(19) United States
(12) Patent Application Publication
(10) Pub. No.: US 2024/0117330 A1
(43) Pub. Date: Apr. 11, 2024

(54) ENZYMES WITH RUVC DOMAINS

(71) Applicant: Melagenomi, Inc., Emeryville, CA (US)

(72) Inventors: Brian Thomas, Emeryville, CA (US); Christopher BROWN, Emeryville, CA (US); Rose KANTOR, Emeryville, CA (US); Audra DEVOTO, Emeryville, CA (US); Cristina BUTTERFIELD, Emeryville, CA (US); Lisa ALEXANDER, Emeryville, CA (US); Daniela S.A. GOLTSMAN, Emeryville, CA (US); Jason LIU, Emeryville, CA (US)

(21) Appl. No.: 18/335,481

(22) Filed: Jun. 15, 2023

Related U.S. Application Data
(63) Continuation of application No. 17/402,426, filed on Aug. 13, 2021.
Application No. 17/402,426 is a continuation of application No. PCT/US2020/018432, filed on Feb. 14, 2020.
(60) Provisional application No. 62/874,414, filed on Jul. 15, 2019.
(60) Provisional application No. 62/805,899, filed on Feb. 14, 2019.
(60) Provisional application No. 62/805,868, filed on Feb. 14, 2019.
(60) Provisional application No. 62/805,878, filed on Feb. 14, 2019.

(51) Int. Cl. C12N 9/22; C12N 15/11

(52) U.S. Cl. CPC C12N 9/22; C12N 15/11; C12Y 301/21; C12N 2310/20; C12N 2310/531

(57) ABSTRACT

The present disclosure provides for endonuclease enzymes having distinguishing domain features, as well as methods of using such enzymes or variants thereof.

### CROSS-REFERENCE

[0001] This application is a continuation of U.S. application Ser. No. 17/402,426, filed on Aug. 13, 2021, which is a continuation of International Application No. PCT/US20/18432, filed on Feb. 14, 2020, entitled “ENZYMES WITH RUVC DOMAINS”, which application claims the benefit of U.S. Provisional Application Nos. 62/874,414 filed on Jul. 15, 2019, 62/805,899 filed on Feb. 14, 2019, 62/805,868 filed on Feb. 14, 2019, and 62/805,878 filed on Feb. 14, 2019, each of which is incorporated by reference herein in their entireties. This application is a continuation of U.S. application Ser. No. 17/402,426, filed on Aug. 13, 2021, which is a continuation of International Application No. PCT/US21/31136 entitled “ENZYMES WITH RUVC DOMAINS”, filed on May 6, 2021, which claims priority to U.S. Provisional Application No. 63/180,570, entitled “ENZYMES WITH RUVC DOMAINS”, filed on Apr. 27, 2021; U.S. Provisional Application No. 63/116,155, entitled “ENZYMES WITH RUVC DOMAINS”, filed on Nov. 19, 2020; U.S. Provisional Application No. 63/032,464, entitled “ENZYMES WITH RUVC DOMAINS”, filed on May 29, 2020; and U.S. Provisional Application No. 63/022,320, entitled “ENZYMES WITH RUVC DOMAINS”, filed on May 8, 2020, each of which is incorporated by reference herein in their entireties.

### BACKGROUND

[0002] Cas enzymes along with their associated Clustered Regularly Interspaced Short Palindromic Repeats (CRISPR) guide ribonucleic acids (RNAs) appear to be a pervasive (˜45% of bacteria, ˜84% of archaea) component of prokaryotic immune systems, serving to protect such microorganisms against non-self nucleic acids, such as infectious viruses and plasmids by CRISPR-RNA guided nucleic acid cleavage. While the deoxyribonucleic acid (DNA) elements encoding CRISPR RNA elements may be relatively conserved in structure and length, their CRISPR-associated (Cas) proteins are highly diverse, containing a wide variety of nucleic acid-interacting domains. While CRISPR DNA elements have been observed as early as 1987, the programmable endonuclease cleavage ability of CRISPR/Cas complexes has only been recognized relatively recently, leading to the use of recombinant CRISPR/Cas systems in diverse DNA manipulation and gene editing applications.

### SEQUENCE LISTING

[0003] The instant application contains a Sequence Listing which has been submitted electronically in XML format and is hereby incorporated by reference in its entirety. Said XML copy, created on Jul. 20, 2023, is named 55921-703505.xml and is 12,300,989 bytes in size.

### SUMMARY

[0004] In some aspects, the present disclosure provides for an engineered nuclease system, comprising: (a) an endonuclease comprising a RuvC_III domain and an HNH domain, wherein the endonuclease is derived from an uncultivated microorganism, wherein the endonuclease is a class 2, type II Cas endonuclease; and (b) an engineered guide ribonucleic acid structure configured to form a complex with the endonuclease comprising: (i) a guide ribonucleic acid sequence configured to hybridize to a target deoxyribonucleic acid sequence; and (ii) a tracr ribonucleic acid sequence configured to bind to the endonuclease. In some embodiments, the RuvC_III domain comprises a sequence with at least 70%, at least 75%, at least 80% or at least 90% sequence identity to any one of SEQ ID NOs: 1827-3637.

[0005] In some aspects, the present disclosure provides for an engineered nuclease system comprising: (a) an endonuclease comprising a RuvC_III domain having at least 75% sequence identity to any one of SEQ ID NOs: 1827-3637; and (b) an engineered guide ribonucleic acid structure configured to form a complex with the endonuclease comprising: (i) a guide ribonucleic acid sequence configured to hybridize to a target deoxyribonucleic acid sequence; and (ii) a tracr ribonucleic acid sequence configured to bind to the endonuclease.

[0006] In some aspects, the present disclosure provides for an engineered nuclease system comprising: (a) an endonuclease configured to bind to a protospacer adjacent motif (PAM) sequence comprising SEQ ID NOs: 5512-5537, wherein the endonuclease is a class 2, type II Cas endonuclease; and (b) an engineered guide ribonucleic acid structure configured to form a complex with the endonuclease comprising: (i) a guide ribonucleic acid sequence configured to hybridize to a target deoxyribonucleic acid sequence; and (ii) a tracr ribonucleic acid sequence configured to bind to the endonuclease.

[0007] In some embodiments, the endonuclease is derived from an uncultivated microorganism. In some embodiments, the endonuclease has not been engineered to bind to a different PAM sequence. In some embodiments, the endonuclease is not a Cas9 endonuclease, a Cas14 endonuclease, a Cas12a endonuclease, a Cas12b endonuclease, a Cas 12c endonuclease, a Cas12d endonuclease, a Cas12e endonuclease, a Cas13a endonuclease, a Cas13b endonuclease, a Cas13c endonuclease, or a Cas 13d endonuclease. In some embodiments, the endonuclease has less than 80% identity to a Cas9 endonuclease. In some embodiments, the endonuclease further comprises an HNH domain. In some embodiments, the tracr ribonucleic acid sequence comprises a sequence with at least 80% sequence identity to about 60 to 90 consecutive nucleotides selected from any one of SEQ ID NOs: 5476-5511 and SEQ ID NO: 5538.

[0008] In some aspects, the present disclosure provides for an engineered nuclease system comprising, (a) an engineered guide ribonucleic acid structure comprising: (i) a guide ribonucleic acid sequence configured to hybridize to a target deoxyribonucleic acid sequence; and (ii) a tracr ribonucleic acid sequence configured to bind to an endonuclease, wherein the tracr ribonucleic acid sequence comprises a sequence with at least 80% sequence identity to about 60 to 90 consecutive nucleotides selected from any one of SEQ ID NOs: 5476-5511 and SEQ ID NO: 5538; and (b) a class 2, type II Cas endonuclease configured to bind to the engineered guide ribonucleic acid. In some embodiments, the endonuclease is configured to bind to a protospacer adjacent motif (PAM) sequence selected from the group comprising SEQ ID NOs: 5512-5537.

[0009] In some embodiments, the engineered guide ribonucleic acid structure comprises at least two ribonucleic acid polynucleotides. In some embodiments, the engineered guide ribonucleic acid structure comprises one ribonucleic acid polynucleotide comprising the guide ribonucleic acid sequence and the tracr ribonucleic acid sequence.

[0010] In some embodiments, the guide ribonucleic acid sequence is complementary to a prokaryotic, bacterial, archaeal, eukaryotic, fungal, plant, mammalian, or human genomic sequence. In some embodiments, the guide ribonucleic acid sequence is 15-24 nucleotides in length. In some embodiments, the endonuclease comprises one or more nuclear localization sequences (NLSs) proximal to an N- or C-terminus of the endonuclease. In some embodiments, the NLS comprises a sequence selected from SEQ ID NOs: 5597-5612.

[0011] In some embodiments, the engineered nuclease system further comprises a single- or double-stranded DNA repair template comprising from 5′ to 3′: a first homology arm comprising a sequence of at least 20 nucleotides 5′ to the target deoxyribonucleic acid sequence, a synthetic DNA sequence of at least 10 nucleotides, and a second homology arm comprising a sequence of at least 20 nucleotides 3′ to the target sequence. In some embodiments, the first or second homology arm comprises a sequence of at least 40, 80, 120, 150, 200, 300, 500, or 1,000 nucleotides.

[0012] In some embodiments, the system further comprises a source of Mg²⁺.

[0013] In some embodiments, the endonuclease and the tracr ribonucleic acid sequence are derived from distinct bacterial species within a same phylum. In some embodiments, the endonuclease is derived from a bacterium belonging to a genus Dermabacter. In some embodiments, the endonuclease is derived from a bacterium belonging to Phylum Verrucomicrobia, Phylum Candidatus Peregrinibacteria, or Phylum Candidatus Melainabacteria. In some embodiments, the endonuclease is derived from a bacterium comprising a 16S rRNA gene having at least 90% identity to any one of SEQ ID NOs: 5592-5595.

[0014] In some embodiments, the HNH domain comprises a sequence with at least 70% or at least 80% identity to any one of SEQ ID NOs: 5638-5460. In some embodiments, the endonuclease comprises SEQ ID NOs: 1-1826 or a variant thereof having at least 55% identity thereto. In some embodiments, the endonuclease comprises a sequence at least 70%, 80%, or 90% identical to a sequence selected from the group consisting of SEQ ID NOs: 1827-1830 or SEQ ID NOs: 1827-2140.

[0015] In some embodiments, the endonuclease comprises a sequence at least 70%, 80%, or 90% identical to a sequence selected from the group consisting of SEQ ID NOs: 3638-3641 or SEQ ID NOs: 3638-3954. In some embodiments, the endonuclease comprises at least 1, at least 2, at least 3, at least 4, or at least 5 peptide motifs selected from the group consisting of SEQ ID NOs: 5615-5632. In some embodiments, the endonuclease comprises a sequence at least 70%, 80%, or 90% identical to a sequence selected from the group consisting of SEQ ID NOs: 1-4 or SEQ ID NOs: 1-319.

[0016] In some embodiments, the guide RNA structure comprises a sequence at least 70%, 80%, or 90% identical to a sequence selected from the group consisting of SEQ ID NOs: 5461-5464, SEQ ID NOs: 5476-5479, or SEQ ID NOs: 5476-5489. In some embodiments, the guide RNA structure comprises an RNA sequence predicted to comprise a hairpin consisting of a stem and a loop, wherein the stem comprises at least 10, at least 12 or at least 14 base-paired ribonucleotides, and an asymmetric bulge within 4 base pairs of the loop.

[0017] In some embodiments, the endonuclease is configured to bind to a PAM comprising a sequence selected from the group consisting of SEQ ID NOs: 5512-5515 or SEQ ID NOs: 5527-5530.

[0018] In some embodiments: (a) the endonuclease comprises a sequence at least 70%, at least 80%, or at least 90% identical to SEQ ID NO: 1827; (b) the guide RNA structure comprises a sequence at least 70%, at least 80%, or at least 90% identical to at least one of SEQ ID NO: 5461 or SEQ ID NO: 5476; and (c) the endonuclease is configured to bind to a PAM comprising SEQ ID NO: 5512 or SEQ ID NO: 5527. In some embodiments: (a) the endonuclease comprises a sequence at least 70%, at least 80%, or at least 90% identical to SEQ ID NO: 1828; (b) the guide RNA structure comprises a sequence at least 70%, at least 80%, or at least 90% identical to at least one of SEQ ID NO: 5462 or SEQ ID NO: 5477; and (c) the endonuclease is configured to bind to a PAM comprising SEQ ID NO: 5513 or SEQ ID NO: 5528. In some embodiments: (a) the endonuclease comprises a sequence at least 70%, at least 80%, or at least 90% identical to SEQ ID NO: 1829; (b) the guide RNA structure comprises a sequence at least 70%, at least 80%, or at least 90% identical to at least one of SEQ ID NO: 5463 or SEQ ID NO: 5478; and (c) the endonuclease is configured to bind to a PAM comprising SEQ ID NO: 5514 or SEQ ID NO: 5529. In some embodiments: (a) the endonuclease comprises a sequence at least 70%, at least 80%, or at least 90% identical to SEQ ID NO: 1830; (b) the guide RNA structure comprises a sequence at least 70%, at least 80%, or at least 90% identical to at least one of SEQ ID NO: 5464 or SEQ ID NO: 5479; and (c) the endonuclease is configured to bind to a PAM comprising SEQ ID NO: 5515 or SEQ ID NO: 5530.

[0019] In some embodiments, the endonuclease comprises a sequence at least 70%, 80%, or 90% identical to a sequence selected from the group consisting of SEQ ID NOs: 2141-2142 or SEQ ID NOs: 2141-2241. In some embodiments, the endonuclease comprises a sequence at least 70%, 80%, or 90% identical to a sequence selected from the group consisting of SEQ ID NOs: 3955-3956 or SEQ ID NOs: 3955-4055. In some embodiments, the endonuclease comprises at least 1, at least 2, at least 3, at least 4, or at least 5 peptide motifs selected from the group consisting of SEQ ID NOs: 5632-5638. In some embodiments, the endonuclease comprises a sequence at least 70%, 80%, or 90% identical to a sequence selected from the group consisting of SEQ ID NOs: 320-321 or SEQ ID NOs: 320-420. In some embodiments, the guide RNA structure comprises a sequence at least 70%, 80%, or 90% identical to a sequence selected from the group consisting of SEQ ID NO: 5465, SEQ ID NOs: 5490-5491 or SEQ ID NOs: 5490-5494. In some embodiments, the guide RNA structure comprises a tracr ribonucleic acid sequence comprising a hairpin comprising at least 8, at least 10, or at least 12 base-paired ribonucleotides. In some embodiments, the endonuclease is configured to bind to a PAM comprising a sequence selected from the group consisting of SEQ ID NOs: 5516 and SEQ ID NOs: 5531. In some embodiments: (a) the endonuclease comprises a sequence at least 70%, 80%, or 90% identical to SEQ ID NO: 2141; (b) the guide RNA structure comprises a sequence at least 70%, 80%, or 90% identical to SEQ ID NO: 5490; and (c) the endonuclease is configured to binding to a PAM comprising SEQ ID NO: 5531. In some embodiments: (a) the endonuclease comprises a sequence at least 70%, 80%, or 90% identical to SEQ ID NO: 2142; (b) the guide RNA structure comprises a sequence at least 70%, 80%, or 90% identical to SEQ ID NO: 5465 or SEQ ID NO: 5491; and (c) the endonuclease is configured to binding to a PAM comprising SEQ ID NO: 5516.

[0020] In some embodiments, the endonuclease comprises a sequence at least 70%, 80%, or 90% identical to a sequence selected from the group consisting of SEQ ID NOs: 2245-2246. In some embodiments, the endonuclease comprises a sequence at least 70%, 80%, or 90% identical to a sequence selected from the group consisting of SEQ ID NOs: 4059-4060. In some embodiments, the endonuclease comprises at least 1, at least 2, at least 3, at least 4, or at least 5 peptide motifs selected from the group consisting of SEQ ID NOs: 5639-5648. In some embodiments, the endonuclease comprises a sequence at least 70%, 80%, or 90% identical to a sequence selected from the group consisting of SEQ ID NOs: 424-425. In some embodiments, the guide RNA structure comprises a sequence at least 70%, 80%, or 90% identical to a sequence selected from the group consisting of SEQ ID NOs: 5498-5499 and SEQ ID NO: 5539. In some embodiments, the guide RNA structure comprises a guide ribonucleic acid sequence predicted to comprise a hairpin with an uninterrupted base-paired region comprising at least 8 nucleotides of a guide ribonucleic acid sequence and at least 8 nucleotides of a tracr ribonucleic acid sequence, and wherein the tracr ribonucleic acid sequence comprises, from 5′ to 3′, a first hairpin and a second hairpin, wherein the first hairpin has a longer stem than the second hairpin.

[0021] In some embodiments, the endonuclease comprises a sequence at least 70%, 80%, or 90% identical to a sequence selected from the group consisting of SEQ ID NOs: 2242-2244 or SEQ ID NOs: 2247-2249. In some embodiments, the endonuclease comprises a sequence at least 70%, 80%, or 90% identical to a sequence selected from the group consisting of SEQ ID NOs: 4056-4058 and SEQ ID NOs 4061-4063. In some embodiments, the endonuclease comprises at least 1, at least 2, at least 3, at least 4, or at least 5 peptide motifs selected from the group consisting of SEQ ID NOs: 5639-5648. In some embodiments, the endonuclease comprises a sequence at least 70%, 80%, or 90% identical to a sequence selected from the group consisting of SEQ ID NOs: 421-423 or SEQ ID NOs: 426-428. In some embodiments, the guide RNA structure comprises a sequence at least 70%, 80%, or 90% identical to a sequence selected from the group consisting of SEQ ID NOs: 5466-5467, SEQ ID NOs: 5495-5497, SEQ ID NO: 5500-5502, and SEQ ID NO: 5539. In some embodiments, the guide RNA structure comprises a guide ribonucleic acid sequence predicted to comprise a hairpin with an uninterrupted base-paired region comprising at least 8 nucleotides of a guide ribonucleic acid sequence and at least 8 nucleotides of a tracr ribonucleic acid sequence, and wherein the tracr ribonucleic acid sequence comprises, from 5′ to 3′, a first hairpin and a second hairpin, wherein the first hairpin has a longer stem than the second hairpin. In some embodiments, the endonuclease is configured to binding to a PAM comprising a sequence selected from the group consisting of SEQ ID NOs: 5517-5518 or SEQ ID NOs: 5532-5534. In some embodiments: (a) the endonuclease comprises a sequence at least 70%, 80%, or 90% identical to SEQ ID NO: 2247; (b) the guide RNA structure comprises a sequence at least 70%, 80%, or 90% identical to SEQ ID NO: 5500; and (c) the endonuclease is configured to binding to a PAM comprising SEQ ID NO: 5517 or SEQ ID NO: 5532. In some embodiments: (a) the endonuclease comprises a sequence at least 70%, 80%, or 90% identical to SEQ ID NO: 2248; (b) the guide RNA structure comprises a sequence at least 70%, 80%, or 90% identical to SEQ ID NO: 5501; and (c) the endonuclease is configured to binding to a PAM comprising SEQ ID NO: 5518 or SEQ ID NOs: 5533. In some embodiments: (a) the endonuclease comprises a sequence at least 70%, 80%, or 90% identical to SEQ ID NO: 2249; (b) the guide RNA structure comprises a sequence at least 70%, 80%, or 90% identical to SEQ ID NO: 5502; and (c) the endonuclease is configured to binding to a PAM comprising SEQ ID NO: 5534.

[0022] In some embodiments, the endonuclease comprises a sequence at least 70%, 80%, or 90% identical to a sequence selected from the group consisting of SEQ ID NO: 2253 or SEQ ID NOs: 2253-2481. In some embodiments, the endonuclease comprises a sequence at least 70%, 80%, or 90% identical to a sequence selected from the group consisting of SEQ ID NO: 4067 or SEQ ID NOs: 4067-4295. In some embodiments, the endonuclease comprises a peptide motif according to SEQ ID NO: 5649. In some embodiments, the endonuclease comprises a sequence at least 70%, 80%, or 90% identical to a sequence selected from the group consisting of SEQ ID NO: 432 or SEQ ID NOs: 432-660. In some embodiments, the guide RNA structure comprises a sequence at least 70%, 80%, or 90% identical to a sequence selected from the group consisting of SEQ ID NO: 5468 or SEQ ID NO: 5503. In some embodiments, the endonuclease is configured to binding to a PAM comprising a sequence selected from the group consisting of SEQ ID NOs: 5519. In some embodiments: (a) the endonuclease comprises a sequence at least 70%, 80%, or 90% identical to SEQ ID NO: 2253; (b) the guide RNA structure comprises a sequence at least 70%, 80%, or 90% identical to SEQ ID NO: 5468 or SEQ ID NO: 5503; and (c) the endonuclease is configured to binding to a PAM comprising SEQ ID NO: 5519.

[0023] In some embodiments, the endonuclease comprises a sequence at least 70%, 80%, or 90% identical to a sequence selected from the group consisting of SEQ ID NOs: 2482-2489. In some embodiments, the endonuclease comprises a sequence at least 70%, 80%, or 90% identical to a sequence selected from the group consisting of SEQ ID NOs: 4296-4303. In some embodiments, the endonuclease comprises a sequence at least 70%, 80%, or 90% identical to a sequence selected from the group consisting of or SEQ ID NOs: 661-668. In some embodiments, the endonuclease comprises a sequence at least 70%, 80%, or 90% identical to a sequence selected from the group consisting of or SEQ ID NOs: 2490-2498. In some embodiments, the endonuclease comprises a sequence at least 70%, 80%, or 90% identical to a sequence selected from the group consisting of SEQ ID NOs: 4304-4312. In some embodiments, the endonuclease comprises a sequence at least 70%, 80%, or 90% identical to a sequence selected from the group consisting of SEQ ID NOs: 669-677. In some embodiments, the guide RNA structure comprises a sequence at least 70%, 80%, or 90% identical to a sequence selected from the group consisting of SEQ ID NO: 5504.

[0024] In some embodiments, the endonuclease comprises a sequence at least 70%, 80%, or 90% identical to a sequence selected from the group consisting of SEQ ID NO: 2499 or SEQ ID NOs: 2499-2750. In some embodiments, the endonuclease comprises a sequence at least 70%, 80%, or 90% identical to a sequence selected from the group consisting of SEQ ID NO: 4313 or SEQ ID NOs: 4313-4564. In some embodiments, the endonuclease comprises at least 1, at least 2, at least 3, at least 4, or at least 5 peptide motifs selected from the group consisting of SEQ ID NOs: 5650-5667. In some embodiments, the endonuclease comprises a sequence at least 70%, 80%, or 90% identical to a sequence selected from the group consisting of SEQ ID NO: 678 or SEQ ID NOs: 678-929. In some embodiments, the guide RNA structure comprises a sequence at least 70%, 80%, or 90% identical to SEQ ID NO: 5469 or SEQ ID NO: 5505. In some embodiments, the endonuclease is configured to binding to a PAM comprising SEQ ID NOs: 5520 or SEQ ID NOs: 5535. In some embodiments: (a) the endonuclease comprises a sequence at least 70%, 80%, or 90% identical to SEQ ID NO: 2499; (b) the guide RNA structure comprises a sequence at least 70%, 80%, or 90% identical to SEQ ID NO: 5469 or SEQ ID NO: 5505; and (c) the endonuclease is configured to binding to a PAM comprising SEQ ID NO: 5520 or SEQ ID NO: 5535.

[0025] In some embodiments, the endonuclease comprises a sequence at least 70%, 80%, or 90% identical to a sequence selected from the group consisting of SEQ ID NO: 2751 or SEQ ID NOs: 2751-2913. In some embodiments, the endonuclease comprises a sequence at least 70%, 80%, or 90% identical to a sequence selected from the group consisting of SEQ ID NO: 4565 or SEQ ID NOs: 4565-4727. In some embodiments, the endonuclease comprises at least 1, at least 2, at least 3, at least 4, or at least 5 peptide motifs selected from the group consisting of SEQ ID NOs: 5668-5678. In some embodiments, the endonuclease comprises a sequence at least 70%, 80%, or 90% identical to a sequence selected from the group consisting of SEQ ID NO: 930 or SEQ ID NOs: 930-1092. In some embodiments, the guide RNA structure comprises a sequence at least 70%, 80%, or 90% identical to SEQ ID NO: 5470 or SEQ ID NOs: 5506. In some embodiments, the endonuclease is configured to binding to a PAM comprising a sequence selected from the group consisting of SEQ ID NOs: 5521 or SEQ ID NOs: 5536. In some embodiments: (a) the endonuclease comprises a sequence at least 70%, 80%, or 90% identical to SEQ ID NO: 2751; (b) the guide RNA structure comprises a sequence at least 70%, 80%, or 90% identical to SEQ ID NO: 5470 or SEQ ID NO: 5506; and (c) the endonuclease is configured to binding to a PAM comprising SEQ ID NO: 5521 or SEQ ID NO: 5536.

[0026] In some embodiments, the endonuclease comprises a sequence at least 70%, 80%, or 90% identical to a sequence selected from the group consisting of SEQ ID NO: 2914 or SEQ ID NOs: 2914-3174. In some embodiments, the endonuclease comprises a sequence at least 70%, 80%, or 90% identical to a sequence selected from the group consisting of SEQ ID NO: 4728 or SEQ ID NOs: 4728-4988. In some embodiments, the endonuclease comprises at least 1, at least 2, or at least 3 peptide motifs selected from the group consisting of SEQ ID NOs: 5676-5678. In some embodiments, the endonuclease comprises a sequence at least 70%, 80%, or 90% identical to a sequence selected from the group consisting of SEQ ID NO: 1093 or SEQ ID NOs: 1093-1353. In some embodiments, the guide RNA structure comprises a sequence at least 70%, 80%, or 90% identical to a sequence selected from the group consisting of SEQ ID NO: 5471, SEQ ID NO: 5507, and SEQ ID NOs: 5540-5542. In some embodiments, the guide RNA structure comprises a tracr ribonucleic acid sequence predicted to comprise at least two hairpins comprising less than 5 base-paired ribonucleotides. In some embodiments, the endonuclease is configured to binding to a PAM comprising SEQ ID NO: 5522. In some embodiments: (a) the endonuclease comprises a sequence at least 70%, 80%, or 90% identical to SEQ ID NO: 2914; (b) the guide RNA structure comprises a sequence at least 70%, 80%, or 90% identical to SEQ ID NO: 5471 or SEQ ID NO: 5507; and (c) the endonuclease is configured to binding to a PAM comprising SEQ ID NO: 5522.

[0027] In some embodiments, the endonuclease comprises a sequence at least 70%, 80%, or 90% identical to a sequence selected from the group consisting of SEQ ID NO: 3175 or SEQ ID NOs: 3175-3330. In some embodiments, the endonuclease comprises a sequence at least 70%, 80%, or 90% identical to a sequence selected from the group consisting of SEQ ID NO: 4989 or SEQ ID NOs: 4989-5146. In some embodiments, the endonuclease comprises at least 1, at least 2, at least 3, at least 4, or at least 5 peptide motifs selected from the group consisting of SEQ ID NOs: 5679-5686. In some embodiments, the endonuclease comprises a sequence at least 70%, 80%, or 90% identical to a sequence selected from the group consisting of SEQ ID NO: 1354 or SEQ ID NOs: 1354-1511. In some embodiments, the guide RNA structure comprises a sequence at least 70%, 80%, or 90% identical to a sequence selected from the group consisting of SEQ ID NOs: 5472 or SEQ ID NOs: 5508. In some embodiments, the endonuclease is configured to binding to a PAM comprising a sequence selected from the group consisting of SEQ ID NO: 5523 or SEQ ID NO: 5537. In some embodiments: (a) the endonuclease comprises a sequence at least 70%, 80%, or 90% identical to SEQ ID NO: 3175; (b) the guide RNA structure comprises a sequence at least 70%, 80%, or 90% identical to SEQ ID NO: 5472 or SEQ ID NO: 5508; and (c) the endonuclease is configured to binding to a PAM comprising SEQ ID NO: 5523 or SEQ ID NO: 5537.

[0028] In some embodiments, the endonuclease comprises a sequence at least 70%, 80%, or 90% identical to a sequence selected from the group consisting of SEQ ID NOs: 3331 or SEQ ID NOs: 3331-3474. In some embodiments, the endonuclease comprises a sequence at least 70%, 80%, or 90% identical to a sequence selected from the group consisting of SEQ ID NOs: 5147 or SEQ ID NOs: 5147-5290. In some embodiments, the endonuclease comprises at least 1, at least 2, at least 3, at least 4, or at least 5 peptide motifs selected from the group consisting of SEQ ID NOs: 5674-5675 and SEQ ID NOs: 5687-5693. In some embodiments, the endonuclease comprises a sequence at least 70%, 80%, or 90% identical to a sequence selected from the group consisting of SEQ ID NO: 1512 or SEQ ID NOs: 1512-1655. In some embodiments, the guide RNA structure comprises a sequence at least 70%, 80%, or 90% identical to a sequence selected from the group consisting of SEQ ID NO: 5473 or SEQ ID NO: 5509. In some embodiments, the endonuclease is configured to binding to a PAM comprising SEQ ID NO: 5524. In some embodiments: (a) the endonuclease comprises a sequence at least 70%, 80%, or 90% identical to SEQ ID NO: 3331; (b) the guide RNA structure comprises a sequence at least 70%, 80%, or 90% identical to SEQ ID NO: 5473 or SEQ ID NO: 5509; and (c) the endonuclease is configured to binding to a PAM comprising SEQ ID NO: 5524.

[0029] In some embodiments, the endonuclease comprises a sequence at least 70%, 80%, or 90% identical to a sequence selected from the group consisting of SEQ ID NO: 3475 or SEQ ID NOs: 3475-3568. In some embodiments, the endonuclease comprises a sequence at least 70%, 80%, or 90% identical to a sequence selected from the group consisting of SEQ ID NO: 5291 or SEQ ID NOs: 5291-5389. In some embodiments, the endonuclease comprises at least 1, at least 2, at least 3, at least 4, or at least 5 peptide motifs selected from the group consisting of SEQ ID NOs: 5694-5699. In some embodiments, the endonuclease comprises a sequence at least 70%, 80%, or 90% identical to a sequence selected from the group consisting of SEQ ID NO: 1656 or SEQ ID NOs: 1656-1755. In some embodiments, the guide RNA structure comprises a sequence at least 70%, 80%, or 90% identical to SEQ ID NO: 5474 or SEQ ID NO: 5510. In some embodiments, the endonuclease is configured to binding to a PAM comprising SEQ ID NOs: 5525. In some embodiments: (a) the endonuclease comprises a sequence at least 70%, 80%, or 90% identical to SEQ ID NO: 3475; (b) the guide RNA structure comprises a sequence at least 70%, 80%, or 90% identical to SEQ ID NO: 5474 or SEQ ID NO: 5510; and (c) the endonuclease is configured to binding to a PAM comprising SEQ ID NO: 5525.

[0030] In some embodiments, the endonuclease comprises a sequence at least 70%, 80%, or 90% identical to a sequence selected from the group consisting of SEQ ID NO: 3569 or SEQ ID NOs: 3569-3637. In some embodiments, the endonuclease comprises a sequence at least 70%, 80%, or 90% identical to a sequence selected from the group consisting of SEQ ID NO: 5390 or SEQ ID NOs: 5390-5460. In some embodiments, the endonuclease comprises at least 1, at least 2, at least 3, at least 4, or at least 5 peptide motifs selected from the group consisting of SEQ ID NOs: 5700-5717. In some embodiments, the endonuclease comprises a sequence at least 70%, 80%, or 90% identical to a sequence selected from the group consisting of SEQ ID NO: 1756 or SEQ ID NOs: 1756-1826. In some embodiments, the guide RNA structure comprises a sequence at least 70%, 80%, or 90% identical to SEQ ID NO: 5475 or SEQ ID NOs: 5511. In some embodiments, the endonuclease is configured to binding to a PAM comprising SEQ ID NO: 5526. In some embodiments: (a) the endonuclease comprises a sequence at least 70%, 80%, or 90% identical to SEQ ID NO: 3569; (b) the guide RNA structure comprises a sequence at least 70%, 80%, or 90% identical to SEQ ID NO: 5475 or SEQ ID NO: 5511; and (c) the endonuclease is configured to binding to a PAM comprising SEQ ID NO: 5526. In some embodiments, the sequence identity is determined by a BLASTP, CLUSTALW, MUSCLE, MAFFT, or Smith-Waterman homology search algorithm. In some embodiments, the sequence identity is determined by the BLASTP homology search algorithm using parameters of a wordlength (W) of 3, an expectation (E) of 10, and a BLOSUM62 scoring matrix setting gap costs at existence of 11, extension of 1, and using a conditional compositional score matrix adjustment.

[0031] In some aspects, the present disclosure provides for an engineered guide ribonucleic acid polynucleotide comprising: (a) a DNA-targeting segment comprising a nucleotide sequence that is complementary to a target sequence in a target DNA molecule; and (b) a protein-binding segment comprising two complementary stretches of nucleotides that hybridize to form a double-stranded RNA (dsRNA) duplex, wherein the two complementary stretches of nucleotides are covalently linked to one another with intervening nucleotides, and wherein the engineered guide ribonucleic acid polynucleotide is configured to forming a complex with an endonuclease comprising a RuvC_III domain having at least 75% sequence identity to any one of SEQ ID NOs: 1827-3637 and targeting the complex to the target sequence of the target DNA molecule. In some embodiments, the DNA-targeting segment is positioned 5′ of both of the two complementary stretches of nucleotides.

[0032] In some embodiments: (a) the protein binding segment comprises a sequence having at least 70%, at least 80%, or at least 90% identity to a sequence selected from the group consisting of SEQ ID NOs: 5476-5479 or SEQ ID NOs: 5476-5489; (b) the protein binding segment comprises a sequence having at least 70%, at least 80%, or at least 90% identity to a sequence selected from the group consisting of (SEQ ID NOs: 5490-5491 or SEQ ID NOs: 5490-5494) and SEQ ID NO: 5538; (c) the protein binding segment comprises a sequence having at least 70%, at least 80%, or at least 90% identity to a sequence selected from the group consisting of SEQ ID NOs: 5498-5499; (d) the protein binding segment comprises a sequence having at least 70%, at least 80%, or at least 90% identity to a sequence selected from the group consisting of SEQ ID NOs: 5495-5497 and SEQ ID NOs: 5500-5502; (e) the protein binding segment comprises a sequence having at least 70%, at least 80%, or at least 90% identity to SEQ ID NO: 5503; (f) the protein binding segment comprises a sequence having at least 70%, at least 80%, or at least 90% identity to SEQ ID NO: 5504; (g) the protein binding segment comprises a sequence having at least 70%, at least 80%, or at least 90% identity to SEQ ID NOs: 5505; (h) protein binding segment comprises a sequence having at least 70%, at least 80%, or at least 90% identity to SEQ ID NO: 5506; (i) protein binding segment comprises a sequence having at least 70%, at least 80%, or at least 90% identity to SEQ ID NO: 5507; (j) the protein binding segment comprises a sequence having at least 70%, at least 80%, or at least 90% identity to SEQ ID NO: 5508; (k) the protein binding segment comprises a sequence having at least 70%, at least 80%, or at least 90% identity to SEQ ID NO: 5509; (1) the protein binding segment comprises a sequence having at least 70%, at least 80%, or at least 90% identity to SEQ ID NO: 5510; or (m) the protein binding segment comprises a sequence having at least 70%, at least 80%, or at least 90% identity to SEQ ID NO: 5511.

[0033] In some embodiments: (a) the guide ribonucleic acid polynucleotide comprises an RNA sequence comprising a hairpin comprising a stem and a loop, wherein the stem comprises at least 10, at least 12, or at least 14 base-paired ribonucleotides, and an asymmetric bulge within 4 base pairs of the loop; (b) the guide ribonucleic acid polynucleotide comprises a tracr ribonucleic acid sequence predicted to comprise a hairpin comprising at least 8, at least 10, or at least 12 base-paired ribonucleotides; (c) the guide ribonucleic acid polynucleotide comprises a guide ribonucleic acid sequence predicted to comprise a hairpin with an uninterrupted base-paired region comprising at least 8 nucleotides of a guide ribonucleic acid sequence and at least 8 nucleotides of a tracr ribonucleic acid sequence, and wherein the tracr ribonucleic acid sequence comprises, from 5′ to 3′, a first hairpin and a second hairpin, wherein the first hairpin has a longer stem than the second hairpin; or (d) the guide ribonucleic acid polynucleotide comprises a tracr ribonucleic acid sequence predicted to comprise at least two hairpins comprising less than 5 base-paired ribonucleotides.

[0034] In some aspects, the present disclosure provides for a deoxyribonucleic acid polynucleotide encoding any of the engineered guide ribonucleic acid polynucleotides described herein.

[0035] In some aspects, the present disclosure provides for a nucleic acid comprising an engineered nucleic acid sequence optimized for expression in an organism, wherein the nucleic acid encodes a class 2, type II Cas endonuclease comprising a RuvC_III domain and an HNH domain, and wherein the endonuclease is derived from an uncultivated microorganism.

[0036] In some aspects, the present disclosure provides for a nucleic acid comprising an engineered nucleic acid sequence optimized for expression in an organism, wherein the nucleic acid encodes an endonuclease comprising a RuvC_III domain having at least 70% sequence identity to any one of SEQ ID NOs: 1827-3637. In some embodiments, the endonuclease comprises an HNH domain having at least 70% or at least 80% sequence identity to any one of SEQ ID NOs: 3638-5460. In some embodiments, the endonuclease comprises SEQ ID NOs: 5572-5591 or a variant thereof having at least 70% sequence identity thereto. In some embodiments, the endonuclease comprises a sequence encoding one or more nuclear localization sequences (NLSs) proximal to an N- or C-terminus of the endonuclease. In some embodiments, the NLS comprises a sequence selected from SEQ ID NOs: 5597-5612.

[0037] In some embodiments, the organism is prokaryotic, bacterial, eukaryotic, fungal, plant, mammalian, rodent, or human. In some embodiments, the organism is E. coli, and: (a) the nucleic acid sequence has at least 70%, 80%, or 90% identity to a sequence selected from the group consisting of SEQ ID NOs: 5572-5575; (b) the nucleic acid sequence has at least 70%, 80%, or 90% identity to a sequence selected from the group consisting of SEQ ID NOs: 5576-5577; (c) the nucleic acid sequence has at least 70%, 80%, or 90% identity to a sequence selected from the group consisting of SEQ ID NOs: 5578-5580; (d) the nucleic acid sequence has at least 70%, 80%, or 90% identity to SEQ ID NO: 5581; (e) the nucleic acid sequence has at least 70%, 80%, or 90% identity to SEQ ID NO: 5582; (f) the nucleic acid sequence has at least 70%, 80%, or 90% identity to SEQ ID NO: 5583; (g) the nucleic acid sequence has at least 70%, 80%, or 90% identity to SEQ ID NO: 5584; (h) the nucleic acid sequence has at least 70%, 80%, or 90% identity to SEQ ID NO: 5585; (i) the nucleic acid sequence has at least 70%, 80%, or 90% identity to SEQ ID NO: 5586; or (j) the nucleic acid sequence has at least 70%, 80%, or 90% identity to SEQ ID NO: 5587. In some embodiments, the organism is human, and: (a) the nucleic acid sequence has at least 70%, 80%, or 90% identity to SEQ ID NO: 5588 or SEQ ID NO: 5589; or (b) the nucleic acid sequence has at least 70%, 80%, or 90% identity to SEQ ID NO: 5590 or SEQ ID NO: 5591.

[0038] In some aspects, the present disclosure provides for a vector comprising a nucleic acid sequence encoding a class 2, type II Cas endonuclease comprising a RuvC_III domain and an HNH domain, wherein the endonuclease is derived from an uncultivated microorganism.

[0039] In some aspects, the present disclosure provides for a vector comprising the any of the nucleic acids described herein. In some embodiments, the vector further comprises a nucleic acid encoding an engineered guide ribonucleic acid structure configured to form a complex with the endonuclease comprising: (a) a guide ribonucleic acid sequence configured to hybridize to a target deoxyribonucleic acid sequence; and (b) a tracr ribonucleic acid sequence configured to binding to the endonuclease. In some embodiments, the vector is a plasmid, a minicircle, a CELiD, an adeno-associated virus (AAV) derived virion, or a lentivirus.

[0040] In some aspects, the present disclosure provides for a cell comprising any of the vectors described herein.

[0041] In some aspects, the present disclosure provides for a method of manufacturing an endonuclease, comprising cultivating any of the cells described herein.

[0042] In some aspects, the present disclosure provides for a method for binding, cleaving, marking, or modifying a double-stranded deoxyribonucleic acid polynucleotide, comprising: (a) contacting the double-stranded deoxyribonucleic acid polynucleotide with a class 2, type II Cas endonuclease in complex with an engineered guide ribonucleic acid structure configured to bind to the endonuclease and the double-stranded deoxyribonucleic acid polynucleotide; (b) wherein the double-stranded deoxyribonucleic acid polynucleotide comprises a protospacer adjacent motif (PAM); and (c) wherein the PAM comprises a sequence selected from the group consisting of SEQ ID NOs: 5512-5526 or SEQ ID NOs: 5527-5537. In some embodiments, the double-stranded deoxyribonucleic acid polynucleotide comprises a first strand comprising a sequence complementary to a sequence of the engineered guide ribonucleic acid structure and a second strand comprising the PAM. In some embodiments, the PAM is directly adjacent to the 3′ end of the sequence complementary to the sequence of the engineered guide ribonucleic acid structure.

[0043] In some embodiments, the class 2, type II Cas endonuclease is not a Cas9 endonuclease, a Cas14 endonuclease, a Cas12a endonuclease, a Cas12b endonuclease, a Cas 12c endonuclease, a Cas12d endonuclease, a Cas12e endonuclease, a Cas13a endonuclease, a Cas13b endonuclease, a Cas13c endonuclease, or a Cas 13d endonuclease. In some embodiments, the class 2, type II Cas endonuclease is derived from an uncultivated microorganism. In some embodiments, the double-stranded deoxyribonucleic acid polynucleotide is a eukaryotic, plant, fungal, mammalian, rodent, or human double-stranded deoxyribonucleic acid polynucleotide.

[0044] In some embodiments: (a) the PAM comprises a sequence selected from the group consisting of SEQ ID NOs: 5512-5515 and SEQ ID NOs: 5527-5530; (b) the PAM comprises SEQ ID NO: 5516 or SEQ ID NO: 5531; (c) the PAM comprises SEQ ID NO: 5539; (d) the PAM comprises SEQ ID NO: 5517 or SEQ ID NO: 5518; (e) the PAM comprises SEQ ID NO: 5519; (f) the PAM comprises SEQ ID NO: 5520 or SEQ ID NO: 5535; (g) the PAM comprises SEQ ID NO: 5521 or SEQ ID NO: 5536; (h) the PAM comprises SEQ ID NO: 5522; (i) the PAM comprises SEQ ID NO: 5523 or SEQ ID NO: 5537; (j) the PAM comprises SEQ ID NO: 5524; (k) the PAM comprises SEQ ID NO: 5525; or (l) the PAM comprises SEQ ID NO: 5526.

[0045] In some aspects, the present disclosure provides for a method of modifying a target nucleic acid locus, the method comprising delivering to the target nucleic acid locus any of the engineered nuclease systems described herein, wherein the endonuclease is configured to form a complex with the engineered guide ribonucleic acid structure, and wherein the complex is configured such that upon binding of the complex to the target nucleic acid locus, the complex modifies the target nucleic locus. In some embodiments, modifying the target nucleic acid locus comprises binding, nicking, cleaving, or marking the target nucleic acid locus. In some embodiments, the target nucleic acid locus comprises deoxyribonucleic acid (DNA) or ribonucleic acid (RNA). In some embodiments, the target nucleic acid comprises genomic DNA, viral DNA, viral RNA, or bacterial DNA. In some embodiments, the target nucleic acid locus is in vitro. In some embodiments, the target nucleic acid locus is within a cell. In some embodiments, the cell is a prokaryotic cell, a bacterial cell, a eukaryotic cell, a fungal cell, a plant cell, an animal cell, a mammalian cell, a rodent cell, a primate cell, or a human cell.

[0046] In some embodiments, delivering the engineered nuclease system to the target nucleic acid locus comprises delivering the nucleic acid of any of claims 135-140 or the vector of any of claims 142-146. In some embodiments, delivering the engineered nuclease system to the target nucleic acid locus comprises delivering a nucleic acid comprising an open reading frame encoding the endonuclease. In some embodiments, the nucleic acid comprises a promoter to which the open reading frame encoding the endonuclease is operably linked. In some embodiments, the engineered nuclease system to the target nucleic acid locus comprises delivering a capped mRNA containing the open reading frame encoding the endonuclease. In some embodiments, the engineered nuclease system to the target nucleic acid locus comprises delivering a translated polypeptide. In some embodiments, the engineered nuclease system to the target nucleic acid locus comprises delivering a deoxyribonucleic acid (DNA) encoding the engineered guide ribonucleic acid structure operably linked to a ribonucleic acid (RNA) pol III promoter. In some embodiments, the endonuclease induces a single-stranded break or a double-stranded break at or proximal to the target locus.

[0047] Additional aspects and advantages of the present disclosure will become readily apparent to those skilled in this art from the following detailed description, wherein only illustrative embodiments of the present disclosure are shown and described. As will be realized, the present disclosure is capable of other and different embodiments, and its several details are capable of modifications in various obvious respects, all without departing from the disclosure. Accordingly, the drawings and description are to be regarded as illustrative in nature, and not as restrictive.

### INCORPORATION BY REFERENCE

[0048] All publications, patents, and patent applications mentioned in this specification are herein incorporated by reference to the same extent as if each individual publication, patent, or patent application was specifically and individually indicated to be incorporated by reference.

### BRIEF DESCRIPTION OF THE DRAWINGS

[0049] The novel features of the invention are set forth with particularity in the appended claims. A better understanding of the features and advantages of the present invention will be obtained by reference to the following detailed description that sets forth illustrative embodiments, in which the principles of the invention are utilized, and the accompanying drawings (also “Figure” and “FIG.” herein), of which:

[0050] FIG. 1 depicts typical organizations of CRISPR/Cas loci of different classes and types.

[0051] FIG. 2 depicts the architecture of a natural Class2/Type II crRNA/tracrRNA pair, compared to a hybrid sgRNA wherein both are joined.

[0052] FIG. 3 depicts schematics showing organization of CRISPR loci encoding enzymes from the MG1 family.

[0053] FIG. 4 depicts schematics showing organization of CRISPR loci encoding enzymes from the MG2 family.

[0054] FIG. 5 depicts schematics showing organization of CRISPR loci encoding enzymes from the MG3 family.

[0055] FIG. 6 depicts a structure-based alignment of an enzyme of the present disclosure (MG1-1) versus Cas9 from Staphylococcus aureus (SEQ ID NO:5613).

[0056] FIG. 7 depicts a structure-based alignment of an enzyme of the present disclosure (MG2-1) versus Cas9 from Staphylococcus aureus (SEQ ID NO:5613).

[0057] FIG. 8 depicts a structure-based alignment of an enzyme of the present disclosure (MG3-1) versus Cas9 from Actinomyces naeslundii (SEQ ID NO: 5614).

[0058] FIGS. 9A, 9B, 9C, 9D, 9E, 9F, 9G, and 9H depicts a structure-based alignment of MG1 family enzymes MG1-1 through MG1-6 (SEQ ID NOs: 5, 6, 9, 1, 2, and 3).

[0059] FIG. 10 depicts in vitro cleavage of DNA by MG1-4 in complex with its corresponding sgRNA containing targeting sequences of varying lengths.

[0060] FIG. 11 depicts in cell cleavage of E. coli genomic DNA using MG1-4 along with its corresponding sgRNA. Shown are dilution series of cells transformed with MG1-4 along with target or non-target spacer (top); bottom panel shows the data quantitated, where the left bar represents non-target sgRNA and the right bar represents target sgRNA.

[0061] FIG. 12 depicts in cell indel formation generated by transfection of HEK cells with MG1-4 or MG1-6 constructs described in Example 11 alongside their corresponding sgRNAs containing various different targeting sequences targeting various locations in the human genome.

[0062] FIG. 13 depicts vitro cleavage of DNA by MG3-6 in complex with its corresponding sgRNA containing targeting sequences of varying lengths.

[0063] FIG. 14 depicts in cell cleavage of E. coli genomic DNA using MG3-7 along with its corresponding sgRNA. Shown are dilution series of cells transformed with MG3-7 along with target or non-target spacer (top); bottom panel shows the data quantitated, where the left bar represents non-target sgRNA and the right bar represents target sgRNA.

[0064] FIG. 15 depicts in cell indel formation generated by transfection of HEK cells with MG3-7 constructs described in Example 13 alongside their corresponding sgRNAs containing various different targeting sequences targeting various locations in the human genome.

[0065] FIG. 16 depicts in vitro cleavage of DNA by MG15-1 in complex with its corresponding sgRNA containing targeting sequences of varying lengths.

[0066] FIGS. 17, 18, 19, and 20 depict agarose gels showing the results of PAM vector library cleavage in the presence of TXTL extracts containing various MG family nucleases and their corresponding tracrRNAs or sgRNAs.

[0067] FIGS. 21, 22, 23, 24, 25 and 26 depict predicted structures (predicted e.g., as in Example 7) of corresponding sgRNAs of MG enzymes described herein.

[0068] FIGS. 27, 28, 29, 30, 31, 32 and 33 depict seqLogo representations of PAM sequences derived via NGS as described herein (e.g. as described in Example 6).

[0069] FIG. 34 depicts in cell cleavage of E. coli genomic DNA using MG2-7 along with its corresponding sgRNA. Shown are dilution series of cells transformed with MG2-7 along with target or non-target spacer (top); bottom panel shows the data quantitated, where the right bar represents non-target sgRNA and the left bar represents target sgRNA.

[0070] FIG. 35 depicts in cell cleavage of E. coli genomic DNA using MG14-1 along with its corresponding sgRNA. Shown are dilution series of cells transformed with MG14-1 along with target or non-target spacer (top); bottom panel shows the data quantitated, where the right bar represents non-target sgRNA and the left bar represents target sgRNA.

[0071] FIG. 36 depicts in cell cleavage of E. coli genomic DNA using MG15-1 along with its corresponding sgRNA. Shown are dilution series of cells transformed with MG15-1 along with target or non-target spacer (top); bottom panel shows the data quantitated, where the right bar represents non-target sgRNA and the left bar represents target sgRNA.

[0072] FIGS. 37-39 depicts in cell indel formation generated by transfection of HEK cells with MG1-4, MG1-6 and MG1-7 constructs described in Example 11 alongside their corresponding sgRNAs containing various different targeting sequences targeting various locations in the human genome.

[0073] FIGS. 40-42 depicts in cell indel formation generated by transfection of HEK cells with MG3-6, MG3-7 and MG3-8 constructs described in Example 13 alongside their corresponding sgRNAs containing various different targeting sequences targeting various locations in the human genome.

[0074] FIG. 43 depicts in cell indel formation generated by transfection of HEK cells with MG14-1 constructs described in Example 14 alongside their corresponding sgRNAs containing various different targeting sequences targeting various locations in the human genome.

[0075] FIG. 44 depicts in cell indel formation generated by transfection of HEK cells with MG18-1 constructs described in Example 17 alongside their corresponding sgRNAs containing various different targeting sequences targeting various locations in the human genome.

### BRIEF DESCRIPTION OF THE SEQUENCE LISTING

[0076] The Sequence Listing filed herewith provides exemplary polynucleotide and polypeptide sequences for use in methods, compositions and systems according to the disclosure. Below are exemplary descriptions of sequences therein.

[0077] MG1

[0078] SEQ ID NOs: 1-319 show the full-length peptide sequences of MG1 nucleases.

[0079] SEQ ID NOs: 1827-2140 show the peptide sequences of RuvC_III domains of MG1 nucleases above.

[0080] SEQ ID NOs: 3638-3955 show the peptide of HNH domains of MG1 nucleases above.

[0081] SEQ ID NOs: 5476-5479 show the nucleotide sequences of MG1 tracrRNAs derived from the same loci as MG1 nucleases above (e.g., same loci as SEQ ID NO:1-4, respectively).

[0082] SEQ ID NOs: 5461-5464 show the nucleotide sequences of sgRNAs engineered to function with an MG1 nuclease (e.g., SEQ ID NO:1-4, respectively), where Ns denote nucleotides of a targeting sequence.

[0083] SEQ ID NOs: 5572-5575 show nucleotide sequences for E. coli codon-optimized coding sequences for MG1 family enzymes (SEQ ID NOs: 1-4).

[0084] SEQ ID NOs: 5588-5589 show nucleotide sequences for human codon-optimized coding sequences for MG1 family enzymes (SEQ ID NOs: 1 and 3).

[0085] SEQ ID NOs: 5616-5632 show peptide motifs characteristic of MG1 family enzymes.

[0086] MG2

[0087] SEQ ID NOs: 320-420 show the full-length peptide sequences of MG2 nucleases.

[0088] SEQ ID NOs: 2141-2241 show the peptide sequences of RuvC_III domains of MG2 nucleases above.

[0089] SEQ ID NOs: 3955-4055 show the peptide of HNH domains of MG2 nucleases above.

[0090] SEQ ID NOs: 5490-5494 show the nucleotide sequences of MG2 tracrRNAs derived from the same loci as MG2 nucleases above (e.g., same loci as SEQ ID NOs: 320, 321, 323, 325, and 326, respectively).

[0091] SEQ ID NO: 5465 shows the nucleotide sequence of an sgRNA engineered to function with an MG2 nuclease (e.g., SEQ ID NO: 321 above).

[0092] SEQ ID NOs: 5572-5575 show nucleotide sequences for E. coli codon-optimized coding sequences for MG2 family enzymes.

[0093] SEQ ID NOs: 5631-5638 show peptide sequences characteristic of MG2 family enzymes.

[0094] MG3

[0095] SEQ ID NOs: 421-431 show the full-length peptide sequences of MG3 nucleases.

[0096] SEQ ID NOs: 2242-2252 show the peptide sequences of RuvC_III domains of MG3 nucleases above.

[0097] SEQ ID NOs: 4056-4066 show the peptide of HNH domains of MG3 nucleases above.

[0098] SEQ ID NOs: 5495-5502 show the nucleotide sequences of MG3 tracrRNAs derived from the same loci as MG3 nucleases above (e.g., same loci as SEQ ID NOs: 421-428, respectively).

[0099] SEQ ID NOs: 5466-5467 show the nucleotide sequence of sgRNAs engineered to function with an MG3 nuclease (e.g., SEQ ID NOs: 421-423).

[0100] SEQ ID NOs: 5578-5580 show nucleotide sequences for E. coli codon-optimized coding sequences for MG3 family enzymes.

[0101] SEQ ID NOs: 5639-5648 show peptide sequences characteristic of MG3 family enzymes.

[0102] MG4

[0103] SEQ ID NOs: 432-660 show the full-length peptide sequences of MG4 nucleases.

[0104] SEQ ID NOs: 2253-2481 show the peptide sequences of RuvC_III domains of MG4 nucleases above.

[0105] SEQ ID NOs: 4067-4295 show the peptide of HNH domains of MG4 nucleases above.

[0106] SEQ ID NO: 5503 shows the nucleotide sequences of an MG4 tracrRNA derived from the same loci as MG4 nucleases above.

[0107] SEQ ID NO: 5468 shows the nucleotide sequence of sgRNAs engineered to function with an MG4 nuclease.

[0108] SEQ ID NO: 5649 shows a peptide sequence characteristic of MG4 family enzymes.

[0109] MG6

[0110] SEQ ID NOs: 661-668 show the full-length peptide sequences of MG6 nucleases.

[0111] SEQ ID NOs: 2482-2489 show the peptide sequences of RuvC_III domains of MG6 nucleases above.

[0112] SEQ ID NOs: 4296-4303 show the peptide of HNH domains of MG3 nucleases above.

[0113] MG7

[0114] SEQ ID NOs: 669-677 show the full-length peptide sequences of MG7 nucleases.

[0115] SEQ ID NOs: 2490-2498 show the peptide sequences of RuvC_III domains of MG7 nucleases above.

[0116] SEQ ID NOs: 4304-4312 show the peptide of HNH domains of MG3 nucleases above.

[0117] SEQ ID NO: 5504 shows the nucleotide sequence of an MG7 tracrRNA derived from the same loci as MG7 nucleases above.

[0118] MG14

[0119] SEQ ID NOs: 678-929 show the full-length peptide sequences of MG14 nucleases.

[0120] SEQ ID NOs: 2499-2750 show the peptide sequences of RuvC_III domains of MG14 nucleases above.

[0121] SEQ ID NOs: 4313-4564 show the peptide of HNH domains of MG14 nucleases above.

[0122] SEQ ID NO: 5505 shows the nucleotide sequences of MG14 tracrRNA derived from the same loci as MG14 nucleases above.

[0123] SEQ ID NO: 5581 shows a nucleotide sequence for an E. coli codon-optimized coding sequences for an MG14 family enzyme.

[0124] SEQ ID NOs: 5650-5667 show peptide sequences characteristic of MG14 family enzymes.

[0125] MG15

[0126] SEQ ID NOs: 930-1092 show the full-length peptide sequences of MG15 nucleases.

[0127] SEQ ID NOs: 2751-2913 show the peptide sequences of RuvC_III domains of MG15 nucleases above.

[0128] SEQ ID NOs: 4565-4727 show the peptide of HNH domains of MG15 nucleases above.

[0129] SEQ ID NO: 5506 shows the nucleotide sequences of MG15 tracrRNA derived from the same loci as MG15 nucleases above.

[0130] SEQ ID NOs: 5470 shows the nucleotide sequence of an sgRNA engineered to function with an MG15 nuclease.

[0131] SEQ ID NO: 5582 shows a nucleotide sequence for an E. coli codon-optimized coding sequences for an MG15 family enzyme.

[0132] SEQ ID NOs: 5668-5675 show peptide sequences characteristic of MG15 family enzymes.

[0133] MG16

[0134] SEQ ID NOs: 1093-1353 show the full-length peptide sequences of MG16 nucleases.

[0135] SEQ ID NOs: 2914-3174 show the peptide sequences of RuvC_III domains of MG16 nucleases above.

[0136] SEQ ID NOs: 4728-4988 show the peptide of HNH domains of MG16 nucleases above.

[0137] SEQ ID NOs: 5507 show the nucleotide sequences of an MG16 tracrRNA derived from the same loci as MG3 nucleases above.

[0138] SEQ ID NOs: 5471 shows the nucleotide sequence of sgRNAs engineered to function with an MG16 nuclease.

[0139] SEQ ID NO: 5583 shows a nucleotide sequence for an E. coli codon-optimized coding sequences for an MG16 family enzyme.

[0140] SEQ ID NOs: 5676-5678 show peptide sequences characteristic of MG16 family enzymes.

[0141] MG18

[0142] SEQ ID NOs: 1354-1511 show the full-length peptide sequences of MG18 nucleases.

[0143] SEQ ID NOs: 3175-3330 show the peptide sequences of RuvC_III domains of MG18 nucleases above.

[0144] SEQ ID NOs: 4989-5146 show the peptide of HNH domains of MG18 nucleases above.

[0145] SEQ ID NO: 5508 shows the nucleotide sequences of MG18 tracrRNA derived from the same loci as MG18 nucleases above.

[0146] SEQ ID NOs: 5472 shows the nucleotide sequence of an sgRNA engineered to function with an MG18 nuclease.

[0147] SEQ ID NO: 5584 shows a nucleotide sequence for an E. coli codon-optimized coding sequences for an MG18 family enzyme.

[0148] SEQ ID NOs: 5679-5686 show peptide sequences characteristic of MG18 family enzymes.

[0149] MG21

[0150] SEQ ID NOs: 1512-1655 show the full-length peptide sequences of MG21 nucleases.

[0151] SEQ ID NOs: 3331-3474 show the peptide sequences of RuvC_III domains of MG21 nucleases above.

[0152] SEQ ID NOs: 5147-5290 show the peptide of HNH domains of MG21 nucleases above.

[0153] SEQ ID NOs: 5509 show the nucleotide sequence of an MG21 tracrRNA derived from the same loci as MG21 nucleases above.

[0154] SEQ ID NOs: 5473 shows the nucleotide sequence of an sgRNA engineered to function with an MG21 nuclease.

[0155] SEQ ID NO: 5585 shows a nucleotide sequence for an E. coli codon-optimized coding sequences for an MG21 family enzyme.

[0156] SEQ ID NOs: 5687-5692 and 5674-5675 show peptide sequences characteristic of MG21 family enzymes.

[0157] MG22

[0158] SEQ ID NOs: 1656-1755 show the full-length peptide sequences of MG22 nucleases.

[0159] SEQ ID NOs: 3475-3568 show the peptide sequences of RuvC_III domains of MG22 nucleases above.

[0160] SEQ ID NOs: 5291-5389 show the peptide of HNH domains of MG22 nucleases above.

[0161] SEQ ID NO: 5510 show the nucleotide sequence of an MG22 tracrRNA derived from the same loci as MG22 nucleases above.

[0162] SEQ ID NOs: 5474 shows the nucleotide sequence of an sgRNAs engineered to function with an MG22 nuclease.

[0163] SEQ ID NO: 5586 shows a nucleotide sequence for an E. coli codon-optimized coding sequences for an MG22 family enzyme.

[0164] SEQ ID NOs: 5694-5699 show peptide sequences characteristic of MG22 family enzymes.

[0165] MG23

[0166] SEQ ID NOs: 1756-1826 show the full-length peptide sequences of MG23 nucleases.

[0167] SEQ ID NOs: 3569-3637 show the peptide sequences of RuvC_III domains of MG23 nucleases above.

[0168] SEQ ID NOs: 5390-5460 show the peptide of HNH domains of MG23 nucleases above.

[0169] SEQ ID NO: 5511 shows the nucleotide sequences of an MG23 tracrRNA derived from the same loci as MG23 nucleases above.

[0170] SEQ ID NOs: 5475 shows the nucleotide sequence of an sgRNA engineered to function with an MG23 nuclease.

[0171] SEQ ID NO: 5587 shows a nucleotide sequence for an E. coli codon-optimized coding sequences for an MG23 family enzyme.

[0172] SEQ ID NOs: 5700-5717 show peptide sequences characteristic of MG23 family enzymes.

### DETAILED DESCRIPTION

[0173] While various embodiments of the invention have been shown and described herein, it will be obvious to those skilled in the art that such embodiments are provided by way of example only. Numerous variations, changes, and substitutions may occur to those skilled in the art without departing from the invention. It should be understood that various alternatives to the embodiments of the invention described herein may be employed.

[0174] The practice of some methods disclosed herein employ, unless otherwise indicated, techniques of immunology, biochemistry, chemistry, molecular biology, microbiology, cell biology, genomics and recombinant DNA. See for example Sambrook and Green, Molecular Cloning: A Laboratory Manual, 4th Edition (2012); the series Current Protocols in Molecular Biology (F. M. Ausubel, et al. eds.); the series Methods In Enzymology (Academic Press, Inc.), PCR 2: A Practical Approach (M. J. MacPherson, B. D. Hames and G. R. Taylor eds. (1995)), Harlow and Lane, eds. (1988) Antibodies, A Laboratory Manual, and Culture of Animal Cells: A Manual of Basic Technique and Specialized Applications, 6th Edition (R. I. Freshney, ed. (2010)) (which is entirely incorporated by reference herein).

[0175] As used herein, the singular forms “a”, “an” and “the” are intended to include the plural forms as well, unless the context clearly indicates otherwise. Furthermore, to the extent that the terms “including”, “includes”, “having”, “has”, “with”, or variants thereof are used in either the detailed description and/or the claims, such terms are intended to be inclusive in a manner similar to the term “comprising”.

[0176] The term “about” or “approximately” means within an acceptable error range for the particular value as determined by one of ordinary skill in the art, which will depend in part on how the value is measured or determined, i.e., the limitations of the measurement system. For example, “about” can mean within one or more than one standard deviation, per the practice in the art. Alternatively, “about” can mean a range of up to 20%, up to 15%, up to 10%, up to 5%, or up to 1% of a given value.

[0177] As used herein, a “cell” generally refers to a biological cell. A cell may be the basic structural, functional and/or biological unit of a living organism. A cell may originate from any organism having one or more cells. Some non-limiting examples include: a prokaryotic cell, eukaryotic cell, a bacterial cell, an archaeal cell, a cell of a single-cell eukaryotic organism, a protozoa cell, a cell from a plant (e.g., cells from plant crops, fruits, vegetables, grains, soy bean, corn, maize, wheat, seeds, tomatoes, rice, cassava, sugarcane, pumpkin, hay, potatoes, cotton, cannabis, tobacco, flowering plants, conifers, gymnosperms, ferns, clubmosses, hornworts, liverworts, mosses), an algal cell, (e.g., Botryococcus braunii, Chlamydomonas reinhardtii, Nannochloropsis gaditana, Chlorella pyrenoidosa, Sargassum patens C. Agardh, and the like), seaweeds (e.g., kelp), a fungal cell (e.g., a yeast cell, a cell from a mushroom), an animal cell, a cell from an invertebrate animal (e.g., fruit fly, cnidarian, echinoderm, nematode, etc.), a cell from a vertebrate animal (e.g., fish, amphibian, reptile, bird, mammal), a cell from a mammal (e.g., a pig, a cow, a goat, a sheep, a rodent, a rat, a mouse, a non-human primate, a human, etc.), and etcetera. Sometimes a cell is not originating from a natural organism (e.g., a cell can be a synthetically made, sometimes termed an artificial cell).

[0178] The term “nucleotide,” as used herein, generally refers to a base-sugar-phosphate combination. A nucleotide may comprise a synthetic nucleotide. A nucleotide may comprise a synthetic nucleotide analog. Nucleotides may be monomeric units of a nucleic acid sequence (e.g., deoxyribonucleic acid (DNA) and ribonucleic acid (RNA)). The term nucleotide may include ribonucleoside triphosphates adenosine triphosphate (ATP), uridine triphosphate (UTP), cytosine triphosphate (CTP), guanosine triphosphate (GTP) and deoxyribonucleoside triphosphates such as dATP, dCTP, dITP, dUTP, dGTP, dTTP, or derivatives thereof. Such derivatives may include, for example, [αS]dATP, 7-deaza-dGTP and 7-deaza-dATP, and nucleotide derivatives that confer nuclease resistance on the nucleic acid molecule containing them. The term nucleotide as used herein may refer to dideoxyribonucleoside triphosphates (ddNTPs) and their derivatives. Illustrative examples of dideoxyribonucleoside triphosphates may include, but are not limited to, ddATP, ddCTP, ddGTP, ddITP, and ddTTP. A nucleotide may be unlabeled or detectably labeled, such as using moieties comprising optically detectable moieties (e.g., fluorophores). Labeling may also be carried out with quantum dots. Detectable labels may include, for example, radioactive isotopes, fluorescent labels, chemiluminescent labels, bioluminescent labels and enzyme labels. Fluorescent labels of nucleotides may include but are not limited fluorescein, 5-carboxyfluorescein (FAM), 2′7′-dimethoxy-4′5-dichloro-6-carboxyfluorescein (JOE), rhodamine, 6-carboxyrhodamine (R6G), N,N,N′,N′-tetramethyl-6-carboxyrhodamine (TAMRA), 6-carboxy-X-rhodamine (ROX), 4-(4′ dimethylaminophenylazo) benzoic acid (DABCYL), Cascade Blue, Oregon Green, Texas Red, Cyanine and 5-(2′-aminoethyl)aminonaphthalene-1-sulfonic acid (EDANS). Specific examples of fluorescently labeled nucleotides can include [R6G]dUTP, [TAMRA]dUTP, [R110]dCTP, [R6G]dCTP, [TAMRA]dCTP, [JOE]ddATP, [R6G]ddATP, [FAM]ddCTP, [R110]ddCTP, [TAMRA]ddGTP, [ROX]ddTTP, [dR6G]ddATP, [dR110]ddCTP, [dTAMRA]ddGTP, and [dROX]ddTTP available from Perkin Elmer, Foster City, Calif; FluoroLink DeoxyNucleotides, FluoroLink Cy3-dCTP, FluoroLink Cy5-dCTP, FluoroLink Fluor X-dCTP, FluoroLink Cy3-dUTP, and FluoroLink Cy5-dUTP available from Amersham, Arlington Heights, Ill.; Fluorescein-15-dATP, Fluorescein-12-dUTP, Tetramethyl-rodamine-6-dUTP, IR770-9-dATP, Fluorescein-12-ddUTP, Fluorescein-12-UTP, and Fluorescein-15-2′-dATP available from Boehringer Mannheim, Indianapolis, Ind.; and Chromosome Labeled Nucleotides, BODIPY-FL-14-UTP, BODIPY-FL-4-UTP, BODIPY-TMR-14-UTP, BODIPY-TMR-14-dUTP, BODIPY-TR-14-UTP, BODIPY-TR-14-dUTP, Cascade Blue-7-UTP, Cascade Blue-7-dUTP, fluorescein-12-UTP, fluorescein-12-dUTP, Oregon Green 488-5-dUTP, Rhodamine Green-5-UTP, Rhodamine Green-5-dUTP, tetramethylrhodamine-6-UTP, tetramethylrhodamine-6-dUTP, Texas Red-5-UTP, Texas Red-5-dUTP, and Texas Red-12-dUTP available from Molecular Probes, Eugene, Oreg. Nucleotides can also be labeled or marked by chemical modification. A chemically-modified single nucleotide can be biotin-dNTP. Some non-limiting examples of biotinylated dNTPs can include, biotin-dATP (e.g., bio-N6-ddATP, biotin-14-dATP), biotin-dCTP (e.g., biotin-11-dCTP, biotin-14-dCTP), and biotin-dUTP (e.g., biotin-11-dUTP, biotin-16-dUTP, biotin-20-dUTP).

[0179] The terms “polynucleotide,” “oligonucleotide,” and “nucleic acid” are used interchangeably to generally refer to a polymeric form of nucleotides of any length, either deoxyribonucleotides or ribonucleotides, or analogs thereof, either in single-, double-, or multi-stranded form. A polynucleotide may be exogenous or endogenous to a cell. A polynucleotide may exist in a cell-free environment. A polynucleotide may be a gene or fragment thereof. A polynucleotide may be DNA. A polynucleotide may be RNA. A polynucleotide may have any three-dimensional structure and may perform any function. A polynucleotide may comprise one or more analogs (e.g., altered backbone, sugar, or nucleobase). If present, modifications to the nucleotide structure may be imparted before or after assembly of the polymer. Some non-limiting examples of analogs include: 5-bromouracil, peptide nucleic acid, xeno nucleic acid, morpholinos, locked nucleic acids, glycol nucleic acids, threose nucleic acids, dideoxynucleotides, cordycepin, 7-deaza-GTP, fluorophores (e.g., rhodamine or fluorescein linked to the sugar), thiol containing nucleotides, biotin linked nucleotides, fluorescent base analogs, CpG islands, methyl-7-guanosine, methylated nucleotides, inosine, thiouridine, pseudouridine, dihydrouridine, queuosine, and wyosine. Non-limiting examples of polynucleotides include coding or non-coding regions of a gene or gene fragment, loci (locus) defined from linkage analysis, exons, introns, messenger RNA (mRNA), transfer RNA (tRNA), ribosomal RNA (rRNA), short interfering RNA (siRNA), short-hairpin RNA (shRNA), micro-RNA (miRNA), ribozymes, cDNA, recombinant polynucleotides, branched polynucleotides, plasmids, vectors, isolated DNA of any sequence, isolated RNA of any sequence, cell-free polynucleotides including cell-free DNA (cfDNA) and cell-free RNA (cfRNA), nucleic acid probes, and primers. The sequence of nucleotides may be interrupted by non-nucleotide components.

[0180] The terms “transfection” or “transfected” generally refer to introduction of a nucleic acid into a cell by non-viral or viral-based methods. The nucleic acid molecules may be gene sequences encoding complete proteins or functional portions thereof. See, e.g., Sambrook et al., 1989, Molecular Cloning: A Laboratory Manual, 18.1-18.88.

[0181] The terms “peptide,” “polypeptide,” and “protein” are used interchangeably herein to generally refer to a polymer of at least two amino acid residues joined by peptide bond(s). This term does not connote a specific length of polymer, nor is it intended to imply or distinguish whether the peptide is produced using recombinant techniques, chemical or enzymatic synthesis, or is naturally occurring. The terms apply to naturally occurring amino acid polymers as well as amino acid polymers comprising at least one modified amino acid. In some cases, the polymer may be interrupted by non-amino acids. The terms include amino acid chains of any length, including full length proteins, and proteins with or without secondary and/or tertiary structure (e.g., domains). The terms also encompass an amino acid polymer that has been modified, for example, by disulfide bond formation, glycosylation, lipidation, acetylation, phosphorylation, oxidation, and any other manipulation such as conjugation with a labeling component. The terms “amino acid” and “amino acids,” as used herein, generally refer to natural and non-natural amino acids, including, but not limited to, modified amino acids and amino acid analogues. Modified amino acids may include natural amino acids and non-natural amino acids, which have been chemically modified to include a group or a chemical moiety not naturally present on the amino acid. Amino acid analogues may refer to amino acid derivatives. The term “amino acid” includes both D-amino acids and L-amino acids.

[0182] As used herein, the “non-native” can generally refer to a nucleic acid or polypeptide sequence that is not found in a native nucleic acid or protein. Non-native may refer to affinity tags. Non-native may refer to fusions. Non-native may refer to a naturally occurring nucleic acid or polypeptide sequence that comprises mutations, insertions and/or deletions. A non-native sequence may exhibit and/or encode for an activity (e.g., enzymatic activity, methyltransferase activity, acetyltransferase activity, kinase activity, ubiquitinating activity, etc.) that may also be exhibited by the nucleic acid and/or polypeptide sequence to which the non-native sequence is fused. A non-native nucleic acid or polypeptide sequence may be linked to a naturally-occurring nucleic acid or polypeptide sequence (or a variant thereof) by genetic engineering to generate a chimeric nucleic acid and/or polypeptide sequence encoding a chimeric nucleic acid and/or polypeptide.

[0183] The term “promoter”, as used herein, generally refers to the regulatory DNA region which controls transcription or expression of a gene and which may be located adjacent to or overlapping a nucleotide or region of nucleotides at which RNA transcription is initiated. A promoter may contain specific DNA sequences which bind protein factors, often referred to as transcription factors, which facilitate binding of RNA polymerase to the DNA leading to gene transcription. A ‘basal promoter’, also referred to as a ‘core promoter’, may generally refer to a promoter that contains all the basic necessary elements to promote transcriptional expression of an operably linked polynucleotide. Eukaryotic basal promoters typically, though not necessarily, contain a TATA-box and/or a CAAT box.

[0184] The term “expression”, as used herein, generally refers to the process by which a nucleic acid sequence or a polynucleotide is transcribed from a DNA template (such as into mRNA or other RNA transcript) and/or the process by which a transcribed mRNA is subsequently translated into peptides, polypeptides, or proteins. Transcripts and encoded polypeptides may be collectively referred to as “gene product.” If the polynucleotide is derived from genomic DNA, expression may include splicing of the mRNA in a eukaryotic cell.

[0185] As used herein, “operably linked”, “operable linkage”, “operatively linked”, or grammatical equivalents thereof generally refer to juxtaposition of genetic elements, e.g., a promoter, an enhancer, a polyadenylation sequence, etc., wherein the elements are in a relationship permitting them to operate in the expected manner. For instance, a regulatory element, which may comprise promoter and/or enhancer sequences, is operatively linked to a coding region if the regulatory element helps initiate transcription of the coding sequence. There may be intervening residues between the regulatory element and coding region so long as this functional relationship is maintained.

[0186] A “vector” as used herein, generally refers to a macromolecule or association of macromolecules that comprises or associates with a polynucleotide and which may be used to mediate delivery of the polynucleotide to a cell. Examples of vectors include plasmids, viral vectors, liposomes, and other gene delivery vehicles. The vector generally comprises genetic elements, e.g., regulatory elements, operatively linked to a gene to facilitate expression of the gene in a target.

[0187] As used herein, “an expression cassette” and “a nucleic acid cassette” are used interchangeably generally to refer to a combination of nucleic acid sequences or elements that are expressed together or are operably linked for expression. In some cases, an expression cassette refers to the combination of regulatory elements and a gene or genes to which they are operably linked for expression.

[0188] A “functional fragment” of a DNA or protein sequence generally refers to a fragment that retains a biological activity (either functional or structural) that is substantially similar to a biological activity of the full-length DNA or protein sequence. A biological activity of a DNA sequence may be its ability to influence expression in a manner known to be attributed to the full-length sequence.

[0189] As used herein, an “engineered” object generally indicates that the object has been modified by human intervention. According to non-limiting examples: a nucleic acid may be modified by changing its sequence to a sequence that does not occur in nature; a nucleic acid may be modified by ligating it to a nucleic acid that it does not associate with in nature such that the ligated product possesses a function not present in the original nucleic acid; an engineered nucleic acid may synthesized in vitro with a sequence that does not exist in nature; a protein may be modified by changing its amino acid sequence to a sequence that does not exist in nature; an engineered protein may acquire a new function or property. An “engineered” system comprises at least one engineered component.

[0190] As used herein, “synthetic” and “artificial” are used interchangeably to refer to a protein or a domain thereof that has low sequence identity (e.g., less than 50% sequence identity, less than 25% sequence identity, less than 10% sequence identity, less than 5% sequence identity, less than 1% sequence identity) to a naturally occurring human protein. For example, VPR and VP64 domains are synthetic transactivation domains.

[0191] The term “tracrRNA” or “tracr sequence”, as used herein, can generally refer to a nucleic acid with at least about 5%, 10%, 20%, 30%, 40%, 50%, 60%, 70%, 80%, 90%, 95%, or 100% sequence identity and/or sequence similarity to a wild type exemplary tracrRNA sequence (e.g., a tracrRNA from S. pyogenes S. aureus, etc or SEQ ID NO s: 5476-5511). tracrRNA can refer to a nucleic acid with at most about 5%, 10%, 20%, 30%, 40%, 50%, 60%, 70%, 80%, 90%, or 100% sequence identity and/or sequence similarity to a wild type exemplary tracrRNA sequence (e.g., a tracrRNA from S. pyogenes S. aureus, etc). tracrRNA may refer to a modified form of a tracrRNA that can comprise a nucleotide change such as a deletion, insertion, or substitution, variant, mutation, or chimera. A tracrRNA may refer to a nucleic acid that can be at least about 60% identical to a wild type exemplary tracrRNA (e.g., a tracrRNA from S. pyogenes S. aureus, etc) sequence over a stretch of at least 6 contiguous nucleotides. For example, a tracrRNA sequence can be at least about 60% identical, at least about 65% identical, at least about 70% identical, at least about 75% identical, at least about 80% identical, at least about 85% identical, at least about 90% identical, at least about 95% identical, at least about 98% identical, at least about 99% identical, or 100% identical to a wild type exemplary tracrRNA (e.g., a tracrRNA from S. pyogenes S. aureus, etc) sequence over a stretch of at least 6 contiguous nucleotides. Type II tracrRNA sequences can be predicted on a genome sequence by identifying regions with complementarity to part of the repeat sequence in an adjacent CRISPR array.

[0192] As used herein, a “guide nucleic acid” can generally refer to a nucleic acid that may hybridize to another nucleic acid. A guide nucleic acid may be RNA. A guide nucleic acid may be DNA. The guide nucleic acid may be programmed to bind to a sequence of nucleic acid site-specifically. The nucleic acid to be targeted, or the target nucleic acid, may comprise nucleotides. The guide nucleic acid may comprise nucleotides. A portion of the target nucleic acid may be complementary to a portion of the guide nucleic acid. The strand of a double-stranded target polynucleotide that is complementary to and hybridizes with the guide nucleic acid may be called the complementary strand. The strand of the double-stranded target polynucleotide that is complementary to the complementary strand, and therefore may not be complementary to the guide nucleic acid may be called noncomplementary strand. A guide nucleic acid may comprise a polynucleotide chain and can be called a “single guide nucleic acid.” A guide nucleic acid may comprise two polynucleotide chains and may be called a “double guide nucleic acid.” If not otherwise specified, the term “guide nucleic acid” may be inclusive, referring to both single guide nucleic acids and double guide nucleic acids. A guide nucleic acid may comprise a segment that can be referred to as a “nucleic acid-targeting segment” or a “nucleic acid-targeting sequence.” A nucleic acid-targeting segment may comprise a sub-segment that may be referred to as a “protein binding segment” or “protein binding sequence” or “Cas protein binding segment”.

[0193] The term “sequence identity” or “percent identity” in the context of two or more nucleic acids or polypeptide sequences, generally refers to two (e.g., in a pairwise alignment) or more (e.g., in a multiple sequence alignment) sequences that are the same or have a specified percentage of amino acid residues or nucleotides that are the same, when compared and aligned for maximum correspondence over a local or global comparison window, as measured using a sequence comparison algorithm. Suitable sequence comparison algorithms for polypeptide sequences include, e.g., BLASTP using parameters of a wordlength (W) of 3, an expectation (E) of 10, and the BLOSUM62 scoring matrix setting gap costs at existence of 11, extension of 1, and using a conditional compositional score matrix adjustment for polypeptide sequences longer than 30 residues; BLASTP using parameters of a wordlength (W) of 2, an expectation (E) of 1000000, and the PAM30 scoring matrix setting gap costs at 9 to open gaps and 1 to extend gaps for sequences of less than 30 residues (these are the default parameters for BLASTP in the BLAST suite available at https://blast.ncbi.nlm.nih.gov); CLUSTALW with parameters of; the Smith-Waterman homology search algorithm with parameters of a match of 2, a mismatch of −1, and a gap of −1; MUSCLE with default parameters; MAFFT with parameters retree of 2 and maxiterations of 1000; Novafold with default parameters; HMMER hmmalign with default parameters.

[0194] Included in the current disclosure are variants of any of the enzyme described herein with one or more conservative amino acid substitutions. Such conservative substitutions can be made in the amino acid sequence of a polypeptide without disrupting the three-dimensional structure or function of the polypeptide. Conservative substitutions can be accomplished by substituting amino acids with similar hydrophobicity, polarity, and R chain length for one another. Additionally or alternatively, by comparing aligned sequences of homologous proteins from different species, conservative substitutions can be identified by locating amino acid residues that have been mutated between species (e.g. non-conserved residues) without altering the basic functions of the encoded proteins. Such conservatively substituted variants may include variants with at least about 20%, at least about 25%, at least about 30%, at least about 35%, at least about 40%, at least about 45%, at least about 50%, at least about 55%, at least about 60%, at least about 65%, at least about 70%, at least about 75%, at least about 80%, at least about 85%, at least about 90%, at least about 91%, at least about 92%, at least about 93%, at least about 94%, at least about 95%, at least about 96%, at least about 97%, at least about 98%, at least about 99% identity to any one of the endonuclease protein sequences described herein (e.g. MG1, MG2, MG3, MG4, MG6, MG7, MG14, MG15, MG16, MG18, MG21, MG22, or MG23 family endonucleases described herein). In some embodiments, such conservatively substituted variants are functional variants. Such functional variants can encompass sequences with substitutions such that the activity of critical active site residues of the endonuclease are not disrupted.

[0195] Conservative substitution tables providing functionally similar amino acids are available from a variety of references (see, for e.g., Creighton, Proteins: Structures and Molecular Properties (W H Freeman & Co.; 2nd edition (December 1993)). The following eight groups each contain amino acids that are conservative substitutions for one another:
[0196] 1) Alanine (A), Glycine (G);
[0197] 2) Aspartic acid (D), Glutamic acid (E);
[0198] 3) Asparagine (N), Glutamine (Q);
[0199] 4) Arginine (R), Lysine (K);
[0200] 5) Isoleucine (I), Leucine (L), Methionine (M), Valine (V);
[0201] 6) Phenylalanine (F), Tyrosine (Y), Tryptophan (W);
[0202] 7) Serine (S), Threonine (T); and
[0203] 8) Cysteine (C), Methionine (M).

[0204] As used herein, the term “RuvC_III domain” generally refers to a third discontinuous segment of a RuvC endonuclease domain (the RuvC nuclease domain being comprised of three discontiguous segments, RuvC_I, RuvC_II, and RuvC_III). A RuvC domain or segments thereof can generally be identified by alignment to known domain sequences, structural alignment to proteins with annotated domains, or by comparison to Hidden Markov Models (HMMs) built based on known domain sequences (e.g., Pfam HMM PF18541 for RuvC_III).

[0205] As used herein, the term “HNH domain” generally refers to an endonuclease domain having characteristic histidine and asparagine residues. An HNH domain can generally be identified by alignment to known domain sequences, structural alignment to proteins with annotated domains, or by comparison to Hidden Markov Models (HMMs) built based on known domain sequences (e.g., Pfam HMM PF01844 for domain HNH).

[0206] Overview

[0207] The discovery of new Cas enzymes with unique functionality and structure may offer the potential to further disrupt deoxyribonucleic acid (DNA) editing technologies, improving speed, specificity, functionality, and ease of use. Relative to the predicted prevalence of Clustered Regularly Interspaced Short Palindromic Repeats (CRISPR) systems in microbes and the sheer diversity of microbial species, relatively few functionally characterized CRISPR/Cas enzymes exist in the literature. This is partly because a huge number of microbial species may not be readily cultivated in laboratory conditions. Metagenomic sequencing from natural environmental niches that represent large numbers of microbial species may offer the potential to drastically increase the number of new CRISPR/Cas systems known and speed the discovery of new oligonucleotide editing functionalities. A recent example of the fruitfulness of such an approach is demonstrated by the 2016 discovery of CasX/CasY CRISPR systems from metagenomic analysis of natural microbial communities.

[0208] CRISPR/Cas systems are RNA-directed nuclease complexes that have been described to function as an adaptive immune system in microbes. In their natural context, CRISPR/Cas systems occur in CRISPR (clustered regularly interspaced short palindromic repeats) operons or loci, which generally comprise two parts: (i) an array of short repetitive sequences (30-40 bp) separated by equally short spacer sequences, which encode the RNA-based targeting element; and (ii) ORFs encoding the Cas encoding the nuclease polypeptide directed by the RNA-based targeting element alongside accessory proteins/enzymes. Efficient nuclease targeting of a particular target nucleic acid sequence generally requires both (i) complementary hybridization between the first 6-8 nucleic acids of the target (the target seed) and the crRNA guide; and (ii) the presence of a protospacer-adjacent motif (PAM) sequence within a defined vicinity of the target seed (the PAM usually being a sequence not commonly represented within the host genome). Depending on the exact function and organization of the system, CRISPR-Cas systems are commonly organized into 2 classes, 5 types and 16 subtypes based on shared functional characteristics and evolutionary similarity.

[0209] Class I CRISPR-Cas systems have large, multisubunit effector complexes, and comprise Types I, III, and IV.

[0210] Type I CRISPR-Cas systems are considered of moderate complexity in terms of components. In Type I CRISPR-Cas systems, the array of RNA-targeting elements is transcribed as a long precursor crRNA (pre-crRNA) that is processed at repeat elements to liberate short, mature crRNAs that direct the nuclease complex to nucleic acid targets when they are followed by a suitable short consensus sequence called a protospacer-adjacent motif (PAM). This processing occurs via an endoribonuclease subunit (Cas6) of a large endonuclease complex called Cascade, which also comprises a nuclease (Cas3) protein component of the crRNA-directed nuclease complex. Cas I nucleases function primarily as DNA nucleases.

[0211] Type III CRISPR systems may be characterized by the presence of a central nuclease, known as Cas10, alongside a repeat-associated mysterious protein (RAMP) that comprises Csm or Cmr protein subunits Like in Type I systems, the mature crRNA is processed from a pre-crRNA using a Cas6-like enzyme. Unlike type I and II systems, type III systems appear to target and cleave DNA-RNA duplexes (such as DNA strands being used as templates for an RNA polymerase).

[0212] Type IV CRISPR-Cas systems possess an effector complex that consists of a highly reduced large subunit nuclease (csf1), two genes for RAMP proteins of the Cas5 (csf3) and Cas7 (csf2) groups, and, in some cases, a gene for a predicted small subunit; such systems are commonly found on endogenous plasmids.

[0213] Class II CRISPR-Cas systems generally have single-polypeptide multidomain nuclease effectors, and comprise Types II, V and VI.

[0214] Type II CRISPR-Cas systems are considered the simplest in terms of components. In Type II CRISPR-Cas systems, the processing of the CRISPR array into mature crRNAs does not require the presence of a special endonuclease subunit, but rather a small trans-encoded crRNA (tracrRNA) with a region complementary to the array repeat sequence; the tracrRNA interacts with both its corresponding effector nuclease (e.g. Cas9) and the repeat sequence to form a precursor dsRNA structure, which is cleaved by endogenous RNAse III to generate a mature effector enzyme loaded with both tracrRNA and crRNA. Cas II nucleases are known as DNA nucleases. Type 2 effectors generally exhibit a structure consisting of a RuvC-like endonuclease domain that adopts the RNase H fold with an unrelated HNH nuclease domain inserted within the folds of the RuvC-like nuclease domain. The RuvC-like domain is responsible for the cleavage of the target (e.g., crRNA complementary) DNA strand, while the HNH domain is responsible for cleavage of the displaced DNA strand.

[0215] Type V CRISPR-Cas systems are characterized by a nuclease effector (e.g. Cas12) structure similar to that of Type II effectors, comprising a RuvC-like domain. Similar to Type II, most (but not all) Type V CRISPR systems use a tracrRNA to process pre-crRNAs into mature crRNAs; however, unlike Type II systems which requires RNAse III to cleave the pre-crRNA into multiple crRNAs, type V systems are capable of using the effector nuclease itself to cleave pre-crRNAs Like Type-II CRISPR-Cas systems, Type V CRISPR-Cas systems are again known as DNA nucleases. Unlike Type II CRISPR-Cas systems, some Type V enzymes (e.g., Cas12a) appear to have a robust single-stranded nonspecific deoxyribonuclease activity that is activated by the first crRNA directed cleavage of a double-stranded target sequence.

[0216] Type VI CRIPSR-Cas systems have RNA-guided RNA endonucleases. Instead of RuvC-like domains, the single polypeptide effector of Type VI systems (e.g. Cas13) comprises two HEPN ribonuclease domains. Differing from both Type II and V systems, Type VI systems also appear to not need a tracrRNA for processing of pre-crRNA into crRNA. Similar to type V systems, however, some Type VI systems (e.g., C2C2) appear to possess robust single-stranded nonspecific nuclease (ribonuclease) activity activated by the first crRNA directed cleavage of a target RNA.

[0217] Because of their simpler architecture, Class II CRISPR-Cas have been most widely adopted for engineering and development as designer nuclease/genome editing applications.

[0218] One of the early adaptations of such a system for in vitro use can be found in Jinek et al. (Science. 2012 Aug. 17; 337(6096):816-21, which is entirely incorporated herein by reference). The Jinek study first described a system that involved (i) recombinantly-expressed, purified full-length Cas9 (e.g., a Class II, Type II Cas enzyme) isolated from S. pyogenes SF370, (ii) purified mature ˜42 nt crRNA bearing a ˜20 nt 5′ sequence complementary to the target DNA sequence desired to be cleaved followed by a 3′ tracr-binding sequence (the whole crRNA being in vitro transcribed from a synthetic DNA template carrying a T7 promoter sequence); (iii) purified tracrRNA in vitro transcribed from a synthetic DNA template carrying a T7 promoter sequence, and (iv) Mg²⁺. Jinek later described an improved, engineered system wherein the crRNA of (ii) is joined to the 5′ end of (iii) by a linker (e.g., GAAA) to form a single fused synthetic guide RNA (sgRNA) capable of directing Cas9 to a target by itself (compare top and bottom panel of FIG. 2).

[0219] Mali et al. (Science. 2013 Feb. 15; 339(6121): 823-826), which is entirely incorporated herein by reference, later adapted this system for use in mammalian cells by providing DNA vectors encoding (i) an ORF encoding codon-optimized Cas9 (e.g., a Class II, Type II Cas enzyme) under a suitable mammalian promoter with a C-terminal nuclear localization sequence (e.g., SV40 NLS) and a suitable polyadenylation signal (e.g., TK pA signal); and (ii) an ORF encoding an sgRNA (having a 5′ sequence beginning with G followed by 20 nt of a complementary targeting nucleic acid sequence joined to a 3′ tracr-binding sequence, a linker, and the tracrRNA sequence) under a suitable Polymerase III promoter (e.g., the U6 promoter).

[0220] MG1 Enzymes

[0221] In one aspect, the present disclosure provides for an engineered nuclease system comprising (a) an endonuclease. In some cases, the endonuclease is a Cas endonuclease. In some cases, the endonuclease is a Type II, Class II Cas endonuclease. The endonuclease may comprise a RuvC_III domain, wherein said RuvC_III domain has at least about 70% sequence identity to any one of SEQ ID NOs: 1827-2140. In some cases, the endonuclease may comprise a RuvC_III domain, wherein the RuvC_III domain has at least about 20%, at least about 25%, at least about 30%, at least about 35%, at least about 40%, at least about 45%, at least about 50%, at least about 55%, at least about 60%, at least about 65%, at least about 70%, at least about 75%, at least about 80%, at least about 85%, at least about 90%, at least about 91%, at least about 92%, at least about 93%, at least about 94%, at least about 95%, at least about 96%, at least about 97%, at least about 98%, at least about 99% identity to any one of SEQ ID NOs: 1827-2140. In some cases, the endonuclease may comprise a RuvC_III domain, wherein the substantially identical to any one of SEQ ID NOs: 1827-2140. The endonuclease may comprise a RuvC_III domain having at least about 70% sequence identity to any one of SEQ ID NOs: 1827-1831. In some cases, the endonuclease may comprise a RuvC_III domain having at least about 20%, at least about 25%, at least about 30%, at least about 35%, at least about 40%, at least about 45%, at least about 50%, at least about 55%, at least about 60%, at least about 65%, at least about 70%, at least about 75%, at least about 80%, at least about 85%, at least about 90%, at least about 91%, at least about 92%, at least about 93%, at least about 94%, at least about 95%, at least about 96%, at least about 97%, at least about 98%, at least about 99% identity to any one of SEQ ID NOs: 1827-1831. In some cases, the endonuclease may comprise a RuvC_III domain substantially identical to any one of SEQ ID NOs: 1827-1831. In some cases, the endonuclease may comprise a RuvC_III domain having at least about 70%, at least about 75%, at least about 80%, at least about 85%, at least about 90%, at least about 91%, at least about 92%, at least about 93%, at least about 94%, at least about 95%, at least about 96%, at least about 97%, at least about 98%, at least about 99% identity to SEQ ID NO: 1827. In some cases, the endonuclease may comprise a RuvC_III domain having at least about 70%, at least about 75%, at least about 80%, at least about 85%, at least about 90%, at least about 91%, at least about 92%, at least about 93%, at least about 94%, at least about 95%, at least about 96%, at least about 97%, at least about 98%, at least about 99% identity to SEQ ID NO: 1828. In some cases, the endonuclease may comprise a RuvC_III domain having at least about 70%, at least about 75%, at least about 80%, at least about 85%, at least about 90%, at least about 91%, at least about 92%, at least about 93%, at least about 94%, at least about 95%, at least about 96%, at least about 97%, at least about 98%, at least about 99% identity to SEQ ID NO: 1829. In some cases, the endonuclease may comprise a RuvC_III domain having at least about 70%, at least about 75%, at least about 80%, at least about 85%, at least about 90%, at least about 91%, at least about 92%, at least about 93%, at least about 94%, at least about 95%, at least about 96%, at least about 97%, at least about 98%, at least about 99% identity to SEQ ID NO: 1830. In some cases, the endonuclease may comprise a RuvC_III domain having at least about 70%, at least about 75%, at least about 80%, at least about 85%, at least about 90%, at least about 91%, at least about 92%, at least about 93%, at least about 94%, at least about 95%, at least about 96%, at least about 97%, at least about 98%, at least about 99% identity to SEQ ID NO: 1831.

[0222] The endonuclease may comprise an HNH domain having at least about 70% identity to any one of SEQ ID NOs: 3638-3955. In some cases, the endonuclease may comprise an HNH domain having at least about 70%, at least about 75%, at least about 80%, at least about 85%, at least about 90%, at least about 91%, at least about 92%, at least about 93%, at least about 94%, at least about 95%, at least about 96%, at least about 97%, at least about 98%, or at least about 99% identical to any one of SEQ ID NOs: 3638-3955. The endonuclease may comprise an HNH domain substantially identical to any one of SEQ ID NOs: 3638-3955. The endonuclease may comprise an HNH domain having at least about 70% identity to any one of SEQ ID NOs: 3638-3955. In some cases, the endonuclease may comprise an HNH domain having at least about 70%, at least about 75%, at least about 80%, at least about 85%, at least about 90%, at least about 91%, at least about 92%, at least about 93%, at least about 94%, at least about 95%, at least about 96%, at least about 97%, at least about 98%, or at least about 99% identical to any one of SEQ ID NOs: 3638-3955. The endonuclease may comprise an HNH domain substantially identical to any one of SEQ ID NOs: 3638-3955. The endonuclease may comprise an HNH domain having at least about 70% identity to any one of SEQ ID NOs: 3638-3641. In some cases, the endonuclease may comprise an HNH domain having at least about 70%, at least about 75%, at least about 80%, at least about 85%, at least about 90%, at least about 91%, at least about 92%, at least about 93%, at least about 94%, at least about 95%, at least about 96%, at least about 97%, at least about 98%, or at least about 99% identical to any one of SEQ ID NOs: 3638-3641. The endonuclease may comprise an HNH domain substantially identical to any one of SEQ ID NOs: 3638-3641. The endonuclease may comprise an HNH domain having at least about 70% identity to any one of SEQ ID NOs: 3638. In some cases, the endonuclease may comprise an HNH domain having at least about 70%, at least about 75%, at least about 80%, at least about 85%, at least about 90%, at least about 91%, at least about 92%, at least about 93%, at least about 94%, at least about 95%, at least about 96%, at least about 97%, at least about 98%, or at least about 99% identical to any one of SEQ ID NOs: 3638. The endonuclease may comprise an HNH domain substantially identical to any one of SEQ ID NOs: 3638. The endonuclease may comprise an HNH domain having at least about 70% identity to any one of SEQ ID NOs: 3639. In some cases, the endonuclease may comprise an HNH domain having at least about 70%, at least about 75%, at least about 80%, at least about 85%, at least about 90%, at least about 91%, at least about 92%, at least about 93%, at least about 94%, at least about 95%, at least about 96%, at least about 97%, at least about 98%, or at least about 99% identical to any one of SEQ ID NOs: 3639. The endonuclease may comprise an HNH domain substantially identical to any one of SEQ ID NOs: 3639. The endonuclease may comprise an HNH domain having at least about 70% identity to any one of SEQ ID NOs: 3640. In some cases, the endonuclease may comprise an HNH domain having at least about 70%, at least about 75%, at least about 80%, at least about 85%, at least about 90%, at least about 91%, at least about 92%, at least about 93%, at least about 94%, at least about 95%, at least about 96%, at least about 97%, at least about 98%, or at least about 99% identical to any one of SEQ ID NOs: 3640. The endonuclease may comprise an HNH domain substantially identical to any one of SEQ ID NOs: 3640. The endonuclease may comprise an HNH domain having at least about 70% identity to any one of SEQ ID NOs: 3641. In some cases, the endonuclease may comprise an HNH domain having at least about 70%, at least about 75%, at least about 80%, at least about 85%, at least about 90%, at least about 91%, at least about 92%, at least about 93%, at least about 94%, at least about 95%, at least about 96%, at least about 97%, at least about 98%, or at least about 99% identical to any one of SEQ ID NOs: 3641. The endonuclease may comprise an HNH domain substantially identical to any one of SEQ ID NOs: 3641.

[0223] In some cases, the endonuclease may comprise a variant having at least about 30%, at least about 35%, at least about 40%, at least about 45%, at least about 50%, at least about 55%, at least about 60%, at least about 65%, at least about 70%, at least about 75%, at least about 80%, at least about 85%, at least about 90%, at least about 95%, at least about 96%, at least about 97%, at least about 98%, or at least about 99% identity to any one of SEQ ID NOs: 1-6 or 9-319. In some cases, the endonuclease may be substantially identical to any one of SEQ ID NOs: 1-6 or 9-319. In some cases, the endonuclease may comprise a variant having at least about 30%, at least about 35%, at least about 40%, at least about 45%, at least about 50%, at least about 55%, at least about 60%, at least about 65%, at least about 70%, at least about 75%, at least about 80%, at least about 85%, at least about 90%, at least about 95%, at least about 96%, at least about 97%, at least about 98%, or at least about 99% identity to any one of SEQ ID NOs:1-4. In some cases, the endonuclease may be substantially identical to any one of SEQ ID NOs: 1-4. In some cases, the endonuclease may comprise a peptide motif substantially identical to any one of SEQ ID NOs: 5615, 5616, or 5617.

[0224] In some cases, the endonuclease may comprise a variant having one or more nuclear localization sequences (NLSs). The NLS may be proximal to the N- or C-terminus of said endonuclease. The NLS may be appended N-terminal or C-terminal to any one of SEQ ID NOs: 1-6 or 9-319, or to a variant having at least about 30%, at least about 35%, at least about 40%, at least about 45%, at least about 50%, at least about 55%, at least about 60%, at least about 65%, at least about 70%, at least about 75%, at least about 80%, at least about 85%, at least about 90%, at least about 95%, at least about 96%, at least about 97%, at least about 98%, or at least about 99% identity to any one of SEQ ID NOs: 1-319. The NLS may be an SV40 large T antigen NLS. The NLS may be a c-myc NLS. The NLS can comprise a sequence with at least about 80%, at least about 85%, at least about 90%, at least about 95%, at least about 99% identity to any one of SEQ ID NOs: 5593-5608. The NLS can comprise a sequence substantially identical to any one of SEQ ID NOs: 5593-5608. The NLS can comprise any of the sequences in Table 1 below, or a combination thereof:

TABLE 1
Example NLS Sequences that can be used with Cas Effectors
According to the Disclosure

| Source | NLS amino acid sequence | SEQ ID NO: |
|---|---|---|
| SV40 | PKKKRKV | 5597 |
| nucleoplasmin bipartite NLS | KRPAATKKAGQAKKKK | 5598 |
| c-myc NLS | PAAKRVKLD | 5599 |
| c-myc NLS | RQRRNELKRSP | 5600 |
| hRNPA1 M9 NLS | NQSSNFGPMKGGNFGGRSSGPYGGGGQYFA | 5601 |
| | KPRNQGGY | |
| Importin-alpha IBB domain | RMRIZFKNKGKDTAELRRRRVEVSVELRKAK | 5602 |
| | KDEQILKRRNV | |
| Myoma T protein | VSRKRPRP | 5603 |
| Myoma T protein | PPKKARED | 5604 |
| p53 | PQPKKKPL | 5605 |
| mouse c-abl IV | SALIKKKKKMAP | 5606 |
| influenza virus NS1 | DRLRR | 5607 |
| influenza virus NS1 | PKQKKRK | 5608 |
| Hepatitis virus delta antigen | RKLKKKIKKL | 5609 |
| mouse Mx1 protein | REKKKELKER | 5610 |
| human poly(ADP-ribose) | KRKGDEVDGVDEVAKKKSKK | 5611 |
| polymerase | | |
| steroid hormone receptor | RKCLQAGMNLEARKTKK | 5612 |
| (human) glucocorticoid | | |

[0225] In some cases, the endonuclease may be recombinant (e.g., cloned, expressed, and purified by a suitable method such as expression in E. coli followed by epitope-tag purification). In some cases, the endonuclease may be derived from a bacterium with a 16S rRNA gene having at least about 90% identity to any one of SEQ ID NOs: 5592-5595. The endonuclease may be derived from a species having a 16S rRNA gene at least about 80%, at least about 82%, at least about 83%, at least about 84%, at least about 85%, at least about 86%, at least about 87%, at least about 88%, at least about 89%, at least about 90%, at least about 91%, at least about 92%, at least about 93%, at least about 94%, at least about 95%, at least about 96%, at least about 97%, at least about 98%, or at least about 99% identity to any one of SEQ ID NOs: 5592-5595. The endonuclease may be derived from a species having a 16S rRNA gene substantially identical to any one of SEQ ID NOs: 5592-5595. The endonuclease may be derived from a bacterium belonging to the Phylum Verrucomicrobia or the Phylum Candidatus Peregrinibacteria.

[0226] In some cases, sequence identity may be determined by the BLASTP, CLUSTALW, MUSCLE, MAFFT, Novafold, or Smith-Waterman homology search algorithm. The sequence identity may be determined by the BLASTP algorithm using parameters of a wordlength (W) of 3, an expectation (E) of 10, and using a BLOSUM62 scoring matrix setting gap costs at existence of 11, extension of 1, and using a conditional compositional score matrix adjustment.

[0227] In some cases, the system above may comprise (b) at least one engineered synthetic guide ribonucleic acid (sgRNA) capable of forming a complex with the endonuclease bearing a 5′ targeting region complementary to a desired cleavage sequence. In some cases, the 5′ targeting region may comprises a PAM sequence compatible with the endonuclease. In some cases, the 5′ most nucleotide of the targeting region may be G. In some cases, the 5′ targeting region may be 15-23 nucleotides in length. The guide sequence and the tracr sequence may be supplied as separate ribonucleic acids (RNAs) or a single ribonucleic acid (RNA). The guide RNA may comprise a crRNA tracrRNA binding sequence 3′ to the targeting region. The guide RNA may comprise a tracrRNA sequence preceded by a 4-nucleotide linker 3′ to the crRNA tracrRNA binding region. The sgRNA may comprise, from 5′ to 3′: a non-natural guide nucleic acid sequence capable of hybridizing to a target sequence in a cell; and a tracr sequence. In some cases, the non-natural guide nucleic acid sequence and the tracr sequence are covalently linked.

[0228] In some cases, the tracr sequence may have a particular sequence. The tracr sequence may have at least about 80% to at least about 60-100 (e.g., at least about 60, at least about 65, at least about 70, at least about 75, at least about 80, at least about 85, or at least about 90) consecutive nucleotides of a natural tracrRNA sequence. The tracr sequence may have at least about 80% sequence identity to at least about 60-100 (e.g., at least about 60, at least about 65, at least about 70, at least about 75, at least about 80, at least about 85, or at least about 90) consecutive nucleotides of any one of SEQ ID NOs: 5476-5489. In some cases, the tracrRNA may have at least about 80%, at least about 85%, at least about 90%, at least about 91%, at least about 92%, at least about 93%, at least about 94%, at least about 95%, at least about 96%, at least about 97%, at least about 98%, or at least about 99% identity to at least about 60-90 (e.g., at least about 60, at least about 65, at least about 70, at least about 75, at least about 80, at least about 85, or at least about 90) consecutive nucleotides of any one of SEQ ID NOs: 5476-5489. In some cases, the tracrRNA may be substantially identical to at least about 60-100 (e.g., at least about 60, at least about 65, at least about 70, at least about 75, at least about 80, at least about 85, or at least about 90) consecutive nucleotides of any one of SEQ ID NOs: 5476-5489. The tracrRNA may comprise any of SEQ ID NOs: 5476-5489.

[0229] In some cases, the at least one engineered synthetic guide ribonucleic acid (sgRNA) capable of forming a complex with the endonuclease may comprise a sequence having at least about 80% identity to any one of SEQ ID NOs: 5461-5464. The sgRNA may comprise a sequence having at least about 80%, at least about 85%, at least about 90%, at least about 91%, at least about 92%, at least about 93%, at least about 94%, at least about 95%, at least about 96%, at least about 97%, at least about 98%, or at least about 99% identity to any one of SEQ ID NOs: 5461-5464. The sgRNA may comprise a sequence substantially identical to any one of SEQ ID NOs: 5461-5464.

[0230] In some cases, the system above may comprise two different sgRNAs targeting a first region and a second region for cleavage in a target DNA locus, wherein the second region is 3′ to the first region. In some cases, the system above may comprise a single- or double-stranded DNA repair template comprising from 5′ to 3′: a first homology arm comprising a sequence of at least about 20 (e.g., at least about 40, 80, 120, 150, 200, 300, 500, or 1 kb) nucleotides 5′ to the first region, a synthetic DNA sequence of at least about 10 nucleotides, and a second homology arm comprising a sequence of at least about 20 (e.g., at least about 40, 80, 120, 150, 200, 300, 500, or 1 kb) nucleotides 3′ to the second region.

[0231] In another aspect, the present disclosure provides a method for modifying a target nucleic acid locus. The method may comprise delivering to the target nucleic acid locus any of the non-natural systems disclosed herein, including an enzyme and at least one synthetic guide RNA (sgRNA) disclosed herein. The enzyme may form a complex with the at least one sgRNA, and upon binding of the complex to the target nucleic acid locus, may modify the target nucleic acid locus. Delivering the enzyme to said locus may comprise transfecting a cell with the system or nucleic acids encoding the system. Delivering the nuclease to said locus may comprise electroporating a cell with the system or nucleic acids encoding the system. Delivering the nuclease to said locus may comprise incubating the system in a buffer with a nucleic acid comprising the locus of interest. In some cases, the target nucleic acid locus comprises deoxyribonucleic acid (DNA) or ribonucleic acid (RNA). The target nucleic acid locus may comprise genomic DNA, viral DNA, viral RNA, or bacterial DNA. The target nucleic acid locus may be within a cell. The target nucleic acid locus may be in vitro. The target nucleic acid locus may be within a eukaryotic cell or a prokaryotic cell. The cell may be an animal cell, a human cell, bacterial cell, archaeal cell, or a plant cell. The enzyme may induce a single or double-stranded break at or proximal to the target locus of interest.

[0232] In cases where the target nucleic acid locus may be within a cell, the enzyme may be supplied as a nucleic acid containing an open reading frame encoding the enzyme having a RuvC_III domain having at least about 75% (e.g., at least about 90%, at least about 91%, at least about 92%, at least about 93%, at least about 94%, at least about 95%, at least about 96%, at least about 97%, at least about 98%, at least about 99%) identity to any one of SEQ ID NOs: 1827-2140. The deoxyribonucleic acid (DNA) containing an open reading frame encoding said endonuclease may comprise a sequence substantially identical to any of SEQ ID NOs: 5572-5575 or at variant having at least about 30%, at least about 35%, at least about 40%, at least about 45%, at least about 50%, at least about 55%, at least about 60%, at least about 65%, at least about 70%, at least about 75%, at least about 80%, at least about 85%, at least about 90%, at least about 95%, at least about 96%, at least about 97%, at least about 98%, or at least about 99% identity to any one of SEQ ID NOs: 5572-5575. In some cases, the nucleic acid comprises a promoter to which the open reading frame encoding the endonuclease is operably linked. The promoter may be a CMV, EF1a, SV40, PGK1, Ubc, human beta actin, CAG, TRE, or CaMKIIa promoter. The endonuclease may be supplied as a capped mRNA containing said open reading frame encoding said endonuclease. The endonuclease may be supplied as a translated polypeptide. The at least one engineered sgRNA may be supplied as deoxyribonucleic acid (DNA) containing a gene sequence encoding said at least one engineered sgRNA operably linked to a ribonucleic acid (RNA) pol III promoter. In some cases, the organism may be eukaryotic. In some cases, the organism may be fungal. In some cases, the organism may be human.

[0233] In some cases, the present disclosure may provide for an expression cassette comprising the system disclosed herein, or the nucleic acid described herein. In some cases, the expression cassette or nucleic acid may be supplied as a vector. In some cases, the expression cassette, nucleic acid, or vector may be supplied in a cell. In some cases, the cell is a cell of a bacterium with a 16S rRNA gene having at least about 90% (e.g., at least about 99%) identity to any one of SEQ ID NOs: 5592-5595.

[0234] MG2 Enzymes

[0235] In one aspect, the present disclosure provides for an engineered nuclease system comprising (a) an endonuclease. In some cases, the endonuclease is a Cas endonuclease. In some cases, the endonuclease is a Type II, Class II Cas endonuclease. The endonuclease may comprise a RuvC_III domain, wherein said RuvC_III domain has at least about 70% sequence identity to any one of SEQ ID NOs: 2141-2241. In some cases, the endonuclease may comprise a RuvC_III domain, wherein the RuvC_III domain has at least about 20%, at least about 25%, at least about 30%, at least about 35%, at least about 40%, at least about 45%, at least about 50%, at least about 55%, at least about 60%, at least about 65%, at least about 70%, at least about 75%, at least about 80%, at least about 85%, at least about 90%, at least about 91%, at least about 92%, at least about 93%, at least about 94%, at least about 95%, at least about 96%, at least about 97%, at least about 98%, at least about 99% identity to any one of SEQ ID NOs: 2141-2241. In some cases, the endonuclease may comprise a RuvC_III domain, wherein the substantially identical to any one of SEQ ID NOs: 2141-2142. The endonuclease may comprise a RuvC_III domain having at least about 70% sequence identity to any one of SEQ ID NOs: 2141-2142. In some cases, the endonuclease may comprise a RuvC_III domain having at least about 20%, at least about 25%, at least about 30%, at least about 35%, at least about 40%, at least about 45%, at least about 50%, at least about 55%, at least about 60%, at least about 65%, at least about 70%, at least about 75%, at least about 80%, at least about 85%, at least about 90%, at least about 91%, at least about 92%, at least about 93%, at least about 94%, at least about 95%, at least about 96%, at least about 97%, at least about 98%, at least about 99% identity to any one of SEQ ID NOs: 2141-2142. In some cases, the endonuclease may comprise a RuvC_III domain substantially identical to any one of SEQ ID NOs: 2141-2142.

[0236] The endonuclease may comprise an HNH domain having at least about 70% identity to any one of SEQ ID NOs: 3955-4055. In some cases, the endonuclease may comprise an HNH domain having at least about 70%, at least about 75%, at least about 80%, at least about 85%, at least about 90%, at least about 91%, at least about 92%, at least about 93%, at least about 94%, at least about 95%, at least about 96%, at least about 97%, at least about 98%, or at least about 99% identical to any one of SEQ ID NOs: 3955-4055. The endonuclease may comprise an HNH domain substantially identical to any one of SEQ ID NOs: 3955-4055. The endonuclease may comprise an HNH domain having at least about 70% identity to any one of SEQ ID NOs: 3955-3956. In some cases, the endonuclease may comprise an HNH domain having at least about 70%, at least about 75%, at least about 80%, at least about 85%, at least about 90%, at least about 91%, at least about 92%, at least about 93%, at least about 94%, at least about 95%, at least about 96%, at least about 97%, at least about 98%, or at least about 99% identical to any one of SEQ ID NOs: 3955-3956. The endonuclease may comprise an HNH domain substantially identical to any one of SEQ ID NOs: 3955-3956.

[0237] In some cases, the endonuclease may comprise a variant having at least about 30%, at least about 35%, at least about 40%, at least about 45%, at least about 50%, at least about 55%, at least about 60%, at least about 65%, at least about 70%, at least about 75%, at least about 80%, at least about 85%, at least about 90%, at least about 95%, at least about 96%, at least about 97%, at least about 98%, or at least about 99% identity to any one of SEQ ID NOs: 320-420. In some cases, the endonuclease may be substantially identical to any one of SEQ ID NOs: 320-420. In some cases, the endonuclease may comprise a variant having at least about 30%, at least about 35%, at least about 40%, at least about 45%, at least about 50%, at least about 55%, at least about 60%, at least about 65%, at least about 70%, at least about 75%, at least about 80%, at least about 85%, at least about 90%, at least about 95%, at least about 96%, at least about 97%, at least about 98%, or at least about 99% identity to any one of SEQ ID NOs:320-321. In some cases, the endonuclease may be substantially identical to any one of SEQ ID NOs: 320-321.

[0238] In some cases, the endonuclease may comprise a variant having one or more nuclear localization sequences (NLSs). The NLS may be proximal to the N- or C-terminus of said endonuclease. The NLS may be appended N-terminal or C-terminal to any one of SEQ ID NOs: 320-420, or to a variant having at least about 30%, at least about 35%, at least about 40%, at least about 45%, at least about 50%, at least about 55%, at least about 60%, at least about 65%, at least about 70%, at least about 75%, at least about 80%, at least about 85%, at least about 90%, at least about 95%, at least about 96%, at least about 97%, at least about 98%, or at least about 99% identity to any one of SEQ ID NOs: 320-420. The NLS may be an SV40 large T antigen NLS. The NLS may be a c-myc NLS. The NLS can comprise a sequence with at least about 80%, at least about 85%, at least about 90%, at least about 95%, at least about 99% identity to any one of SEQ ID NOs: 5593-5608. The NLS can comprise a sequence substantially identical to any one of SEQ ID NOs: 5593-5608. The NLS can comprise any of the sequences in Table 1 or a combination thereof.

[0239] In some cases, sequence identity may be determined by the BLASTP, CLUSTALW, MUSCLE, MAFFT, Novafold, or Smith-Waterman homology search algorithm. The sequence identity may be determined by the BLASTP algorithm using parameters of a wordlength (W) of 3, an expectation (E) of 10, and using a BLOSUM62 scoring matrix setting gap costs at existence of 11, extension of 1, and using a conditional compositional score matrix adjustment.

[0240] In some cases, the system above may comprise (b) at least one engineered synthetic guide ribonucleic acid (sgRNA) capable of forming a complex with the endonuclease bearing a 5′ targeting region complementary to a desired cleavage sequence. In some cases, the 5′ targeting region may comprises a PAM sequence compatible with the endonuclease. In some cases, the 5′ most nucleotide of the targeting region may be G. In some cases, the 5′ targeting region may be 15-23 nucleotides in length. The guide sequence and the tracr sequence may be supplied as separate ribonucleic acids (RNAs) or a single ribonucleic acid (RNA). The guide RNA may comprise a crRNA tracrRNA binding sequence 3′ to the targeting region. The guide RNA may comprise a tracrRNA sequence preceded by a 4-nucleotide linker 3′ to the crRNA tracrRNA binding region. The sgRNA may comprise, from 5′ to 3′: a non-natural guide nucleic acid sequence capable of hybridizing to a target sequence in a cell; and a tracr sequence. In some cases, the non-natural guide nucleic acid sequence and the tracr sequence are covalently linked.

[0241] In some cases, the tracr sequence may have a particular sequence. The tracr sequence may have at least about 80% to at least about 60-100 (e.g., at least about 60, at least about 65, at least about 70, at least about 75, at least about 80, at least about 85, or at least about 90) consecutive nucleotides of a natural tracrRNA sequence. The tracr sequence may have at least about 80% sequence identity to at least about 60-100 (e.g., at least about 60, at least about 65, at least about 70, at least about 75, at least about 80, at least about 85, or at least about 90) consecutive nucleotides of any one of SEQ ID NOs: 5490-5494. In some cases, the tracrRNA may have at least about 80%, at least about 85%, at least about 90%, at least about 91%, at least about 92%, at least about 93%, at least about 94%, at least about 95%, at least about 96%, at least about 97%, at least about 98%, or at least about 99% identity to at least about 60-90 (e.g., at least about 60, at least about 65, at least about 70, at least about 75, at least about 80, at least about 85, or at least about 90) consecutive nucleotides of any one of SEQ ID NOs: 5490-5494. In some cases, the tracrRNA may be substantially identical to at least about 60-100 (e.g., at least about 60, at least about 65, at least about 70, at least about 75, at least about 80, at least about 85, or at least about 90) consecutive nucleotides of any one of SEQ ID NOs: 5490-5494. The tracrRNA may comprise any of SEQ ID NOs: 5490-5494.

[0242] In some cases, the at least one engineered synthetic guide ribonucleic acid (sgRNA) capable of forming a complex with the endonuclease may comprise a sequence having at least about 80% identity to SEQ ID NO: 5465. The sgRNA may comprise a sequence having at least about 80%, at least about 85%, at least about 90%, at least about 91%, at least about 92%, at least about 93%, at least about 94%, at least about 95%, at least about 96%, at least about 97%, at least about 98%, or at least about 99% identity to SEQ ID NO: 5465. The sgRNA may comprise a sequence substantially identical to SEQ ID NO: 5465.

[0243] In some cases, the system above may comprise two different sgRNAs targeting a first region and a second region for cleavage in a target DNA locus, wherein the second region is 3′ to the first region. In some cases, the system above may comprise a single- or double-stranded DNA repair template comprising from 5′ to 3′: a first homology arm comprising a sequence of at least about 20 (e.g., at least about 40, 80, 120, 150, 200, 300, 500, or 1 kb) nucleotides 5′ to the first region, a synthetic DNA sequence of at least about 10 nucleotides, and a second homology arm comprising a sequence of at least about 20 (e.g., at least about 40, 80, 120, 150, 200, 300, 500, or 1 kb) nucleotides 3′ to the second region.

[0244] In another aspect, the present disclosure provides a method for modifying a target nucleic acid locus of interest. The method may comprise delivering to the target nucleic acid locus any of the non-natural systems disclosed herein, including an enzyme and at least one synthetic guide RNA (sgRNA) disclosed herein. The enzyme may form a complex with the at least one sgRNA, and upon binding of the complex to the target nucleic acid locus of interest, may modify the target nucleic acid locus of interest. Delivering the enzyme to said locus may comprise transfecting a cell with the system or nucleic acids encoding the system. Delivering the nuclease to said locus may comprise electroporating a cell with the system or nucleic acids encoding the system. Delivering the nuclease to said locus may comprise incubating the system in a buffer with a nucleic acid comprising the locus of interest. In some cases, the target nucleic acid locus comprises deoxyribonucleic acid (DNA) or ribonucleic acid (RNA). The target nucleic acid locus may comprise genomic DNA, viral DNA, viral RNA, or bacterial DNA. The target nucleic acid locus may be within a cell. The target nucleic acid locus may be in vitro. The target nucleic acid locus may be within a eukaryotic cell or a prokaryotic cell. The cell may be an animal cell, a human cell, bacterial cell, archaeal cell, or a plant cell. The enzyme may induce a single or double-stranded break at or proximal to the target locus of interest.

[0245] In cases where the target nucleic acid locus may be within a cell, the enzyme may be supplied as a nucleic acid containing an open reading frame encoding the enzyme having a RuvC_III domain having at least about 75% (e.g., at least about 90%, at least about 91%, at least about 92%, at least about 93%, at least about 94%, at least about 95%, at least about 96%, at least about 97%, at least about 98%, at least about 99%) identity to any one of SEQ ID NOs: 2141-2241. The deoxyribonucleic acid (DNA) containing an open reading frame encoding said endonuclease may comprise a sequence substantially identical to any of SEQ ID NOs: 5576-5577 or at variant having at least about 30%, at least about 35%, at least about 40%, at least about 45%, at least about 50%, at least about 55%, at least about 60%, at least about 65%, at least about 70%, at least about 75%, at least about 80%, at least about 85%, at least about 90%, at least about 95%, at least about 96%, at least about 97%, at least about 98%, or at least about 99% identity to any one of SEQ ID NOs: 5576-5577. In some cases, the nucleic acid comprises a promoter to which the open reading frame encoding the endonuclease is operably linked. The promoter may be a CMV, EF1a, SV40, PGK1, Ubc, human beta actin, CAG, TRE, or CaMKIIa promoter. The endonuclease may be supplied as a capped mRNA containing said open reading frame encoding said endonuclease. The endonuclease may be supplied as a translated polypeptide. The at least one engineered sgRNA may be supplied as deoxyribonucleic acid (DNA) containing a gene sequence encoding said at least one engineered sgRNA operably linked to a ribonucleic acid (RNA) pol III promoter. In some cases, the organism may be eukaryotic. In some cases, the organism may be fungal. In some cases, the organism may be human.

[0246] MG3 Enzymes

[0247] In one aspect, the present disclosure provides for an engineered nuclease system comprising (a) an endonuclease. In some cases, the endonuclease is a Cas endonuclease. In some cases, the endonuclease is a Type II, Class II Cas endonuclease. The endonuclease may comprise a RuvC_III domain, wherein said RuvC_III domain has at least about 70% sequence identity to any one of SEQ ID NOs: 2242-2251. In some cases, the endonuclease may comprise a RuvC_III domain, wherein the RuvC_III domain has at least about 20%, at least about 25%, at least about 30%, at least about 35%, at least about 40%, at least about 45%, at least about 50%, at least about 55%, at least about 60%, at least about 65%, at least about 70%, at least about 75%, at least about 80%, at least about 85%, at least about 90%, at least about 91%, at least about 92%, at least about 93%, at least about 94%, at least about 95%, at least about 96%, at least about 97%, at least about 98%, at least about 99% identity to any one of SEQ ID NOs: 2242-2251. In some cases, the endonuclease may comprise a RuvC_III domain, wherein the substantially identical to any one of SEQ ID NOs: 2242-2251. The endonuclease may comprise a RuvC_III domain having at least about 70% sequence identity to any one of SEQ ID NOs: 2242-2244. In some cases, the endonuclease may comprise a RuvC_III domain having at least about 20%, at least about 25%, at least about 30%, at least about 35%, at least about 40%, at least about 45%, at least about 50%, at least about 55%, at least about 60%, at least about 65%, at least about 70%, at least about 75%, at least about 80%, at least about 85%, at least about 90%, at least about 91%, at least about 92%, at least about 93%, at least about 94%, at least about 95%, at least about 96%, at least about 97%, at least about 98%, at least about 99% identity to any one of SEQ ID NOs: 2242-2244. In some cases, the endonuclease may comprise a RuvC_III domain substantially identical to any one of SEQ ID NOs: 2242-2244.

[0248] The endonuclease may comprise an HNH domain having at least about 70% identity to any one of SEQ ID NOs: 4056-4066. In some cases, the endonuclease may comprise an HNH domain having at least about 70%, at least about 75%, at least about 80%, at least about 85%, at least about 90%, at least about 91%, at least about 92%, at least about 93%, at least about 94%, at least about 95%, at least about 96%, at least about 97%, at least about 98%, or at least about 99% identical to any one of SEQ ID NOs: 4056-4066. The endonuclease may comprise an HNH domain substantially identical to any one of SEQ ID NOs: 4056-4066. The endonuclease may comprise an HNH domain having at least about 70% identity to any one of SEQ ID NOs: 4056-4058. In some cases, the endonuclease may comprise an HNH domain having at least about 70%, at least about 75%, at least about 80%, at least about 85%, at least about 90%, at least about 91%, at least about 92%, at least about 93%, at least about 94%, at least about 95%, at least about 96%, at least about 97%, at least about 98%, or at least about 99% identical to any one of SEQ ID NOs: 4056-4058. The endonuclease may comprise an HNH domain substantially identical to any one of SEQ ID NOs: 4056-4058.

[0249] In some cases, the endonuclease may comprise a variant having at least about 30%, at least about 35%, at least about 40%, at least about 45%, at least about 50%, at least about 55%, at least about 60%, at least about 65%, at least about 70%, at least about 75%, at least about 80%, at least about 85%, at least about 90%, at least about 95%, at least about 96%, at least about 97%, at least about 98%, or at least about 99% identity to any one of SEQ ID NOs: 421-431. In some cases, the endonuclease may be substantially identical to any one of SEQ ID NOs: 421-431. In some cases, the endonuclease may comprise a variant having at least about 30%, at least about 35%, at least about 40%, at least about 45%, at least about 50%, at least about 55%, at least about 60%, at least about 65%, at least about 70%, at least about 75%, at least about 80%, at least about 85%, at least about 90%, at least about 95%, at least about 96%, at least about 97%, at least about 98%, or at least about 99% identity to any one of SEQ ID NOs:421-423. In some cases, the endonuclease may be substantially identical to any one of SEQ ID NOs: 421-423.

[0250] In some cases, the endonuclease may comprise a variant having one or more nuclear localization sequences (NLSs). The NLS may be proximal to the N- or C-terminus of said endonuclease. The NLS may be appended N-terminal or C-terminal to any one of SEQ ID NOs: 421-431, or to a variant having at least about 30%, at least about 35%, at least about 40%, at least about 45%, at least about 50%, at least about 55%, at least about 60%, at least about 65%, at least about 70%, at least about 75%, at least about 80%, at least about 85%, at least about 90%, at least about 95%, at least about 96%, at least about 97%, at least about 98%, or at least about 99% identity to any one of SEQ ID NOs: 421-431. The NLS may be an SV40 large T antigen NLS. The NLS may be a c-myc NLS. The NLS can comprise a sequence with at least about 80%, at least about 85%, at least about 90%, at least about 95%, at least about 99% identity to any one of SEQ ID NOs: 5593-5608. The NLS can comprise a sequence substantially identical to any one of SEQ ID NOs: 5593-5608. The NLS can comprise any of the sequences in Table 1 or a combination thereof.

[0251] In some cases, sequence identity may be determined by the BLASTP, CLUSTALW, MUSCLE, MAFFT, Novafold, or Smith-Waterman homology search algorithm. The sequence identity may be determined by the BLASTP algorithm using parameters of a wordlength (W) of 3, an expectation (E) of 10, and using a BLOSUM62 scoring matrix setting gap costs at existence of 11, extension of 1, and using a conditional compositional score matrix adjustment.

[0252] In some cases, the system above may comprise (b) at least one engineered synthetic guide ribonucleic acid (sgRNA) capable of forming a complex with the endonuclease bearing a 5′ targeting region complementary to a desired cleavage sequence. In some cases, the 5′ targeting region may comprises a PAM sequence compatible with the endonuclease. In some cases, the 5′ most nucleotide of the targeting region may be G. In some cases, the 5′ targeting region may be 15-23 nucleotides in length. The guide sequence and the tracr sequence may be supplied as separate ribonucleic acids (RNAs) or a single ribonucleic acid (RNA). The guide RNA may comprise a crRNA tracrRNA binding sequence 3′ to the targeting region. The guide RNA may comprise a tracrRNA sequence preceded by a 4-nucleotide linker 3′ to the crRNA tracrRNA binding region. The sgRNA may comprise, from 5′ to 3′: a non-natural guide nucleic acid sequence capable of hybridizing to a target sequence in a cell; and a tracr sequence. In some cases, the non-natural guide nucleic acid sequence and the tracr sequence are covalently linked.

[0253] In some cases, the tracr sequence may have a particular sequence. The tracr sequence may have at least about 80% to at least about 60-100 (e.g., at least about 60, at least about 65, at least about 70, at least about 75, at least about 80, at least about 85, or at least about 90) consecutive nucleotides of a natural tracrRNA sequence. The tracr sequence may have at least about 80% sequence identity to at least about 60-100 (e.g., at least about 60, at least about 65, at least about 70, at least about 75, at least about 80, at least about 85, or at least about 90) consecutive nucleotides of any one of SEQ ID NOs: 5495-5502. In some cases, the tracrRNA may have at least about 80%, at least about 85%, at least about 90%, at least about 91%, at least about 92%, at least about 93%, at least about 94%, at least about 95%, at least about 96%, at least about 97%, at least about 98%, or at least about 99% identity to at least about 60-90 (e.g., at least about 60, at least about 65, at least about 70, at least about 75, at least about 80, at least about 85, or at least about 90) consecutive nucleotides of any one of SEQ ID NOs: 5495-5502. In some cases, the tracrRNA may be substantially identical to at least about 60-100 (e.g., at least about 60, at least about 65, at least about 70, at least about 75, at least about 80, at least about 85, or at least about 90) consecutive nucleotides of any one of SEQ ID NOs: 5495-5502. The tracrRNA may comprise any of SEQ ID NOs: 5495-5502.

[0254] In some cases, the at least one engineered synthetic guide ribonucleic acid (sgRNA) capable of forming a complex with the endonuclease may comprise a sequence having at least about 80% identity to any one of SEQ ID NOs: 5466-5467. The sgRNA may comprise a sequence having at least about 80%, at least about 85%, at least about 90%, at least about 91%, at least about 92%, at least about 93%, at least about 94%, at least about 95%, at least about 96%, at least about 97%, at least about 98%, or at least about 99% identity to any one of SEQ ID NOs: 5466-5467. The sgRNA may comprise a sequence substantially identical to any one of SEQ ID NOs: 5466-5467.

[0255] In some cases, the system above may comprise two different sgRNAs targeting a first region and a second region for cleavage in a target DNA locus, wherein the second region is 3′ to the first region. In some cases, the system above may comprise a single- or double-stranded DNA repair template comprising from 5′ to 3′: a first homology arm comprising a sequence of at least about 20 (e.g., at least about 40, 80, 120, 150, 200, 300, 500, or 1 kb) nucleotides 5′ to the first region, a synthetic DNA sequence of at least about 10 nucleotides, and a second homology arm comprising a sequence of at least about 20 (e.g., at least about 40, 80, 120, 150, 200, 300, 500, or 1 kb) nucleotides 3′ to the second region.

[0256] In another aspect, the present disclosure provides a method for modifying a target nucleic acid locus of interest. The method may comprise delivering to the target nucleic acid locus any of the non-natural systems disclosed herein, including an enzyme and at least one synthetic guide RNA (sgRNA) disclosed herein. The enzyme may form a complex with the at least one sgRNA, and upon binding of the complex to the target nucleic acid locus of interest, may modify the target nucleic acid locus of interest. Delivering the enzyme to said locus may comprise transfecting a cell with the system or nucleic acids encoding the system. Delivering the nuclease to said locus may comprise electroporating a cell with the system or nucleic acids encoding the system. Delivering the nuclease to said locus may comprise incubating the system in a buffer with a nucleic acid comprising the locus of interest. In some cases, the target nucleic acid locus comprises deoxyribonucleic acid (DNA) or ribonucleic acid (RNA). The target nucleic acid locus may comprise genomic DNA, viral DNA, viral RNA, or bacterial DNA. The target nucleic acid locus may be within a cell. The target nucleic acid locus may be in vitro. The target nucleic acid locus may be within a eukaryotic cell or a prokaryotic cell. The cell may be an animal cell, a human cell, bacterial cell, archaeal cell, or a plant cell. The enzyme may induce a single or double-stranded break at or proximal to the target locus of interest.

[0257] In cases where the target nucleic acid locus may be within a cell, the enzyme may be supplied as a nucleic acid containing an open reading frame encoding the enzyme having a RuvC_III domain having at least about 75% (e.g., at least about 90%, at least about 91%, at least about 92%, at least about 93%, at least about 94%, at least about 95%, at least about 96%, at least about 97%, at least about 98%, at least about 99%) identity to any one of SEQ ID NOs: 2242-2251. The deoxyribonucleic acid (DNA) containing an open reading frame encoding said endonuclease may comprise a sequence substantially identical to any of SEQ ID NOs: 5578-5580 or at variant having at least about 30%, at least about 35%, at least about 40%, at least about 45%, at least about 50%, at least about 55%, at least about 60%, at least about 65%, at least about 70%, at least about 75%, at least about 80%, at least about 85%, at least about 90%, at least about 95%, at least about 96%, at least about 97%, at least about 98%, or at least about 99% identity to any one of SEQ ID NOs: 5578-5580. In some cases, the nucleic acid comprises a promoter to which the open reading frame encoding the endonuclease is operably linked. The promoter may be a CMV, EF1a, SV40, PGK1, Ubc, human beta actin, CAG, TRE, or CaMKIIa promoter. The endonuclease may be supplied as a capped mRNA containing said open reading frame encoding said endonuclease. The endonuclease may be supplied as a translated polypeptide. The at least one engineered sgRNA may be supplied as deoxyribonucleic acid (DNA) containing a gene sequence encoding said at least one engineered sgRNA operably linked to a ribonucleic acid (RNA) pol III promoter. In some cases, the organism may be eukaryotic. In some cases, the organism may be fungal. In some cases, the organism may be human.

[0258] MG4 Enzymes

[0259] In one aspect, the present disclosure provides for an engineered nuclease system comprising (a) an endonuclease. In some cases, the endonuclease is a Cas endonuclease. In some cases, the endonuclease is a Type II, Class II Cas endonuclease. The endonuclease may comprise a RuvC_III domain, wherein said RuvC_III domain has at least about 70% sequence identity to any one of SEQ ID NOs: 2253-2481. In some cases, the endonuclease may comprise a RuvC_III domain, wherein the RuvC_III domain has at least about 20%, at least about 25%, at least about 30%, at least about 35%, at least about 40%, at least about 45%, at least about 50%, at least about 55%, at least about 60%, at least about 65%, at least about 70%, at least about 75%, at least about 80%, at least about 85%, at least about 90%, at least about 91%, at least about 92%, at least about 93%, at least about 94%, at least about 95%, at least about 96%, at least about 97%, at least about 98%, at least about 99% identity to any one of SEQ ID NOs: 2253-2481. In some cases, the endonuclease may comprise a RuvC_III domain, wherein the substantially identical to any one of SEQ ID NOs: 2253-2481. The endonuclease may comprise a RuvC_III domain having at least about 70% sequence identity to any one of SEQ ID NOs: 2253-2481. In some cases, the endonuclease may comprise a RuvC_III domain having at least about 20%, at least about 25%, at least about 30%, at least about 35%, at least about 40%, at least about 45%, at least about 50%, at least about 55%, at least about 60%, at least about 65%, at least about 70%, at least about 75%, at least about 80%, at least about 85%, at least about 90%, at least about 91%, at least about 92%, at least about 93%, at least about 94%, at least about 95%, at least about 96%, at least about 97%, at least about 98%, at least about 99% identity to any one of SEQ ID NOs: 2253-2481. In some cases, the endonuclease may comprise a RuvC_III domain substantially identical to any one of SEQ ID NOs: 2253-2481.

[0260] The endonuclease may comprise an HNH domain having at least about 70% identity to any one of SEQ ID NOs: 4067-4295. In some cases, the endonuclease may comprise an HNH domain having at least about 70%, at least about 75%, at least about 80%, at least about 85%, at least about 90%, at least about 91%, at least about 92%, at least about 93%, at least about 94%, at least about 95%, at least about 96%, at least about 97%, at least about 98%, or at least about 99% identical to any one of SEQ ID NOs: 4067-4295. The endonuclease may comprise an HNH domain substantially identical to any one of SEQ ID NOs: 4067-4295. The endonuclease may comprise an HNH domain having at least about 70% identity to any one of SEQ ID NOs: 4067-4295. In some cases, the endonuclease may comprise an HNH domain having at least about 70%, at least about 75%, at least about 80%, at least about 85%, at least about 90%, at least about 91%, at least about 92%, at least about 93%, at least about 94%, at least about 95%, at least about 96%, at least about 97%, at least about 98%, or at least about 99% identical to any one of SEQ ID NOs: 4067-4295. The endonuclease may comprise an HNH domain substantially identical to any one of SEQ ID NOs: 4067-4295.

[0261] In some cases, the endonuclease may comprise a variant having at least about 30%, at least about 35%, at least about 40%, at least about 45%, at least about 50%, at least about 55%, at least about 60%, at least about 65%, at least about 70%, at least about 75%, at least about 80%, at least about 85%, at least about 90%, at least about 95%, at least about 96%, at least about 97%, at least about 98%, or at least about 99% identity to any one of SEQ ID NOs: 432-660. In some cases, the endonuclease may be substantially identical to any one of SEQ ID NOs: 432-660. In some cases, the endonuclease may comprise a variant having at least about 30%, at least about 35%, at least about 40%, at least about 45%, at least about 50%, at least about 55%, at least about 60%, at least about 65%, at least about 70%, at least about 75%, at least about 80%, at least about 85%, at least about 90%, at least about 95%, at least about 96%, at least about 97%, at least about 98%, or at least about 99% identity to any one of SEQ ID NOs: 432-660. In some cases, the endonuclease may be substantially identical to any one of SEQ ID NOs: 432-660.

[0262] In some cases, the endonuclease may comprise a variant having one or more nuclear localization sequences (NLSs). The NLS may be proximal to the N- or C-terminus of said endonuclease. The NLS may be appended N-terminal or C-terminal to any one of SEQ ID NOs: 432-660, or to a variant having at least about 30%, at least about 35%, at least about 40%, at least about 45%, at least about 50%, at least about 55%, at least about 60%, at least about 65%, at least about 70%, at least about 75%, at least about 80%, at least about 85%, at least about 90%, at least about 95%, at least about 96%, at least about 97%, at least about 98%, or at least about 99% identity to any one of SEQ ID NOs: 432-660. The NLS may be an SV40 large T antigen NLS. The NLS may be a c-myc NLS. The NLS can comprise a sequence with at least about 80%, at least about 85%, at least about 90%, at least about 95%, at least about 99% identity to any one of SEQ ID NOs: 5593-5608. The NLS can comprise a sequence substantially identical to any one of SEQ ID NOs: 5593-5608. The NLS can comprise any of the sequences in Table 1 or a combination thereof.

[0263] In some cases, sequence identity may be determined by the BLASTP, CLUSTALW, MUSCLE, MAFFT, Novafold, or Smith-Waterman homology search algorithm. The sequence identity may be determined by the BLASTP algorithm using parameters of a wordlength (W) of 3, an expectation (E) of 10, and using a BLOSUM62 scoring matrix setting gap costs at existence of 11, extension of 1, and using a conditional compositional score matrix adjustment.

[0264] In some cases, the system above may comprise (b) at least one engineered synthetic guide ribonucleic acid (sgRNA) capable of forming a complex with the endonuclease bearing a 5′ targeting region complementary to a desired cleavage sequence. In some cases, the 5′ targeting region may comprises a PAM sequence compatible with the endonuclease. In some cases, the 5′ most nucleotide of the targeting region may be G. In some cases, the 5′ targeting region may be 15-23 nucleotides in length. The guide sequence and the tracr sequence may be supplied as separate ribonucleic acids (RNAs) or a single ribonucleic acid (RNA). The guide RNA may comprise a crRNA tracrRNA binding sequence 3′ to the targeting region. The guide RNA may comprise a tracrRNA sequence preceded by a 4-nucleotide linker 3′ to the crRNA tracrRNA binding region. The sgRNA may comprise, from 5′ to 3′: a non-natural guide nucleic acid sequence capable of hybridizing to a target sequence in a cell; and a tracr sequence. In some cases, the non-natural guide nucleic acid sequence and the tracr sequence are covalently linked.

[0265] In some cases, the tracr sequence may have a particular sequence. The tracr sequence may have at least about 80% to at least about 60-100 (e.g., at least about 60, at least about 65, at least about 70, at least about 75, at least about 80, at least about 85, or at least about 90) consecutive nucleotides of a natural tracrRNA sequence. The tracr sequence may have at least about 80% sequence identity to at least about 60-100 (e.g., at least about 60, at least about 65, at least about 70, at least about 75, at least about 80, at least about 85, or at least about 90) consecutive nucleotides of SEQ ID NO: 5503. In some cases, the tracrRNA may have at least about 80%, at least about 85%, at least about 90%, at least about 91%, at least about 92%, at least about 93%, at least about 94%, at least about 95%, at least about 96%, at least about 97%, at least about 98%, or at least about 99% identity to at least about 60-90 (e.g., at least about 60, at least about 65, at least about 70, at least about 75, at least about 80, at least about 85, or at least about 90) consecutive nucleotides of SEQ ID NO: 5503. In some cases, the tracrRNA may be substantially identical to at least about 60-100 (e.g., at least about 60, at least about 65, at least about 70, at least about 75, at least about 80, at least about 85, or at least about 90) consecutive nucleotides of SEQ ID NO: 5503. The tracrRNA may comprise SEQ ID NO: 5503.

[0266] In some cases, the at least one engineered synthetic guide ribonucleic acid (sgRNA) capable of forming a complex with the endonuclease may comprise a sequence having at least about 80% identity to SEQ ID NO: 5468. The sgRNA may comprise a sequence having at least about 80%, at least about 85%, at least about 90%, at least about 91%, at least about 92%, at least about 93%, at least about 94%, at least about 95%, at least about 96%, at least about 97%, at least about 98%, or at least about 99% identity to SEQ ID NO: 5468. The sgRNA may comprise a sequence substantially identical to SEQ ID NO: 5468.

[0267] In some cases, the system above may comprise two different sgRNAs targeting a first region and a second region for cleavage in a target DNA locus, wherein the second region is 3′ to the first region. In some cases, the system above may comprise a single- or double-stranded DNA repair template comprising from 5′ to 3′: a first homology arm comprising a sequence of at least about 20 (e.g., at least about 40, 80, 120, 150, 200, 300, 500, or 1 kb) nucleotides 5′ to the first region, a synthetic DNA sequence of at least about 10 nucleotides, and a second homology arm comprising a sequence of at least about 20 (e.g., at least about 40, 80, 120, 150, 200, 300, 500, or 1 kb) nucleotides 3′ to the second region.

[0268] In another aspect, the present disclosure provides a method for modifying a target nucleic acid locus of interest. The method may comprise delivering to the target nucleic acid locus any of the non-natural systems disclosed herein, including an enzyme and at least one synthetic guide RNA (sgRNA) disclosed herein. The enzyme may form a complex with the at least one sgRNA, and upon binding of the complex to the target nucleic acid locus of interest, may modify the target nucleic acid locus of interest. Delivering the enzyme to said locus may comprise transfecting a cell with the system or nucleic acids encoding the system. Delivering the nuclease to said locus may comprise electroporating a cell with the system or nucleic acids encoding the system. Delivering the nuclease to said locus may comprise incubating the system in a buffer with a nucleic acid comprising the locus of interest. In some cases, the target nucleic acid locus comprises deoxyribonucleic acid (DNA) or ribonucleic acid (RNA). The target nucleic acid locus may comprise genomic DNA, viral DNA, viral RNA, or bacterial DNA. The target nucleic acid locus may be within a cell. The target nucleic acid locus may be in vitro. The target nucleic acid locus may be within a eukaryotic cell or a prokaryotic cell. The cell may be an animal cell, a human cell, bacterial cell, archaeal cell, or a plant cell. The enzyme may induce a single or double-stranded break at or proximal to the target locus of interest.

[0269] In cases where the target nucleic acid locus may be within a cell, the enzyme may be supplied as a nucleic acid containing an open reading frame encoding the enzyme having a RuvC_III domain having at least about 75% (e.g., at least about 90%, at least about 91%, at least about 92%, at least about 93%, at least about 94%, at least about 95%, at least about 96%, at least about 97%, at least about 98%, at least about 99%) identity to any one of SEQ ID NOs: 2253-2481. In some cases, the nucleic acid comprises a promoter to which the open reading frame encoding the endonuclease is operably linked. The promoter may be a CMV, EF1a, SV40, PGK1, Ubc, human beta actin, CAG, TRE, or CaMKIIa promoter. The endonuclease may be supplied as a capped mRNA containing said open reading frame encoding said endonuclease. The endonuclease may be supplied as a translated polypeptide. The at least one engineered sgRNA may be supplied as deoxyribonucleic acid (DNA) containing a gene sequence encoding said at least one engineered sgRNA operably linked to a ribonucleic acid (RNA) pol III promoter. In some cases, the organism may be eukaryotic. In some cases, the organism may be fungal. In some cases, the organism may be human.

[0270] MG6 Enzymes

[0271] In one aspect, the present disclosure provides for an engineered nuclease system comprising (a) an endonuclease. In some cases, the endonuclease is a Cas endonuclease. In some cases, the endonuclease is a Type II, Class II Cas endonuclease. The endonuclease may comprise a RuvC_III domain, wherein said RuvC_III domain has at least about 70% sequence identity to any one of SEQ ID NOs: 2482-2489. In some cases, the endonuclease may comprise a RuvC_III domain, wherein the RuvC_III domain has at least about 20%, at least about 25%, at least about 30%, at least about 35%, at least about 40%, at least about 45%, at least about 50%, at least about 55%, at least about 60%, at least about 65%, at least about 70%, at least about 75%, at least about 80%, at least about 85%, at least about 90%, at least about 91%, at least about 92%, at least about 93%, at least about 94%, at least about 95%, at least about 96%, at least about 97%, at least about 98%, at least about 99% identity to any one of SEQ ID NOs: 2482-2489. In some cases, the endonuclease may comprise a RuvC_III domain, wherein the substantially identical to any one of SEQ ID NOs: 2482-2489.

[0272] The endonuclease may comprise an HNH domain having at least about 70% identity to any one of SEQ ID NOs: 4296-4303. In some cases, the endonuclease may comprise an HNH domain having at least about 70%, at least about 75%, at least about 80%, at least about 85%, at least about 90%, at least about 91%, at least about 92%, at least about 93%, at least about 94%, at least about 95%, at least about 96%, at least about 97%, at least about 98%, or at least about 99% identical to any one of SEQ ID NOs: 4296-4303. The endonuclease may comprise an HNH domain substantially identical to any one of SEQ ID NOs: 4056-4066.

[0273] In some cases, the endonuclease may comprise a variant having at least about 30%, at least about 35%, at least about 40%, at least about 45%, at least about 50%, at least about 55%, at least about 60%, at least about 65%, at least about 70%, at least about 75%, at least about 80%, at least about 85%, at least about 90%, at least about 95%, at least about 96%, at least about 97%, at least about 98%, or at least about 99% identity to any one of SEQ ID NOs: 661-668. In some cases, the endonuclease may be substantially identical to any one of SEQ ID NOs: 661-668.

[0274] In some cases, the endonuclease may comprise a variant having one or more nuclear localization sequences (NLSs). The NLS may be proximal to the N- or C-terminus of said endonuclease. The NLS may be appended N-terminal or C-terminal to any one of SEQ ID NOs: 661-668, or to a variant having at least about 30%, at least about 35%, at least about 40%, at least about 45%, at least about 50%, at least about 55%, at least about 60%, at least about 65%, at least about 70%, at least about 75%, at least about 80%, at least about 85%, at least about 90%, at least about 95%, at least about 96%, at least about 97%, at least about 98%, or at least about 99% identity to any one of SEQ ID NOs: 661-668. The NLS may be an SV40 large T antigen NLS. The NLS may be a c-myc NLS. The NLS can comprise a sequence with at least about 80%, at least about 85%, at least about 90%, at least about 95%, at least about 99% identity to any one of SEQ ID NOs: 5593-5608. The NLS can comprise a sequence substantially identical to any one of SEQ ID NOs: 5593-5608. The NLS can comprise any of the sequences in Table 1 or a combination thereof.

[0275] In some cases, sequence identity may be determined by the BLASTP, CLUSTALW, MUSCLE, MAFFT, Novafold, or Smith-Waterman homology search algorithm. The sequence identity may be determined by the BLASTP algorithm using parameters of a wordlength (W) of 3, an expectation (E) of 10, and using a BLOSUM62 scoring matrix setting gap costs at existence of 11, extension of 1, and using a conditional compositional score matrix adjustment.

[0276] In some cases, the system above may comprise (b) at least one engineered synthetic guide ribonucleic acid (sgRNA) capable of forming a complex with the endonuclease bearing a 5′ targeting region complementary to a desired cleavage sequence. In some cases, the 5′ targeting region may comprises a PAM sequence compatible with the endonuclease. In some cases, the 5′ most nucleotide of the targeting region may be G. In some cases, the 5′ targeting region may be 15-23 nucleotides in length. The guide sequence and the tracr sequence may be supplied as separate ribonucleic acids (RNAs) or a single ribonucleic acid (RNA). The guide RNA may comprise a crRNA tracrRNA binding sequence 3′ to the targeting region. The guide RNA may comprise a tracrRNA sequence preceded by a 4-nucleotide linker 3′ to the crRNA tracrRNA binding region. The sgRNA may comprise, from 5′ to 3′: a non-natural guide nucleic acid sequence capable of hybridizing to a target sequence in a cell; and a tracr sequence. In some cases, the non-natural guide nucleic acid sequence and the tracr sequence are covalently linked.

[0277] In some cases, the tracr sequence may have a particular sequence. The tracr sequence may have at least about 80% to at least about 60-100 (e.g., at least about 60, at least about 65, at least about 70, at least about 75, at least about 80, at least about 85, or at least about 90) consecutive nucleotides of a natural tracrRNA sequence.

[0278] In some cases, the system above may comprise two different guide RNAs targeting a first region and a second region for cleavage in a target DNA locus, wherein the second region is 3′ to the first region. In some cases, the system above may comprise a single- or double-stranded DNA repair template comprising from 5′ to 3′: a first homology arm comprising a sequence of at least about 20 (e.g., at least about 40, 80, 120, 150, 200, 300, 500, or 1 kb) nucleotides 5′ to the first region, a synthetic DNA sequence of at least about 10 nucleotides, and a second homology arm comprising a sequence of at least about 20 (e.g., at least about 40, 80, 120, 150, 200, 300, 500, or 1 kb) nucleotides 3′ to the second region.

[0279] In another aspect, the present disclosure provides a method for modifying a target nucleic acid locus of interest. The method may comprise delivering to the target nucleic acid locus any of the non-natural systems disclosed herein, including an enzyme and at least one synthetic guide RNA (sgRNA) disclosed herein. The enzyme may form a complex with the at least one sgRNA, and upon binding of the complex to the target nucleic acid locus of interest, may modify the target nucleic acid locus of interest. Delivering the enzyme to said locus may comprise transfecting a cell with the system or nucleic acids encoding the system. Delivering the nuclease to said locus may comprise electroporating a cell with the system or nucleic acids encoding the system. Delivering the nuclease to said locus may comprise incubating the system in a buffer with a nucleic acid comprising the locus of interest. In some cases, the target nucleic acid locus comprises deoxyribonucleic acid (DNA) or ribonucleic acid (RNA). The target nucleic acid locus may comprise genomic DNA, viral DNA, viral RNA, or bacterial DNA. The target nucleic acid locus may be within a cell. The target nucleic acid locus may be in vitro. The target nucleic acid locus may be within a eukaryotic cell or a prokaryotic cell. The cell may be an animal cell, a human cell, bacterial cell, archaeal cell, or a plant cell. The enzyme may induce a single or double-stranded break at or proximal to the target locus of interest.

[0280] In cases where the target nucleic acid locus may be within a cell, the enzyme may be supplied as a nucleic acid containing an open reading frame encoding the enzyme having a RuvC_III domain having at least about 75% (e.g., at least about 90%, at least about 91%, at least about 92%, at least about 93%, at least about 94%, at least about 95%, at least about 96%, at least about 97%, at least about 98%, at least about 99%) identity to any one of SEQ ID NOs: 2482-2489. In some cases, the nucleic acid comprises a promoter to which the open reading frame encoding the endonuclease is operably linked. The promoter may be a CMV, EF1a, SV40, PGK1, Ubc, human beta actin, CAG, TRE, or CaMKIIa promoter. The endonuclease may be supplied as a capped mRNA containing said open reading frame encoding said endonuclease. The endonuclease may be supplied as a translated polypeptide. The at least one engineered sgRNA may be supplied as deoxyribonucleic acid (DNA) containing a gene sequence encoding said at least one engineered sgRNA operably linked to a ribonucleic acid (RNA) pol III promoter. In some cases, the organism may be eukaryotic. In some cases, the organism may be fungal. In some cases, the organism may be human.

[0281] MG7 Enzymes

[0282] In one aspect, the present disclosure provides for an engineered nuclease system comprising (a) an endonuclease. In some cases, the endonuclease is a Cas endonuclease. In some cases, the endonuclease is a Type II, Class II Cas endonuclease. The endonuclease may comprise a RuvC_III domain, wherein said RuvC_III domain has at least about 70% sequence identity to any one of SEQ ID NOs: 2490-2498. In some cases, the endonuclease may comprise a RuvC_III domain, wherein the RuvC_III domain has at least about 20%, at least about 25%, at least about 30%, at least about 35%, at least about 40%, at least about 45%, at least about 50%, at least about 55%, at least about 60%, at least about 65%, at least about 70%, at least about 75%, at least about 80%, at least about 85%, at least about 90%, at least about 91%, at least about 92%, at least about 93%, at least about 94%, at least about 95%, at least about 96%, at least about 97%, at least about 98%, at least about 99% identity to any one of SEQ ID NOs: 2490-2498. In some cases, the endonuclease may comprise a RuvC_III domain, wherein the substantially identical to any one of SEQ ID NOs: 2490-2498. The endonuclease may comprise a RuvC_III domain having at least about 70% sequence identity to any one of SEQ ID NOs: 2490-2498. In some cases, the endonuclease may comprise a RuvC_III domain having at least about 20%, at least about 25%, at least about 30%, at least about 35%, at least about 40%, at least about 45%, at least about 50%, at least about 55%, at least about 60%, at least about 65%, at least about 70%, at least about 75%, at least about 80%, at least about 85%, at least about 90%, at least about 91%, at least about 92%, at least about 93%, at least about 94%, at least about 95%, at least about 96%, at least about 97%, at least about 98%, at least about 99% identity to any one of SEQ ID NOs: 2490-2498. In some cases, the endonuclease may comprise a RuvC_III domain substantially identical to any one of SEQ ID NOs: 2490-2498.

[0283] The endonuclease may comprise an HNH domain having at least about 70% identity to any one of SEQ ID NOs: 4304-4312. In some cases, the endonuclease may comprise an HNH domain having at least about 70%, at least about 75%, at least about 80%, at least about 85%, at least about 90%, at least about 91%, at least about 92%, at least about 93%, at least about 94%, at least about 95%, at least about 96%, at least about 97%, at least about 98%, or at least about 99% identical to any one of SEQ ID NOs: 4304-4312. The endonuclease may comprise an HNH domain substantially identical to any one of SEQ ID NOs: 4304-4312. The endonuclease may comprise an HNH domain having at least about 70% identity to any one of SEQ ID NOs: 4304-4312. In some cases, the endonuclease may comprise an HNH domain having at least about 70%, at least about 75%, at least about 80%, at least about 85%, at least about 90%, at least about 91%, at least about 92%, at least about 93%, at least about 94%, at least about 95%, at least about 96%, at least about 97%, at least about 98%, or at least about 99% identical to any one of SEQ ID NOs: 4304-4312. The endonuclease may comprise an HNH domain substantially identical to any one of SEQ ID NOs: 4304-4312.

[0284] In some cases, the endonuclease may comprise a variant having at least about 30%, at least about 35%, at least about 40%, at least about 45%, at least about 50%, at least about 55%, at least about 60%, at least about 65%, at least about 70%, at least about 75%, at least about 80%, at least about 85%, at least about 90%, at least about 95%, at least about 96%, at least about 97%, at least about 98%, or at least about 99% identity to any one of SEQ ID NOs: 669-677. In some cases, the endonuclease may be substantially identical to any one of SEQ ID NOs: 669-677. In some cases, the endonuclease may comprise a variant having at least about 30%, at least about 35%, at least about 40%, at least about 45%, at least about 50%, at least about 55%, at least about 60%, at least about 65%, at least about 70%, at least about 75%, at least about 80%, at least about 85%, at least about 90%, at least about 95%, at least about 96%, at least about 97%, at least about 98%, or at least about 99% identity to any one of SEQ ID NOs: 669-677. In some cases, the endonuclease may be substantially identical to any one of SEQ ID NOs: 669-677.

[0285] In some cases, the endonuclease may comprise a variant having one or more nuclear localization sequences (NLSs). The NLS may be proximal to the N- or C-terminus of said endonuclease. The NLS may be appended N-terminal or C-terminal to any one of SEQ ID NOs: 669-677, or to a variant having at least about 30%, at least about 35%, at least about 40%, at least about 45%, at least about 50%, at least about 55%, at least about 60%, at least about 65%, at least about 70%, at least about 75%, at least about 80%, at least about 85%, at least about 90%, at least about 95%, at least about 96%, at least about 97%, at least about 98%, or at least about 99% identity to any one of SEQ ID NOs: 669-677. The NLS may be an SV40 large T antigen NLS. The NLS may be a c-myc NLS. The NLS can comprise a sequence with at least about 80%, at least about 85%, at least about 90%, at least about 95%, at least about 99% identity to any one of SEQ ID NOs: 5593-5608. The NLS can comprise a sequence substantially identical to any one of SEQ ID NOs: 5593-5608. The NLS can comprise any of the sequences in Table 1 or a combination thereof.

[0286] In some cases, sequence identity may be determined by the BLASTP, CLUSTALW, MUSCLE, MAFFT, Novafold, or Smith-Waterman homology search algorithm. The sequence identity may be determined by the BLASTP algorithm using parameters of a wordlength (W) of 3, an expectation (E) of 10, and using a BLOSUM62 scoring matrix setting gap costs at existence of 11, extension of 1, and using a conditional compositional score matrix adjustment.

[0287] In some cases, the system above may comprise (b) at least one engineered synthetic guide ribonucleic acid (sgRNA) capable of forming a complex with the endonuclease bearing a 5′ targeting region complementary to a desired cleavage sequence. In some cases, the 5′ targeting region may comprises a PAM sequence compatible with the endonuclease. In some cases, the 5′ most nucleotide of the targeting region may be G. In some cases, the 5′ targeting region may be 15-23 nucleotides in length. The guide sequence and the tracr sequence may be supplied as separate ribonucleic acids (RNAs) or a single ribonucleic acid (RNA). The guide RNA may comprise a crRNA tracrRNA binding sequence 3′ to the targeting region. The guide RNA may comprise a tracrRNA sequence preceded by a 4-nucleotide linker 3′ to the crRNA tracrRNA binding region. The sgRNA may comprise, from 5′ to 3′: a non-natural guide nucleic acid sequence capable of hybridizing to a target sequence in a cell; and a tracr sequence. In some cases, the non-natural guide nucleic acid sequence and the tracr sequence are covalently linked.

[0288] In some cases, the tracr sequence may have a particular sequence. The tracr sequence may have at least about 80% to at least about 60-100 (e.g., at least about 60, at least about 65, at least about 70, at least about 75, at least about 80, at least about 85, or at least about 90) consecutive nucleotides of a natural tracrRNA sequence. The tracr sequence may have at least about 80% sequence identity to at least about 60-100 (e.g., at least about 60, at least about 65, at least about 70, at least about 75, at least about 80, at least about 85, or at least about 90) consecutive nucleotides of SEQ ID NO: 5504. In some cases, the tracrRNA may have at least about 80%, at least about 85%, at least about 90%, at least about 91%, at least about 92%, at least about 93%, at least about 94%, at least about 95%, at least about 96%, at least about 97%, at least about 98%, or at least about 99% identity to at least about 60-90 (e.g., at least about 60, at least about 65, at least about 70, at least about 75, at least about 80, at least about 85, or at least about 90) consecutive nucleotides of SEQ ID NO: 5504. In some cases, the tracrRNA may be substantially identical to at least about 60-100 (e.g., at least about 60, at least about 65, at least about 70, at least about 75, at least about 80, at least about 85, or at least about 90) consecutive nucleotides of SEQ ID NO: 5504. The tracrRNA may comprise SEQ ID NO: 5504.

[0289] In some cases, the system above may comprise two different sgRNAs targeting a first region and a second region for cleavage in a target DNA locus, wherein the second region is 3′ to the first region. In some cases, the system above may comprise a single- or double-stranded DNA repair template comprising from 5′ to 3′: a first homology arm comprising a sequence of at least about 20 (e.g., at least about 40, 80, 120, 150, 200, 300, 500, or 1 kb) nucleotides 5′ to the first region, a synthetic DNA sequence of at least about 10 nucleotides, and a second homology arm comprising a sequence of at least about 20 (e.g., at least about 40, 80, 120, 150, 200, 300, 500, or 1 kb) nucleotides 3′ to the second region.

[0290] In another aspect, the present disclosure provides a method for modifying a target nucleic acid locus of interest. The method may comprise delivering to the target nucleic acid locus any of the non-natural systems disclosed herein, including an enzyme and at least one synthetic guide RNA (sgRNA) disclosed herein. The enzyme may form a complex with the at least one sgRNA, and upon binding of the complex to the target nucleic acid locus of interest, may modify the target nucleic acid locus of interest. Delivering the enzyme to said locus may comprise transfecting a cell with the system or nucleic acids encoding the system. Delivering the nuclease to said locus may comprise electroporating a cell with the system or nucleic acids encoding the system. Delivering the nuclease to said locus may comprise incubating the system in a buffer with a nucleic acid comprising the locus of interest. In some cases, the target nucleic acid locus comprises deoxyribonucleic acid (DNA) or ribonucleic acid (RNA). The target nucleic acid locus may comprise genomic DNA, viral DNA, viral RNA, or bacterial DNA. The target nucleic acid locus may be within a cell. The target nucleic acid locus may be in vitro. The target nucleic acid locus may be within a eukaryotic cell or a prokaryotic cell. The cell may be an animal cell, a human cell, bacterial cell, archaeal cell, or a plant cell. The enzyme may induce a single or double-stranded break at or proximal to the target locus of interest.

[0291] In cases where the target nucleic acid locus may be within a cell, the enzyme may be supplied as a nucleic acid containing an open reading frame encoding the enzyme having a RuvC_III domain having at least about 75% (e.g., at least about 90%, at least about 91%, at least about 92%, at least about 93%, at least about 94%, at least about 95%, at least about 96%, at least about 97%, at least about 98%, at least about 99%) identity to any one of SEQ ID NOs: 2490-2498. In some cases, the nucleic acid comprises a promoter to which the open reading frame encoding the endonuclease is operably linked. The promoter may be a CMV, EF1a, SV40, PGK1, Ubc, human beta actin, CAG, TRE, or CaMKIIa promoter. The endonuclease may be supplied as a capped mRNA containing said open reading frame encoding said endonuclease. The endonuclease may be supplied as a translated polypeptide. The at least one engineered sgRNA may be supplied as deoxyribonucleic acid (DNA) containing a gene sequence encoding said at least one engineered sgRNA operably linked to a ribonucleic acid (RNA) pol III promoter. In some cases, the organism may be eukaryotic. In some cases, the organism may be fungal. In some cases, the organism may be human.

[0292] MG14 Enzymes

[0293] In one aspect, the present disclosure provides for an engineered nuclease system comprising (a) an endonuclease. In some cases, the endonuclease is a Cas endonuclease. In some cases, the endonuclease is a Type II, Class II Cas endonuclease. The endonuclease may comprise a RuvC_III domain, wherein said RuvC_III domain has at least about 70% sequence identity to any one of SEQ ID NOs: 2499-2750. In some cases, the endonuclease may comprise a RuvC_III domain, wherein the RuvC_III domain has at least about 20%, at least about 25%, at least about 30%, at least about 35%, at least about 40%, at least about 45%, at least about 50%, at least about 55%, at least about 60%, at least about 65%, at least about 70%, at least about 75%, at least about 80%, at least about 85%, at least about 90%, at least about 91%, at least about 92%, at least about 93%, at least about 94%, at least about 95%, at least about 96%, at least about 97%, at least about 98%, at least about 99% identity to any one of SEQ ID NOs: 2499-2750. In some cases, the endonuclease may comprise a RuvC_III domain, wherein the substantially identical to any one of SEQ ID NOs: 2499-2750. The endonuclease may comprise a RuvC_III domain having at least about 70% sequence identity to any one of SEQ ID NOs: 2499-2750. In some cases, the endonuclease may comprise a RuvC_III domain having at least about 20%, at least about 25%, at least about 30%, at least about 35%, at least about 40%, at least about 45%, at least about 50%, at least about 55%, at least about 60%, at least about 65%, at least about 70%, at least about 75%, at least about 80%, at least about 85%, at least about 90%, at least about 91%, at least about 92%, at least about 93%, at least about 94%, at least about 95%, at least about 96%, at least about 97%, at least about 98%, at least about 99% identity to any one of SEQ ID NOs: 2499-2750. In some cases, the endonuclease may comprise a RuvC_III domain substantially identical to any one of SEQ ID NOs: 2499-2750.

[0294] The endonuclease may comprise an HNH domain having at least about 70% identity to any one of SEQ ID NOs: 4313-4564. In some cases, the endonuclease may comprise an HNH domain having at least about 70%, at least about 75%, at least about 80%, at least about 85%, at least about 90%, at least about 91%, at least about 92%, at least about 93%, at least about 94%, at least about 95%, at least about 96%, at least about 97%, at least about 98%, or at least about 99% identical to any one of SEQ ID NOs: 4313-4564. The endonuclease may comprise an HNH domain substantially identical to any one of SEQ ID NOs: 4313-4564. The endonuclease may comprise an HNH domain having at least about 70% identity to any one of SEQ ID NOs: 4313-4564. In some cases, the endonuclease may comprise an HNH domain having at least about 70%, at least about 75%, at least about 80%, at least about 85%, at least about 90%, at least about 91%, at least about 92%, at least about 93%, at least about 94%, at least about 95%, at least about 96%, at least about 97%, at least about 98%, or at least about 99% identical to any one of SEQ ID NOs: 4067-4295. The endonuclease may comprise an HNH domain substantially identical to any one of SEQ ID NOs: 4313-4564.

[0295] In some cases, the endonuclease may comprise a variant having at least about 30%, at least about 35%, at least about 40%, at least about 45%, at least about 50%, at least about 55%, at least about 60%, at least about 65%, at least about 70%, at least about 75%, at least about 80%, at least about 85%, at least about 90%, at least about 95%, at least about 96%, at least about 97%, at least about 98%, or at least about 99% identity to any one of SEQ ID NOs: 678-929. In some cases, the endonuclease may be substantially identical to any one of SEQ ID NOs: 678-929. In some cases, the endonuclease may comprise a variant having at least about 30%, at least about 35%, at least about 40%, at least about 45%, at least about 50%, at least about 55%, at least about 60%, at least about 65%, at least about 70%, at least about 75%, at least about 80%, at least about 85%, at least about 90%, at least about 95%, at least about 96%, at least about 97%, at least about 98%, or at least about 99% identity to any one of SEQ ID NOs: 678-929. In some cases, the endonuclease may be substantially identical to any one of SEQ ID NOs: 678-929.

[0296] In some cases, the endonuclease may comprise a variant having one or more nuclear localization sequences (NLSs). The NLS may be proximal to the N- or C-terminus of said endonuclease. The NLS may be appended N-terminal or C-terminal to any one of SEQ ID NOs: 678-929, or to a variant having at least about 30%, at least about 35%, at least about 40%, at least about 45%, at least about 50%, at least about 55%, at least about 60%, at least about 65%, at least about 70%, at least about 75%, at least about 80%, at least about 85%, at least about 90%, at least about 95%, at least about 96%, at least about 97%, at least about 98%, or at least about 99% identity to any one of SEQ ID NOs: 678-929. The NLS may be an SV40 large T antigen NLS. The NLS may be a c-myc NLS. The NLS can comprise a sequence with at least about 80%, at least about 85%, at least about 90%, at least about 95%, at least about 99% identity to any one of SEQ ID NOs: 5593-5608. The NLS can comprise a sequence substantially identical to any one of SEQ ID NOs: 5593-5608. The NLS can comprise any of the sequences in Table 1 or a combination thereof.

[0297] In some cases, sequence identity may be determined by the BLASTP, CLUSTALW, MUSCLE, MAFFT, Novafold, or Smith-Waterman homology search algorithm. The sequence identity may be determined by the BLASTP algorithm using parameters of a wordlength (W) of 3, an expectation (E) of 10, and using a BLOSUM62 scoring matrix setting gap costs at existence of 11, extension of 1, and using a conditional compositional score matrix adjustment.

[0298] In some cases, the system above may comprise (b) at least one engineered synthetic guide ribonucleic acid (sgRNA) capable of forming a complex with the endonuclease bearing a 5′ targeting region complementary to a desired cleavage sequence. In some cases, the 5′ targeting region may comprises a PAM sequence compatible with the endonuclease. In some cases, the 5′ most nucleotide of the targeting region may be G. In some cases, the 5′ targeting region may be 15-23 nucleotides in length. The guide sequence and the tracr sequence may be supplied as separate ribonucleic acids (RNAs) or a single ribonucleic acid (RNA). The guide RNA may comprise a crRNA tracrRNA binding sequence 3′ to the targeting region. The guide RNA may comprise a tracrRNA sequence preceded by a 4-nucleotide linker 3′ to the crRNA tracrRNA binding region. The sgRNA may comprise, from 5′ to 3′: a non-natural guide nucleic acid sequence capable of hybridizing to a target sequence in a cell; and a tracr sequence. In some cases, the non-natural guide nucleic acid sequence and the tracr sequence are covalently linked.

[0299] In some cases, the tracr sequence may have a particular sequence. The tracr sequence may have at least about 80% to at least about 60-100 (e.g., at least about 60, at least about 65, at least about 70, at least about 75, at least about 80, at least about 85, or at least about 90) consecutive nucleotides of a natural tracrRNA sequence. The tracr sequence may have at least about 80% sequence identity to at least about 60-100 (e.g., at least about 60, at least about 65, at least about 70, at least about 75, at least about 80, at least about 85, or at least about 90) consecutive nucleotides of SEQ ID NO: 5505. In some cases, the tracrRNA may have at least about 80%, at least about 85%, at least about 90%, at least about 91%, at least about 92%, at least about 93%, at least about 94%, at least about 95%, at least about 96%, at least about 97%, at least about 98%, or at least about 99% identity to at least about 60-90 (e.g., at least about 60, at least about 65, at least about 70, at least about 75, at least about 80, at least about 85, or at least about 90) consecutive nucleotides of SEQ ID NO: 5505. In some cases, the tracrRNA may be substantially identical to at least about 60-100 (e.g., at least about 60, at least about 65, at least about 70, at least about 75, at least about 80, at least about 85, or at least about 90) consecutive nucleotides of SEQ ID NO: 5505. The tracrRNA may comprise SEQ ID NO: 5505.

[0300] In some cases, the at least one engineered synthetic guide ribonucleic acid (sgRNA) capable of forming a complex with the endonuclease may comprise a sequence having at least about 80% identity to SEQ ID NO: 5469. The sgRNA may comprise a sequence having at least about 80%, at least about 85%, at least about 90%, at least about 91%, at least about 92%, at least about 93%, at least about 94%, at least about 95%, at least about 96%, at least about 97%, at least about 98%, or at least about 99% identity to SEQ ID NO: 5469. The sgRNA may comprise a sequence substantially identical to SEQ ID NO: 5469.

[0301] In some cases, the system above may comprise two different sgRNAs targeting a first region and a second region for cleavage in a target DNA locus, wherein the second region is 3′ to the first region. In some cases, the system above may comprise a single- or double-stranded DNA repair template comprising from 5′ to 3′: a first homology arm comprising a sequence of at least about 20 (e.g., at least about 40, 80, 120, 150, 200, 300, 500, or 1 kb) nucleotides 5′ to the first region, a synthetic DNA sequence of at least about 10 nucleotides, and a second homology arm comprising a sequence of at least about 20 (e.g., at least about 40, 80, 120, 150, 200, 300, 500, or 1 kb) nucleotides 3′ to the second region.

[0302] In another aspect, the present disclosure provides a method for modifying a target nucleic acid locus of interest. The method may comprise delivering to the target nucleic acid locus any of the non-natural systems disclosed herein, including an enzyme and at least one synthetic guide RNA (sgRNA) disclosed herein. The enzyme may form a complex with the at least one sgRNA, and upon binding of the complex to the target nucleic acid locus of interest, may modify the target nucleic acid locus of interest. Delivering the enzyme to said locus may comprise transfecting a cell with the system or nucleic acids encoding the system. Delivering the nuclease to said locus may comprise electroporating a cell with the system or nucleic acids encoding the system. Delivering the nuclease to said locus may comprise incubating the system in a buffer with a nucleic acid comprising the locus of interest. In some cases, the target nucleic acid locus comprises deoxyribonucleic acid (DNA) or ribonucleic acid (RNA). The target nucleic acid locus may comprise genomic DNA, viral DNA, viral RNA, or bacterial DNA. The target nucleic acid locus may be within a cell. The target nucleic acid locus may be in vitro. The target nucleic acid locus may be within a eukaryotic cell or a prokaryotic cell. The cell may be an animal cell, a human cell, bacterial cell, archaeal cell, or a plant cell. The enzyme may induce a single or double-stranded break at or proximal to the target locus of interest.

[0303] In cases where the target nucleic acid locus may be within a cell, the enzyme may be supplied as a nucleic acid containing an open reading frame encoding the enzyme having a RuvC_III domain having at least about 75% (e.g., at least about 90%, at least about 91%, at least about 92%, at least about 93%, at least about 94%, at least about 95%, at least about 96%, at least about 97%, at least about 98%, at least about 99%) identity to any one of SEQ ID NOs: 2499-2750. The deoxyribonucleic acid (DNA) containing an open reading frame encoding said endonuclease may comprise a sequence substantially identical to SEQ ID NO: 5581 or at variant having at least about 30%, at least about 35%, at least about 40%, at least about 45%, at least about 50%, at least about 55%, at least about 60%, at least about 65%, at least about 70%, at least about 75%, at least about 80%, at least about 85%, at least about 90%, at least about 95%, at least about 96%, at least about 97%, at least about 98%, or at least about 99% identity to SEQ ID NO: 5581. In some cases, the nucleic acid comprises a promoter to which the open reading frame encoding the endonuclease is operably linked. The promoter may be a CMV, EF1a, SV40, PGK1, Ubc, human beta actin, CAG, TRE, or CaMKIIa promoter. The endonuclease may be supplied as a capped mRNA containing said open reading frame encoding said endonuclease. The endonuclease may be supplied as a translated polypeptide. The at least one engineered sgRNA may be supplied as deoxyribonucleic acid (DNA) containing a gene sequence encoding said at least one engineered sgRNA operably linked to a ribonucleic acid (RNA) pol III promoter. In some cases, the organism may be eukaryotic. In some cases, the organism may be fungal. In some cases, the organism may be human.

[0304] MG15 Enzymes

[0305] In one aspect, the present disclosure provides for an engineered nuclease system comprising (a) an endonuclease. In some cases, the endonuclease is a Cas endonuclease. In some cases, the endonuclease is a Type II, Class II Cas endonuclease. The endonuclease may comprise a RuvC_III domain, wherein said RuvC_III domain has at least about 70% sequence identity to any one of SEQ ID NOs: 2751-2913. In some cases, the endonuclease may comprise a RuvC_III domain, wherein the RuvC_III domain has at least about 20%, at least about 25%, at least about 30%, at least about 35%, at least about 40%, at least about 45%, at least about 50%, at least about 55%, at least about 60%, at least about 65%, at least about 70%, at least about 75%, at least about 80%, at least about 85%, at least about 90%, at least about 91%, at least about 92%, at least about 93%, at least about 94%, at least about 95%, at least about 96%, at least about 97%, at least about 98%, at least about 99% identity to any one of SEQ ID NOs: 2751-2913. In some cases, the endonuclease may comprise a RuvC_III domain, wherein the substantially identical to any one of SEQ ID NOs: 2751-2913. The endonuclease may comprise a RuvC_III domain having at least about 70% sequence identity to any one of SEQ ID NOs: 2751-2913. In some cases, the endonuclease may comprise a RuvC_III domain having at least about 20%, at least about 25%, at least about 30%, at least about 35%, at least about 40%, at least about 45%, at least about 50%, at least about 55%, at least about 60%, at least about 65%, at least about 70%, at least about 75%, at least about 80%, at least about 85%, at least about 90%, at least about 91%, at least about 92%, at least about 93%, at least about 94%, at least about 95%, at least about 96%, at least about 97%, at least about 98%, at least about 99% identity to any one of SEQ ID NOs: 2751-2913. In some cases, the endonuclease may comprise a RuvC_III domain substantially identical to any one of SEQ ID NOs: 2751-2913.

[0306] The endonuclease may comprise an HNH domain having at least about 70% identity to any one of SEQ ID NOs: 4565-4727. In some cases, the endonuclease may comprise an HNH domain having at least about 70%, at least about 75%, at least about 80%, at least about 85%, at least about 90%, at least about 91%, at least about 92%, at least about 93%, at least about 94%, at least about 95%, at least about 96%, at least about 97%, at least about 98%, or at least about 99% identical to any one of SEQ ID NOs: 4565-4727. The endonuclease may comprise an HNH domain substantially identical to any one of SEQ ID NOs: 4565-4727. The endonuclease may comprise an HNH domain having at least about 70% identity to any one of SEQ ID NOs: 4565-4727. In some cases, the endonuclease may comprise an HNH domain having at least about 70%, at least about 75%, at least about 80%, at least about 85%, at least about 90%, at least about 91%, at least about 92%, at least about 93%, at least about 94%, at least about 95%, at least about 96%, at least about 97%, at least about 98%, or at least about 99% identical to any one of SEQ ID NOs: 4565-4727. The endonuclease may comprise an HNH domain substantially identical to any one of SEQ ID NOs: 4565-4727.

[0307] In some cases, the endonuclease may comprise a variant having at least about 30%, at least about 35%, at least about 40%, at least about 45%, at least about 50%, at least about 55%, at least about 60%, at least about 65%, at least about 70%, at least about 75%, at least about 80%, at least about 85%, at least about 90%, at least about 95%, at least about 96%, at least about 97%, at least about 98%, or at least about 99% identity to any one of SEQ ID NOs: 930-1092. In some cases, the endonuclease may be substantially identical to any one of SEQ ID NOs: 930-1092. In some cases, the endonuclease may comprise a variant having at least about 30%, at least about 35%, at least about 40%, at least about 45%, at least about 50%, at least about 55%, at least about 60%, at least about 65%, at least about 70%, at least about 75%, at least about 80%, at least about 85%, at least about 90%, at least about 95%, at least about 96%, at least about 97%, at least about 98%, or at least about 99% identity to any one of SEQ ID NOs: 930-1092. In some cases, the endonuclease may be substantially identical to any one of SEQ ID NOs: 930-1092.

[0308] In some cases, the endonuclease may comprise a variant having one or more nuclear localization sequences (NLSs). The NLS may be proximal to the N- or C-terminus of said endonuclease. The NLS may be appended N-terminal or C-terminal to any one of SEQ ID NOs: 930-1092, or to a variant having at least about 30%, at least about 35%, at least about 40%, at least about 45%, at least about 50%, at least about 55%, at least about 60%, at least about 65%, at least about 70%, at least about 75%, at least about 80%, at least about 85%, at least about 90%, at least about 95%, at least about 96%, at least about 97%, at least about 98%, or at least about 99% identity to any one of SEQ ID NOs: 930-1092. The NLS may be an SV40 large T antigen NLS. The NLS may be a c-myc NLS. The NLS can comprise a sequence with at least about 80%, at least about 85%, at least about 90%, at least about 95%, at least about 99% identity to any one of SEQ ID NOs: 5593-5608. The NLS can comprise a sequence substantially identical to any one of SEQ ID NOs: 5593-5608. The NLS can comprise any of the sequences in Table 1 or a combination thereof.

[0309] In some cases, sequence identity may be determined by the BLASTP, CLUSTALW, MUSCLE, MAFFT, Novafold, or Smith-Waterman homology search algorithm. The sequence identity may be determined by the BLASTP algorithm using parameters of a wordlength (W) of 3, an expectation (E) of 10, and using a BLOSUM62 scoring matrix setting gap costs at existence of 11, extension of 1, and using a conditional compositional score matrix adjustment.

[0310] In some cases, the system above may comprise (b) at least one engineered synthetic guide ribonucleic acid (sgRNA) capable of forming a complex with the endonuclease bearing a 5′ targeting region complementary to a desired cleavage sequence. In some cases, the 5′ targeting region may comprises a PAM sequence compatible with the endonuclease. In some cases, the 5′ most nucleotide of the targeting region may be G. In some cases, the 5′ targeting region may be 15-23 nucleotides in length. The guide sequence and the tracr sequence may be supplied as separate ribonucleic acids (RNAs) or a single ribonucleic acid (RNA). The guide RNA may comprise a crRNA tracrRNA binding sequence 3′ to the targeting region. The guide RNA may comprise a tracrRNA sequence preceded by a 4-nucleotide linker 3′ to the crRNA tracrRNA binding region. The sgRNA may comprise, from 5′ to 3′: a non-natural guide nucleic acid sequence capable of hybridizing to a target sequence in a cell; and a tracr sequence. In some cases, the non-natural guide nucleic acid sequence and the tracr sequence are covalently linked.

[0311] In some cases, the tracr sequence may have a particular sequence. The tracr sequence may have at least about 80% to at least about 60-100 (e.g., at least about 60, at least about 65, at least about 70, at least about 75, at least about 80, at least about 85, or at least about 90) consecutive nucleotides of a natural tracrRNA sequence. The tracr sequence may have at least about 80% sequence identity to at least about 60-100 (e.g., at least about 60, at least about 65, at least about 70, at least about 75, at least about 80, at least about 85, or at least about 90) consecutive nucleotides of SEQ ID NO: 5506. In some cases, the tracrRNA may have at least about 80%, at least about 85%, at least about 90%, at least about 91%, at least about 92%, at least about 93%, at least about 94%, at least about 95%, at least about 96%, at least about 97%, at least about 98%, or at least about 99% identity to at least about 60-90 (e.g., at least about 60, at least about 65, at least about 70, at least about 75, at least about 80, at least about 85, or at least about 90) consecutive nucleotides of SEQ ID NO: 5506. In some cases, the tracrRNA may be substantially identical to at least about 60-100 (e.g., at least about 60, at least about 65, at least about 70, at least about 75, at least about 80, at least about 85, or at least about 90) consecutive nucleotides of SEQ ID NO: 5506. The tracrRNA may comprise SEQ ID NO: 5506.

[0312] In some cases, the at least one engineered synthetic guide ribonucleic acid (sgRNA) capable of forming a complex with the endonuclease may comprise a sequence having at least about 80% identity to SEQ ID NO: 5470. The sgRNA may comprise a sequence having at least about 80%, at least about 85%, at least about 90%, at least about 91%, at least about 92%, at least about 93%, at least about 94%, at least about 95%, at least about 96%, at least about 97%, at least about 98%, or at least about 99% identity to SEQ ID NO: 5470. The sgRNA may comprise a sequence substantially identical to SEQ ID NO: 5470.

[0313] In some cases, the system above may comprise two different sgRNAs targeting a first region and a second region for cleavage in a target DNA locus, wherein the second region is 3′ to the first region. In some cases, the system above may comprise a single- or double-stranded DNA repair template comprising from 5′ to 3′: a first homology arm comprising a sequence of at least about 20 (e.g., at least about 40, 80, 120, 150, 200, 300, 500, or 1 kb) nucleotides 5′ to the first region, a synthetic DNA sequence of at least about 10 nucleotides, and a second homology arm comprising a sequence of at least about 20 (e.g., at least about 40, 80, 120, 150, 200, 300, 500, or 1 kb) nucleotides 3′ to the second region.

[0314] In another aspect, the present disclosure provides a method for modifying a target nucleic acid locus of interest. The method may comprise delivering to the target nucleic acid locus any of the non-natural systems disclosed herein, including an enzyme and at least one synthetic guide RNA (sgRNA) disclosed herein. The enzyme may form a complex with the at least one sgRNA, and upon binding of the complex to the target nucleic acid locus of interest, may modify the target nucleic acid locus of interest. Delivering the enzyme to said locus may comprise transfecting a cell with the system or nucleic acids encoding the system. Delivering the nuclease to said locus may comprise electroporating a cell with the system or nucleic acids encoding the system. Delivering the nuclease to said locus may comprise incubating the system in a buffer with a nucleic acid comprising the locus of interest. In some cases, the target nucleic acid locus comprises deoxyribonucleic acid (DNA) or ribonucleic acid (RNA). The target nucleic acid locus may comprise genomic DNA, viral DNA, viral RNA, or bacterial DNA. The target nucleic acid locus may be within a cell. The target nucleic acid locus may be in vitro. The target nucleic acid locus may be within a eukaryotic cell or a prokaryotic cell. The cell may be an animal cell, a human cell, bacterial cell, archaeal cell, or a plant cell. The enzyme may induce a single or double-stranded break at or proximal to the target locus of interest.

[0315] In cases where the target nucleic acid locus may be within a cell, the enzyme may be supplied as a nucleic acid containing an open reading frame encoding the enzyme having a RuvC_III domain having at least about 75% (e.g., at least about 90%, at least about 91%, at least about 92%, at least about 93%, at least about 94%, at least about 95%, at least about 96%, at least about 97%, at least about 98%, at least about 99%) identity to any one of SEQ ID NOs: 2751-2913. The deoxyribonucleic acid (DNA) containing an open reading frame encoding said endonuclease may comprise a sequence substantially identical to SEQ ID NO: 5582 or at variant having at least about 30%, at least about 35%, at least about 40%, at least about 45%, at least about 50%, at least about 55%, at least about 60%, at least about 65%, at least about 70%, at least about 75%, at least about 80%, at least about 85%, at least about 90%, at least about 95%, at least about 96%, at least about 97%, at least about 98%, or at least about 99% identity to SEQ ID NO: 5582. In some cases, the nucleic acid comprises a promoter to which the open reading frame encoding the endonuclease is operably linked. The promoter may be a CMV, EF1a, SV40, PGK1, Ubc, human beta actin, CAG, TRE, or CaMKIIa promoter. The endonuclease may be supplied as a capped mRNA containing said open reading frame encoding said endonuclease. The endonuclease may be supplied as a translated polypeptide. The at least one engineered sgRNA may be supplied as deoxyribonucleic acid (DNA) containing a gene sequence encoding said at least one engineered sgRNA operably linked to a ribonucleic acid (RNA) pol III promoter. In some cases, the organism may be eukaryotic. In some cases, the organism may be fungal. In some cases, the organism may be human.

[0316] MG16 Enzymes

[0317] In one aspect, the present disclosure provides for an engineered nuclease system comprising (a) an endonuclease. In some cases, the endonuclease is a Cas endonuclease. In some cases, the endonuclease is a Type II, Class II Cas endonuclease. The endonuclease may comprise a RuvC_III domain, wherein said RuvC_III domain has at least about 70% sequence identity to any one of SEQ ID NOs: 2914-3174. In some cases, the endonuclease may comprise a RuvC_III domain, wherein the RuvC_III domain has at least about 20%, at least about 25%, at least about 30%, at least about 35%, at least about 40%, at least about 45%, at least about 50%, at least about 55%, at least about 60%, at least about 65%, at least about 70%, at least about 75%, at least about 80%, at least about 85%, at least about 90%, at least about 91%, at least about 92%, at least about 93%, at least about 94%, at least about 95%, at least about 96%, at least about 97%, at least about 98%, at least about 99% identity to any one of SEQ ID NOs: 2914-3174. In some cases, the endonuclease may comprise a RuvC_III domain, wherein the substantially identical to any one of SEQ ID NOs: 2914-3174. The endonuclease may comprise a RuvC_III domain having at least about 70% sequence identity to any one of SEQ ID NOs: 2914-3174. In some cases, the endonuclease may comprise a RuvC_III domain having at least about 20%, at least about 25%, at least about 30%, at least about 35%, at least about 40%, at least about 45%, at least about 50%, at least about 55%, at least about 60%, at least about 65%, at least about 70%, at least about 75%, at least about 80%, at least about 85%, at least about 90%, at least about 91%, at least about 92%, at least about 93%, at least about 94%, at least about 95%, at least about 96%, at least about 97%, at least about 98%, at least about 99% identity to any one of SEQ ID NOs: 2914-3174. In some cases, the endonuclease may comprise a RuvC_III domain substantially identical to any one of SEQ ID NOs: 2914-3174.

[0318] The endonuclease may comprise an HNH domain having at least about 70% identity to any one of SEQ ID NOs: 4728-4988. In some cases, the endonuclease may comprise an HNH domain having at least about 70%, at least about 75%, at least about 80%, at least about 85%, at least about 90%, at least about 91%, at least about 92%, at least about 93%, at least about 94%, at least about 95%, at least about 96%, at least about 97%, at least about 98%, or at least about 99% identical to any one of SEQ ID NOs: 4728-4988. The endonuclease may comprise an HNH domain substantially identical to any one of SEQ ID NOs: 4728-4988. The endonuclease may comprise an HNH domain having at least about 70% identity to any one of SEQ ID NOs: 4728-4988. In some cases, the endonuclease may comprise an HNH domain having at least about 70%, at least about 75%, at least about 80%, at least about 85%, at least about 90%, at least about 91%, at least about 92%, at least about 93%, at least about 94%, at least about 95%, at least about 96%, at least about 97%, at least about 98%, or at least about 99% identical to any one of SEQ ID NOs: 4728-4988. The endonuclease may comprise an HNH domain substantially identical to any one of SEQ ID NOs: 4728-4988.

[0319] In some cases, the endonuclease may comprise a variant having at least about 30%, at least about 35%, at least about 40%, at least about 45%, at least about 50%, at least about 55%, at least about 60%, at least about 65%, at least about 70%, at least about 75%, at least about 80%, at least about 85%, at least about 90%, at least about 95%, at least about 96%, at least about 97%, at least about 98%, or at least about 99% identity to any one of SEQ ID NOs: 1093-1353. In some cases, the endonuclease may be substantially identical to any one of SEQ ID NOs: 1093-1353. In some cases, the endonuclease may comprise a variant having at least about 30%, at least about 35%, at least about 40%, at least about 45%, at least about 50%, at least about 55%, at least about 60%, at least about 65%, at least about 70%, at least about 75%, at least about 80%, at least about 85%, at least about 90%, at least about 95%, at least about 96%, at least about 97%, at least about 98%, or at least about 99% identity to any one of SEQ ID NOs: 1093-1353. In some cases, the endonuclease may be substantially identical to any one of SEQ ID NOs: 1093-1353.

[0320] In some cases, the endonuclease may comprise a variant having one or more nuclear localization sequences (NLSs). The NLS may be proximal to the N- or C-terminus of said endonuclease. The NLS may be appended N-terminal or C-terminal to any one of SEQ ID NOs: 1093-1353, or to a variant having at least about 30%, at least about 35%, at least about 40%, at least about 45%, at least about 50%, at least about 55%, at least about 60%, at least about 65%, at least about 70%, at least about 75%, at least about 80%, at least about 85%, at least about 90%, at least about 95%, at least about 96%, at least about 97%, at least about 98%, or at least about 99% identity to any one of SEQ ID NOs: 1093-1353. The NLS may be an SV40 large T antigen NLS. The NLS may be a c-myc NLS. The NLS can comprise a sequence with at least about 80%, at least about 85%, at least about 90%, at least about 95%, at least about 99% identity to any one of SEQ ID NOs: 5593-5608. The NLS can comprise a sequence substantially identical to any one of SEQ ID NOs: 5593-5608. The NLS can comprise any of the sequences in Table 1 or a combination thereof.

[0321] In some cases, sequence identity may be determined by the BLASTP, CLUSTALW, MUSCLE, MAFFT, Novafold, or Smith-Waterman homology search algorithm. The sequence identity may be determined by the BLASTP algorithm using parameters of a wordlength (W) of 3, an expectation (E) of 10, and using a BLOSUM62 scoring matrix setting gap costs at existence of 11, extension of 1, and using a conditional compositional score matrix adjustment.

[0322] In some cases, the system above may comprise (b) at least one engineered synthetic guide ribonucleic acid (sgRNA) capable of forming a complex with the endonuclease bearing a 5′ targeting region complementary to a desired cleavage sequence. In some cases, the 5′ targeting region may comprises a PAM sequence compatible with the endonuclease. In some cases, the 5′ most nucleotide of the targeting region may be G. In some cases, the 5′ targeting region may be 15-23 nucleotides in length. The guide sequence and the tracr sequence may be supplied as separate ribonucleic acids (RNAs) or a single ribonucleic acid (RNA). The guide RNA may comprise a crRNA tracrRNA binding sequence 3′ to the targeting region. The guide RNA may comprise a tracrRNA sequence preceded by a 4-nucleotide linker 3′ to the crRNA tracrRNA binding region. The sgRNA may comprise, from 5′ to 3′: a non-natural guide nucleic acid sequence capable of hybridizing to a target sequence in a cell; and a tracr sequence. In some cases, the non-natural guide nucleic acid sequence and the tracr sequence are covalently linked.

[0323] In some cases, the tracr sequence may have a particular sequence. The tracr sequence may have at least about 80% to at least about 60-100 (e.g., at least about 60, at least about 65, at least about 70, at least about 75, at least about 80, at least about 85, or at least about 90) consecutive nucleotides of a natural tracrRNA sequence. The tracr sequence may have at least about 80% sequence identity to at least about 60-100 (e.g., at least about 60, at least about 65, at least about 70, at least about 75, at least about 80, at least about 85, or at least about 90) consecutive nucleotides of SEQ ID NO: 5507. In some cases, the tracrRNA may have at least about 80%, at least about 85%, at least about 90%, at least about 91%, at least about 92%, at least about 93%, at least about 94%, at least about 95%, at least about 96%, at least about 97%, at least about 98%, or at least about 99% identity to at least about 60-90 (e.g., at least about 60, at least about 65, at least about 70, at least about 75, at least about 80, at least about 85, or at least about 90) consecutive nucleotides of SEQ ID NO: 5507. In some cases, the tracrRNA may be substantially identical to at least about 60-100 (e.g., at least about 60, at least about 65, at least about 70, at least about 75, at least about 80, at least about 85, or at least about 90) consecutive nucleotides of SEQ ID NO: 5507. The tracrRNA may comprise SEQ ID NO: 5507.

[0324] In some cases, the at least one engineered synthetic guide ribonucleic acid (sgRNA) capable of forming a complex with the endonuclease may comprise a sequence having at least about 80% identity to SEQ ID NO: 5471. The sgRNA may comprise a sequence having at least about 80%, at least about 85%, at least about 90%, at least about 91%, at least about 92%, at least about 93%, at least about 94%, at least about 95%, at least about 96%, at least about 97%, at least about 98%, or at least about 99% identity to SEQ ID NO: 5471. The sgRNA may comprise a sequence substantially identical to SEQ ID NO: 5471.

[0325] In some cases, the system above may comprise two different sgRNAs targeting a first region and a second region for cleavage in a target DNA locus, wherein the second region is 3′ to the first region. In some cases, the system above may comprise a single- or double-stranded DNA repair template comprising from 5′ to 3′: a first homology arm comprising a sequence of at least about 20 (e.g., at least about 40, 80, 120, 150, 200, 300, 500, or 1 kb) nucleotides 5′ to the first region, a synthetic DNA sequence of at least about 10 nucleotides, and a second homology arm comprising a sequence of at least about 20 (e.g., at least about 40, 80, 120, 150, 200, 300, 500, or 1 kb) nucleotides 3′ to the second region.

[0326] In another aspect, the present disclosure provides a method for modifying a target nucleic acid locus of interest. The method may comprise delivering to the target nucleic acid locus any of the non-natural systems disclosed herein, including an enzyme and at least one synthetic guide RNA (sgRNA) disclosed herein. The enzyme may form a complex with the at least one sgRNA, and upon binding of the complex to the target nucleic acid locus of interest, may modify the target nucleic acid locus of interest. Delivering the enzyme to said locus may comprise transfecting a cell with the system or nucleic acids encoding the system. Delivering the nuclease to said locus may comprise electroporating a cell with the system or nucleic acids encoding the system. Delivering the nuclease to said locus may comprise incubating the system in a buffer with a nucleic acid comprising the locus of interest. In some cases, the target nucleic acid locus comprises deoxyribonucleic acid (DNA) or ribonucleic acid (RNA). The target nucleic acid locus may comprise genomic DNA, viral DNA, viral RNA, or bacterial DNA. The target nucleic acid locus may be within a cell. The target nucleic acid locus may be in vitro. The target nucleic acid locus may be within a eukaryotic cell or a prokaryotic cell. The cell may be an animal cell, a human cell, bacterial cell, archaeal cell, or a plant cell. The enzyme may induce a single or double-stranded break at or proximal to the target locus of interest.

[0327] In cases where the target nucleic acid locus may be within a cell, the enzyme may be supplied as a nucleic acid containing an open reading frame encoding the enzyme having a RuvC_III domain having at least about 75% (e.g., at least about 90%, at least about 91%, at least about 92%, at least about 93%, at least about 94%, at least about 95%, at least about 96%, at least about 97%, at least about 98%, at least about 99%) identity to any one of SEQ ID NOs: 2914-3174. The deoxyribonucleic acid (DNA) containing an open reading frame encoding said endonuclease may comprise a sequence substantially identical to SEQ ID NO: 5583 or at variant having at least about 30%, at least about 35%, at least about 40%, at least about 45%, at least about 50%, at least about 55%, at least about 60%, at least about 65%, at least about 70%, at least about 75%, at least about 80%, at least about 85%, at least about 90%, at least about 95%, at least about 96%, at least about 97%, at least about 98%, or at least about 99% identity to SEQ ID NO: 5583. In some cases, the nucleic acid comprises a promoter to which the open reading frame encoding the endonuclease is operably linked. The promoter may be a CMV, EF1a, SV40, PGK1, Ubc, human beta actin, CAG, TRE, or CaMKIIa promoter. The endonuclease may be supplied as a capped mRNA containing said open reading frame encoding said endonuclease. The endonuclease may be supplied as a translated polypeptide. The at least one engineered sgRNA may be supplied as deoxyribonucleic acid (DNA) containing a gene sequence encoding said at least one engineered sgRNA operably linked to a ribonucleic acid (RNA) pol III promoter. In some cases, the organism may be eukaryotic. In some cases, the organism may be fungal. In some cases, the organism may be human.

[0328] MG18 Enzymes

[0329] In one aspect, the present disclosure provides for an engineered nuclease system comprising (a) an endonuclease. In some cases, the endonuclease is a Cas endonuclease. In some cases, the endonuclease is a Type II, Class II Cas endonuclease. The endonuclease may comprise a RuvC_III domain, wherein said RuvC_III domain has at least about 70% sequence identity to any one of SEQ ID NOs: 3175-3300. In some cases, the endonuclease may comprise a RuvC_III domain, wherein the RuvC_III domain has at least about 20%, at least about 25%, at least about 30%, at least about 35%, at least about 40%, at least about 45%, at least about 50%, at least about 55%, at least about 60%, at least about 65%, at least about 70%, at least about 75%, at least about 80%, at least about 85%, at least about 90%, at least about 91%, at least about 92%, at least about 93%, at least about 94%, at least about 95%, at least about 96%, at least about 97%, at least about 98%, at least about 99% identity to any one of SEQ ID NOs: 3175-3300. In some cases, the endonuclease may comprise a RuvC_III domain, wherein the substantially identical to any one of SEQ ID NOs: 3175-3300. The endonuclease may comprise a RuvC_III domain having at least about 70% sequence identity to any one of SEQ ID NOs: 3175-3300. In some cases, the endonuclease may comprise a RuvC_III domain having at least about 20%, at least about 25%, at least about 30%, at least about 35%, at least about 40%, at least about 45%, at least about 50%, at least about 55%, at least about 60%, at least about 65%, at least about 70%, at least about 75%, at least about 80%, at least about 85%, at least about 90%, at least about 91%, at least about 92%, at least about 93%, at least about 94%, at least about 95%, at least about 96%, at least about 97%, at least about 98%, at least about 99% identity to any one of SEQ ID NOs: 3175-3300. In some cases, the endonuclease may comprise a RuvC_III domain substantially identical to any one of SEQ ID NOs: 3175-3300.

[0330] The endonuclease may comprise an HNH domain having at least about 70% identity to any one of SEQ ID NOs: 4989-5146. In some cases, the endonuclease may comprise an HNH domain having at least about 70%, at least about 75%, at least about 80%, at least about 85%, at least about 90%, at least about 91%, at least about 92%, at least about 93%, at least about 94%, at least about 95%, at least about 96%, at least about 97%, at least about 98%, or at least about 99% identical to any one of SEQ ID NOs: 4989-5146. The endonuclease may comprise an HNH domain substantially identical to any one of SEQ ID NOs: 4989-5146. The endonuclease may comprise an HNH domain having at least about 70% identity to any one of SEQ ID NOs: 4989-5146. In some cases, the endonuclease may comprise an HNH domain having at least about 70%, at least about 75%, at least about 80%, at least about 85%, at least about 90%, at least about 91%, at least about 92%, at least about 93%, at least about 94%, at least about 95%, at least about 96%, at least about 97%, at least about 98%, or at least about 99% identical to any one of SEQ ID NOs: 4989-5146. The endonuclease may comprise an HNH domain substantially identical to any one of SEQ ID NOs: 4989-5146.

[0331] In some cases, the endonuclease may comprise a variant having at least about 30%, at least about 35%, at least about 40%, at least about 45%, at least about 50%, at least about 55%, at least about 60%, at least about 65%, at least about 70%, at least about 75%, at least about 80%, at least about 85%, at least about 90%, at least about 95%, at least about 96%, at least about 97%, at least about 98%, or at least about 99% identity to any one of SEQ ID NOs: 1354-1511. In some cases, the endonuclease may be substantially identical to any one of SEQ ID NOs: 1354-1511. In some cases, the endonuclease may comprise a variant having at least about 30%, at least about 35%, at least about 40%, at least about 45%, at least about 50%, at least about 55%, at least about 60%, at least about 65%, at least about 70%, at least about 75%, at least about 80%, at least about 85%, at least about 90%, at least about 95%, at least about 96%, at least about 97%, at least about 98%, or at least about 99% identity to any one of SEQ ID NOs: 1354-1511. In some cases, the endonuclease may be substantially identical to any one of SEQ ID NOs: 1354-1511.

[0332] In some cases, the endonuclease may comprise a variant having one or more nuclear localization sequences (NLSs). The NLS may be proximal to the N- or C-terminus of said endonuclease. The NLS may be appended N-terminal or C-terminal to any one of SEQ ID NOs: 1354-1511, or to a variant having at least about 30%, at least about 35%, at least about 40%, at least about 45%, at least about 50%, at least about 55%, at least about 60%, at least about 65%, at least about 70%, at least about 75%, at least about 80%, at least about 85%, at least about 90%, at least about 95%, at least about 96%, at least about 97%, at least about 98%, or at least about 99% identity to any one of SEQ ID NOs: 1354-1511. The NLS may be an SV40 large T antigen NLS. The NLS may be a c-myc NLS. The NLS can comprise a sequence with at least about 80%, at least about 85%, at least about 90%, at least about 95%, at least about 99% identity to any one of SEQ ID NOs: 5593-5608. The NLS can comprise a sequence substantially identical to any one of SEQ ID NOs: 5593-5608. The NLS can comprise any of the sequences in Table 1 or a combination thereof.

[0333] In some cases, sequence identity may be determined by the BLASTP, CLUSTALW, MUSCLE, MAFFT, Novafold, or Smith-Waterman homology search algorithm. The sequence identity may be determined by the BLASTP algorithm using parameters of a wordlength (W) of 3, an expectation (E) of 10, and using a BLOSUM62 scoring matrix setting gap costs at existence of 11, extension of 1, and using a conditional compositional score matrix adjustment.

[0334] In some cases, the system above may comprise (b) at least one engineered synthetic guide ribonucleic acid (sgRNA) capable of forming a complex with the endonuclease bearing a 5′ targeting region complementary to a desired cleavage sequence. In some cases, the 5′ targeting region may comprises a PAM sequence compatible with the endonuclease. In some cases, the 5′ most nucleotide of the targeting region may be G. In some cases, the 5′ targeting region may be 15-23 nucleotides in length. The guide sequence and the tracr sequence may be supplied as separate ribonucleic acids (RNAs) or a single ribonucleic acid (RNA). The guide RNA may comprise a crRNA tracrRNA binding sequence 3′ to the targeting region. The guide RNA may comprise a tracrRNA sequence preceded by a 4-nucleotide linker 3′ to the crRNA tracrRNA binding region. The sgRNA may comprise, from 5′ to 3′: a non-natural guide nucleic acid sequence capable of hybridizing to a target sequence in a cell; and a tracr sequence. In some cases, the non-natural guide nucleic acid sequence and the tracr sequence are covalently linked.

[0335] In some cases, the tracr sequence may have a particular sequence. The tracr sequence may have at least about 80% to at least about 60-100 (e.g., at least about 60, at least about 65, at least about 70, at least about 75, at least about 80, at least about 85, or at least about 90) consecutive nucleotides of a natural tracrRNA sequence. The tracr sequence may have at least about 80% sequence identity to at least about 60-100 (e.g., at least about 60, at least about 65, at least about 70, at least about 75, at least about 80, at least about 85, or at least about 90) consecutive nucleotides of SEQ ID NO: 5508. In some cases, the tracrRNA may have at least about 80%, at least about 85%, at least about 90%, at least about 91%, at least about 92%, at least about 93%, at least about 94%, at least about 95%, at least about 96%, at least about 97%, at least about 98%, or at least about 99% identity to at least about 60-90 (e.g., at least about 60, at least about 65, at least about 70, at least about 75, at least about 80, at least about 85, or at least about 90) consecutive nucleotides of SEQ ID NO: 5508. In some cases, the tracrRNA may be substantially identical to at least about 60-100 (e.g., at least about 60, at least about 65, at least about 70, at least about 75, at least about 80, at least about 85, or at least about 90) consecutive nucleotides of SEQ ID NO: 5508. The tracrRNA may comprise SEQ ID NO: 5508.

[0336] In some cases, the at least one engineered synthetic guide ribonucleic acid (sgRNA) capable of forming a complex with the endonuclease may comprise a sequence having at least about 80% identity to SEQ ID NO: 5472. The sgRNA may comprise a sequence having at least about 80%, at least about 85%, at least about 90%, at least about 91%, at least about 92%, at least about 93%, at least about 94%, at least about 95%, at least about 96%, at least about 97%, at least about 98%, or at least about 99% identity to SEQ ID NO: 5472. The sgRNA may comprise a sequence substantially identical to SEQ ID NO: 5472.

[0337] In some cases, the system above may comprise two different sgRNAs targeting a first region and a second region for cleavage in a target DNA locus, wherein the second region is 3′ to the first region. In some cases, the system above may comprise a single- or double-stranded DNA repair template comprising from 5′ to 3′: a first homology arm comprising a sequence of at least about 20 (e.g., at least about 40, 80, 120, 150, 200, 300, 500, or 1 kb) nucleotides 5′ to the first region, a synthetic DNA sequence of at least about 10 nucleotides, and a second homology arm comprising a sequence of at least about 20 (e.g., at least about 40, 80, 120, 150, 200, 300, 500, or 1 kb) nucleotides 3′ to the second region.

[0338] In another aspect, the present disclosure provides a method for modifying a target nucleic acid locus of interest. The method may comprise delivering to the target nucleic acid locus any of the non-natural systems disclosed herein, including an enzyme and at least one synthetic guide RNA (sgRNA) disclosed herein. The enzyme may form a complex with the at least one sgRNA, and upon binding of the complex to the target nucleic acid locus of interest, may modify the target nucleic acid locus of interest. Delivering the enzyme to said locus may comprise transfecting a cell with the system or nucleic acids encoding the system. Delivering the nuclease to said locus may comprise electroporating a cell with the system or nucleic acids encoding the system. Delivering the nuclease to said locus may comprise incubating the system in a buffer with a nucleic acid comprising the locus of interest. In some cases, the target nucleic acid locus comprises deoxyribonucleic acid (DNA) or ribonucleic acid (RNA). The target nucleic acid locus may comprise genomic DNA, viral DNA, viral RNA, or bacterial DNA. The target nucleic acid locus may be within a cell. The target nucleic acid locus may be in vitro. The target nucleic acid locus may be within a eukaryotic cell or a prokaryotic cell. The cell may be an animal cell, a human cell, bacterial cell, archaeal cell, or a plant cell. The enzyme may induce a single or double-stranded break at or proximal to the target locus of interest.

[0339] In cases where the target nucleic acid locus may be within a cell, the enzyme may be supplied as a nucleic acid containing an open reading frame encoding the enzyme having a RuvC_III domain having at least about 75% (e.g., at least about 90%, at least about 91%, at least about 92%, at least about 93%, at least about 94%, at least about 95%, at least about 96%, at least about 97%, at least about 98%, at least about 99%) identity to any one of SEQ ID NOs: 3175-3300. The deoxyribonucleic acid (DNA) containing an open reading frame encoding said endonuclease may comprise a sequence substantially identical to SEQ ID NOs: 5584 or at variant having at least about 30%, at least about 35%, at least about 40%, at least about 45%, at least about 50%, at least about 55%, at least about 60%, at least about 65%, at least about 70%, at least about 75%, at least about 80%, at least about 85%, at least about 90%, at least about 95%, at least about 96%, at least about 97%, at least about 98%, or at least about 99% identity to SEQ ID NOs: 5584. In some cases, the nucleic acid comprises a promoter to which the open reading frame encoding the endonuclease is operably linked. The promoter may be a CMV, EF1a, SV40, PGK1, Ubc, human beta actin, CAG, TRE, or CaMKIIa promoter. The endonuclease may be supplied as a capped mRNA containing said open reading frame encoding said endonuclease. The endonuclease may be supplied as a translated polypeptide. The at least one engineered sgRNA may be supplied as deoxyribonucleic acid (DNA) containing a gene sequence encoding said at least one engineered sgRNA operably linked to a ribonucleic acid (RNA) pol III promoter. In some cases, the organism may be eukaryotic. In some cases, the organism may be fungal. In some cases, the organism may be human.

[0340] MG21 Enzymes

[0341] In one aspect, the present disclosure provides for an engineered nuclease system comprising (a) an endonuclease. In some cases, the endonuclease is a Cas endonuclease. In some cases, the endonuclease is a Type II, Class II Cas endonuclease. The endonuclease may comprise a RuvC_III domain, wherein said RuvC_III domain has at least about 70% sequence identity to any one of SEQ ID NOs: 3331-3474. In some cases, the endonuclease may comprise a RuvC_III domain, wherein the RuvC_III domain has at least about 20%, at least about 25%, at least about 30%, at least about 35%, at least about 40%, at least about 45%, at least about 50%, at least about 55%, at least about 60%, at least about 65%, at least about 70%, at least about 75%, at least about 80%, at least about 85%, at least about 90%, at least about 91%, at least about 92%, at least about 93%, at least about 94%, at least about 95%, at least about 96%, at least about 97%, at least about 98%, at least about 99% identity to any one of SEQ ID NOs: 3331-3474. In some cases, the endonuclease may comprise a RuvC_III domain, wherein the substantially identical to any one of SEQ ID NOs: 3331-3474. The endonuclease may comprise a RuvC_III domain having at least about 70% sequence identity to any one of SEQ ID NOs: 3331-3474. In some cases, the endonuclease may comprise a RuvC_III domain having at least about 20%, at least about 25%, at least about 30%, at least about 35%, at least about 40%, at least about 45%, at least about 50%, at least about 55%, at least about 60%, at least about 65%, at least about 70%, at least about 75%, at least about 80%, at least about 85%, at least about 90%, at least about 91%, at least about 92%, at least about 93%, at least about 94%, at least about 95%, at least about 96%, at least about 97%, at least about 98%, at least about 99% identity to any one of SEQ ID NOs: 3331-3474. In some cases, the endonuclease may comprise a RuvC_III domain substantially identical to any one of SEQ ID NOs: 3331-3474.

[0342] The endonuclease may comprise an HNH domain having at least about 70% identity to any one of SEQ ID NOs: 5147-5290. In some cases, the endonuclease may comprise an HNH domain having at least about 70%, at least about 75%, at least about 80%, at least about 85%, at least about 90%, at least about 91%, at least about 92%, at least about 93%, at least about 94%, at least about 95%, at least about 96%, at least about 97%, at least about 98%, or at least about 99% identical to any one of SEQ ID NOs: 5147-5290. The endonuclease may comprise an HNH domain substantially identical to any one of SEQ ID NOs: 5147-5290. The endonuclease may comprise an HNH domain having at least about 70% identity to any one of SEQ ID NOs: 5147-5290. In some cases, the endonuclease may comprise an HNH domain having at least about 70%, at least about 75%, at least about 80%, at least about 85%, at least about 90%, at least about 91%, at least about 92%, at least about 93%, at least about 94%, at least about 95%, at least about 96%, at least about 97%, at least about 98%, or at least about 99% identical to any one of SEQ ID NOs: 5147-5290. The endonuclease may comprise an HNH domain substantially identical to any one of SEQ ID NOs: 5147-5290.

[0343] In some cases, the endonuclease may comprise a variant having at least about 30%, at least about 35%, at least about 40%, at least about 45%, at least about 50%, at least about 55%, at least about 60%, at least about 65%, at least about 70%, at least about 75%, at least about 80%, at least about 85%, at least about 90%, at least about 95%, at least about 96%, at least about 97%, at least about 98%, or at least about 99% identity to any one of SEQ ID NOs: 1512-1655. In some cases, the endonuclease may be substantially identical to any one of SEQ ID NOs: 1512-1655. In some cases, the endonuclease may comprise a variant having at least about 30%, at least about 35%, at least about 40%, at least about 45%, at least about 50%, at least about 55%, at least about 60%, at least about 65%, at least about 70%, at least about 75%, at least about 80%, at least about 85%, at least about 90%, at least about 95%, at least about 96%, at least about 97%, at least about 98%, or at least about 99% identity to any one of SEQ ID NOs: 1512-1655. In some cases, the endonuclease may be substantially identical to any one of SEQ ID NOs: 1512-1655.

[0344] In some cases, the endonuclease may comprise a variant having one or more nuclear localization sequences (NLSs). The NLS may be proximal to the N- or C-terminus of said endonuclease. The NLS may be appended N-terminal or C-terminal to any one of SEQ ID NOs: 1512-1655, or to a variant having at least about 30%, at least about 35%, at least about 40%, at least about 45%, at least about 50%, at least about 55%, at least about 60%, at least about 65%, at least about 70%, at least about 75%, at least about 80%, at least about 85%, at least about 90%, at least about 95%, at least about 96%, at least about 97%, at least about 98%, or at least about 99% identity to any one of SEQ ID NOs: 1512-1655. The NLS may be an SV40 large T antigen NLS. The NLS may be a c-myc NLS. The NLS can comprise a sequence with at least about 80%, at least about 85%, at least about 90%, at least about 95%, at least about 99% identity to any one of SEQ ID NOs: 5593-5608. The NLS can comprise a sequence substantially identical to any one of SEQ ID NOs: 5593-5608. The NLS can comprise any of the sequences in Table 1 or a combination thereof.

[0345] In some cases, sequence identity may be determined by the BLASTP, CLUSTALW, MUSCLE, MAFFT, Novafold, or Smith-Waterman homology search algorithm. The sequence identity may be determined by the BLASTP algorithm using parameters of a wordlength (W) of 3, an expectation (E) of 10, and using a BLOSUM62 scoring matrix setting gap costs at existence of 11, extension of 1, and using a conditional compositional score matrix adjustment.

[0346] In some cases, the system above may comprise (b) at least one engineered synthetic guide ribonucleic acid (sgRNA) capable of forming a complex with the endonuclease bearing a 5′ targeting region complementary to a desired cleavage sequence. In some cases, the 5′ targeting region may comprises a PAM sequence compatible with the endonuclease. In some cases, the 5′ most nucleotide of the targeting region may be G. In some cases, the 5′ targeting region may be 15-23 nucleotides in length. The guide sequence and the tracr sequence may be supplied as separate ribonucleic acids (RNAs) or a single ribonucleic acid (RNA). The guide RNA may comprise a crRNA tracrRNA binding sequence 3′ to the targeting region. The guide RNA may comprise a tracrRNA sequence preceded by a 4-nucleotide linker 3′ to the crRNA tracrRNA binding region. The sgRNA may comprise, from 5′ to 3′: a non-natural guide nucleic acid sequence capable of hybridizing to a target sequence in a cell; and a tracr sequence. In some cases, the non-natural guide nucleic acid sequence and the tracr sequence are covalently linked.

[0347] In some cases, the tracr sequence may have a particular sequence. The tracr sequence may have at least about 80% to at least about 60-100 (e.g., at least about 60, at least about 65, at least about 70, at least about 75, at least about 80, at least about 85, or at least about 90) consecutive nucleotides of a natural tracrRNA sequence. The tracr sequence may have at least about 80% sequence identity to at least about 60-100 (e.g., at least about 60, at least about 65, at least about 70, at least about 75, at least about 80, at least about 85, or at least about 90) consecutive nucleotides of SEQ ID NO: 5509. In some cases, the tracrRNA may have at least about 80%, at least about 85%, at least about 90%, at least about 91%, at least about 92%, at least about 93%, at least about 94%, at least about 95%, at least about 96%, at least about 97%, at least about 98%, or at least about 99% identity to at least about 60-90 (e.g., at least about 60, at least about 65, at least about 70, at least about 75, at least about 80, at least about 85, or at least about 90) consecutive nucleotides of SEQ ID NO: 5509. In some cases, the tracrRNA may be substantially identical to at least about 60-100 (e.g., at least about 60, at least about 65, at least about 70, at least about 75, at least about 80, at least about 85, or at least about 90) consecutive nucleotides of SEQ ID NO: 5509. The tracrRNA may comprise SEQ ID NO: 5509.

[0348] In some cases, the at least one engineered synthetic guide ribonucleic acid (sgRNA) capable of forming a complex with the endonuclease may comprise a sequence having at least about 80% identity to SEQ ID NO: 5473. The sgRNA may comprise a sequence having at least about 80%, at least about 85%, at least about 90%, at least about 91%, at least about 92%, at least about 93%, at least about 94%, at least about 95%, at least about 96%, at least about 97%, at least about 98%, or at least about 99% identity to SEQ ID NO: 5473. The sgRNA may comprise a sequence substantially identical to SEQ ID NO: 5473.

[0349] In some cases, the system above may comprise two different sgRNAs targeting a first region and a second region for cleavage in a target DNA locus, wherein the second region is 3′ to the first region. In some cases, the system above may comprise a single- or double-stranded DNA repair template comprising from 5′ to 3′: a first homology arm comprising a sequence of at least about 20 (e.g., at least about 40, 80, 120, 150, 200, 300, 500, or 1 kb) nucleotides 5′ to the first region, a synthetic DNA sequence of at least about 10 nucleotides, and a second homology arm comprising a sequence of at least about 20 (e.g., at least about 40, 80, 120, 150, 200, 300, 500, or 1 kb) nucleotides 3′ to the second region.

[0350] In another aspect, the present disclosure provides a method for modifying a target nucleic acid locus of interest. The method may comprise delivering to the target nucleic acid locus any of the non-natural systems disclosed herein, including an enzyme and at least one synthetic guide RNA (sgRNA) disclosed herein. The enzyme may form a complex with the at least one sgRNA, and upon binding of the complex to the target nucleic acid locus of interest, may modify the target nucleic acid locus of interest. Delivering the enzyme to said locus may comprise transfecting a cell with the system or nucleic acids encoding the system. Delivering the nuclease to said locus may comprise electroporating a cell with the system or nucleic acids encoding the system. Delivering the nuclease to said locus may comprise incubating the system in a buffer with a nucleic acid comprising the locus of interest. In some cases, the target nucleic acid locus comprises deoxyribonucleic acid (DNA) or ribonucleic acid (RNA). The target nucleic acid locus may comprise genomic DNA, viral DNA, viral RNA, or bacterial DNA. The target nucleic acid locus may be within a cell. The target nucleic acid locus may be in vitro. The target nucleic acid locus may be within a eukaryotic cell or a prokaryotic cell. The cell may be an animal cell, a human cell, bacterial cell, archaeal cell, or a plant cell. The enzyme may induce a single or double-stranded break at or proximal to the target locus of interest.

[0351] In cases where the target nucleic acid locus may be within a cell, the enzyme may be supplied as a nucleic acid containing an open reading frame encoding the enzyme having a RuvC_III domain having at least about 75% (e.g., at least about 90%, at least about 91%, at least about 92%, at least about 93%, at least about 94%, at least about 95%, at least about 96%, at least about 97%, at least about 98%, at least about 99%) identity to any one of SEQ ID NOs: 3331-3474. The deoxyribonucleic acid (DNA) containing an open reading frame encoding said endonuclease may comprise a sequence substantially identical to SEQ ID NOs: 5585 or at variant having at least about 30%, at least about 35%, at least about 40%, at least about 45%, at least about 50%, at least about 55%, at least about 60%, at least about 65%, at least about 70%, at least about 75%, at least about 80%, at least about 85%, at least about 90%, at least about 95%, at least about 96%, at least about 97%, at least about 98%, or at least about 99% identity to SEQ ID NOs: 5585. In some cases, the nucleic acid comprises a promoter to which the open reading frame encoding the endonuclease is operably linked. The promoter may be a CMV, EF1a, SV40, PGK1, Ubc, human beta actin, CAG, TRE, or CaMKIIa promoter. The endonuclease may be supplied as a capped mRNA containing said open reading frame encoding said endonuclease. The endonuclease may be supplied as a translated polypeptide. The at least one engineered sgRNA may be supplied as deoxyribonucleic acid (DNA) containing a gene sequence encoding said at least one engineered sgRNA operably linked to a ribonucleic acid (RNA) pol III promoter. In some cases, the organism may be eukaryotic. In some cases, the organism may be fungal. In some cases, the organism may be human.

[0352] MG22 Enzymes

[0353] In one aspect, the present disclosure provides for an engineered nuclease system comprising (a) an endonuclease. In some cases, the endonuclease is a Cas endonuclease. In some cases, the endonuclease is a Type II, Class II Cas endonuclease. The endonuclease may comprise a RuvC_III domain, wherein said RuvC_III domain has at least about 70% sequence identity to any one of SEQ ID NOs: 3475-3568. In some cases, the endonuclease may comprise a RuvC_III domain, wherein the RuvC_III domain has at least about 20%, at least about 25%, at least about 30%, at least about 35%, at least about 40%, at least about 45%, at least about 50%, at least about 55%, at least about 60%, at least about 65%, at least about 70%, at least about 75%, at least about 80%, at least about 85%, at least about 90%, at least about 91%, at least about 92%, at least about 93%, at least about 94%, at least about 95%, at least about 96%, at least about 97%, at least about 98%, at least about 99% identity to any one of SEQ ID NOs: 3475-3568. In some cases, the endonuclease may comprise a RuvC_III domain, wherein the substantially identical to any one of SEQ ID NOs: 3475-3568. The endonuclease may comprise a RuvC_III domain having at least about 70% sequence identity to any one of SEQ ID NOs: 3475-3568. In some cases, the endonuclease may comprise a RuvC_III domain having at least about 20%, at least about 25%, at least about 30%, at least about 35%, at least about 40%, at least about 45%, at least about 50%, at least about 55%, at least about 60%, at least about 65%, at least about 70%, at least about 75%, at least about 80%, at least about 85%, at least about 90%, at least about 91%, at least about 92%, at least about 93%, at least about 94%, at least about 95%, at least about 96%, at least about 97%, at least about 98%, at least about 99% identity to any one of SEQ ID NOs: 3475-3568. In some cases, the endonuclease may comprise a RuvC_III domain substantially identical to any one of SEQ ID NOs: 3475-3568.

[0354] The endonuclease may comprise an HNH domain having at least about 70% identity to any one of SEQ ID NOs: 5291-5389. In some cases, the endonuclease may comprise an HNH domain having at least about 70%, at least about 75%, at least about 80%, at least about 85%, at least about 90%, at least about 91%, at least about 92%, at least about 93%, at least about 94%, at least about 95%, at least about 96%, at least about 97%, at least about 98%, or at least about 99% identical to any one of SEQ ID NOs: 5291-5389. The endonuclease may comprise an HNH domain substantially identical to any one of SEQ ID NOs: 5291-5389. The endonuclease may comprise an HNH domain having at least about 70% identity to any one of SEQ ID NOs: 5291-5389. In some cases, the endonuclease may comprise an HNH domain having at least about 70%, at least about 75%, at least about 80%, at least about 85%, at least about 90%, at least about 91%, at least about 92%, at least about 93%, at least about 94%, at least about 95%, at least about 96%, at least about 97%, at least about 98%, or at least about 99% identical to any one of SEQ ID NOs: 5291-5389. The endonuclease may comprise an HNH domain substantially identical to any one of SEQ ID NOs: 5291-5389.

[0355] In some cases, the endonuclease may comprise a variant having at least about 30%, at least about 35%, at least about 40%, at least about 45%, at least about 50%, at least about 55%, at least about 60%, at least about 65%, at least about 70%, at least about 75%, at least about 80%, at least about 85%, at least about 90%, at least about 95%, at least about 96%, at least about 97%, at least about 98%, or at least about 99% identity to any one of SEQ ID NOs: 1656-1755. In some cases, the endonuclease may be substantially identical to any one of SEQ ID NOs: 1656-1755. In some cases, the endonuclease may comprise a variant having at least about 30%, at least about 35%, at least about 40%, at least about 45%, at least about 50%, at least about 55%, at least about 60%, at least about 65%, at least about 70%, at least about 75%, at least about 80%, at least about 85%, at least about 90%, at least about 95%, at least about 96%, at least about 97%, at least about 98%, or at least about 99% identity to any one of SEQ ID NOs: 1656-1755. In some cases, the endonuclease may be substantially identical to any one of SEQ ID NOs: 1656-1755.

[0356] In some cases, the endonuclease may comprise a variant having one or more nuclear localization sequences (NLSs). The NLS may be proximal to the N- or C-terminus of said endonuclease. The NLS may be appended N-terminal or C-terminal to any one of SEQ ID NOs: 432-660, or to a variant having at least about 30%, at least about 35%, at least about 40%, at least about 45%, at least about 50%, at least about 55%, at least about 60%, at least about 65%, at least about 70%, at least about 75%, at least about 80%, at least about 85%, at least about 90%, at least about 95%, at least about 96%, at least about 97%, at least about 98%, or at least about 99% identity to any one of SEQ ID NOs: 1656-1755. The NLS may be an SV40 large T antigen NLS. The NLS may be a c-myc NLS. The NLS can comprise a sequence with at least about 80%, at least about 85%, at least about 90%, at least about 95%, at least about 99% identity to any one of SEQ ID NOs: 5593-5608. The NLS can comprise a sequence substantially identical to any one of SEQ ID NOs: 5593-5608. The NLS can comprise any of the sequences in Table 1 or a combination thereof.

[0357] In some cases, sequence identity may be determined by the BLASTP, CLUSTALW, MUSCLE, MAFFT, Novafold, or Smith-Waterman homology search algorithm. The sequence identity may be determined by the BLASTP algorithm using parameters of a wordlength (W) of 3, an expectation (E) of 10, and using a BLOSUM62 scoring matrix setting gap costs at existence of 11, extension of 1, and using a conditional compositional score matrix adjustment.

[0358] In some cases, the system above may comprise (b) at least one engineered synthetic guide ribonucleic acid (sgRNA) capable of forming a complex with the endonuclease bearing a 5′ targeting region complementary to a desired cleavage sequence. In some cases, the 5′ targeting region may comprises a PAM sequence compatible with the endonuclease. In some cases, the 5′ most nucleotide of the targeting region may be G. In some cases, the 5′ targeting region may be 15-23 nucleotides in length. The guide sequence and the tracr sequence may be supplied as separate ribonucleic acids (RNAs) or a single ribonucleic acid (RNA). The guide RNA may comprise a crRNA tracrRNA binding sequence 3′ to the targeting region. The guide RNA may comprise a tracrRNA sequence preceded by a 4-nucleotide linker 3′ to the crRNA tracrRNA binding region. The sgRNA may comprise, from 5′ to 3′: a non-natural guide nucleic acid sequence capable of hybridizing to a target sequence in a cell; and a tracr sequence. In some cases, the non-natural guide nucleic acid sequence and the tracr sequence are covalently linked.

[0359] In some cases, the tracr sequence may have a particular sequence. The tracr sequence may have at least about 80% to at least about 60-100 (e.g., at least about 60, at least about 65, at least about 70, at least about 75, at least about 80, at least about 85, or at least about 90) consecutive nucleotides of a natural tracrRNA sequence. The tracr sequence may have at least about 80% sequence identity to at least about 60-100 (e.g., at least about 60, at least about 65, at least about 70, at least about 75, at least about 80, at least about 85, or at least about 90) consecutive nucleotides of SEQ ID NO: 5510. In some cases, the tracrRNA may have at least about 80%, at least about 85%, at least about 90%, at least about 91%, at least about 92%, at least about 93%, at least about 94%, at least about 95%, at least about 96%, at least about 97%, at least about 98%, or at least about 99% identity to at least about 60-90 (e.g., at least about 60, at least about 65, at least about 70, at least about 75, at least about 80, at least about 85, or at least about 90) consecutive nucleotides of SEQ ID NO: 5510. In some cases, the tracrRNA may be substantially identical to at least about 60-100 (e.g., at least about 60, at least about 65, at least about 70, at least about 75, at least about 80, at least about 85, or at least about 90) consecutive nucleotides of SEQ ID NO: 5510. The tracrRNA may comprise SEQ ID NO: 5510.

[0360] In some cases, the at least one engineered synthetic guide ribonucleic acid (sgRNA) capable of forming a complex with the endonuclease may comprise a sequence having at least about 80% identity to SEQ ID NO: 5474. The sgRNA may comprise a sequence having at least about 80%, at least about 85%, at least about 90%, at least about 91%, at least about 92%, at least about 93%, at least about 94%, at least about 95%, at least about 96%, at least about 97%, at least about 98%, or at least about 99% identity to SEQ ID NO: 5474. The sgRNA may comprise a sequence substantially identical to SEQ ID NO: 5474.

[0361] In some cases, the system above may comprise two different sgRNAs targeting a first region and a second region for cleavage in a target DNA locus, wherein the second region is 3′ to the first region. In some cases, the system above may comprise a single- or double-stranded DNA repair template comprising from 5′ to 3′: a first homology arm comprising a sequence of at least about 20 (e.g., at least about 40, 80, 120, 150, 200, 300, 500, or 1 kb) nucleotides 5′ to the first region, a synthetic DNA sequence of at least about 10 nucleotides, and a second homology arm comprising a sequence of at least about 20 (e.g., at least about 40, 80, 120, 150, 200, 300, 500, or 1 kb) nucleotides 3′ to the second region.

[0362] In another aspect, the present disclosure provides a method for modifying a target nucleic acid locus of interest. The method may comprise delivering to the target nucleic acid locus any of the non-natural systems disclosed herein, including an enzyme and at least one synthetic guide RNA (sgRNA) disclosed herein. The enzyme may form a complex with the at least one sgRNA, and upon binding of the complex to the target nucleic acid locus of interest, may modify the target nucleic acid locus of interest. Delivering the enzyme to said locus may comprise transfecting a cell with the system or nucleic acids encoding the system. Delivering the nuclease to said locus may comprise electroporating a cell with the system or nucleic acids encoding the system. Delivering the nuclease to said locus may comprise incubating the system in a buffer with a nucleic acid comprising the locus of interest. In some cases, the target nucleic acid locus comprises deoxyribonucleic acid (DNA) or ribonucleic acid (RNA). The target nucleic acid locus may comprise genomic DNA, viral DNA, viral RNA, or bacterial DNA. The target nucleic acid locus may be within a cell. The target nucleic acid locus may be in vitro. The target nucleic acid locus may be within a eukaryotic cell or a prokaryotic cell. The cell may be an animal cell, a human cell, bacterial cell, archaeal cell, or a plant cell. The enzyme may induce a single or double-stranded break at or proximal to the target locus of interest.

[0363] In cases where the target nucleic acid locus may be within a cell, the enzyme may be supplied as a nucleic acid containing an open reading frame encoding the enzyme having a RuvC_III domain having at least about 75% (e.g., at least about 90%, at least about 91%, at least about 92%, at least about 93%, at least about 94%, at least about 95%, at least about 96%, at least about 97%, at least about 98%, at least about 99%) identity to any one of SEQ ID NOs: 3475-3568. The deoxyribonucleic acid (DNA) containing an open reading frame encoding said endonuclease may comprise a sequence substantially identical to SEQ ID NOs: 5586 or at variant having at least about 30%, at least about 35%, at least about 40%, at least about 45%, at least about 50%, at least about 55%, at least about 60%, at least about 65%, at least about 70%, at least about 75%, at least about 80%, at least about 85%, at least about 90%, at least about 95%, at least about 96%, at least about 97%, at least about 98%, or at least about 99% identity to SEQ ID NOs: 5586. In some cases, the nucleic acid comprises a promoter to which the open reading frame encoding the endonuclease is operably linked. The promoter may be a CMV, EF1a, SV40, PGK1, Ubc, human beta actin, CAG, TRE, or CaMKIIa promoter. The endonuclease may be supplied as a capped mRNA containing said open reading frame encoding said endonuclease. The endonuclease may be supplied as a translated polypeptide. The at least one engineered sgRNA may be supplied as deoxyribonucleic acid (DNA) containing a gene sequence encoding said at least one engineered sgRNA operably linked to a ribonucleic acid (RNA) pol III promoter. In some cases, the organism may be eukaryotic. In some cases, the organism may be fungal. In some cases, the organism may be human.

[0364] MG23 Enzymes

[0365] In one aspect, the present disclosure provides for an engineered nuclease system comprising (a) an endonuclease. In some cases, the endonuclease is a Cas endonuclease. In some cases, the endonuclease is a Type II, Class II Cas endonuclease. The endonuclease may comprise a RuvC_III domain, wherein said RuvC_III domain has at least about 70% sequence identity to any one of SEQ ID NOs: 3569-3637. In some cases, the endonuclease may comprise a RuvC_III domain, wherein the RuvC_III domain has at least about 20%, at least about 25%, at least about 30%, at least about 35%, at least about 40%, at least about 45%, at least about 50%, at least about 55%, at least about 60%, at least about 65%, at least about 70%, at least about 75%, at least about 80%, at least about 85%, at least about 90%, at least about 91%, at least about 92%, at least about 93%, at least about 94%, at least about 95%, at least about 96%, at least about 97%, at least about 98%, at least about 99% identity to any one of SEQ ID NOs: 3569-3637. In some cases, the endonuclease may comprise a RuvC_III domain, wherein the substantially identical to any one of SEQ ID NOs: 3569-3637. The endonuclease may comprise a RuvC_III domain having at least about 70% sequence identity to any one of SEQ ID NOs: 3569-3637. In some cases, the endonuclease may comprise a RuvC_III domain having at least about 20%, at least about 25%, at least about 30%, at least about 35%, at least about 40%, at least about 45%, at least about 50%, at least about 55%, at least about 60%, at least about 65%, at least about 70%, at least about 75%, at least about 80%, at least about 85%, at least about 90%, at least about 91%, at least about 92%, at least about 93%, at least about 94%, at least about 95%, at least about 96%, at least about 97%, at least about 98%, at least about 99% identity to any one of SEQ ID NOs: 3569-3637. In some cases, the endonuclease may comprise a RuvC_III domain substantially identical to any one of SEQ ID NOs: 3569-3637.

[0366] The endonuclease may comprise an HNH domain having at least about 70% identity to any one of SEQ ID NOs: 5390-5460. In some cases, the endonuclease may comprise an HNH domain having at least about 70%, at least about 75%, at least about 80%, at least about 85%, at least about 90%, at least about 91%, at least about 92%, at least about 93%, at least about 94%, at least about 95%, at least about 96%, at least about 97%, at least about 98%, or at least about 99% identical to any one of SEQ ID NOs: 5390-5460. The endonuclease may comprise an HNH domain substantially identical to any one of SEQ ID NOs: 5390-5460. The endonuclease may comprise an HNH domain having at least about 70% identity to any one of SEQ ID NOs: 5390-5460. In some cases, the endonuclease may comprise an HNH domain having at least about 70%, at least about 75%, at least about 80%, at least about 85%, at least about 90%, at least about 91%, at least about 92%, at least about 93%, at least about 94%, at least about 95%, at least about 96%, at least about 97%, at least about 98%, or at least about 99% identical to any one of SEQ ID NOs: 5390-5460. The endonuclease may comprise an HNH domain substantially identical to any one of SEQ ID NOs: 5390-5460.

[0367] In some cases, the endonuclease may comprise a variant having at least about 30%, at least about 35%, at least about 40%, at least about 45%, at least about 50%, at least about 55%, at least about 60%, at least about 65%, at least about 70%, at least about 75%, at least about 80%, at least about 85%, at least about 90%, at least about 95%, at least about 96%, at least about 97%, at least about 98%, or at least about 99% identity to any one of SEQ ID NOs: 1756-1826. In some cases, the endonuclease may be substantially identical to any one of SEQ ID NOs: 1756-1826. In some cases, the endonuclease may comprise a variant having at least about 30%, at least about 35%, at least about 40%, at least about 45%, at least about 50%, at least about 55%, at least about 60%, at least about 65%, at least about 70%, at least about 75%, at least about 80%, at least about 85%, at least about 90%, at least about 95%, at least about 96%, at least about 97%, at least about 98%, or at least about 99% identity to any one of SEQ ID NOs: 1756-1826. In some cases, the endonuclease may be substantially identical to any one of SEQ ID NOs: 1756-1826.

[0368] In some cases, the endonuclease may comprise a variant having one or more nuclear localization sequences (NLSs). The NLS may be proximal to the N- or C-terminus of said endonuclease. The NLS may be appended N-terminal or C-terminal to any one of SEQ ID NOs: 1756-1826, or to a variant having at least about 30%, at least about 35%, at least about 40%, at least about 45%, at least about 50%, at least about 55%, at least about 60%, at least about 65%, at least about 70%, at least about 75%, at least about 80%, at least about 85%, at least about 90%, at least about 95%, at least about 96%, at least about 97%, at least about 98%, or at least about 99% identity to any one of SEQ ID NOs: 1756-1826. The NLS may be an SV40 large T antigen NLS. The NLS may be a c-myc NLS. The NLS can comprise a sequence with at least about 80%, at least about 85%, at least about 90%, at least about 95%, at least about 99% identity to any one of SEQ ID NOs: 5593-5608. The NLS can comprise a sequence substantially identical to any one of SEQ ID NOs: 5593-5608. The NLS can comprise any of the sequences in Table 1 or a combination thereof.

[0369] In some cases, sequence identity may be determined by the BLASTP, CLUSTALW, MUSCLE, MAFFT, Novafold, or Smith-Waterman homology search algorithm. The sequence identity may be determined by the BLASTP algorithm using parameters of a wordlength (W) of 3, an expectation (E) of 10, and using a BLOSUM62 scoring matrix setting gap costs at existence of 11, extension of 1, and using a conditional compositional score matrix adjustment.

[0370] In some cases, the system above may comprise (b) at least one engineered synthetic guide ribonucleic acid (sgRNA) capable of forming a complex with the endonuclease bearing a 5′ targeting region complementary to a desired cleavage sequence. In some cases, the 5′ targeting region may comprises a PAM sequence compatible with the endonuclease. In some cases, the 5′ most nucleotide of the targeting region may be G. In some cases, the 5′ targeting region may be 15-23 nucleotides in length. The guide sequence and the tracr sequence may be supplied as separate ribonucleic acids (RNAs) or a single ribonucleic acid (RNA). The guide RNA may comprise a crRNA tracrRNA binding sequence 3′ to the targeting region. The guide RNA may comprise a tracrRNA sequence preceded by a 4-nucleotide linker 3′ to the crRNA tracrRNA binding region. The sgRNA may comprise, from 5′ to 3′: a non-natural guide nucleic acid sequence capable of hybridizing to a target sequence in a cell; and a tracr sequence. In some cases, the non-natural guide nucleic acid sequence and the tracr sequence are covalently linked.

[0371] In some cases, the tracr sequence may have a particular sequence. The tracr sequence may have at least about 80% to at least about 60-100 (e.g., at least about 60, at least about 65, at least about 70, at least about 75, at least about 80, at least about 85, or at least about 90) consecutive nucleotides of a natural tracrRNA sequence. The tracr sequence may have at least about 80% sequence identity to at least about 60-100 (e.g., at least about 60, at least about 65, at least about 70, at least about 75, at least about 80, at least about 85, or at least about 90) consecutive nucleotides of SEQ ID NO: 5511. In some cases, the tracrRNA may have at least about 80%, at least about 85%, at least about 90%, at least about 91%, at least about 92%, at least about 93%, at least about 94%, at least about 95%, at least about 96%, at least about 97%, at least about 98%, or at least about 99% identity to at least about 60-90 (e.g., at least about 60, at least about 65, at least about 70, at least about 75, at least about 80, at least about 85, or at least about 90) consecutive nucleotides of SEQ ID NO: 5511. In some cases, the tracrRNA may be substantially identical to at least about 60-100 (e.g., at least about 60, at least about 65, at least about 70, at least about 75, at least about 80, at least about 85, or at least about 90) consecutive nucleotides of SEQ ID NO: 5511. The tracrRNA may comprise SEQ ID NO: 5511.

[0372] In some cases, the at least one engineered synthetic guide ribonucleic acid (sgRNA) capable of forming a complex with the endonuclease may comprise a sequence having at least about 80% identity to SEQ ID NO: 5475. The sgRNA may comprise a sequence having at least about 80%, at least about 85%, at least about 90%, at least about 91%, at least about 92%, at least about 93%, at least about 94%, at least about 95%, at least about 96%, at least about 97%, at least about 98%, or at least about 99% identity to SEQ ID NO: 5475. The sgRNA may comprise a sequence substantially identical to SEQ ID NO: 5475.

[0373] In some cases, the system above may comprise two different sgRNAs targeting a first region and a second region for cleavage in a target DNA locus, wherein the second region is 3′ to the first region. In some cases, the system above may comprise a single- or double-stranded DNA repair template comprising from 5′ to 3′: a first homology arm comprising a sequence of at least about 20 (e.g., at least about 40, 80, 120, 150, 200, 300, 500, or 1 kb) nucleotides 5′ to the first region, a synthetic DNA sequence of at least about 10 nucleotides, and a second homology arm comprising a sequence of at least about 20 (e.g., at least about 40, 80, 120, 150, 200, 300, 500, or 1 kb) nucleotides 3′ to the second region.

[0374] In another aspect, the present disclosure provides a method for modifying a target nucleic acid locus of interest. The method may comprise delivering to the target nucleic acid locus any of the non-natural systems disclosed herein, including an enzyme and at least one synthetic guide RNA (sgRNA) disclosed herein. The enzyme may form a complex with the at least one sgRNA, and upon binding of the complex to the target nucleic acid locus of interest, may modify the target nucleic acid locus of interest. Delivering the enzyme to said locus may comprise transfecting a cell with the system or nucleic acids encoding the system. Delivering the nuclease to said locus may comprise electroporating a cell with the system or nucleic acids encoding the system. Delivering the nuclease to said locus may comprise incubating the system in a buffer with a nucleic acid comprising the locus of interest. In some cases, the target nucleic acid locus comprises deoxyribonucleic acid (DNA) or ribonucleic acid (RNA). The target nucleic acid locus may comprise genomic DNA, viral DNA, viral RNA, or bacterial DNA. The target nucleic acid locus may be within a cell. The target nucleic acid locus may be in vitro. The target nucleic acid locus may be within a eukaryotic cell or a prokaryotic cell. The cell may be an animal cell, a human cell, bacterial cell, archaeal cell, or a plant cell. The enzyme may induce a single or double-stranded break at or proximal to the target locus of interest.

[0375] In cases where the target nucleic acid locus may be within a cell, the enzyme may be supplied as a nucleic acid containing an open reading frame encoding the enzyme having a RuvC_III domain having at least about 75% (e.g., at least about 90%, at least about 91%, at least about 92%, at least about 93%, at least about 94%, at least about 95%, at least about 96%, at least about 97%, at least about 98%, at least about 99%) identity to any one of SEQ ID NOs: 3569-3637. The deoxyribonucleic acid (DNA) containing an open reading frame encoding said endonuclease may comprise a sequence substantially identical to SEQ ID NOs: 5587 or at variant having at least about 30%, at least about 35%, at least about 40%, at least about 45%, at least about 50%, at least about 55%, at least about 60%, at least about 65%, at least about 70%, at least about 75%, at least about 80%, at least about 85%, at least about 90%, at least about 95%, at least about 96%, at least about 97%, at least about 98%, or at least about 99% identity to SEQ ID NOs: 5587. In some cases, the nucleic acid comprises a promoter to which the open reading frame encoding the endonuclease is operably linked. The promoter may be a CMV, EF1a, SV40, PGK1, Ubc, human beta actin, CAG, TRE, or CaMKIIa promoter. The endonuclease may be supplied as a capped mRNA containing said open reading frame encoding said endonuclease. The endonuclease may be supplied as a translated polypeptide. The at least one engineered sgRNA may be supplied as deoxyribonucleic acid (DNA) containing a gene sequence encoding said at least one engineered sgRNA operably linked to a ribonucleic acid (RNA) pol III promoter. In some cases, the organism may be eukaryotic. In some cases, the organism may be fungal. In some cases, the organism may be human.

### EXAMPLES

### Example 1.—Metagenomic Analysis for New Proteins

[0376] Metagenomic samples were collected from sediment, soil and animal. Deoxyribonucleic acid (DNA) was extracted with a Zymobiomics DNA mini-prep kit and sequenced on an Illumina HiSeq® 2500. Samples were collected with consent of property owners. Additional raw sequence data from public sources included animal microbiomes, sediment, soil, hot springs, hydrothermal vents, marine, peat bogs, permafrost, and sewage sequences. Metagenomic sequence data was searched using Hidden Markov Models generated based on known Cas protein sequences including type II Cas effector proteins. Novel effector proteins identified by the search were aligned to known proteins to identify potential active sites. This metagenomic workflow resulted in delineation of the MG1, MG2, MG3, MG4, MG6, MG14, MG15, MG16, MG18, MG21, MG22, and MG23 families of class II, type II CRISPR endonucleases described herein.

### Example 2A. —Discovery of an MG1 Family of CRISPR Systems

[0377] Analysis of the data from the metagenomic analysis of Example 1 revealed a new cluster of previously undescribed putative CRISPR systems initially comprising six members (MG1-1, MG1-2, MG1-3, MG1-4, MG1-5, and MG1-6 recorded as SEQ ID NOs: 5, 6, 1, 2, and 3 respectively). This family is characterized by an enzyme bearing HNH and RuvC domains. The RuvC domains of this family have a RuvC_III portion having low homology to previously described Cas9 family members. Although the initial family members have a maximum of 56.8% identity among them, all 6 enzymes exhibit a divergent RuvC_III portion of the RuvC domain and bear the common motif of RHHALDAMV (SEQ ID NO:5615), KHHALDAMC (SEQ ID NO:5616), or KHHALDAIC (SEQ ID NO:5617). These motifs are not found in other described Cas9-like enzymes. The corresponding protein and nucleic acid sequences for these new enzymes and their relevant subdomains are presented in the sequence listing. Putative tracrRNA sequences were identified based on their location relative to the other genes and are presented as SEQ ID NOs: 5476-5479. The enzyme systems appear to derive from the Phylum Verrucomicrobia, the Phylum Candidatus Peregrinibacteria, or the Phylum Candidatus Melainabacteria based on the sequences of 16S rRNAs from genome bins containing the CRISPR systems. The 16S rRNA sequences are presented as SEQ ID NOs: 5592-5596). A detailed domain-level alignment of the CRISPR system sequences together calling out the features described by Shmakov et al. (Mol Cell. 2015 Nov. 5; 60(3):385-97), which is entirely incorporated by reference) is depicted in FIGS. 9A, 9B, 9C, 9D, 9E, 9F, 9G, and 9H. A comparison of MG1-1, 1-2, and 1-3 versus additional proprietary protein datasets revealed additional protein sequences with similar architecture, presented as SEQ NOs: 7-319. These MG1 protein sequences led to the discovery of additional MG1 motifs as shown in SEQ ID NOs: 5618-5632.

### Example 2B. —Discovery of an MG2 Family of CRISPR Systems

[0378] Analysis of data from the metagenomic analysis of Example 1 revealed a new cluster of previously undescribed putative CRISPR systems comprising six members (MG2-1, MG2-2, MG2-3, MG2-5, and MG2-6). The corresponding protein and nucleic acid sequences for these new enzymes and exemplary subdomains are presented as SEQ ID NOs: 320, 322-325. Based on their location relative to the other genes, putative tracrRNA sequences were identified in the operon and are presented as SEQ ID NOs: 5490, 5492-5494, and 5538. A detailed domain-level alignment of these sequences versus Cas9 as outlined in Shmakov et al. (Mol Cell. 2015 Nov. 5; 60(3):385-97), is depicted in FIG. 7.

[0379] A comparison of MG2-1, MG2-2, MG2-3, MG2-5, and MG2-6 versus additional proprietary protein datasets revealed additional protein sequences with similar architecture, presented as SEQ NOs: 321 and 326-420. Motifs commonly found in MG2 family members are presented as SEQ ID NOs: 5631-5638.

### Example 2C. —Discovery of an MG3 Family of CRISPR Systems

[0380] Analysis of the data from the metagenomic analysis of Example 1 revealed a new previously undescribed putative CRISPR system: MG3-1. The corresponding amino acid sequences for this new enzyme and its exemplary subdomains are presented as SEQ ID NOs: 424, 2245, and 4059. Based on proximity to the other elements in the operon, a putative tracrRNA containing sequence was identified and is included as SEQ ID NO: 5498. A detailed domain-level alignment of the sequence versus Cas9 from Actinomyces naeslundii is depicted in FIG. 8.

[0381] A comparison of MG3-1 versus additional proprietary protein datasets revealed additional protein sequences with similar architecture, presented as SEQ NOs: 421-423, 425-431.

### Example 2D. —Discovery of MG4, 7, 14, 15, 16, 18, 21, 22, 23 Families of CRISPR Systems

[0382] Analysis of the data from the metagenomic analysis of Example 1 revealed new clusters of previously undescribed putative CRISPR systems comprising 9 families of one member each (MG 4-5, MG7-2, MG14-1, MG15-1, MG16-2, MG18-1, MG21-1, MG22-1, MG23-1). The corresponding protein and nucleic acid sequences for these new enzymes and their exemplary subdomains are presented as SEQ ID NOs: 432, 669, 678, 930, 1093, 1354, 1512, 1656, 1756. Based on proximity to the other elements in the operon, a putative tracr containing sequence was identified for each family. These sequences are presented in the sequence listing as SEQ ID NOs: 5503-5511, respectively.

[0383] A comparison of MG 4-5, MG7-2, MG14-1, MG15-1, MG16-2, MG18-1, MG21-1, MG22-1, MG23-1 versus additional proprietary protein datasets revealed additional protein sequences with similar architecture, presented as SEQ NOs: 433-660, 670-677, 679-929, 931-1092, 1094-1353, 1355-1511, 1513-1655, 1657-1755, and 1757-1826. Motifs common to the nucleases of these sets of CRISPR systems are presented as SEQ ID NO: 5649 for MG4; SEQ ID NOs: 5650-5667 for MG14; 5668-5675 for MG15; SEQ ID NOs: 5676-5678 for MG16; SEQ ID NOs: 5679-5686 for MG18; SEQ ID NOs: 5687-5693 and SEQ ID NOs: 5674-5675 for MG21; SEQ ID NOs: 5694-5699 for MG22; and SEQ ID NOs: 5700-5717 for MG23.

### Example 3. —Prophetic—Determination of Protospacer-Adjacent Motif

[0384] Experiments are performed as in any of the examples in Karvelis et al. Methods. 2017 May 15; 121-122:3-8, which is entirely incorporated by reference herein, to identify the protospacer adjacent motif (PAM) sequence specificity for the novel enzymes described herein to allow for optimal synthetic sequence targeting.

[0385] In one example (in-vivo screen), cells bearing plasmids encoding any of the enzymes described herein and protospacer-targeting guide RNA are co-transformed with a plasmid library containing an antibiotic resistance gene, and a protospacer sequence flanked by a randomized PAM sequence. Plasmids containing functional PAMs are cleaved by the enzyme, leading to cell death. Deep-sequencing of the enzyme cleavage-resistant plasmid pool isolated from the surviving cells displays a set of depleted plasmids that contain functional cleavage-permitting PAMs.

[0386] In another example (in vitro screen), PAM library in the form of DNA plasmid or concatemeric repeats is subjected to cleavage by the RNP complex (e.g., including the enzyme, tracrRNA and crRNA or the enzyme and hybrid sgRNA) assembled in vitro or in cell lysates. Resulting free DNA ends from successful cleavage events are captured by adapter ligation, followed by the PCR amplification of the PAM-sided products. Amplified library of functional PAMs is subjected to deep sequencing and PAMs licensing DNA cleavage are identified.

### Example 4. —Prophetic—Use of Synthetic CRISPR System as Described Herein in a Mammalian Cell for Genome Editing

[0387] DNA/RNA sequences encoding (i) an ORF encoding codon-optimized enzyme under a cell-compatible promoter with a cell-compatible C-terminal nuclear localization sequence (e.g., SV40 NLS in the case of human cells) and a suitable polyadenylation signal (e.g., TK pA signal in the case of human cells); and (ii) an ORF encoding an sgRNA (having a 5′ sequence beginning with G followed by 20 nt of a complementary targeting nucleic acid sequence targeting genomic DNA followed by a corresponding compatible PAM identified via Example 3 and a 3′ tracr-binding sequence, a linker, and the tracrRNA sequence) under a suitable Polymerase III promoter (e.g., the U6 promoter in mammalian cells) are prepared. In some embodiments, these sequences are prepared on the same or separate plasmid vectors, which are transfected via a suitable technique into eukaryotic cells. In some embodiments, these sequences are prepared as separate DNA sequences, which are transfected or microinjected into cells. In some embodiments, these sequences are prepared as synthesized RNAs or in-vitro transcribed RNAs which are transfected or microinjected into cells. In some embodiments, these sequences are translated into proteins and transfected or microinjected into cells.

[0388] Whichever transfection method is selected, (i) and (ii) are introduced into cells. A period of incubation is allowed to pass so that the enzyme and/or sgRNA can be transcribed and/or translated into active form. After the incubation period, genomic DNA in the vicinity of the targeting sequence is analyzed (e.g., by sequencing). An indel is introduced into the genomic DNA in the vicinity of the targeting sequence as a result of enzyme-mediated cleavage and non-homologous end joining.

[0389] In some embodiments, (i) and (ii) are introduced into cells with a third repair nucleotide that encodes regions of the genome flanking the cleavage site of sizes 25 bp or larger, which will facilitate homology directed repair. Containing within these flanking sequences may be a single base pair mutation, a functional gene fragment, a foreign or native gene for expression, or several genes composing a biochemical pathway.

### Example 5. —Prophetic—Use of Synthetic CRISPR System as Described Herein In Vitro

[0390] Any of the enzymes described herein are cloned into a suitable E. coli expression plasmid containing a purification tag and are recombinantly expressed in E. coli and purified using the recombinant tag. RNAs comprising a 5′ G followed by a 20 nt targeting sequence and PAM sequence, a tracrRNA binding region of a compatible crRNA, a GAAA linker, and a compatible tracrRNA are synthesized by suitable solid-phase RNA synthesis methods. Recombinant enzymes and sgRNA are combined in a suitable cleavage buffer containing Mg2+ (e.g., 20 mM HEPES pH 7.5, 100 mM KCl, 5 mM MgCl₂, 1 mM DTT, 5% glycerol) and the reaction is initiated by introducing a target DNA including a sequence complementary to the targeting sequence and PAM sequence. Cleavage of the DNA is monitored by a suitable assay (e.g., agarose gel electrophoresis followed by ethidium bromide staining (or similarly acting DNA-intercalating agent) and UV visualization).

### Example 6. —(General Protocol) PAM Sequence Identification/Confirmation for the Endonucleases Described Herein

[0391] PAM sequences were determined by sequencing plasmids containing randomly-generated PAM sequences that could be cleaved by putative endonucleases expressed in an E. coli lysate-based expression system (myTXTL, Arbor Biosciences). In this system, an E. coli codon optimized nucleotide sequence was transcribed and translated from a PCR fragment under control of a T7 promoter. A second PCR fragment with a tracr sequence under a T7 promoter and a minimal CRISPR array composed of a T7 promoter followed by a repeat-spacer-repeat sequence was transcribed in the same reaction. Successful expression of the endonuclease and tracr sequence in the TXTL system followed by CRISPR array processing provided active in vitro CRISPR nuclease complexes.

[0392] A library of target plasmids containing a spacer sequence matching that in the minimal array followed by 8N mixed bases (putative PAM sequences) was incubated with the output of the TXTL reaction. After 1-3 hr, the reaction was stopped and the DNA was recovered via a DNA clean-up kit, e.g., Zymo DCC, AMPure XP beads, QiaQuick etc. Adapter sequences were blunt-end ligated to DNA with active PAM sequences that had been cleaved by the endonuclease, whereas DNA that had not been cleaved was inaccessible for ligation. DNA segments comprising active PAM sequences were then amplified by PCR with primers specific to the library and the adapter sequence. The PCR amplification products were resolved on a gel to identify amplicons that corresponded to cleavage events. The amplified segments of the cleavage reaction were also used as template for preparation of an NGS library. Sequencing this resulting library, which was a subset of the starting 8N library, revealed the sequences which contain the correct PAM for the active CRISPR complex. For PAM testing with a single RNA construct, the same procedure was repeated except that an in vitro transcribed RNA was added along with the plasmid library and the tracr/minimal CRISPR array template was omitted. For endonucleases where NGS libraries were prepared, seqLogo (see e.g., Huber et al. Nat Methods. 2015 February; 12(2):115-21) representations were constructed and are presented in FIGS. 27, 38, 29, 30, 31, 32, 33, 34, and 35. The seqLogo module used to construct these representations takes the position weight matrix of a DNA sequence motif (e.g. a PAM sequence) and plots the corresponding sequence logo as introduced by Schneider and Stephens (see e.g. Schneider et al. Nucleic Acids Res. 1990 Oct. 25; 18(20):6097-100. The characters representing the sequence in the seqLogo representations have been stacked on top of each other for each position in the aligned sequences (e.g. PAM sequences). The height of each letter is proportional to its frequency, and the letters have been sorted so the most common one is on top.

### Example 7. —(General Protocol) RNA Folding of tracrRNA and sgRNA Structures

[0393] Folded structures of guide RNA sequences at 37° C. were computed using the method of Andronescu et al. Bioinformatics. 2007 Jul. 1; 23(13):i19-28, which is incorporated by reference herein in its entirety. Predicted structures of exemplary sgRNAs described herein are presented in FIGS. 21, 22, 23, 24, 25, and 26.

### Example 8. —(General Protocol) In Vitro Cleavage Efficiency of MG CRISPR Complexes

[0394] Endonucleases were expressed as His-tagged fusion proteins from an inducible T7 promoter in a protease deficient E. coli B strain. Cells expressing the His-tagged proteins were lysed by sonication and the His-tagged proteins were purified by Ni-NTA affinity chromatography on a HisTrap FF column (GE Lifescience) on an AKTA Avant FPLC (GE Lifescience). The eluate was resolved by SDS-PAGE on acrylamide gels (Bio-Rad) and stained with InstantBlue Ultrafast coomassie (Sigma-Aldrich). Purity was determined using densitometry of the protein band with ImageLab software (Bio-Rad). Purified endonucleases were dialyzed into a storage buffer composed of 50 mM Tris-HCl, 300 mM NaCl, 1 mM TCEP, 5% glycerol; pH 7.5 and stored at −80° C.

[0395] Target DNAs containing spacer sequences and PAM sequences (determined e.g., as in Example 6) were constructed by DNA synthesis. A single representative PAM was chosen for testing when the PAM had degenerate bases. The target DNAs comprised 2200 bp of linear DNA derived from a plasmid via PCR amplification with a PAM and spacer located 700 bp from one end. Successful cleavage resulted in fragments of 700 and 1500 bp. The target DNA, in vitro transcribed single RNA, and purified recombinant protein were combined in cleavage buffer (10 mM Tris, 100 mM NaCl, 10 mM MgCl₂) with an excess of protein and RNA and incubated for 5 minutes to 3 hours, usually 1 hr. The reaction was stopped via addition of RNAse A and incubation at 60 minutes. The reaction was then resolved on a 1.2% TAE agarose gel and the fraction of cleaved target DNA is quantified in ImageLab software.

### Example 9. —(General Protocol) Testing of Genome Cleavage Activity of MG CRISPR Complexes in E. coli

[0396] E. coli lacks the capacity to efficiently repair double-stranded DNA breaks. Thus, cleavage of genomic DNA can be a lethal event. Exploiting this phenomenon, endonuclease activity was tested in E. coli by recombinantly expressing an endonuclease and a tracrRNA in a target strain with spacer/target and PAM sequences integrated into its genomic DNA.

[0397] In this assay, the PAM sequence is specific for the endonuclease being tested as determined by the methods described in Example 6. sgRNA sequences were determined based upon the sequence and predicted structure of the tracrRNA. Repeat-anti-repeat pairings of 8-12 bp (generally 10 bp) were chosen, starting from the 5′ end of the repeat. The remaining 3′ end of the repeat and 5′ end of the tracrRNA were replaced with a tetraloop. Generally, the tetraloop was GAAA, but other tetraloops can be used, particularly if the GAAA sequence is predicted to interfere with folding. In these cases, a TTCG tetraloop was used.

[0398] Engineered strains with PAM sequences integrated into their genomic DNA were transformed with DNA encoding the endonuclease. Transformants were then made chemocompetent and transformed with 50 ng of single guide RNAs either specific to the target sequence (“on target”), or non-specific to the target (“non target”). After heat shock, transformations were recovered in SOC for 2 hrs at 37 t. Nuclease efficiency was then determined by a 5-fold dilution series grown on induction media. Colonies were quantified from the dilution series in triplicate.

### Example 10a. —(General Protocol) Testing of Genome Cleavage Activity of MG CRISPR Complexes in Mammalian Cells

[0399] To show targeting and cleavage activity in mammalian cells, the MG Cas effector protein sequences were tested in two mammalian expression vectors: (a) one with a C-terminal SV40 NLS and a 2A-GFP tag, and (b) one with no GFP tag and two SV40 NLS sequences, one on the N-terminus and one on the C-terminus. In some instances, nucleotide sequences encoding the endonucleases were codon-optimized for expression in mammalian cells.

[0400] The corresponding single guide RNA sequence (sgRNA) with targeting sequence attached is cloned into a second mammalian expression vector. The two plasmids are cotransfected into HEK293T cells. 72 hr after co-transfection of the expression plasmid and a sgRNA targeting plasmid into HEK293T cells, the DNA is extracted and used for the preparation of an NGS-library. Percent NHEJ is measured via indels in the sequencing of the target site to demonstrate the targeting efficiency of the enzyme in mammalian cells. At least 10 different target sites were chosen to test each protein's activity.

### Example 10b. (General Protocol) Testing of Genome Cleavage Activity of MG CRISPR Complexes in Mammalian Cells

[0401] To show targeting and cleavage activity in mammalian cells, the MG Cas effector protein sequences were cloned into two mammalian expression vector: (a) one with flanking N and C-terminal SV40 NLS sequences, a C-terminal His tag, and a 2A-GFP tag at the C terminus after the His tag (Backbone 1), and (b) one with flanking NLS sequences and C-terminal His tag but no T2A GFP tag (Backbone 2). In some instances, nucleotide sequences encoding the endonucleases were the native sequence, codon-optimized for expression in E. coli, or codon-optimized for expression in mammalian cells.

[0402] The corresponding single guide RNA sequence (sgRNA) with targeting sequence attached was cloned into a second mammalian expression vector. The two plasmids were cotransfected into HEK293T cells. 72 hr after co-transfection of the expression plasmid and a sgRNA targeting plasmid into HEK293T cells, the DNA was extracted and used for the preparation of an NGS-library. Percent NHEJ was measured via indels in the sequencing of the target site to demonstrate the targeting efficiency of the enzyme in mammalian cells. About 7-12 different target sites were chosen for testing each protein's activity. An arbitrary threshold of 5% indels was used to identify active candidates.

### Example 11.—Characterization of MG1 Family Members

[0403] PAM Specificity, tracrRNA/sgRNA Validation

[0404] The targeted endonuclease activity of MG1 family endonuclease systems was confirmed using the myTXTL system described in Example 6. In this assay, PCR amplification of cleaved target plasmids yields a product that migrates at approximately 170 bp in the gel, as shown in FIGS. 17-20. Amplification products were observed for MG1-4 (dual guide: see gel 1, lane 3, single guide: see gel 6 lane 2), MG1-5 (gel 2 lane 10), MG1-6 (dual guide: see gel 5 lane 6, single guide see: gel 6 lane 5), and MG1-7 (dual guide: see gel 3 lane 13, single guide: see gel 3 lane 2) (protein SEQ ID NOs: 1-4, respectively). Sequencing the PCR products revealed active PAM sequences for these enzymes as shown in Table 2.

TABLE 2
PAM sequence specificities and related data for MG1 enzymes

| | Enzyme | | | | | | Synthetic |
|---|---|---|---|---|---|---|---|
| | protein | Native | | tracrRNA | sgRNA | Synthetic | (single guide) |
| | SEQ | (dual guide) | PAM SEQ | SEQ | SEQ | (single guide) | PAM SEQ |
| Enzyme | ID NO | PAM | ID NO: | ID NO: | ID NO: | PAM | ID NO: |
| MG1-4 | 1 | nRRRAA | 5527 | 5476 | 5461 | nRRR | 5512 |
| MG1-5 | 2 | nnnnCC | 5528 | 5477 | 5462 | nnnnYY | 5513 |
| MG1-6 | 3 | nnRRAC | 5529 | 5478 | 5463 | nnRRAY | 5514 |
| MG1-7 | 4 | nRRRAA | 5530 | 5479 | 5464 | nRRRAAG | 5515 |

[0405] Synthetic single guide RNAs (sgRNAs) were designed based on the sequences and predicted structures of the tracrRNAs and are presented as SEQ ID NOs: 5461-5464. The PAM sequence screen of Example 6 was repeated with the sgRNAs. The results of this experiment are also presented in Table 2, which reveals that PAM specificity changed slightly when using sgRNAs.

[0406] Targeted Endonuclease Activity In Vitro

[0407] In vitro activity of the MG1-4 endonuclease system (protein SEQ ID NO: 1 with sgRNA SEQ ID NO: 5461) on a target DNA with a PAM sequence CAGGAAGG was verified using the method of Example 8. The single guide sequence reported above (SEQ ID NO: 5461) was used, with varying spacer/targeting sequence lengths from 18-24 nt replacing the Ns of the sequence.

[0408] The results are shown in FIG. 10, wherein the left panel shows a gel demonstrating DNA cleavage by MG1-4 in combination with corresponding single guide sgRNAs having different targeting sequence lengths (18-24 nt), and the right panel shows the same data quantified as a bar graph. The data demonstrated that targeting sequences from 18-24 nucleotides were functional with the MG1-4/sgRNA system.

[0409] Targeted Endonuclease Activity in Bacterial Cells

[0410] In vivo activity of the MG1-4 endonuclease system (protein SEQ ID NO: 1, sgRNA SEQ ID NO: 5461) was tested with the PAM sequence CAGGAAGG as in Example 9. Transformed E. coli were plated in serial dilution, and the results (showing E. coli serial dilutions in the left panel and quantitated growth in the right panel) are presented in FIG. 11. A substantial reduction in the growth of E. coli expressing on target sgRNA compared to E. coli expressing non-target sgRNA indicates that genomic DNA was specifically cleaved by the endonuclease in E. coli cells.

[0411] Targeted Endonuclease Activity in Mammalian Cells (a)

[0412] The method of Example 10 was used to demonstrate targeting and cleavage activity in mammalian cells. Open reading frames encoding the MG1-4 (protein SEQ ID NO: 5527) and MG1-6 (protein SEQ ID NO: 5529) sequences were cloned into 2 mammalian expression vectors, one with a C-terminal SV40 NLS and a 2A-GFP tag (E. coli MG-BB) and one with no GFP tag and 2 NLS sequences, one on the N-terminus and one on the C-terminus (E. coli pMG5-BB). For MG1-6, the open reading frame was additionally codon-optimized for mammalian expression (SEQ ID NO: 5589) and cloned into the 2-NLS plasmid backbone (MG-16hs). The results of this experiment are shown in FIG. 12. The endonuclease expression vectors were cotransfected into HEK293T cells with a second vector for expressing a sgRNA (e.g., SEQ ID NOs: 5512 or 5515) with a tracr sequence specific for the endonuclease and a guide sequence selected from Tables 3-4. 72 hr after co-transfection the DNA was extracted and used for the preparation of an NGS-library. Cleavage activity was detected by the appearance of internal deletions (NHEJ remnants) proximal to the sequence of the target site. Percent NHEJ was measured via indels in the sequencing of the target site to demonstrate the targeting efficiency of the enzyme in mammalian cells and is presented in FIG. 12.

TABLE 3
MG1-4 mammalian targeting sequences

| MG1-4 | MG1-4 | Targeting sequence | Targeted |
|---|---|---|---|
| Target ID | Targeting Sequence | SEQ ID NO: | Gene |
| 1 | aatatgtagctgtttgggaggt | 5543 | VEGFA |
| 2 | ctagggggcgctcggccaccac | 5544 | VEGFA |
| 3 | tggctaaagagggaatgggctt | 5545 | VEGFA |
| 4 | cacaccccggctctggctaaag | 5546 | VEGFA |
| 5 | tcggaggagccgtggtccgcgc | 5547 | VEGFA |
| 6 | gcggaccacggctcctccgaag | 5548 | VEGFA |
| 7 | gtacaaacggcagaagctggag | 5549 | EMX1 |
| 8 | gaggaagggcctgagtccgagca | 5550 | EMX1 |
| 9 | aaggcaaacatcctgataatgg | 5551 | Apolipoprotein |

TABLE 4
MG1-6 mammalian targeting sequences

| MG1-6 | MG1-6 | Targeting sequence | |
|---|---|---|---|
| Target ID | Targeting Sequence | SEQ ID NO: | Targeted Gene |
| 1 | tctttagccagagccggggtgt | 5552 | VEGFA |
| 2 | tggaccccctatttctgacctc | 5553 | VEGFA |
| 3 | atgggagcccttcttcttctgc | 5554 | EMX1 |
| 4 | tgccacgaagcaggccaatggg | 5555 | EMX1 |
| 5 | tggtgtctgtttgaggttgcta | 5556 | HBB-R01 |
| 6 | gggcaggttggtatcaaggtta | 5557 | HBB-R01 |
| 7 | aggtgctgacgtaggtagtgct | 5558 | FANCF |
| 8 | gccctacttccgctttcacctt | 5559 | FANCF |
| 9 | aatgtatgctggcttttaaggg | 5560 | IVS40 |
| 10 | gctcctttggctagggaagtgt | 5561 | IVS40 |

[0413] Targeted Endonuclease Activity in Mammalian Cells (b)

[0414] MG1-4 target loci were chosen to test locations in the genome with the PAM nRRRAA (SEQ ID NO: 5527). The spacers corresponding to the chosen target sites were cloned into the sgRNA scaffold in the mammalian vector system Backbone 2 described in Example 10b. The sites are listed in Table 4a below. The activity of MG1-4 at various target sites is shown in Table 4a and FIG. 37

TABLE 4a
Activity of MG1-4 at various target sites

| | | | | % NHEJ |
|---|---|---|---|---|
| target ID | target sequence | PAM | locus | (mean ± std) |
| 1 | aatatgtagctgtttgggaggt | CAGAAA | VEGFA | 1.62 ± 1.2 |
| 2 | ctagggggcgctcggccaccac | AGGGAA | VEGFA | -0.07 ± 0 |
| 3 | tggctaaagagggaatgggctt | TGGAAA | VEGFA | 10.32 ± 2.75 |
| 4 | cacaccccggctctggctaaag | AGGGAA | VEGFA | 0.18 ± 0.53 |
| 5 | tcggaggagccgtggtccgcgc | GGGGAA | VEGFA | 0 ± 0.03 |
| 6 | gaagccgagccgagcggagccg | CGAGAA | VEGFA | 4.53 ± 1.73 |
| 7 | gcggaccacggctcctccgaag | GAGGAA | VEGFA | 0.3 ± 0.04 |
| 8 | gtacaaacggcagaagctggag | GAAGAA | EMX1 | 0.23 ± 0.1 |
| 10 | Gaaggcaaacatcctgataatgg | TGAAAA | Apolipoprotein | 0.07 ± 0.06 |

[0415] MG1-6 target loci were chosen to test locations in the genome with the PAM nnRRAC (SEQ ID NO: 5529). The spacers corresponding to the chosen target sites were cloned into the sgRNA scaffold in the mammalian vector system backbone 2 described in Example 10b. The sites are listed in Table 4b below. The activity of MG1-6 at various target sites is shown in Table 4b and FIG. 38.

TABLE 4b
Activity of MG1-6 at various target sites.

| target ID | target sequence | PAM | locus | % NHEJ (mean ± std) |
|---|---|---|---|---|
| 1 | tctttagccagagccggggtgt | GCAGAC | VEGFA | 0.385 ± 0.035 |
| 2 | tggaccccctatttctgacctc | CCAAAC | VEGFA | 0.65 ± 0.62 |
| 3 | atgggagcccttcttcttctgc | TCGGAC | EMX1 | -0.045 ± 0.105 |
| 4 | tgccacgaagcaggccaatggg | GAGGAC | EMX1 | 0.96 ± 0.14 |
| 5 | tggtgtctgtttgaggttgcta | GTGAAC | HBB | -0.09 ± 0.09 |
| 6 | gggcaggttggtatcaaggtta | CAAGAC | HBB | 4.915 ± 0.135 |
| 7 | aggtgctgacgtaggtagtgct | TGAGAC | FANCF | 3.85 ± 1.86 |
| 9 | aatgtatgctggcttttaaggg | GGAAAC | IVS40 | -0.215 ± 0.105 |
| 10 | gctcctttggctagggaagtgt | TAAAAC | IVS40 | 3.03 ± 3.5 |

[0416] MG1-7 target loci were chosen to test locations in the genome with the PAM nRRRAAG (SEQ ID NO: 5515). The spacers corresponding to the chosen target sites were cloned into the sgRNA scaffold in the mammalian vector system backbone 2 described in Example 10b. The sites are listed in Table 4c below. The activity of MG1-7 at various target sites is shown in Table 4c and FIG. 39.

TABLE 4c
Activity of MG1-7 at various target sites

| | | | | % NHEJ |
|---|---|---|---|---|
| target ID | target sequence | PAM | locus | (mean ± std) |
| 1 | atcaaactgtgagcatcttcag | ggaaaag | IVS40 | 0.105 ± 0.88 |
| 2 | cagcgaatctactcagccagag | caggaag | IVS40 | 0.075 ± 0.02 |
| 3 | ctttaacttgtgtgattctgga | gaggaag | IVS40 | −0.25 |
| 4 | agcttaattagctcctttggct | agggaag | IVS40 | 0.545 ± 1.71 |
| 5 | ccatggtgcatctgactcctga | ggagaag | HBB | 0.005 ± 0.01 |
| 6 | tgcttgagaccgccagaagctc | ggaaaag | FANCF | 0.91 ± 0.38 |
| 7 | cgagaacagcccagaagttgga | cgaaaag | VEGFA | 5.49 ± 0.44 |
| 8 | cggaggagccgtggtccgcgcg | ggggaag | VEGFA | 0.27 ± 0.20 |
| 9 | atgtgtgagaaaaatttaatca | taagaag | Apolipoprotein | −1.85 ± 1.89 |
| 10 | aggtccaagtaaaatttgtctt | agaaaag | Apolipoprotein | −2.17 ± 2.55 |
| 11 | gtacaaacggcagaagctggag | gaggaag | EMX1 | 0.775 ± 0.33 |
| 12 | aggaagggcctgagtccgagca | gaagaag | EMX1 | 0.01 ± 0.01 |
| 13 | aagggcctgagtccgagcagaa | gaagaag | EMX1 | 0.185 ± 0.22 |

### Example 12. — Characterization of MG2 Family Members

[0417] PAM Specificity, tracrRNA/sgRNA Validation

[0418] The targeted endonuclease activity of MG2 family members was confirmed in the myTXTL system as described in Example 6. Results of this assay are shown in FIGS. 17-20. In the assay shown in FIGS. 17-20, active proteins that successfully cleave the library result in a band around 170 bp in the gel. Amplification products were observed for MG2-1 (see gel 2 lane 11 and gel 4 lane 6) and MG2-7 (see gel 11 lane 10) (SEQ ID NOs: 320 and 321, respectively). Sequencing the PCR products revealed active PAM sequences in Table 5 below:

TABLE 5
PAM sequence specificities and related data for MG2 enzymes

| | Enzyme | | | | | | Synthetic |
|---|---|---|---|---|---|---|---|
| | protein | Native | | tracrRNA | sgRNA | Synthetic | (single guide) |
| | SEQ | (dual guide) | PAM SEQ | SEQ | SEQ | (single guide) | PAM SEQ |
| Enzyme | ID NO | PAM | ID NO: | ID NO: | ID NO: | PAM | ID NO: |
| MG2-1 | 320 | nRCGTA | 5531 | 5490 | N/A | N/A | N/A |
| MG2-7 | 321 | N/A | N/A | 5491 | 5465 | NNNRTA | 5516 |

[0419] Targeted Endonuclease Activity in Bacterial Cells

[0420] In vivo activity of the MG2-7 endonuclease system with a sgRNA (endonuclease SEQ ID NO: 321; sgRNA SEQ ID NO: 5465) and an AGCGTAAG PAM sequence was confirmed using the method described in Example 9. Transformed E. coli were plated in serial dilution, and the results (showing E. coli serial dilutions in the left panel and quantitated growth in the right panel) are presented in FIG. 34. A substantial reduction in the growth of E. coli expressing on target sgRNA compared to E. coli expressing non-target sgRNA indicates that genomic DNA was specifically cleaved by the MG1-4 endonuclease in E. coli cells.

### Example 13. — Characterization of MG3 Family Members

[0421] PAM Specificity, tracrRNA/sgRNA Validation

[0422] The targeted endonuclease activity of MG3 family members was confirmed using the myTXTL system as described in Example 6 using tracr sequences and CRISPR arrays. In this assay, PCR amplification of cleaved target plasmids yields a product that migrates at approximately 170 bp in the gel, as shown in FIGS. 17-20. Amplification products were observed for MG3-6 (dual guide: see gel 2 lane 8; single guide: see gel 3 lane 3), MG3-7 (dual guide: see gel 2 lane 3, single guide: see gel 3 lane 4), and MG3-8 (dual guide: see gel 9 lane 5) (SEQ ID NOs: 421, 422, and 423, respectively). Sequencing the PCR products revealed active PAM sequences in Table 6 below:

TABLE 6
PAM sequence specificities and related data for MG3 enzymes

| | Enzyme | | | | | | Synthetic |
|---|---|---|---|---|---|---|---|
| | protein | Native | | tracrRNA | sgRNA | Synthetic | (single guide) |
| | SEQ | (dual guide) | PAM SEQ | SEQ | SEQ | (single guide) | PAM SEQ |
| Enzyme | ID NO | PAM | ID NO: | ID NO: | ID NO: | PAM | ID NO: |
| MG3-6 | 421 | nnRGGTT | 5532 | 5500 | 5466 | nnGGG | 5517 |
| MG3-7 | 422 | nnRnYAY | 5533 | 5501 | 5467 | nnGnTnT | 5518 |
| MG3-8 | 423 | nnRGGTT | 5534 | 5502 | N/A | N/A | N/A |

[0423] Synthetic single guide RNAs (sgRNAs) were designed based on the sequences and predicted structures of the tracrRNAs and are presented as SEQ ID NOs: 5466-5467. The PAM sequence screen of Example 6 was repeated with the sgRNAs. The results of this experiment are also presented in Table 6, which reveals that PAM specificity changed slightly when using sgRNAs.

[0424] Targeted Endonuclease Activity In Vitro

[0425] In vitro activity of the MG3-6 (endonuclease SEQ ID NO: 421) was verified with the PAM sequence GTGGGTTA using the method of Example 8. The single guide sequence reported above (SEQ ID NO: 5466) was used, with varying spacer/targeting sequence lengths from 18-24 nt replacing the Ns of the sequence. The results are shown in FIG. 13, wherein the top panel shows a gel demonstrating DNA cleavage by MG3-6 in combination with different sgRNAs having different targeting sequence lengths (18-24 nt), and the bottom panel shows the same data quantified as a bar graph. The data demonstrated that targeting sequences from 18-24 nucleotides were functional with the MG3-6/sgRNA system.

[0426] Targeted Endonuclease Activity in Bacterial Cells

[0427] In vivo activity of the MG3-7 endonuclease system (protein SEQ ID NO: 422; sgRNA SEQ ID NO: 5467) was tested with the PAM sequence TGGACCTG using the method of Example 9. Transformed E. coli were plated in serial dilution, and the results (showing E. coli serial dilutions in the top panel and quantitated growth in the bottom panel) are presented in FIG. 14. A substantial reduction in the growth of E. coli expressing on target sgRNA compared to E. coli expressing non-target sgRNA indicates that genomic DNA was being specifically cleaved by the MG3-7 endonuclease system.

[0428] Targeted Endonuclease Activity in Mammalian Cells (a)

[0429] The method of Example 10 was used to demonstrate targeting and cleavage activity in mammalian cells. Open reading frames encoding MG3-7 (protein SEQ ID NO: 422) was cloned into 2 mammalian expression vectors, one with a C-terminal SV40 NLS and a 2A-GFP tag (E. coli MG-BB) and one with no GFP tag and 2 NLS sequences, one on the N-terminus and one on the C-terminus (E. coli pMG5-BB). The endonuclease expression vectors were cotransfected into HEK293T cells with a second vector for expressing the sgRNA above with a guide sequence selected from Table 7. The results of this experiment are shown in FIG. 12. 72 hr after co-transfection DNA was extracted and used for the preparation of an NGS-library. Cleavage activity was detected by the appearance of internal deletions (NHEJ remnants) in the vicinity of the target site. Results are presented in FIG. 15.

[0430] The target site which were encoded on the sgRNA plasmids are shown in Table 7 below.

TABLE 7
MG3-7 mammalian targeting sequences

| MG3-7 | MG3-7 | Targeting sequence | |
|---|---|---|---|
| Target ID | Targeting Sequence | SEQ ID NO: | Targeted Gene |
| 1 | cccctatttctgacctcccaaa | 5563 | VEGFA |
| 2 | tgtggttccagaaccggaggac | 5564 | EMX1 |
| 3 | ggccctgggcaggttggtatca | 5565 | HBB-R01 |
| 4 | tccttaaacctgtcttgtaacc | 5566 | HBB-R01 |
| 5 | ctgactcctgaggagaagtctg | 5567 | HBB-R01 |
| 6 | tccgagcttctggcggtctcaa | 5568 | FANCF |
| 7 | tatcatttcgcggatgttccaa | 5569 | FANCF |
| 8 | tcgggcagagggtgcatcacct | 5570 | Apolipoprotein |
| 9 | ataataagcagaacttttagtg | 5571 | Fibrinogen |
| 10 | gttttctttagttattaatttc | 5572 | Fibrinogen |

[0431] Targeted Endonuclease Activity in Mammalian Cells (b)

[0432] MG3-6 target loci were chosen to test locations in the genome with the PAM nnRGGTT (SEQ ID NO: 5532). The spacers corresponding to the chosen target sites were cloned into the sgRNA scaffold in the mammalian vector system backbone 1 described in Example 10b. The sites are listed in Table 7a below. The activity of MG3-6 at various target sites is shown in Table 7a and FIG. 40.

TABLE 7a
Activity of MG3-6 at various target sites

| target | | | | % NHEJ |
|---|---|---|---|---|
| ID | target sequence | PAM | locus | (mean ± std) |
| target1 | gagtgactgaaacttcacagaa | tagggtt | Albumin | 9.755 ± 4.67 |
| target2 | ttctatttatgagatcaacagc | acaggtt | Albumin | 32.75 ± 7.42 |
| target3 | cagatgcaccatggtgtctgtt | tgaggt | HBB_R01 | 2.525 ± 2.13 |
| target5 | gaggccctgggcaggttggtat | caaggtt | HBB_R01 | 25.16 ± 3.67 |
| target6 | aggttggtatcaaggttacaag | acaggtt | HBB_R01 | 35.27 ± 2.78 |
| target7 | tcaactttcctggcaacttgcg | gtaggtt | Apolipoprotei | 21.57 ± 5.70 |
| target8 | aggaacattcagttaagatagt | ctaggtt | Fibrinogen | 7.5675 ± 11.99 |
| target9 | tttaaattatgaatccatctct | aaaggtt | Fibrinogen | 46.3175 ± 31.46 |
| target10 | gagtgactgaaacttcacagaa | tagggtt | Albumin | 3.9325 ± 3.53 |

[0433] MG3-7 target loci were chosen to test locations in the genome with the PAM nnRnTAC (SEQ ID NO: 5718). The spacers corresponding to the chosen target sites were cloned into the sgRNA scaffold in the mammalian vector systems described in Example 10b. The sites are listed in Table 7b below. The activity of MG3-7 at various target sites is shown in Table 7b and FIG. 41.

TABLE 7b
Activity of MG3-7 at various target sites

| | | | | % NHEJ | |
|---|---|---|---|---|---|
| | | | | backbone 2 | % NHEJ |
| target ID | target sequence | PAM | locus | (mean ± std) | backbone 1 |
| 1 | cccctatttctgacctcccaaa | CAGCTAC | VEGFA | 0.54 ± 0.44 | |
| 2 | tgtggttccagaaccggaggac | AAAGTAC | EMX1 | −0.09 ± 0.04 | |
| 3 | ggccctgggcaggttggtatca | AGGTTAC | HBB | 8.275 ± 0.3.12 | 3.87 |
| 4 | tccttaaacctgtcttgtaacc | TTGATAC | HBB | 0.16 ± 0.20 | |
| 5 | ctgactcctgaggagaagtctg | CCGTTAC | HBB | 0.245 ± 0.16 | |
| 6 | tccgagcttctggcggtctcaa | GCACTAC | FANCF | 1.84 ± 0.10 | 3.95 |
| 7 | tatcatttcgcggatgttccaa | TCAGTAC | FANCF | 0.325 ± 0.68 | |
| 8 | tcgggcagagggtgcatcacct | GGACTAC | Apolipoprotein | 13 | 23.88 |

[0434] MG3-8 target loci were chosen to test locations in the genome with the PAM nnRGGTT (SEQ ID NO: 5534). The spacers corresponding to the chosen target sites were cloned into the sgRNA scaffold in the mammalian vector system backbone 1 described in Example 10b. The sites are listed in Table 7c below. The activity of MG3-8 at various target sites is shown in Table 7c and FIG. 42.

TABLE 7c
Activity of MG3-8 at various target sites

| | | | | % NHEJ |
|---|---|---|---|---|
| target ID | target sequence | PAM | locus | (mean ± std) |
| targetl | gagtgactgaaacttcacagaa | tagggtt | Albumin | 10.81 ± 4.26 |
| target2 | ttctatttatgagatcaacagc | acaggtt | Albumin | 30.48 ± 11.17 |
| target3 | cagatgcaccatggtgtctgtt | tgaggt | HBB | 3.3925 ± 2.13 |
| target4 | gaagttggtggtgaggccctgg | gcaggtt | HBB | 28.995 ± 11.87 |
| target5 | gaggccctgggcaggttggtat | caaggtt | HBB | 28.69 ± 1.96 |
| target6 | aggttggtatcaaggttacaag | acaggtt | HBB | 30.8575 ± 13.24 |
| target7 | tcaactttcctggcaacttgcg | gtaggtt | Apolipoprotein | 7.9825 ± 3.23 |
| target8 | aggaacattcagttaagatagt | ctaggtt | Fibrinogen | 20.2925 ± 17.10 |
| target9 | tttaaattatgaatccatctct | aaaggtt | Fibrinogen | 35.533 ± 25.46 |
| target10 | gagtgactgaaacttcacagaa | tagggtt | Albumin | 4.9 ± 0.71 |

### Example 13. —Characterization of MG4 Family Members

[0435] PAM Specificity, tracrRNA/sgRNA Validation

[0436] The targeted endonuclease activity of MG4 family endonuclease systems was confirmed using the myTXTL system as described in Example 6. In this assay, PCR amplification of cleaved target plasmids yields a product that migrates at approximately 170 bp in the gel, as shown in FIGS. 17-20. Amplification products were observed for, MG4-2 (dual guide: see gel2 lane 9, single guide: see gel 10 lane 7) (SEQ ID NO: 432). Sequencing the PCR products revealed active PAM sequences shown in Table 8 below.

TABLE 8
PAM sequence specificities and related data for MG4 enzymes

| | Enzyme | | | | Synthetic |
|---|---|---|---|---|---|
| | protein | tracrRNA | sgRNA | Synthetic | (single guide) |
| | SEQ | SEQ | SEQ | (single guide) | PAM |
| Enzyme | ID NO | ID NO: | ID NO: | PAM | SEQ ID NO: |
| MG4-5 | 432 | 5503 | 5468 | nnCCR | 5519 |

### Example 14. —Characterization of MG14 Family Members

[0437] PAM Specificity, tracrRNA/sgRNA Validation

[0438] The targeted endonuclease activity of MG14 family members (was confirmed using the myTXTL system as described in Example 6. In this assay, PCR amplification of cleaved target plasmids yields a product that migrates at approximately 170 bp in the gel, as shown in FIGS. 17-20. Amplification products were observed for MG14-1 (dual guide: see gel 1 lane 4, single guide: see gel 3 lane 8) (SEQ ID NO: 678). Sequencing the PCR products revealed active PAM sequence specificities shown in Table 9 below.

TABLE 9
PAM sequence specificities and related data for MG14 enzymes

| | Enzyme | Native | | | | Synthetic | Synthetic |
|---|---|---|---|---|---|---|---|
| | protein | (dual guide) | PAM | tracrRNA | sgRNA | (single guide) | (single guide) |
| | SEQ | PAM | SEQ | SEQ | SEQ | PAM | PAM SEQ |
| Enzyme | ID NO | determined | ID NO: | ID NO: | ID NO: | determined | ID NO: |
| MG14-1 | 678 | NNNNGGTA | 5535 | 5505 | 5469 | NNNGGRTA | 5520 |

[0439] Targeted Endonuclease Activity in Bacterial Cells

[0440] In vivo activity of the MG14-1 endonuclease system with a sgRNA (endonuclease SEQ ID NO: 678; sgRNA SEQ ID NO: 5469) and a GGCGGGGA PAM sequence was confirmed using the method described in Example 9. Transformed E. coli were plated in serial dilution, and the results (showing E. coli serial dilutions in the left panel and quantitated growth in the right panel) are presented in FIG. 35. A substantial reduction in the growth of E. coli expressing on target sgRNA compared to E. coli expressing non-target sgRNA indicates that genomic DNA was specifically cleaved by the MG1-4 endonuclease in E. coli cells.

[0441] Targeted Endonuclease Activity in Mammalian Cells

[0442] MG14-1 target loci were chosen to test locations in the genome with the PAM nnnnGGTA (SEQ ID NO: 5535). The spacers corresponding to the chosen target sites were cloned into the sgRNA scaffold in the mammalian vector system backbone 2 described in Example 10b. The sites are listed in Table 9a below. The activity of MG14-1 at various target sites is shown in Table 9a and FIG. 43.

TABLE 9a
Activity of MG14-1 at various target sites

| | | | | % NHEJ |
|---|---|---|---|---|
| target ID | target sequence | PAM | locus | (mean ± std) |
| 1 | cttattaataaaattcaaacat | CCTAGGTA | Albumin | 0.22 ± 1.04 |
| 2 | gttggtggtgaggccctgggca | GGTTGGTA | HBB | 0.67 ± 0.16 |
| 3 | ctagttaatggaataaaacatt | TTATGGTA | Fibrinogen | 0.15 |
| 4 | gcattataatgcaccaaggctt | TATAGGTA | Fibrinogen | 0.2 |
| 5 | gtggcggggtcccaggtgctga | CGTAGGTA | FANCF | 5.33 ± 4.13 |
| 6 | tgtccgccgccggccggggagg | AGGTGGTA | VEGFA | 4.88 ± 0.65 |
| 7 | ggtgatgcaccctctgcccgat | GCTTGGTA | Apolipoprotein | −0.35 ± 0.59 |
| 8 | ccacatcaactttcctggcaac | TTGCGGTA | Apolipoprotein | 0.195 ± 0.98 |
| 9 | gctagttaatggaataaaacatt | TTATGGTA | Fibrinogen | 0.6 |
| 10 | gcattataatgcaccaaggctt | TATAGGTA | Fibrinogen | 1.17 ± 1.42 |

### Example 15. —Characterization of MG15 Family Members

[0443] PAM Specificity, tracrRNA/sgRNA Validation

[0444] The targeted endonuclease activity of MG15 family members was confirmed using the myTXTL system as described in Example 6. In this assay, PCR amplification of cleaved target plasmids yields a product that migrates at approximately 170 bp in the gel, as shown in FIGS. 17-20. Amplification products were observed for MG15-1 (dual guide: see gel 7 lane 7, single guide: see gel 3 lane 9) (SEQ ID NO: 930). Sequencing the PCR products revealed active PAM sequence specificities detailed in Table 10 below.

TABLE 10

| | Enzyme | | | | | | Synthetic |
|---|---|---|---|---|---|---|---|
| | protein | Native | PAM | tracrRNA | sgRNA | Synthetic | (single guide) |
| | SEQ | (dual guide) | SEQ | SEQ | SEQ | (single guide) | PAM SEQ |
| Enzyme | ID NO | PAM | ID NO: | ID NO: | ID NO: | PAM | ID NO: |
| MG15-1 | 930 | nnnnC | 5536 | 5506 | 5470 | nnnnC | 5521 |

[0445] In Vitro Activity

[0446] In vitro activity of the MG15-1 endonuclease system (protein SEQ ID NO: 930; sgRNA SEQ ID NO:5470) was tested with the PAM sequence GGGTCAAA using the method of Example 8. The single guide sequence reported above (SEQ ID NO: 5470) was used, with varying spacer/targeting sequence lengths from 18-24 nt (replacing the Ns of the sequence). The results are shown in FIG. 16, wherein the top panel shows a gel demonstrating DNA cleavage by MG15-1 in combination with different sgRNAs having different targeting sequence lengths (18-24 nt), and the bottom panel shows the same data quantified as a bar graph. The data demonstrated that targeting sequences from 18-24 nucleotides were functional with the MG15-1/sgRNA system.

[0447] Targeted Endonuclease Activity in Bacterial Cells

[0448] In vivo activity of the MG15-1 endonuclease system with a sgRNA (endonuclease SEQ ID NO: 930; sgRNA SEQ ID NO: 5470) and a GGGTCAAA PAM sequence was confirmed using the method described in Example 9. Transformed E. coli were plated in serial dilution, and the results (showing E. coli serial dilutions in the left panel and quantitated growth in the right panel) are presented in FIG. 35. A substantial reduction in the growth of E. coli expressing on target sgRNA compared to E. coli expressing non-target sgRNA indicates that genomic DNA was specifically cleaved by the MG1-4 endonuclease in E. coli cells.

### Example 16. —Characterization of MG16 Family Members

[0449] PAM Specificity, tracrRNA/sgRNA Validation

[0450] The targeted endonuclease activity of MG16 family members was confirmed using the myTXTL system as described in Example 6. In this assay, PCR amplification of cleaved target plasmids yields a product that migrates at approximately 170 bp in the gel, as shown in FIGS. 17-20. Amplification products were observed for MG16-2 (see gel 11, lane 17) (SEQ ID NO: 1093). Sequencing the PCR products revealed active PAM sequence specificities detailed in Table 11 below.

TABLE 11
PAM sequence specificities and related data for MG16 enzymes

| | Enzyme | | | Synthetic |
|---|---|---|---|---|
| | protein | sgRNA | Synthetic | (single guide) |
| | SEQ | SEQ | (single guide) | PAM |
| Enzyme | ID NO | ID NO: | PAM | SEQ ID NO: |
| MG16-2 | 1093 | 5471 | nRTnCC | 5522 |

### Example 17. —Characterization of MG18 Family Members

[0451] PAM Specificity, tracrRNA/sgRNA Validation

[0452] The targeted endonuclease activity of MG18 family members was confirmed using the myTXTL system as described in Example 6. In this assay, PCR amplification of cleaved target plasmids yields a product that migrates at approximately 170 bp in the gel, as shown in FIGS. 17-20. Amplification products were observed for MG18-1 (dual guide: see gel 9 lane 9, single guide: see gel 11 lane 12) (SEQ ID NO: 1354). Sequencing the PCR products revealed active PAM sequence specificities detailed in Table 12 below.

TABLE 12
PAM sequence specificities and related data for MG18 enzymes

| | Enzyme | | | | | | Synthetic |
|---|---|---|---|---|---|---|---|
| | protein | Native | PAM | tracrRNA | sgRNA | Synthetic | (single guide) |
| | SEQ | (dual guide) | SEQ | SEQ | SEQ | (single guide) | PAM SEQ |
| Enzyme | ID NO | PAM | ID NO: | ID NO: | ID NO: | PAM | ID NO: |
| MG18-1 | 1354 | nRWART | 5537 | 5508 | 5472 | nnnRRT | 5523 |

[0453] Targeted Endonuclease Activity in Mammalian Cells

[0454] MG18-1 target loci were chosen to test locations in the genome with the PAM nRWART (SEQ ID NO: 5537). The spacers corresponding to the chosen target sites were cloned into the sgRNA scaffold in the mammalian vector system backbone 1 described in Example 10b. The sites are in Table 12a below. The activity of MG18-1 at various target sites is shown in Table 12a and FIG. 44.

TABLE 12a
Activity of MG18-1 at various target sites

| | | | | % NHEJ |
|---|---|---|---|---|
| target ID | target sequence | PAM | locus | (mean ± std) |
| target2 | tgcttattatggacaagtagca | agaaat | Fibrinogen | 9.003 ± 3.70 |
| target4 | tccctgaagatgctcacagttt | gatagt | IVS40 | 1.99 ± 2.56 |
| target5 | ttttatttctcctgcatatgat | gatagt | IVS40 | 6.303 ± 4.82 |
| target8 | tgtggggcaaggtgaacgtgga | tgaagt | HBB | 14.897 ± 2.73 |
| target9 | atggtgcatctgactcctgagg | agaagt | HBB | 0.387 ± 0.32 |
| target10 | agaacagcccagaagttggacg | aaaagt | VEGFA | 4.3 ± 1.29 |
| target11 | tcctccgaagcgagaacagccc | agaagt | VEGFA | 15.22 ± 2.40 |

### Example 18. —Characterization of MG21 Family Members

[0455] PAM Specificity, tracrRNA/sgRNA Validation

[0456] The targeted endonuclease activity of MG21 family was confirmed using the myTXTL system as described in Example 6. In this assay, PCR amplification of cleaved target plasmids yields a product that migrates at approximately 170 bp in the gel, as shown in FIGS. 17-20. Amplification products were observed for MG21-1 (see gel 11 lane 2) (SEQ ID NO: 1512). Sequencing the PCR products revealed active PAM sequence specificities detailed in Table 13 below.

TABLE 13

| | Enzyme | | | Synthetic |
|---|---|---|---|---|
| | protein | sgRNA | Synthetic | (single guide) |
| | SEQ | SEQ | (single guide) | PAM |
| Enzyme | ID NO | ID NO: | PAM | SEQ ID NO: |
| MG21-1 | 1512 | 5473 | nnRnR | 5524 |

### Example 19. — Characterization of MG22 Family Members

[0457] PAM Specificity, tracrRNA/sgRNA Validation

[0458] The targeted endonuclease activity of MG22 family members was confirmed using the myTXTL system as described in Example 6. In this assay, PCR amplification of cleaved target plasmids yields a product that migrates at approximately 170 bp in the gel, as shown in FIGS. 17-20. In the assay shown FIGS. 17-20, active proteins that successfully cleave the library result in a band around 170 bp in the gel. Amplification products were observed for MG22-1 (see gel 11 lane 3) (protein SEQ ID NO: 1656). Sequencing the PCR products revealed active PAM sequence specificities detailed in Table 14 below.

TABLE 14

| | Enzyme | Native | | | | Synthetic | Synthetic |
|---|---|---|---|---|---|---|---|
| | protein | (dual guide) | PAM | tracrRNA | sgRNA | (single guide) | (single guide) |
| | SEQ | PAM | SEQ | SEQ | SEQ | PAM | PAM SEQ |
| Enzyme | ID NO | determined | ID NO: | ID NO: | ID NO: | determined | ID NO: |
| MG22-1 | 1656 | N/A | N/A | 5510 | 5474 | nnRCnT | 5525 |

### Example 20. —Characterization of MG23 Family Members

[0459] PAM Specificity, tracrRNA/sgRNA Validation

[0460] The targeted endonuclease activity of MG23 family members was confirmed using the myTXTL system as described in Example 6. In this assay, PCR amplification of cleaved target plasmids yields a product that migrates at approximately 170 bp in the gel, as shown in FIGS. 17-20. Amplification products were observed for MG23-1 (see gel 11 lane 4) (SEQ ID NO: 1756). Sequencing the PCR products revealed active PAM sequences specificities for these enzymes detailed Table 15 below.

TABLE 15

| | Enzyme | | | | Synthetic |
|---|---|---|---|---|---|
| | protein | tracrRNA | sgRNA | Synthetic | (single guide) |
| | SEQ | SEQ | SEQ | (single guide) | PAM |
| Enzyme | ID NO | ID NO: | ID NO: | PAM | SEQ ID NO: |
| MG23-1 | 1756 | 5511 | 5475 | nRRA | 5526 |

[0461] Systems of the present disclosure may be used for various applications, such as, for example, nucleic acid editing (e.g., gene editing), binding to a nucleic acid molecule (e.g., sequence-specific binding). Such systems may be used, for example, for addressing (e.g., removing or replacing) a genetically inherited mutation that may cause a disease in a subject, inactivating a gene in order to ascertain its function in a cell, as a diagnostic tool to detect disease-causing genetic elements (e.g. via cleavage of reverse-transcribed viral RNA or an amplified DNA sequence encoding a disease-causing mutation), as deactivated enzymes in combination with a probe to target and detect a specific nucleotide sequence (e.g. sequence encoding antibiotic resistance int bacteria), to render viruses inactive or incapable of infecting host cells by targeting viral genomes, to add genes or amend metabolic pathways to engineer organisms to produce valuable small molecules, macromolecules, or secondary metabolites, to establish a gene drive element for evolutionary selection, to detect cell perturbations by foreign small molecules and nucleotides as a biosensor.

[0462] While preferred embodiments of the present invention have been shown and described herein, it will be obvious to those skilled in the art that such embodiments are provided by way of example only. It is not intended that the invention be limited by the specific examples provided within the specification. While the invention has been described with reference to the aforementioned specification, the descriptions and illustrations of the embodiments herein are not meant to be construed in a limiting sense. Numerous variations, changes, and substitutions will now occur to those skilled in the art without departing from the invention. Furthermore, it shall be understood that all aspects of the invention are not limited to the specific depictions, configurations or relative proportions set forth herein which depend upon a variety of conditions and variables. It should be understood that various alternatives to the embodiments of the invention described herein may be employed in practicing the invention. It is therefore contemplated that the invention shall also cover any such alternatives, modifications, variations or equivalents. It is intended that the following claims define the scope of the invention and that methods and structures within the scope of these claims and their equivalents be covered thereby.

1-22. (canceled)

23. An engineered nuclease composition comprising:
(a) an endonuclease comprising a RuvC_III domain and an HNH domain, wherein said RuvC_III domain comprises a sequence having at least 85% sequence identity to at least 21 consecutive amino acids of any one of SEQ ID NOs: 2490, 2491, 3129, 2917-2924 and wherein said HNH domain comprises a sequence having at least 75% sequence identity to at least 20 consecutive amino acids of any one of SEQ ID NOs: 4304, 4305, 4943, 4731-4738; and
(b) an engineered guide ribonucleic acid structure configured to form a complex with said endonuclease comprising:
(i) a guide ribonucleic acid sequence configured to hybridize to a target deoxyribonucleic acid sequence; and
(ii) a tracr ribonucleic acid sequence configured to bind to said endonuclease.

24. The engineered nuclease composition of claim 23, wherein said RuvC_III domain comprises a sequence having at least 85% sequence identity to at least 21 consecutive amino acids of any one of SEQ ID NOs: 2490; and wherein said HNH domain comprises a sequence having at least 75% sequence identity to at least 20 consecutive amino acids of any one of SEQ ID NOs: 4304.

25. The engineered nuclease composition of claim 23, wherein said RuvC_III domain comprises a sequence having at least 85% sequence identity to at least 21 consecutive amino acids of any one of SEQ ID NOs: 2491; and wherein said HNH domain comprises a sequence having at least 75% sequence identity to at least 20 consecutive amino acids of any one of SEQ ID NOs: 4305.

26. The engineered nuclease composition of claim 23, wherein said RuvC_III domain comprises a sequence having at least 85% sequence identity to at least 21 consecutive amino acids of any one of SEQ ID NOs: 3129; and wherein said HNH domain comprises a sequence having at least 75% sequence identity to at least 20 consecutive amino acids of any one of SEQ ID NOs: 4943.

27. The engineered nuclease composition of claim 23, wherein said RuvC_III domain comprises a sequence having at least 85% sequence identity to at least 21 consecutive amino acids of any one of SEQ ID NOs: 2917; and wherein said HNH domain comprises a sequence having at least 75% sequence identity to at least 20 consecutive amino acids of any one of SEQ ID NOs: 4731.

28. The engineered nuclease composition of claim 23, wherein said RuvC_III domain comprises a sequence having at least 85% sequence identity to at least 21 consecutive amino acids of any one of SEQ ID NOs: 2918; and wherein said HNH domain comprises a sequence having at least 75% sequence identity to at least 20 consecutive amino acids of any one of SEQ ID NOs: 4732.

29. The engineered nuclease composition of claim 23, wherein said RuvC_III domain comprises a sequence having at least 85% sequence identity to at least 21 consecutive amino acids of any one of SEQ ID NOs: 2919; and wherein said HNH domain comprises a sequence having at least 75% sequence identity to at least 20 consecutive amino acids of any one of SEQ ID NOs: 4733.

30. The engineered nuclease composition of claim 23, wherein said RuvC_III domain comprises a sequence having at least 85% sequence identity to at least 21 consecutive amino acids of any one of SEQ ID NOs: 2920; and wherein said HNH domain comprises a sequence having at least 75% sequence identity to at least 20 consecutive amino acids of any one of SEQ ID NOs: 4734.

31. The engineered nuclease composition of claim 23, wherein said RuvC_III domain comprises a sequence having at least 85% sequence identity to at least 21 consecutive amino acids of any one of SEQ ID NOs: 2921; and wherein said HNH domain comprises a sequence having at least 75% sequence identity to at least 20 consecutive amino acids of any one of SEQ ID NOs: 4735.

32. The engineered nuclease composition of claim 23, wherein said RuvC_III domain comprises a sequence having at least 85% sequence identity to at least 21 consecutive amino acids of any one of SEQ ID NOs: 2922; and wherein said HNH domain comprises a sequence having at least 75% sequence identity to at least 20 consecutive amino acids of any one of SEQ ID NOs: 4736.

33. The engineered nuclease composition of claim 23, wherein said RuvC_III domain comprises a sequence having at least 85% sequence identity to at least 21 consecutive amino acids of any one of SEQ ID NOs: 2923; and wherein said HNH domain comprises a sequence having at least 75% sequence identity to at least 20 consecutive amino acids of any one of SEQ ID NOs: 4737.

34. The engineered nuclease composition of claim 23, wherein said RuvC_III domain comprises a sequence having at least 85% sequence identity to at least 21 consecutive amino acids of any one of SEQ ID NOs: 2924; and wherein said HNH domain comprises a sequence having at least 75% sequence identity to at least 20 consecutive amino acids of any one of SEQ ID NOs: 4738.

35. The engineered nuclease composition of claim 23, wherein said RuvC_III domain comprises a sequence having at least 90% sequence identity to at least 21 consecutive amino acids of any one of SEQ ID NOs: 2917-2921, 2923, and 2924; and wherein said HNH domain comprises a sequence having at least 80% sequence identity to at least 20 consecutive amino acids of any one of SEQ ID NOs: 4731-4735, 4737, and 4738.

36. The engineered nuclease composition of claim 35, wherein said RuvC_III domain comprises a sequence having at least 90% sequence identity to at least 21 consecutive amino acids of any one of SEQ ID NOs: 2917 and wherein said HNH domain comprises a sequence having at least 80% sequence identity to at least 20 consecutive amino acids of any one of SEQ ID NOs: 4731.

37. The engineered nuclease composition of claim 35, wherein said RuvC_III domain comprises a sequence having at least 90% sequence identity to at least 21 consecutive amino acids of any one of SEQ ID NOs: 2918 and wherein said HNH domain comprises a sequence having at least 80% sequence identity to at least 20 consecutive amino acids of any one of SEQ ID NOs: 4732.

38. The engineered nuclease composition of claim 35, wherein said RuvC_III domain comprises a sequence having at least 90% sequence identity to at least 21 consecutive amino acids of any one of SEQ ID NOs: 2919 and wherein said HNH domain comprises a sequence having at least 80% sequence identity to at least 20 consecutive amino acids of any one of SEQ ID NOs: 4733.

39. The engineered nuclease composition of claim 35, wherein said RuvC_III domain comprises a sequence having at least 90% sequence identity to at least 21 consecutive amino acids of any one of SEQ ID NOs: 2920 and wherein said HNH domain comprises a sequence having at least 80% sequence identity to at least 20 consecutive amino acids of any one of SEQ ID NOs: 4734.

40. The engineered nuclease composition of claim 35, wherein said RuvC_III domain comprises a sequence having at least 90% sequence identity to at least 21 consecutive amino acids of any one of SEQ ID NOs: 2921 and wherein said HNH domain comprises a sequence having at least 80% sequence identity to at least 20 consecutive amino acids of any one of SEQ ID NOs: 4735.

41. The engineered nuclease composition of claim 35, wherein said RuvC_III domain comprises a sequence having at least 90% sequence identity to at least 21 consecutive amino acids of any one of SEQ ID NOs: 2923 and wherein said HNH domain comprises a sequence having at least 80% sequence identity to at least 20 consecutive amino acids of any one of SEQ ID NOs: 4737.

42. The engineered nuclease composition of claim 35, wherein said RuvC_III domain comprises a sequence having at least 90% sequence identity to at least 21 consecutive amino acids of any one of SEQ ID NOs: 2924 and wherein said HNH domain comprises a sequence having at least 80% sequence identity to at least 20 consecutive amino acids of any one of SEQ ID NOs: 4738.

The application's sequence listing, which the Patent Office published only in electronic form, follows.

SEQUENCE LISTING (5718 sequences)

SEQ ID NO: 1 - protein, 1025 aa, unidentified
  REGION 1..1025: note = Description of Unknown: uncultivated organism with predicted taxonomy: Candidatus Melainabacteria
  REGION 1..1025: note = MG1-4 effector
MKKKVFAFDLGKASIGYCVRDGFNINEANSIIIDKDHAETMSLRDRRRIKKTLDAHHAREEYFNKVWSGVGLNILDKNNNNFKKEFPSKNEDVIYTSCLLRIALLQNQKLEEWQIYKALYNAFQRRGYDVNIAWKSVQTDDDKENIERMKKYTCENDIELIISDEYKYPCYYDALRLGLWNEDEPTKLNRSIPQHNSNKVRTTEYVAPRELVEKELKQLWLNAQLQLPQLNSISAEEFLYGEYKIPYGSCVQKEFKQYRGTKKDWQGVLCQKIPRFDNRIIAKCKLLPKRNVCKANTIENVSFVLLMKLKNLRFTVISGEKLRLSPVQIKQIYENWLEKVEDTYNKDLEKAEKLGKENPEKRLNITITRQEIEKIIGEKIIDKIEPMKADISGRSSFCRRACQIMNKIILDGELYPQNVDISEFVDRDNAKNGITEEEIQSMLSKIGDWNNLYIPDNREENAQNASNSRIKTDIMLGNITNPIVRNRLQIFRDLLLNLAEKYGTPDEVIFEFVRDGADNSLYGSKKAQDTERFMKQQEKENEQIINELKDAGLYVNGQNHANATYFLMHKLLKSQGGKCIYSGQNISPSNYDECEIDHIYPRTLGGNDALYNKVVCYRRENQDKKGRTPYEWLSPDSDKWANYVNRLNKIKKQLGKKKFELLTSKPEDCEKLIESYNGLAETSHIARVAQQMTAFIFGWGLQIQGESRRIFVNNGSSTCAIRKRYGLNKLLGDNLKKNRSNDKHHALDAICISFSRDFKYDKEIKKDIIKGFNPEIVKNAIDKIMPYPYANDKPFKGNTKPLETIYGLRTYGDKSYITQRVELNSIDKKATKIKSIIDETIKNDLLNKLKENPTEQEWKLMLQNYIHPKKQTKVKKVMISVSEGEITKDSNNRERMGEFVDFGTKGTQHQFKHSKRHKGQILYFNEKGVVEVMPVYSNIKTTDVKDKLQNMGCKLYNKGQMFYSGCLVDIPKPFKAGSKEYPAGRYQIKTIRSDKVAELEDACGNKISTNVKYLVPAEFKKVESK

SEQ ID NO: 2 - protein, 1077 aa, unidentified
  REGION 1..1077: note = Description of Unknown: uncultivated organism with predicted taxonomy: Verrucomicrobia
  REGION 1..1077: note = MG1-5 effector
MHTKETVWGFDIGKGSLGEAVRVGNEFKHVLSMEIDADFAEIKTAAATRRAWRTREAHKAREMWLEKCLSDADIEILGRRKVDIVDGTWKLVSRGDGRLEREFPADGENVCYNSIALRCKLLLGEKLESWQVFKALNSAIQNRGYDAQIPWGDEDGKSSETKRSGKSDSAKKSGEDESYAERLALFEREFDKLLAEVENREKYDFPCFFKAAKMGLWSPENPDKVGIRIDNTAEKAKGYVVPRNAVIAEFRALVNAAAKQYPKLKGKADFIMFGKAEEAYASYKPELRRKFGLRRGADSDWTALGQKTPRFDNRIIGKCKLIPRLNVCKIKPLKECKAEDDFLPHTITLALKLLNLRFFRGAGIDSLSFDEFLRAFEIARQNKFALNKTNLKKFFKTIGAEIMDENQSSVEQPREGGRASYSRPAMRLLRDLIFSGKSPAEFYASRICKIENTDKNRGLVAEDLAFIKLMGDIPWNGIFVPDVDTFNFANIRESERADKINKLIGSQNDPIVRHRLAFFYERIKLLESKFGAPDKIVLEFVRDDFLGSKAKKEMSQGIKKRFEEKKKLAEELDSQRAEFGNKYASKKMLLKFELYKKQRGRCVYTDNALPLSELENLEVEHIFPRSRGGADAMYNYVLTDENTNKQKGDKTPFEWLSSDKTKWESYCDRVRSLTQSLGAKRCKLLVSPNAEELMQKYTALAETAWISKLAQKICCIHFGFQFGGLKGEKKVWTVSGNTTAMIRGRYGLNRLLHNEEISEDLPLLDRIVKEKNFEEKNRDNKKHHALDAMCICFAPTSNAKKALSRKNILPEEIAKNPESDDARNFFAKYLAEVVPTKVAIKKPELEQTIYSKRVIGGRQTIVKKCNVRDLAYKGQNPKYDFDTLTKRIKDIINPVSKRVIEDFAKTEPTEAEWEDWCKYEAAIPSKNGSPTRLLRVLCKTKDDAERFKDLSKDGCGAYRKSKSHKGQFIWKDNKGNYLVAPVYIYSSKQKVYAELKNNPKCMGICDFFKTGCLVKISNEVVDEKKNRLWLKAGFYNLNSIAKEKRVYLTDVNGQEHKKIPLQHLMNAGMKRVETNTI

SEQ ID NO: 3 - protein, 1059 aa, unidentified
  REGION 1..1059: note = Description of Unknown: uncultivated organism with predicted taxonomy: unclassified Verrucomicrobia (miscellaneous)
  REGION 1..1059: note = MG1-6 effector
MEKEKNNHVWGFDIGKGSLGEAVRVGGDFKHIASVLLDPEFGEIKTAALARRQMRTRKAHKAREKWLEECLDGTGVEILKRREVGIVDGQWRLISKGDERLEREFPPNGEEVCYNSIALRCKLLLGEKLEGWQVFKALNSAIQKRGYDENIPWGEAEEKSSKKDEDDYAQKLSQYEREKSELFESFADGEKYDFPCFFKAYKMGLWSPENPRRVEVRIDCRAQKAKSYVVARKYVEREFECLVEAAAKFFPKLKGRAKFILYGVSETPYASYYGNMRKKFGLKRGAESDWTALGQKVPRFDNRIIDKCRLIPRMNVCKIRPLNEARNEKDLLYYEVTLALKLLNLRFFRNSNIEQLTFEEFKKAFEIASGAKYKMTKTAMKKFLKSISATALGDDYAEIEPPKESGRASFSRPAMDILKELIFSGMPPREFYGRKIPEISNTDKNKGVVASDLDFIKLMGDCPWGGIFIPDVQTYQFANAAFPNPDAQINKLIGSQNNPIVRHRLTFFFERIKFLESKYGVPDKVVLEFVRDDFMGEKEKKEMRIAMKKRAEEKMMIAKDLDEHGFKGGNLLLKMELYRKQNGICLYTGDALPLSELATLEIEHIVPRSRGGPDAQYNYVITREKTNKLKGDKTPYEWLSSDAKEWASYTDRVNACAKALGKKRCRLLLEKDAEELVEKYTALAETAHIAKLAQKIVCMHFGFQFGGLSGTKRVFTVPGALTSRIRKFYGLDRILHNAAAESENLSFEEFLKFSEDLEKKNRKNKKHHALDAMCLCFAPTGVDSRRAKLGEILPEKLRSEKAAREFFKSYLDKIMPVDVAPKKPRLEDGIYSKRIIGGKACMVKRNNLVDLAYKSGLKPVFDIPTLIKLVDKKEKGIINPQIRKMIGEFAATNPDESAWRKWCEEVRLPSKSGLGARVLRVLVYYGEADEYKDLSKDGCGAYRKGDGHKGQVVWESVDGKYYVEPVYVHASKAGVMAALNANPKKKRICGMFNSHCTVDVGDVYNDRGDFILPAGRYMVNTILTTGRCVLTNADGEKRNPININYLMRAGMRRVELSEL

SEQ ID NO: 4 - protein, 1061 aa, unidentified
  REGION 1..1061: note = Description of Unknown: uncultivated organism with predicted taxonomy: unclassified Verrucomicrobia (miscellaneous)
  REGION 1..1061: note = MG1-7 effector
MKVMEDEGGNHIWGFDIGKGSLGEAVLDGSEFKHVASLLLDADFGEIETAAGLRRQMRTRKAHKAREKWLESCLSGFGIETLKRREVGIVNGQWTLISKGDERLEREFPPDGENICYNSIALRCKLLLGEKLEGWQIFKALNSAIQNRGYDENIPWKESDASPSKKEGGDYAQKLSQYSREKSELFESFEGGEKYDYPCFFKAYKMGLWSPDNPERVEVRIGSDAQKAKDYVIPRKDVEREFERLVEAASKWYPAMKGKAMYIMYGIAETPYASYKPLLRKKFDLKRGAESDWTALGQKIPRFDNRIIDKCRLIPRLNVCKIRPLSKIRGEADLLHYEITLSLKLLNLRFFRNSNVESLSFGEFKAAFEIAKGAKYKMGKAALKKFLKSISASVLSEDQSEIEAPRESGRAAFSRPAMLLLKELIFSGMTPAEFYAKKSGEISNADPNKGIVASDLDFIKLMGNCGWSGIFIPDVDTFHFANKGAEPAKLINELIGSQNNPIVRHRLSFFYERIKFLESKFGIPDKVVLEFVREDFMGKEQKKRMQIEMKKRASEKMLIAKKLDEAGYKGGNLLLKMELLEKQGGVCLYTGEPLLPSELGVLEIEHIVPRSRGGPDAQYNYVLTREKTNKEKADRTPFEWLSSDPVKWAGYSDRVKARAGQLGRKRCELLLEKNAEELVEKYTALAETAHISKLAQKIVCLHFGFQFGGLSGTKRVFTVPGALTARIRTFYGLNKILHNEDLAHETLSFEGFLKRGEELDKKNRANKKHHALDAMCLCFAPTGVNSKRARVDMLLPPKIRSEKEAELFFRKYLDKLIPVDVAPKKPKLEDGIYSMRTVGGKKIMARRVNLVDLAYKSGLKPVYDVSVLIKLLDKKERGIINPQIRKLVADFARTNPSEDEWKKWCGECRLPSKNGLGTRVIRVLLNYGEPAEYKDLSKDGRGAFRRGDGHKGQIVWESTDGKYCVLPIYVHASKAKLLAELCANPKKKRICGIFTSHCMVKVGNTYNNKGELLLPEGVYMLNTIRTDGWIQLTSANGDKSKPININYLMKAGMKKVPVKDL

SEQ ID NO: 5 - protein, 1294 aa, unidentified
  REGION 1..1294: note = Description of Unknown: uncultivated organism
  REGION 1..1294: note = MG1-1 effector
MWAFDLGKGSIGEAVRQGNDFKHKESLLIPHELARRGPAAVSGTPANKYRAKKTREAHLERERWLDTIWKVAGLTPLQARAVWENPETQKWELKHKGDYRLEREFAPKQFKKGAGGELVPIKYPNGKATDGAPAEKKADFETCYTSALLRIRLLQGDPSLKDWQIFKALRAALQSRGYGPVPWATKEARKQGRTPEELAREEEKKLQSADPRYREAVNKWQAFKDSVPKAFHFPCYFDAWKLGLWLHAKPDELGCRINHLAESTRNIRFDRADVRVELIRLGDQAAEILPALKKAFSDWQSGGWKYQHPVTGEKLTYPLRAKTFGEFLCDGPAGTPDESSFEAFLDQRHKAGLNRGSFEEWMAALGQKTPSFDNRILNNCVLIPRFHVCKMDVRLVMDEQGKLTGQIVTESLLATEVTLLLKLKNILVADPSAKDGQRKLTVGEVQDILAYAHRRLAELELVAADGTLLNLWPSKVAQRFSISKSSWRDVAVEAEFLRRMTASNIVVGSETRRLTIAEASSLLRAIANPKKGLEAQLPKDLQLLTKTAKSEFKKAKTASDEKTLRPMPGHEEVKAPKSSGRCGYSRVALRILKELILSGQAPSAFHSRLRELDTELLRKLGSSPEKPLVLIDDSKSQDQEQRKKENIENGKRGLLVSELNFLRQMRKERATEDSWENFFIPSQTIDALQQRHTQDGKLDSQSAIRELLGTINDPIVRHRLGVLAERLRKLQCGDEKRDSPGFGVPDAIVLEFVREDFMGEEAKREYQNFINEREKDRKAAREEAGKLGFDSRSSGLRYELWKAQGCCCLYTGRALAETELDQYEIDHIVPRSLGGPDAIVNYALTFHDINHTKEKGKLTPFTLLHGKPGWAEYLLRVDARATFLRNKKVQLLTRPDAAELVQRYTALAETAWISKLAQAIVNLQFGWTNGYDEKRERRVIVVSGGLTARVRRKYGLDKLLYNDVTDLEVLAKKVKNRDDKRHHALDAMVMTFIPQWARNPDQEGFFRFPREFRDASGREDYQKVRQLFAKHLSEVMPTNIAFERAALADTSFGLRVEGGKRIIVKRVSLFDLAQEPAGAPGKTKFSSKYLLKKIEWVRDATIRRRVKEEFLHKEPTEPNWQKFCDSFRQNSRNGVPGARIMKVWVYAGEPNEFKDLSKDGEGAMRKAKDDHQGQIIYTANDGELAVNPVYAHASITREMKRLRESGSKAKVHCFVRSKCIFHLRKAVPQPEYKLVVKNEQKQKRRIPATLALAPAKFMLNTIITDSMDVEFSAANGQRLVAPLRVLIDAGFEPV

SEQ ID NO: 6 - protein, 1031 aa, unidentified
  REGION 1..1031: note = Description of Unknown: uncultivated organism with predicted taxonomy: Verrucomicrobia
  REGION 1..1031: note = MG1-2 effector
MTWAFDLGLGSIGEAVQQKGEFKHAASWLVPSEFASTKAARTRRRMWRTRQAHKARESWLNQCLRSAGMEVLVGRRVERGPQGWTTLPGDPRLEREFPSAGDTTCYNSALLRIRLLRGETLAPWQVYKALHAAIQRRGYDPNIPWKSGASRSTEEKEEGETRARAAEYQSLLEDMAPGRTEFHYPCYLQAWKMRLWNPGQPEVLQERVSHDAESIHGMVAPRTLVEKEVRDLVAAAARYHPQLAGQADFILWGPACKPYASHNGTLRKQHGLRQGSEEDWEGVMGQKIPRFDNRIIEKCALIPRFNVCKMAPEGRAAAQPDAALPREVAFLMKLKNLRFSRGGGIAHLEAAEIATLFEKRREALSLTQKQWETACEKLGGRPLPPDLEVKAPRLGGRSAFCRPALKHVKELILSGKSPRDFHAEALARLHGNTNPQKGLVPADLDFLLRMGDSWEGLYLPNKRLEAISSRARTPDEAIREVIGSVNDPIVRHRLQLFVERLDELETRFGPPDQVALEFVREDFMGEKAKIEYRKFLNRREKERKEAREQAGQLGATSGSSGLKMELFKAQRGQCLYSGQRLHETKIEDYVIEHIVPRAKRGPDAVINYVLTTEELNNDKSDHIPFEWPYLKKQWDAYTQRVESCAGALGVKRVRLLVSPDAVELAQKYTALAETAWISKLAQTILNLKFGWTNGNTPDGRKAVVVVPGGLTARIRRKYSLNSLLAGDGVDEEEAEKKNRKDHRHHALDAMVISFLPGWVANPDKEHFFRFPEPVRANPRGFFQTAIHNVVPRQLCFEKGKLEETIYARRTIAGNSVAAVRQEFRALAFKSVGINKTEFNLDYLYKQTDKILEPRIRQLVQDFASTEPNEAAWERFCDEVRLPRKDGHPGPHVRRVRMRVGPMDEFKNLSKDRAASGAYRKGSTHHGQWVYRDATGRSLVRPVYAFESAGQVRRELIAMHGLDALVGYFQSGCLVELVRPVAHKKTPLAPGQFSLNTLRKDGFAVVTDARGRKSEPISLKTLLESGFHRVTS

SEQ ID NO: 7 - protein, 1200 aa, unidentified
  REGION 1..1200: note = Description of Unknown: uncultivated organism
  REGION 1..1200: note = MG1-3 effector
MNEYILREPDRKPLAEEWLNHEFYRSAVVLGIDIGLEGIGVYLRRGPQEIFARSIMLELPEAEALAERRQKRAWRHCRKNRKRRLHRLKQLFAKHGLPWLDADRMSRAHPFRERYRAINNGVASKEALSICIRHCVVHRGYDYGGTEEGTFPWGESPLLSKAAEWLATAYVTPELKEQIEQRAPGLVPGKNEEEQRNKFAELLRERLEWSQQHDIARVLAEHVKGGHDNLRTRARGYNFPRQKVWEHLETIVRKHAHLIDDVEGFLAVLGLNPNKAANAKEAAKARKRAIFFYNRKTRFDMERHWEKKVNRCPFAGKLGGNPDERCAENGDLNVRRWKALEFAATRRVEIEATEGKGATKKKRRCLHSLSASATRKLIEFIEKHHGAASPATAPKWEEGKAIILDDITAVHGEKAKPVAEKQSEWNKSYFTQLKDLLTPTLANRKKRASLSAFAAGHLFNIATADSSDFAPENVVTRLREAGFYDWRRNASVDFNPFPQVELLLGRRIKHGKRRGELSPTCQGLLRRIFAEHREALGGATAPDYCVIEVIGDPPRNARQRAERQKEIEANREKREKLFEQYGIEDSGVASKRRRIMLYEQQRGKCPYTGRDLPSNPLDPSLEIEHIFPVEMGGLSVDDNLVLTWRSVNAEKGKRTPLQWAGERFDAMLANTRDMRWSARKREIFAWGTIREDKPDKPSHYNADGTLRVPDFGNTTRTAQLARQLRAEIMRWMQVDDKPDEAARRIGTPSGWLAAQARKSWLPAEEYEKVRNNVTHHLIDAAILAHIPPREGMNSVRCKGIFYVESVPVRDPVTGDTTYRLETKALPELSPLPRLKHWLPDNGEYDVCPVWKPRRQSKTQSLGDSTFWRQVRPDEATVAQRTALKPEEITDADELLTTLQRMNIPAKLIPSRSALADWLAAATAATKADKDKPIAPLKLTDGTPVKNLWKFDSKGSFSSPVGWSGKRNPDGKLRELRTISLKYDRLELWLGYDHQKAERARRAKQPDWEQAGWVYQKRLIPDARALRHVKQMGFSFARDKRHKAPAFMQNKPDKPETHQTLRDLVLGGRLLPFSHKVGEIRKGDVFKLHLLPDGSIRKRTPVGQPEPAAALSTFYVVTALKHGRGNPVVKLTSQLFKDKEGTPMERFAGDVLSKILSTADDLAYVLGLPPAAEEAQKHGWRIPTSPPPPAAAAKETDGNLL

SEQ ID NO: 8 - protein, 1200 aa, unidentified; identical to SEQ ID NO: 7
  REGION 1..1200: note = Description of Unknown: uncultivated organism
  REGION 1..1200: note = MG1-13 effector

SEQ ID NO: 9 - protein, 692 aa, unidentified
  REGION 1..692: note = Description of Unknown: uncultivated organism
  REGION 1..692: note = MG1-3 effector
MGYGVKEKMKHFHYSIPRTQEKLHYPNKYKVTKAQWKKWCEEKGYKINLGTSEIPAPKISGRTGFSRPTMLLLREFILSGLGAQDFREKILTTNFKGFEKFKLQEEDLDFLKNIKNNDPQNIYLPNNSLKEKFLNKNTGDMEEAVQKLIGSTRHSVVRHRLTIFFKELQKLEKKFGAPDQIVIEFAREDFSTKDSKKKYENDSKENNRIFEAAKKELQEKFGIDYRRQNENLVRKYMMWEKQGYTCPYTGQALSFEKLPEYEIEHIIPRGNKWNGPDDIKNTVLTTGTENRKKGDNMPFEYIKNEEWEAFKERVNNMKISGKTKNILFARTKEEAEKLIDRYYGLATTGWVARMARDIACLWFGWQPNAEGEKRKLHTVSGSLVGKVRRKFGLNKALNPFLSEADAGKDEKNRDDKRHHALDAMVMTYLDEYMRNPRNFSKLQKELGEMFGKLGGAQYFEERLAEVTPYKIARNKAKLGETAYRKIEVQEKIIKRGKPEIKKEEIIVTRKNIEDAKPKEIIDKNIAKKIDDFLNKKPSEEEKKEFYKKLGIKKITVKKGKPDNLKNLSKNPNARGQYYESKSITGTGTLQHGVYLYSRDGENWKVEPVYAFKSPYKTKKELLEQGFQIKDNALFYAGCIIEVTENIEGKDIDRGKYTAMTIKTAGTIKLRNYKGDIIQTSLPQLKNNFHFIK

SEQ ID NO: 10 - protein, 692 aa, unidentified; identical to SEQ ID NO: 9
  REGION 1..692: note = Description of Unknown: uncultivated organism
  REGION 1..692: note = MG1-3 effector

SEQ ID NO: 11 - protein, 1271 aa, unidentified
  REGION 1..1271: note = Description of Unknown: uncultivated organism
  REGION 1..1271: note = MG1-8 effector
MPSPTTIWAFDLGKGSVGEAVRDIETNQFLHVAALLLPPDLARRGRADQTGTPASRYRAWKVRLAHRERERWLDTVWLAAGLTPLQKREVWRNPATGRWELKHPADYRLEREFAPALGEKTKDGAPSDAAGANLCYTSCLLRIKLLRWKRGDPPLEEWQVYKALRSAMQKRGYGRVPWAVKQARAQGKTPEELEAEEQKQLEQADPRYREAAGKWPEFKRAVPAEFHFPCYYDAFHMGLWSPDQPDQLRLRLDHRAASTRNVRFDRANVRKELIALGNNAAAMLPQLQQAFERWQRDGWTFRHPVTGKALTKPVHARTFGEFLCDGPAGQPDETSFEAFLNQRREAGIRIGTFEEWMAALGQKTPRFDNRILAPCVLIPRYHACKVYARLEKDRAGRLTGKLVPDSLLASEVTFLLKLKNLLVADPVKGQRKLTVEEVRDIFAFAQRRLKTLPLFTPEGEPAKEWPSKVANCFAINPSDWPKIAVETECLKGLARLTVSDNGAPRPLTREEAEALLHAVAGGRRAAQSALPAHLLPLVKRAAAAWKQAKQQAGEIMLRPLPGHEEVKAPRTSGRSAYSRVALRILKELILSGDAPSAFHARLVRRDPDLLQRLGPAPGQPLAIFDDSTASNEAQRKQHDAENRKRGLLVSELNFLLQMRKDDGSPDSWENLFIPAQTLEALQQRHTEDGRLDADAAVRELLGTIKDPLVRHRLGVFDERLRKLRFGDARKGLRGFGVPEAIVLEFVREDFMGEQAKRELQTFQKRREQARAEAEAEAAKLGLESRSSALRYELFKAQGGICLYTGRPLSETQLDQYEIDHIVPRSLGGPDAMVNYVLTFPEVNSAKEKGKLTPYALLHGTDGWDAYVARVKARAAALRNKKVQLLTREDAPELVERYTALAETAWISKLAQTIVNLRFGWRNGVDYSGPQPVKRVIVVSGGLTARVRAKYGLDKLLYGENTPPEVLAKKVKNRDDDRHHALDAMVMTFIPHWARDPNKQGFFRFPPAFRDANGREDYQQIQSLFARQLEKIVPRHLAYEPCALADTIYGRRLDKGEPVIVQRVPVRELAYKQEQQRPVFNLTYAKDQIAHLRDPRLRRVLEALVATGPDQVAWDNYCRALAAGTCPELPGRKVLKVTLNRDEDPAEFKDLSKDGCGAFRTRKGEHRGQFVYLDARGRVRVRPVRPFESLVAVKAEVERLAAGGRLIGFFQSMCPVELDQPVTHGNFVLRPGTYRLNTIKKDGRAQVTTAAGEKTPQINLAKLVAAGFRRIA

SEQ ID NO: 12 - protein, 1655 aa, unidentified
  REGION 1..1655: note = Description of Unknown: uncultivated organism with predicted taxonomy: Verrucomicrobia
  REGION 1..1655: note = MG1-9 effector
MPSPTTIWAFDLGKGSVGEAVRDIETNQFLHVAALLLPPDLARRGRADQTGTPASRYRAWKVRLAHRERERWLDTVWLAAGLTPLQKREVWRNPATGRWELKHPADYRLEREFAPALGEKTKDGAPSDAAGANLCYTSCLLRIKLLRWKRGDPPLEEWQVYKALRSAMQKRGYGRVPWAVNQARAQGKTPEELEAEEQKQLEQADPRYREAAGKWPEFKRAVPAEFHFPCYYDAFHMGLWSPDQPDQLRLRPDHRAASTRNVRFDRADVRKELIALGNNAAAMLPQLQQAFARWQRDGWTFRHPVTREALTKPVRARTFGEFLCDGPAGQPDETSFEAFLNQRREAGIRIGTFEEWMAALGQKTPRFDNRIVENCALIPRLHVCKVAPRWRRNQNGDKELDPRSLLAAEVTFLLQLKNLQVDDATAGTVRYLNTDELNEWWKHACEKAANVPLSDTWERDVLDCFKITRAEWRRWCVSKNLLPVARERSEAAALAGEIATQSAEAASGDSGAEERSRGKSQDVVQAPKPTGRSRFCRPALAILRHLLLHREKPQDFAARLRNREPALLDALDFDVLDTAPAEERPTGNGKALKRYRKQQRTWLLTGDLDFLDHVWKATDRDGNPRDFEPHQLRIPDMTLRDLRKRHDLTETPYSDLLRQNSAELERRDKAILELIGQQKNPVVRDRLTRFWQRLKHFQNPVVPSDPKKQKPGLGLADPACLVLEFVRDDKDNSLEGRKRTEAIQQALRENEQRRDKARKALEQCGLPTTDDMVVRWLLREAQGGVCIYTSNEIRPADLPNLQIEHIVPRSRGGPDAFWNWVLCDENANAEKGDRVPYVWFKEEKTDEEWADYKRRVLARAAHLGRRKVDLLLRPDAAELAGEKYTALAESAWIARLAQTIARLHFGWPLDDEPGEERVITISGGLTARIRRKYLLDSLLGVGNDAETLRREIDSALNELQALRTDTSLSENAPKQKRAELRQRLANLAAEAEKNRDDQRHHALDAMLLTFLPNWARDRTKEDFFRFPTAIGDNDFYSKEDQPEMAAIKSQLAKLYVENKPVFREIKQARLAGDFGRLQQLKASVFPARKRIAELYRALDKLKQPRNVRAVREWFRAQLEGASPAPNGPVLPRTMAWQRTPTEATLYRRVYLIYKDCPERSLLALTDLAFAPNPRNPQQPVFDLKWLRTRIQSIAEHPGYDRKKLQSVLSAKLEATLSAKRFASCQFGPEDWQQICAQPEVAACFQPVGRGKSKRPPEPDQRLVKVCKVEVLPATRYELSELGYTSGNNYAWNPDHLAETARNILRKDDAQARTRGRRRTPAPASSPSADASPWPGFLWDREMQAKLASPKFREALEQQLVPHLLPPKPARMSDAERTDWATREERWKQAFEQFRKSHNLPKSFFVFTSDSDRPPRRPNVSLLRVLFEPKDKVFSRDALAKQAQSVVDAQLRRCLECFADSLTQVRDPRLQEKAWRDYCNVVRVVPKETLEQFTREHPTPTADQWISFFEAQTGPRIFQVMQTVGTSLEEYFDLSKDACGAFARGGNKGYWLCKRGDAIEARPIRFFENPEQVRVRLLGQGWELLDPKPWRTGDLLNLPEAAQSGARSVPAGYYFLGSFSNDTGVNLKPCFGGEVPQNVSLKALWNRGLRRCSPTA

SEQ ID NO: 13 - protein, 1147 aa, unidentified
  REGION 1..1147: note = Description of Unknown: uncultivated organism
  REGION 1..1147: note = MG1-10 effector
MTHYYQFNSIPDAVSPNSESLEQLKSASARYWAEHDFFSSDTVVLGLDIGMEGIGICVRKGKDILYCKSLLVDLPESEALAKRRAFRASRHVRKNRRRRMRLLKDLFGQYGLPWVDDSIMSRSDPYILRHRAVSKKLASKEALSICIRSLVARRGYDYDAMKEQGNNPWGDSNSVKEVMSWLKTTFVDEKMVQFIKEREEELTEGKGAPLKEETREKLWELLQARKAASDKQDINAMTAAYAKQRISERQAKGMNYPRSMVRKNLEEIIDRHAHLIDDVEGFKASLFRPCVTKEDKGKAIFYYQRKTAEENRLHFEKKVKDCPLAGWLQLGDENSKCCLKGNAWFRLWKLVDFLSVRRFYLKKKEKGSVPIRRLLPASVIESLVKASVHQDDHHFVSGWKDVKAVLNESLACEGWMAIDKGGDVKDQKDWNKEQLIALQDLCSPSASSRQARASLGEASARKLYYMVTQNESNFDPECMEEQKKNCGLYEQRQAISLFGGTFPQVAALLGTIGPDKKNKNGRFVQKTTGILQRIFADLSPMIGGKKVPDYVVVECIRQAPRTETQKKEIEVEQKNNRASKDKMASEFGVGEGKLGRSKYFRIALWKQQGGSKTTKAICPFTGKTLDVDDPLSPQLELAHLYPDTKGGLYMMDNLVLTTREVNKAMDNMTPVEAARAGIFGISCDEMIRRSEQFAWGESKRKLFRFEPTAEESFPDFNNMTRISQLASQLRKQVAFWLGIHADSDDLSAAVALRERIGNPQGQYTAAMRRSLLPESGKDRSGYVHHREDAALLSCMPPMGLNSIKYKGIFYTKMVPWLDSSGQLQQRRSLFALSCADGLPLPDIASILEDDTECPIIKRRSESKYKALGDSTFWHVDEEGNTWQRTPLVLGKDTSADSLHAMLVASCIPENLIPSQSEIDKWISHHTPAHRGEEIKNIPLRLKNGVPVKSIWKEASKGTLINSPMGWSGTMSDDGIFREARSLRSSNDRLELWIGWNAKKQVWEYQTRVVPTREAMAGIRRMGLPWRNTKNIPPYLQKILKQKKVSSLKELISGKLCPHSIHVADIRKGMVAKIEFEYDVKKCPSDKNGLKEVMWGEVTAILTSGKVECKSLIRKDMKPYSATNSLKIAMLFGFPPPDEFAKTHSLKP

SEQ ID NO: 14 - protein, 1206 aa, unidentified
  REGION 1..1206: note = Description of Unknown: uncultivated organism
  REGION 1..1206: note = MG1-11 effector
MNNTPLSPNTASAEPEPDRKLAAESAAENAQARAVAASWAQHPFFDDESIVLGLDIGMQGIGIAVRRGRQLLYAKTLMVELPESAPLRQRRQYRAARHARKNRKTRMRRLRELFLRHGLPWVSDEIYGRSDPYKLRARAFTPGKTLASKEALSLCIRSVVAHRGFDYYALCSESGGYPWGESSDMKDAARWLRTQYVTEETRDQLIGMAGAFSCFDEKEITDNHLLEWERLVRERCDDPNKPDLATLLRQYASSRPDDRRARGWNFPRSLMEDHLRTIINKHRHLIDDCDGFLAALFRPCDTKADKKRAIFHYNRKTPAEARARFERKIALCPYLSDPETAISLGHADAEGRPLPPEKCGTRGEAAICRWSMLDFLSTRRFELKPPKARGKDLAEPPLLRQTLPEATIRALDEALQEPVKPRWADLKSRLTKALKPFTLETNTKSPTNALLIEQLKDICCPSGPKAAARAGLSARAAELLIGVITGRSNPAGEASDTPPAPSYDPRQLEERKLAWGLYEKRARIDASRTGIYPQVHTLLGTLRVHRKSAEDSAFSTRGLLQRLFEGELRESLGGKTRPDYCIIECIKNPACNTKQASEIQKQNDARRKRKEELCRAYGCANPTHAEMLRLQLFEEQGGKRKGEAPAICPFTGESLGTDPLSPHLELAHIFPDARGGLYIRENLVLTTARTNRDMNNRTPIEAAEASLPGWSRWETIEQRIRHFRWNAKKLELFTFRPTPEQPIPDFNNMTRTAQLARELRRYIAVWMGINRDVDAVRERIGNPCGSYTAAARRGMLPADYRKDRSNNLHHRIDAAVLTCIPPAAGLNNLRCGGIFRNTRINGKRCTTTIPGLPLPDFGALIADDSTCPLVSRRRTGSTRQSLGDSTFWGVNSQGDLTQRTPLVYDKDTSVESIAQDLVRTGIRAEEMPDQDHIEQWLLRMSQAQQEEREGRDAAGPAPTLRLKNGRPIRSIRKGSKKGEIAVSPLGWSGIIEPRSESPAGDGAPAAEATSGRGRDRNRAAITAPNRFIALRCLSSSNDRLELWLGHDGKKWKYVTRVIPTKQALAGLKRMGLPWRGRERAPLYLIRLLDAARCRDLKQFICGTLPPHAVKVATVRKGDFFRATFNLKPKKREEQHSHTACLDTPATLTGWGKVTALMTKGQIGISPATHQGYEKTSVRGPSRLAKMLGLQEDAAAEAESRGLLPRP

SEQ ID NO: 15 - protein, 1244 aa, unidentified
  REGION 1..1244: note = Description of Unknown: uncultivated organism
  REGION 1..1244: note = MG1-12 effector
MDYIIKPAPGSTSSPYDWANDPFYKSAIVLGIDIGIEGIGVWLRKGRNHVFARTFLFNTPEAAPLKGRRLLRGGRRCRQSEQHREVLLKQFCAEFGLPWTEIKDQENEDGPFKLRLRAVRSKLGSKEALVVCLRHIIRHRGYDYHETDGGSFPWGDELKADVATGWAKAAYCSPEDAAEFLHDVSDCGWNDKQLASFRHALTAAVERHKQGIEAALEKHFAQDKNNLRIPARKHNFPRSLIWKHMEKICANHRDFLGGEAGLSAALLKLKPILNYHRKKPGALAERKVNRCPVAIHLFGGTAPKCDPNSNPHIRRFKLLEFLATRSFVAKDGTRLLANADLMKWLLDEVLAEDIRAVVVNKVKGGQKQERRKFGGFRDEFIARFDPNGKIELAGDRVSHNKDFFEQLGDLLRPKLSVLNARASICGKSAEELFKRATKDGYQAEIISRNLKEKQFDGQSFYTLRQAAAAGFGIYPQVEFLLGRRGKKGNQAVPGVLRQMLELPEVSAKLDGQKIPDYVIIETVGDMPRNVVQAKEIQDEQKRRREFKEGLFEKFGVHDKQQDSEARKRVLLYDQQGGNRGEAICPYTGEPLGDPLSPKLQIDHIFPESLGGISEMVNLVLTHETTNNQRKGNQTPYQAFGGQQNTAEWQALVARVQKMGWNKQKRELVLREESSCPEWDNMTRIAQLARQLREEAARWLGVFGDDAKVRQKIGTPTGYQTSVCREAWSENVPKKDRTNLRHHLWDAAVISHIPPDRGMQLSHCGGIFFHAGEKKNGNILMRALPGLGPDLNSFENATKDQCLVEKKKTNRSKKSRFQQWIYGFPDKNGQMWARDSLKSLADKANLLELLRDAGIGENQLPTSHFEEWQEKRKAQFFTREEAWAAVEALALPPEQKIPEPIFEEWWSYRFSGDKRKVDEKLLRILIAKAGVKESVSKERLASVLTNRGDPGPLTRKDGTPINGVSGTAKQMTPMAIIPHRNHKREIIGFKLATESFVRAEIWVTEKPTKDGNAELNYHCRLIPHPRGLANLRQRVMQCTGKQLTWERRLTDEELRELGLLKELAALKREQEKISATHAKAVQKWQKEQQAKTNTLDLASSPSVQPIELKLPWLSLRKCYAGLPLYARRLTNKHGADISRIAKDDLLRVPLNSEGDICKREESAYQTLWYRVSAINKSGKIEMKMAERKQIKPPSERELRDGKRKPLTTDELWRVYAYTKEPSSTDVLAYLLEITRGNDQPPHPVK

SEQ ID NO: 16 - protein, 1294 aa, unidentified
  REGION 1..1294: note = Description of Unknown: uncultivated organism
  REGION 1..1294: note = MG1-14 effector
VWAFDLGKGSIGEAVRQGNDFKHKESLLIPHELARRGPAAVSGTPANKYRAKKTREAHLERERWLDTIWKVAGLTPLQARAVWENPETQKWELKHKGDYRLEREFAPKQFKKGAGGELVPIKYPNGKATDGAPAEKKADFETCYTSALLRIRLLQGDPSLKDWQIFKALRAALQSRGYGPVPWATKEARKQGRTPEELAREEEKKLQSADPRYREAVNKWQAFKDSVPKAFHFPCYFDAWKLGLWLHAKPDELGCRINHLAESTRNIRFDRADVRVELIRLGDQAAEILPALKKAFSDWQSGGWKYQHPVTGEKLTYPLRAKTFGEFLCDGPAGTPDESSFEAFLDQRHKAGLNRGSFEEWMAALGQKTPSFDNRILNNCVLIPRFHVCKMDVRLVMDEQGKLTGQIVTESLLATEVTLLLKLKNILVADPSAKDGQRKLTVGEVQDILAYAHRRLAELELVAADGTLLNLWPSKVAQRFSISKSSWRDVAVEAEFLRRMTASNIVVGSETRRLTIAEASSLLRAIANPKKGLEAQLPKDLQLLTKTAKSEFKKAKTASDEKTLRPMPGHEEVKAPKSSGRCGYSRVALRILKELILSGQAPSAFHSRLRELDTELLRKLGSSPEKPLVLIDDSKSQDQEQRKKENIENGKRGLLVSELNFLRQMRKERATEDSWENFFIPSQTIDALQQRHTQDGKLDSQSAIRELLGTINDPIVRHRLGVLAERLRKLQCGDEKRDSPGFGVPDAIVLEFVREDFMGEEAKREYQNFINEREKDRKAAREEAGKLGFDSRSSGLRYELWKAQGCCCLYTGRALAETELDQYEIDHIVPRSLGGPDAIVNYALTFHDINHTKEKGKLTPFTLLHGKPGWAEYLLRVDARATFLRNKKVQLLTRPDAAELVQRYTALAETAWISKLAQAIVNLQFGWTNGYDEKRERRVIVVSGGLTARVRRKYGLDKLLYNDVTDLEVLAKKVKNRDDKRHHALDAMVMTFIPQWARNPDQEGFFRFPREFRDASGREDYQKVRQLFAKHLSEVMPTNIAFERAALADTSFGLRVEGGKRIIVKRVSLFDLAQEPAGAPGKTKFSSKYLLKKIEWVRDATIRRRVKEEFLHKEPTEPNWQKFCDSFRQNSRNGVPGARIMKVWVYAGEPNEFKDLSKDGEGAMRKAKDDHQGQIIYTANDGELAVNPVYAHASITREMKRLRESGSKAKVHCFVRSKCIFHLRKAVPQPEYKLVVKNEQKQKRRIPATLALAPAKFMLNTIITDSMDVEFSAANGQRLVAPLRVLIDAGFEPV

SEQ ID NO: 17 - protein, 1010 aa, unidentified
  REGION 1..1010: note = Description of Unknown: uncultivated organism
  REGION 1..1010: note = MG1-20 effector
MNTKKIIFGFDVGLGSLGEAVRQGDKIIHADSLLIDKEVAEIKDQAERRRQYRTRTTHKEREKWWKKIWKMIGKQPLKGIEVFKDKNGNWQAEKGDEKLEREFPKKGDDTVYTSCLLRILLLQGEKLKDWQIYKAVRSAFMRAGYPNVPWAKQDEKEEEKRATEFTEMLEKIFTNLDYRFPCYYDAYQMEIFDAETGEIEIRQKKKANRARGYTAPRDLVEKELRLLLEQAAKQIPDLKNMPAKDWKDYILFGLKGDEKLQNKQWKGFYDTKIRGILDQKKAKFDNRCVNNCSQIPRFRVSRTKNILYFQTHLLLKLCNMMVEKNKKNEKLTPEERQEWYEKAEGERKQYMKDFFAKGGKKLTEDDYKKIANKYKITKTQWKKWCEKKGYKTYPGTCEIAAPKISGRTGFSRPAMLLLREFILSGLGAHDFRKKVLLENFKGFEKYKLHKEDLDFLKNIKGNDPQNIYLPSISLKEKFLDKNTGDIEDAVQKLIGSTRNSVVRHRLSVFFKRLQELEKKFGTPDNIVIEFAREDFSTKDSKKKYENDSKTNNKLFLEAKKKLRDNFGIDYRKQNENLVRKYMMWEKQGHICPYTGQPLDFEKLPEYEIEHIIPRGNKWNGPDDIKNTVLTTSAENRRKGENMPFEYIKNEEWESFKNRVNNMNISGKTKNILLARTEEEVEKLINRYYGLAVTGWVARMARDIACLWFGWEPGAEGEQRKLHTVSGSLVGKVRRKFGLNKALNPFLSAADAKKDEKNREDKRHHALDAMVMTYLDEYMRNPRNFSKLQKELGEIFGKLGGAQYFEEKLEDVIPHKIARNKARLEAQAISSVKKKISELKKTDIESIIDYKMKIEIQEIGLKNFQKKHSKEQKILLKPNGAINLSKDKKSRPRWYVTKTGEGFSYEGHYIFKERNNENFKICPVKAFESSWQVFRKLKNKGYEIKDNALFYAGCIIEITKPIPKKDIDVGFYEIKSLKPSDHRIQLKSLKRGEVFPLFAISYLKNNFHFVQ

SEQ ID NO: 18 - protein, 774 aa, unidentified
  REGION 1..774: note = Description of Unknown: uncultivated organism with predicted taxonomy: Candidatus Peregrinibacteria bacterium CG10_big_fil_rev_8_21_14_0_10_54_7
  REGION 1..774: note = MG1-21 effector
EKLEREFPKKGDDTVYTSCLLRILLLQGEKLKDWQIYKAVRSAFMRAGYPNVPWAKQDEKEEEKRATEFTEMLEKIFTNLDYRFPCYYDAYQMEIFDAETGEIEIRQKKKANRARGYTAPRDLVEKELRLLLEQAAKQIPDLKNMPAKDWKDYILFGLKGDEKLQNKQWKGFYDTKIRGILDQKKAKFDNRCVNNCSQIPRFRVSRTKNILYFQTHLLLKLCNMMVEKNKKNEKLTPEERQERYEKAEEERKQYMKDFFAKGGKKLTEDDYKKIANKYKITKTQWKKWCEKKGYKTYPGTCEIAAPKISGRTGFSRPAMLLLREFILSGLGAHDFRKKVLLENFKGFEKYKLHKEDLDFLKNIKGNDPQNIYLPSISLKEKFLDKNTGDIEDAVQKLIGSTRNSVVRHRLSVFFKRLQELEKKFGTPDNIVIEFAREDFSTKDSKKKYENDSKTNNKLFLEAKKKLRDNFGIDYRKQNENLVRKYMMWEKQGHICPYTGQPLDFEKLPEYEIEHIIPRGNKWNGPDDIKNTVLTTSAENRRKGENMPFEYIKNEEWESFKNRVNNMNISGKTKNILLARTEEEVEKLINRYYGLAVTGWVARMARDIACLWFGWEPGAEGEQRKLHTVSGSLVGKVRRKFGLNKALNPFLSAADAKKDEKNREDKRHHALDAMVMTYLDEYMRNPRNFSKLQKELGEIFGKLGGAQYFEEKLEDVIPHKIARNKARLEAQAISSVKKKISELKKTDIESIIDYKMKIEIQEIGLKNFQKKHSKE

SEQ ID NO: 19 - protein, 774 aa, unidentified; identical to SEQ ID NO: 18
  REGION 1..774: note = Description of Unknown: uncultivated organism with predicted taxonomy: Candidatus Peregrinibacteria bacterium CG10_big_fil_rev_8_21_14_0_10_54_7
  REGION 1..774: note = MG1-22 effector

SEQ ID NO: 20 - protein, 809 aa, unidentified
  REGION 1..809: note = Description of Unknown: uncultivated organism with predicted taxonomy: Candidatus Melainabacteria bacterium
  REGION 1..809: note = MG1-23 effector
MSKKVFAFDLGKASVGYCVREGFDIRKVGSIIIEKDHAEITTNRDRRRVKKTLEAHKAREQFFKKLWQNAGLETLDKEDERFKKEFGNKKDKNIYTSCLLRIALLQNKKLEQWQIYKALFNAFQRRGYDANLAWANAKTDDDKKNAEYMAKYTKENNVELINNDDFKFPCYYDAKRLGLWSEENPSELKTTIPLTGSKKVRTNGLVAPRELVEKELKQLWLNAQKQLPQLQNIDAEYFLYGDYRQAYGSYVVKEFRKFRGTKNDWQGVLGQKIPRFDNRIIAKCKLLPKRNVCKANTLENVSLVLLMKLKNLRLTDNMGEKFLLSPIDIKKIYENWLIKAKIDTNEEKLDTTITKKEIETVLNRKIKDKIDPMKANISGRSSFCRRACKIMTKIILSCELYPQNVDITEFVDKPNTQNPITIEEINTMISKIGDWNNLYIPDNRDEMAENSSDNREQTDTLIGNITNPIVRNRLQIFRDLILNLKQEYGTPNEVIFEFVRDGADNSLFGAKKANDTLKVMKENEKDNEQIVSELKDANALSSENILKLKLLKKQGLKCIYSGKSIAISNFDACEIDHIYPRSMGGNDALYNKVLCYSMENQKKAGRTPYEWLHKDEKTWFDFVNRLEAIKDTLGKKKYELLTSKPEDCKILIDSYNGLAETAQIARIAQQITALVFNWGLQVEGENRHIFVNNGSSTASIRRTYKLNKLLGDDVKKNRDNDKHHALDAICISFSRDYKYNKEKKVDEIEGLNPEIIKEVINNLMPYPYANDKTFKGNIKPLESIYGKRVKNGNTYLTKRADITSLEPKE

SEQ ID NO: 21 - protein, 1036 aa, unidentified
  REGION 1..1036: note = Description of Unknown: uncultivated organism
  REGION 1..1036: note = MG1-24 effector
MGKKVFAFDMGKTSIGFCVREALEIKEANSIIIDKEHSDISSIRERRRVKKNLEAHKAREAFFINLWKSCGLIPLDTKDENFKKEFATKHEDVIYTSCLLRIALLQNKKLEQWQIFKALYNAIQRRGYDTNLAWKSAQSDDDKENQELVKKYTQENGIEMIQNEEYKYPCYYDAKRLGLWNETTPKVCKRTLNNENLIKIRTTTYVAPRQLIEKELCNLWKNAQAQIPELNKYTVEEFLYGEYKEPYGSFVNPKFKQYMGTNHDWQGVLGQKIPRFDNRIIAKCKLLPKRNVCKANTIENVSLVLLMKLKNLRLTILDGSKRILAPAEIKHIYENWLSKVEQNVIKMQEKCKKENKTPDKEDKKLDTTITKKEIENVINQVISDKIEPLKANISGRSAFCKRACQIINKFILGGYLYPNEMDITEFIDSENRPNGITKAEIQNMLSKIGDWNNLFIPDNRGETIDNSENIRVKTDLMIGGITNPIVRNRLQIFRDLLLSLERDYGKPDEVIFEFVREGADNSLFGKAKAQAAETNMREMEKRNQQLIEELKNYDAYSSKNFEKLKLLKIQCGQCAYSGEKIGIGDFNKCEIDHIYPRAMGGNDALYNKVLCYRVENQKKQDRTPYEWLSSNKEQWANYVFRLNKIKQSLGKKKFELLTSKPEDCAKLIDSYNGLAETAYIARVAQQITAFCFGWGLQVEGEKRHIFVNNGSSTHAIRRRYGLNSLLGNDIKKNRDNDKHHALDAICISFSRDFKYDEKSKVDVIDGFTKEMVKKVLDEIIPYPYTNKKPFKGNIRPLETIYGLRTYGNNSYITQRIPLESIEQKDKKIKTIIDEAIKNDLLEKLTQKMDSKDWIKMLQNYVHPTKKTKVKKVMVVVSEGKIEKDSNGKERIGEFCDFGTKGTNHQFKHSKGHKGQILYFNEKGSVKVMPIYANIKTQDVKDKLLALGCKLYNKGEMFYSGCLIEVEKPFNATVYYKETDENGKDKTISVKQEVPAGIFKLRTIMSNGAIKLENNCGMEILSSAKVLVEANMKKYKN

SEQ ID NO: 22 - protein, 1027 aa, unidentified
  REGION 1..1027: note = Description of Unknown: uncultivated organism
  REGION 1..1027: note = MG1-25 effector
MVKKIFAFDMGKSSIGYCAREGLKVLELGSLIIDKDHAEIVSNRDRRRVFKTLNAHKAREKFFNDLWKSCNLEPLEKEDKLFKKEFGKKDEETIYNSTLLRIALLQNIELEEWQIYKALHSAIQRRGYDTSLAWANANTDDEKENKKRTLEYTTNKENDELISQEEYKYPCYYDAKRLGLWEEENPKTLKTYVDVYNNDKIRTAGIVAPRNMVEKELKQLYINAQKQLPELNKYSADYFLYGVSEKAYATYLDSDYKKYRGTNWEWENGGVLGQKIPRFDNRIIAKCKLLPKRNVCKAETVENVSLVLLMKLKNLRFTDVLGEKSMLSAEAIKQIYENWQKKATKNDGSIKLDTTITKQEIEKVIGEKILEKFEPMKAKLSGRSSFCRRACKIMCKIILEGIENPATMDVGEFIDNIDVKNGITEKEIRTMLSKIGTWDNLYIPDNRYEMAEISSDEREKTDILIGNITNAIVRNRLQIFRDKILELKYKHGTPDEVIFEFVRDDNSLFGAKKTQEYISNINKNQKENEEIAQQLKDANCFSSKNLEKLKLLQKQGGHCIYSGRPIAISNLEECEIDHIYPRSRGGNDALSNKVLCYAIENQNKKEQTPYEWLHNNEHSWNEFVKRVTNKQEALGKIKVKLLISKPEDSEKLIKSYNGLAETAQIARVAQDITAFVFGWGLQLEGEKRRIFVNNGATTSAIRKTYRLNKLLGNDVKKNRQNDKHHALDAICISFSRGYKYNATTKRDEIEGLDIHDNEFRDLVKSSIDSLLPYPYSNDKPFKGNIKPLETIYGYRKLGEKTYITQRVDITSIEQKDKKIKSIIDEIIKNDLLAKLEDKMTSKEWANMLSKYVHPTKKTRVKKVLLVVSEGITNFDENGRARIGEFVDFGTKGTKHQFKHSKGHKGQILYYNEKNAIKVMPIYANQKLGEVKDKLEQMNCKLYKKGMMFYSGCLIKVDKEFEGTAYYTIADENGKEKQTPKKEILPAGIYKLRTLKSDGRVQLESSVGIEIWTNAKNLVDTDFKKLTK

SEQ ID NO: 23 - protein, 1025 aa, unidentified
  REGION 1..1025: note = Description of Unknown: uncultivated organism
  REGION 1..1025: note = MG1-26 effector
MKKKVFAFDLGKASIGYCVREGFEINEANSIIIDKDHAETMSLRDRRRIKKTLDAHHAREEYFNKVWSGVGLNILDKNNNNFKKEFPSKNEDIIYTSCLLRIALLQNQKLEQWQIYKALYNAFQRRGYDVNIAWKSVQTDDDKENIERMKKYTCENDIELIISDEYKYPCYYDALRLGLWNEDEPTKLNHSIPQHNSNKIRTTEYVAPRELVEKELKQLWLNAQLQLPQLNSISPEEFLYGEYKVPYGSCTEKEFKQYRGTERDWQGVLGQKIPRFNNRIISKCKLLPKRNVCKANTLENVSFVFLMKLKNLRFTTVSGEKLRLSPTEIKQIYENWLLKVENAYDKDIEKANNLGKEKPEKRLNINITKKEIENVICNEIIDKIEPMKADISGRSSFCRRACQIMNKIILDGELYPQNVDISEFVDRDNVKNGITEEEIQSMLSKIGDWNNLYIPDNREENAQNASNSRTKTDIMLGNITNPIVRNRLQIFRDLLLDLAEKYGTPDEVIFEFVRDGADNSLYGSKKAQDTEKYMKQQEKENEQIIKELKEAGLYVNGQNHANATYFLMHKLLKSQGGACAYSGQKIAPSNYDECEIDHIYPRTLGGNDALYNKVVCYRRENQDKKGRTPYEWLSSDNDKWANYVNRLNKIKKQLGKKKFELLTSKPEDCEKLIESYNGLAETSHIARVAQQMTAFIFGWGLQVQGKNRRIFVNNGSSTCAIRKRYDLNKLLGDDRKKNRENDKHHALDAICISFSRDFKYDKEIKKDIIKGFNPEIVKDAIDKIMPYPYANDKPFKGNTKPLETIYGLRTYGEKSYITQRVELNSIDKKATKIKSIIDETIKNDLLNKLEENPTEQEWKLMLQNYIHPKKQTKVKKVMIIVSEGEITKDSNDRERIGEFVDFGTKGTQHQFKHSKGHKGQILYFNQKGIVKVMPVYSNIKITDIKDKLQNMGCKLYNKGQMFYSGCLVDIPKPFKAGSKEHPAGCYKVRTITLGGQIKLEDNCGIEILTSATYLVQAGFKKVESK

SEQ ID NO: 24 - protein, 1028 aa, unidentified
  REGION 1..1028: note = Description of Unknown: uncultivated organism
  REGION 1..1028: note = MG1-27 effector
MNKKVFAFDLGKASIGYCVREDLKILEAGSLIINKDHAECISNRDRRRVQKTLLAHKKRESFFNNLWQNCDLNILNKDDKRFSTEFGKKNDSTIYNSTLLRIALIQNKPLEEWQIYKALHNAIQRRGYDSKLPWANAKSDDDKKNEELSARYTQNEQGEELIKNENFKYPCYYDAVRLSLWSENMPEKLQTYVPLDNVKKIRDAGIVAPRNLVEKELKQLYINAQLQLPQLNKYSVEYFLYGEGEVAYASYNKKDYKCHRGTEWDMQGVLGQKIPRFDNRIIAKCKLLPKRNVCKANTLENVSFVLLMKLKNLRYTNINNEYSMLSADTINKIYQNWLNKALKDDGSYKLDTTIIQKEVEKVLGEKIQDKFEPLKANISGRSSFCRRACKIMNHIILNGIEDPTTMDVAEFTDNIDTPNGITEAEIRTMLSKIGTWENLYIPDNRYEMAELSSDNREKTDILIGNITNPIVRNRLQVFRDKLIELKQKYETPDKIIFEFIRDGADNSLYGAKKAQDFLKTIKENEKTNNDLAIELKNADCFSVVNLEKLKLLKQQDGICIYCGQRIGISDLDKCEIDHIYPRSRGGNDAISNKVLCYSIENQKKKDRTPYEWLHNDERTWADFVNRAKLLKDKLKKTKYTLLTSKPENCEELIKSYNGLAETAQIARVAQDITAFIFGWGLQLKDEKRRIFVNNGASTSGIRKTYRLNKLLGNDVKKNRNNDKHHALDAICISFSQNYKYNKHTKRDEIEGLDIHDNEFRELIKQTLDAIIPYPYTNDKPFKGNTKPLETIYGYRCIDNKHYITQRVSLETIEQKDKKIKCIVDEVIKNDLLEKIKEKMPTKDWTTMLQNYIHPTKQTKVKKILVIVSEGELTKDSNAHSRIGEYADFGTKGTKHQFKHSKGHKGQILYYNEKGVIKVLPIYANQKDSDVKSYIEQNGCKLYKKGMKFYSGCLIQINKDFEATAYYTQTDENGNDKQIPTKEKLQAGVYKLRTMMIDGKVKLESSTGIELLTNAKVLVEADFSKFSKY

SEQ ID NO: 25 - protein, 1036 aa, unidentified
  REGION 1..1036: note = Description of Unknown: uncultivated organism
  REGION 1..1036: note = MG1-28 effector
MGKKVFAFDMGKASIGYCAREDFEIKEANSIIIDKDHSDISSIRDRRRVKKTIIAHKAREQFFVNLWKSCNLTPIDTKDDNFKKEFANKKDSTIYTSCLLRIALLQNKKLEQWQIFKALYNAIQRRGYDANLAWKSAQTNDDKENIELTQKYTQENGIELIKNEKYKYPCYYDAKRLGLWDENFPNRFNQAINLDNVIKVRTTTYVAPRQLVEKELKQLWINAQIQIPELNKYSVEEFLYGEYKEAYGSYVNPEFKKYMGTAHDWQGVLGQKIPRFDNRIIAKCKLLPKRNVCKANTIENVTFVLLMKLKNLRITNNLGEKIILSPEEIKHIYENWLSKVEQNVIKMQEKCKKENKTPDKEDKKLDTTITKKEIENVINQVISDKIEPMKANISGRSSFCKRACQIMNKFILGGYLYPQEMDITEFIDSENSPNGITKQEIQVMLSRIGDWNNLYIPDNRGENINDSEKIRTNTDLIIGSITNPVIRNRLQIFRDLLLSLEKDYGKPDEVIFEFVREGADNSLFGKAKAQAAETNMKAMEKQNQQLVKELKNYDAYSSINFEKLKLLKMQCGQCAYSGQKIGISDFDKCEIDHIYPRTMGGNDALYNKVLCYRVENQKKQGRIPYEWLSSDKEKWANYVFRLNEIKKSLGKKKFELLTSKPEDCEKLIDSYNGLAETAHIAKVAQQIAAVCFSWGLQIEGEKRHIYVNNGSSTHAIRHRYGLNSLLGNDIKKNRDNDKHHALDAICISFSRDFKYDEESKKDIIKGFTREMVKKVIDEIMPVPYTNKKPFKGNTRPLETIYGLRAYNGKSYITQRVPLESIEPKEKKVRTIIDEVIKNDLLEKLNQKIDSKEWISMLQNYIHPKKKTIVKKVMIVVSEASIEKDSNGVERIGEFCDFGTKGTKHQFKHSKGHKGQILYFDEKGLVKVMPIYSNIRTQDIKDKLMTMGCKLYNKGEIFYSGCLVEIEKPFVATVYYKETDADGKEKTISVKQEVPYGIFKIRTIMGDGKIKLENNCGLEILSSAKVLVPLNMKKYKN

SEQ ID NO: 26 - protein, 1036 aa, unidentified; identical to SEQ ID NO: 21
  REGION 1..1036: note = Description of Unknown: uncultivated organism
  REGION 1..1036: note = MG1-29 effector

SEQ ID NO: 27 - protein, 1036 aa, unidentified
  REGION 1..1036: note = Description of Unknown: uncultivated organism
  REGION 1..1036: note = MG1-30 effector
MGKKVFAFDMGKASIGYCAREDFEIKEANSIIIDKDHSDISSIRDRRRVKKTLNAHKARERFLVNLWKSCNLIPLDTKDDKFKKEFANKKDSTIYTSCLLRIALLQNKKLEQWQIFKALYNAIQRRGYDANLAWKSAQTNDDKENIELTQKYTQENGIELIKNEKYKYPCYYDAKRLGLWDENFPNRFNQAINLDNVIKVRTTTYVAPRQLVEKELKQLWINAQIQIPELNKYSVEEFLYGEYKEAYGSYVNPEFKKYMGTAHDWQGVLGQKIPRFDNRIIAKCKLLPKRNVCKANTIENVTFVLLMKLKNLRITNNLGEKIILSPEEIKHIYENWLSKVEQNVIKMQEKCKKENKTPDKEDKKLDTTITKKEIENVINQVISDKIEPMKANISGRSSFCKRACQIMNKFILGGYLYPQEMDITEFIDSENSPNGITKQEIQVMLSRIGDWNNLYIPDNRGENINDSEKIRTNTDLIIGSITNPVIRNRLQIFRDLLLSLEKDYGKPDEVIFEFVREGADNSLFGKAKAQAAETNMKAMEKQNQQLVKELKNYDAYSSINFEKLKLLKMQCGQCAYSGQKIGISDFDKCEIDHIYPRTMGGNDALYNKVLCYRVENQKKQGRIPYEWLSSDKEKWANYVFRLNEIKKSLGKKKFELLTSKPEDCEKLIDSYNGLAETAHIAKVAQQIAAVCFSWGLQIEGEKRHIYVNNGSSTHAIRHRYGLNSLLGNDIKKNRDNDKHHALDAICISFSRDFKYDEESKKDIIKGFTREMVKKVIDEIMPVPYTNKKPFKGNTRPLETIYGLRAYNGKSYITQRVPLESIEPKEKKVRTIIDEVIKNDLLEKLNQKIDSKEWISMLQNYIHPKKKTIVKKVMIVVSEGSIEKDSNGVERIGEFCDFGTKGTKHQFKHSKGHKGQILYFDEKGLVKVMPIYSNIRTQDIKDKLMTMGCKLYNKGEIFYSGCLVEIEKPFVATVYYKETDTDGKEKTISVKQEVPDGIFKIRTIMGDGKIKLENNCGLEILSSAKVLVPLNMKKYKN

SEQ ID NO: 28 - protein, 1028 aa, unidentified
  REGION 1..1028: note = Description of Unknown: uncultivated organism
  REGION 1..1028: note = MG1-31 effector
MNKKVFAFDLGKASIGYCVREDLKILEAGSLIINKDHAECISNRDRRRVQKTLLAHKKRESFFNKLWQNCDLNILNKDDKRFSTEFGKKNDSTIYNSTLLRIALIQNKPLEEWQIYKALHNAIQRRGYDSKLPWANAKSDDDKKNEELSARYTQNEQGEELIKNENFKYPCYYDAVRLSLWSENMPEKLQTYVPLDNVKKIRDAGIVAPRNLVEKELKQLYINAQLQLPQLNKYSVEYFLYGEGEVAYASYNKKDYKCHRGTEWDMQGVLGQKIPRFDNRIIAKCKLLPKRNVCKANTLENVSFVLLMKLKNLRYTNINNEYSILSADTINKIYQNWLNKALKDDGSYKLDTTIIQKEVEKVLGEKIQDKFEPLKANISGRSSFCRRACKIMNHIILNGIEDPSTMDVAEFTDNIDTPNGITEAEIRTMLSKIGTWENLYIPDNRYEMAELSSDNREKTDILIGNITNPIVRNRLQVFRDKLIELKQKYETPDKIIFEFIRDGADNSLYGAKKAQDFLKTIKENEKTNNDLAIELKNADCFSVVNLEKLKLLKQQDGICIYCGQRIGISDLDKCEIDHIYPRSRGGNDAISNKVLCYSIENQKKKDRTPYEWLHNDERTWADFVNRAKLLKDKLKKTKYTLLTSKPENCEELIKSYNGLAETAQIARVAQDITAFIFSWGLQLKDEKRRIFVNNGASTSGIRKTYRLNKLLGNDVKKNRSNDKHHALDAICISFSQNYKYNKYTKRDEIEGLDIHDNEFRELIKQTLDAIIPYPYTNDKPFKGNTKPLETIYGYRCIDNKHYITQRVSLETIEQKDKKIKCIVDEVIKNDLLEKIKEKMPTKDWTTMLQNYIHPTKQTKVKKILVIVSEGELTKDSNAHSRIGEYADFGTKGTKHQFKHSKGHKGQILYYNEKGVIKVLPIYANQKDSDVKSHIEQNGCKLYKKGMKFYSGCLIQINKDFEATAYYTQTDGNGNDKQIPTKEKLQAGVYKLRTMTEAGQIKLESSTGIELLTSAKVLVEADFSKFSKY

SEQ ID NO: 29 - protein, 1028 aa, unidentified
  REGION 1..1028: note = Description of Unknown: uncultivated organism
  REGION 1..1028: note = MG1-32 effector
MNKKVFAFDLGKASIGYCVREDLKILEAGSLIINKDHAECISNRDRRRVQKTLLAHKKRESFFNNLWQNCDLNILNKDDKKFSTEFGKKNDSTIYNSTLLRIALIQNKPLEEWQIYKALHNAIQRRGYDSKLPWANAKSDDDRKNEELSARYTQNEQGEELIQNENFKYPCYYDAVRLSLWSENMPEKLQTYVPLDNVKKIRDAGIVAPRNLVEKELKQLYINAQLQLPQLNKYSVEYFLYGEGEVAYASYNKKDYKCHRGTEWDMQGVLGQKIPRFDNRIIAKCKLLPKRNVCKANTLENVSFVLLMKLKNLRYTNINNEYSMLSADTINKIYQNWLNKALKDDGSYKLDTTIIQKEVEKVLGEKIQDKFEPLKANISGRSSFCRRACKIMNHIILNGIEDPSTMDVAEFTDNIDTPNGITEAEIRTMLSKIGTWENLYIPDNRYEMAELSSDNREKTDILIGNITNPIVRNRLQVFRDKLIELKQKYETPDKIIFEFIRDGADNSLYGAKKAQDFLKTIKENEKTNNDLAIELKNADCFSVVNLEKLKLLKQQDGICIYCGQRIGISDLDKCEIDHIYPRSRGGNDAISNKVLCYSIENQKKKDRTPYEWLHNDERTWADFVNRAKLLKDKLKKTKYTLLTSNPENCKELIKSYNGLAETAQIARVAQDITAFIFGWGLQLKDEKRRIFVNNGASTSGIRKTYRLNKLLGNDVKKNRSNDKHHALDAICISFSQNYKYNKYTKRDEIEGLDIHDNEFRELIKQTLDAIIPYPYTNDKPFKGNTKPLETIYGYRCIDNKHCITQRVSIETIEQKDKKIKCIVDEVIKNDLLEKIKEKMPTKDWTTMLQNYIHPTKQTKVKKILVIVSEGELTKDSNAHSRIGEYADFGTKGTKHQFKHSKGHKGQILYYNEKGVIKVLPIYANQKDSDVKSYIEQNGCKLYKKGMKFYSGCLIQINKDFEATAYYTQTDKNGNDKRIPTKEKLQAGVYKLRTMTEAGQIKLESSTGIELLTSATVLVEADFSKFSKY

SEQ ID NO: 30 - protein, 1028 aa, unidentified; identical to SEQ ID NO: 28
  REGION 1..1028: note = Description of Unknown: uncultivated organism
  REGION 1..1028: note = MG1-33 effector

SEQ ID NO: 31 - protein, 1025 aa, unidentified; identical to SEQ ID NO: 23
  REGION 1..1025: note = Description of Unknown: uncultivated organism with predicted taxonomy: Candidatus Gastranaerophilales bacterium HUM_9
  REGION 1..1025: note = MG1-34 effector

SEQ ID NO: 32 - protein, 1027 aa, unidentified; identical to SEQ ID NO: 22
  REGION 1..1027: note = Description of Unknown: uncultivated organism
  REGION 1..1027: note = MG1-35 effector

SEQ ID NO: 33 - protein, 1011 aa, unidentified
  REGION 1..1011: note = Description of Unknown: uncultivated organism with predicted taxonomy: Clostridium
  REGION 1..1011: note = MG1-36 effector
MRYRIGLNIGINSCGWAVIEHNEDGEPIKLENMGVRMFEISENLKDGLSLSKAPRETRSIRRRIRRRKHRIERLKYLIVNSNMLTQEEVNNLYNSTNLENIYLLRVRALSEKISNTDLTRVLINLMKKRGYKSNVELEDYAKDEDGKVLTATKENQKIMKEKGYSTVAEMYLKDKKFKMILPDGTIIYKIRNTTGNYSSTVLRNQIREELIRILIKQQELNDLVTNDFVQKCLEIFDSQRPYDEGPGLRYSTTQVDKMLGKCIFEKQENRAVKASYSFEYFDFLKQLNNIIIEKTIITSNNKTTQKRKLSKEERQKIIKLAKYQSQIRYYDIRQELQLSDYERFCNLEYSSISEFSESINKLAERKPKLEGFTSYFRIKQALYYVDNTLIERLSNEELDEIAYVLTVYKSNERRLEQFEIRNLHLPANAIQELLKISFIEIAYLSLKAIKKITPYIEEGYTYNSALEQAYPSFETSLCNINSEILNPVCRRAISQSIKVLKAIVNQYGKPDLINIEFSNELGKGKSEREKIKKQKQENLGKTSRIKEELQAQGIENPTGTEITKYKLWKEQTNYCMYSGKKIDIEQVFSSETQINYIIPFWMCFDDTYKNKILTFTSEVKQKQDLMPYQYIQKMRRDTEEYETRISMLIRVYSKKNRLVKKNITKEEMIKWRNRNIEDTQYIAKWITNYIRRNIQFVECSKYNNKVLIISSNLTSYINRKLDISNNIIIGNQKHALDALVTATVSKELLNKIIIYSRENTENSQFPIPWENFKQDMNNLPPIFVSRAPKRKVTGQAHDETIRRMQICGKEIKCISRTDIKKLKLNSEGEIENFSKNSKNTDKVLYNALKEEIKENGGNATRSFIKQFYKPKKDKTPGLPVKKVKLESKTRLPIKLKNQAIATNGSIIRLDVFKVENEGYYYVPIYVSDTVLPKLPNKACASSKPYEEWPEMREEDFIFSLYSRDLIYIKNKSPMNLHPTDGKRKHSNNRRNISVLHKGRYLRSNHKHNKQW

SEQ ID NO: 34 - protein, 1027 aa, unidentified
  REGION 1..1027: note = Description of Unknown: uncultivated organism
  REGION 1..1027: note = MG1-37 effector
MVRKIFAFDMGKSSIGYCAREGLKVLELGSLIIDKDHAEIVSNRDRRRVFKTLNAHKAREKFFNELWKSCNLEPLEKEDKLFKKEFGKKDEETICNSTLLRIALLQNIELEEWQIYKALHSAIQRRGYDTSLAWANANSDDEKENKKRTLEYSTNKENDELISQEEYKYPCYYDAKRLGLWEEENPKMLKTYVDVYNNDKIRTAGIVAPRNMVEKELKQLYINAQKQLPELNKYSADYFLYGVSEKAYATYLDSDYKKYRGTNWEWENGGVLGQKIPRFDNRIIAKCKLLPKRNVCKAETVENVSLVLLMKLKNLRFTDVLGEKSMLSAEAIKQIYENWQKKATKNDGSIKLDTTITKQEIEKVIGEKILEKFEPMKAKLSGRSSFCRRACKIMCKIILEGIENPATMDVGEFIDNIDVKNGITEKEIRTMLSKIGTWDNLYIPDNRYEMAEISSDEREKTDILIGNITNAIVRNRLQIFRDKILELKYKHGTPDEVIFEFVRDDNSLFGAKKTQEYISNINKNQKENEEIAQQLKDANCFSSKNLEKLKLLQKQGGHCIYSGRPIAISNLEECEIDHIYPRSRGGNDALSNKVLCYAIENQNKKEQTPYEWLHNNEHSWNEFVKRVTNKQEALGKIKVKLLISKPEDSEKLIKSYNGLAETAQIARVAQDITAFVFGWGLQLEGEKRRIFVNNGATTSAIRKTYRLNKLLGNDVKKNRQNDKHHALDAICISFSRGYKYNATTKRDEIEGLDIHDNEFRDLVKSSIDSLLPYPYSNDKPFKGNIKPLETIYGYRKLGEKTYITQRVDITSIEQKDKKIKSIIDEIIKNDLLAKLEDKMTSKEWANMLSKYVHPTKKTKVKKVLLVVSEGITNFDENGRARIGEFVDFGTKGTKHQFKHSKGHKGQILYYNEKNAIKVMPIYANQKLGEVKDKLEQMNCKLYKKGMMFYSGCLIKVDKEFEGTAYYTIADENGKEKQTPNKEILPAGIYKLRTLMSDGTVKLESSIGIEILTSAKKLAEADFKKLTK

SEQ ID NO: 35 - protein, 810 aa, unidentified
  REGION 1..810: note = Description of Unknown: uncultivated organism with predicted taxonomy: Candidatus Melainabacteria bacterium
  REGION 1..810: note = MG1-38 effector
MSKKVFAFDLGKASVGYCVREGFDIRKVGSIIIEKDHAEITTNRDRRRVKKTLEAHKAREQFFKKLWQNAGLETLDKEDERFKKEFGNKKDKNIYTSCLLRIALLQNKKLEQWQIYKALFNAFQRRGYDANLAWANAKTDDDKKNAEYMAKYTKENNVELINNDDFKFPCYYDAKRLGLWSEENPSELKTTIPLTGSKKVRTNGLVAPRELVEKELKQLWLNAQKQLPQLQNIDAEYFLYGDYRQAYGSYVVKEFRKFRGTKNDWQGVLGQKIPRFDNRIIAKCKLLPKRNVCKANTLENVSLVLLMKLKNLRLTDNMGEKFLLSPIDIKKIYENWLIKAKIDTNEEKLDTTITKKEIETVLNRKIKDKIDPMKANISGRSSFCRRACKIMTKIILSCELYPQNVDITEFVDKPNTQNPITIEEINTMISKIGDWNNLYIPDNRDEMAENSSDNREQTDTLIGNITNPIVRNRLQIFRDLILNLKQEYGTPNEVIFEFVRDGADNSLFGAKKANDTLKVMKENEKDNEQIVSELKDANALSSENILKLKLLKKQGLKCIYSGKSIAISNFDACEIDHIYPRSMGGNDALYNKVLCYSMENQKKAGRTPYEWLHKDEKTWFDFVNRLEAIKDTLGKKKYELLTSKPEDCKILIDSYNGLAETAQIARIAQQITALVFNWGLQVEGENRHIFVNNGSSTASIRRTYKLNKLLGDDVKKNRDNDKHHALDAICISFSRDYKYNKEKKVDEIEGLNPEIIKEVINNLMPYPYANDKTFKGNIKPLESIYGKRVKNGNTYLTKRADITSLEPKEK

SEQ ID NO: 36 - protein, 1028 aa, unidentified; identical to SEQ ID NO: 28
  REGION 1..1028: note = Description of Unknown: uncultivated organism
  REGION 1..1028: note = MG1-39 effector

SEQ ID NO: 37 - protein, 1028 aa, unidentified; identical to SEQ ID NO: 29
  REGION 1..1028: note = Description of Unknown: uncultivated organism
  REGION 1..1028: note = MG1-40 effector

SEQ ID NO: 38 - protein, 1025 aa, unidentified; identical to SEQ ID NO: 23
  REGION 1..1025: note = Description of Unknown: uncultivated organism with predicted taxonomy: Candidatus Gastranaerophilales bacterium HUM_9
  REGION 1..1025: note = MG1-41 effector

SEQ ID NO: 39 - protein, 1028 aa, unidentified; identical to SEQ ID NO: 24
  REGION 1..1028: note = Description of Unknown: uncultivated organism
  REGION 1..1028: note = MG1-42 effector

SEQ ID NO: 40 - protein, 1028 aa, unidentified; identical to SEQ ID NO: 28
  REGION 1..1028: note = Description of Unknown: uncultivated organism
  REGION 1..1028: note = MG1-43 effector

SEQ ID NO: 41 - protein, 1036 aa, unidentified; identical to SEQ ID NO: 27
  REGION 1..1036: note = Description of Unknown: uncultivated organism
  REGION 1..1036: note = MG1-44 effector

SEQ ID NO: 42 - protein, 1025 aa, unidentified; identical to SEQ ID NO: 23
  REGION 1..1025: note = Description of Unknown: uncultivated organism with predicted taxonomy: Candidatus Melainabacteria
  REGION 1..1025: note = MG1-45 effector

SEQ ID NO: 43 - protein, 1036 aa, unidentified; identical to SEQ ID NO: 25
  REGION 1..1036: note = Description of Unknown: uncultivated organism
  REGION 1..1036: note = MG1-46 effector

SEQ ID NO: 44 - protein, 1028 aa, unidentified; identical to SEQ ID NO: 24
  REGION 1..1028: note = Description of Unknown: uncultivated organism
  REGION 1..1028: note = MG1-47 effector

SEQ ID NO: 45 - protein, 996 aa, unidentified
  REGION 1..996: note = Description of Unknown: uncultivated organism
  REGION 1..996: note = MG1-48 effector
MNKKVYAFDLGKASIGYCARDGFNILELGSLIINKDHAEVVSNRDRRRAYKTLQAHKSREEFFIKLWQDCGLPVLEKNDKRFTIEFSKEKDETLYNSTLLRITLLQEKPLEVWQIYKALHSAIQRRGYDANIRWANDSDDEKENQERVTKYTQDENGIQIITNDAYKYPCYYDAVRLGLWDEKNPLEYKKHIPLQGVTKVRTTGIVAPRSFVEKELTQLYINAQKQLPQLEKYSVNYFLYGKYGKAYATFHKQEQGKEKDYGVLGQKIPRFDNRIIAKCKLLPKRNVCNAGTIENVSFTLLMKLKNLRFTNANGERCMLDSSAIKEVYENWLKKANKDNEIKLDTTITKKEIENVIGFKIQDKIEPMKTNISGRSSFCRRACQIMNKIILEGIENPATMDVAEFTDNVDSPNGITEQEIREMLSKIGTWENLYIPDNRYEMAELSSDDRQKTDLLIGNITNPIVRNRLQILRDKLLELKAEHGTPDEVIFEFVRDGADNSLYGAKKANGYLKNIKENEKENNEIKKELEEANAYSPTNFEKLKLLRMQCGKCVYSGKNISINDFDSCEIDHVYPRTMGGNDALYNRVLCYSIENQNKAGRTPYEWLSSDKELWANYVARLNDIKGSLGKKKFELLTSKPEVCEKLIESYNGLAETAQIARVAQQLAAFIFGWGMQTEGDKRHLFINNGSTTAAIRRRYGLNKLLGDDIKKNRENDKHHALDAICISFSKDFKYDHKSKKDIIEGFTYDFVKNEIDKLIPYPYANDKPFKGNTRPLETIYGYRKYGDKNYLTNRVDITSIEQKEKKIKTIVDEVIKNDLLEKLNLSSGDWAAMLKNYKHPKKHTIVKKVLTIVSEGTITTDSNNKSRMGEYADFGNKGVKNQFKHSKGHKGQILYYNEKGAVKVMPIYANQKLSEVKEKLLAMNCKLYKKGIMFYSGCLVSIPKDFKGGSNDYSAGIYTLKTIIADTGVIKLENLNGVEIGTSAKYLTDAEFRKYKN

SEQ ID NO: 46 - protein, 1015 aa, unidentified
  REGION 1..1015: note = Description of Unknown: uncultivated organism
  REGION 1..1015: note = MG1-49 effector
MKKFFAFDIGKKGLGYCCREGSKIHCAGSLTIEPDHSSVEDIRNNRKAIKTRIFHKAREEYFNKLWHDEAGLEILDKDDERFKIEFSKQDDERIYNSTLLRIALLQNRELEKWQIYKALHNAFQRRGYDSELPWKNSGTKADEENEKLAKNYTQKNGQKLIKKEKFQYPCYYDALALGMWKERNPSDLQRIVSKNPQKIRTGRRVAPRKLVIKELTDLWTAAQKQIPELQKISADKFLYGEYREPYASYTNPDWHKNMGKEKDWQGVLGQKIPRFNNRIISKCKLLPKRNVCSADTIENIVFTLLYQLKNFRYTNSNGEVGCRLAPIEIKEIYDNNIQNWMKNLYDNKKNNKSHTFTVSKTEIEKVIGKGQIYTTKNEKFKSFQANTSGRSSFCRRALQIMNEIILTGTDPKDVNISKFVDKSTTNNPITEDEIKEMLTKVGDWNELYIPYNSTRMAEFAQNPDIQSDLMIGSITNPIIRNRLQIFKNLLNDMIKKYGKPDEVIFEFVKDGKDNSLFGAEKAKATEQMMRINEKKNEEIRNNLSDDYSAINFLKYKLAEMQDWTCIYSGRKIEITDFDACEIDHIFPRTDDTNDALYNKVICYKEEIADKHGRTPYEWMNNNTARWQEYIMRVKSLSQKSGKTKTALLTLSPTQSEKFLEKRKALNETTQIAKIVQSVTASVLEWDLQVKDKNRHIFISDGSSTHKIRQQYKLDRLLDDNAKKNRENGKHRALDAICISYSKDFQYNTEQHKYEIENIDIPHIEDVINHVVPYPYTNDKPLKSALAPAGTIYGKKVKNGKTYITKRIALLDIKKDSKSINKISDNDIKSDLLNKSGKNLSDDNWVKILSKYTHPKRGTKVKKVIVLEEFKGQITFDSNGRERLGEYCDFGNKGTKGQFKHSKQHRGQILYFNEKGKIKVMPVYANKKVQDVKDELINMGCKLYHGGEMFYSGCLIEIPNDFKAGGNIQPKGIYKVSTITTAGLVKIENNSGNIVHTNSTHITEADFRKFIKRSNS

SEQ ID NO: 47 - protein, 1015 aa, unidentified; identical to SEQ ID NO: 46
  REGION 1..1015: note = Description of Unknown: uncultivated organism
  REGION 1..1015: note = MG1-50 effector

SEQ ID NO: 48 - protein, 997 aa, unidentified
  REGION 1..997: note = Description of Unknown: uncultivated organism with predicted taxonomy: Candidatus Melainabacteria bacterium
  REGION 1..997: note = MG1-51 effector
MNKKVYAFDLGKASIGYCVREDFNILELGSLIINKDHAEVITNRDRRRVYKTILAHKKREEFFNNLWSECGLTLLSKTDKRFTIEFSSSNDNTIYNSTLLRIALLQNKPLEQWQIYKALHNAIQRRGYDAEIAWTNDSADEKDNQKRVIKYTQDDLGNELIKDENYKYPCYYDALRLQLWSEKNPKDFNRHIPLTGSTKVRTTGLVVPRAFVEKELTQLYLNAQKQLPQLKKYTVEYFLYGKYGSAYATFRTPQQGKEKDYGVLGQKIPRFDNRIIGKCKLLPKRNVCKANTIENVSFVLLMKLKNLRFTDINGNKCKLGLSAIKDIYNNWYKESGNGKKLNTTITKTKIEKVIGCKILEDAKNINETLKANTSGRSSFCRRACQIMNKIILEGIANPLTMDVVEFTDDVGTANGITEQEIREMLSKIGTWENLYIPDNRYEMVELSSDDRQKTDLLIGKITNPIVRNRLQILRDKLLALKEKYGTPDKVIFEFIRDGADNSLYGAQKANNYLISIKANEKENNEIKKELEDANAYSNTNFDKLKLLRMQGGRCIYSGEKIGISNFEQCDIDHIFPRSRGGNDALYNKVLCYSKENRIKGDKVPYEWLNNTENWDIYLQRTRDLKGSLGKKKFELLTSKPDQCEKLIESYNGLADTAQIAKVAQQLAAFIFGWGMQTDGDKRHLFVNNGSTTAAIRRRYGLNKILGNDIKKNRENDKHHALDAICISFSQDFKYDPKSQKDIINGFTYDFVKNEIDKLIPYPYANNKPFKGNTKPLETIYGYREYNGKKYITNKIDINSLEQKEKKIKNIIDEVIKNDLLNKINLPSDEWKNMLQNYIHPKKQTHVKKVMVIVSEGDVTFDTNNRIRMGEYVDFGTKNVKKQFKHSKGHKGQILYYNEKGAIKVMPVYANQKLQEVKEKLLGMNCKLYKKGMMFTSGCLLEIPNEFYAGSNKYPAGIYKLRTIIADTCVIKIESSEGIEIVSSAKYLADAEFKKYKP

SEQ ID NO: 49 - protein, 997 aa, unidentified
  REGION 1..997: note = Description of Unknown: uncultivated organism
  REGION 1..997: note = MG1-52 effector
MNKKVYAFDLGKASIGYCAREGFNILDLGSLIINKDHAEVVSNRDRRRVHKTLLAHRTREEFFNKLWKDCGLEILDKSDKRFTIEFAKNNDSILYNSILLRIALLQNKPLEEWQIYKSLHNAIQRRGYDANLVWANDSDDEKTNKELAARYMQDEAGIELITNDEYKYPCYYDATRLGLWNEEAPNKFNRHIPLTDVTKVRTTGLVAPRQLVEKELTQLYLNAQKQLPQLNKYSVEYFLYGKYGRAYATFRKPEHGREKDYGVLGQKIPRFDNRIISKCKLLPKRNVCKAATLENVSFTLLMKLKNLRFTAPDGNKHMLSADAIREIYENWLQESNNGEKLNTTITKTKIEKVIGFKMLDDTKNINETLKANINGRSSFCRRACQIMNKIILEGIENPATMDVAEFTDDITAHNGITEAEIREMLSKIGTWDNLYIPDNRYEMAELSSDDRQKTDLIIGKITNPIVRNRLQILRDKLLELKSEYGTPDEVIFEFIRDGADNSLYGAKKSNDYLKNIKENEKENLEIKKELEDVDRYSPTNFEKLKLLRMQGGKCIYSGKPICIDDFDKCEIDHIYPRTMGGNDALYNRVLCYSIENQNKKGRTPYEWLSNDKEYWSAYVDRLNKIKGSLGKKKFELLTSKPEDCEKLIESYNGLAETAQIARVAQQLAAFIFGLGMQTEGDKRHLFVNNGSTTAAIRRRYGLNKLLGDDVKKNRENDKHHALDAICISFSRDFKYDEKSKKDVIEGFTYDFVKKAIDELIPYPYANDKQFKGNIRPLETIYGYREYGNKKYITNRVDITTIEQKEKKIKTIVDEYIKKDLLDKLNLSSSEWVELMKNYKHPKKHTIVKKVLTLVSEGEISKDSNDKSRMGEYADFGTKGVANQFKHSKGHKGQILYYNEKGAIKVMPIYANQKLSDVKQKLMSMGCKLYKKGMMFTAGCLLNIPNDFYVSENLYTSGIYKLRTIMSSGQIKIENSNGKEIITSAKYLTDANFLKYKN

SEQ ID NO: 50 - protein, 1015 aa, unidentified; identical to SEQ ID NO: 46
  REGION 1..1015: note = Description of Unknown: uncultivated organism
  REGION 1..1015: note = MG1-53 effector

SEQ ID NO: 51 - protein, 1015 aa, unidentified; identical to SEQ ID NO: 46
  REGION 1..1015: note = Description of Unknown: uncultivated organism
  REGION 1..1015: note = MG1-54 effector

SEQ ID NO: 52 - protein, 1015 aa, unidentified; identical to SEQ ID NO: 46
  REGION 1..1015: note = Description of Unknown: uncultivated organism
  REGION 1..1015: note = MG1-55 effector

SEQ ID NO: 53 - protein, 1003 aa, unidentified
  REGION 1..1003: note = Description of Unknown: uncultivated organism
  REGION 1..1003: note = MG1-56 effector
MTKKVFAFDMGKASIGFCVRDNHDIKEANSIIIDKDHSDISSLRDRRRVYRTLKAHHAREAFFNTLWTECGLSLLDKNDIRFTKEFSGKKDNTIYTSCLLRIALLQNKHLERWQIYKAIFNALQRRGYDPKLAWKTAQTDDDKENLELVEKYTQENGIELIQSEEYKYPCYYDATRLGLWSEEEPNKLKTCQPMNGIIKVRSTNYVAPRSMVEKELAQLWENAQIQLPQLKKYSTDYFLYGEYREAYGSYKNPDYRKFMGTEYDWQGALGQKIPRFNNRIIAKCKLLPKRNVCKAETLENVTFVLLMKLKNLRFTSPDGQKCMLSADAIKEIYNNWLMESDNGKKLNTTITKTKIEKVIGYKMLDNTKNINDTMKVNLSGRSSFCRRACQIMNRIILDGIEEPKTMDVAEFIDNIDTPNGITEQEIRTMLSKIGTWDNLYIPDNRNEMAEIADDSRTKTDIMIGNITNPIVRNRLQIFRDLLLRLKSDYGTPDEVIFEFVRDEADNSLEGQKRAKDTENYMKAQAKENEQIKKELEEQNALSGINFEKLKLLKMQGGKCIYSGQNIGISDFDKCEIDHIYPRTMGGNDALYNRVLCYRIENQDKKGRTPYEWLSHDEEQWAAYVHRLSEIKQILGKKKFELLTSKPEDCAKIIDSYNGLAETAHIARVAQQITAFIFDWGLQLEGENRHIFVNNGSSTCAIRKRYHLNSLLGDDEKKNRSNDKHHALDAICISYSRDFKYDKNIKKDTIEEFNPEVVKKVIDEIIPYPYANKKPFKGNTRPLETIYGLRYREKSYITNRVAITSIEQKDKKIKTIIDETIKNDLLNKLEEKMSSNDWINMLENYVHPKKRTHVKKVNVIVSEGKIEADKNGRDRIGEYSDFGTKGTQHQFKHSKGHKGQILYFNEKGAIKVMPVYANKSTKEVRKQLEQMGCKLYNGGELFYSGCLIEVPNEFKGTKSNQKHGIYKLRTMMSDGKVKLENNSGEEIMTSANYLVNAKFSKYKD

SEQ ID NO: 54 - protein, 1013 aa, unidentified
  REGION 1..1013: note = Description of Unknown: uncultivated organism
  REGION 1..1013: note = MG1-57 effector
MKKIFAFDMGKKGLGYCCREGSKINCAGSIIVEPDHSSIEDVRNRRRIIRTRNSHKSREKYFNKLWHVEAGLEILDNNDELFKTEFSKQNDETIYNSTLLRIALLQNRKLENWQIYKALHNAFQRRGYDSALPWKNSKTKDDEESEKQVKIYTQKDGKELIEKDEFQYPCYYDALSLGLWEEKNPYDLKRTISKEPQKIRTGGRVAPRNLVIKELSDLWIAAQKQIPKLQKISVEKFLYGDYREPYASYTNPDWRKNMGKKEDWQGVLGQKIPRFNNRVISKCKLLPKRNVCSADTIENIVFTLLYQLKNFRYTNSKGKVGCRLAPFDIKEIYDNNIEVWINNLEENKKNNKNHTFTVSKTEIEKVIGKGEIYTTKNEKFESFKANTSGRSSFCRRALQIMNEIILTGTEPQDIEVSKYVDKSTTNNPITEEEIREMLSKVGDWNELYIPDNRAEVAELAQNSDIQSDLMIGSITNPIVRNRLQIFKNLLIDMIRKYGKPEEVIFEFVRDGKDNSLFGAEKAKATEQMMKNNEKKNEEIKKNLGDDYSAINFLKYKLAEMQDWKCIYSGRKIGITDFAACEIDHIFPRTDDGNDALYNKVICYKEENADKLGRTPYEWLYHNIARWQEYVTRVKSLSQKLGKTKTALLTLPPEQSEKLLEKKNALNETAQIAKVAQSITAFILGWGLQVKGENRHIFVNNGSSTHKIRQQFKLNRLLGNDEKKNRENDKHHALDAICISYSKDFRYNTEKHKYEIDNLDIPHIEEVINSIVPYPYTNDKPLKSAVAPEETIYGKKIKDGKTYITKRISLADIKKDTKSINKISDEDIKKDLLLKSEQNLSERDWTNLLQDYIHPKRGTRVKKVITLEEFKGKITYDSNGRERLGEYCDFGNKGTKGQFKRSKQHRGQILYFDDKGKVKVMPVYSNKKVQDVKDELINMGCKLYRGGEMFNSGCQIEIPNDFKAGSNMYPKGLYKLSTITTAGQIKIENNSGNQLLTSATYLVQAEFKKSKKKR

SEQ ID NO: 55 - protein, 809 aa, unidentified
  REGION 1..809: note = Description of Unknown: uncultivated organism with predicted taxonomy: Candidatus Termititenax aidoneus
  REGION 1..809: note = MG1-58 effector
GEYEQAYGSYLNPDFKKYRGTNRDWQGVLGQKIPRFDNRIISKCKLLPKRNVCKSETIENVSFVLLMKLKNLRFTNLMGEKCILNSDAIKQIYENWKNKALKENGEYKLDTTITKKEIENVIGEKIQDKIEPMKANISGRSSFCRRACQIMNKIILEGIENPAEMDVIEFMDNIDSPNGITEKEIREMLSKIGNWDNLYIPDNRYKMAEISSDDREKTDLLIGNITNPIVRNRLQIFRDKLLKMKQEYGTPDEVIFEFVRDGADNSVLSGAKAEGYKLLCEQNYAKNEKLKNDLGDDFSPQNLIKLKLLESQNFQCIYSGNNIAPTDLDACEIDHIYPRTMGGNDALYNKVLCYSIENQNKKGRTPYEWFHQEKTEEEWIEYKNRCFNFLNKYPIPKKVKRRQDNHISKSIKEYYVKLSEYKLAKKKFELLTSKPEDCEKLIESYNGLAETAQIARVAQEITAFVFGWGMQTSGDDRHIFVNNGSSTSAIRRRYGLNKILGDDVKKNRENDKHHALDAICISFSRDFKYDEHSKKDVIKGFTYDFVKKEIDKLMPYPYANDKHFKGNTKPLETIYGYRRIDNKDYITKRISITDINKKEKVIKTILDKQIRKDLLDNLKLSDNEWKEYLSNYTHPTQKTIVKKVLTIESEGTLTFDKNNRGRIGEFADFGTKGTKYQFKHSKGHKGQILYYNEKGNIKVMPIYANQKKSDVIENLEQMNCKLYKNGMMFYSGCLIEISKEFIATVYYTIKDENDKNKQISQKETLNSGIYKLRTIKSDGTIKIENNNGIEILTSVKILSEINFKKYKKS

SEQ ID NO: 56 - protein, 1076 aa, unidentified
  REGION 1..1076: note = Description of Unknown: uncultivated organism with predicted taxonomy: Verrucomicrobia
  REGION 1..1076: note = MG1-59 effector
MYTKEIIWGFDIGKGSLGEAVRVGNEFKHVQSLEIAPDFAETKTTAAARRAWRTREAHKARELWLEKCLSEAGIEVLLRRKVGVVDGAWKLVSKGDVRLEREFPPAGEDLCYNSIALRCKLLLGEKLESWQVFKALNSAIQNRGYDANIPWGDEDAADGGDGSSRKSSDSDASGDGESYAEKLAHYEREFDGILAELDNREKYEFPCFFKAAKMGLWSPENPDFVGVRIDNTAEKAKGYVVPREAVVREFRALVNAAALQYPNLKGKADFIMFGRACEPYASYNPELRKRFGLKRGAATDWTALGQKTPRFDNRVIDKCKLIPRLNVCKIKPLDECKTDDDFLSYTITLSLKLLNLRFFRGAGMDSLSFDEFLRAFELAKNSKFKLGKAALKKFFKTIGAEVMDESQSEIEQPRNGGRAAFSRPAMRILRDLIFSGKSPAEFYATAIENIANTDKNKGLVAGDLDFLKLMGDAPWSGIFIPDVGLSDFADASEAAREAQINKLIGSQNDPIVRHRLSFFYERIKSLEAKIVVPVKIVLEFVRDDFLGKKAKSDLNKAIKTRFDEKKKLAEDLDSKREEFGFKYASKKMLLKFELYKKQGGECVYTGNALPLSELESLEIEHIVPRSRGGPDAMYNYVLTDEKTNKEKGDRTPFEWRSTMGAEWESYCERVRKLTKELGAKRCKLLLSPNAAELVEKYTAFAETAWISKLAQRICCLHFGFQFGGLTGAKKVWTVSGNTTAMIRGRYGLNRLLHDEESAADSLFDRICMEKKFEEKNRKNKKHHALDAMCLCFAPTSNAKKASAYKNILPEEITRNPESDEARKFFGKYLANVIPNKVAVEKPTLEQTIYAKRLIGGKETIVKKCNVRELAYTGINPKYNYSTLVKSIKSIVAEVPKRIISDFVLSNPNLSESEWEDWCKYEALIPSKNGAPTKLLRVLCDVGSPEEYKDLSKDGCGAYRKGDSHKGQFIWKTKQGRYVVAPVYAHASKAKVFAALKNNPDCAEVCGFFRQNCLVEIPNDVVDKSGKMLLKAGVYRSNTIKTDCRAKLTNSDGISPNPISIQYLMPAGMKRIKLDTL

SEQ ID NO: 57 - protein, 956 aa, unidentified
  REGION 1..956: note = Description of Unknown: uncultivated organism with predicted taxonomy: unclassified Verrucomicrobia (miscellaneous)
  REGION 1..956: note = MG1-60 effector
EFPPSGEDVCYNSIALRCKLLLGEKLEGWQVFKALNSAIQKRGYDENIPWGEAEEKSSKKDDDDYAQKLSQYEKEKSELFESFADGEKYDFPCFFKAYKMGLWSPENPTRVEVRIDCRAQKAKSYVIARKYVEREFECLVEAAAKFFPKLKGRAKFILYGVSKTPYASYYGNMRKKFGLKRGAESDWTALGQKVPRFDNRIIDKCRLIPRMNVCKIRPLNEARNEKDLLYYEVTLALKLLNLRFFRNSNIEQLTFEEFKKAFEIAAGAKYKMTKTAMKKFLKSISATALGDDYAEIEPPKEGGRASFSRPAMEILKELIFSGMPPREFYGRKISEISNTDKNKGVVSSDLDFIKLMGDCPWGGIFIPDVQTYQFANAAFPDPDAQINKLIGSQNNPIVRHRLTFFFERIKFLESKYGVPDKVVLEFVRDDFMGEKEKKEMRIAMKKRAEEKMRIAKDLDEHGFKGGNLLLKMELYRKQNGICLYTGDALPLSELATLEIEHIVPRSRGGPDAQYNYVITREKTNKLKGDKTPYEWLSSDAKEWASYTDRVNACAKALGKKRCRLLLEKDAEELVEKYTALAETAHIAKLAQKIVCMHFGFQFGGLSGTKRVFTVPGALTSRIRKFYGLDRILHNSAAESENLSFEEFLKFSEDLEKKNRKNKKHHALDAMCLCFAPTGVDSRRAKLGEILPEKLRSEKAAREFFKSYLDKIMPVDVAPKKPRLEDGIYSKRIIGGKACMVKRNNLVDLAYKSGLKPVFDIPTLIKLVDKKEKGIINPQIRKMIGEFAATNPDESAWRKWCEEVRLPSKSGLGARVMRVLVYYGEADEYKDLSKDGCGAYRKGDGHKGQVIWESVDGKYYVEPVYVHASKAGVMAALNANPKKKRICGMFNSHCTVDVGDVYNDKGDFILPAGRYMVNTIRSDNQCVLTNADGEKRNPININYLMRAGMRRVDLSEL

SEQ ID NO: 58 - protein, 1043 aa, unidentified
  REGION 1..1043: note = Description of Unknown: uncultivated organism
  REGION 1..1043: note = MG1-61 effector
MENKTVFAFDIGTGSLGTCVRKEKEILDLSVNLLPQDFASLKEAREKRRQIRTRIAHKMREKWWKEQAQKAGIEIPETGHLDEKGNFIKPDERMSREFPKEGDNTIYNSALLRIALLQGKKLEGWQIFKAIWSAIQHRGYDSNLPWINNPKRNVEEEGEENKDEKENKEAVKKYNNELKKVFGEGDENERFYYPCYYEAYKMGIWSKEEPENLNKKISNNPSPARNKDGKVDLVIPRELIEKEIKDMLIKAGDKYTYIKENLDYILYGPSKSKYAAYNLKEYKKYRGKDWEWQGLLSQKTPRFDNRLISKCVLIPRLNVCKAKDELNKEVTFLMKLNNMRYFEIKGGEEKKLNAEQIKQIFEKFKDKLKITKDQWSKYLKINFAAVPNPGQLKIDAPKISGRSSFCRPALGIIKELILSGKKPSELYKELTENNKNTDPKKGLIKEDYNFLLKLPDDYNFYISDSRDEESKLNESERKNKIDEIISEIINPVVKHRLKLFYDKLIELKQKHGTPEKIIIEFVRDPKEGFYGEKRRKEIIFEQNKKRKENDLAFEDAKKIGLKGKDAVLKIKLHKEQGGFDIYDGNPIKDNEIDNYEIDHIVPRESGGPDSYINKVLTSRKNNEEKGKRTPYEWLKDKNYWNDYVKRIKDSKTLNDKKKTLLTSSEAVNLAEKYTQLAETAYIAKMSQKIAHLFFGWSQGTLGSKKKVIVANGSLTAKMRGLYGLNRILHSGISEEEYKELVKSGKIDEKNRDNPRHHALDAIVLSMLPEIQMNDRKKDFFPIWFTPDYCRENLEKCFPKHIKYEKPKLAETIYGLRKVLDNGKERYVFVMRFGKGTKIEEYYDMDLAKKNLDSILSDKIKKDFSEKLSENPSAEEWKKFIDDYNAGGKVKKIILKCSSLIDPEEIKDFLEGKVRNYGEYIKGKMPGQYLKQKKDSYGYMVYKNEEGKWIRESIYAFDSVIKKQKEIKEKYKETYYFRSGMIVEIQETFEFDGRKEKIKVKKGKYYLKTIGFTNQVKIESIDSSSDFLINLKYLMENGKMKPVF

SEQ ID NO: 59 - protein, 1043 aa, unidentified; identical to SEQ ID NO: 58
  REGION 1..1043: note = Description of Unknown: uncultivated organism with predicted taxonomy: Deltaproteobacteria
  REGION 1..1043: note = MG1-62 effector

SEQ ID NO: 60 - protein, 833 aa, unidentified
  REGION 1..833: note = Description of Unknown: uncultivated organism with predicted taxonomy: Verrucomicrobia bacterium 61-8
  REGION 1..833: note = MG1-63 effector
DGPAGQPDETSFEAFLNQRREAGIRIGTFEEWMAALGQKTPRFDNRIVENCALIPRLHVCKVAPRWRRNQNGDKELDPRSLLAAEVTFLLQLKNLQVDDATAGTVRYLNTDELNEWWKHACEKAANVPLSDTWERDVLDCFKITRAEWRRWCVSKNLLPVARERSEAAALAGEIATQSAEAASGDSGAEERSRGKSQDVVQAPKPTGRSRFCRPALAILRHLLLHREKPQDFAARLRNREPALLDALDFDVLDNAPAEERPTGNGKALKGYRKQQRTWLLTGDLDFLDHVWKATDRDGNPRDFEPHQLRIPDMTLRDLRKRHDLTETPYSELLRQNSAELERRDKAILELIGQQKNPVVRDRLTRFWQRLKHFQNPVVPSDPKKQKPGLGLADPACLVLEFVRDDKDNSLEGRKRTEAIQQALRENEQRRDKARKALEQCGLPTTDDMVVRWLLLEAQGPACIYTNKPIRCTDLPNLQIEHIVPRALGGPDAFWNWVLSDENANAEKGDRVPYVWFKEEKTDEEWADYKRRVLARAAHLGRRKVDLLLRPDAAELAGEKYTALAESAWIARLAQTIARLHFGWPLDDEPGEERVITISGGLTARIRRKYLLDSLLGVGNDAETLRREIDSALDELEALRTDTSLSENARKQKRAELRQRLANLAAEAEKNRDDQRHHALDAMLLTFLPNWARDRTKEDFFRFPTAIGDNDFYSKEDQPEMAAIKSELAKLYVENKPVFREIKQARLAGDFGRLQQLKASVFPARKRIAELYRALDKLKQPRNVRAVREWFRAQLEGASPAPNGPVLPRTMAWQRTPTEATLYRRVYLIYKDCP

SEQ ID NO: 61 - protein, 1306 aa, unidentified
  REGION 1..1306: note = Description of Unknown: uncultivated organism
  REGION 1..1306: note = MG1-64 effector
IGTFEEWMAALGQKTPRFDNRIVENCALIPRLHVCKVAPRWRRNQNGDKELDPRSLLAAEVTFLLQLKNLQVDDATAGTVRYLNTDELNEWWKHACEKAANVPLSDTWERDVLDCFKITRAEWRRWCVSKNPLPVARERSEAAALAGEIATQSAEAASGDSGAEERSRGKSQDVVQAPKPTGRSRFCRPALAILRHLLLHREKPQDFAARLRNREPALLDALDFDVLDTAPAEERPTGNGKALKRYRKQQRTWLLTGDLDFLDHVWKATDRDGNPRDFEPHQLRIPDMTLRDLRKRHDLTETPYSELLRQNSAELERRDKAILELIGQQKNPVVRDRLTRFWQRLKHFQNPVVPSDPKKQKPGLGLADPACLVLEFVRDDKDNSLEGRKRTEAIQQALRENEQRRDKARKALEQCGLPTTDDMVVRWLLREAQGGVCIYTSNEIRPADLPNLQIEHIVPRSRGGPDAFWNWVLCDENANAEKGDRVPYVWFKEEKTDEEWADYKRRVLARAAQLGRRKADLHLRPDAAELAGEKYTALAESAWIARLAQTIARLHFGWPLDDEPGEERVITISGGLTARIRRKYLLDSLLGVGNDAETLRREIDSALNELQALRTDTSLSENAPKQKRAELRQRLANLAAEAEKNRDDQRHHALDAMLLTFLPNWARDRNKEDFFRFPTAIGDNDFYSKEDQPEMAAIKSELAKLYVENKPVFREIKQARLAGDFGRLQQLKASVFPARKRIAELYRALDKLKQPRNVRAVREWFRSQLEGASPAAKRPVLPRTMAWQRTPTEATLYRRVYLIYKDCPERSLLALTDLAFAPNPRNPQQPVFDLKWLRTRIQSIAEHPGYDRKKLQSVLSAKLEATLSAKRFASCQFGPEDWQQICAQPEVAACFQPVGRGKSKRPPEPDQRLVKVCKVEVLPATRYELSELGYTSGNNYAWNPDHLAETARNILRKDDAQARTRGRRRTPAPASSPSADASPWPGFLWDREMQAKLASPKFREALEQQLVPHLLPPKPARMSDAERTDWATREERWKQAFEQFRKSHNLPKSFFVFTSDSDRPPRRPNVSLLRVLFEPKDKVFSRDALAKQAQSVVDAQLRRCLECFADSLTQVRDPRLQEKAWRDYCNVVRVVPKETLEQFTREHPTPTADQWISFFEAQTGPRIFQVMQTVGTSLEEYFDLSKDACGAFARGGNKGYWLCKRGDAIEARPIRFFENPEQVRVRLLGQGWELLDPKPWRTGDLLNLPEAAQSGARSVPAGYYFLGSFSNDTGVNLKPCFGGEVPQNVSLKALWNRGLRRCSPTA

SEQ ID NO: 62 - protein, 1150 aa, unidentified
  REGION 1..1150: note = Description of Unknown: uncultivated organism with predicted taxonomy: Verrucomicrobia
  REGION 1..1150: note = MG1-65 effector
ILPSGKAKDGAPAATEADLAICYNSALLRIKLLRGEKLEEWQIFKALRAALQNRGQQIVPWIAREAARTGKTPEELLEEEKKALKDKDPDDQSPMTKWQEFCQLDPIKNNHSLQYPCYYDAYKIGLWDPTQPNSFKNKPDHNAASTQQVVFPGDRIEAELLLLAQNAATQLPVLDHAYKKVIGEFLNDRRARIENINQKRAARAQARNQAPRLLSTENLPHAKNFAELFVYGPAGKPNLPNGYRNIALADASIARALVLRPGTDFDHQSAIGQKIPRFDNRILAHCALFPRFHVCKATPRIYPDNSVDADSLLPCEVTFLFKLKNLRVSRAGQVTSLTPQQIQTIFHHVRNTALSQLGAAQEPSAKALASKFSLTKTELTKWGKKPGMAFSLLPTQQEIEKPKFLGRSRFSKPALKIIKEIILFGKSPQQIAQELKAPNSPLAQQLQLKISPQSPMQGLTHHDLDILTKCGDSWDNFHIPDTTTDFLLSTNQNSSYPNQSDKDTLIKKYIATSNNPIIRHRLELFYERLRLHLEKYGKPDFIALEFVREDFLGEEAKKKIQKIQNENKKLNSQAAEKVEELKLAGRQSILKYKLWQLQGGICLYTGKPIAQTEIESHEVEHIVPRNHPQTQGPDAQWNLVLTAREINDRKANRTPFEWFQQDPIAFQWPMGQPDASIPSQEKQRLWEAYCDRIKQRKKNLGNKRVKLLLSDKAPELVERYETLATTATIARMALRITDILFDWQNGNDAQGNKRVRVFPGGRTAAIRRRYLLNTLLGADSDQKLKTITDLQSEISQIKAQWPSLQGEEHKPTRKAYYQKRRQLAELIEGTKKDRSDARHHALDAMVLTFLPTWAQHPNKDEFFRFPPPLDNPYPQRPDILKVHQFFRDALNNVIPTPLAFEKARLAETAYGFRIINNKKKIAQRVAVEKLAYPGQEQKFDLAYLEGQIPSIADEKIRSMLTEIYNNIKSKTLQEAEQTWKDECAKLRLKTRDGSPGPFIKKVTQITDFHREYKDLSKDGTGAYYKGGDRHQGQFIYRDARGEFTVHPVYVHESIPQVKKALIEQNKTICIFVNSGCLVKTAQPIDPANYRKIIYENNKPKRITPEHPLPSGIYKWRTIIESSTSVTLENVFGEEFAINFCHLCKAGIQRL

SEQ ID NO: 63 - protein, 1076 aa, unidentified
  REGION 1..1076: note = Description of Unknown: uncultivated organism
  REGION 1..1076: note = MG1-66 effector
MADERIFSFDLGTGSIAYCVREGSNVIALGVDEIPSDFSELKDVRERTRQIRTRKAHKVREEWWKKHAELAGIEVPETGHLDEETGKFIPPDIRISTEFTKPGDSTIYNSYLLRIALLQGKELESWQIFKAIWSAIQHRGYERVPWINKEEDNEDTNKKRKSKSEGSEKEKEEREIQQAVVNYRNELKNAFGEKTQYYYPCYLEAYRLGIWSPDEPDNLTKTISDNPEPIRNKGGKIRRIIPRELLEAEIKQLLHQAGKKYPYIEENLDVILYGPAKTKYPAYTLKEYRRFMGKDWEWQGLLSQKTPRFDNRIIYKCRLIPRLNACKRKDPLAQEVIFLMKLKNFRYVDAETGEVLALKPEQLKTMFEEFQEEKKIGKRELEKFVKIRLNGKPHPGHTVIEPPNTNGRASFCRPALRIIKEILLTGKSPHQLYEEYTKANTNTDPRKGLVNDDYKFLLDLPAEWDKFHIPDRREEEAGLDEETRLKKIQELLGKITNAVVRHRLVLFYQKLQELKEKYGSPDKVIFEFARDPEETLDSKGRKERYKKVQDANRKAKEEAKKNLRELRNNGISIDGENALLKVRLWQEQNGRDLYTGLPIGQTEISICEIDHIIPREMGGPNAMYNFVLTKPECNREKGKRTPYQWLGSDPEKWQMFVDRINSEEYKKLSDRKKELLLKTITDEDELKELVEKYTHLAETSYISRLAQKIVHLYFGWEQLTKGSSRRVFVVSGAFTKRIRDLFKLDAILYPDLTLEEVYKYSAEEREEKNRNNPRHHALDALVVSITQEIKYNPLKGKDEYPEWFTPEFCKQAVERCLPVKVRFEKPTLAETIYGLRPYLDDNGRPTGKYVFVTRFGEGTDFEEYDDLDHAKKNVDSIYSANIRRELKQKLDENPSEQEWKIFIYNYRAGGKPKKLLMIASSDFAQEEVEKFLRGEINNLGEFIKGKMPGQYLKQSKESRGYFVYKDAKGKWRREAIYAFESPYLKKRKILSELKGRGDVYFFRSGVLVEIRNDIIKKQKPQSGNTETISKGFYYLNTIFETGYSKITSMEGKECLLSISKLMEEGKMKPAQEIRMR

SEQ ID NO: 64 - protein, 1655 aa, unidentified
  REGION 1..1655: note = Description of Unknown: uncultivated organism
  REGION 1..1655: note = MG1-67 effector
MPSPTTIWAFDLGKGSVGEAVRDIETNQFLHVAALLLPPDLARRGRADQTGTPASRYRAWKVRLAHRERERWLDTVWLAAGLTPLQKREVWRNPATGRWELKHPADYRLEREFAPAFGEKTKDGAPSDAAGANLCYTSCLLRIKLLRWKPGDPLLEEWQVYKALRSAMQKRGYGRVPWAVKEARAQGKTPEELEAEEQKQLEQADPRYREAAGKWPKFKRAVPAEFHFPCYYDAFHMGLWSPDQPDQLRLRPDHRAASTRNVRFDRADVRKELIALGNNAAAMLPQLQQAFERWQRDGWTFRHPVTGKALTKPVHARTFGEFLCDGPAGQPDETSFEAFLNQRREAGIRIGTFEEWMAALGQKTPRFDNRIVENCALIPRLHVCKVAPRWRRNQNGDKELDPRSLLAAEVTFLLQLKNLQVDDATAGTVRYLNTDELNEWWKHACEKAANVPLSDTWERDVLDCFKITRAEWRRWCVSKNLLPVARERSEAAAFAGEIATQSAEAASGDSGAEERSRGKSQDVVQAPKPTGRSRFCRPALAILRHLLLHREKPQDFAARLRNREPALLDALDFDVLDTAPAEERPTGNGKALKRYRKQQRTWLLTGDLDFLDHVWKATDRDGNPRDFEPHQLRIPDMTLRDLRKRHDLTETPYSELLRQNSAELERRDKAIVELIGQQKNPVVRDRLTRFWQRLKHFQNPVVPSDPKKQKPGLGLADPACLVLEFVRDDKDNSLEGRKRTEAIQQALRENEQRRDKARKALEQCGLPTTDDMVVRWLLLEAQGPACIYTNKPIRCTDLPNLQIEHIVPRSFGGPDAFWNWVLCDENANAEKGDRVPYVWFKEEKTDEEWADYKRRVLARAAQLGRRKVDLLLRPDAAELAGEKYTALAESAWIARLAQTIARLHFGWPLDDEPGEERVITISGGLTARIRRKYLLDSLLGVGNDAETLRREIDSALDELEALRTDTSLSENARKQKRAELRQRLANLAAEAEKNRDDQRHHALDAMLLTFLPNWARDRNKEDFFRFPTAIGDNDLYSKEDQPKIEAIKSKLAKLYEENGAVFREIKQARLAGDFGRLQQLKASVFPARKRIAELYRALDKLKQPRNVRAVREWFRAQLEGASPAPNGPVLPRTMAWQRTPTEATLYRRVYLIYKDCPERSLLALTDLAFAPNPRNPQQPVFDLKWLRTRIQSIAEHPGYDRKKLQSVLSAKLEATLSAKRFASCQFGPEDWQQICAQPEVAACFQPVGRGKSKRPPEPDQRLVKVCKVEVLPATRYELSELGYTSGNNYVWNPDHLAETARNILRKDDAQARTRGRRRTPAPASSPSADASPWPGFLWDREMQAKLASPEFREALEQQLVPHLLPPKPARMSDAERTDWATREERWKQAFEQFRKSHNLPKSFFVFTSDSDRPPRRPNVSLLRVLFEPKDKVFSRDALAKQAQSVVDAQLRRCLECFADSLTQVRDPRLQEKAWRDYCNVVRVVPKETLEQFTREHPTPTADQWISFFEAQTGPRIFQVMQTVGTSLEEYFDLSKDACGAFARGGNKGYWLCKRGDAIEARPIRFFENPEQVRVRLLGQGWELLDPKPWRTGDLLNLPEAAQSGARSVPAGYYFLGSFSNDTGVNLKPCFGGEVPQNVSLKALWNRGLRRCSPTA

SEQ ID NO: 65 - protein, 983 aa, unidentified
  REGION 1..983: note = Description of Unknown: uncultivated organism with predicted taxonomy: Elusimicrobia bacterium HGW-Elusimicrobia-1
  REGION 1..983: note = MG1-68 effector
MGKIYAFDLGTGSLGSCVREDKEIKDLSVELLPNDFATLKEARERRRQIRTRIAHKKREEWWKEQSQKAGIEVLETGHLDKNGNFIKPDDKISRQFPESGDDAIYNSSLLRIAILQGKKLEGWQIFKAIWSAIQHRGYDSNLPWIRESKRNIDEDENTEQINKDEKENQEAVKKYNNALKDVFGDKKEYYYPCYYEAYKMGIWSPNEPNNLNKKFSANPNPARNKDGKVDLVIPRDLIEKEIKDMLLKIGESYPYIKENLDLILYGPGKSKYAAYKAKEYRKYLGKDWEWQGLLSQKTPRFDNRLISKCALIPRLNVCKAKDELNKEVVFLMKLKDVRYYKIDGGEEKYLTNEEIKNIYEKFKDKLKITERQWTKYLKENLQGSPNPSQPKIEPSKPSGRSRFCRPALRIIKEIILSGKSPDLLYKELVENNKNTDPKKGLVKEDYSFLLKMPEKWENFHIPDNRMDESKLDETERKNLIEEIFSKTSNPIVKHRLKIFYDKLIEYKNKFGEPEKVIIEFVRDTDDGFYGKIKKKKIIAEQNKNRKESDLAFKEAQTLGLKGGESILKIKLYREQGGFDLYDGKTIKDTEIDNYEIDHIVPREDGGPDSYINKVLTSRKNNDDKGKRTPYEWLSKSDNWEEYFERVKKLPKDSKKKKDLLVSANAKELVEKYTQLAETAYIAKLSQKICHLFFGWEQGTEGSKRKVIVANGGLTAKMRNAYDLNRILHTGLSDAEYKELCKSGEIDKKNRDNPRHHALDAMVISMIPEIKMNDRKKDFFPIWFNPDYCREKLEQCFPKNIRYEKPKLAETIYGLREIIDDKGNKKYVFVSRLVGDVKNIEGYYDIKTAKKYLDKIFSDKIRKDFKEKLDSNPSNEEWKSFLDNYFAGGKPKKILLKVSDEYTYDKIKDFLDGKVKNCGEFIKGRLPGQYLKQKKEAYGYFIYKNEKEKWIRDVIYAFDSVFNKMKEIKSKYKEAYFFRSEMLV

SEQ ID NO: 66 - protein, 1235 aa, unidentified
  REGION 1..1235: note = Description of Unknown: uncultivated organism with predicted taxonomy: Pedosphaera sp. Tous-C6FEB
  REGION 1..1235: note = MG1-69 effector
RAMTSPATIWAFDLGKGSLGEAVLNLETHQFHHKATLLLPADLAQRGPASQAGTPASRYRALKVRQAHRERERWLDTVWQAAGLEVLQPRQTALVCALPPKRDDTGQPLFDQGHWALVGRADYRLEREFAPALGEKTKDGAPSDAAGANLCYTSCLLRIKLLRWKPGDPALEDWQVYKALRSAMQKRGYGPVPWAAEESRPKLTKEEQAKEQEIAARWDKFKKGYRYDENPDADPNRAPLPPQFHFPCYYDAFHMGLWRPDQPDHLRPRPDHRAASTRNVRFDRADVRKELIALGNNAAAMLPQLQQAFERWQSDGWTFRHPVTGEELTKPVRARTFGEFLCDGPAGQPDETSFEAFLNQRRQAGIRIGTFEEWMAALGQKTPRFDNRILAPCVLIPRYHACKVDARLEKDRAGRLTGKLVPDSLLASEVTFLLKLKNLLVADPVKGQRKLTVEEVREIFAFAQRRLKTLPLLTPEGEPAKEWPRKVANCFAINPSDWPKIAAEAECLKGLARLTVSDNGAPRPLTREEAEALLHAVAGGRRAAQTVLPAHLLPLVKRAAAAWKQAKQQAEEIMLRPLPGHEEVKAPRTCGRSAYSRVALRILKELILSGDAPSAFHARLVRREPDLLQRLGPAPGQPLAIFDDSTASNEAQRKQENAENRKHGLLVSELNFLLQMRKDDGSPDSWENLFIPAQTLEALQQRHTEDGRLDADAAVRELLGTIKDPVVRHRLGVFDERLRKLRFGDAREGLPGFGVPEAIVLEFVREDFMGEEAKRRLQTFQRQREEERKKARSIAAQAGAESALSALKCQLWEAQGGECLNGREVLDQTGQSKARCLYRQTALPLSRLDEYVIDHIVPRARGGPEAMVNYVLTTAETNEAKGDRTPFEWLHGSPDWDAYVARVKARAAALRNKKVQLLTREDAPELVERYTALAETAWISKLAQTIVNLRFGWRNGVDYSGPQPVKRVIVVSGGLTARVRRKYGLDKLLYGEDTAPEVLAKKVKNRDDDRHHALDAMVMTFIPHWARDPNKQGFFRFPPAFRDANGREDYQRIRSLFASHLQQIVPRHLAYEPSVLADTIYGGRLDNGRPVIVQRVPVRELAYKQEQQRPVFNLTYARDQIAHVRDPRLRRVLEAFVATGPDQAAWDNYCRALAAGTCPELPDRKVLKVTLNRDEDPEEFKDLSKDGCGAFRTRKGEHRGQFVYLDARGRVRVRPVRPFESLVAVKAEVERLAAG

SEQ ID NO: 67 - protein, 1052 aa, unidentified
  REGION 1..1052: note = Description of Unknown: uncultivated organism with predicted taxonomy: Endomicrobium
  REGION 1..1052: note = MG1-70 effector
SIAYCVREGVNVLDIGVDILPGDFASLKNVREKRRMIRTRMAHKVREEWWKMHAKEAGIEVLETGHLNENGEFVKPDIRLSTEFTPPGDSTIYNSYLLRIALLQGKDLESWQIFKAIWSAIQHRGYEKAPWVRKEEAQKEPSDGKKSRKSKSEDESEKEREEKEIQQAVENYRNELKQAFGDNHQYYYPCYLEAYKLGIWSPDEPDNLTKTISENPEPIRNKDGEIRRIIPRELLEKEIKELLQQAGKKYPYIEKNLNYILYGPAGTKYPAYTLKEYRRYMGKDWEWQGLLSQKTPRFDNRIISKCRLIPRLNVCRRKDELVQDVTFLMKLKNFRFIDRETGEVKALTPEQLKEMFETFRSERKINKTELKKYVKDRLNGWVHPSHTNIDPPKTTGRASYCRPALRILKEILLTGKSPHQLYQEYTSTNTNTDPRKGLVNDDYKFLLDLPAEWDNFYIPDRREEEANLDEETRLKKIYETFSKITNSVVRHRLLLFYNKLRELKEKYGAPDKVIFEFARDPEETLETSKRKDYKKIQKFNLKAKEKAKQILEELRSKGISMQGSNKVLKVRLWQEQGGFDVYTGQPIGETEIDICEIDHIVPREMGGPNARYNMVLTKPECNREKGKRTPYQWLGQDPEEWQKFVERLEREKGFENLPAKKKNLLVATNPEELIERYTHLAETSYISRLAQRIVHLFFGWEQLTKGSTRHVYVVSGALTKYIRDKFELDVLLYPDLTKEEVFKIPSEEREEKNRNNPRHHALDALVVSIARPENVDKYPEWFTQDFCRMAIEKCLPVKVRFEKPTLAETIYGLRPMLDDNGRPTGKYVFVTRFGEGTRFSDYSKLEHAKKNVDSIYSANIRRDLKNKLKENPSKEEWEVFIHNYRAGGKPKKLLMIASSEIDGDDVKKFLSGELRNLGEFIKGKMPGQFLKQAQESRGYFVYKDEKGKWRREVIYAFESPYLRRREILSKLKDCKEIYFFRSGMLVKIENDFLYEPRGGASKTIPGGYYYINTINVSEQVKITAIDGREIKLSLSQLMEKGRMKPAQKVRMD

SEQ ID NO: 68 - protein, 1110 aa, unidentified
  REGION 1..1110: note = Description of Unknown: uncultivated organism
  REGION 1..1110: note = MG1-71 effector
WQIYKALRAALQNRGQQTVPWIAREAARTGKTPEELLEEEKKAFENKDPDYQSALTKWQQFCQLDPIKNNHSLQYPCYYDAYKIGLWDPTQPNSFKNKPDHNAASTQQVVFPGDRIEAELLLLAQNAATQLPVLDHAYKKVIGEFLNDRRARIENINQKRAARAQARNQAPRLLSTENLPHAKNFAELFVYGPAGKPNLPNGYRNIALADASIARALVLRPGTDFDHQSAIGQKIPRFDNRILAHCALFPRFHVCKATPKIYPDNSVDADSLLPCEVTFLFKLKNLRVSRAGQVTSLTPQQIQTIFHHVRNTALSQLGAAQEPSAKALASKFSLTKTELTKWGKKPGMAFSLLPTQQEIEKPKFLGRSRFSKPALKIIKEIILSGKSPQQIAQELKAPNSPLAQQLQLKISPQSPMQGLTHHDLDILTKCGDSWDNFHIPDTTTDFLLSTNQNSSYPNQSDKDTLIKKYIATSNNPIIRHRLELFYERLRLHLEKYGKPDFIALEFVREDFLGEEAKKKIQKIQNENKKLNSQAAEKVEELKLAGRQSILKYKLWQLQGGICLYTGKPIAQTEIESHEVEHIVPRNHPQTQGPDAQWNLVLTAREINDRKANRTPFEWFQQDPIAFQWPMGQPDASIPSQEKQRLWEAYCDRIKQRKKNLGNKRVKLLLSDKAPELVERYETLATTATIARMALRITDILFDWQNGNDAQGNKRVRVFPGGRTAAIRRRYLLNTLLGADSDQKLKTITDLQSEISQIKAQWPSLQGEEHKPTRKAYYQKRRQLAELIEGTKKDRSDARHHALDAMVLTFLPTWAQHPNKDEFFRFPPPLDNPYPQRPDILKVHQFFRDALNNVIPTPLAFEKARLAETAYGFRIINNKKKIAQRVAVEKLAYPGQEQKFDLAYLEGQIPSIADEKIRSMLTEIYNNIKSKTLQEAEQTWKDECAKLRLKTRDGSPGPFIKKVTQITDFHREYKDLSKDGTGAYYKGGDRHQGQFIYRDARGEFTVHPVYVHESIPQVKKALIEQNKTICIFVNSGCLVKTAQPIDPANYRKIIYENNKPKRITPEHPLPSGIYKWRTIIESSTSVTLENVFGEEFAINFCHLCKAGIQRL

SEQ ID NO: 69 - protein, 1005 aa, unidentified
  REGION 1..1005: note = Description of Unknown: uncultivated organism with predicted taxonomy: Deltaproteobacteria
  REGION 1..1005: note = MG1-72 effector
MPSPTTIWAFDLGKGSVGEAVRDIETNQFLHVAALLLPPDLARRGRADQTGTPASRYRAWKVRLAHRERERWLDTVWLAAGLTPLQKREVWRNPATGRWELKHPADYRLEREFAPALGEKTKDGAPSDAAGANLCYTSCLLRIKLLRWKRGDPPLEEWQVYKALRSAMQKRGYGRVPWAVNQARAQGKTPEELEAEEQKQLEQADPRYREAAGKWPEFKRAVPAEFHFPCYYDAFHMGLWSPDQPDQLRLRPDHRAASTRNVRFDRADVRKELIALGNNAAAMLPQLQQAFERWQRDGWTFRHPVTGKALTKPVHARTFGEFLCDGPAGQPDETSFEAFLNQRREAGIRIGTFEEWMAALGQKTPRFDNRILAPCVLIPRYHACKVDARLEKDRAGRLTGKLVPDSLLASEVTFLLKLKNLLVADPVKGQRKLTVQEVRDIFAFAQRRLKTLPLFTPEGEPAKEWPRKVANCFAINPSDWPKIAVETECLKGLARLTVSDNGAPRPLTREEAEALLHAVAGGRRAAQTALPAHLLPLVKRAAAAWKQAKQQAEEIMLRPLPGHEEVKAPRTSGRSAYSRVALRILKELILSGDAPSAFHARLVRRDPDLLQRLGPAPGQPLAIFDDSTASNEAQRKQHDAENRKRGLLVSELNFLLQMRKDDGSPDSWENLFIPAQTLEALQQRHTEDGRLDADAAVRELLGTIKDPVVRHRLGVFDERLRKLRFGDAREGLPGFGVPEAIVLEFVREDFMGEQAKRELQTFQKRREQARAEAEAEAAKLGLESRSSSLRYELFKAQGGICLYTGRTLSETQLDQYEIDHIVPRSLGGPDAMVNYVLTFPEVNSAKEKGKLTPYALLHGTDGWDAYVARVKARAAALRNKKVQLLTREDAPQLVERYTALAETAWISKLAQTIVNLRFGWRNGVDYSGPQPVKRVIVVSGGLTARVRAKYGLDKLLYGENTPPEVLAKKVKNRDDDRHHALDAMVMTFIPHWARDPHKEGFFRFP

SEQ ID NO: 70 - protein, 1141 aa, unidentified
  REGION 1..1141: note = Description of Unknown: uncultivated organism with predicted taxonomy: Pedosphaera sp. Tous-C6FEB
  REGION 1..1141: note = MG1-73 effector
SLTTLVTFPIVSPMPSPTTIWAFDLGKGSVGEAVRDIETNQFLHVAALLLPPDLARRGRADQTGTPASRYRAWKVRLAHRERERWLDTVWLAAGLTPLQKREVWRNPATGRWELKHPADYRLEREFAPALGEKTKDGAPSDAAGANLCYTSCLLRIKLLRWKRGDPPLEEWQVYKALRSAMQKRGYGRVPWAVNQARAQGKTPEELEAEEQKQLEQADPRYREAAGKWPEFKRAVPAEFHFPCYYDAFHMGLWSPDQPDQLRLRPDHRAASTRNVRFDRADVRKELIALGNNAAAMLPQLQQAFARWQRDGWTFRHPVTREALTKPVRARTFGEFLCDGPAGQPDETSFEAFLNQRREAGIRIGTFEEWMAALGQKTPRFDNRIVENCALIPRLHVCKVAPRWRRNQNGDKELDPRSLLAAEVTFLLQLKNLQVDDATAGTVRYLNTDELNEWWKHACEKAANVPLSDTWERDVLDCFKITRAEWRRWCVSKNLLPVARERSEAAALAGEIATQSAEAASGDSGAEERSRGKSQDVVQAPKPTGRSRFCRPALAILRHLLLHREKPQDFAARLRNREPALLDALDFDVLDTAPAEERPTGNGKALKRYRKQQRTWLLTGDLDFLDHVWKATDRDGNPRDFEPHQLRIPDMTLRDLRKRHDLTETPYSDLLRQNSAELERRDKAILELIGQQKNPVVRDRLTRFWQRLKHFQNPVVPSDPKKQKPGLGLADPACLVLEFVRDDKDNSLEGRKRTEAIQQALRENEQRRDKARKALEQCGLPTTDDMVVRWLLREAQGGVCIYTSNEIRPADLPNLQIEHIVPRSRGGPDAFWNWVLCDENANAEKGDRVPYVWFKEEKTDEEWADYKRRVLARAAHLGRRKVDLLLRPDAAELAGEKYTALAESAWIARLAQTIARLHFGWPLDDEPGEERVITISGGLTARIRRKYLLDSLLGVGNDAETLRREIDSALNELQALRTDTSLSENAPKQKRAELRQRLANLAAEAEKNRDDQRHHALDAMLLTFLPNWARDRNKEDFFRFPTAIGDNDFYSKEDQPEMAAIKSQLAKLYVENKPVFREIKQARLAGDFGRLQQLKASVFPARKRIAELYRALDKLKQPRNVRAVREWFRAQLEGASPAPNGP

SEQ ID NO: 71 - protein, 1171 aa, unidentified
  REGION 1..1171: note = Description of Unknown: uncultivated organism
  REGION 1..1171: note = MG1-74 effector
WIPKLCQKADYRLEREFPPSRILPSGKAKDGAPAATEADLAICYNSALLRIKLLRGEKLEEWQIFKALRAALQNRGQQIVPWIAREAARTGKTPEELLEEEKKALKDKDPDDQSPMTKWQEFCQLDPIKNNHSLQYPCYYDAYKIGLWDPTQPNSFKNKPDHNAASTQQVVFPGDRIEAELLLLAQNAATQLPVLDHAYKKVIGEFLNDRRARIENINQKRAARAQARNQAPRLLSTENLPHAKNFAELFVYGPAGKPNLPNGYRNIALADASIARALVLRPGTDFDHQSAIGQKIPRFDNRILAHCALFPRFHVCKATPRIYPDNSVDADSLLPCEVTFLFKLKNLRVSRAGQVTSLTPQQIQTIFHHVRNTALSQLGAAQEPSAKALASKFSLTKTELTKWGKKPGMAFSLLPTQQEIEKPKFLGRSRFSKPALKIIKEIILSGKSPQQIAQELKAPNSPLAQQLQLKISPQSPMQGLTHHDLDILTKCGDSWDNFHIPDTTTDFLLSTNQNSSYPNQSDKDTLIKKYIATSNNPIIRHRLELFYERLRLHLEKYGKPDFIALEFVREDFLGEEAKKKIQKIQNENKKLNSQAAEKVEELKLAGRQSILKYKLWQLQGGICLYTGKPIAQTEIESHEVEHIVPRNHPQTQGPDAQWNLVLTAREINDRKANRTPFEWFQQDPIAFQWPMGQPDASIPSQEKQRLWEAYCDRIKQRKKNLGNKRVKLLLSDKAPELVERYETLATTATIARMALRITDILFDWQNGNDAQGNKRVRVFPGGRTAAIRRRYLLNTLLGADSDQKLKTITDLQSEISQIKAQWPSLQGEEHKPTRKAYYQKRRQLAELIEGTKKDRSDARHHALDAMVLTFLPTWAQHPNKDEFFRFPPPLDNPYPQRPDILKVHQFFRDALNNVIPTPLAFEKARLADTAYGFRIINNKKKIAQRVAVEKLAYPGQEQKFDLAYLEGQIPSIADEKIRSMLTEIYNNIKSKTLQEAEQTWKDECAKLRLKTRDGSPGPFIKKVTQITDFHREYKDLSKDGTGAYYKGGDRHQGQFIYRDARGEFTVHPVYVHESIPQVKKALIEQNKTICIFVNSGCLVKTAQPIDPANYRKIIYENNKPKRITPEHPLPSGIYKWRTIIESSTSVTLENVFGEEFAINFCHLCKAGIQRL

SEQ ID NO: 72 - protein, 800 aa, unidentified
  REGION 1..800: note = Description of Unknown: uncultivated organism
  REGION 1..800: note = MG1-75 effector
MTESDPFQHKAILRKWENHEFYRSSVVLGLDVGLEGIGVYLRKGPRTLYEKTLLYQIPKTNALQDRRQSRAARRCRKNRRTRMTRLKALFERHGFPWFEGNDDALTRSDPFLLRHRATTKKLASREALGICIRHLVTHRRYEFFSDEGENPWGEEASLATEVKWLRTAYVDEKDADLLRTECRVLADVAGGRAEDKYEEFRQILEDRIVTERNNPILEMLESYAGEKRNHLRQKARGAVFPRRLVWSHLESICRRHGELFDDVDEFLRDLGAPRSRKDRAIFNYHRKTEEEMKAHWARKVGPCPYAEMLGLSSKLRRGVRGEMPIRRFSLLEFLVSRRIELSDGRLLLVPDSCIEMLFDWMERFEAAYRDQRTLPPMKKIREIVVGEMRKSTGQAPAPASKSEINKAFFEQIKGIMAPTASRRNARASLSCEAAEKLFEEATSSGLSRDSVNRQLQTYYQWRKRASSDFGLYPQVEFLLGRRRRRRAGEGEYAVSGRLQRIFSLPEVVEHLDGQASPDYCVIEVVGDIPRNEKERREKEQEIRKNQGRKEKLFERFNAADSAVGSAYKRVLLFDQQRGLCPYSGGELGDPLSSDLEIDHIFPRKRGGISVRENLVLTFADRNRDKGNLTPREAARKRNGWDWDEIEAATARMKWSRKKREIFEREGAGIPPLANVTRTAQLARQLVAECAHWMGIAGDPDEIQRRIGTPSGYMRAQALRSWEDTVPAKNRSDLVHHLVDAAVVAHIPPGAGMNQVSYGGIFYPSSVDGKDRARLAALPLGPGLRRWTAAEPLECSAAPPG

SEQ ID NO: 73 - protein, 953 aa, unidentified
  REGION 1..953: note = Description of Unknown: uncultivated organism
  REGION 1..953: note = MG1-76 effector
MGNGTIFSFDLGTGSIATCVRQDEEIKYIHVETLPGEFATLKETRERRRQIRTRLAHKQREEWWKIHAKEAGIEVLETGHLDEKGNFISPDPRLTCEFSKKGNPTIYNSLLLRIALLQGKKLEGWQIFKAIWNAIQRRGYDENIPWKHKLEAEKTEDDNEQENSKQTKGKKSKKKEDANSEDEEQKIRQAVIKYKEKLNNTFGDKEEYKYPSYLEAYLLGIWSPDEPDNLTKTISENPEPIRNKDGNIKLITPTELVEKELKQLLVKVGEQNEYIKKNLNYILYGPSGCRYGTYILPKYRRYIGKDREWEGLLSQKTPRFDNRIVYKCRLMPRFNVCKRKDLLSQEVIFLMKLKNFRFVDAETGEEKMLTPEQIQKMFNDFQNTLKINNRELKKYLKENFKGEIHPSFPAIDAPNTKGRASFCRPTLKIIKEIILSGKSPHTLYQEYTSSNTNTDPKKGLINNDYKFLLKMPTEWENFHIPDEREDEAQLNEDERIKVIYNILSKITNPVVRHRLLLFYRKLQYLKQEFGIPNIVMLEFARDPEELLAGEERKKKYLKLQKENRQKKEKAEKIYQELKNGNVNLKGRSILLKIQLWQEQNGIDPYSGEQIPQTKINLYEIDHIVPREMGGSDAYFNKVLTSPEKNREKAKRTPYQMFKGNISDWKKYLNTIEKITNLSKKKRALLTSENPEELIERYTHLAETAYISRLAQKICHLFFGWEQLTKGSQRKVFVVSGAFTRKIRTIFELDRILYPDLSDEEYKELLTKGEIQKKNRDNPRHHVLDTIVLSIIPEIKYNPEREKDDYPVWFNKEYCRQYIEKCFPRPIRFVKAKLAETIYGLRERNDYTEEEKKKGKKQYVFVTRFGTGTTLKELKEYDDLKFAKKNVESIYSYNIRQDLMKKLEEKPAPEEWKVFLHNYRAGGKPKKILVKASSYIDEEEVQKFLNGEIPNLGE

SEQ ID NO: 74 - protein, 898 aa, unidentified
  REGION 1..898: note = Description of Unknown: uncultivated organism
  REGION 1..898: note = MG1-77 effector
MTTPATIWAFDLGKGSLGEAVRDQQTNQFLHKATLLLPADLAQRGPATQAGTPASRYRALKVRQAHRERERWLDTVWQAAGLEVLQPRQTALVCELPPKRDDTGQPLFDQGHWALVGRADYRLEREFAPALGEKTRDGAPSDAAGANLCYTSCLLRIKLLRWKPGDPPLEEWQVYKALRSALQKRGYGRVPWAVKEARARGKTPEELEAEEQKQLEQADPRYREAAGKWPEFKRAVPVEFHFPCYYDAFHMGLWSPDQPDHLRLRPDHRAASTRNVRFDRADVRKELIALGNHAAAMLPQLQQAFERWQRDGWKFPHPVTGQELTKPVRARSFGEFLCDGPAGQPDETSFEAFLNQRREAGIRIGTFEEWMAALGQKTPKFDNRILAPCVLIPRYHACKVDARLEKDRAGRLTGRLVSDSLLASEVTLLLKLKNLLVADADTGQRKLTVEEVRDIFAFVQRRLKLLPLLTPEGEPVKEWPRKVADCFAINPSDWPKLAAETECLKGLARLTVSDNGAPRPLTREETEVLLHAVAGGRRAAQTALPAHLLPLVKKAEAAWKQAKQAVEGNILRPLPGHEEVKAPRTSGRSAYSRVALRILKELILSGDAPSAFHARLVQREPDLLQRLGPAPDQPLAIFDDSTASNETQRKQEDAENRKRGLLVSELNFLLQMRKDDGSPDSWENLFIPAQTIEALQQRHTEDGWLDADAAVRELLGTIKDPVVRHRLGVFDERLRKLRFGDARERLSGFGVPEAIVLEFVREDFMGEQAKRDLQSFQKRREQARAEAEAEAAKLGLGSRSRALRYELFKAQGGICLYTGRPLSETQLDQYEIDHIVPRSLGGPDAMVNYVLTFPEVNSAKEKGKLTPYALLHGTPHWDAYVARVKARAATLRNKKVQL

SEQ ID NO: 75 - protein, 1035 aa, unidentified
  REGION 1..1035: note = Description of Unknown: uncultivated organism with predicted taxonomy: Verrucomicrobia
  REGION 1..1035: note = MG1-78 effector
MSKTETVWAFDLGKGSMGEAVRQGNQFLHKASLLIPAEFAETRTARDRRRMWRTRQAHKARERWLDEVMTAAGIEVLKGRQVGKVDGKWVETAKGDPRLEREFAAPGDSTCYTSCLLRIKLLRGEKLEPWQIYKALHSAIQRRGYDPDIPWKTREQRQGKKSEDEEGKTLTRMQEFEKQLLAMSPDHPEYRWPCYFDAWKMGLWSPAKPDELKERLDFNAQTTRDQIVPRKVVEAEVRALVEAASQFYPSLKGKADYLLYGPPQRAYASYYVEQRKQHGLREGGVNDWQGVVGQKIPRFDNRIIGKCVLIPRLNVCKIRKGDDGKLHPQSRIVAETVFLMKLKNMRLQTAKGVTGLTAQQISKIFADPKRKKYGLTKTQWKQWCIKFGGMPLPGNQEEVEEPHFGGRSRFCRPALEIVKRLILSGDTPPMAYEKEVARLNGNTDPLKGLVKDDLKFLLQMGPTWEGIYIPNQKLDALTRSTEDANEAIRQLIGAQNDPIVRHRLTLFADRLNLLAEKHGTPDCVVLEFVREDFMGRKAKQEYLKFQRERAKERSEAREEAAKAGATEGAAGLKMELYKAQGGICLYTGEALSVTSLDEYVIDHIVPRAKGGPDSVMNYVLTTRRANDDKLDRTPYEWLSQTPGWDAYVERVKERAVTLRNKKVSLLTRPDADTLVDKYTALAETAWISKLAQTIISLRFGWPGGIANGERKIIVVSGGLTGRIRRKYKLNSLLNPDAKSEEEAEVKNRNDDRHHALDAMVISFIPNWARDAKKTGFFRFPDGIHRELFAKEIADVIPLNVCFEKPALAETIYGARNDHGAKVIVQRTALLSLAMKPTTPGKTTFDLKYAGKQAQSVRDPIIQKRLLEFIATNPDEATWRKFCAELHIKRKDGTAGPRVEYVTVTVGEPTEYKDMSKDGTGAYRKALKGHKGQFVFVDSKGKFKVRPVYAFESAQKVGQELTQKFGQNAIKGFFQSGCLVELTAPVPHSFTPLVPGQYKLNTIFTDGRAKLTDSTGKQSLPISLEKLFSAGFKRAR

SEQ ID NO: 76 - protein, 1333 aa, unidentified
  REGION 1..1333: note = Description of Unknown: uncultivated organism
  REGION 1..1333: note = MG1-79 effector
MPTTNPYVITHVTKNWMKDEFYDSALVLGLDIGIEGIGVWLRKGREPLFARTFMVSLPEAAPLKNRRAKRAQRHARQSLRRREAMLREWVVRYGLLPQEKTDGRWWKNPAVFERAFEHRHRAITTGVASPECLVVCIRHLLRHRGFDYHLTDEGAFPWGDELDDKEIIQWAKNSCCAPEYRTHLCNLIEADAAWAKNSDGSFTEKYLKVRQALDDAVREYENRPVERMLEQHMSEKNHPHLRPRARGRNFARELVKQHLYAICEKHRHFFAPGTFDQAMRELLGDQTGPSQWKLTWMDQDGKARQTILDYHRRTREEAEELWKRKVKKCPFAPLLFEKRHPTTPQHDCAVRSDPRIRRFNLLMFLAERRIELETHDAEGRLQNPRVNLDANVVRDLLGDLEQDIRAVEALRNKQSASRPDKPGKKTFEQRWRICNDCGKETGQDETGKSSCCKAKTKPKMPLAGVAKGSFNADFFDQLGDLLRPELRSLKGRASLSGEAAEVLFKLVTRNGTDFEPARIRQALEDCGYYDWRTNLPAGLGIYPQVTFLLGNRGHYDKDGNPRQIDKTTGNPVHHGILRRLFAGQLRLDDGTLVGLKDKLDDKVVPDYVVIETIGEIPKNQKEKKEFQDEIKANRSRKTDIIEKKYGLKLDSLSDWQVKQVLLFDQQANEEGEAFSPYSGVSLGTNPLAHDLEVEHIYPERRGGISVMDNLVITWRTENQTKGDRTPWEWAKDEGWRVDVHLQKMHWSANKRALFVRQESDPPQWDNTTRMAQLARHLRAEVIHWLGLDQIQDQKERNKEIARRIGTPTGFQTSVCRESWTPPHVFPQMYRLLCDKKGVPVRDRNGQERWVKDRTNLRHHLWDAAVLSHIPPGVGLNSADCGGIFVHRRDPQNGEWSVSALADLGPDLVAFEKANADRCLVVRLRQRKSKKSRYKETIFSLPDQQNRVFAREPLSKVVTSLLKSKKKNPDAELRKLLDRPGLLNPLEITNKKTGQTKQIKLLNKADVERWLSCKDVSLDQEGFRKFIEDVGVPTEQIPDDAVKAAFMKRNGETLLRKTFKPNSLVSFIRQKCRIKDSEIEARVEIAIAERNERTVLRAANGRDGQPGQVIRSILIEQDKLPPCGFGLHFNPTAKPKRGSEVAGFKPVDNSNSVVYLRREIWIGQRTKKKGRKTTVETFYKSRLIPHPRHLASYQKLHGQPWKADPLPLGMKLAGKLAVGDLLRIPLKKEKRNRNDNLIAKRGETPLESRFYRVKSMKTNCTIEFQMAEFAEPKLVKGQIPDPATERLLETYELTCSNEADLLWLLEVTTGKRIKLPPPVVENAPTTGKREGELL

SEQ ID NO: 77 - protein, 1035 aa, unidentified
  REGION 1..1035: note = Description of Unknown: uncultivated organism with predicted taxonomy: Verrucomicrobia
  REGION 1..1035: note = MG1-80 effector
MSKTETVWAFDLGKGSMGEAVRQGNQFLHKASLLIPAEFAETRTARDRRRMWRTRQAHKARERWLDEVMTAAGIEVLKGRQVGKVDGKWVETAKGDPRLEREFAAPGDSTCYTSCLLRIKLLRGEKLEPWQIYKALHSAIQRRGYDPDIPWKTREQRQGKKSEDEEGKTLTRMQEFEKQLLAMSPDHPEYRWPCYFDAWKMGLWSPAKPDELKERLDFNAQTTRDQIVPRKVVEAEVRALVEAASQFYPSLKGKADYLLYGPPQRAYASYYVEQRKQHGLREGGVNDWQGVVGQKIPRFDNRIIGKCVLIPRLNVCKIRKGDDGKLHPQSRIVAETVFLMKLKNMRLQTAKGVTGLTAQQISKIFADPKRKKYGLTKTQWKQWCIKFGGMPLPGNQEEVEEPHFGGRSRFCRPALEIVKRLILSGDTPPMAYEKEVARLNGNTDPLKGLVKDDLKFLLQMGPTWEGIYIPNQKLDALTRSTEDANEAIRQLIGAQNDPIVRHRLTLFADRLNLLAEKHGTPDCVVLEFVREDFMGRKAKQEYLKFQRERAKERSEAREEAAKAGATEGAAGLKMELYKAQGGICLYTGEALSVTSLDEYVIDHIVPRAKGGPDSVMNYVLTTRRANDDKLDRMPYEWLSQTPGWDAYVERVKERAVTLRNKKVSLLTRPDADTLVDKYTALAETAWISKLAQTIISLRFGWPGGIANGERKIIVVSGGLTGRIRRKYKLNSLLNPDAKSEEEAEVKNRNDDRHHALDAMVISFIPNWARDAKKTGFFRFPDGIHRELFAKEIADVIPLNVCFEKPALAETIYGARNDHGAKVIVQRTALLSLAMKPTTPGKTTFDLKYAGKQAQSVRDPIIQKRLLEFIATNPDEATWRKFCAELHIKRKDGTAGPRVEYVTVTVGEPTEYKDMSKDGTGAYRKALKGHKGQFVFVDSKGKFKVRPVYAFESAQKVGQELTQKFGQNAIKGFFQSGCLVELTAPVPHSFTPLVPGQYKLNTIFTDGRAKLTDSTGKQSLPISLEKLFSAGFKRAR

SEQ ID NO: 78 - protein, 1074 aa, unidentified
  REGION 1..1074: note = Description of Unknown: uncultivated organism
  REGION 1..1074: note = MG1-81 effector
MNSSRSPVTRFSTGLVFGFDVGTGSIGWAVRNGTEFLDVGVLVCPEETAKLDSRRGLRRQRRTLRSKKYRRQWFARELAGLLGLTLIRQGQSELPLPETAWEQNAKGGWVPKPGFESLRDPVALRVAAAEGEPLRPEELFTALVHLFRLRGYLADVPWANREVEAKESDAKKEEGEIRARMSALQAEMQAAGCELPCQLLALRANNGQRQRKEVWPRELVEKEFRAIVAAQATRHPTLAEKADWLLFGDCREVKSHRVFFKTTESRNPGVLGLKWPRFDNRGPALDALRPIDELGRPLHVVRKNKEAFSKAQWELAVMNFRVIDRQTGALVPPDARALARLREMWESSSRKRRAKKEAMSGTPAGSPETTPRVEIKVALLEKWAAEFANRYKLVEGQQSLTPQTGAGRARYSTPTLELIREQFERGIRFDPPQPVLRRPGESPQRALDRYLADIKHPLVRHRLLLFSRLLDKLVKQHGEPDLIVLEAVRSLALGEKNKRELLKRNKANRDQRESIRQELASRNASTSRNAILRYRLWKEALSTCPFCGDKITQEQLLRGEADIEHLVPRSVVDCNEFYNLTVGHVRCNRELKGDRTPFQAFGHTEKWPQLRDNAEKCFKGRKLEIFLSDNAEQLIEQKADLQHTAYIARIVRHVALIRLGWTGDDGRDPTIIKGNKPSSSFQVTNGQLTSRLRQAWGLNHILHPLPEGKRWDDLTDAEKEQMQQKNRGDLRHHALDAMVIACTLPWLAHRTVGATDPETGEHGWWQLDERTRRSLALNPVFPTEGQMRRVAEEWMQKVVVRHHVSRSPHQSAYATTIYGKKAPNTYVAREVFTTLTPKNLGSIWPPDFAAYCEAAWARYVEESPDIEAELKRSKGCVPESFTARLCFAHFQQWRELMKRGENVEFTWPETVKIPIRSVRLISVKDDTAVMRFAPGTPGYVKRTGFKEVRIHVSADGNSFVPVFVPYWKGDAIPPETPIKTGTRPVAVIRKGQVVGLKKPLAAGASAGHYRVIVLGQSQVSILPPHVANKDEAKLALGIPRTGIKPYWPEFIRALGYELPHPPSAQSPPPGALPT

SEQ ID NO: 79 - protein, 917 aa, unidentified
  REGION 1..917: note = Description of Unknown: uncultivated organism
  REGION 1..917: note = MG1-82 effector
MTPATTIWAFDLGKGSLGEAVRDLQTDQFLHTTTLLLPADLAQRGPARQAGTPASRYRAWKVRHAHRERERWLATVWRATGLTPLQTREVWQNPSTGRWELKHPADYRLEREFAPTLGEKTRDGAPSDEAGANLCYTSCLLRIKLLRWKPGDPPLEKWQVYKALRSAMQKRGYGRVPWAVKEARARGKTPEELEAEEQKQLEQADPRYREAAGKWPDFKRAVPAEFHFPCYYDALYMGLWSPDQPGHLRLRPDHRAASTRNVRFDRADVRKELIALGNNAAAMLPQLQQAFERWQHDGWKFLHPVTGQEVTYPVRARTFGEFLCDGPAGQPDETSFEAFLNQRREGGIRIGTFEEWMAALGQKTPKFDNRILAPCVLIPRYHACKVDARLEKDRAGRLTGKLVPDSLLASEVTLLLKLKNLLVADADKGQRKLTVEEIRDIFAFAQRRLRTLPLLNPKGEPVKEWPKKVANCFAITPSDWPKLAAETECLKGLARLTVSDNGTSRPLTSEEAEALLHAVAGGRRAAQTALPAHLLPLLKRAADTWRQAKQAAEGNVLRPLPGHEEVNAPRTSGRSAYSRVALRILKELILSGDAPSAFHARLVRREPVLLQRLGPAPDKPLAIFDDSTASNEAQRKQADAENRKRGLLVSELSFLRQMRKDDGSPDSWENLFIPAQTLEALQQRHTENGRLDADAAVRELLGTIKDPVVRHRLGVFDERLRKLRFGDAREGLPGFGVPEAIVLEFVREDFMGEEAKRRLRSFQRQREAERKRAREETAEAGATEKSAPLKYELLTAQGGLCLYCGQALTLKKLEQYAIDHIVPVGAQGSDALFNKVLAHQECNAAKGKQTPFEWLHGTPGWDAYVARVKARAATLRNKKVQLLTREDAPELVERYTALAETAWISKLAQTIVNLRFG

SEQ ID NO: 80 - protein, 1016 aa, unidentified
  REGION 1..1016: note = Description of Unknown: uncultivated organism
  REGION 1..1016: note = MG1-83 effector
DSAGKPQQTILDYHRKTPEEAKELWERKVKDCPFAPTLHQQDKLSTPKHKCSFRSDARIRRFNLLMFLAERRVELETEDAQGQRQNPCVNLDAEVVRQLMEDLEKDIHAVEALVNKQPAPRPDKPGKKNFEKRFNLSLAGVAKGSFNADFFDQLGDLLRPELRSLRQRASLSGEAAEVLYQLATNNGTTFEPVKVRQALEECDYYHWRANPPHGLGIYPQVAFLLGQRGHYDDEGNPTDKDKAGNPVHHGILRRLFAGQLRLDDGTGQGAKLIDLCEHLDGKTVPDYVIIETIGDIPRNQKEKKEFKDEIKANRSRKTDIIEKKYNLKLDSLSDWQVKQVLLFDQQANDDGEAFSPYTGASLGKNPLAHGLEVEHIYPERRGGISIMDNLVITWRTENQTKGDQTPWEWLGQRATAQLQKMHWNRDKRALFVREESEPPQWDNTTRMAQIARYLRVEIIHWLGLDRIKNEMERNKQIAGRIGTPTGFQTSICRESWTPRTVFPQMYRLLHDKKGIPVRDQHGRERWVKDRTNLRHHLWDAAVLSHIPPREGLNSADCGGIFVHRRDQQTGEWRVSALPNLGPDLVAFEKENEGRCLVAHLRQRKSKRSRYKDTIFGLPDREQKHFAREPLDKVVAGLLKSKKKNPDVQLRKLLDRPGFLKPLEIKNKKTGEMKRIQLLREEDLTRWLSCKDISLDPQEFRDFIAKLGVPAECVTDEAVAEQFLNSKTGESRPKWNFKPTQIIAFIRKCGVKEDKLPNSRVEDAIRARKECTVLRASNGRDGQQGQAIRRIPIEQDKLPPCGFGLHFNPTAEAKHGNAIAGFKAVDNSNSIVYLRREIWIGQKWKKKGKDKVASTFYESRLIPHPRHLAAYEKLHGQPWKSEPLPAGMSLAGCLAVGDLLRVPLKKEKKNAGDNLIAKRGEPPVEWKFYRVKSLRTEGPVEFQLAEFTEPKLAKDQIPDAATKRLLDICELSSRKDADLLWLLEATTGQEVQPLPPCDEPPPVSPTKPATKTGDELL

SEQ ID NO: 81 - protein, 1062 aa, unidentified
  REGION 1..1062: note = Description of Unknown: uncultivated organism with predicted taxonomy: Coraliomargarita sp. CAG:312
  REGION 1..1062: note = MG1-84 effector
MNNNNTQIWGFDIGKASLGEAVWCGGEFKHVESLILDKDFAEIKTSAGRRRQARTRKAHKAREEWLEKCLEDCGIEILKRRKVGIVNGQWKLISKGDARLEKEFPAEGEEVCYNSIALRCKLILGEKLESWQIFKALNSSIQHRGYDENIPWKETQNESKKEDGDYFKKIVLYESEKEDILNRLPQECKREDFDFPCFFKAKKMGIWSEENPYKVGLRISNNAQKAKGYVIPRKYVENEFVRLVQMASLQYPKLKDKQMFILYGISETPYASLFKDARKKFGLKRGADSDWTALGQKIPRFDNRMIGKCKLIPRLNTCKIKSPDKIKSEEDLLHYDITLALKLLNLRFFKDSEICALSFEEFKKLFEIGKSNKYKISKTDLKKFLKSIGASVLSQDHSEIEAPRTSGRSSFSRPAMKILKELIFSGEPPSKFLKAKIDKIANTDPNKGIIREDLDFIRIMGDCPWNGIFIPDVETYKYASQTQESSEAQINKLIGSQNDPIVRHRLSFFYERIKALSEKFGVPDKIVLEFVREDFMGKQAKKDLSLSMKKRFEEKIDIAKKLDDIGYKGNKMLLKMELLQKQGFACLYTGEALQETDLPILEIEHIVPRSLGGPDAAYNYVLTSESTNKAKGNQTPYKWLSPDRDKWRAYTERVRARAAELGSKRCRLLLSENAEELINKYTALAETAWISKLAQRIVCMHFGFQFGGNTGEKRVFTVPGNITAKIRSAFGLNKILHNIDADKKNMSEFDIVKLDYELDKKNRKNKKHHALDAMCLCFAPTGPNAQKLGIGALLPPEIAAKAEEFFRGYIEKVVPNEVAPKKPKLEESIYSKRTINRKECIVRKFNLVDLAYKSGLKPVYDISAIEKLLEDKPKKIPPIINPTVRRIVRDFVSTNPNEDEWRNWCKTVRMPSKNRNGTRIIRVLVYVGTPEEYKDLSKDGCGAFRKGDSHKGQIIWMDKNGRYKVSPVYVHSSKSQTMESIKSNPDFIKIAGFFKSHCLVEIESPVVNGKRDVLLSPGTYMINTIMAAGMAILSDTNGVKSPAININYLMNAGMRRISIKYK

SEQ ID NO: 82 - protein, 1080 aa, unidentified
  REGION 1..1080: note = Description of Unknown: uncultivated organism with predicted taxonomy: unclassified Verrucomicrobia (miscellaneous)
  REGION 1..1080: note = MG1-85 effector
YIVDFCSHCKYFNNNKKFNKNMEKEKNNHVWGFDIGKGSLGEAVRIGGDFKHIASVLLDPEFGEIKTAALARRQMRTRKAHKAREKWLEECLEGTGVEILKRREVGIVDGQWQLISKGDERLEREFPPSGEDVCYNSIALRCKLLLGEKLEGWQVFKALNSAIQKRGYDENIPWGEAEEKSSKKDDDDYAQKLSQYEKEKSELFESFADGEKYDFPCFFKAYKMGLWSPENPTRVEVRIDCRAQKAKSYVIARKYVEREFECLVEAAAKFFPKLKGRAKFILYGVSETPYASYYGNMRKKFGLKRGAESDWTALGQKVPRFDNRIIDKCRFIPRMNVCKIRPLNEARNEKDLLYYEVTLALKLLNLRFFRNSNIEQLTFEEFKKAFEIAAGAKYKMTKTAMKKFLKSISATALGDDYAEIEPPKESGRASFSRPAMEILKELIFSGMPPREFYGRKISEISNTDKNKGVVSSDLDFIKLMGDCPWGGIFIPDVQTYQFANAAFPDPDAQINKLIGSQNNPIVRHRLTFFFERIKFLESKYGVPDKVVLEFVRDDFMGEKEKKEMRIAMKKRAEEKMRIAKDLDEHGFKGGNLLLKMELYRKQNGICLYTGDALPLSELATLEIEHIVPRSRGGPDAQYNYVITREKTNKLKGDKTPYEWLSSDAKEWASYTDRVNACAKALGKKRCRLLLEKDAEELVEKYTALAETAHIAKLAQKIVCMHFGFQFGGLSGTKRVFTVPGALTSRIRKFYGLDRILHNSAAESENLSFEEFLKFSEDLEKKNRKNKKHHALDAMCLCFAPTGVDSRRAKLGEILPEKLRSEKAAREFFKSYLDKIMPVDVAPKKPRLEDGIYSKRIIGGKACMVKRNNLVDLAYKSGLKPVFDIPTLIKLVDKKEKGIINPQIRKMIGEFAATNPDESAWRKWCEEVRLPSKSGLGARIMRVLVYYGEADEYKDLSKDGYGAYRKGDGHKGQVIWESVDGKYYVEPVYVHASKAGVMAALNANPKKKRICGMFNSHCTVDVGDVYNDKGDFILPAGRYMVNTIQKNGQCVLTNADGEKRNPININYLMRAGMRRVDLSEL

SEQ ID NO: 83 - protein, 1062 aa, unidentified
  REGION 1..1062: note = Description of Unknown: uncultivated organism with predicted taxonomy: Coraliomargarita sp. CAG:312
  REGION 1..1062: note = MG1-86 effector
MNNNNTQIWGFDIGKASLGEAVWCGGKFKHVESLILDKDFAEIKTSAGRRRQARTRKAHKAREEWLEKCLEDCGIEILKRRKVGIVNGQWKLISKGDARLEKEFPAEGEEVCYNSIALRCKLILGENLESWQIFKALNSSIQHRGYDENIPWKETQNESKKEDGDYFKKIVLYESEKEDILNRLPQECKREDFDFPCFFKAKKMGIWSEENPYKVGLRISNNAQKAKGYVIPRKYVESEFVRLVQMASLQYPKLKDKQMFILYGISETPYASLFKDARKKFGLKRGADSDWTALGQKIPRFDNRMIGKCKLIPRLNTCKIKSPDKIKSEEDLLHYDITLALKLLNLQFFKDSEICALSFEEFKKLFEIGKSNKYKISKTDLKKFLKSIGASVLSQDHSEIEAPRTSGRSSFSRPAMKILKELIFSGEPPSKFLKAKIDKIANTDPNKGIIREDLDFIRIMGDCPWNGIFIPDMETYKYASQTQESSEAQINKLIGSQNDPIVRHRLSFFYERIKALSEKFGVPDKIVLEFVREDFMGKQAKKDLSLSMKKRFEEKIDIAKKLDDIGYKGNKMLLKMELLQKQGFACLYTGEALQETDLPVLEIEHIVPRSLGGPDAAYNYVLTSESTNKAKGNQTPYKWLSPDRDKWRAYTERVRARAAELGSKRCRLLLSENAEELINKYTALAETAWISKLAQRIVCMHFGFQFGGNTGEKRVFTVPGNITAKIRSAFGLNKILHNIDADKKNMSEFDIVKLDYELDKKNRKNKKHHALDAMCLCFAPTGPNAQKLGIGALLPPEIAAKAEEFFRGYIEKVVPNEVAPKKPKLEESIYSKRTINRKECIVRKFNLVDLAYKSGLKPVYDISAIEKLLEDKPKKIPPIINPTVRRIVRDFVSTNPNEDEWRNWCKTVRMPSKNRNGTRIIRVLVYVGTPEEYKDLSKDGCGAFRKGDSHKGQIIWMDKNGRYKVSPVYVHSSKSQTMESIKSNPDFIKIAGFFKSHCLVEIESPVVNGKRDVLLSPGTYMINTIMAAGMAILSDTNGVKSPAININYLMNAGMRRISIKYK

SEQ ID NO: 84 - protein, 1073 aa, unidentified
  REGION 1..1073: note = Description of Unknown: uncultivated organism with predicted taxonomy: Verrucomicrobia
  REGION 1..1073: note = MG1-87 effector
MYTKEIIWGFDIGKGSLGEAVRVGNEFKHVQSLEIAPDFAETKTTAAARRAWRTREAHKAREFWLEKCLSEAGIEVLLRRKVGVVDGAWKLVSKGDVRLEREFPPAGEDLCYNSIALRCKLLLGEKLESWQVFKALNSAIQNRGYDANIPWGDEDAADGGDGSSRKSSDSDASGDGESYAEKLAHYEREFDGILAELDNREKYEFPCFFKAAKMGLWSPENPDFVGVRIDNTAEKAKGYVVPREAVVREFRALVNAAALQYPNLKGKADFIMFGRACEPYASYNPELRKRFGLKRGAATDWTALGQKTPRFDNRVIDKCKLIPRLNVCKIKPLDECKTDDDFLSYTITLSLKLLNLRFFRGAGVDSLSFDEFLRAFELVKNSKFKLGKAALKKFFKTIGAEVMDESQSEIEQPRNGGRAAFSRPAMRILRDLIFSGKSPAEFYATAIENIANTDKNKGLVAGDLDFLKLMGDAPWSGIFIPDVGLSDFADASEAAREAQINKLIGSQNDPIVRHRLSFFYERIKSLEAKFGVPDKIVLEFVRDDFLGKKAKSDLNKAIKTRFDEKKKLAEDLDSKREEFGFKYASKKMLLKFELYKKQGGECVYTGNALPLSELESLEIEHIVPRSRGGPDAMYNYVLTDEKTNKEKGDRTPFEWRSTMGAEWESYCERVRKLTKELGAKRCKLLLSPNAAELVEKYTALAETAWISKLAQRICCLHFGFQFGGLAGAKKVWTVSGNTTAMIRGRYGLNRLLHDEESAEDLSLFDRICMEKKFEEKNRKNKKHHALDAMCLCFAPTSNAKKASAYKNILPEEITRNPESDEARKFFGKYLASVIPNKVAVKKSALEQTIYALRKGRIVKKCNVRDLAYTGINPKYNYSTLVKSIKSIVGEVPKRIVSDFVLSNSDLSESEWEDWCKNNAAIPSKNGAPTKLLRVLCDAGNPEEYKDLSKDGCGAYRKGDSHKGQFIWKTKQGRYVVAPVYAHASKAKVLASLKNNPDCAEVCGFFRQNCLVEIPNDVVDKSGKMLLKSGIYKSNSIRADGYGYLENSDGISSKPISIQYLMPAGMKRIKLDII

SEQ ID NO: 85 - protein, 1059 aa, unidentified
  REGION 1..1059: note = Description of Unknown: uncultivated organism with predicted taxonomy: unclassified Verrucomicrobia (miscellaneous)
  REGION 1..1059: note = MG1-88 effector
MEKEKNNHVWGFDIGKGSLGEAVRIGGDFKHIASVLLDPEFGEIKTAALARRQMRTRKAHKAREKWLEECLEGTGVEILKRREVGIVDGQWQLISKGDERLEREFPPSGEDVCYNSIALRCKLLLGEKLEGWQVFKALNSAIQKRGYDENIPWGEAEEKSSKKDDDDYAQKLSQYEKEKSELFESFADGEKYDFPCFFKAYKMGLWSPENPTRVEVRIDCRAQKAKSYVIARKYVEREFECLVEAAAKFFPKLKGRAKFILYGVSKTPYASYYGNMRKKFGLKRGAESDWTALGQKVPRFDNRIIDKCRFIPRMNVCKIRPLNEARNEKDLLYYEVTLALKLLNLRFFRNSNIEQLTFEEFKKAFEIAAGAKYKMTKTAMKKFLKSISATALGDDYAEIEPPKESGRASFSRPAMEILKELIFSGMPPREFYGRKISEISNTDKNKGVVSSDLDFIKLMGDCPWGGIFIPDVQTYQFANAAFPDPDAQINKLIGSQNNPIVRHRLTFFFERIKFLESKYGVPDKVVLEFVRDDFMGEKEKKEMRIAMKKRAEEKMRIAKDLDEHGFKGGNLLLKMELYRKQNGICLYTGDALPLSELATLEIEHIVPRSRGGPDAQYNYVITREKTNKLKGDKTPYEWLSSDAKEWASYTDRVNACAKALGKKRCRLLLEKDAEELVEKYTALAETAHIAKLAQKIVCMHFGFQFGGLSGTKRVFTVPGALTSRIRKFYGLDRILHNSASESENLSFEEFLKFSEDLEKKNRKNKKHHALDAMCLCFAPTGVDSRRAKLGEILPEKLRSEKAAREFFKSYLDKIMPVDVAPKKPRLEDGIYSKRIIGGKACMVKRNNLVDLAYKSGLKPVFDIPTLIKLVDKKEKGIINPQIRKMIGEFAATNPDESAWRKWCEEVRLPSKSGLGARIMRVLVYYGEADEYKDLSKDGCGAYRKGDGHKGQVIWESVDGKYYVEPVYVHASKAGVMAALNANPKKKRICGMFNSHCTVDVGDVYNDKGDFILPAGRYMVNTIRSDNQCVLTNADGEKRNPININYLMRAGMRRVDLSEL

SEQ ID NO: 86 - protein, 1059 aa, unidentified
  REGION 1..1059: note = Description of Unknown: uncultivated organism with predicted taxonomy: unclassified Verrucomicrobia (miscellaneous)
  REGION 1..1059: note = MG1-89 effector
MEKEKNNHVWGFDIGKGSLGEAVRIGGDFKHIASVLLDPEFGEIKTAALARRQMRTRKAHKAREKWLEECLEGTGVEILKRREVGIVDGQWQLISKGDERLEREFPPSGEDVCCNSIALRCKLLLGEKLEGWQVFKALNSAIQKRGYDENIPWGEAEEKSSKKDDDDYAQKLSQYEKEKSELFESFADGEKYDFPCFFKAYKMGLWSPENPTRVEVRIDCRAQKAKSYVIARKYVEREFECLVEAAAKFFPKLKGRAKFILYGVSETPYASYYGNMRKKFGLKRGAESDWTALGQKVPRFDNRIIDKCRLIPRMNVCKIRPLNEARNEKDLLYYEVTLALKLLNLRFFRNSNIEQLTFEEFKKAFEIAAGAKYKMTKTAMKKFLKSISATALGDDYAEIEPPKESGRASFSRPAMEILKELIFSGMPPREFYGRKISEISNTDKNKGVVSSDLDFIKLMGDCPWGGIFIPDVQTYQFANAAFPDPDAQINKLIGSQNNPIVRHRLTFFFERIKFLESKYGVPDKVVLEFVRDDFMGEKEKKEMRIAMKKRAEEKMRIAKDLDEHGFKGGNLLLKMELYRKQNGICLYTGDALPLSELATLEIEHIVPRSRGGPDAQYNYVITREKTNKLKGDKTPYEWLSSDAKEWASYTDRVNACAKALGKKRCRLLLEKDAEELVEKYTALAETAHIAKLAQKIVCMHFGFQFGGLSGTKRVFTVPGALTSRIRKFYGLDRILHNSAAESENLSFEEFLKFSEDLEKKNRKNKKHHALDAMCLCFAPTGVDSRRAKLGEILPEKLRSEKAAREFFKSYLDKIMPVDVAPKKPRLEDGIYSKRIIGGKACMVKRNNLVDLAYKSGLKPVFDIPTLIKLVDKKEKGIINPQIRKMIGEFAATNPDESAWRKWCEEVRLPSKSGLGARVMRVLVYYGEADEYKDLSKDGCGAYRKGDGHKGQVIWESVDGKYYVEPVYVHASKAGVMAALNANPKKKRICGMFNSHCTVDVGDVYNDKGDFILPAGRYMVNTIRSDNQCVLTNADGEKRNPININYLMRAGMRRVDLSEL

SEQ ID NO: 87 - protein, 1059 aa, unidentified
  REGION 1..1059: note = Description of Unknown: uncultivated organism with predicted taxonomy: unclassified Verrucomicrobia (miscellaneous)
  REGION 1..1059: note = MG1-90 effector
MEKEKNNHVWGFDIGKGSLGEAVRIGGDFKHIASVLLDPEFGEIKTAALARRQMRTRKAHKAREKWLEECLEGTGVEILKRREVGIVDGQWQLISKGDERLEREFPPSGEDVCYNSIALRCKLLLGEKLEGWQVFKALNSAIQKRGYDENIPWGEAEEKSSKKDDDDYAQKLSQYEKEKSELFESFADGEKYDFPCFFKAYKMGLWSPENPTRVEVRIDCRAQKAKSYVIARKYVEREFECLVEAAAKFFPKLKGRAKFILYGVSETPYASYYGNMRKKFGLKRGAESDWTALGQKVPRFDNRIIDKCRFIPRMNVCKIRPLNEARNEKDLLYYEVTLALKLLNLRFFRNSNIEQLTFEEFKKAFEIAAGAKYKMTKTAMKKFLKSISATALGDDYAEIEPPKESGRASFSRPAMEILKELIFSGMPPREFYGRKISEISNTDKNKGVVSSDLDFIKLMGDCPWGGIFIPDVQTYQFANAAFPDPDAQINKLIGSQNNPIVRHRLTFFFERIKFLESKYGVPDKVVLEFVRDDFMGEKEKKEMRIAMKKRAEEKMRIAKDLDEHGFKGGNLLLKMELYRKQNGICLYTGDALPLSELATLEIEHIVPRSRGGPDAQYNYVITREKTNKLKGDKTPYEWLSSDAKEWASYTDRVNACAKALGKKRCRLLLEKDAEELVEKYTALAETAHIAKLAQKIVCMHFGFQFGGLSGTKRVFTVPGALTSRIRKFYGLDRILHNSAAESENLSFEEFLKFSEDLEKKNRKNKKHHALDAMCLCFAPTGVDSRRAKLGEILPEKLRSEKAAREFFKSYLDKIMPVDVAPKKPRLEDGIYSKRIIGGKACMVKRNNLVDLAYKSGLKPVFDIPTLIKLVDKKEKGIINPQIRKMIGEFAATNPDESAWRKWCEEVRLPSKSGLGARVMRVLVYYGEADEYKDLSKDGCGAYRKGDGHKGQVIWESVDGKYYVEPVYVHASKAGVMAALNANPKKKRICGIFNSHCTVDVGDVYNDKGDFILPAGRYMVNTIRSDNQCVLTNADGEKRNPININYLMRAGMRRVDLSEL

SEQ ID NO: 88 - protein, 874 aa, unidentified
  REGION 1..874: note = Description of Unknown: uncultivated organism
  REGION 1..874: note = MG1-91 effector
MVKRVARLRQTFWRDTENPDVVKIRIDNTAEKAKGYVVPRSAVIAEFRALVDAAAKQYPALKGKADFIMFGVSEEPYASYNPELRKKFGLKRGAESDWTALGQKTPRFDNRVIDKCKLIPRLNVCKIKPLPECRTDDDFLPYETTLALKLLNLRFFRGAGVDSLSFDEFLRAFEIAKNNKFELNKTNLKKFFKSIGAEVIDESQSKIEQPRSSGRASFSRPAMRILRNLVFSGKSPAEFYETELVKITNTDKNRGIVAEDIKFLKLMGNVPWGGIFVPDVGVFDFADSTECSRAVQINKLIGMQNDPIVRHRLSFFYGRIKSLDAEFGTPDKIVLEFVRDDFLGKKAKADLSKAINDRAKEKKKYAEELDSQRENFGPKYASKKMLLKYELYSKQKGECIYTGRALGFSDLEQLEVEHIVPRSRGGPDALYNYVLTDEKTNKDKGDRTPFEWLSSKGVEWDAYRDRVRGLTKELGAKRCKLLLSPNAEELVEKYTALAETAWISKLAQRICCIHFGFQFGGLTGEKKVWTVSGNTTAMIRSRYGLNRLLHNEDVPKDISLSERLKLESEFERKNRDNKKHHALDAMCLCYAPTSNTRRAASYKNILPAEITRNPESDEARRFFGGYLANVIPNKVAIEKPTLEQTIYAKRLINGKETIVKKCNVRDLAYAGRNPQYSYLTLVKNIKCIVGKVSKNIISDFVLSNPDLNESEWENWCKYDAVIPSKNGAPTKLLRVLCGARNPEEYKDLSKDGCGAYRKGNLHKGQFVWKTKQGCYVVTPVYAFESKIKVWDDMRRDPNCEEICGFFRQNCLVEIPNDVYDSKGVLKLKAGVYRSNTIRADGFVKLTNSDGFSPNPISIQYLMSAGMKRITLNTI

SEQ ID NO: 89 - protein, 1077 aa, unidentified
  REGION 1..1077: note = Description of Unknown: uncultivated organism with predicted taxonomy: unclassified Verrucomicrobia (miscellaneous)
  REGION 1..1077: note = MG1-92 effector
MSLYFIEQISDWKIMKVMEDEGGNHIWGFDIGKGSLGEAVLDGSEFKHVASLLLDADFGEIETAAGLRRQMRTRKAHKAREKWLESCLSGFGIETLKRREVGIVNGQWTLISKGDERLEREFPPDGENICYNSIALRCKLLLGEKLEGWQIFKALNSAIQNRGYDENIPWKESDASPSKKEGGDYAQKLSQYSREKSELFESFEGGEKYDYPCFFKAYKMGLWSPDNPERVEVRIGSDAQKAKDYVIPRKDVEREFERLVEAASKWYPAMKGKAMYIMYGIAETPYASYKPLLRKKFDLKRGAESDWTALGQKIPRFDNRIIDKCRLIPRLNVCKIRPLSEIRGEADLLHYEITLSLKLLNLRFFRNSNVESLSFGEFKAAFEIAKGAKYKMGKAALKKFLKSISASVLSEDQSEIEAPRESGRAAFSRPAMLLLKELIFSGMTPAEFYAKKSGEISNADPNKGLVASDLDFIKLMGNCGWSGIFIPDVDTFHFANKGAEPAKLINELIGSQNNPIVRHRLSFFYERIKFLESKFGIPDKVVLEFVREDFMGKEQKKRMQIEMKKRASEKMLIAKKLDEAGYKGGNLLLKMELLEKQGGVCLYTGEPLLPSELGVLEIEHIVPRSRGGPDAQYNYVLTREKTNKEKADRTPFEWLSSDPVKWAGYSDRVKARAGQLGRKRCELLLEKNAEELVEKYTALAETAHISKLAQKIVCLHFGFQFGGLSGTKRVFTVPGSLTARIRTFYGLNKILHNEDLAHETLSYEGFLKRGEELDKKNRANKKHHALDAMCLCFAPTGVNSKRARVDMLLPPKIRSEKDAELFFRKYLDKLIPVDVAPKKPKLEDGIYSMRMVGGKKIMARRVNLVDLAYKGGQGQKPVYDISVLMDKKNPKEKKIINPQIRKLVADFARTNPSEDEWKKWCGECRLPSKNGLGTRVIRVLLNYGEPAEYKDLSKDGCGAFRKGKEHKGQIVWESTDGKYYVLPIYVHASKAKLLAELCANPKKKRICGIFTSHCMVKVGNTYNNKGELLLPEGVYMLNTIQTDGRGKLTNANGEKSNLININYLMKAGMKKVSIKEL

SEQ ID NO: 90 - protein, 1059 aa, unidentified
  REGION 1..1059: note = Description of Unknown: uncultivated organism with predicted taxonomy: unclassified Verrucomicrobia (miscellaneous)
  REGION 1..1059: note = MG1-93 effector
MEKEKNNHVWGFDIGKGSLGEAVRIGGDFKHIASVLLDPEFGEIKTAALARRQMRTRKAHKAREKWLEECLEGTGVEILKRREVGIVDGQWQLISKGDERLEREFPPSGEDVCYNSIALRCKLLLGEKLEGWQVFKALNSAIQKRGYDENIPWGEAEEKSSKKDDDDYAQKLSQYEKEKSELFESFADGEKYDFPCFFKAYKMGLWSPENPTRVEVRIDCRAQKAKSYVIARKYVEREFECLVEAAAKFFPKLKGRAKFILYGVSETPYASYYGNMRKKFGLKRGAESDWTALGQKVPRFDNRIIDKCRLIPRMNVCKIRPLNEARNEKDLLYYEVTLALKLLNLRFFRNSNIEQLTFEEFKKAFEIAAGAKYKMTKTAMKKFLKSISATALGDDYAEIEPPKESGRASFSRPAMEILKELIFSGMPPREFYGREISEISNTDKNKGVVSSDLDFIKLMGDCPWGGIFIPDVQTYQFANAAFPDPDAQINKLIGSQNNPIVRHRLTFFFERIKFLESKYGVPDKVVLEFVRDDFMGEKEKKEMRIAMKKRAEEKMRIAKDLDEHGFKGGNLLLKMELYRKQNGICLYTGDALPLSELATLEIEHIVPRSRGGPDAQYNYVITREKTNKLKGDKTPYEWLSSDAKEWASYTDRVNACAKALGKKRCRLLLEKDAEELVEKYTALAETAHIAKLAQKIVCMHFGFQFGGLSGTKRVFTVPGALTSRIRKFYGLDRILHNSAAESENLSFEEFLKFSEDLEKKNRKNKKHHALDAMCLCFAPTGVDSRRAKLGEILPEKLRSEKAAREFFKSYLDKIMPVDVAPKKPRLEDGIYSKRIIGGKACMVKRNNLVDLAYKSGLKPVFDIPTLIKLVDKKEKGIINPQIRKMIGEFAATNPDESAWRKWCEEVRLPSKSGLGARIMRVLVYYGEADEYKDLSKDGCGAYRKGDGHKGQVIWESVDGKYYVEPVYVHASKAGVMAALNANPKKKRICGMFNSHCTVDVGDVYNDKGDFILPAGRYMVNTIQKNGQCVLTNADGEKRNPININYLMRAGMRRVELSEL

SEQ ID NO: 91 - protein, 762 aa, unidentified
  REGION 1..762: note = Description of Unknown: uncultivated organism with predicted taxonomy: unclassified Verrucomicrobia (miscellaneous)
  REGION 1..762: note = MG1-94 effector
NRIIGKCKLIPRLNVCKIKPLKECKTEDDFLPHTITLALKLLNLRFFRGAGIDSLSFDEFLRAFEIARQNKFALNKTNLKKFFKTIGAEIMDENQSSVEQPREGGRASYSRPAMRLLRDLIFSGKSPAEFYASRICKIENTDKNRGLVAEDLAFIKLMGDIPWNGIFVPDVDTFNFANIRESERADKINKLIGSQNDPIVRHRLAFFYERIKLLESKFGAPDKIVLEFVRDDFLGSKAKKEMSQGIKKRFEEKKKLAEELDSQRAEFGNKYASKKMLLKFELYKKQRGRCVYTDNALPLSELENLEVEHIFPRSRGGADAMYNYVLTDENTNKQKGDRTPFEWLSSDKTKWESYCDRVRSLTQSLGAKRCKLLVSPNAEELMQKYTALAETAWISKLAQKICCIHFGFQFGGLKGEKKVWTVSGNTTAMIRGRYGLNRLLHNEEISEDLPLLDRIVKEKNFEEKNRDNKKHHALDAMCICFAPTSNAKKALSRKNILPEEIAKNPESDDARNFFAKYLEEVVPTKVAIKKPELEQTIYSKRVIGGRQTIVKKCNVRDLAYKGQNPKYDFDTLTKRIKDIINPVSKRVIEDFAKTEPTEAEWEDWCKYEAAIPSKNGSPTRLLRVLVEIGNPEEYKDLSKDGCGAYRKGDSHKGQFIWKNKKGRYIVAPIYAHASKAKVLDDLQNNPDCAEICGFFRTNCLVKIPNDVADKDGKFLLKAGFYKSNTIMASGSVKLTDPNGIIKIVGIQHLMNAGMKRVETNTI

SEQ ID NO: 92 - protein, 1062 aa, unidentified
  REGION 1..1062: note = Description of Unknown: uncultivated organism with predicted taxonomy: Coraliomargarita sp. CAG:312
  REGION 1..1062: note = MG1-95 effector
MNNNNTQIWGFDIGKASLGEAVWCGGKFKHVESLILDKDFAEIKTSAGRRRQARTRKAHKAREEWLEKCLEDCGIEILKRRKVGIVNGQWKLISKGDARLEKEFPAEGEEVCYNSIALRCKLILGEKLESWQIFKALNSSIQHRGYDENIPWKETQNESKKEDGDYFKKIVLYESEKEDILNRLPQECKREDFDFPCFFKAKKMGIWSEENPYKVGLRISNNAQKAKGYVIPRKYVESEFVRLVQMASLQYPKLKDKQMFILYGISETPYASLFKDARKKFGLKRGADSDWTALGQKIPRFDNRMIGKCKLIPRLNTCKIKSPDKIKSEEDLLHYDITLALKLLNLRFFKDSEICALSFEEFKKLFEIGKSNKYKISKTDLKKFLKSIGASVLSQDHSEIEAPRTSGRSSFSRPAMKILKELIFSGEPPSKFLKAKIDKIANTDPNKGIIREDLDFIRIMGDCPWNGIFIPDVETYKYASQTQESSEAQINKLIGSQNDPIVRHRLSFFYERIKALSEKFGVPDKIVLEFVREDFMGKQAKKDLSLSMKKRFEEKIDIAKKLDDIGYKGNKMLLKMELLQKQGFACLYTGEALQETDLPILEIEHIVPRSLGGPDAAYNYVLTSESTNKAKGNQTPYKWLSPDRDKWRAYTERVRARATELGSKRCRLLLSENAEELINKYTALAETAWISKLAQRIVCMHFGFQFGGNTGEKRVFTVPGNITAKIRSAFGLNKILHNIDADKKNMSEFDIVKLDYELDKKNRKNKKHHALDAMCLCFAPTGPNAQKLGIGALLPPEIAAKAEEFFRGYIEKVVPNEVAPKKPKLEESIYSKRTINGKECIVRKFNLVDLAYKSGLKPVYDISAIEKLLEDKPKKIPPIINPTVRRIVRDFVSTNPNEDEWRNWCKTVRMPSKNRNGTRIIRVLVYVGTPEEYKDLSKDGCGAFRKGDSHKGQIIWMDKNGRYKVSPVYVHSSKSQTMESIKSNPDFIKIAGFFKSHCLVEIESPVVNGKGDVLLSPGTYMINTIMAAGMAILSDTNGVKSPAININYLMNAGMRRVSIKYK

SEQ ID NO: 93 - protein, 1059 aa, unidentified
  REGION 1..1059: note = Description of Unknown: uncultivated organism with predicted taxonomy: unclassified Verrucomicrobia (miscellaneous)
  REGION 1..1059: note = MG1-96 effector
MEKEKNNHVWGFDIGKGSLGEAVRIGGDFKHIASVLLDPEFGEIKTAALARRQMRTRKAHKAREKWLEECLEGTGVEILKRREVGIVDGQWQLISKGDERLEREFPPSGEDVCYNSIALRCKLLLGEKLEGWQVFKALNSAIQKRGYDENIPWGEAEEKSSKKDDDDYAQKLSQYEKEKSELFESFADGEKYDFPCFFKAYKMGLWSPENPTRVEVRIDCRAQKAKSYVIARKYVEREFECLVEAAAKFFPKLKGRAKFILYGVSETPYASYYGNMRKKFGLKRGAESDWTALGQKVPRFDNRIIDKCRLIPRMNVCKIRPLNEARNEKDLLYYEVTLALKLLNLRFFRNSNIEQLTFEEFKKAFEIAAGAKYKMTKTAMKKFLKSISATALGDDYAEIEPPKESGRASFSRPAMEILKELIFSGMPPREFYGRKISEISNTDKNKGVVSSDLDFIKLMGDCPWGGIFIPDVQTYQFANVAFPDPDAQINKLIGSQNNPIVRHRLTFFFERIKFLESKYGVPDKVVLEFVRDDFMGEKEKKEMRIAMKKRAEEKMRIAKDLDEHGFKGGNLLLKMELYRKQNGICLYTGDALPLSELATLEIEHIVPRSRGGPDAQYNYVITREKTNKLKGDKTPYEWLSSDAKEWASYTDRVNACAKALGKKRCRLLLEKDAEELVEKYTALAETAHIAKLAQKIVCMHFGFQFGGLSGTKRVFTVPGALTSRIRKFYGLDRILHNSASESENLSFEEFLKFSEDLEKKNRKNKKHHALDAMCLCFAPTGVDSRRAKLGEILPEKLRSEKAAREFFKSYLDKIMPVDVAPKKPRLEDGIYSKRIIGGKACMVKRNNLVDLAYKSGLKPVFDIPTLIKLVDKKEKGIINPQIRKMIGEFAATNPDESAWRKWCEEVRLPSKSGLGARVMRVLVYYGEADEYKDLSKDGCGAYRKGDGHKGQVIWESVDGKYYVEPVYVHASKAGVMAALNANPKKKRICGMFNSHCTVDVGDVYNDKGDFILPAGRYMVNTIQKNGQCVLTNADGEKRNPININYLMRAGMRRVELSEL

SEQ ID NO: 94 - protein, 1059 aa, unidentified
  REGION 1..1059: note = Description of Unknown: uncultivated organism with predicted taxonomy: unclassified Verrucomicrobia (miscellaneous)
  REGION 1..1059: note = MG1-97 effector
MEKEKNNHVWGFDIGKGSLGEAVRIGGDFKHIASVLLDPEFGEIKTAALARRQMRTRKAHKAREKWLEECLEGTGVEILKRREVGIVDGQWQLISKGDERLEREFPPSGEDVCYNSIALRCKLLLGEKLEGWQVFKALNSAIQKRGYDENIPWGEAEEKSSKKDDDDYAQKLSQYEKEKSELFESFADGEKYDFPCFFKAYKMGLWSPENPTRVEVRIDCRAQKAKSYVIARKYVEREFECLVEAAAKFFPKLKGRAKFILYGVSETPYASYYGNMRKKFGLKRGAESDWTALGQKVPRFDNRIIDKCRLIPRMNVCKIRPLNEARNEKDLLYYEVTLALKLLNLRFFRNSNIEQLTFEEFKKAFEIAAGAKYKMTKTAMKKFLKSISATALGDDYAEIEPPKESGRASFSRPAMEILKELIFSGMPPREFYGRKISEISNTDKNKGIVSSDLDFIKLMGDCPWGGIFIPDVQTYQFANAAFPDPDAQINKLIGSQNNPIVRHRLTFFFERIKFLESKYGVPDKVVLEFVRDDFMGEKEKKEMRIAMKKRAEEKMRIAKDLDEHGFKGGNLLLKMELYRKQNGICLYTGDALPLSELATLEIEHIVPRSRGGPDAQYNYVITREKTNKLKGDKTPYEWLSSDAKEWASYTDRVNACAKALGKKRCRLLLEKDAEELVEKYTALAETAHIAKLAQKIVCMHFGFQFGGLSGTKRVFTVPGALTSRIRKFYGLDRILHNSAAESENLSFEEFLKFSEDLEKKNRKNKKHHALDAMCLCFAPTGVDSRRAKLGEILPEKLRSEKAAREFFKSYLDKIMPVDVAPKKPRLEDGIYSKRIIGGKACMVKRNNLVDLAYKSGLKPVFDIPTLIKLVDKKEKGIINPQIRKMIGEFAATNPDESAWRKWCEEVRLPSKSGLGARVMRVLVYYGEADEYKDLSKDGCGAYRKGDGHKGQVIWESVDGKYYVEPVYVHASKAGVMAALNANPKKKRICGMFNSHCTVDVGDVYNDKGDFILPAGRYMVNTIRSDNQCVLTNADGEKRNPININYLMRAGMRRVDLSEL

SEQ ID NO: 95 - protein, 1059 aa, unidentified; identical to SEQ ID NO: 86
  REGION 1..1059: note = Description of Unknown: uncultivated organism with predicted taxonomy: unclassified Verrucomicrobia (miscellaneous)
  REGION 1..1059: note = MG1-98 effector

SEQ ID NO: 96 - protein, 1059 aa, unidentified
  REGION 1..1059: note = Description of Unknown: uncultivated organism with predicted taxonomy: unclassified Verrucomicrobia (miscellaneous)
  REGION 1..1059: note = MG1-99 effector
MEKEKNNHVWGFDIGKGSLGEAVRIGGDFKHIASVLLDPEFGEIKTAALARRQMRTRKAHKAREKWLEECLEGTGVEILKRREVGIVDGQWQLISKGDERLEREFPPSGEDVCYNSIALRCKLLLGEKLEGWQVFKALNSAIQKRGYDENIPWGEAEEKSSKKDDDDYAQKLSQYEKEKSELFESFADGEKYDFPCFFKAYKMGLWSPENPTRVEVRIDCRAQKAKSYVIARKYVEREFECLVEAAAKFFPELKGRAKFILYGVSETPYASYYGNMRKKFGLKRGAESDWTALGQKVPRFDNRIIDKCRFIPRMNVCKIRPLNEARNEKDLLYYEVTLALKLLNLRFFRNSNIEQLTFEEFKKAFEIAAGAKYKMTKTAMKKFLKSISATALGDDYAEIEPPKESGRASFSRPAMEILKELIFSGMPPREFYGRKISEISNTDKNKGVVSSDLDFIKLMGDCPWGGIFIPDVQTYQFANAAFPDPDAQINKLIGSQNNPIVRHRLTFFFERIKFLESKYGVPDKVVLEFVRDDFMGEKEKKEMRIAMKKRAEEKMRIAKDLDEHGFKGGNLLLKMELYRKQNGICLYTGDALPLSELATLEIEHIVPRSRGGPDAQYNYVITREKTNKLKGDKTPYEWLSSDAKEWASYTDRVNACAKALGKKRCRLLLEKDAEELVEKYTALAETAHIAKLAQKIVCMHFGFQFGGLSGTKRVFTVPGALTSRIRKFYGLDRILHNSAAESENLSFEEFLKFSEDLEKKNRKNKKHHALDAMCLCFAPTGVDSRRAKLGEILPEKLRSEKAAREFFKSYLDKIMPVDVAPKKPRLEDGIYSKRIIGGKACMVKRNNLVDLAYKSGLKPVFDIPTLIKLVDKKEKGIINPQIRKMIGEFAATNPDESAWRKWCEEVRLPSKSGLGARVMRVLVYYGEADEYKDLSKDGCGAYRKGDGHKGQVIWESVDGKYYVEPVYVHASKAGVMAALNANPKKKRICGMFNSHCTVDVGDVYNDKGDFILPAGRYMVNTIRSDNQCVLTNADGEKRNPININYLMRAGMRRVDLSEL

SEQ ID NO: 97 - protein, 1062 aa, unidentified
  REGION 1..1062: note = Description of Unknown: uncultivated organism with predicted taxonomy: Coraliomargarita sp. CAG:312
  REGION 1..1062: note = MG1-100 effector
MNNNNTQIWGFDIGKASLGEAVWCGGKFKHVESLILDKDFAEIKTSAGRRRQARTRKAHKAREEWLEKCLEDCGIEILKRRKVGIVNGQWKLISKGDARLEKEFPAEGEEVCYNSIALRCKLILGENLESWQIFKALNSSIQHRGYDENIPWKETQNESKKEDGDYFKKIVLYESEKEDILNRLPQECKREDFDFPCFFKAKKMGIWSEENPYKVGLRISNNAQKAKGYVIPRKYVESEFVRLVQMASLQYPKLKDKQMFILYGISETPYASLFKDARKKFGLKRGADSDWTALGQKIPRFDNRMIGKCKLIPRLNTCKIKSPDKIKSEEDLLHYDITLALKLLNLRFFKDSEICALSFEEFKKLFEIGKSNKYKISKTDLKKFLKSIGASVLSQDHSEIEAPRTSGRSSFSRPAMKILKELIFSGEPPSKFLKAKIDKIANTDPNKGIIREDLDFIRIMGDCPWNGIFIPDVETYKYASQTQESSEAQINKLIGSQNDPIVRHRLSFFYERIKALSEKFGVPDKIVLEFVREDFMGKQAKKDLSLSMKKRFEEKIDIAKKLDDIGYKGNKMLLKMELLQKQGFACLYTGEALQETDLPILEIEHIVPRSLGGPDAAYNYVLTSESTNKAKGNQTPYKWLSPDRDKWRAYTERVRARAAELGSKRCRLLLSENAEELINKYTALAETAWISKLAQRIVCMHFGFQFGGNTGEKRVFTVPGNITAKIRSAFGLNKILHNIDADKKNMSEFDIVKLDYELDKKNRKNKKHHALDAMCLCFAPTGPNAQKLGIGALLPPEIAAKAEEFFRGYIEKVVPNEVAPKKPKLEESIYSKRTINGKECIVRKFNLVDLAYKSGLKPVYDISAIEKLLEDKPKKIPPIINSTVRRIVRDFVSTNPNEDEWRNWCKTVRMPSKNRNGTRIIRVLVYVGTPEEYKDLSKDGCGAFRKGDSHKGQIIWMDKNGRYKVSPVYVHSSKSQTMESIKSNPDFIKIAGFFKSHCLVEIESPVVNGKRDVLLSPGTYMINTIMAAGMAILSDTNGVKSPAININYLMNAGMRRVSIKYK

SEQ ID NO: 98 - protein, 1055 aa, unidentified
  REGION 1..1055: note = Description of Unknown: uncultivated organism with predicted taxonomy: unclassified Verrucomicrobia (miscellaneous)
  REGION 1..1055: note = MG1-101 effector
MENRVNIWGFDIGKGSLGEAVRIGSEIKHVQSLILYKDFGEIKTAAGIRRQYRTRKAHRAREKFLEKVLGECGIEVLRRREVGIVDGCWKLIAKGDIRLEKEFPSPGEDVCYNSIALRCKLLLGEPLESWQVFKALNSAIQNRGYDPDIPWTETDADKKEDSDWAKRLSAYEDEKKVVFSGLADPQRYDYPCFFKAYKMGLWSPEDPEIVKLRIDNHAEKAKNYVIPRKCVEAEFEKLVENASLQYPKLKGKALYIMFGPAQKEYASLNPELRRQFNLKRGADTDWTALGQKIPRFDNRIVDKCKLMPRFNVCKIRSLDEIKNPADFLPYEITTLMKLLNLRFLRNGTIESLACDELKEAFELARDNKYKLSKTALKKFLKKIGAEVLDEDQSKIEAPRSGGRASFSRPAMAVLKELILSGESPAKFYARKVSQIENTDKLKGLVASDFDFIKQMGDIAWGKIFMPDMRLLEFANRQNIDAEARINKLIGSQNDPIVRHRLGFFYDRIKFLESKFGVPDKIVIEFVRDDFLGEKAKKEYQKAINERFKEKQELAKEMDEAGYKGAKMLLKLELYKKQGGQCVYTGEALPSSEIASLEIEHIVPRSRGGPDSIYNYVLTRESTNKEKADMTPYEWLSRNADRWNAYVSRVNSLYKSLGGKRCKLLLANNAEELVDKYTALAETAWISKLAQQVVCLHFGFQFGGMEGQRRVFCIPGGVTARIRGMFGLNELLHVKDYDTDSMSETEIVELHKRLEKKNRENKKHHALDAMCLCFAPTGSQIKRFDAKTIMPEGILGREKQYFKSYLDKIVPNEVATQKPRLEQTLYSKRVVGGKECIVRKFNLIDLAYKSGLKPVYDLQTIKKLVGKDQSESDIINPVVGALVREFIATDPTEEQWRAWCGEVCMPSESFTGSRIKRVLVRCGNPDEFKDLSKDGCGAYRKGDAHKGQIVWRSTNGKCYVMPIYVHASKYGLIEALKKRADFKEIVGLFRMHCLVNIERDVVNKNGQKLLPPGIYMLNTIMTKGTAVLTNTDGVKQKEVNMNYLVESGMRPIKVDY

SEQ ID NO: 99 - protein, 1012 aa, unidentified
  REGION 1..1012: note = Description of Unknown: uncultivated organism with predicted taxonomy: unclassified Verrucomicrobia (miscellaneous)
  REGION 1..1012: note = MG1-102 effector
ALARRQMRTRKAHKAREKWLEECLEGTGVEILKRREVGIVDGQWQLISKGDERLEREFPPSGEDVCYNSIALRCKLLLGEKLEGWQVFKALNSAIQKRGYDENIPWGEAEEKSSKKDDDDYAQKLSQYEKEKSELFESFADGEKYDFPCFFKAYKMGLWSPENPTRVEVRIDCRAQKAKSYVIARKYVEREFECLVEAAAKFFPKLKGRAKFILYGVSETPYASYYGNMRKKFGLKRGAESDWTALGQKVPRFDNRIIDKCRLIPRMNVCKIRPLNEARNEKDLLYYEVTLALKLLNLRFFRNSNIEQLTFEEFKKAFEIAAGAKYKMTKTAMKKFLKSISATALGDDYAEIEPPKESGRASFSRPAMEILKELIFSGMPPREFYGRKISEISNTDKNKGVVSSDLDFIKLMGDCPWGGIFIPDVQTYQFANAAFPDPDAQINKLIGSQNNPIVRHRLTFFFERIKFLESKYGVPDKVVLEFVRDDFMGEKEKKEMRIAMKKRAEEKMRIAKDLDGHGFKGGNLLLKMELYRKQNGICLYTGDALPLSELATLEIEHIVPRSRGGPDAQYNYVITREKTNKLKGDKTPYEWLSSDAKEWASYTDRVNACAKALGKKRCRLLLEKDAEELVEKYAALAETAHIAKLAQKIVCMHFGFQFGGLSGTKRVFTVPGALTSRIRKFYGLDRILHNSAAESENLSFEEFLKFSEDLEKKNRKNKKHHALDAMCLCFAPTGVDSRRAKLGEILPEKLRSEKAAREFFKSYLDKIMPVDVAPKKPRLEDGIYSKRIIGGKACMVKRNNLVDLAYKSGLKPVFDIPTLIKLVDKKEKGIINPQIRKMIGEFAATNPDESAWRKWCEEVRLPSKSGLGARIMRVLVYYGEADEYKDLSKDGCGAYRKGDGHKGQVIWESVDGKYYVEPVYVHASKAGVMAALNANPKKKRICGMFNSHCAVDVGDVYNDKGDFILPAGRYMVNTIRSDNQCVLTNADGEKRNPININYLMRAGMRRVDLSEL

SEQ ID NO: 100 - protein, 1059 aa, unidentified
  REGION 1..1059: note = Description of Unknown: uncultivated organism with predicted taxonomy: Verrucomicrobia
  REGION 1..1059: note = MG1-103 effector
MEKEKNNHVWGFDIGKGSLGEAVRIGGDFKHIASVLLDPEFGEIKTAALARRQMRTRKAHKAREKWLEECLEGTGVEILKRREVGIVDGQWQLISKGDERLEREFPPSGEDVCYNSIALRCKLLLGEKLEGWQVFKALNSAIQKRGYDENIPWGEAEEKSSKKDDDDYAQKLSQYEKEKSELFESFADGEKYDFPCFFKAYKMGLWSPENPTRVEVRIDCRAQKAKSYVIARKYVEREFECLVEAAAKFFPKLKGRAKFILYGVSETPYASYYGNMRKKFGLKRGAESDWTALGQKVPRFDNRIIDKCRLIPRMNVCKIRPLNEARNEKDLLYYEVTLALKLLNLRFFRNSNIEQLTFEEFKKAFEIAAGAKYKMTKTAMKKFLKSISATALGDDYAEIEPPKESGRASFSRPAMEILKELIFSGMPPREFYGRKISEISNTDKNKGVVSSDLDFIKLMGDCPWGGIFIPDVQTYQFANAAFPDPDAQINKLIGSQNNPIVRHRLTFFFERIKFLESKYGVPDKVVLEFVRDDFMGEKEKKEMRIAMKKRAEEKMRIAKDLDEHGFKGGNLLLKMELYRKQNGICLYTGDALPLSELATLEIEHIVPRSRGGPDAQYNYVITREKTNKLKGDKTPYEWLSSDAKEWASYTDRVNACAKALGKKRCRLLLEKDAEELVEKYTALAETAHIAKLAQKIVCMHFGFQFGGLSGTKRVFTLPGALTSRIRKFYGLDRILHISAAESENLSFEEFLKFSEDLEKKNRKNKKHHALDAMCLCFAPTGVDSRRAKLGEILPEKLRSEKAAREFFKSYLDKIMPVDVAPKKPRLEDGIYSKRIIGGKACMVKRNNLVDLAYKSGLKPVFDIPTLIKLVDKKEKGIINPQIRKMIGEFAATNPDESAWRKWCEEVRLPSKSGLGARVKRVLVYYGEADEYKDLSKDGCGAYRKGDGHKGQVIWESVDGKYYVEPVYVHASKAGVMAALNANPKKKRICGMFNSHCTVDVGDVYNDKGDFILPAGRYMVNTIRSDNQCVLTNADGEKRNPININYLMRAGMRRVELSEL

SEQ ID NO: 101 - protein, 1062 aa, unidentified; identical to SEQ ID NO: 81
  REGION 1..1062: note = Description of Unknown: uncultivated organism with predicted taxonomy: Verrucomicrobia
  REGION 1..1062: note = MG1-104 effector

SEQ ID NO: 102 - protein, 1059 aa, unidentified
  REGION 1..1059: note = Description of Unknown: uncultivated organism
  REGION 1..1059: note = MG1-105 effector
MEKEKNNHVWGFDIGKGSLGEAVRIGGDFKHIASVLLDPEFGEIKTAALVRRQMRTRKAHKAREKWLEECLEGTGVEILKRREVGIVDGQWQLISKGDERLEREFPPSGEDVCYNSIALRCKLLLGEKLEGWQVFKALNSAIQKRGYDENIPWGEAEEKSSKKDDDDYAQKLSQYEKEKSELFESFADGEKYDFPCFFKAYKMGLWSPENPTRVEVRIDCRAQKAKSYVIARKYVEREFECLVEAAAKFFPKLKGRAKFILYGVSETPYASYYGNMRKKFGLKRGAESDWTALGQKVPRFDNRIIDKCRFIPRMNVCKIRPLNEARNEKDLLYYEVTLALKLLNLRFFRNSNIEQLTFEEFKKAFEIAAGAKYKMTKTAMKKFLKSISATALGDDYAEIEPPKESGRASFSRPAMEILKELIFSGMPPREFYGRKISEISNTDKNKGVVSSDLDFIKLMGDCPWGGIFIPDVQTYQFANAAFPDPDAQINKLIGSQNNPIVRHRLTFFFERIKFLESKYGVPDKVVLEFVRDDFMGEKEKKEMRIAMKKRAEEKMRIAKDLDEHGFKGGNLLLKMELYRKQNGICLYTGDALPLSELATLEIEHIVPRSRGGPDAQYNYVITREKTNKLKGDKTPYEWLSSDAKEWASYTDRVNACAKALGKKRCRLLLEKDAEELVEKYTALAETAHIAKLAQKIVCMHFGFQFGGLSGTKRVFTVPGALTSRIRKFYGLDRILHNSAAERENLSFEEFLKFSEDLEKKNRKNKKHHALDAMCLCFAPTGVDSRRVKLGEILPEKLKSEKAAREFFKSYLDKIMPVDVAPKKPRLEDGIYSKRIIGGKACMVKRNNLVDLAYKSGLKPVFDIPTLIKLVDKKEKGIINPQIRKMIGEFAATNPDESAWRKWCEEVRLPSKSGLGARIMRVLVYYGEADEYKDLSKDGYGAYRKGDGHKGQVIWESVDGKYYVEPVYVHASKAGVMAALNANPKKKRICGMFNSHCTVDVGDVYNDKGDFILPAGRYMVNTIRSDNQCVLTNADGEKRNPININYLMRAGMRRVDLSEL

SEQ ID NO: 103 - protein, 1073 aa, unidentified
  REGION 1..1073: note = Description of Unknown: uncultivated organism with predicted taxonomy: Verrucomicrobia
  REGION 1..1073: note = MG1-106 effector
MYTKEIIWGFDIGKGSLGEAVRVGNEFKHVQSLEIASDFAETKTTAAARRAWRTREAHKARELWLEKCLSEAGIEVLLRRKVGVVDGAWKLVSKGDVRLEREFPPAGEDLCYNSIALRCKLLLGEKLESWQVFKALNSAIQNRGYDANIPWGDEDAADGGDGSSRKSSDSDASGDGESYAEKLAHYEREFDGILAELDNREKYEFPCFFKAAKMGLWSPENPDFVGVRIDNTAEKAKGYVVPREAVVREFRALVNAAALQYPNLKGKADFIMFGRACEPYASYNPELRKRFGLKRGAATDWTALGQKTPRFDNRVIDKCKLIPRLNVCKIKPLDECKTDDDFLSYTITLSLKLLNLRFFRGAGVDSLSFDEFLRAFELAKNSKFKLGKAALKKFFKTIGAEVMDESQSEIEQPRNGGRAAFSRPAMRILRDLIFSGKSPAEFYATAIENVANTDKNKGLVAGDLDFLKLMGDAPWSGIFIPDVGLSDFADASEAAREAQINKLIGSQNDPIVRHRLSFFYERIKSLEAKFGVPDKIVLEFVRDDFLGKKAKSDLNKAIKTRFDEKKKLAEDLDSKREEFGLKYASKKMLLKFELYKKQGGECVYTGNALPLSELENLEVEHIVPRSRGGPDAMYNYVLTDEKTNKEKGDRTPYEWLSSKGAEWDSYCDRVRELTKNLGAKRCRLLLAPNAAELVEKYTALAETAWISKLAQRICCLHFGFQFGGLAGAKKVWTVSGNTTAMIRGRYGLNRLLHDEESAEDLSLFDRICMEKKFEEKNRKNKKHHALDAMCLCFAPTSNAKKASAYKNILPEEITRNPESDEARKFFGKYLATVIPNKVAVEKSKLEQTIYSLRKGRIVKKCNVRDLAYEGINPKYNYTKLVKRIESIVGDVSKRIISDFVLSNPDLKESEWEDWCKYEAAIPSKNGAPTKLLRVLCEVGSPEEYKDLSKDGCGAYRKGDSHKGQFIWKTQKGKYMVAPVYAHASKAKVFAALKSNPDCAEVCGFFRQNCLVEISNDVIDKSGKMLLKAGVYRSNSVRSNGQVAITNSDGISPNPISIQYLMPAGMKRIKLDTV

SEQ ID NO: 104 - protein, 1073 aa, unidentified; identical to SEQ ID NO: 84
  REGION 1..1073: note = Description of Unknown: uncultivated organism with predicted taxonomy: Verrucomicrobia
  REGION 1..1073: note = MG1-107 effector

SEQ ID NO: 105 - protein, 1073 aa, unidentified
  REGION 1..1073: note = Description of Unknown: uncultivated organism with predicted taxonomy: Verrucomicrobia
  REGION 1..1073: note = MG1-108 effector
MHTKDIIWGFDIGKGSLGEAVRVGNEFKHVQSLEIAPDFAETKTTAAARRAWRTREAHKARELWLEKCLSEAGIEVLLRRKVGVVDGAWKLVSKGDVRLEREFPPAGEDLCYNSIALRCKLLLGEKLESWQVFKALNSAIQNRGYDANIPWGDEDAADGGDGSSRKSSDSDASGDGESYAEKLAHYEREFDGILAELDNREKYEFPCFFKAAKMGLWSPENPDFVGVRIDNTAEKAKGYVVPREAVVREFRALVNAAELQYPNLKGKADFIMFGRACEPYASYNPELRKRFGLKRGAATDWTALGQKTPRFDNRVIDKCKLIPRLNVCKIKPLDECKTDDDFLSYTITLSLKLLNLRFFRGAGVDSLSFDEFLRAFELAKNSKFKLGKAALKKFFKTIGAEVMDESQSEIEQPRNGGRAAFSRPAMRILRDLIFSGKSPAEFYATELGKIANTDKNKGLVAGDLDFLKLMSDAPWSGIFIPDVGLSDFADTSEAARAAQINKLIGSQNDPIVRHRLSFFYERIKSLEAKFGVPDKIVLEFVRDDFLGKKAKSDLNKAIKTRFDEKKKLAEDLDSKREEFGLKYASKKMLLKFELYKKQGGECVYTGNALPLSELENLEVEHIVPRSRGGPDAMYNYVLTDEKTNKEKGDRTPYEWHSLKGAEWDSYCDRVRELTKNLGAKRCRLLLAPNAAELVEKYTALAETAWISKLAQRICCLHFGFQFGGLAGAKKVWTVSGNTTAMIRGRYGLNRLLHDEEAAEDLSLFDRICMEKKFEEKNRKNKKHHALDAMCLCFAPTSNAKKASAYKNILPEEITRNPESDEARKFFGRYLATVIPNKVAVEKSKLEQTIYSLRKGRIVKKCNVRDLAYEGINPKYNYTKLVKRIESIVGDVSKRIISDFVLSNPDLKESEWEDWCKYEAAIPSKNGAPTKLLRVLCEVGSPEEYKDLSKDGCGAYRKGDSHKGQFIWKTQKGKYMVAPVYAYASKAKVFAALKSNPDCAEVCGFFRQNCLVEISNDVIDKSGKMLLKSGIYKSNTIMSDGRAKFTNSDGISTNPISIQYLMPAGMKRIKLDTV

SEQ ID NO: 106 - protein, 1059 aa, unidentified
  REGION 1..1059: note = Description of Unknown: uncultivated organism with predicted taxonomy: unclassified Verrucomicrobia (miscellaneous)
  REGION 1..1059: note = MG1-109 effector
MEKEKNNHVWGFDIGKGSLGEAVRIGGDFKHIASVLLDPEFGEIKTAALARRQMRTRKAHKAREKWLEECLEGTGVEILKRREVGIVDGQWQLISKGDERLEREFPPSGEDVCYNSIALRCKLLLGEKLEGWQVFKALNSAIQKRGYDENIPWGEAEEKSSKKDDDDYAQKLSQYEKEKSELFESFADGEKYDFPCFFKAYKMGLWSPENPTRVEVRIDCRAQKAKSYVIARKYVEREFECLVEAAAKFFPKLKGRAKFILYGVSETPYASYYGNMRKKFGLKRGAESDWTALGQKVPRFDNRIIDKCRLIPRMNVCKIRPLNEARNEKDLLYYEVTLALKLLNLRFFRNSNIEQLTFEEFKKAFEIAAGAKYKMTKTAMKKFLKSISATALGDDYAEIEPPKESGRASFSRPAMEILKELIFSGMPPREFYGRKISEISNTDKNKGVVSSDLDFIKLMGDCPWGGIFIPDVQTYQFANAAFPDPDAQINKLIGSQNNPIVRHRLTFFFERIKFLESKYGVPDKVVLEFVRDDFMGEKEKKEMRSAMKKRAEEKMRIAKDLDEHGFKGGNLLLKMELYRKQNGICLYTGDALPLSELATLEIEHIVPRSRGGPDAQYNYVITREKTNKLKGDKTPYEWLSSDAKEWASYTDRVNACAKALGKKRCRLLLEKDAEELVEKYTALAETAHIAKLAQKIVCMHFGFQFGGLSGTKRVFTVPGALTSRIRKFYGLDRILHNSAAESENLSFEEFLKFSEDLEKKNRKNKKHHALDAMCLCFAPTGVDSRRAKLGEILPEKLRSEKAAREFFKSYLDKIMPVDVAPKKPRLEDGIYSKRIIGGKACMVKRNNLVDLAYKSGLKPVFDIPTLIKLVDKKEKGIINPQIRKMIGEFAATNPDESAWRKWCEEVRLPSKSGLGARVMRVLVYYGEADEYKDLSKDGCGAYRKGDGHKGQVIWESVDGKYYVEPVYVHASKAGVMAALNANPKKKRICGMFNSHCTVDVGDVYNDKGDFILPAGRYMVNTIRSDNQCVLTNADGEKRNPININYLMRAGMRRVDLSEL

SEQ ID NO: 107 - protein, 1073 aa, unidentified
  REGION 1..1073: note = Description of Unknown: uncultivated organism with predicted taxonomy: Verrucomicrobia
  REGION 1..1073: note = MG1-110 effector
MYTKEIIWGFDIGKGSLGEAVRVGNEFKHVQSLEIAPDFAETKTTAAARRAWRTREAHKARELWLEKCLSEAGIEVLLRRKVGVVDGAWKLVSKGDVRLEREFPPAGEDLCYNSIALRCKLLLGEKLESWQVFKALNSAIQNRGYDANIPWGDEDAADGGDGSSRKSSDSDASGDGESYAEKLAHYEREFDGILAELDNREKYEFPCFFKAAKMGLWSPENPDFVGVRIDNTAEKAKGYVVPREAVVREFRALVNAAALQYPNLKDKADFIMFGRACEPYASYNPELRKRFGLKRGAATDWTALGQKTPRFDNRVIDKCKLIPRLNVCKIKPLDECKTDDDFLSYTITLSLKLLNLRFFRGAGVDSLSFDEFLRAFELAKNSKFKLGKAALKKFFKTIGAEVMDESQSEIEQPRNGGRAAFSRPAMRILRDLIFSGKSPAEFYAAAIENIANTDKNKGLVAGDLDFLKLMGDAPWSGIFIPDVGLSDFADASEAAREEQINKLIGSQNDPIVRHRLSFFYERIKSLEAKFGVPDKIVLEFVRDDFLGKKAKSDLNKAIKTRFDEKKKLAEDLDSKREEFGFKYASKKMLLKFELYKKQGGECVYTGKALPLSELESLEIEHIVPRSRGGPDAMYNYVLTDEKTNKEKGDRTPFEWRSTMGAEWESYCERVRKLTKELGAKRCKLLLSPNAAELVEKYTALAETAWISKLAQRICCLHFGFQFGGLAGAKKVWTVSGNTTAMIRGRYGLNRLLHDEESAEDLSLFDRICMEKKLEEKNRKNKKHHALDAMCLCFAPTSNAKKASAYKNILPEEITRNPESDEARKFFGKYLANVIPNKVAVEKPTLEQTIYAMRNGRIVKKCNVRDLAYTGINPKYNYSTLVKSIKSIVGEVPKRIISDFVLSNPKLSESEWEDWCKNEALIPSKNGAPTKLLRVLCDVGSPEEYKDLSKDGCGAYRKGDSHNGQFIWKTKQGRYVVAPVYAHASKAKVLAALKNNPDCAEVCGFFRQNCLVEIPNDVVDKSGKMLLKSGIYKSNTIMSDGRAKFTNSDGISTNPISIQYLMPAGMKRIKLDTV

SEQ ID NO: 108 - protein, 1062 aa, unidentified; identical to SEQ ID NO: 97
  REGION 1..1062: note = Description of Unknown: uncultivated organism with predicted taxonomy: Coraliomargarita sp. CAG:312
  REGION 1..1062: note = MG1-111 effector

SEQ ID NO: 109 - protein, 1059 aa, unidentified; identical to SEQ ID NO: 96
  REGION 1..1059: note = Description of Unknown: uncultivated organism with predicted taxonomy: unclassified Verrucomicrobia (miscellaneous)
  REGION 1..1059: note = MG1-112 effector

SEQ ID NO: 110 - protein, 1034 aa, unidentified
  REGION 1..1034: note = Description of Unknown: uncultivated organism with predicted taxonomy: Verrucomicrobia
  REGION 1..1034: note = MG1-113 effector
MGAEFRHVASLLLDKDFGEIKTAAGLRRQMRTRKAHKAREKWLERCLSDFGIEPLKRREVGIVNGRWMLISKGDERLEREFPPDGEDICYNAIALRCKLLLGEKLESWQIFKALNSAIQNRGYDENIPWKESDVSPSKKDDDDYAKRLSQYSREKSELLESFEGGEKYDYPCFFKAYKMGLWSPENPERVEIRIGNDAQKAKGYVIPRKDVEREFESLVEAASKWHPAMKGKAMYMMYGIAETPYASFKPSLRKKFDLKRGAESDWTALGQKIPRFDNRIIDKCRLIPRLNVCKIRPLSEARGEGDLLHYEITLSLKLLNLRFFRNSNVESLSFEEFKAAFEIAKSAKYKMGKAALKKFLKSISASVLSEDQSEIEAPRESGRAAFSRPAMLLLKELIFSGMPPAEFYAKKAGEISNADPNKGIVASDLDFIKLMGNCGWNGIFIPDVETYRFANDGADSAKLINGLIGSQNNPIVRHRLAFFYERIKFLESKFGIPDKVVLEFVREDFMGKEQKKRMQIGMKKRASEKMLIAKKLDEAGYKGGNLLLKMELLEKQGGICLYTGEPLLPSELGVLEIEHIVPRSRGGPDAQYNYALTREKTNKEKADRTPFEWLSSDPVKWAGYSDRIKARAGQLGRKRCELLLEKNAEELVEKYTALAETAHISKLAQKIVCLHFGFQFGGLGGTKRVFTVPGALTARIRSFYGLNKILHNEDLAKDALSYEEVLKRGEELDKKNRENEKHHALDAMCLCFAPTGVNSKRARIDMLLPPDIRGEGKAELFFRKYLDRLIPVDVAPKKPRLEDGIYSMRAVGGKKFMARRVNLVDLAYTVGQKPVYDISVLIGKKNPKEKKIINAQIRKLVADFARTNPSEDEWRKWCGECRLPSKNGIGTRVIRVLLNYGEPAEYKDLSKDGRGAFRRGDGHKGQIVWESTDGKYYVVPIYVHASKAKLLAELDANPKKKRVCDIFTSHCMVKVGNAYNDKGELLLPEGVYMVNTIQTDGRGKLTNPNGEKSNLININYLMKAGMRKVSVKDL

SEQ ID NO: 111 - protein, 1077 aa, unidentified
  REGION 1..1077: note = Description of Unknown: uncultivated organism with predicted taxonomy: unclassified Verrucomicrobia (miscellaneous)
  REGION 1..1077: note = MG1-114 effector
MSLYFIEQISDWKIMKVIEDEGGNHIWGFDIGKGSLGEAVLDGSEFKHVASLLLDADFGEIETAAGLRRQMRTRKAHKAREKWLESCLSGFGIETLKRREVGIVNGQWTLISKGDERLEREFPPDGENICYNSIALRCKLLLGEKLEGWQIFKALNSAIQNRGYDENIPWKESDASPSKKEGGDYAQKLSQYSREKSELFESFEGGEKYDYPCFFKACKMGLWSPDNPERVEVRIGSDAQKAKGYVIPRKDVEREFERLVEAASKWYPAMKGKAMYIMYGIAETPYASFKPLLRKKFDLKRGAESDWTALGQKIPRFDNRIIDKCRLIPRLNVCKIRPLSEIRGEADLLHYEITLSLKLLNLRFFRNSNVESLSFGEFKAAFEIAKGAKYKMGKAALKKFLKSISASVLSEDQSEIEAPRESGRAAFSRPAMLLLKELIFSGMTPAEFYAKKSGEISNADPNKGLVASDLDFIKLMGNCGWSGIFIPDVDTFHFANKGAEPAKLINELIGSQNNPIVRHRLSFFYERIKFLESKFGIPDKVVLEFVREDFMGKEQKKRMQIEMKKRASEKMLIAKKLDEAGYKGGNLLLKMELLEKQGGVCLYTGEPLLPSELGVLEIEHIVPRSRGGPDAQYNYVLTREKTNKEKADRTPFEWLSSDPVKWAGYSDRVKARAGQLGRKRCELLLEKNAEELVEKYTALAETAHISKLAQKIVCLHFGFQFGGLSGTKRVFTVPGSLTARIRTFYGLNKILHNEDLAHETLSYEGFLKRGEELDKKNRANKKHHALDAMCLCFAPTGVNSKRARVDMLLPPKIRSEKDAELFFRKYLDKLIPVDVAPKKPKLEDGIYSMRMVGGKKIMARRVNLVDLAYKGGQGQKPVYDISVLMDKKNPKEKKIINPQIRKLVADFARTNPSEDEWKKWCGECRLPSKNGLGTRVIRVLLNYGEPAEYKDLSKDGCGAFRKGKEHKGQIVWESTDGKYYVLPIYVHASKAKLLAELCANPKKKRICGIFTSHCMVKVGNTYNNKGELLLPEGVYMLNTIQTDGRGKLTNANGEKSNLININYLMKAGMKKVSIKEL

SEQ ID NO: 112 - protein, 1061 aa, unidentified
  REGION 1..1061: note = Description of Unknown: uncultivated organism with predicted taxonomy: unclassified Verrucomicrobia (miscellaneous)
  REGION 1..1061: note = MG1-115 effector
MKVIEDEGGNHIWGFDIGKGSLGEAVLDGSEFKHVASLLLDADFGEIKTAAGLRRQMRTRKAHKAREKWLESCLSGFGMETLKRREVGIVNGQWTLISKGDERLEREFPPDGENICYNSIALRCKLLLGEKLEGWQIFKALNSAIQNRGYDENIPWKESDASPSKKEDGDYAQKLSQYSKEKSELFESFEGGEKYDYPCFFKACKMGLWSPDNPERVEVRIGSDAQKAKDYVIPRKDVEREFERLVEAASKWYPAMKGKAMYIMYGIAETPYASYKPLLRKKFDLKRGAESDWTALGQKIPRFDNRIIDKCRLIPRLNVCKIRPLSKIRGEADLLHYEITLSLKLLNLRFFRNSNVESLSFGEFKAAFEIAKGAKYKMGKAALKKFLKSISASVLSEDQSEIEAPRESGRAAFSRPAMLLLKELIFSGMTPAEFYAKKSGEISNADPNKGIVASDLDFIKLMGNCGWSGIFIPDVDTFHFANKGAEPAKLINELIGSQNNPIVRHRLSFFYERIKFLESKFGIPDKVVLEFVREDFMGKEQKKRMQIEMKKRASEKMLIAKKLDEAGYKGGNLLLKMELLEKQGGVCLYTGEPLLPSELGVLEIEHIVPRSRGGPDAQYNYVLTREKTNKEKADRTPFEWLSSDPVKWAGYSDRVKARAGQLGRKRCELLLEKNAEELVEKYTALAETAHISKLAQKIVCLHFGFQFGGLSGTKRVFTVPGALTARIRTFYGLNKILHNEDLAHETLSFEGFLKRGEELDKKNRANKKHHALDAMCLCFAPTGVNSKRARVDMLLPPKIRSEKEAELFFRKYLDKLIPVDVAPKKPKLEDGIYSMRTVGGKKIMARRVNLVDLAYKSGLKPVYDVSVLIKLLDKKERGIINPQIRKLVADFARTNPSEDEWKKWCGECRLPSKNGLGTRVIRVLLNYGEPAEYKDLSKDGRGAFRRGDGHKGQIVWESTDGKYCVLPIYVHASKAKLLAELCANPKKKRICGIFTSHCMVKVGNTYNNKGELLLPEGVYMLNTIRTDGWIQLTSANGDKSKPININYLMKAGMKKVPVKDL

SEQ ID NO: 113 - protein, 1073 aa, unidentified
  REGION 1..1073: note = Description of Unknown: uncultivated organism with predicted taxonomy: Verrucomicrobia
  REGION 1..1073: note = MG1-116 effector
MYTKEIIWGFDIGKGSLGEAVRVGNEFKHVQSLEIAPDFAETKTTAAARRAWRTREAHKARELWLEKCLSEAGIEVLLRRKVGVVDGAWKLVSKGDVRLEREFPPAGEDLCYNSIALRCKLLLGEKLESWQVFKALNSAIQNRGYDANIPWGDEDAADGGDGSSRKSSDSDASGDGESYAEKLAHYEREFDGILAELDNREKYEFPCFFKAAKMGLWSPENPDFVGVRIDNTAEKAKGYVVPREAVVREFRALVNAAALQYPNLKGKADFIMFGRACEPYASYNPELRKRFGLKRGAATDWTALGQKTPRFDNRVIDKCKLIPRLNVCKIKPLDECKTDDDFLSYTITLSLKLLNLRFFRGAGVDSLSFDEFLRAFELAKNSKFKLGKAALKKFFKTIGAEVMDESQSEIEQPRNGGRAAFSRPAMRILRDLIFSGKSPAEFYATAIENIANTDKNKGLVAGDLDFLKLMGDAPWSGIFIPDVGLSDFADASEAAREAQINKLIGSQNDPIVRHRLSFFYERIKSLEAKFGVPDKIVLEFVRDDFLGKKAKSDLNKAIKTRFDEKKKLAEDLDSKREEFGFKYASKKMLLKFELYKKQGGECVYTGNALPLSELESLEIEHIVPRSRGGPDAMYNYVLTDEKTNKEKGDRTPFEWRSTMGAEWESYCERVRKLTKELGAKRCKLLLSPNAAELVEKYTALAETAWISKLAQRICCLHFGFQFGGLAGAKKVWTVSGNTTAMIRGRYGLNRLLHDEESAEDLSLFDRICMEKKFEEKNRKNKKHHALDAMCLCFAPTSNAKKASAYKNILPEEITRNPESDEARKFFGRYLATVIPNKVAVEKSKLEQTIYSLRKGRIVKKCNVRDLAYEGINPKYNYTKLVKRIESIVGDVSKRIISDFVLYNPDLKESEWEDWCKYEAAIPSKNGAPTKLLRVLCEVGSPEEYKDLSKDGCGAYRKGDSHKGQFIWKTQKGKYMVAPVYAHASKAKVFASLKNNPDCAEVCGFFRQNCLVEIPNDVIDKSGKMLLKAGVYRSNSVRSNGQVAITNSDGISPNPISIQYLMPAGMKRIKLDTV

SEQ ID NO: 114 - protein, 1062 aa, unidentified
  REGION 1..1062: note = Description of Unknown: uncultivated organism with predicted taxonomy: Coraliomargarita sp. CAG:312
  REGION 1..1062: note = MG1-117 effector
MNNNNTQIWGFDIGKASLGEAVWCGGKFKHVESLILDKDFAEIKTSAGRRRQARTRKAHKAREEWLEKCLEDCGIEILKRRKVGIVNGQWKLISKGDARLEKEFPAEGEEVCYNSIALRCKLILGENLESWQIFKALNSSIQHRGYDENIPWKETQNESKKEDGDYFKKIVLYESEKEDILNRLPQECKREDFDFPCFFKAKKMGIWSEENPYKVGLRISNNAQKAKGYVIPRKYVESEFVRLVQMASLQYPKLKDKQMFILYGISETPYASLFKDARKKFGLKRGADSDWTALGQKIPRFDNRMIGKCKLIPRLNTCKIKSPDKIKSEEDLLHYDITLALKLLNLRFFKDSEICALSFEEFKKLFEIGKSNKYKISKTDLKKFLKSIGASVLSQDHSEIEAPRTSGRSSFSRPAMKILKELIFSGEPPSKFLKAKIDKIANTDPNKGIIREDLDFIRIMGDCPWNGIFIPDVETYKYASQTQESSEAQINKLIGSQNDPIVRHRLSFFYERIKALSEKFGVPDKIVLEFVREDFMGKQAKKDLSLSMKKRFEEKIDIAKKLDDIGYKGNKMLLKMELLQKQGFACLYTGEALQETDLPILEIEHIVPRSLGGPDAAYNYVLTSESTNKAKGNQTPYKWLSPDRDKWRAYTERVRARAAELGSKRCRLLLSENAEELINKYTALAETAWISKLAQRIVCMHFGFQFGGNTGEKRVFTVPGNITAKIRSAFGLNKILHNIDADKKNMSEFDIVKLDYELDKKNRKNKKHHALDAMCLCFAPTGPNAQKLGIGALLPPEIAAKAEEFFRGYIEKVVPNEVAPKKPKLEESIYSKRTINRKECIVRKFNLVDLAYKSGLKPVYDISAIEKLLEDKPKKIPPIINPTVRRIVRDFVSTNPNEDEWRNWCKTVRMPSKNRNGTRIIRVLVYVGTPEEYKDLSKDGCGAFRKGDSHKGQIIWMDKNGRYKVSPVYVHSSKSQTMESIKSNPDFIKIAGFFKSHCLVEIESPVVNGKRDVLLSPGTYMINTIMAAGMAILSDTNGVKSPAININYLMNAGMRRISIKYK

SEQ ID NO: 115 - protein, 1059 aa, unidentified
  REGION 1..1059: note = Description of Unknown: uncultivated organism with predicted taxonomy: unclassified Verrucomicrobia (miscellaneous)
  REGION 1..1059: note = MG1-118 effector
MEKEKNNHVWGFDIGKGSLGEAVRIGGDFKHIASVLLDPEFGEIKTAALARRQMRTRKAHKAREKWLEECLEGTGVEILKRREVGIVDGQWQLISKGDERLEREFPPSGEDVCYNSIALRCKLLLGEKLEGWQVFKALNSAIQKRGYDENIPWGEAEEKSSKKDDDDYAQKLSQYEKEKSELFESFADGEKYDFPCFFKAYKMGLWSPENPTRVEVRIDCRAQKAKSYVIARKYVEREFECLVEAAAKFFPKLKGRAKFILYGVSETPYASYYGNMRKKFGLKRGAESDWTALGQKVPRFDNRIIDKCRLIPRMNVCKIRPLNEARNEKDLLYYEVTLALKLLNLRFFRNSNIEQLTFEEFKKAFEIAAGAKYKMTKTAMKKFLKSISATALGDGYAEIEPPKESGRASFSRPAMEILKELIFSGMPPREFYGRKISEISNTDKNKGVVSSDLDFIKLMGDCPWGGIFIPDVQTYLFANAAFPDPDAQINKLIGSQNNPIVRHRLTFFFERIKFLESKYGVPDKVVLEFVRDDFMGEKEKKEMRIAMKKRAEEKMRIAKDLDEHGFKGGNLLLKMELYRKQNGICLYTGDALPLSELATLEIEHIVPRSRGGPDAQYNYVITREKTNKLKGDKTPYEWLSSDAKEWASYTDRVNACAKALGKKRCRLLLEKDAEELVEKYTALAETAHIAKLAQKIVCMHFGFQFGGLSGTKRVFTVPGALTSRIRKFYGLDRILHNSAAESENLSFEEFLKFSEDLEKKNRKNKKHHALDAMCLCFAPTGVDSRRAKLGEILPEKLRSEKAAREFFKSYLDKIMPVDVAPKKPRLEDGIYSKRIIGGKACMVKRNNLVDLAYKSGLKPVFDIPTLIKLVDKKEKGIINPQIRKMIGEFAATNPDESAWRKWCEEVRLPSKSGLGARVMRVLVYYGEADEYKDLSKDGCGAYRKGDGHKGQVIWESVDGKYYVEPVYVHASKAGVMAALNANPKKKRICGMFNSHCTVDVGDVYNDKGDFILPAGRYMVNTIRSDNQCVLTNADGEKRNPININYLMRAGMRRVDLSEL

SEQ ID NO: 116 - protein, 1059 aa, unidentified
  REGION 1..1059: note = Description of Unknown: uncultivated organism with predicted taxonomy: unclassified Verrucomicrobia (miscellaneous)
  REGION 1..1059: note = MG1-119 effector
MEKEKNNHVWGFDIGKGSLGEAVRIGGDFKHIASVLLDPEFGEIKTAALARRQMRTRKAHKAREKWLEECLEGTGVEILKRREVGIVDGQWQLISKGDERLEREFPPSGEDVCYNSIALRCKLLLGEKLEGWQVFKALNSAIQKRGYDENIPWGEAEEKSSKKDDDDYAQKLSQYEKEKSELFESFADGEKYDFPCFFKAYKMGLWSPENPTRVEVRIDCRAQKAKSYVIARKYVEREFECLVEAAAKFFPKLKGRAKFILYGVSETPYASYYGNMRKKLGLKRGAESDWTALGQKVPRFDNRIIDKCRLIPRMNVCKIRPLNEARNEKDLLYYEVTLALKLLNLRFFRNSNIEQLTFEEFKKAFEIAAGAKYKMTKTAMKKFLKSISATALGDDYAEIEPPKESGRASFSRPAMEILKELIFSGMPPREFYGRKISEISNTDKNKGVVSSDLDFIKLMGDCPWGGIFIPDVQTYQFANAAFPDPDAQINKLIGSQNNPIVRHRLTFFFERIKFLESKYGVPDKVVLEFVRDDFMGEKEKKEMRIAMKKRAEEKMRIAKDLDEHGFKGGNLLLKMELYRKQNGICLYTGDALPLSELATLEIEHIVPRSRGGPDAQYNYVITREKTNKLKGDKTPYEWLSSDAKEWASYTDRVNACAKALGKKRCRLLLEKDAEELVEKYTALAETAHIAKLAQKIVCMHFGFQFGGLSGTKRVFTVPGALTSRIRKFYGLDRILHNSAAESENLSFEEFLKFSEDLEKKNRKNKKHHALDAMCLCFAPTGVDSRRAKLGEILPEKLRSEKAAREFFKSYLDKIMPVDVAPKKPRLEDGIYSKRIIGGKACMVKRNNLVDLAYKSGLKPVFDIPTLIKLVDKKEKGIINPQIRKMIGEFAATNPDESAWRKWCEEVRLPSKSGLGARIMRVLVYYGEADEYKDLSKDGCGAYRKGDGHKGQVIWESVDGKYYVEPVYVHASKAGVMAALNANPKKKRICGMFNSHCTVDVGDVYNDKGDFILPAGRYMVNTIRSDNQCVLTNADGEKRNPININYLMRAGMRRVDLSEL

SEQ ID NO: 117 - protein, 1034 aa, unidentified
  REGION 1..1034: note = Description of Unknown: uncultivated organism with predicted taxonomy: unclassified Verrucomicrobia (miscellaneous)
  REGION 1..1034: note = MG1-120 effector
MGAEFRHVTSLLLDEDFGEIKTAAGLRRQMRTRKAHKAREKWLERCLLEFGIEPLKRREVGIVNGRWMLISKGDERLEREFPPDGEDICYNAIALRCKLLLGEKLESWQIFKALNSAIQNRGYDENIPWKESDVSLPKKDDDDYAKKLSQYSREKGELLESFEDGEKYDYPCFFKAYKMGLWSPENPERVEIRIGNDAQKAKGYVIPRKDVEREFESLVEAASKWHPAMKGKAMYIMYGIAETPYASFKPALRKKFDLKRGAESDWTALGQKIPRFDNRIIDKCRLIPRLNVCKIRPLSEARGEGDLLHYEITLSLKLLNLRFFRNSNVESLSFEEFKAAFEIAKSAKYKMGKAALKKFLKSISASVLSEDQSEIEAPRESGRASFSRPAMLLLKELIFSGMPPTEFYAKKAGEISNADPNKGIVASDLDFIKLMGNCGWSGIFIPDVETYRFANNGADSAKLINGLIGSQNNPIVRHRLAFFYERIKFLESKFGVPDKVVLEFVREDFMGKEQKKRMQIEMKKRASEKMLIAKKLDEAGYKGGNLLLKMELLEKQGGICLYTGEPLLPSELGVLEIEHIVPRSRGGPDAQYNYALTREKTNKEKADRTPFEWLSSDPVKWAGYSDRVKARAGQLGRKRCELLLEKNAEELVEKYTALAETAHISKLAQKIVCLHFGFQFGGLGGTKRVFTVPGALTARIRSFYGLNKILHNEDLAKDALSYEEVLKRGEELDKKNRKNKKHHALDAMCLCFAPTGVNSKRARIDMLLPPDIRGEREAELFFRKYLDRLIPVDVAPKKPRLEDGIYSMRAVGGKKFMARRVNLVDLAYKSGLKPVYDISALIKLLDKKEKGIINAQIRKLVADFARTNPSEDEWRKWCGECRLPSKNGIGTRVIRVLLNYGEPAEYKDLSKDGRGAFRRGDGHKGQIVWESTDGKYYVVPIYVHASKAKLLAELDANPKKKRVCDIFTSHCMVKIGNTYNDKGELLLHEGVYMVNTIQTDGRGKLTNPNGEKSNLININYLMKAGMRKVSVKDL

SEQ ID NO: 118 - protein, 1057 aa, unidentified
  REGION 1..1057: note = Description of Unknown: uncultivated organism with predicted taxonomy: unclassified Verrucomicrobia (miscellaneous)
  REGION 1..1057: note = MG1-121 effector
KEKNNHVWGFDIGKGSLGEAVRIGGDFKHIASVLLDPEFGEIKTAALVRRQMRTRKAHKAREKWLEECLEGTGVEILKRREVGIVDGQWQLISKGDERLEREFPPSGEDVCYNSIALRCKLLLGEKLEGWQVFKALNSAIQKRGYDENIPWGEAEEKSSKKDDDDYAQKLSQYEKEKSELFESFADGEKYDFPCFFKAYKMGLWSPENPTRVEVRIDCRAQKAKSYVIARKYVEREFECLVEAAAKFFPKLKGRAKFILYGVSETPYASYYGNMRKKFGLKRGAESDWTALGQKVPRFDNRIIDKCRFIPRMNVCKIRPLNEARNEKDLLYYEVTLALKLLNLRFFRNSNIEQLTFEEFKKAFEIAAGAKYKMTKTAMKKFLKSISAIALGDDYAEIEPPKESGRASFSRPAMEILKELIFSGMPPREFYGRKISEISNTDKNKGVVSSDLDFIKLMGDCPWGGIFIPDVQTYQFANAAFPDPDAQINKLIGSQNNPIVRHRLTFFFERIKFLESKYGVPDKVVLEFVRDDFMGEKEKKEMRIAMKKRAEEKMRIAKDLDEHGFKGGNLLLKMELYRKQNGICLYTGDALPLSELATLEIEHIVPRSRGGPDAQYNYVITREKTNKLKGDKTPYEWLSSDAKEWASYTDRVNACAKALGKKRCRLLLEKDAEELVEKYTALAETAHIAKLAQKIVCMHFGFQFGGLSGTKRVFTVPGALTSRIRKFYGLDRILHNSAAESENLSFEEFLKFSEDLEKKNRKNKKHHALDAMCLCFAPTGVDSRRAKLGEILPEKLRSEKAAREFFKSYLDKIMPVDVAPKKPRLEDGIYSKRIIGGKACMVKRNNLVDLAYKSGLKPVFDIPTLIKLVDKKEKGIINPQIRKMIGEFAATNPDESAWRKWCEEVRLPSKSGLGARVMRVLVYYGEADEYKDLSKDGCGAYRKGDGHKGQVIWESVDGKYYVEPVYVHASKAGVMAALNANPKKKRICGMFNSHCTVDVGDVYNDKGDFILPAGRYMVNTIWKSGPCVLTNADGEKRNPININYLMRAGMRRVDLSEL

SEQ ID NO: 119 - protein, 1059 aa, unidentified
  REGION 1..1059: note = Description of Unknown: uncultivated organism with predicted taxonomy: unclassified Verrucomicrobia (miscellaneous)
  REGION 1..1059: note = MG1-122 effector
MEKEKNNHVWGFDIGKGSLGEAVRIGGDFKHIASVLLDPEFGEIKTAALARRQMRTRKAHKAREKWLEECLEGTGVEILKRREVGIVDGQWQLISKGDERLEREFPPSGEDVCYNSIALRCKLLLGEKLEGWQVFKALNSAIQKRGYDENIPWGEAEEKSSKKDDDDYAQKLSQYEKEKSELFESFADGEKYDFPCFFKAYKMGLWSPENPTRVEVRIDCRAQKAKSYVIARKYVEREFECLVEAAAKFFPKLKGRAKFILYGVSKTPYASYYGNMRKKFGLKRGAESDWTALGQKVPRFDNRIIDKCRFIPRMNVCKIRPLNEARNEKDLLYYEVTLALKLLNLRFFRNSNIEQLTFEEFKKAFEIAAGAKYKMTKTAMKKFLKSISATALGDDYAEIEPPKESGRASFSRPAMEILKELIFSGMPPREFYGRKISEISNTDKNKGVVSSDLDFIKLMGDCPWGGIFIPDVQTYQFANAAFPDPDAQINKLIGSQNNPIVRHRLTFFFERIKFLESKYGVPDKVVLEFVRDDFMGEKEKKEMRIAMKKRAEEKMRIAKDLDEHGFKGGNLLLKMELYRKQNGICLYTGDALPLSELATLEIEHIVPRSRGGPDAQYNYVITREKTNKLKGDKTPYEWLSSDAKEWASYTDRVNACAKALGKKRCRLLLEKDAEELVEKYTALAETAHIAKLAQKIVCMHFGFQFGGLSGTKRVFTVPGALTSRIRKFYGLDRILHNSASESENLSFEEFLKFSEDLEKKNRKNKKHHALDAMCLCFAPTGVDSRRAKLGEILPEKLRSEKAAREFFKSYLDKIMPVDVAPKKPRLEDGIYSKRIIGGKACMVKRNNLVDLAYKSGLKPVFDIPTLIKLVDKKEKGIINPQIRKMIGEFAATNPDESAWRKWCEEVRLPSKSGLGARVMRVLVYYGEADEYKDLSKDGCGAYRKGDGHKGQVIWESVDGKYYVEPVYVHASKAGVMAALNANPKKKRICGMFNSHCTVDVGDVYNDKGDFILPAGRYMVNTIRSDNQCVLTNADGEKRNPININYLMRAGMRRVDLSEL

SEQ ID NO: 120 - protein, 1059 aa, unidentified
  REGION 1..1059: note = Description of Unknown: uncultivated organism with predicted taxonomy: unclassified Verrucomicrobia (miscellaneous)
  REGION 1..1059: note = MG1-123 effector
MEKEKNNHVWGFDIGKGSLGEAVRIGGDFKHIASVLLDPEFGEIKTAALARRQMRTRKAHKAREKWLEECLEGTGVEILKRREVGIVDGQWQLISKGDERLEREFPPSGEDVCYNSIALRCKLLLGEKLEGWQVFKALNSAIQKRGYDENIPWGEAEEKSPKKDDDDYAQKLSQYEKEKSELFESFADGEKYDFPCFFKAYKMGLWSPENPTRVEVRIDCRAQKAKSYVIARKYVEREFECLVEAAAKFFPKLKGRAKFILYGVSETPYASYYGNMRKKFGLKRGAESDWTALGQKVPRFDNRIIDKCRFIPRMNVCKIRPLNEARNEKDLLYYEVTLALKLLNLRFFRNSNIEQLTFEEFKKAFEIAAGAKYKMTKTAMKKFLKSISATALGDDYAEIEPPKESGRASFSRPAMEILKELIFSGMPPREFYGRKISEISNTDKNKGVVSSDLDFIKLMGDCPWGGIFIPDVQTYQFANAAFPDPDAQINKLIGSQNNPIVRHRLTFFFERIKFLESKYGVPDKVVLEFVRDDFMGEKEKKEMRIAMKKRAEEKMRIAKDLDEHGFKGGNLLLKMELYRKQNGICLYTGDALPLSELATLEIEHIVPRSRGGPDAQYNYVITREKTNKLKGDKTPYEWLSSDAKEWASYTDRVNACAKALGKKRCRLLLEKDAEELVEKYTALAETAHIAKLAQKIVCMHFGFQFGGLSGTKRVFTVPGALTSRIRKFYGLDRILHNSAAERENLSFEEFLKFSEDLEKKNRKNKKHHALDAMCLCFAPTGVDSRRAKLGEILPEKLRSEKAAREFFKSYLDKIMPVDVAPKKPRLEDGIYSKRIIGGKACMVKRNNLVDLAYKSGLKPVFDIPTLIKLVDKKEKGIINPQIRKMIGEFAATNPDESAWRKWCEEVRLPSKSGLGARIMRVLVYYGEADEYKDLSKDGCGAYRKGDGHKGQVIWESVDGKYYVGPVYVHASKAGVMAALNANPKKKRICGMFNSHCTVDVGDVYNDKGDFILPAGRYMVNTIRSDNQCVLTNADGEKRNPININYLMRTGMRRVDLSEL

SEQ ID NO: 121 - protein, 1073 aa, unidentified
  REGION 1..1073: note = Description of Unknown: uncultivated organism with predicted taxonomy: Verrucomicrobia
  REGION 1..1073: note = MG1-124 effector
MYTKEIIWGFDIGKGSLGEAVRVGNEFKHVQSLEIAPDFAETKTTAAARRAWRTREAHKARELWLEKCLSEAGIEVLLRRKVGVVDGAWKLVSKGDVRLEREFPPAGEDLCYNSIALRCKLLLGEKLESWQVFKALNSAIQNRGYDANIPWGDEDAADGGDGSSRKSSDSDASGDGESYAEKLAHYEREFDGILAELDNREKYEFPCFFKAAKMGLWSPENPDFVGVRIDNTAEKAKGYVVPREAVVREFRALVNAAALQYPNLKGKADFIMFGRACEPYASYNPELRKRFGLKRGAATDWTALGQKTPRFDNRVIDKCKLIPRLNVCKIKPLDECKTDDDFLSYTITLSLKLLNLRFFRGAGVDSLSFDEFLRAFELAKNSKFKLGKAALKKFFKTIGAEVMDESQSEIEQPRNGGRAAFSRPAMRILRDLIFSGKSPAEFYATAIENIANTDKNKGLVAGDLDFLKLMGDAPWSGIFIPDVGLSDFADASEAAREAQINKLIGSQNDPIVRHRLSFFYERIKSLEAKFGVPDKIVLEFVRDDFLGKKAKSDLNKAIKTRFDEKKKLAEDLDSKREEFGFKYASKKMLLKFELYKKQGGECVYTGNALPLSELESLEIEHIVPRSRGGPDAMYNYVLTDEKTNKEKGDRTPFEWRSTMGAEWESYCERVRKLTKELGAKRCKLLLSPNAAELVEKYTALAETAWISKLAQRICCLHFGFQFGGLAGAKKVWTVSGNTTAMIRGRYGLNRLLHDEESAEDLSLFDRICMEKKFEEKNRKNKKHHALDAMCLCFAPTSNAKKASAYKNILPEEITRNPESDEARKFFGKYLASVIPNKVAVEKPTLEQTIYAMRKGRIVKKCNVRDLAYTGINPKYNYSTLVKSIKSIVGEVPKRIISDFVLSNPKLSESEWEDWCKNNAAIPSKNGAPTKLLRVLCDAGNPEEYKDLSKDGCGAYRKGDSHKGQFIWKTKQGRYVVAPVYAHASKAKVLAALKNNPDCAEVCGFFRQNCLVEIPNDVVDKSGKMLLKAGVYRSNSIWASGHAQLTNSDGVSPNPISIQYLMPAGMKRIKLDTV

SEQ ID NO: 122 - protein, 1062 aa, unidentified
  REGION 1..1062: note = Description of Unknown: uncultivated organism with predicted taxonomy: Verrucomicrobia
  REGION 1..1062: note = MG1-125 effector
MNNNNTQIWGFDIGKASLGEAVWCGGKFKHVESLILDKDFAEIKTSAGRRRQARTRKAHKAREEWLEKCLEDCGIEILKRRKVGIVNGQWKLISKGDARLEKEFPAEGEEVCYNSIALRCKLILGEKLESWQIFKALNSSIQHRGYDENIPWKETQNESKKEDGDYFKKIVLYESEKEDILNRLPQECKREDFDFPCFFKAKKMGIWSEENPYKVGLRISNNAQKAKGYVIPRKYVENEFVRLVQMASLQYPKLKDKQMFILYGISETPYASRFKDARKKFGLKRGADSDWTALGQKIPRFDNRMIGKCKLIPRLNTCKIKSPDKIKSEEDLLHYDITLALKLLNLRFFKDSEICALSFEEFKKLFEIGKSNKYKISKTDLKKFLKSIGASVLSQDHSEIEAPRTSGRSSFSRPAMKILKELIFSGEPPSKFLKAKIDKIANTDPNKGIIREDLDFIRIMGDCPWNGIFIPDVETYKYASQTQESSEAQINKLIGSQNDPIVRHRLSFFYERIKALSEKFGVPDKIVLEFVREDFMGKQAKKDLSLSMKKRFEEKIDIAKKLDDIGYKGNKMLLKMELLQKQGFACLYTGEALQETDLPILEIEHIVPRSLGGPDAAYNYVLTSESTNKAKGNQTPYKWLSPDRDKWRAYTERVRARAAELGSKRCRLLLSENAEELINKYTALAETAWISKLAQRIVCMHFGFQFGGNTGEKRVFTVPGNITAKIRSAFGLNKILHNIDADKKNMSEFDIVKLDYELDKKNRKNKKHHALDAMCLCFAPTGPNAQKLGIGALLPPEIAAKAEEFFRGYIEKVVPNEVAPKKPKLEESIYSKRTINRKECIVRKFNLVDLAYKSGLKPVYDISAIEKLLEDKPKKIPPIINPTVRRIVRDFVSTNPNEDEWRNWCKTVRMPSKNRNGTRIIRVLVYVGTPEEYKDLSKDGCGAFRKGDSHKGQIIWMDKNGRYKVSPVYVHSSKSQTMESIKSNPDFIKIAGFFKSHCLVEIESPVVNGKRDVLLSPGTYMINTIMAAGMAILSDTNGVKSPAININYLMNAGMRRISIKYK

SEQ ID NO: 123 - protein, 1054 aa, unidentified
  REGION 1..1054: note = Description of Unknown: uncultivated organism with predicted taxonomy: unclassified Verrucomicrobia (miscellaneous)
  REGION 1..1054: note = MG1-126 effector
MEKEKNNHVWGFDIGKGSLGEAVRIGGDFKHIASVLLDPEFGEIKTAALARRQMRTRKAHKAREKWLEECLEGTGVEILKRREVGIVDGQWQLISKGDERLEREFPPSGEDVCYNSIALRCKLLLGEKLEGWQVFKALNSAIQKRGYDENIPWGEAEEKSSKKDDDDYAQKLSQYEKEKSELFESFADGEKYDFPCFFKAYKMGLWSPENPTRVEVRIDCRAQKAKSYVIARKYVEREFECLVEAAAKFFPKLKGRAKFILYGVSETPYASYYGNMRKKFGLKRGAESDWTALGQKVPRFDNRIIDKCRLIPRMNVCKIRPLNEARNEKDLLYYEVTLALKLLNLRFFRNSNIEQLTFEEFKKAFEIAAGAKYKMTKTAMKKFLKSISATALGDDYAEIEPPKESGRASFSRPAMEILKELIFSGMPPREFYGRKISEISNTDKNKGVVSSDLDFIKLMGDCPWGGIFIPDVQTYQFANAAFPDPDAQINKLIGSQNNPIVRHRLTFFFERIKFLESKYGVPDKVVLEFVRDDFMGEKEKKEMRIAMKKRAEEKMRIAKDLDEHGFKGGNLLLKMELYRKQNGICLYTGDALPLSELATLEIEHIVPRSRGGPDAQYNYVITREKTNKLKGDKTPYEWLSSDAKEWASYTDRVNACAKALGKKRCRLLLEKDAEELVEKYTALAETAHIAKLAQKIVCMHFGFQFGGLSGTKRVFTVPGALTSRIRKFYGLDRILHNSAAESENLSFEEFLKFSEDLEKKNRKNKKHHALDAMCLCFAPTGVDSRRAKLGEILPEKLRSEKAAREFFKSYLDKIMPVDVAPKKPRLEDGIYSKRIIGGKACMVKRNNLVDLVKPVFDIPTLIKLVDKKEKGIINPQIRKMIGEFAATNPDESAWRKWCEEVRLPSKSGLGARIMRVLVYYGEADEYKDLSKDGCGAYRKGDGHKGQVIWESVDGKYYVEPVYVHASKAGVMAALNANPKKKRICGMFNSHCTVDVGDVYNDKGDFILPAGRYMVNTIQKNGQCVLTNADGEKRNPININYLMRAGMRRVELSEL

SEQ ID NO: 124 - protein, 1073 aa, unidentified; identical to SEQ ID NO: 103
  REGION 1..1073: note = Description of Unknown: uncultivated organism with predicted taxonomy: Verrucomicrobia
  REGION 1..1073: note = MG1-127 effector

SEQ ID NO: 125 - protein, 1059 aa, unidentified
  REGION 1..1059: note = Description of Unknown: uncultivated organism with predicted taxonomy: unclassified Verrucomicrobia (miscellaneous)
  REGION 1..1059: note = MG1-128 effector
MEKEKNNHVWGFDIGKGSLGEAVRIGGDFKHIASVLLDPEFGEIKTAALARRQMRTRKAHKAREKWLEECLEGTGVEILKRREVGIVDGQWQLISKGDERLEREFPPSGEDVCYNSIALRCKLLLGEKLEGWQVFKALNSAIQKRGYDENIPWGEAEEKSSKKDDDDYAQKLSQYEKEKSELFESFADGEKYDFPCFFKAYKMGLWSPENPTRVEVRIDCRAQKAKSYVIARKYVEREFECLVEAAAKFFPKLKGRAKFILYGVSETPYASYYGNMRKKFGLKRGAESDWTALGQKVPRFDNRIIDKCRLIPRMNVCKIRPLNEARNEKDLLYYEVTLALKLLNLRFFRNSNIEQLTFEEFKKAFEIAAGAKYKMTKTAMKKFLKSISATALGDDYAEIEPPKESGRASFSRPAMEILKELIFSGMPPREFYGRKISEISNTDKNKGVVSSDLDFIKLMGDCPWGGIFIPDVQTYQFANAAFPDPDAQINKLIGSQNNPIVRHRLTFFFERIKFLESKYGVPDKVVLEFVRDDFMGEKEKKEMRIAMKKRAEEKMRIAKDLDEHGFKGGNLLLKMELYRKQNGICLYTGDALPLSELATLEIEHIVPRSRGGPDAQYNYVITREKTNKLKGDKTPYEWLSSDAKEWASYTDRVNACAKALGKKRCRLLLEKDAEELVEKYTALAETAHIAKLAQKIVCMHFGFQFGGLSGTKRVFTVPGALTSRIRKFYGLDRILHNSASESENLSFEEFLKFSEDLEKKNRKNKKHHALDAMCLCFAPTGVDSRRAKLGEILPEKLRSEKAAREFFKSYLDKIMPVDVAPKKPRLEDGIYSKRIIGGKACMVKRNNLVDLAYKSGLKPVFDIPTLIKLVDKKEKGIINPQIRKMIGEFAATNPDESAWRKWCEEVRLQSKSGLGARVMRVLVYYGEADEYKDLSKDGCGAYRKGDGHKGQVIWESVDGKYYVEPVYVHASKAGVMAALNANPKKKRICGMFNSHCTVDVGDVYNDKGDFILPAGRYMVNTILTTGRCVLTNADGEKRNPININYLMRAGMRRVELSEL

SEQ ID NO: 126 - protein, 1073 aa, unidentified
  REGION 1..1073: note = Description of Unknown: uncultivated organism with predicted taxonomy: Verrucomicrobia
  REGION 1..1073: note = MG1-129 effector
MYTKEIIWGFDIGKGSLGEAVRVGNEFKHVQSLEIAPDFAETKTTAAARRAWRTREAHKARELWLEKCLSEAGIEVLLRRKVGVVDGAWKLVSKGDVRLEREFPPAGEDLCYNSIALRCKLLLGEKLESWQVFKALNSAIQNRGYDANIPWGDEDAADGGDGSSRKSSDSDASGDGESYAEKLAHYEREFDGILAELDNREKYEFPCFFKAAKMGLWSPENPDFVGVRIDNTAEKAKGYVVPREAVVREFRALVNAAALQYPNLKGKADFIMFGRACEPYASYNPELRKRFGLKRGAATDWTALGQKTPRFDNRIIDKCKLIPRLNVCRIKPLDKCKTDDDFLSYTITLSLKLLNLRFFRGAGVDSLSFDEFLRAFELAKNSKFKLGKAALKKFFKTIGAEVMDESQSEIEQPRNGGRAAFSRPAMRILRDLIFSGKSPAEFYAAAIENIANTDKNKGLVAGDLDFLKLMGDAPWSGIFIPDIGLSDFADASEAAREAQINKLIGSQNDPIVRHRLSFFYERIKSLEAKFGVPDKIVLEFVRDDFLGKKAKSDLNKAIKTRFDEKKKLAEDLDSKREEFGFKYASKKMLLKFELYKKQGGECVYTGNALPLSELESLEIEHIVPRSRGGPDAMYNYVLTDEKTNKEKGDRTPFEWRSTMGAEWESYCERVRKLTKELGAKRCKLLLSPNAAELVEKYTALAETAWISKLAQRICCLHFGFQFGGLAGAKKVWTVSGNTTAMIRGRYALNRLLHDEESAEDLSLFDRICMEKKFEEKNRKNKKHHALDAMCLCFAPTSNAKKASAYKNILPEEITRNPESDEARKFFGKYLANVIPNKVAVEKPTLEQTIYAMRKGRIVKKCNVRDLAYTGINPKYNYSTLVKSIKSIVGEVPKRIISDFVLSNPKLSESEWEDWCKNNAAIPSKNGAPTKLLRVLCDAGNPEEYKDLSKDGCGAYRKGDSHKGQFIWKTKQGRYVVAPVYAHASKAKVLAALKNNPDCAEVCGFFRQNCLVEIPNDVVDKSGKMLLKAGVYRSNSIWASGHAQLTNSDGVSPNPISIQYLMPAGMKRIKLDTV

SEQ ID NO: 127 - protein, 1059 aa, unidentified
  REGION 1..1059: note = Description of Unknown: uncultivated organism with predicted taxonomy: unclassified Verrucomicrobia (miscellaneous)
  REGION 1..1059: note = MG1-130 effector
MEKEKNNHVWGFDIGKGSLGEAVRIGGDFKHIASVLLDPEFGEIKTAALARRQMRTRKAHKAREKWLEECLEGTGVEILKRREVGIVDGQWQLISKGDERLEREFPPSGEDVCYNSIALRCKLLLGEKLEGWQVFKALNSAIQKRGYDENIPWGEAEEKSSKKDDDDYAQKLSQYEKEKPELFESFADGEKYDFPCFFKAYKMGLWSPENPTRVEVRIDCRAQKAKSYVIARKYVEREFECLVEAAAKFFPKLKGRAKFILYGVSETPYASYYGNMRKKFGLKRGAESDWTALGQKVPRFDNRIIDKCRFIPRMNVCKIRPLNEARNEKDLLYYEVTLALKLLNLRFFRNSNIEQLTFEEFKKAFEIAAGAKYKMTKTAMKKFLKSISATALGDDYAEIEPPKESGRASFSRPAMEILKELIFSGMPPREFYGRKISEISNTDKNKGVVSSDLDFIKLMGDCPWGGIFIPDVQTYQFANAAFPDPDAQINKLIGSQNNPIVRHRLTFFFERIKFLESKYGVPDKVVLEFVRDDFMGEKEKKEMRIAMKKRAEEKMRIAKDLDEHGFKGGNLLLKMELYRKQNGICLYTGDALPLSELATLEIEHIVPRSRGGPDAQYNYVITREKTNKLKGDKTPYEWLSSDAKEWASYTDRVNACAKALGKKRCRLLLEKDAEELVEKYTALAETAHIAKLAQKIVCMHFGFQFGGLSGTKRVFTVPGALTSRIRKFYGLDRILHNSAAESENLSFEEFLKFSEDLEKKNRKNKKHHALDAMCLCFAPTGVDSRRAKLGEILPEKLRSEKAAREFFKSYLDKIMPVDVAPKKPRLEDGIYSKRIIGGKACMVKRNNLVDLAYKSGLKPVFDIPTLIKLVDKKEKGIINPQIRKMIGEFAATNPNESAWRKWCEEVRLPSKSGLGARVMRVLVYYGEADEYKDLSKDGCGAYRKGDEHKGQVIWESVDGKYYVEPVYVHASKAGVMAALNANPKKKRICGMFNSHCTVDVGDVYNDKGDFILPAGRYMVNTIRSDNQCVLTNADGEKRNPININYLMRAGMRRVDLSEL

SEQ ID NO: 128 - protein, 1077 aa, unidentified; identical to SEQ ID NO: 89
  REGION 1..1077: note = Description of Unknown: uncultivated organism with predicted taxonomy: unclassified Verrucomicrobia (miscellaneous)
  REGION 1..1077: note = MG1-131 effector

SEQ ID NO: 129 - protein, 1059 aa, unidentified
  REGION 1..1059: note = Description of Unknown: uncultivated organism with predicted taxonomy: unclassified Verrucomicrobia (miscellaneous)
  REGION 1..1059: note = MG1-132 effector
MEKEKNNHVWGFDIGKGSLGEAVRIGGDFKHIASVLLDPEFGEIKTAALARRQMRTRKAHKAREKWLEECLEGTGVEILKRREVGIVDGQWQLISKGDERLEREFPPSGEDVCYNSIALRCKLLLGEKLEGWQVFKALNSAIQKRGYDENIPWGEAEEKSSKKDDDDYAQKLSQYEKEKSELFESFADGEKYDFPCFFKAYKMGLWSPENPTRVEVRIDCRAQKAKSYVIARKYVEREFECLVEAAAKFFPKLKGRAKFILYGVSETPYASYYGNMRKKFGLKRGAESDWTALGQKVPRFDNRIIDKCRFIPRMNVCKIRPLNEARNEKDLLYYEVTLALKLLNLRFFRNSNIEQLTFEEFKKAFEIAAGAKYKMTKTAMKKFLKSISATALGDDYAEIEPPKESGRASFSRPAMEILKELIFSGMPPREFYGRKISEISNTDKNKGVVSSDLDFIKLMGDCPWGGIFIPDVQTYQFANAAFPDPDAQINKLIGSQNNPIVRHRLTFFFERIKFLESKYGVPDKVVLEFVRDDFMGEKEKKEMRIAMKKRAEEKMRIAKDLDEHGFKGGNLLLKMELYRKQNGICLYTGDALPLSELATLEIEHIVPRSRGGPDAQYNYVITREKTNKLKGDKTPYEWISSDAKEWASYTDRVNACAKALGKKRCRLLLEKDAEELVEKYTALAETAHIAKLAQKIVCMHFGFQFGGLSGTKRVFTVPGALTSRIRKFYGLDRILHNSAAESENLSFEEFLKFSEDLEKKNRKNKKHHALDAMCLCFAPTGVDSRRAKLGEILPEKLRSEKAAREFFKSYLDKIMPVDVAPKKPRLEDGIYSKRIIGGKACMVKRNNLVDLAYKSGLKPVFDIPTLIKLVDKKEKGIINPQIRKMIGEFAATNPDESAWRKWCEEVRLPSKSGLGARVMRVLVYYGEADEYKDLSKDGYGAYRKGDGHKGQVIWESVDGKYYVEPVYVHASKAGVMAALNANPKKKRICGMFNSHCTVDVGDVYNDKGDFILPAGRYMVNTIRSDNQCVLTNADGEKRNPININYLMRAGMRRVDLSEL

SEQ ID NO: 130 - protein, 1062 aa, unidentified
  REGION 1..1062: note = Description of Unknown: uncultivated organism with predicted taxonomy: Coraliomargarita sp. CAG:312
  REGION 1..1062: note = MG1-133 effector
MNNNNTQIWGFDIGKASLGEAVWCGGKFKHVESLILDKDFAEIKTSAGRRRQARTRKAHKAREEWLEKCLEDCGIEILKRRKVGIVNGQWKLISKGDARLEKEFPAEGEEVCYNSIALRCKLILGEKLESWQIFKALNSSIQHRGYDENIPWKETQNESKKEDGDYFKKIVLYESEKEDILNRLPQECKREDFDFPCFFKAKKMGIWSEENPYKVGLRISNNAQKAKGYVIPRKYVENEFVRLVQMASLQYPKLKDKQMFILYGISETPYASRLKDARKKFGLKRGADSDWTALGQKIPRFDNRMIGKCKLIPRLNTCKIKSPEKIKSEEDLLHYDITLALKLLNLRFFKDSEICALSFEEFKKLFEIGKSNKYKISKTDLKKFLKSIGASVLSQDHSEIEAPRTSGRSSFSRPAMKILKELIFSGEPPSKFLKAKIDKIANTDPNKGIIREDLDFIRIMGDCPWNGIFIPDVETYKYASQTQESSEAQINKLIGSQNDPIVRHRLSFFYERIKALSEKFGVPDKIVLEFVREDFMGKQAKKDLSLSMKKRFEEKIDIAKKLDDIGYKGNKMLLKMELLQKQGFACLYTGEALQETDLPILEIEHIVPRSLGGPDAAYNYVLTSESTNKAKGNQTPYKWLSPDRDKWRAYTERVRARAAELGSKRCRLLLSENAEELINKYTALAETAWISKLAQRIVCMHFGFQFGGNTGEKRVFTVPGNITAKIRSAFGLNKILHNIDADKKNMSEFDIVKLDYELDKKNRKNKKHHALDAMCLCFAPTGPNAQKLGIGALLPPEIAAKAEEFFRGYIEKVVPNEVAPKKPKLEESIYSKRTINRKECIVRKFNLVDLAYKSGLKPVYDISAIEKLLEDKPKKIPPIINPTVRRIVRDFVSTNPNEDEWRNWCKTVRMPSKNRNGTRIIRVLVYVGTPEEYKDLSKDGCGAFRKGDSHKGQIIWMDKNGRYKVSPVYVHSSKSQTMESIKSNPDFIKIAGFFKSHCLVEIESPVVNGKGDVLLSPGTYMINTIMAAGMAILSDTNGVKSPAININYLMNAGMRRISIKYK

SEQ ID NO: 131 - protein, 1061 aa, unidentified
  REGION 1..1061: note = Description of Unknown: uncultivated organism with predicted taxonomy: unclassified Verrucomicrobia (miscellaneous)
  REGION 1..1061: note = MG1-134 effector
MKVMEDEGGNHIWGFDIGKGSLGEAVLDGSEFKHVASLLLDADFGEIKTAAGLRRQMRTRKAHKAREKWLESCLSGFGMETLKRREVGIVNGQWTLISKGDERLEREFPPDGENICYNSIALRCKLLLGEKLEGWQIFKALNSAIQNRGYDENIPWKESDASPSKKEDGDYAQKLSQYSREKSELFESFEGGEKYDYPCFFKACKMGLWSPDNPERVEVRIGSDAQKAKGYVIPRKDVEREFERLVEAASKWYPAMKGKAMYIMYGIAETPYASFKPLLRKKFDLKRGAESDWTALGQKIPRFDNRIIDKCRLIPRLNVCKIRPLSEIRGEADLLHYEITLSLKLLNLRFFRNSNVESLSFGEFKAAFEIAKGAKYKMGKAALKKFLKSISASVLSEDQSEIEAPRESGRAAFSRPAMLLLKELIFSGMTPAEFYAKKSGEISNADPNKGIVASDLDFIKLMGNCGWSGIFIPDVDTFHFANKGAEPAKLINELIGSQNNPIVRHRLSFFYERIKFLESKFGIPDKVVLEFVREDFMGKEQKKRMQIEMKKRASEKMLIAKKLDEAGYKGGNLLLKMELLEKQGGVCLYTGEPLLPSELGVLEIEHIVPRSRGGPDAQYNYVLTREKTNKEKADRTPFEWLSSDPVKWAGYSDRVKARAGQLGRKRCELLLEKNAEELVEKYTALAETAHISKLAQKIVCLHFGFQFGGLSGTKRVFTVPGALTARIRTFYGLNKILHNEDLAHETLSFEGFLKRGEELDKKNRANKKHHALDAMCLCFAPTGVNSKRARVDMLLPPKIRSEKEAELFFRKYLDKLIPVDVAPKKPKLEDGIYSMRMVGGKKIMARRVNLVDLAYKSGLKPVYDVSVLIKLLDKKERGIINPQIRKLVADFARTNPSEDEWKKWCGECRLPSKNGLGTRVIRVLLNYGEPAEYKDLSKDGRGAFRRGDGHKGQIVWESTDGKYCVLPIYVHASKAKLLAELCANPKKKRICGIFTSHCMVKVGNTYNNKGELLLPEGVYMLNTIRTDGWIQLTSANGDKSKPININYLMKAGMKKVPVKDL

SEQ ID NO: 132 - protein, 1058 aa, unidentified
  REGION 1..1058: note = Description of Unknown: uncultivated organism with predicted taxonomy: unclassified Verrucomicrobia (miscellaneous)
  REGION 1..1058: note = MG1-135 effector
MEKEKNNHVWGFDIGKGSLGEAVRIGGDFKHIASVLLDPEFGEIKTAALVRRQMRTRKAHKAREKGLEECLEGTGVEILKRREVGIVDGQWQLISKGDERLEREFPPSGEDVCYNSIALRCKLLLGEKLEGWQVFKALNSAIQKRGYDENIPWGEAEEKSSKKDDDDYAQKLSQYEKEKSELFESFADGEKYDFPCFFKAYKMGLWSPENPTRVEVRIDCRAQKAKSYVIARKYVEREFECLVEAAAKFFPKLKGRAKFILYGVSETPYASYYGNMRKKFGLKRGAESDWTALGQKVPRFDNRIIDKCRLIPRMNVCKIRPLNEARNEKDLLYYEVTLALKLLNLRFFRNSNIEQLTFEEFKKAFEIAAGAKYKMTKTAMKKFLKSISATALGDDYAEIEPPKESGRASFSRPAMEILKELIFSGMPPREFYGRKISEISNTDKNKGVVSSDLDFIKLMGDCPWGGIFIPDVQTYQFANAAFPDPDAQINKLIGSQNNPIVRHRLTFFFERIKFLESKYAVPDKVVLEFVRDDFMGEKEKKEMRIAMKKRAEEKMRIAKDLDEHGFKGGNLLLKMELYRKQNGICLYTGDALPLSELATLEIEHIVPRSRGGPDAQYNYVITREKTNKLKGDKTPYEWLSSDAKEWASYTDRVNACAKALGKKRCRLLLEKDAEELVEKYTALAETAHIAKLAQKIVCMHFGFQFGGLSGTKRVFTVPGALTSRIRKFYGLDRILHNSAAESENLSFEEFLKFSEDLEKKNRKNKKHHALDAMCLCFAPTGVDSGRAKLGEILPEKLRSEKAAREFFKSYLDKIMPVDVAPKKPRLEDGIYSKRIIGGKACMVKRNNLVDLAYKSGLKPVFDIPTLIKLVDKKEKGIINPQIRKMIGEFAATNPDESAWRKWCEEVRLPSKSGLGARVMRVLVYYGEADEYKDLSKDGCGAYRKGDGHKGQVIWESVDGKYYVEPVYVHASKAGAMAALNANPKKKRICGMFNSHCTVDVGDVYNDNGDFILPAGRYMVNTIKKNGQCVLSDANNEKNTININYLMRAGMRRIELSEL

SEQ ID NO: 133 - protein, 1073 aa, unidentified
  REGION 1..1073: note = Description of Unknown: uncultivated organism with predicted taxonomy: Verrucomicrobia
  REGION 1..1073: note = MG1-136 effector
MYTKEIIWGFDIGKGSLGEAVRVGNEFKHVQSLEIAPDFAETKTTAAARRAWRTREAHKARELWLEKCLSEAGIEVLLRRKVGVVDGAWKLVSKGDVRLEREFPPAGEDLCYNSIALRCKLLLGEKLESWQVFKALNSAIQNRGYDANIPWGDEDAADGGDGSSRKSSDSDASGDGESYAEKLAHYEREFDGILAELDNREKYEFPCFFKAAKMGLWSPENPDFVGVRIDNTAEKAKGYVMPREAVVREFRALVNAAALQYPNLKGKADFIMFGRACEPYASYNPELRKRFGLKRGAATDWTALGQKTPRFDNRVIDKCKLIPRLNVCKIKPLDECKTDDDFLSYTITLSLKLLNLRFFRGAGVDSLSFDEFLRAFELAKNSKFKLGKAALKKFFKTIGAEVMDESQSEIEQPRNGGRAAFSRPAMRILRDLIFSGKSPAEFYATAIENIANTDKNKGLVAGDLDFLKLMGDAPWSGIFIPDVGLSDFADASAAAREAQINKLIGSQNDPIVRHRLSFFYERIKSLEAKFGVPDKIVLEFVRDDFLGKKAKSDLNKAIKTRFDEKKKLAEDLDSKREEFGFKYASKKMLLKFELYKKQGGECVYTGNALPLSELESLEIEHIVPRSRGGPDAMYNYVLTDEKTNKEKGDRTPFEWRSTMGAEWESYCERVRKLTKELGAKRCKLLLSPNAAELVEKYTALAETAWISKLAQRICCLHFGFQFGGLAGAKKVWTVSGNTTAMIRGRYGLNRLLHDEESAEDLSLFDRICMEKKFEEKNRKNKKHHALDAMCLCFAPTSNAKKASAYKNILPEEITRNPESDEARKFFGKYLASVIPNKVAVKKSALEQTIYALRKGRIVKKCNVRDLAYTGINPKYNYSTLVKSIKSIVGEVPKRIVSDFVLSNSDLSESEWEDWCKNNAAIPSKNGAPTKLLRVLCDAGNPEEYKDLSKDGCGAYRKGDSHKGQFIWKTKQGRYVVAPVYAHASKAKVLAALKNNPDCAEVCGFFRQNCLVEIPNDVIDKSGKMLLKSGIYKSNTIMSDGRAKFTNSDGISTNPISIQYLMPAGMKRIKLDTV

SEQ ID NO: 134 - protein, 1059 aa, unidentified
  REGION 1..1059: note = Description of Unknown: uncultivated organism with predicted taxonomy: unclassified Verrucomicrobia (miscellaneous)
  REGION 1..1059: note = MG1-137 effector
MEKEKNNHVWGFDIGKGSLGEAVRIGGDFKHIASVLLDSEFGEIKTAALVRRQMRTRKAHKAREKWLEECLEGTGVEILKRREVGIVDGQWQLISKGDERLEREFPPSGEDVCYNSIALRCKLLLGEKLEGWQVFKALNSAIQKRGYDENIPWGEAEEKSSKKDDDDYAQKLSQYEKEKSELFESFADGEKYDFPCFFKAYKIGLWSPENPTRVEVRIDCRAQKAKSYVIARKYVEREFECLVEAAAKFFPKLKGRAKFILYGVSETPYASYYGNMRKKFGLKRGAESDWTALGQKVPRFDNRIIDKCRLIPRMNVCKIRPLNEARNEKDLLYYEVTLALKLLNLRFFRNSNIEQLTFEEFKKAFEIAAGAKYKMTKTAMKKFLKSISATALGDDYAEIEPPKESGRASFSRPAMEILKELIFSGMPPREFYGRKISEISNTDKNKGVVSSDLDFIKLMGDCPWGGIFIPDVQTYQFANAAFPDPDAQINKLIGSQNNPIVRHRLTFFFERIKFLESKYGVPDKVVLEFVRDDFMGEKEKKEMRIAMKKRAEEKMRIAKDLDEHGFKGGNLLLKMELYRKQNGICLYTGDALPLSELATLEIEHIVPRSRGGPDAQYNYVITREKTNKLKGDKTPYEWLSSDAKEWASYTDRVNACAKALGKKRCRLLLEKDAEELVEKYTALAETAHIAKLAQKIVCMHFGFQFGGLSGTKRVFTVPGALTSRIRKFYGLDRILHNSAAESENLSFEEFLKFSEDLEKKNRKNKKHHALDAMCLCFAPTGVDSRRAKLGEILPEKLRSEKAAREFFKSYLDKIMPVDVAPKKPRLEDGIYSKRIIGGKACMVKRNNLVDLAYKSGLKPVFDIPTLIKLVDKKEKGIINPQIRKMIGEFAATNPDESAWRKWCEEVRLPSKSGLGARVMRVLVYYGEADEYKDLSKDGCGAYRKGDGHKGQVIWESVDGKYYVEPVYVHASKAGVMAALNANPKKKRICGMFNSHCTVDVGDVYNDKGDFILPAGRYMVNTIRSDNQCVLTNADGEKRNPININYLMRAGMRRVDLSEL

SEQ ID NO: 135 - protein, 1059 aa, unidentified; identical to SEQ ID NO: 86
  REGION 1..1059: note = Description of Unknown: uncultivated organism with predicted taxonomy: unclassified Verrucomicrobia (miscellaneous)
  REGION 1..1059: note = MG1-138 effector

SEQ ID NO: 136 - protein, 1059 aa, unidentified
  REGION 1..1059: note = Description of Unknown: uncultivated organism with predicted taxonomy: unclassified Verrucomicrobia (miscellaneous)
  REGION 1..1059: note = MG1-139 effector
MEKEKNNHVWGFDIGKGSLGEAVRIGGDFKHIASVLLDPEFGEIKTAALVRRQMRTRKAHKAREKWLEECLEGTGVEILKRREVGIVDGQWQLISKGDERLEREFPPSGEDVCYNSIALRCKLLLGEKLEGWQVFKALNSAIQKRGYDENIPWGEAEEKSSKKDDDDYAQKLSQYEKEKSELFESFADGEKYDFPCFFKAYKMGLWSPENPTRVEVRIDCRAQKAKSYVIARKYVEREFECLVEAAAKFFPKLKGRAKFILYGVSETPYASYYGNMRKKFGLKRGAESDWTALGQKVPRFDNRIIDKCRFIPRMNVCKIRPLNEARNEKDLLYYEVTLALKLLNLRFFRNSNIEQLTFEEFKKAFEIAAGAKYKMTKTAMKKFLKSISATALGDDYAEIEPPKESGRASFSRPAMEILKELIFSGMPPREFYGRKISEISNTDKNKGVVSSDLDFIKLMGDCPWGGIFIPDVQTYQFANAAFPDPDAQINKLIGSQNNPIVRHRLTFFFERIKFLESKYGVPDKVVLEFVRDDFMGEKEKKEMRIAMKKRAEEKMRIAKDLDEHGFKGGNLLLKMELYRKQNGICLYTGDALPLSELATLEIEHIVPRSRGGPDAQYNYVITREKTNKLKGDKTPYEWLSSDAKEWASYTDRVNACAKALGKKRCRLLLEKDAEELVEKYTALAETAHIAKLAQKIVCMHFGFQFGGLSGTKRVFTVPGALTSRIRKFYGLDRILHNSAAESENLSFEEFLKFSEDLEKKNRKNKKHHALDAMCLCFAPTGVDSRRAKLGEILPEKLRSEKAAREFFKSYLDKIMPVDVAPKKPRLEDGIYSKRIIGGKACMVKRNNLVDLAYKSGLKPVFDIPTLIKLVDKKEKGIINPQIRKMIGEFAATNPDESAWRKWCEEVRLPSKSGLGARIMRVLVYYGEADEYKDLSKDGCGAYRKGDGHKGQVIWESVDGKYYVEPVYVHASKAGVMAALNANPKKKRICGMFNSHCTVDVGDVYNDKGDFILPAGRYMVNTILTTGRCVLTNADGEKRNPININYLMRAGMRRVELSEL

SEQ ID NO: 137 - protein, 1059 aa, unidentified
  REGION 1..1059: note = Description of Unknown: uncultivated organism with predicted taxonomy: unclassified Verrucomicrobia (miscellaneous)
  REGION 1..1059: note = MG1-140 effector
MEKEKNNHVWGFDIGKGSLGEAVRIGGDFKHIASVLLDPEFGEIKTAALARRQMRTRKAHKAREKWLEECLEGTGVEILKRREVGIVDGQWQLISKGDERLEREFPPSGEDVCYNSIALRCKLLLGEKLEGWQVFKALNSAIQKRGYDENIPWGEAEEKSSKKDDDDYAQKLSQYEKEKSELFESFADGEKYDFPCFFKAYKMGLWSPENPTRVEVRIDCRAQKAKSYVIARKYVEREFECLVEAAAKFFPKLKGRAKFILYGVSETPYASYYGNMRKKFGLKRGAESDWTALGQKVPRFDNRIIDKCRFIPRMNVCKIRPLNEARNEKDLLYYEVTLALKLLNLRFFRNSNIEQLTFEEFKKAFEIAAGAKYKMTKTAMKKFLKSISATALGDDYAEIEPPKESGRASFSRPAMEILKELIFSGMPPREFYGRKISEISNTDKNMGVVSSDLDFIKLMGDCPWGGIFIPDVQTYQFANAAFPDPDAQINKLIGSQNNPIVRHRLTFFFERIKFLESKYGVPDKVVLEFVRDDFMGEKEKKEMRIAMKKRAEEKMRIAKDLDEHGFKGGNLLLKMELYRKQNGICLYTGDALPLSELATLEIEHIVPRSRGGPDAQYNYVITREKTNKLKGDKTPYEWLSSDAKEWASYTDRVNACAKALGKKRCRLLLEKDAEELVEKYTALAETAHIAKLAQKIVCMHFGFQFGGLSGTKRVFTVPGALTSRIRKFYGLDRILHNSAAESENLSFEEFLKFSEDLEKKNRKNKKHHALDAMCLCFAPTGVDSRRAKLGEILPEKLRSEKAAREFFKSYLDKIMPVDVAPKKPRLEDGIYSKRIIGGKACMVKRNNLVDLAYKSGLKPVFDIPTLIKLVDKKEKGIINPQIRKMIGEFAATNPDESAWRKWCEEVRLPSKSGLGARIMRVLVYYGEADEYKDLSKDGCGAYRKGDGHKGQVIWESVDGKYYVEPVYVHASKAGVMAALNANPKKKRICGMFNSHCAVDVGDVYNDKGDFILPAGRYMVNTIRSDNQCVLTNADGEKRNPININYLMRAGMRRVDLSEL

SEQ ID NO: 138 - protein, 1073 aa, unidentified
  REGION 1..1073: note = Description of Unknown: uncultivated organism with predicted taxonomy: Verrucomicrobia
  REGION 1..1073: note = MG1-141 effector
MYTKEIIWGFDIGKGSLGEAVRVGNEFKHVQSLEIAPDFAETKTTAAARRAWRTREAHKARELWLEKCLSEAGIEVLLRRKVGVVDGAWKLVSKGDVRLEREFPPAGEDLCYNSIALRCKLLLGEKLESWQVFKALNSAIQNRGYDANIPWGDEDAADGGDGSSRKSSDSDASGDGESYAEKLAHYEREFDGILAELDNREKYEFPCFFKAAKMGLWSPENPDFVGVRIDNTAEKAKGYVVPREAVVREFRALVNAAALQYPNLKGKADFIMFGRACEPYASYNPELRKRFGLKRGAATDWTALGQKTPRFDNRVIDKCKLIPRLNVCRIKPLDECKTDDDFLSYTITLSLKLLNLRFFRGAGMDSLSFDEFLRAFELAKNSKFKLGKAALKKFFKTIGAEVMDESQSEIEQPRNGGRAAFSRPAMRILRDLIFSGKSPADFYATAIENIANTDKNKGLVAGDLDFLKLMGDAPWSGIFIPDVGLSDFADASEAARAAQINKLIGSQNDPIVRHRLSFFYERIKSLEAKFGVPDKIVLEFVRDDFLGKKAKSDLNKAIKTRFDEKKKLAEELDSNRAEFGPKYASKKMLLKYELYKKQGGKCVYTGNALPLSELENLEIEHIVPRSRGGPDAMYNYVLTDEKTNKEKGDRTPFEWRSTMGAEWESYCARVRELTKKLGAKRCKLLLAPNAAELVEKYTALAETAWISKLAQRICCLHFGFQFGGLAGAKKVWTVSGNTTSMIRGRYGLNRLLHDEESAEDLSLFDRICMEKKFEEKNRKNKKHHALDAMCLCFAPTSNAKKASAYKNILPEEITRNPESDEARKFFGKYLANVIPNKVAVEKPTLEQTIYAMRNGRIVKKCNVRDLAYTGINPKYNYSTLVKSIKSIVGEVPKRIISDFVLSNSDLSESEWEDWCKNEAAIPSKNGAPTKLLRVLCDAGNPEEYKDLSKDGCGAYRKGDSHKGQFIWKTKQGRYVVAPVYAHASKAKVLAALKNNPDCAEVCGFFRQNCLVEIPNDVVDKSGKMLLKAGVYRSNSVRSNGQVAITNSDGISPNPISIQYLMPAGMKRIKLDTV

SEQ ID NO: 139 - protein, 1060 aa, unidentified
  REGION 1..1060: note = Description of Unknown: uncultivated organism with predicted taxonomy: unclassified Verrucomicrobia (miscellaneous)
  REGION 1..1060: note = MG1-142 effector
MKVMEGEGGNHIWGFDIGKGSLGEAVLDGSEFKHVASLLLDADFGEIKTAAGLRRQMRTRKAHKAREKWLESCLSGFGMETLKRREVGIVNGQWTLISKGDERLEREFPPDGENICYNSIALRCKLLLGEKLEGWQIFKALNSAIQNRGYENIPWNESDASPSKKEDGDYAQKLSQYSREKSELFESFEGGEKYDYPCFFKACKMGLWSPDNPERVEVRIGSDAQKAKGYVIPRKDVEREFERLVEAASKWYPAMKGKAMYIMYGIAETPYASFKPLLRKKFDLKRGAESDWTALGQKIPRFDNRIIDKCRLIPRLNVCKIRPLSEIRGEADLLHYEITLSLKLLNLRFFRNSNVESLSFGEFKAAFEIAKGAKYKMGKAALKKFLKSISASVLSEDQSEIEAPRESGRAAFSRPAMLLLKELIFSGMTPAEFYAKKSGEISNADPNKGIVASDLDFIKLMGNCGWSGIFIPDVDTFHFANKGAEPAKLINELIGSQNNPIVRHRLSFFYERIKFLESKFGIPDKVVLEFVREDFMGKEQKKRMQIEMKKRASEKMLIAKKLDEAGYKGGNLLLKMELFEKQGGVCLYTGEPLLPSELGILEIEHIVPRSRGGPDAQYNYVLTREKTNKEKADRTPFEWLSSDPVRWAGYSDRVKARAGQLGRKRCELLLEKNAEELVEKYTALAETAHISKLAQKIVCLHFGFQFGGLSGTKRVFTVPGALTARIRTFYGLNKILHNEDLAHETLSFEGFLKRGEELDKKNRANKKHHALDAMCLCFAPTGVNSKRARVDMLLPPKIRSEKEAELFFRKYLDKLIPVDVAPKKPKLEDGIYSMRMVGGKKIMARRVNLVDLAYKSGLKPVYDVSVLIKLLDKKERGIINPQIRKLVADFARTNPSEDEWKKWCGECRLPSKNGLGTRVIRVLLNYGEPAEYKDLSKDGCGAFRRGDGHKGQIVWESTDGKYYVLPIYVHASKAKLLAELCANPKKKRICGIFTSHCMVKVGNTYNNKGELLLPEGVYMVNTIRTDGWIQLTSANGDKSKPININYLMKAGMKKVLVKDL

SEQ ID NO: 140 - protein, 905 aa, unidentified
  REGION 1..905: note = Description of Unknown: uncultivated organism with predicted taxonomy: Verrucomicrobia bacterium
  REGION 1..905: note = MG1-143 effector
KESDVSLPKKDDDDYAKKLSQYSREKGELLESFEDGEKYDYPCFFKAYKMGLWSPENPERVEIRIGNDAQKAKGYVIPRKDVEREFESLVEAASKWHPAMKGKAMYIMYGIAETPYASFKPAFRKKFDLKRGAESDWTALGQKIPRFDNRIIDKCRLIPRLNVCKIRPLSEARGEGDLLHYEITLSLKLLNLRFFRNSNVESLSFEEFKAAFEIAKSAKYKMGKAALKKFLKSISASVLSEDQSEIEAPRESGRASFSRPAMLLLKELIFSGMPPAEFYAKKAGEISNADPNKGIVASDLDFIKLMGNCGWNGIFIPDVETYRFANNGADSAKLINGLIGSQNNPIVRHRLAFFYERIKFLESKFGVPDKVVLEFVREDFMGKEQKKRMQIEMKKRASEKMLIAKKLDEAGYKGGNLLMKMELLEKQGGICLYTGEPLLPSELGVLEIEHIVPRSRGGPDAQYNYVLTREKTNKEKADRTPFEWLSSDPVKWAGYSDRVKARAGQLGRKRCELLLEKNAEELVEKYTALAETAHISKLAQKIVCLHFGFQFGGLGGTKRVFTVPGALTARIRSFYGLNKILHNEDLAKDALSYEEVLKRGEELDKKNRKNKKHHALDAMCLCFAPTGVNSKRARIDMLLPPDIRGERKAELFFRKYLDRLIPVDVAPKKPRLEDGIYSMRAVGGKKFMARRVNLVDLAYKSGLKPVYDISALIKLLDKKEKGIINAQIRKLVADFARTNPSEDEWRKWCGECRLPSKNGIGTRVIRVLLNYGEPAEYKDLSKDGRGAFRRGDGHKGQIVWESTDGKYYVVPIYVHASKAKLLAELDANPKKKRVCDIFTSHCMVKVGNAYNDKGELLLSEGVYMVNTIRTDGWIQLTSANGDKSKPININYLMKAGMRKVSVKDL

SEQ ID NO: 141 - protein, 1025 aa, unidentified
  REGION 1..1025: note = Description of Unknown: uncultivated organism with predicted taxonomy: unclassified Verrucomicrobia (miscellaneous)
  REGION 1..1025: note = MG1-144 effector
LLDADFGEIKTAAGLRRQMRTRKAHKAREKWLESCLSGFGMETLKRREVGIVNGQWTLISKGDERLEREFPPDGENICYNSIALRCKLLLGEKLEGWQIFKALNSAIQNRGYDENIPWKESDASPSKKEDGDYAQKLSQYSKEKSELFESFEGGEKYDYPCFFKACKMGLWSPDNPERVEVRIGSDAQKAKGYVIPRKDVEREFERLVEAASKWYPAMKGKAMYIMYGIAETPYASFKPLLRKKFDLKRGAESDWTALGQKIPRFDNRIIDKCRLIPRLNVCKIRPLSEIRGEADLLHYEITLSLKLLNLRFFRNSNVESLSFGEFKAAFEIAKGAKYKMGKAALKKFLKSISASVLSEDQSEIEAPRESGRAAFSRPAMLLLKELIFSGMTPAEFYAKKSGEISNADPNKGLVASDLDFIKLMGNCGWSGIFIPDVDTFHFANKGAEPAKLINELIGSQNNPIVRHRLSFFYERIKFLESKFGIPDKVVLEFVREDFMGKEQKKRMQIEMKKRASEKMLIAKKLDEAGYKGGNLLLKMELLEKQGGVCLYTGEPLLPSELGVLEIEHIVPRSRGGPDAQYNYVLTREKTNKEKADRTPFEWLSSDPVKWAGYSDRVKARAGQLGRKRCELLLEKNAEELVEKYTALAETAHISKLAQKIVCLHFGFQFGGLSGTKRVFTVPGSLTARIRTFYGLNKILHNEDLAHETLSYEGFLKRVEELDKKNRANKKHHALDAMCLCFAPTGVNSKRARVDMLLPPKIRSEKDAELFFRKYLDKLIPVDVAPKKPKLEDGIYSMRMVGGKKIMARRVNLVDLAYKGGQGQKPVYDISVLMDKKNPKEKKIINPQIRKLVADFARTNPSEDEWKKWCGECRLPSKNGLGTRVIRVLLNYGEPAEYKDLSKDGCGAFRKGKEHKGQIVWESTDGKYYVLPIYVHASKAKLLAELCANPKKKRICGIFTSHCMVKVGNTYNNKGELLLPEGVYMLNTIQTDGRGKLTNANGEKSNLININYLMKAGMKKVSIKEL

SEQ ID NO: 142 - protein, 1073 aa, unidentified
  REGION 1..1073: note = Description of Unknown: uncultivated organism with predicted taxonomy: Verrucomicrobia
  REGION 1..1073: note = MG1-145 effector
MYTKDIIWGFDIGKGSLGEAVRVGNEFKHVQSLEIAPDFAETKTTAAARRAWRTREAHKARELWLEKCLSEAGIEVLLRRKVGVVDGAWKLVSKGDVRLEREFPPAGEDLCYNSIALRCKLLLGEKLESWQVFKALNSAIQNRGYDANIPWGDEDAADGGDGSSRKSSDSDASGDGESYAEKLAHYEREFDGILAELDNREKYEFPCFFKAAKMGLWSPENPDFVGVRIDNTAEKAKGYVVPREAVVREFRALVNAAALQYPNLKGKADFIMFGRACEPYASYNPELRKLFGLKRGAATDWTALGQKTPRFDNRVIDKCKLIPRLNVCKIKPLDECKTDDDFLSYTITLSLKLLNLRFFRGAGVDSLSFDEFLRAFELAKNSKFKLGKAALKKFFKTIGAEVMDESQSEIEQPRNGGRAAFSRPAMRILRDLIFSGKSPAEFYAAAIENIANTDKNKGLVAGDLDFLKLMGDAPWSGIFIPDVGLSDFADASEAAREAQINKLIGSQNDPIVRHRLSFFYERIKSLEAKFGVPDKIVLEFVRDDFLGKKAKSDLNKAIKTRFDEKKKLAEELDSNRAEFGPKYASKKMLLKYELYKKQGGKCVYTGKALPLSELENLEIEHIVPRSRGGPDAMYNYVLTDEKTNKEKGDRTPFEWRSTMGAEWESYCERVRKLTKELGAKRCKLLLSPNAAELVEKYTALAETAWISKLAQRICCLHFGFQFGGLAGAKKVWTVSGNTTAMIRGRYGLNRLLHDEESAEDLSLFDRICMEKKFEEKNRKNKKHHALDAMCLCFAPTSNAKKASAYKNILPEEITRNPESDEARKFFGKYLATVIPNKVAVEKSKLEQTIYSLRKGRIVKKCNVRDLAYTGINPKYNYSTLVKSIKSIVGEVPKRIVSDFVLSNSDLSESEWEDWCKNEAAIPSKNGAPTKLLRVLCDAGNPEEYKDLSKDGCGAYRKGDSHKGQFIWKTKQGRYVVAPVYAHASKAKVLAALKNNPDCAEVCGFFRQNCLVEIPNDVIDKSGKMLLKAGVYRSNSVKSNGQVAITNSDGISPNPISIQYLMPAGMKRIKLDTV

SEQ ID NO: 143 - protein, 1059 aa, unidentified
  REGION 1..1059: note = Description of Unknown: uncultivated organism with predicted taxonomy: unclassified Verrucomicrobia (miscellaneous)
  REGION 1..1059: note = MG1-147 effector
MEKEKNNHVWGFDIGKGSLGEAVRIGGDFKHIASVLLDPEFGEIKTAALARRQMRTRKAHKAREKWLEECLEGTGVEILKRREVGIVDGQWQLISKGDERLEREFPPSGEDVCYNSIALRCKLLLGEKLEGWQVFKALNSAIQKRGYDENIPWGEAEEKSSKKDDDDYAQKLSQYEKEKSELFESFADGEKYDFPCFFKAYKMGLWSPENPTRVEVRIDCRAQKAKSYVIARKYVEREFECLVEAAAKFFPKLKGRAKFILYGVSETPYASYYGNMRKKFGLKRGAESDWTALGQKVPRFDNRIIDKCRLIPRMNVCKIRPLNEARNEKDLLYYEVTLALKLLNLRFFRNSNIEQLTFEEFKKAIEIAAGAKYKMTKTAMKKFLKSISATALGDDYAEIEPPKESGRASFSRPAMEILKELIFSGMPPREFYGRKISEISNTDKNKGVVSSDLDFIKLMGDCPWGGIFIPDVQTYQFANAAFPDPDAQINKLIGSQNNPIVRHRLTFFFERIKFLESKYGVPDKVVLEFVRDDFMGEKEKKEMRIAMKKRAEEKMRIAKDLDEHGFKGGNLLLKMELYRKQNGICLYTGDALPLSELATLEIEHIVPRSRGGPDAQYNYVITREKTNKLKGDKTPYEWLSSDAKEWASYTDRVNACAKALGKKRCRLLLEKDAEELVEKYTALAETAHIAKLAQKIVCMHFGFQFGGLSGTKRVFTVPGALTSRIRKFYGLDRILHNSAAESENLSFEEFLKFSEDLEKKNRKNKKHHALDAMCLCFAPTGVDSRRAKLGEILPEKLRSEKAAREFFKSYLDKIMPVDVAPKKPRLEDGIYSKRIIGGKACMVKRNNLVDLAYKSGLKPVFDIPTLIKLVDKKEKGIINPQIRKMIGEFAATNPDESAWRKWCEEVRLPSKSGLGVRVMRVLVYYGEADEYKDLSKDGCGAYRKGDGHKGQVIWESVDGKYYVEPVYVHASKAGVMAALNANPKKKRICGMFNSHCTVDVGDVYNDKGDFILPAGRYMVNTIRSDNQCVLTNADGEKRNPININYLMRAGMRRVDLSEL

SEQ ID NO: 144 - protein, 938 aa, unidentified
  REGION 1..938: note = Description of Unknown: uncultivated organism with predicted taxonomy: unclassified Verrucomicrobia (miscellaneous)
  REGION 1..938: note = MG1-148 effector
KLLLGEKLEGWQVFKALNSAIQKRGYDENIPWGEAEEKSSKKDDDDYAQKLSQYEKEKSELFESFADGEKYDFPCFFKAYKMGLWSPENPTRVEVRIDCRAQKAKSYVIARKYVEREFECLVEAAAKFFPKLKGRAKFILYGVSETPYASYYGNMRKKFGLKRGAESDWTALGQKVPRFDNRIIDKCRLIPRMNVCKIRPLNEARNEKDLLYYEVTLALKLFNLRFFRNSNIEQLTFEEFKKAFEIAAGAKYKMTKTAMKKFLKSISATALGDDYAEIEPPKESGRASFSRPAMEILKELIFSGMPPREFYGRKISEISNTDKNKGVVSSDLDFIKLMGDCPWGGIFIPDVQTYQFANAAFPDPDAQINKLIGSQNNPIVRHRLTFFFERIKFLESKYGVPDKVVLEFVRDDFMGEKEKKEMRIAMKKRAEEKMRIAKDLDEHGFKGGNLLLKMELYRKQNGICLYTGDALPLSELATLEIEHIVPRSRGGPDAQYNYVITREKTNKLKGDKTPYEWLSSDAKEWASYTDRVNACAKALGKKRCRLLLEKDAEELVEKYTALAETAHIAKLAQKIVCMHFGFQFGGLSGTKRVFTVPGALTSRIRKFYGLDRILHNSASESENLSFEEFLKFSEDLEKKNRKNKKHHALDAMCLCFAPTGVDSRRAKLGEILPEKLRSEKAAREFFKSYLDKIMPVDVAPKKPRLEDGIYSKRIIGGKACMVKRNNLVDLAYKSGLKPVFDIPTLIKLVDKKEKGIINPQIRKMIGEFAATNPDESAWRKWCEEVRLPSKSGLGARVMRVLVYYGEADEYKDLSKDGYGAYRKGDGHKGQVIWESVDGKYYVEPVYVHASKAGVMAALNANPKKKRICGMFNSHCTVDVDDVYNDKGDFILPAGRYMVNTIRSDNQCVLTNADGEKRNPININYLMRAGMRRVDLSEL

SEQ ID NO: 145 - protein, 1059 aa, unidentified
  REGION 1..1059: note = Description of Unknown: uncultivated organism with predicted taxonomy: unclassified Verrucomicrobia (miscellaneous)
  REGION 1..1059: note = MG1-149 effector
MEKEKNNHVWGFDIGKGSLGEAVRIGGDFKHIASVLLDPEFGEIKTAALACRQMRTRKAHKAREKWLEECLEGTGVEILKRREVGIVDGQWQLISKGDERLEREFPPSGEDVCYNSIALRCKLLLGEKLEGWQVFKALNSAIQKRGYDENIPWGEAEEKSSKKDDDDYAQKLSQYEKEKSELFESFADGEKYDFPCFFKAYKMGLWSPENPTRVEVRIDCRAQKAKSYVIARKYVEREFECLVEAAAKFFPKLKGRAKFILYGVSETPYASYYGNMRKKFGLKRGAESDWTALGQKVPRFDNRIIDKCRFIPRMNVCKIRPLNEARNEKDLLYYEVTLALKLLNLRFFRNSNIEQLTFEEFKKAFEIAAGAKYKMTKTAMKKFLKSISATALGDDYAEIEPPKESGRASFSRPAMEILKELIFSGMPPREFYGRKISEISNTDKNKGVVSSDLDFIKLMGDCPWGGIFIPDVQTYQFANAAFPDPDAQINKLIGSQNNPIVRHRLTFFFERIKFLESKYGVPDKVVLEFVRDDFMGEKEKKEMRIAMKKRAEEKMRIAKDLDEHGFKGGNLLLKMELYRKQNGICLYTGDALPLSELATLEIEHIVPRSRGGPDAQYNYVITREKTNKLKGDKTPYEWISSDAKEWASYTDRVTACAKALGKKRCRLLLEKDAEELVEKYTALAETAHIAKLAQKIVCMHFGFQFGGLSGTKRVFTVPGALTSRIRKFYGLDRILHNSAAESENLSFEEFLKFSEDLEKKNRKNKKHHALDAMCLCFAPTGVDSRRAKLGEILPEKLRSEKAAREFFKSYLDKIMPVDVAPKKPRLEDGIYSKRIIGGKACMVKRNNLVDLAYKSGLKPVFDIPTLIKLVDKKEKGIINPQIRKMIGEFAATNPDESAWRKWCEEVRLPSKSGLGARIMRVLVYYGEADEYKDLSKDGCGAYRKGDGHKGQVIWESVDGKYYVEPVYVHASKAGVMAALNANPKKKRICGMFNSHCTVDVGDVYNDKGDFILPAGRYMVNTIRSDNQCVLTNADGEKRNPININYLMRAGMRRVDLSEL

SEQ ID NO: 146 - protein, 1062 aa, unidentified
  REGION 1..1062: note = Description of Unknown: uncultivated organism with predicted taxonomy: Coraliomargarita sp. CAG:312
  REGION 1..1062: note = MG1-150 effector
MNNNNTQIWGFDIGKASLGEAVWCGGKFKHVESLILDKDFAEIKTSAGRRRQARTRKAHKAREEWLEKCLEDCGIEILKRRKVGIVNGQWKLISKGDARLEKEFPAEGEEVCYNSIALRCKLILGEKLESWQIFKALNSSIQHRGYDENIPWKETQNESKKEDGDYFKKIVLYESEKEDILNRLPQECKREDFDFPCFFKAKKMGIWSEENPYKVGLRISNNAQKAKGYVIPRKYVESEFVRLVQMASLQYPKLKDKQMFILYGISETPYASLFKDARKKFGLKRGSDSDWTALGQKIPRFDNRMIGKCKLIPRLNTCKIKSPDKIKSEEDLLHYDITLALKLLNLRFFKDSEICALSFEEFKKLFEIGKSNKYKISKTDLKKFLKSIGASVLSQDHSEIEAPRTSGRSSFSRPAMKILKELIFSGEPPSKFLKAKIDKIANTDPNKGIIRKDLDFIRIMGDCPWNGIFIPDVETYKYASQTQESSEAQINKLIGSQNDPIVRHRLSFFYERIKALSEKFGVPDKIVLEFVREDFMGKQAKKDLSLSMKKRFEEKIDIAKKLDDIGYKGNKMLLKMELLQKQGFACLYTGEALQETDLPILEIEHIVPRSLGGPDAAYNYVLTSESTNKAKGNQTPYKWLSPDRDKWRAYTERVRARAAELGSKRCRLLLSENAEELINKYTALAETAWISKLAQRIVCMHFGFQFGGNTGEKRVFTVPGNITAKIRSAFGLNKILHNIDADKKNMSEFDIVKLDYELDKKNRKNKKHHALDAMCLCFAPTGPNAQKLGIGALLPPEIAAKAEEFFRGYIEKVVPNEVAPKKPKLEESIYSKRTINGKECIVRKFNLVDLAYKSGLKPVYDISAIEKLLEDKPKKIPPIINPTVRRIVRDFVSTNPNEDEWRNWCKTVRMPSKNRNGTRIIRVLVYVGTPEEYKDLSKDGCGAFRKGDSHKGQIIWMDKNGRYKVSPVYVHSSKSQTMESIKSNPDFIKIAGFFKSHCLVEIESPVVNGKGDVLLSPGTYMINTIMAAGMAILSDTNGVKSPAININYLMNAGMRRVSIKYK

SEQ ID NO: 147 - protein, 1034 aa, unidentified
  REGION 1..1034: note = Description of Unknown: uncultivated organism with predicted taxonomy: Verrucomicrobia
  REGION 1..1034: note = MG1-151 effector
MGAEFRHVTSLLLDEDFGEIKTAAGLRRQMRTRKAHKAREKWLERCLLEFGIEPLKRREVGIVNGRWMLISKGDERLEREFPPDGEDICYNAIALRCKLLLGEKLESWQIFKALNSAIQNRGYDENIPWKESDVSLPKKDDDDYAKKLSQYSREKGELLESFEDGEKYDYPCFFKAYKMGLWSPENPERVEIRIGNDAQKAKGYVIPRKDVEREFESLVEAASKWHPAMKGKAMYIMYGIAETPYASFKPALRKKFDLKRGAESDWTALGQKIPRFDNRIIDKCRLIPRLNVCKIRPLSEARGEGDLLHYEITLSLKLLNLRFFRNSNVESLSFEEFKAAFEIAKSAKYKMGKAALKKFLKSISASVLSEDQSEIEAPRESGRASFSRPAMLLLKELIFSGMPPAEFYAKKAGEISNADPNKGIVASDLDFIKLMGNCGWNGIFIPDVETYRFANNGADSAKLINGLIGSQNNPIVRHRLAFFYERIKFLESKFGVPDKVVLEFVREDFMGKEQKKRMQIEMKKRASEKMLIAKKLDEAGYKGGNLLLKMELLEKQGGICLYTGEPLLPSELGVLEIEHIVPRSRGGPDAQYNYVLTREKTNKEKADRTPFEWLSSDPVKWAGYSDRVKARAGQLGRKRCELLLEKNAEELVEKYTALAETAHISKLAQKIVCLHFGFQFGGLGGTKRVFTVTGALTARIRSFYGLNKILHNEDLAKDALSYEEVLKRGEELDKKNRKNKKHHALDAMCLCFAPTGVNSKRARIDMLLPPDIRGEREAELFFRKYLDRLIPVDVAPKKPRLEDGIYSMRAVGGKKFMARRVNLVDLAYKSGLKPVYDISALIKLLDKKEKGIINAQIRKLVADFARTNPSEDEWRKWCGECRLPSKNGIGTRVIRVLLNYGEPAEYKDLSKDGRGAFRRGDGHKGQIVWESTDGKYYVVPIYVHASKAKLLAELDANPKKKRVCDIFTSHCMVKVGNAYNDKGELLLPEGVYMVNTIQTDGRGKLTNTNGDKSKPININYLMKAGMRKVSVKDL

SEQ ID NO: 148 - protein, 874 aa, unidentified; identical to SEQ ID NO: 88
  REGION 1..874: note = Description of Unknown: uncultivated organism
  REGION 1..874: note = MG1-152 effector

SEQ ID NO: 149 - protein, 1059 aa, unidentified
  REGION 1..1059: note = Description of Unknown: uncultivated organism with predicted taxonomy: unclassified Verrucomicrobia (miscellaneous)
  REGION 1..1059: note = MG1-153 effector
MEKEKNNHVWGFDIGKGSLGEAVRIGGDFKHIASVLLDPEFGEIKTAALVRRQMRTRKAHKAREKWLEECLEGTGVEILKRREVGIVDGQWQLISKGDERLEREFPPSGEDVCYNSIALRCKLLLGEKLEGWQVFKALNSAIQKRGYDENIPWGEAEEKSSKKDDDDYAQKLSQYEKEKSELFESFADGEKYDFPCFFKAYKMGLWSPENPTRVEVRIDCRAQKAKSYVIARKYVEREFECLVEAAVKFFPKLKGRAKFILYGVSETPYASYYGNMRKKFGLKRGAESDWTALGQKVPRFDNRIIDKCRLIPRMNVCKIRPLNEARNEKDLLYYEVTLALKLLNLRFFRNSNIEQLTFEEFKKAFEIAAGAKYKMTKTAMKKFLKSISATALGDDYAEIEPPKESGRASFSRPAMEILKELIFSGMPPREFYGRKISEISNTDKNKGVVSSDLDFIKLMGDCPWGGIFIPDVQTYQFANAAFPDPDAQINKLIGSQNNPIVRHRLTFFFERIKFLESKYGVPDKVVLEFVRDDFMGEKEKKEMRIAMKKRAEEKMRIAKDLDEHGFKGGNLLLKMELYRKQNGICLYTGDALPLSELATLEIEHIVPRSRGGPDAQYNYVITREKTNKLKGDKTPYEWLSSDAKEWASYTDRVNACAKALGKKRCRLLLEKDAEELVEKYTALAETAHIAKLAQKIVCMHFGFQFGGLSGTKRVFTVPGALTSRIRKFYGLDRILHNSAAESENLSFEEFLKFSEDLEKKNRKNKKHHALDAMCLCFAPTGVDSRRAKLGEILPEKLRSEKAAREFFKSYLDKIMPMDVAPKKPRLEDGIYSKRIIGGKACMVKRNNLVDLAYKSGLKPVFDIPTLIKLVDKKEKGIINPQIRKMIGEFAATNPDESAWRKWCEEVRLPSKSGLGARIMRVLVYYGEADEYKDLSKDGCGAYRKGDGHKGQVIWESVDGKYYVEPVYVHASKAGVMAALNANPKKKRICGMFNSHCTVDVGDVYNDKGDFILPAGRYMVNTIRSDNQCVLTNADGEKRNPININYLMRAGMRRVDLSEL

SEQ ID NO: 150 - protein, 1073 aa, unidentified
  REGION 1..1073: note = Description of Unknown: uncultivated organism with predicted taxonomy: Verrucomicrobia
  REGION 1..1073: note = MG1-154 effector
MYTKEIIWGFDIGKGSLGEAVRVGNEFKHVQSLEIAPDFAETKTTAAARRAWRTREAHKARELWLEKCLSEAGIEVLLRRKVGVVDGAWKLVSKGDVRLEREFPPAGEDLCYNSIALRCKLLLGEKLESWQVFKALNSAIQNRGYDANIPWGDEDAADGGDGSSRKSSDSDASGDGESYAEKLVHYEREFDGILAELDNREKYEFPCFFKAAKMGLWSPENPDFVGVRIDNTAEKAKGYVVPREAVVREFRALVNAAALQYPNLKGKADFIMFGRACEPYASYNPELRKRFGLKRGAATDWTALGQKTPRFDNRVIDKCKLIPRLNVCKIKPLDECKTDDDFLSYTITLSLKLLNLRFFRGAGVDSLSFDEFLRAFELAKNSKFKLGKAALKKFFKTIGAEVMDESQSEIEQPRNGGRAAFSRPAMRILRDLIFSGKSPAEFYATAIENIANTDKNKGLVAGDLDFLKLMGDAPWSGIFIPDVGLSDFADASEAAREAQINKLIGSQNDPIVRHRLSFFYERIKSLEAKFGVPDKIVLEFVRDDFLGKKAKSDLNKAIKTRFDEKKKLAEDLDSKREEFGLKYASKKMLLKFELYKKQGGECVYTGNALPLSELENLEVEHIVPRSRGGPDAMYNYVLTDEKTNKEKGDRTPFEWRSTMGAEWESYCERVRKLTKELGAKRCKLLLSPNAAELVEKYTALAETAWISKLAQRICCLHFGFQFGGLAGAKKVWTVSGNTTAMIRGRYALNRLLHDEESAEDLSLFDRICMEKKFEEKNRKNKKHHALDAMCLCFAPTSNAKKASAYKNILPEEITRNPESDEARKFFGKYLANVIPNKVAVEKPTLEQTIYAMRKGRIVKKCNVRDLAYTGINPKYNYSTLVKSIKSIVGEVPKRIISDFVLSNPKLSESEWEDWCKNNAAIPSKNGAPTKLLRVLCDAGNPEEYKDLSKDGCGAYRKGDSHKGQFIWKTKQGRYVVAPVYAHASKAKVLAALKNNPDCAEVCGFFRQNCLVEIPNDVVDKSGKMLLKAGVYRSNSIWASGHAQLTNSDGVSPNPISIQYLMPAGMKRIKLDTV

SEQ ID NO: 151 - protein, 1074 aa, unidentified
  REGION 1..1074: note = Description of Unknown: uncultivated organism with predicted taxonomy: Verrucomicrobia
  REGION 1..1074: note = MG1-155 effector
MGTKEIVWGFDIGKGSLGEAVRIGNEFKHVQSLEIPPEFAETKTAAALRRAWRTRHAHKARELWLERCLSNAGIEVLGRRKVDIVGGRWKLVSEGDRRLEREFPADGEDCCYNSIALRCKLLLGEKLESWQVFKALNSAIQTRGYDAKIPWGNGNGKTPDSAKGEKSEAVKEEDSYAEKLALYEREFDGLLAEVNNRKKYDFPCFFKAAKIGLWSPENPDVVKIRIDNTAEKAKGYVVPRSAVVSEFRALVEAAAKQYPALKGKADFIMFGVSEEPYASYNPELRKKFGLKRGAESDWTALGQKTPRFDNRVIDKCKLIPRLNVCKIKPLPECRTDDDFLPYETTLALKLLNLRFFRGAGVDSLSFDEFLRAFEIAKNNKFELNKTNLKKFFKSIGAEVIDESQSKIEQPRSSGRASFSRPAMRILRNLVFSGKSPAEFYETELVKITNTDKNRGIVAEDIKFLKLMGNVPWGGIFIPDVAAFDFANSTEFSRAVQINKLIGLQNDPIVRHRLSFFYERIKSLEAKFGTPDKIVLEFVRDDFLGKKAKADLSRAINDRAKERKKYAEELDSQREIFGSKYASKKMLLKYELYSKQKGVCVYTGNALGFSNLEQLEVEHIVPRSRGGPDALYNYVLTDEKTNKEKGDRTPFEWLSSKGLEWESYCQRVRELTKEFGAKRCRLLLSPNAEELVEKYTALAETAWISKLAQRVCCIHFGFQFGGLTGVKKVWTVSGNTTAMIRSRYGLNRLLHDENVPKDISLSERLKLENDFEKKNRDNKKHHALDAMCLCYAPTSNTRRAASYKNILPAEITRNPESDEARRFFGRYLANVIPNKVAIEKPTLEQTIYAKRLINGKETIVKKCNVRDLAYAGINPKYDLGKLKDRIRDIINPVSKRVISDFVNSNPNLSESEWEDWCRHEASIPSKSGKATRLLRVQCAVGDPAEYKDLSKDGCGAYRKGKSHKGQYIWKTKGGRYVVTPVYTFASKIRVYDDMRRDPNCEEICGFFRQNCLVEIPNDVYDSKGVWKLKAGIYRSNTIRADGFVKLTNSDGFSSNPISIQYLMTAGMKRITLDTI

SEQ ID NO: 152 - protein, 891 aa, unidentified
  REGION 1..891: note = Description of Unknown: uncultivated organism with predicted taxonomy: Coraliomargarita sp. CAG:312
  REGION 1..891: note = MG1-156 effector
LYESEKEDILNRLPQECKREDFDFPCFFKAKKMGIWSEENPYKVGLRISNNAQKAKGYVIPRKYVESEFVRLVQMASLQYPKLKDKQMFILYGISETPYASLFKDARKKFGLKRGSDSDWTALGQKIPRFDNRMIGKCKLIPRLNTCKIKSPDKIKSEEDLLHYDITLALKLLNLRFFKDSEICALSFEEFKKLFEIGKSNKYKISKTDLKKFLKSIGASVLSQDHSEIEAPRTSGRSSFSRPAMKILKELIFSGEPPSKFLKAKIDKIANTDPNKGIIREDLDFIRIMGDCPWNGIFIPDVETYKYASQTQESSEAQINKLIGSQNDPIVRHRLSFFYERIKALSEKFGVPDKIVLEFVREDFMGKQAKKDLSLSMKKRFEEKIDIAKKLDDIGYKGNKMLLKMELLQKQGFACLYTGEALQETDLPILEIEHIVPRSLGGPDAAYNYVLTSESTNKAKGNQTPYKWLSPDRDKWRAYTERVRARAAELGSKRCRLLLSENAEELINKYTALAETAWISKLAQRIVCMHFGFQFGGNTGEKRVFTVPGNITAKIRSAFGLNKILHNIDADKKNMSEFDIVKLDYELDKKNRKNKKHHALDAMCLCFAPTGPNAQKLGIGALLPPEIAAKAEEFFRGYIEKVVPNEVAPKKPKLEESIYSKRTINGKECIVRKFNLVDLAYKSGLKPVYDISAIEKLLEDKPKKIPPIINPTVRRIVRDFVSTNPNEDEWRNWCKTVRMPSKNRNGTRIIRVLVYVGTPEEYKDLSKDGCGAFRKGDSHKGQIIWMDKNGRYKVSPVYVHSSKSQTMESIKSNPDFIKIAGFFKSHCLVEIESPVVNGKGDVLLSPGTYMINTIMAAGMAILSDTNGVKSPAININYLMNAGMRRVSIKYK

SEQ ID NO: 153 - protein, 1055 aa, unidentified
  REGION 1..1055: note = Description of Unknown: uncultivated organism with predicted taxonomy: Verrucomicrobia
  REGION 1..1055: note = MG1-157 effector
MENRVNIWGFDIGKGSLGEAVRIGSEIKHVQSLILDKDFGEIKTAAGIRRQYRTRKAHRAREKFLEKVLGECGIEVLRRREVGIVDGCWKLIAKGDIRLEKEFPSPGEDVCYNSIALRCKLLLGEPLESWQVFKALNSAIQNRGYDPDIPWTETDADKKEDSDWAKRLSAYEDEKKVLFSGLADPQRYDYPCFFKAYKMGLWSPEDPEIVKLRIDNHAEKAKNYVIPRKCVEAEFEKLVENASLQYPKLKGKALYIMFGPAQKEYASLNPELRRQFNLKRGADTDWTALGQKIPRFDNRIVDKCKLMPRFNVCKIKPLDEIKNPADFLPYEITTLMKLLNLRFLRNGTIESLACDELKEAFELARDNKYKLSKTALKKFLKKIGAEVLDEDQSKIEAPRSGGRASFSRPAMAVLKELILSGESPAKFYARKVSQIENTDKLKGLVASDFDFIKQMGDIAWGKIFMPDMRLLEFANRQNIDAEARINKLIGSQNDPIVRHRLGFFYDRIKFLESKFGVPDKIVIEFVRDDFLGEKAKKEYQKAINERFKEKQELAKEMDEAGYKGAKMLLKLELYKKQGGQCVYTGEALPSSEIASLEIEHIVPRSRGGPDSIYNYVLTRERTNKEKADRTPYEWLSRDQQRWNAYVSRVNSLYKSLGGKRCKLLLANNAEELVDKYTALAETAWISKLAQQVVCLHFGFQFGGMEGQRRVFCIPGGVTARIRGMFGLNELLHVKDYDTDSMSETEIVELYKRLEKKNRENKKHHALDAMCLCFAPTGSQIKRFDAKTIMPEGILGREKQYFKSYLDKIVPNEVATQKPRLEQTLYSKRVVGGKECIVRKFNLVDLAYKSGLKPVYDLQTIKKLVGKDQSESDIINPVVGALVREFIATDPTEEQWRAWCGEVCMPSESFTGSRIKRVLVRCGNPDEFKDLSKDGCGAYRKGDAHKGQTVWRSTNGKCYVLPIYVHASKYGLIEALKKRADFKEIVGLFRMHCLVNIERDVFDKKGQKLLPPGIYMLNTLRADSQALLTNTDGVKQKAININYLVESGMRPIKVDY

SEQ ID NO: 154 - protein, 1061 aa, unidentified
  REGION 1..1061: note = Description of Unknown: uncultivated organism with predicted taxonomy: unclassified Verrucomicrobia (miscellaneous)
  REGION 1..1061: note = MG1-158 effector
MKVMEDEGGNHIWGFDIGKGSLGEAVLDGSEFKHVASLLLDADFGEIETAAGLRRQMRTRKAHKAREKWLESCLSGFGIETLKRREVGIVNGQWTLISKGDERLEREFPPDGENICYNSIALRCKLLLGEKLEGWQIFKALNSAIQNRGYDENIPWKESDASPSKKEGGDYAQKLSQYSREKSELFESFEGGEKYDYPCFFKAYKMGLWSPDNPERVEVRIGSDAQKAKDYVIPRKDVEREFERLVEAASKWYPAMKGKAMYIMYGIAETPYASYKPLLRKKFDLKRGAESDWTALGQKIPRFDNRIIDKCRLIPRLNVCKIRPLSKIRGEADLLHYEITLSLKLLNLRFFRNSNVESLSFGEFKAAFEIAKGAKYKMGKAALKKFLKSISASVLSEDQSEIEAPRESGRAAFSRPAMLLLKELIFSGMTPAEFYAKKSGEISNADPNKGIVASDLDFIKLMGNCGWSGIFIPDVDTFHFANKGAEPAKLINELIGSQNNPIVRHRLSFFYERIKFLESKFGIPDKVVLEFVREDFMGKEQKKRMQIEMKKRASEKMLIAKKLDEAGYKGGNLLLKMELLEKQGGVCLYTGEPLLPSELGVLEIEHIVPRSRGGPDAQYNYVLTREKTNKEKADRTPFEWLSSDPVKWAGYSDRVTARAGQLGRKRCELLLEKNAEELVEKYTALAETAHISKLAQKIVCLHFGFQFGGLSGTKRVFTVPGALTARIRTFYGLNKILHNEDLAHETLSFEGFLKRGEELDKKNRANKKHHALDAMCLCFAPTGVNSKRARVDMLLPPKIRSEKEAELFFRKYLDKLIPVDVAPKKPKLEDGIYSMRTVGGKKIMARRVNLVDLAYKSGLKPVYDVSVLIKLLDKKERGIINPQIRKLVADFARTNPSEDEWKKWCGECRLPSKNGLGTRVIRVLLNYGEPAEYKDLSKDGRGAFRRGDGHKGQIVWESTDGKYYVLPIYVHASKAKLPAELCANPKKKRICGIFTSHCMVKVGNTYNNKGELLLPEGVYMLNTIRTDGWIQLTSANGDKSKPININYLMKAGMKKVPVKDL

SEQ ID NO: 155 - protein, 1052 aa, unidentified
  REGION 1..1052: note = Description of Unknown: uncultivated organism with predicted taxonomy: Coraliomargarita sp. CAG:312
  REGION 1..1052: note = MG1-159 effector
MDILGNKVWGFDMGKGSLGEAVRIGNEFKHVCSLLLDADFGEIKTAASLRRQYRTHKAHKAREKWLEDCLRKCGIEVLQRRQVAFVDDKWQLVSKGDIRLEKEFPTDDENICYNSIALRCKLILGEKLESWQVFKALNSAIQNRGYDSEIPWKETEVKSKDNSDYAIKLQAFEREKDELLLNLPSIDEAIRSKFDYPCFFKAYKIGLWNPVNPNQVDSKISHTANKAKGYVIPRNYVEKEFIKLVEMASLQYPKLRNKALFILYGITEKPYASFDFDLRKKFNLKRGAESDWTALGQKIPRFDNRIVDKCKLIPRFNVCKVKHIDEIQQDKDFLYYEITLAMKLLNLRFYRNANVQSLNYDEFKILFEIGKANKFKITKTNLKKFLNSINAEILDENQAEVAQPKDSGRASFSRPAMQLIKELIFSGQSPADFYARKVSSISNVETKKGLVVEDLDFIKLMGDVDWNGIFIPDVETYKFAKNFSEDNSAQINKLIGMQNDPIVRHRLSFFYDRIKYLEAKFGIPDKVVLEFVRDDFIGKEKKKELNIAIKKRYSEKLKIAEKLDEIGFKGSKMLMKLELFQKQGGICLYTREPLLPTEIPSLEIEHIVPRSRGGPDSAYNFVLTREATNKEKANRTPFEWLSGDSQKWVSYSDRVMSRSKELGKKRCQLLLKENAEELVEKYTALAETAWIARLAQRIVCMHFGFPMGALIGKKRVFTVSGSVTSRIRGMYGLNKILHNTEIDKTLSEVDILKLNDSLETKNRANKKHHALDAMCLCFAPTSKEVLNKNREILPVEIAKDAENYFRRYLDNIIPNKVATMKPRLEETIYSKRKIGKKEYIVRKYDLESLAYKGINPKYDVESIKKLANSENIINVVARKIIRDFVNDNPTEQEWKDFCNTVKMPSKNGNGSRLKRILLLVGNTAEYKDLSKDGCGAYRKGDSHKGQIIWKTKSGKFKVEPIYAHSSRAKVSKELMKKPEFDSVAGIFRTGCLVEFTNDVMNDKDEFLLERGIYSLNTISTAGQVAITNSNGNKSIGININYLMKAGMRRLNL

SEQ ID NO: 156 - protein, 933 aa, unidentified
  REGION 1..933: note = Description of Unknown: uncultivated organism with predicted taxonomy: unclassified Verrucomicrobia (miscellaneous)
  REGION 1..933: note = MG1-160 effector
EKLEGWQVFTALNSAIQKRGYDENIPWGEAEEKSPKKDDDDYAQKLSQYEKEKSELFESFADGEKYDFPCFFKAYKMGLWSPENPTRVEVRIDCRAQKAKSYVIARKYVEREFECLVEAAAKFFPKLKGRAKFILYGVSETPYASYYGNMRKKFGLKRGAESDWTALGQKVPRFDNRIIDKCRFIPRMNVCKIRPLNEARNEKDLLYYEVTLALKLLNLRFFRNSNIEQLTFEEFKKAFEIAAGAKYKMTKTAMKKFLKSISPTALGDDYAEIEPPKESGRASFSRPAMEILKELIFSGMPPREFYGRKISEISNTDKNKGVVSSDLDFIKLMGDCPWGGIFIPDVQTYQFANAAFPDPDAQINKLIGSQNNPIVRHRLTFFFERIKFLESKYGVPDKVVLEFVRDDFMGEKEKKEMRIAMKKRAEEKMRIAKDLDEHGFKGGNLLLKMELYRKQNGICLYTGDALPLSELATLEIEHIVPRSRGGPDAQYNYVITREKTNKLKGDKTPYEWLSSDAKEWASYTDRVNACAKALGKKRCRLLLEKDAEELVEKYTALAETAHIAKLAQKIVCMHFGFQFGGLSGTKRVFTVPGALTSRIRKFYGLDRILHNSAAERENLSFEEFLKFSEDLEKKNRKNKKHHALDAMCLCFAPTGVDSRRVKLGEILPEKLKSEKAAREFFKSYLDKIMPVDVAPKKPRLEDGIYSKRIIGGKACMVKRNNLVDLAYKSGLKPVFDIPTLIKLVDKKEKGIINPQIRKMIGEFAATNPDESAWRKWCEEVRLPSKSGLGARIMRVLVYYGEADEYKDLSKDGCGAYRKGDGHKGQVIWESVDGKYYVEPVYVHASKAGVMAALNANPKKKRICGMFNSHCTVDVGDVYNDKGDFILPAGRYMVNTIRSDNQCVLTNADGEKRNPININYLMRTGMRRVDLSEL

SEQ ID NO: 157 - protein, 1074 aa, unidentified
  REGION 1..1074: note = Description of Unknown: uncultivated organism with predicted taxonomy: Verrucomicrobia
  REGION 1..1074: note = MG1-161 effector
MGTKEIVWGFDIGKGSLGEAVRIGNEFKHVQSLEIPPEFAETKTAAALRRAWRTRHAHKARELWLERCLSNAGIEVLGRRKVDIVGGRWKLVSEGDRRLEREFPADGEDCCYNSIALRCKLLLGEKLESWQVFKALNSAIQTRGYDAKIPWGNDDGKTSDSAKGGKSEAAKEEESYAEKLALYEREFDGLLAEVDNRKKYDFPCFFKAAKIGLWSPANPDAVKIRIDNTAEKAKGYVVPRSAVIAEFRALVDAAAKQYPALKGKADFIMFGVSEEPYASYNPELRKKFGLKRGAESDWTALGQKTPRFDNRVIDKCKLIPRLNVCKIKPLPECRTDDDFLPYETTLALKLLNLRFFRGAGVDSLSFDEFLRAFEIAKNNKFELNKTNLKKFFKSIGAEVIDESQSKIEQPRSSGRASFSRPAMRILRNLVFSGKSPAEFYETELVKITNTDKNRGIVAEDIKFLKLMGNVPWGGIFVPDVGVFDFADSTECSRAVQINKLIGMQNDPIVRHRLSFFYGRIKSLDAEFGTPDKIVLEFVRDDFLGKKAKADLSKAINDRAKEKKKYAEELDSQRENFGPKYASKKMLLKYELYSKQKGECIYTGRALGFSDLEQLEVEHIVPRSRGGPDALYNYVLTDEKTNKDKGDRTPFEWLSSKGVEWDAYRDRVRGLTKELGAKRCKLLLSPNAEELVEKYTALAETAWISKLAQRICCIHFGFQFGGLTGEKKVWTVSGNTTAMIRSRYGLNRLLHNEDVPKDISLSERLKLESEFERKNRDNKKHHALDAMCLCYAPTSNTRRAASYKNILPAEITRNPESDEARRFFGGYLANVIPNKVAIEKPTLEQTIYAKRLIEGRETIVKKCNVRDLAYAGINPKYDLGKLKDRIRDIINPVSKRVISDFVNSNPNLSESEWEDWCRHEASIPSKSDKATRLLRVQCAVGDPAEYKDLSKDGCGAYRKGKSHKGQYIWKTKGGRYVVTPVYTFASKIRVYDDMRRDPNCEEICGFFRQNCLVEIPNDVYDNKGVLKLKAGIYRSNTIKTNGQVNLTTPNGIKFNGISIQYLMSAGMKRITLNTI

SEQ ID NO: 158 - protein, 1062 aa, unidentified
  REGION 1..1062: note = Description of Unknown: uncultivated organism with predicted taxonomy: Coraliomargarita sp. CAG:312
  REGION 1..1062: note = MG1-162 effector
MNNNNTQIWGFDIGKASLGEAVWCGGKFKHVESLILDKDFAEIKTSAGRRRQARTRKAHKAREEWLEKCLEDCGIEILKRRKVGIVNGQWKLISKGDARLEKEFPAEGEEVCYNSIALRCKLILGEKLESWQIFKALNSSIQHRGYDENIPWKETQNESKKEDGDYFKKIVLYESEKEDILNRLPQECKREDFDFPCFFKAKKMGIWSEENPYKVGLRISNNAQKAKGYVIPRKYVENEFVRLVQMASLQYPKLKDKQMFILYGISETPYASLFKDARKKFGLKRGADSDWTALGQKIPRFDNRMIGKCKLIPRLNTCKIKSPEKIKSEEDLLHYDITLALKLLNLRFFKDSEICALSFEEFKKLFEIGKSNKYKISKTDLKKFLKSIGASVLSQDHSEIEAPRTSGRSSFSRPAMKILKELIFSGEPPSKFLKAKIDKIANTDPNKGIIREDLDFIRIIGDCPWNGIFIPDVETYKYASQTQESSEAQINKLIGSQNDPIVRHRLSFFYERIKALSEKFGVPDKIVLEFVREDFMGKQAKKDLSLSMKKRFEEKIDIAKKLDDIGYKGNKMLLKMELLQKQGFACLYTGEALQETDLPILEIEHIVPRSLGGPDAAYNYVLTSESTNKAKGNQTPYKWLSPDRDKWRAYTERVRARAAELGSKRCRLLLSENAEELINKYTALAETAWISKLAQRIVCMHFGFQFGGNTGEKRVFTVPGNITAKIRSAFGLNKILHNIDADKKNMSEFDIVKLDYELDKKNRKNKKHHALDAMCLCFAPTGPNAQKLGIGALLPPEIAAKAEEFFRGYIEKVVPNEVAPKKPKLEESIYSKRTINRKECIVRKFNLVDLAYKSGLKPVYDISAIEKLLEDKPKKIPPIINPTVRRIVRDFVSTNPNEDEWRNWCKTVRMPSKNRNGTRIIRVLVYVGTPEEYKDLSKDGCGAFRKGDSHKGQIIWMDKNGRYKVSPVYVHSSKSQTMESIKSNPDFIKIAGFFKSHCLVEIESPVVNSKRDVLLSPGTYMINTIMAAGMAILSDTNGVKSPAININYLMNAGMRRISIKYK

SEQ ID NO: 159 - protein, 1063 aa, unidentified
  REGION 1..1063: note = Description of Unknown: uncultivated organism with predicted taxonomy: unclassified Verrucomicrobia (miscellaneous)
  REGION 1..1063: note = MG1-163 effector
MKVIEDEGGNHIWGFDIGKGSLGEAVLDGSEFKHVASLLLDADFGEIETAAGLRRQMRTRKAHKAREKWLESCLSGFGIETLKRREVGIVNGQWTLISKGDERLEREFPPDGENICYNSIALRCKLLLGEKLEGWQIFKALNSAIQNRGYDENIPWKESDASPSKKEGGDYAQKLSQYSREKSELFESFEGGEKYDYPCFFKACKMGLWSPDNPERVEVRIGSDAQKAKGYVIPRKDVEREFERLVEAASKWYPAMKGKAMYIMYGIAETPYASFKPLLRKKFDLKRGAESDWTALGQKIPRFDNRIIDKCRLIPRLNVCKIRPLSKIRGEADLLHYEITLSLKLLNLRFFRNSNVESLSFGEFKAAFEIAKGAKYKMGKAALKKFLKSISASVLSEDQSEIEAPRESGRAAFSRPAMLLLKELIFSGMTPAEFYAKKSGEISNADPNKGIVASDLDFIKLMGNCGWSGIFIPDVDTFHFANKGAEPAKLINELIGSQNNPIVRHRLSFFYERIKFLESKFGIPDKVVLEFVREDFMGKEQKKRMQIEMKKRASEKMLIAKKLDEAGYKGGNLLLKMELLEKQGGVCLYTGEPLLPSELGVLEIEHIVPRSRGGPDAQYNYVLPREKTNKEKADRTPFEWLSSDPVKWAGYSDRVKARAGQLGRKRCELLLEKNAEELVEKYTALAETAHISKLAQKIVCLHFGFQFGGLSGTKRVFTVPGSLTARIRTFYGLNKILHNEDLAHETLSFEGFLKRGEELDKKNRANKKHHALDAMCLCFAPTGVNSKRARVDMLLPPKIRSEKDAELFFRKYLDKLIPVDVAPKKPKLEDGIYSMRMVGGKKIMARRVNLVDLAYKGGQGQKPVYDISVLMDKKNPKEKKIINPQIRKLVADFARTNPSEDEWKKWCGECRLPSKNGLGTRVIRVLLNYGEPAEYKDLSKDGCGAFRKGKEHKGQIVWESTDGKYYVLPIYVHASKAKLLAELCANPKKKRICGIFTSHCMVKVGNTYNNKGELLLPEGVYMLNTIQTDGRGKLTNANGEKSNLININYLMKAGMKKVSIKEL

SEQ ID NO: 160 - protein, 1074 aa, unidentified
  REGION 1..1074: note = Description of Unknown: uncultivated organism with predicted taxonomy: Verrucomicrobia
  REGION 1..1074: note = MG1-164 effector
MHTKETVWGFDIGKGSLGEAVRVGNEFKHVLSMEIDADFAEIKTAAATRRAWRTREAHKAREMWLEKCLSDADIEILGRRKVDIVDGTWKLVSRGDGRLEREFPADGENVCYNSIALRCKLLLGEKLESWQVFKALNSAIQNRGYDAQIPWGDEDGKSSETKRSGKSDSAKKSGEDESYAERLALFEREFDKLLAEVENREKYDFPCFFKAAKMGLWSPENPDKVGIRIDNTAEKAKGYVVPRNAVIAEFRALVNAAAKQYPKLKGKADFIMFGKAEEAYASYKPELRRKFGLRRGADSDWTALGQKTPRFDNRIIGKCKLIPRLNVCKIKPLKECKTEDDFLPHTITLALKLLNLRFFRGAGIDSLSFDEFLRAFEIARQNKFALNKTNLKKFFKTIGAEIMDENQSSVEQPREGGRAAYSRPAMRLLRDLIFSGKSPAEFYASRICKIENTDKNRGLVAEDLAFIKLMGDIPWNGIFVPDVDTFNFANIRESERADKINKLIGSQNDPIVRHRLAFFYERIKLLESKFGAPDKIVLEFVRDDFLGSKAKKEMSQGIKKRFEEKKKLAEELDSQRAEFGNKYASKKMLLKFELYKKQRGRCVYTDNALPLSELENLEVEHIFPRSRGGADAMYNYVLTDENTNKQKGERTPFEWLSSDKTKWESYCDRVRSLTQSLGAKRCKLLVSPNAEELMQKYTALAETAWISKLAQKICCIHFGFQFGGLKGEKKVWTVSGNTTAMIRGRYGLNRLLHNEEISEDLPLLDRIVKEKNFEEKNRDNKKHHALDAMCICFAPTSNAKKALSRKNILPEEIAKNPESDDARKFFAKYLAEVVPTKVAIKKPELEQTIYSKRVIGGRQTIVKKCNVRDLAYKGQNPKYDFDTLTKRIKDIINPVSKRVIEDFAKTEPTEAEWEDWCKYEAAIPSKNGSPTRLLRVLVEIGNPEEYKDLSKDGCGAYRKGDSHKGQFIWKNKKGRYIVAPIYAHASKAKVLDDLQNNPDCAEICGFFRTNCLVKIPNDVADKDGKILLKAGFYKSNTIKTEGRVKLTNPNGIITEIGLQHLMNAGMKRVETNTI

SEQ ID NO: 161 - protein, 1059 aa, unidentified
  REGION 1..1059: note = Description of Unknown: uncultivated organism with predicted taxonomy: unclassified Verrucomicrobia (miscellaneous)
  REGION 1..1059: note = MG1-165 effector
MEKEKNNHVWGFDIGKGSLGEAVRIGGDFKHIASVLLDPEFGEIKTAALVRRQMRTRKAHKAREKWLEECLEGTGVEILKRREVGIVDGQWQLISKGDERLEREFPPSGEDVCYNSIALRCKLLLGEKLEGWQVFKALNSAIQKRGYDENIPWGEAEEKSSKKDDDDYAQKLSQYEKEKSELFESFADGEKYDFPCFFKAYKMGLWSPENPTRVEMRIDCRAQKAKSYVIARKYVEREFECLVEAAAKFFPKLKGRAKFILYGVSETPYASYYGNMRKKFGLKRGAESDWTALGQKVPRFDNRIIDKCRLIPRMNVCKIRPLNEARNEKDLLYYEVTLALKLLNLRFFRNSNIEQLTFEEFKKAFEIAAGAKYKMTKTAMKKFLKSISATALGDDYAEIEPPKESGRASFSRPAMEILKELIFSGMPPREFYGRKISEISNTDKNKGVVSSDLDFIKLMGDCPWGGIFIPDVQTYQFANAAFPDPDAQINKLIGSQNNPIVRHRLTFFFERIKFLESKYGVPDKVVLEFVRDDFMGEKEKKEMRIAMKKRAEEKMRIAKDLDEHGFKGGNLLLKMELYRKQNGICLYTGDALPLSELATLEIEHIVPRSRGGPDAQYNYVITREKTNKLKGDKTPYEWLSSDAKEWASYTDRVNACAKALGKKRCRLLLEKDAEELVEKYTALAETAHIAKLAQKIVCMHFGFQFGGLSGTKRVFTVPGALTSRIRKFYGLDRILHNSAAESENLSFEEFLKFSEDLEKKNRKNKKHHALDAMCLCFAPTGVDSRRAKLGEILPEKLRSEKAAREFFKSYLDKIMPVDVAPKKPRLEDGIYSKRIIGGKACMVKRNNLVDLAYKSGLKPVFDIPTLIKLVDKKEKGIINPQIRKMIGEFAATNPDESAWRKWCEEVRLPSKSGLGARVMRVLVYYGEADEYKDLSKDGCGAYRKGDGHKGQVIWESVDGKYYVEPVYVHASKAGVMAALNANPKKKRICGMFNSHCTVDVGDVYNDKGDFILPAGRYMVNTIQKNGQCVLTNADGEKRNPININYLMRAGMRRVELSEL

SEQ ID NO: 162 - protein, 1059 aa, unidentified
  REGION 1..1059: note = Description of Unknown: uncultivated organism with predicted taxonomy: unclassified Verrucomicrobia (miscellaneous)
  REGION 1..1059: note = MG1-166 effector
MEKEKNNHVWGFDIGKGSLGEAVRIGGDFKHIASVLLDPEFGEIKTAALARRQMRTRKAHKAREKWLEECLEGTGVEILKRREVGIVDGQWQLISKGDERLEREFPPSGEDVCYNSIALRCKLLLGEKLEGWQVFKALNSAIQKRGYDENIPWGEAEEKSSKKDDDDYAQKLSQYEKEKSELFESFADGEKYDFPCFFKAYKMGLWSPENPTRVEVRIDCRAQKAKSYVIARKYVEREFECLVEAAAKFFPKLKGRAKFILYGVSETPYASYYGNMRKKFGLKRGAESDWTALGQKVPRFDNRIIDKCRFIPRMNVCKIRPLNEARNEKDLLYYEVTLALKLLNLRFFRNSNIEQLTFEEFKKAFEIAAGAKYKMTKTAMKKFLKSISATALGDDYAEIEPPKESGRASFSRPAMEILKELIFSGMPPREFYGRKISEISNTDKNKGVVSSDLDFIKLMGDCPWGGIFIPDGQTYQFANAAFPDPDAQINKLIGSQNNPIVRHRLTFFFERIKFLESKYGVPDKVVLEFVRDDFMGEKEKKEMRIAMKKRAEEKMRIAKDLDEHGFKGGNLLLKMELYRKQNGICLYTGDALPLSELATLEIEHIVPRSRGGPDAQYNYVITREKTNKLKGDKTPYEWLSSDAKEWASYTDRVNACAKGLGKKRCRLLLEKDAEELVEKYTALAETAHIAKLAQKIVCMHFGFQFGGLSGTKRVFTVPGALTSRIRKFYGLDRILHNSASESENLSFEEFLKFSEDLEKKNRKNKKHHALDAMCLCFAPTGVDSRRAKLGEILPEKLRSEKAAREFFKSYLEKIMPVDVAPKKPRLEDGIYSKRIIGGKACMVKRNNLVDLAYKSGLKPVFDIPTLIKLVDKKEKGIINPQIRKMIGEFAATNPDESAWRKWCEEVRLPSKSGLGARIMRVLVYYGEADEYKDLSKDGYGAYRKGDGHKGQVIWESVDGKYYVEPVYVHASKAGVMAALNANPKKKRICGMFNSHCTVDVGDVYNDKGEFILPAGRYMVNTIRSDNQCVLTNADGEKRNPININYLMRAGMRRVDLSEL

SEQ ID NO: 163 - protein, 1055 aa, unidentified
  REGION 1..1055: note = Description of Unknown: uncultivated organism with predicted taxonomy: unclassified Verrucomicrobia (miscellaneous)
  REGION 1..1055: note = MG1-167 effector
KNNHVWGFDIGKGSLGEAVRIGGDFKHIASVLLDPEFGEIKTAALARRQMRTRKAHKAREKWLEECLEGTGVEILKRREVGIVDGQWRLISKGDERLEREFPPSGEDVCYNSIALRCKLLLGEKLEGWQVFKALNSAIQKRGYDENIPWGEAEEKSSKKDDDDYAQKLSQYEKEKSELFESFADGEKYDFPCFFKAYKMGLWSPENPTRVEVRIDCRAQKAKSYVIARKYVEREFECLVEAAAKFFPKLKGRAKFILYGVSETPYASYYGNMRKKFGLKRGAESDWTALGQKVPRFDNRIIDKCRLIPRMNVCKIRPLNEARNEKDLLYYEVTLALKLLNLRFFRNSNIEQLTFEEFKKAFEIAAGAKYKMTKTAMKKFLKSISATALGDDYAEIEPPKESGRASFSRPAMEILKELIFSGMPPREFYGRKISEISNTDKNKGVVSSDLDFIKLMGDCPWGGIFIPDVQTYQFANAVFPDPDAQINKLIGSQNNPIVRHRLTFFFERIKFLESKYGVPDKVVLEFVRDDFMGEKEKKEMRIAMKKRAEEKMRIAKDLDEHGFKGGNLLLKMELYRKQNGICLYTGDALPLSELATLEIEHIVPRSRGGPDAQYNYVITREKTNKLKGDKTPYEWLSSDAKEWASYTDRVNACAKALGKKRCRLLLEKDAEELVEKYTALAETAHIAKLAQKIVCMHFGFQFGGLSGTKRVFTVPGALTSRIRKFYGLDRILHNSAAESENLSFEEFLKFSEDLEKKNRKNKKHHALDAMCLCFAPTGVDSRRAKLGEILPEKLRSEKAAREFFKSYLDKIMPVDVAPKKPRLEDGIYSKRIIGGKACMVKRNNLVDLAYKSGLKPVFDIPTLIKLVDKKEKGIINPQIRKMIGEFAATNPDESAWRKWCEEVRLPSKSGLGARIMRVLVYYGEADEYKDLSKDGYGAYRKGDGHKGQVIWESVDGKYYVEPVYVHASKAGVMAALNANPKKKRICGMFNSHCTVDVGDVYNDKGDFILPAGRYMVNTIRSDNQCVLTNADGEKRNPININYLMRAGMRRVDLSEL

SEQ ID NO: 164 - protein, 988 aa, unidentified
  REGION 1..988: note = Description of Unknown: uncultivated organism with predicted taxonomy: Verrucomicrobia
  REGION 1..988: note = MG1-168 effector
GRWKLVSEGDRRLEREFPADGEDCCYNSIALRCKLLLGEKLESWQVFKALNSAIQTRGYDAKIPWGNDDGKTSDSAKGGKSEAAKEEESYAEKLALYEREFDGLLAEVDNRKKYDFPCFFKAAKIGLWSPANPDAVKIRIDNTAEKAKGYVVPRSAVIAEFRALVDAAAKQYPALKGKADFIMFGVSEEPYASYNPELRKKFGLERGAESDWTALGQKTPRFDNRVIDKCKLIPRLNVCKIKPLPECRTDDDFLPYETTLALKLLNLRFFRGAGVDSLSFDEFLRAFEIAKNNKFELNKTNLKKFFKSIGAEVIDESQSKIEQPRSSGRASFSRPAMRILRNLVFSGKSPAEFYETELVKITNTDKNRGIVAEDIKFLKLMGNVPWGGIFVPDVGVFDFADSTECSRAVQINKLIGMQNDPIVRHRLSFFYGRIKSLDAEFGTPDKIVLEFVRDDFLGKKAKADLSKAINDRAKEKKKYAEELDSQRENFGPKYASKKMLLKYELYSKQKGECIYTGRALGFSDLEQLEVEHIVPRSRGGPDALYNYVLTDEKTNKDKGDRTPFEWLSSKGVEWDAYRDRVRGLTKELGAKRCKLLLSPNAEELVEKYTALAETAWISKLAQRICCIHFGFQFGGLTGEKKVWTVSGNTTAMIRSRYGLNRLLHNEDVPKDISLSERLKLESEFERKNRDNKKHHALDAMCLCYAPTSNTRRAASYKNILPAEITRNPESDEARRFFGGYLANVIPNKVAIEKPTLEQTIYAKRLINGKETIVKKCNVRDLAYAGRNPQYSYLTLVKNIKCIVGKVSKNIISDFVLSNPDLNESEWENWCKYDAVIPSKNGAPTKLLRVLCGARNPEEYKDLSKDGCGAYRKGNLHKGQFVWKTKQGCYVVTPVYAFESKIKVWDDMRRDPNCEEICGFFRQNCLVEIPNDVYDSKGVLKLKAGVYRSNTIRADGFVKLTNSDGFSPNPISIQYLMSAGMKRITLNTI

SEQ ID NO: 165 - protein, 991 aa, unidentified
  REGION 1..991: note = Description of Unknown: uncultivated organism with predicted taxonomy: unclassified Verrucomicrobia (miscellaneous)
  REGION 1..991: note = MG1-169 effector
ECLEGTGVEILKRREVGIVDGQWQLISKGDERLEREFPPSGEDVCYNSIALRCKLLLGEKLEGWQVFKALNSAIQKRGYDENIPWGEAEEKSSKKDDDDYAQKLSQYEKEKSELFESFADGEKYDFPCFFKAYKMGLWSPENPTRVEVRIDCRAQKAKSYVIARKYVEREFECLVEAAAKFFPKLKGRAKFILYGVSETPYASYYGNMRKKFGLKRGAESDWTALGQKVPRFDNRIIDKCRLIPRMNVCKIRPLNESRNEKDLLYYEVTLALKLLNLRFFRNSNIEQLTFEEFKKAFEIAAGAKYKMTKTAMKKFLKSISATALGDDYAEIEPPKESGRASFSRPAMEILKELIFSGMPPREFYGRKISEISNTDKNKGVVSSDLDFIKLMGDCPWGGIFIPDVQTYQFANAAFPDPDAQINKLIGSQNNPIVRHRLTFFFERIKFLESKYGVPDKVVLEFVRDDFMGEKEKKEMRIAMKKRAEEKMRIAKDLDEHGFKGGNLLLKMELYRKQNGICLYTGDALPLSELATLEIEHIVPRSRGGPDAQYNYVITREKTNKLKGDKTPYEWLSSDAKEWASYTDRVNACAKALGKKRCRLLLEKDAEELVEKYTALAETAHIAKLAQKIVCMHFGFQFGGLSGTKRVFTVPGALTSRIRKFYGLDRILHNSAAESENLSFEEFLKFSEDLEKKNRKNKKHHALDAMCLCFAPTGVDSRRAKLGEILPEKLRSEKAAREFFKSYLDKIMPVDVAPKKPRLEDGIYSKRIIGGKACMVKRNNLVDLAYKSGLKPVFDIPTLIKLVDKKEKGIINPQIRKMIGEFAATNPDESAWRKWCEEVRLPSKSGLGARIMRVLVYYGEADEYKDLSKDGCGAYRKGDGHKGQVIWESVDGKYYVEPVYVHASKAGVMAALNANPKKKRICGMFNSHCTVDVGDVYNDKGDFILPAGRYMVNTILTTGRCVLTNADGEKRNPININYLMRAGMRRVDLNEL

SEQ ID NO: 166 - protein, 872 aa, unidentified
  REGION 1..872: note = Description of Unknown: uncultivated organism with predicted taxonomy: unclassified Verrucomicrobia (miscellaneous)
  REGION 1..872: note = MG1-170 effector
DGEKYDFPCFFKAYKMGLWSPENPTRVEVRIDCRAQKAKSYVIARKYVEREFECLVEAAAKFFPKLKGRAKFILYGVSETPYASYYGNMRKKFGLKRGAESDWTALGQKVPRFDNRIIDKCRLIPRMNVCKIRPLNESRNEKDLLYYEVTLALKLLNLRFFRNSNIEQLTFEEFKKAFEIAAGAKYKMTKTAMKKFLKSISATALGDDYAEIEPPKESGRASFSRPAMEILKELIFSGMPPREFYGRKISEISNTDKNKGVVSSDLDFIKLMGDCPWGGIFIPDVQTYQFANAAFPDPDAQINKLIGSQNNPIVRHRLTFFFERIKFLESKYGVPDKVVLEFVRDDFMGEKEKKEMRIAMKKRAEEKMRIAKDLDEHGFKGGNLLLKMELYRKQNGICLYTGDALPLSELATLEIEHIVPRSRGGPDAQYNYVITREKTNKLKGDKTPYEWLSSDAKEWASYTDRVNACAKALGKKRCRLLLEKDAEELVEKYTALAETAHIAKLAQKIVCMHFGFQFGGLSGTKRVFTVPGALTSRIRKFYGLDRILHNSAAESENLSFEEFLKFSEDLEKKNRKNKKHHALDAMCLCFAPTGVDSRRAKLGEILPEKLRSEKAAREFFKSYLDKIMPVDVAPKKPRLEDGIYSKRIIGGKACMVKRNNLVDLAYKSGLKPVFDIPTLIKLVDKKEKGIINPQIRKMIGEFAATNPDESAWRKWCEEVRLPSKSGLGARIMRVLVYYGEADEYKDLSKDGCGAYRKGDGHKGQVIWESVDGKYYVEPVYVHASKAGVMAALNANPKKKRICGMFNSHCTVDVGDVYNDKGDFILPAGRYMVNTILTTGRCVLTNADGEKRNPININYLMRAGMRRVDLNEL

SEQ ID NO: 167 - protein, 1064 aa, unidentified
  REGION 1..1064: note = Description of Unknown: uncultivated organism with predicted taxonomy: unclassified Verrucomicrobia (miscellaneous)
  REGION 1..1064: note = MG1-171 effector
EFNKNMEKEKNNHVWGFDIGKGSLGEAVRIGGDFKHIASVLLDPEFGEIKTAALARRQMRTRKAHKAREKWLEECLEGTGVEILKRREVGIVDGQWQLISKGDERLEREFPPSGEDVCYNSIALRCKLLLGEKLEGWQVFKALNSAIQKRGYDENIPWGEAEEKSSKKDDDDYAQKLSQYEKEKSELFESFADGEKYDFPCFFKAYKMGLWSPENPTRVEVRIDCRAQKAKSYVIARKYVEREFECLVEAAAKFFPKLKGRAKFILYGVSETPYASYYGNMRKKFGLKRGAESDWTALGQKVPRFDNRIIDKCRLIPRMNVCKIRPLNESRNEKDLLYYEVTLALKLLNLRFFRNSNIEQLTFEEFKKAFEIAAGAKYKMTKTAMKKFLKSISATALGDDYAEIEPPKESGRASFSRPAMEILKELIFSGMPPREFYGRKISEISNTDKNKGVVSSDLDFIKLMGDCPWGGIFIPDVQTYQFANAAFPDPDAQINKLIGSQNNPIVRHRLTFFFERIKFLESKYGVPDKVVLEFVRDDFMGEKEKKEMRIAMKKRAEEKMRIAKDLDEHGFKGDNLLLKMELYRKQNGICLYTGDALPLSELATLEIEHIVPRSRGGPDAQYNYVITREKTNKLKGDKTPYEWLSSDAKEWASYTDRVNACAKALGKKRCRLLLEKDAEELVEKYTALAETAHIAKLAQKIVCMHFGFQFGGLSGTKRVFTVPGALTSRIRKFYGLDRILHNSAAESENLSFEEFLKFSEDLEKKNRKNKKHHALDAMCLCFAPTGVDSRRAKLGEILPEKLRSEKAAREFFKSYLDKIMPVDVAPKKPRLEDGIYSKRIIGGKACMVKRNNLVDLAYKSGLKPVFDIPTLIKLVDKKEKGIINPQIRKMIGEFAATNPDESAWRKWCEEVRLPSKSGLGARIMRVLVYYGEADEYKDLSKDGCGAYRKGDGHKGQVIWESVDGKYYVEPVYVHASKAGVMAALNANPKKKRICGMFNSHCTVDVGDVYNDKGDFILPAGRYMVNTILTTGRCVLTNADGEKRNPININYLMRAGMRRVDLNEL

SEQ ID NO: 168 - protein, 1073 aa, unidentified; identical to SEQ ID NO: 133
  REGION 1..1073: note = Description of Unknown: uncultivated organism with predicted taxonomy: Verrucomicrobia
  REGION 1..1073: note = MG1-172 effector

SEQ ID NO: 169 - protein, 1046 aa, unidentified
  REGION 1..1046: note = Description of Unknown: uncultivated organism with predicted taxonomy: unclassified Verrucomicrobia (miscellaneous)
  REGION 1..1046: note = MG1-173 effector
IGKGSLGEAVRIGGDFKHIASVLLDPEFGEIKTAALARRQMRTRKAHKAREKWLEECLEGTGVEILKRREVGIVDGQWQLISKGDERLEREFPPSGEDVCYNSIALRCKLLLGEKLEGWQVFKALNSAIQKRGYDENIPWGEAEEKSSKKDDDDYAQKLSQYEKEKSELFESFADGEKYDFPCFFKAYKMGLWSPENPTRVEVRIDCRAQKAKSYVIARKYVEREFECLVEAAAKFFPKLKGRAKFILYGVSETPYASYYGNMRKKFGLKRGAESDWTALGQKVPRFDNRIIDKCRLIPRMNVCKIRPLNEARNEKDLLYYEVTLALKLLNLRFFRNSNIEQLTFEEFKKAFEIAAGAKYKMTKTAMKKFLKSISATALGDDYAEIEPPKESGRASFSRPAMEILKELIFSGMPPREFYGRKISEISNTDKNKGVVSSDLDFIKLMGDCPWGGIFIPDVQTYQFANAAFPDPDAQINKLIGSQNNPIVRHRLTFFFERIKFLESKYGVPDKVVLEFVRDDFMGEKEKKEMRIAMKKRAEEKMRIAKDLDEHGFKGGNLLLKMELYRKQNGICLYTGDALPLSELATLEIEHIVPRSRGGPDAQYNYVITREKTNKLKGDKTPYEWLSSDAKEWASYTDRVNACTKALGKKRCRLLLEKDAEELVEKYTALAETAHIAKLAQKIVCMHFGFQFGGLSGTKRVFTVPGALTSRIRKFYGLDRILHNSAAESENLSFEEFLKFSEDLEKKNRKNKKHHALDAMCLCFAPTGVDSRRAKLGEILPEKLRSEKAAREFFKSYLDKIMPVDVAPKKPRLEDGIYSKRIIGGKACMVKRNNLVDLAYKSGLKPVFDIPTLIKLVDKKEKGIINPQIRKMIGEFAATNPDESAWRKWCEEVRLPSKSGLGARIMRVLVYYGEADEYKDLSKDGYGAYRKGDGHKGQVIWESVDGKYYVEPVYVHASKAGVMAALNANPKKKRICGMFNSHCTVDVGDVYNDKSDFILPAGRYMVNTIRSDNQCVLTNADGEKRNPININYLMRAGMRRVDLSEL

SEQ ID NO: 170 - protein, 1059 aa, unidentified; identical to SEQ ID NO: 86
  REGION 1..1059: note = Description of Unknown: uncultivated organism with predicted taxonomy: unclassified Verrucomicrobia (miscellaneous)
  REGION 1..1059: note = MG1-174 effector

SEQ ID NO: 171 - protein, 918 aa, unidentified
  REGION 1..918: note = Description of Unknown: uncultivated organism with predicted taxonomy: Coraliomargarita sp. CAG:312
  REGION 1..918: note = MG1-175 effector
AADGGDGSSRKSSDSDASGDGESYAEKLAHYEREFDGILAELDNREKYEFPCFFKAAKMGLWSPENPDFVGVRIDNTAEKAKGYVVPREAVVREFRALVNAAALQYPNLKGKADFIMFGRACEPYASYNPELRKRFGLKRGAATDWTALGQKTPRFDNRVIDKCKLIPRLNVCKIKPLDECKTDDDFLSYTITLSLKLLNLRFFRGAGVDSLSFDEFLRAFELAKNSKFKLGKAALKKFFKTIGAEVMDESQSEIEQPRNGGRAAFSRPAMRILRDLIFSGKSPAEFYAAAIENIANTDKNKGLVAGDLDFLKLMGDAPWSGIFIPDVGLSDFADASEAAREAQINKLIGSQNDPIVRHRLSFFYERIKSLEAKFGVPDKIVLEFVRDDFLGKKAKSDLNKAIKTRFDEKKKLAEDLDSKREEFGFKYASKKMLLKFELYKKQGGECVYTGNALPLSELESLEIEHIVPRSRGGPDAMYNYVLTDEKTNKEKGDRTPFEWRSTMGAEWESYCERVRKLTKELGAKRCKLLLSPNAAELVEKYTALAETAWISKLAQRICCLHFGFQFGGLAGAKKVWTVSGNTTAMIRGRYGLNRLLHDEESAEDLSLFDRICMEKKFEEKNRKNKKHHALDAMCLCFAPTSNAKKASAYKNILPEEITRNPESDEARKFFGKYLASVIPNKVAVEKSKLEQTIYSLRKGRIVKKCNVRDLAYEGINPKYNYTKLVKRIESIVGDVSKRIISDFVLSNPDLNESEWEEWCKYKAAIPSKNGAPTKLLRVLFDVGSPEEYKDLSKDGCGAYRKGDSHKGQFIWKTQKGKYMVAPVYAHASKAKVFASLKNNPDCAEVCGFFRQNCLVEIPNDVIDKSGKMLLKSGIYKSNTIMSDGRAKFTNSDGISTNPISIQYLMPAGMKRIKLDTV

SEQ ID NO: 172 - protein, 1059 aa, unidentified
  REGION 1..1059: note = Description of Unknown: uncultivated organism with predicted taxonomy: unclassified Verrucomicrobia (miscellaneous)
  REGION 1..1059: note = MG1-176 effector
MEKEKNNHVWGFDIGKGSLGEAVRIGGDFKHIASVLLDPEFGEIKTAALARRQMRTRKAHKAREKWLEECLEGTGVEILKRREVGIVDGQWQLISKGDERLEREFPPSGEDVCYNSIALRCKLLLGEKLEGWQVFKALNSAIQKRGYDENIPWGEAEEKSSKKDDDDYAQKLSQYEKEKSELFESFADGEKYDFPCFFKAYKMGLWSPENPTRVEVRIDCRAQKAKSYVIARKYVEREFECLVEAAAKFFPKLKGRAKFILYGVSETPYASYYGNMRKKFGLKRGAESDWTALGQKVPRFDNRIIDKCRLIPRMNVCKIRPLNEARNEKDLLYYEVTLALKLLNLRFFRNSNIEQLTFEEFKKAFEIAAGAKYKMTKTAMKKFLKSISATALGDDYAEIEPPKESGRASFSRPAMEILKELIFSGMPPREFYGRKISEISNTDKNKGVVSSDLDFIKLMGDCPWGGIFIPDVQTYQFANAAFPDPDAQINKLIGSQNNPIVRHRLTFFFERIKFLESKYGVPDKVVLEFVRDDFMGEKEKKEMRIAMKKRAEEKMRIAKDLDGHGFKGGNLLLKMELYRKQNGICLYTGDALPLSELATLEIEHIVPRSRGGPDAQYNYVITREKTNKLKGDKTPYEWLSSDAKEWASYTDRVNACAKALGKKRCRLLLEKDAEELVEKYAALAETAHIAKLAQKIVCMHFGFQFGGLSGTKRVFTVPGALTSRIRKFYGLDRILHNSAAESENLSFEEFLKFSEDLEKKNRKNKKHHALDAMCLCFAPTGVDSRRAKLGEILPEKLRSEKAAREFFKSYLDKIMPVDVAPKKPRLEDGIYSKRIIGGKACMVKRNNLVDLAYKSGLKPVFDIPTLIKLVDKKEKGIINPQIRKMIGEFAATNPDESAWRKWCEEVRLPSKSGLGARIMRVLVYYGEADEYKDLSKDGCGAYRKGDGHKGQVIWESVDGKYYVEPVYVHASKAGVMAALNANPKKKRICGMFNSHCAVDVGDVYNDKGDFILPAGRYMVNTIRSDNQCVLTNADGEKRNPININYLMRAGMRRVDLSEL

SEQ ID NO: 173 - protein, 1073 aa, unidentified; identical to SEQ ID NO: 142
  REGION 1..1073: note = Description of Unknown: uncultivated organism with predicted taxonomy: Verrucomicrobia
  REGION 1..1073: note = MG1-177 effector

SEQ ID NO: 174 - protein, 1052 aa, unidentified; identical to SEQ ID NO: 155
  REGION 1..1052: note = Description of Unknown: uncultivated organism with predicted taxonomy: Coraliomargarita sp. CAG:312
  REGION 1..1052: note = MG1-178 effector

SEQ ID NO: 175 - protein, 846 aa, unidentified
  REGION 1..846: note = Description of Unknown: uncultivated organism with predicted taxonomy: Coraliomargarita sp. CAG:312
  REGION 1..846: note = MG1-179 effector
TLFRSAEKAKGYVVPREAVVREFRALVNAAALQYPNLKGKADFIMFGRACEPYASYNPELRKRFGLKRGAATDWTALGQKTPRFDNRVIDKCKLIPRLNVCRIKPLDECKTDDDFLSYTITLSLKLLNLRFFRGAGMDSLSFDEFLRAFELAKNSKFKLGKAALKKFFKTIGAEVMDESQSEIEQPRNGGRAAFSRPAMRILRDLIFSGKSPADFYATAIENIANTDKNKGLVAGDLDFLKLMGDAPWSGIFIPDVGLSDFADASEAARAAQINKLIGSQNDPIVRHRLSFFYERIKSLEAKFGVPDKIVLEFVRDDFLGKKAKSDLNKAIKTRFDEKKKLAEELDSNRAEFGPKYASKKMLLKYELYKKQGGKCVYTGNALPLSELENLEIEHIVPRSRGGPDAMYNYVLTDEKTNKEKGDRTPFEWRSTMGAEWESYCARVRELTKKLGAKRCKLLLAPNAAELVEKYTALAETAWISKLAQRICCLHFGFQFGGLAGAKKVWTVSGNTTSMIRGRYGLNRLLHDEESAEDLSLFDRICMEKKFEEKNRKNKKHHALDAMCLCFAPTSNAKKASAYKNILPEEITRNPESDEARKFFGKYLANVIPNKVAVEKPTLEQTIYAMRNGRIVKKCNVRDLAYTGINPKYNYSTLVKSIKSIVGEVPKRIISDFVLSNSDLSESEWEDWCKNEAAIPSKNGAPTKLLRVLCDAGNPEEYKDLSKDGCGAYRKGDSHKGQFIWKTKQGRYVVAPVYAHASKAKVLAALKNNPDCAEVCGFFRQNCLVEIPNDVVDKSGKMLLKAGVYRSNSVRSNGQVAITNSDGISPNPISIQYLMPAGMKRIKLDTV

SEQ ID NO: 176 - protein, 1018 aa, unidentified
  REGION 1..1018: note = Description of Unknown: uncultivated organism with predicted taxonomy: unclassified Verrucomicrobia (miscellaneous)
  REGION 1..1018: note = MG1-180 effector
IASVLLDPEFGEIKTAALVRRQMRTRKAHKAREKWLEECLEGTGVVDGQWQLISKGDERLEREFPPSGEDVCYNSIALRCKLLLGEKLEGWQVFKALNSAIQKRGYDENIPWGEAEEKSSKKDDDDYAQKLSQYEKEKSELFESFADGEKYDFPCFFKAYKMGLWSPENPTRVEMRIDCRAQKAKSYVIARKYVEREFECLVEAAAKFFPKLKGRAKFILYGVSETPYASYYGNMRKKFGLKRGAESDWTALGQKVPRFDNRIIDKCRLIPRMNVCKIRPLNEARNEKDLLYYEVTLALKLLNLRFFRNSNIEQLTFEEFKKAFEIAAGAKYKMTKTAMKKFLKSISATSLGDDYAEIEPPKESGRASFSRPAMEILKELIFSGMPPREFYGRKISEISNTDKNKGVVSSDLDFIKLMGDCPWGGIFIPDVQTYQFANAAFPDPDAQINKLIGSQNNPIVRHRLTFFFERIKFLESKYGVPDKVVLEFVRDDFMGEKEKKEMRIAMKKRAEEKMRIAKDLDEHGFKGGNLLLKMELYRKQNGICLYTGDALPLSELATLEIEHIVPRSRGGPDAQYNYVITREKTNKLKGDKTPYEWISSDAKEWASYTDRVNACAKALGKKRCRLLLEKDAEELVEKYTALAETAHIAKLAQKIVCMHFGFQFGGVSGTKRVFTVPGALTSRIRKFYGLDRILHNSAAESENLSFEEFLKFSEDLEKKNRKNKKHHALDAMCLCFAPTGVDSRRAKLGEILPEKLRSEKAAREFFKSYLDKIMPVDVAPKKPRLEDGIYSKRIIGGKACMVKRNNLVDLAYKSGLKPVFDIPTLIKLVDKKEKGIINPQIRKMIGEFAATNPDESAWRKWCEEVRLPSKSGLGARIMRVLVYYGEADEYKDLSKDGYGAYRKGDGHKGQVIWESVDGKYYVEPVYVHASKAGVMAALNANPKKKRICGMFNSHCTVDVGDVYNDKGDFILPAGRYMVNTIRSDNQCVLTNADGEKRNPININYLMRAGMRRVDLSEL

SEQ ID NO: 177 - protein, 1077 aa, unidentified; identical to SEQ ID NO: 111
  REGION 1..1077: note = Description of Unknown: uncultivated organism with predicted taxonomy: unclassified Verrucomicrobia (miscellaneous)
  REGION 1..1077: note = MG1-181 effector

SEQ ID NO: 178 - protein, 1061 aa, unidentified; identical to SEQ ID NO: 112
  REGION 1..1061: note = Description of Unknown: uncultivated organism with predicted taxonomy: unclassified Verrucomicrobia (miscellaneous)
  REGION 1..1061: note = MG1-182 effector

SEQ ID NO: 179 - protein, 1062 aa, unidentified; identical to SEQ ID NO: 92
  REGION 1..1062: note = Description of Unknown: uncultivated organism with predicted taxonomy: Coraliomargarita sp. CAG:312
  REGION 1..1062: note = MG1-183 effector

SEQ ID NO: 180 - protein, 1059 aa, unidentified; identical to SEQ ID NO: 127
  REGION 1..1059: note = Description of Unknown: uncultivated organism with predicted taxonomy: unclassified Verrucomicrobia (miscellaneous)
  REGION 1..1059: note = MG1-184 effector

SEQ ID NO: 181 - protein, 1062 aa, unidentified; identical to SEQ ID NO: 122
  REGION 1..1062: note = Description of Unknown: uncultivated organism with predicted taxonomy: Coraliomargarita sp. CAG:312
  REGION 1..1062: note = MG1-185 effector

SEQ ID NO: 182 - protein, 1054 aa, unidentified; identical to SEQ ID NO: 123
  REGION 1..1054: note = Description of Unknown: uncultivated organism with predicted taxonomy: unclassified Verrucomicrobia (miscellaneous)
  REGION 1..1054: note = MG1-186 effector

SEQ ID NO: 183 - protein, 957 aa, unidentified
  REGION 1..957: note = Description of Unknown: uncultivated organism with predicted taxonomy: Verrucomicrobia
  REGION 1..957: note = MG1-187 effector
LRCKLLLGEKLESWQVFKALNSAIQNRGYDANIPWGDEDAADGGDGSSRKSSDSDASGDGESYAEKLAHYEREFDGILAELDNREKYEFPCFFKAAKMGLWSPENPDFVGVRIDNTAEKAKGYVVPREAVVREFRALVNAAALQYPNLKGKADFIMFGRACEPYASYNPELRKRFGLKRGAATDWTALGQKTPRFDNRVIDKCKLIPRLNVCKIKPLDECKTDDDFLSYTITLSLKLLNLRFFRGAGVDSLSFDEFLRAFELAKNSKFKLGKAALKKFFKTIGAEVMDESQSEIEQPRNGGRAAFSRPAMRILRDLIFSGKSPAEFYATAIENIANTDKNKGLVAGDLDFLKLMGDAPWSGIFIPDVGLSDFADASEAAREAQINKLIGSQNDPIVRHRLSFFYERIKSLEAKFGVPDKIVLEFVRDDFLGKKAKSDLNKAIKTRFDEKKKLAEDLDSKREEFGFKYASKKMLLKFELYKKQGGECVYTGNALPLSELESLEIEHIVPRSRGGPDAMYNYVLTDEKTNKEKGDRTPFEWRSTMGAEWESYCERVRKLTKELGAKRCKLLLSPNAAELVEKYTALAETAWISKLAQRICCLHFGFQFGGLAGAKKVWTVSGNTTAMIRGRYGLNRLLHDEESAEDLSLFDRICMEKKFEEKNRKNKKHHALDAMCLCFAPTSNAKKASAYKNILPEEITRNPESDEARKFFGKYLANVIPNKVAVEKPTLEQTIYAMRKGRIVKKCNVRDLAYEGINPKYNYTKLVKRIESIVGDVSKRIISDFVLSNPDLNESEWEEWCKYKAAIPSKNGAPTKLLRVLCDAGNPEEYKDLSKDGCGAYRKGDSHKGQFIWKTKQGRYVVAPVYAHASKAKVLAALKNNPDCAEVCGFFRQNCLVEIPNDVIDKSGKMLLKSGIYKSNTIMSDGRAKFTNSDGISTNPISIQYLMPAGMKRIKLDTV

SEQ ID NO: 184 - protein, 1062 aa, unidentified
  REGION 1..1062: note = Description of Unknown: uncultivated organism with predicted taxonomy: Verrucomicrobia
  REGION 1..1062: note = MG1-188 effector
MNNNNTQIWGFDIGKASLGEAVWCGGKFKHVESLILDKDFAEIKTSAGRRRQARTRKAHKAREEWLEKCLEDCGIEILKRRKVGIVNGQWKLISKGDARLEKEFPAEGEEVCYNSIALRCKLILGENLESWQIFKALNSSIQHRGYDENIPWKETQNESKKEDGDYFKKIVLYESEKEDILNRLPQECKREDFDFPCFFKAKKMGIWSEENPYKVGLRISNNAQKAKGYVIPRKYVENEFVRLVQMASLQYPKLKDKQMFILYGISETPYASLFKDARKKFGLKRGADSDWTALGQKIPRFDNRMIGKCKLIPRLNTCKIKSPEKIKSEEDLLHYDITLALKLLNLRFFKDSEICALSFEEFKKLFEIGKSNKYKISKTDLKKFLKSIGASVLSQDHSEIEAPRTSGRSSFSRPAMKILKELIFSGEPPSKFLKAKIDKIANTDPNKGIIREDLDFIRIMGDCPWNGIFIPDVETYKYASQTQENSEAQINKLIGSQNDPIVRHRLSFFYERIKALSEKFGVPDKIVLEFVREDFMGKQAKKDLSLSMKKRFEEKIDIAKKLDDIGYKGNKMLLKMELLQKQGFACLYTGEALQETDLPILEIEHIVPRSLGGPDAAYNYVLTSESTNKAKGNQTPYKWLSPDRDKWRAYTERVRARAAELGSKRCRLLLSENAEELINKYTALAETAWISKLAQRIVCMHFGFQFGGNTGEKRVFTVPGNITAKIRSAFGLNKILHNIDADKKNMSEFDIVKLDYELDKKNRKNKKHHALDAMCLCFAPTGPNAQKLGIGALLPPEIAAKAEEFFRGYIEKVVPNEVAPKKTKLEESIYSKRTINRKECIVRKFNLVDLAYKSGLKPVYDISAIEKLLEDKPKKIPPIINPTVRRIVRDFVSTNPNEDEWRNWCKTVRMPSKNRNGTRIIRVLVYVGTPEEYKDLSKDGCGAFRKGDSHKGQIIWMDKNGRYKVSPVYVHSSKSQTMESIKSNPDFIKIAGFFKSHCLVEIESPVVNGKRDVLLSPGTYMINTIMAAGMAILSDTNGVKSPAININYLMNAGMRRISIKYK

SEQ ID NO: 185 - protein, 1073 aa, unidentified; identical to SEQ ID NO: 113
  REGION 1..1073: note = Description of Unknown: uncultivated organism with predicted taxonomy: Verrucomicrobia
  REGION 1..1073: note = MG1-189 effector

SEQ ID NO: 186 - protein, 1059 aa, unidentified; identical to SEQ ID NO: 90
  REGION 1..1059: note = Description of Unknown: uncultivated organism with predicted taxonomy: unclassified Verrucomicrobia (miscellaneous)
  REGION 1..1059: note = MG1-190 effector

SEQ ID NO: 187 - protein, 1059 aa, unidentified
  REGION 1..1059: note = Description of Unknown: uncultivated organism with predicted taxonomy: unclassified Verrucomicrobia (miscellaneous)
  REGION 1..1059: note = MG1-191 effector
MEKEKNNHVWGFDIGKGSLGEAVRIGGDFKHIASVLLDPEFGEIKTAALARRQMRTRKAHKAREKWLEECLEGTGVEILKRREVGIVDGQWQLISKGDERLEREFPPSGENVCYNSIALRCKLLLGEKLEGWQVFKALNSAIQKRGYDENIPWGEAEEKSSKKDDDDYAQKLSQYEKEKSELFESFADGEKYDFPCFFKAYKMGLWSPENPTRVEVRIDCRAQKAKSYVIARKYVEREFECLVEAAAKFFPKLKGRAKFILYGVSETPYASYYGNMRKKFGLKRGAESDWTALGQKVPRFDNRIIDKCRFIPRMNVCKIRPLNEARNEKDLLYYEVTLALKLLNLRFFRNSNIEQLTFEEFKKAFEIAAGAKYKMTKTAMKKFLKSISATALGDDYAEIEPPKESGRASFSRPAMEILKELIFSGMPPREFYGRKISEISNTDKNKGVVSSDLDFIKLMGDCPWGGIFIPDVQTYQFANAAFPDPDAQINKLIGSQNNPIVRHRLTFFFERIKFLESKYGVPDKVVLEFVRDDFMGEKEKKEMRIAMKKRAEEKMRIAKDLDEHGFKGGNLLLKMELYRKQNGICLYTGDALPLSELATLEIEHIVPRSRGGPDAQYNYVITREKTNKLKGDKTPYEWLSSDAKEWASYTDRVNACAKALGKKRCRLLLEKDAEELVEKYTALAETAHIAKLAQKIVCMHFGFQFGGLSGTKRVFTVPGALTSRIRKFYGLDRILHNSAAESENLSFEEFLKFSEDLEKKNRKNKKHHALDAMCLCFAPTGVDSRRAKLGEILPEKLRSEKAAREFFKSYLDKIMPVDVAPKKPRLEDGIYSKRIIGGKACMVKRNNLVDLAYKSGLKPVFDIPTLIKLVDKKEKGIINPQIRKMIGEFAATNPDESAWRKWCEEVRLPSKSGLGARVMRVLVYYGEADEYKDLSKDGCGAYRKGDGHKGQVIWESVDGKYYVEPVYVHASKAGVMAALNANPKKKRICGMFNSHCTVDVGDVYNDKGDFILPAGRYMVNTIRSDNQCVLTNADGEKRNPININYLMRAGMRRVELSEL

SEQ ID NO: 188 - protein, 1081 aa, unidentified
  REGION 1..1081: note = Description of Unknown: uncultivated organism with predicted taxonomy: unclassified Verrucomicrobia (miscellaneous)
  REGION 1..1081: note = MG1-192 effector
YYIVDFCSHCKYFNNNKEFNKNMEKEKNNHVWGFDIGKGSLGEAVRIGGDFKHIASVLLDPEFGEIKTAALVRRQMRTRKAHKAREKWLEECLEGTGIEILKRREVGIVDGQWRLISKGDERLEREFPPSGEDVCYNSIALRCKLLLGEKLEGWQVFKALNSAIQKRGYDENIPWGEAEEKSSKKDDDDYAQKLSQYEKEKSELFESFADGEKYDFPCFFKAYKMGLWSPENPTRVEVRIDCRAQKAKSYVIARKYVEREFECLVEAAAKFFPKLKGRAKFILYGVSETPYASYYGNMRKKFGLKRGAESDWTALGQKVPRFDNRIIDKCRLIPRMNVCKIRPLNEARNEKDLLYYEVTLALKLLNLRFFRNSNIEQLTFEEFKKAFEIAAGAKYKMTKTAMKKFLKSISATALGDDYAEIEPPKESGRASFSRPAMEILKELIFSGMPPREFYGRKISEISNTDKNKGVVSSDLDFIKLMGDCPWGGIFIPDVQTYQFANAAFPDPDAQINKLIGSQNNPIVRHRLTFFFERIKFLESKYGVPDKVVLEFVRDDFMGEKEKKEMRIAMKKRAEEKMRIAKDLDGHGFKGGNLLLKMELYRKQNGICLYTGDALPLSELATLEIEHIVPRSRGGPDAQYNYVITREKTNKLKGDKTPYEWLSSDAKEWASYTDRVNACAKALGKKRCRLLLEKDAEELVEKYTALAETAHIAKLAQKIVCMHFGFQFGGLSGTKRVFTVPGALTSRIRKFYGLDRILHNSAAESENLSFEEFLKFSEDLEKKNRKNKKHHALDAMCLCFAPTGVDSRRAKLGEILPEKLRSEKAAREFFKSYLDKIMPVDVAPKKPRLEDGIYSKRIIGGKACMVKRNNLVDLAYKSGLKPVFDIPTLIKLVDKKEKGIINPQIRKMIGEFAATNPDESAWRKWCEEVRLPSKSGLGARVMRVLVYYGEADEYKDLSKDGYGAYRKGDGHKGQVIWESVDGKYYVEPVYVHASKAGVMAALNANPKKKRICGMFNSHCTVDVGDVYNDKGDFILPAGRYMVNTIRSDNQCVLTNADGEKRNPININYLMRSGMRRVDLSEL

SEQ ID NO: 189 - protein, 1073 aa, unidentified; identical to SEQ ID NO: 150
  REGION 1..1073: note = Description of Unknown: uncultivated organism with predicted taxonomy: Verrucomicrobia
  REGION 1..1073: note = MG1-193 effector

SEQ ID NO: 190 - protein, 1059 aa, unidentified; identical to SEQ ID NO: 129
  REGION 1..1059: note = Description of Unknown: uncultivated organism with predicted taxonomy: unclassified Verrucomicrobia (miscellaneous)
  REGION 1..1059: note = MG1-194 effector

SEQ ID NO: 191 - protein, 1059 aa, unidentified; identical to SEQ ID NO: 93
  REGION 1..1059: note = Description of Unknown: uncultivated organism with predicted taxonomy: unclassified Verrucomicrobia (miscellaneous)
  REGION 1..1059: note = MG1-195 effector

SEQ ID NO: 192 - protein, 935 aa, unidentified
  REGION 1..935: note = Description of Unknown: uncultivated organism with predicted taxonomy: Verrucomicrobia
  REGION 1..935: note = MG1-196 effector
MGAEFRHVTSLLLDEDFGEIKTAAGLRRQIRTRKAHKAREKWLERCLLEFGIEPLKRREVGIVNGRWMLISKGDERLEREFPPDGEDICYNAIALRCKLLLGEKLESWQIFKALNSAIQNRGYDENIPWKESDVSLPKKDDDDYAKKLSQYSREKGELLESFEDGEKYDYPCFFKAYKMGLWSPENPERVEIRIGNDAQKAKGYVIPRKDVEREFESLVEAASKWHPAMKGKAMYIMYGIAETPYASFKPAFRKKFDLKRGAESDWTALGQKIPRFDNRIIDKCRPIPRLNVCKIRPLSEARGEGDLLHYEITLSLKLLNLRFFRNSNVESLSFEEFKAAFEIAKSAKYKMGKAALKKFLKSISASVLSEDQSEIEAPRESGRASFSRPAMLLLKELIFSGMPPAEFYAKKAGEISNADPNKGIVASDLDFIKLMGNCGWNGIFIPDVETYRFANNGADSAKLINGLIGSQNNPIVRHRLAFFYERIKFLESKFGVPDKVVLEFVREDFMGKEQKKRMQIEMKKRASEKMLIAKKLDEAGYKGGNLLLKMELLEKQGGICLYTGEPLLPSELGVLEIEHIVPRSRGGPDAQYNYVLTREKTNKEKADRTPFEWLSSDPVKWAGYSDRVKARAGQLGRKRCELLLEKNAEELVEKYTALAETAHISKLAQKIVCLHFGFQFGGLGGTKRVFTVPGALTARIRSFYGLNKILHNEDLAKDALSYEEVLKRGEELDKKNRKNKKHHALDAMCLCFAPTGVNSKRARIDMLLPPDIRGEREAELFFRKYLDRLIPVDVAPKKPRLEDGIYSMRAVGGKKFMARRVNLVDLAYKSGLKPVYDISALIKLLDKKEKGIINAQIRKLVADFARTNPTEDEWRKWCGECRLPSKNGIGTRVIRVLLNYGEPAEYKDLSKDGRGAFRRGDGHKGQIVWESTDGK

SEQ ID NO: 193 - protein, 1059 aa, unidentified; identical to SEQ ID NO: 116
  REGION 1..1059: note = Description of Unknown: uncultivated organism with predicted taxonomy: unclassified Verrucomicrobia (miscellaneous)
  REGION 1..1059: note = MG1-197 effector

SEQ ID NO: 194 - protein, 1059 aa, unidentified
  REGION 1..1059: note = Description of Unknown: uncultivated organism with predicted taxonomy: unclassified Verrucomicrobia (miscellaneous)
  REGION 1..1059: note = MG1-198 effector
MEKEKNNHVWGFDIGIGSLGEAVRIGGDFKHIASVLLDPEFGEIKTAALARRQMRTRKAHKAREKWLEECLEGTGVEILKRREVGIVDGQWQLISKGDERLEREFPPSGEDVCYNSIALRCKLLLGEKLEGWQVFKALNSAIQKRGYDENIPWGEAEEKSSKKDDDDYAQKLSQYEKEKSELFESFADGEKYDFPCFFKAYKMGLWSPENPTRVEVRIDCRAQKAKSYVIARKYVEREFECLVEAAAKFFPKLKGRAKFILYGVSETPYASYYGNMRKKFGLKRGAESDWTALGQKVPCFDNRIIDKCRLIPRMNVCKIRPLNEARNEKDLLYYEVTLALKLLNLRFFRNSNIEQLTFEEFKEAFEIAAGAKYKMTKTAMKKFLKSISATALGDDYAEIEPPKESGRASFSRPAMEILKELIFSGMPPREFYGRKISEISNTDKNKGVVSSDLDFIKLMGDCPWGGIFIPDVQTYQFANAAFPDPDAQINKLIGSQNNPIVRHRLTFFFERIKFLESKYGVPDKVVLEFVRDDFMGEKEKKEMRIAMKKRAEEKMRIAKDLDEHGFKGGNLLLKMELYRKQNGICLYTGDALPLSELATLEIEHIVPRSRGGPDAQYNYVITREKTNKLKGDKTPYEWLSSDAKEWASYTDRVNACAKAFGKKRCRLLLEKDAEELVEKYTALAETAHIAKLAQKIVCMHFGFQFGGLSGTKRVFTVPGALTSRIRKFYGLDRILHNSAAESENLSFEEFLKFSEDLEKKNRKNKKHHALDAMCLCFAPTGVDSRRAKLGEILPEKLRSEKAAREFFKSYLDKIMPVDVAPKKPRLEDGIYSKRIIGGKACMVKRNNLVDLAYKSGLKPVFDIPTLIKLVDKKEKGIINPQIRKMIGEFAATNPDESAWRKWCEEVRLPSKSGLGARIMRVLVYYGEADEYKDLSKDGCGAYRKGDGHKGQVIWESVDGKYYVEPVYVHASKAGVMAALNANPKKKRICGMFNSHCTVDVGDVYNDKGDFILPAGRYMVNTIQKNGQCVLTNADGEKRNPININYLMRAGMRRVELSEL

SEQ ID NO: 195 - protein, 899 aa, unidentified
  REGION 1..899: note = Description of Unknown: uncultivated organism with predicted taxonomy: unclassified Verrucomicrobia (miscellaneous)
  REGION 1..899: note = MG1-199 effector
SKKDDDDYAQKLSQYEKEKSELFESFADGEKYDFPCFFKAYKMGLWSPENPTRVEVRIDCRAQKAKSYVIARKYVEREFECLVEAAAKFFPKLKGRAKFILYGVSETPYASYYGNMRKKFGLKRGAESDWTALGQKVPCFDNRIIDKCRLIPRMNVCKIRPLNEARNEKDLLYYEVTLALKLLNLRFFRNSNIEQLTFEEFKEAFEIAAGAKYKMTKTAMKKFLKSISATALGDDYAEIEPPKESGRASFSRPAMEILKELIFSGMPPREFYGRKISEISNTDKNKGVVSSDLDFIKLMGDCPWGGIFIPDVQTYQFANAAFPDPDAQINKLIGSQNNPIVRHRLTFFFERIKFLESKYGVPDKVVLEFVRDDFMGEKEKKEMRIAMKKRAEEKMRIAKDLDEHGFKGGNLLLKMELYRKQNGICLYTGDALPLSELATLEIEHIVPRSRGGPDAQYNYVITREKTNKLKGDKTPYEWLSSDAKEWASYTDRVNACAKAFGKKRCRLLLEKDAEELVEKYTALAETAHIAKLAQKIVCMHFGFQFGGLSGTKRVFTVPGALTSRIRKFYGLDRILHNSAAESENLSFEEFLKFSEDLEKKNRKNKKHHALDAMCLCFAPTGVDSRRAKLGEILPEKLRSEKAAREFFKSYLDKIMPVDVAPKKPRLEDGIYSKRIIGGKACMVKRNNLVDLAYKSGLKPVFDIPTLIKLVDKKEKGIINPQIRKMIGEFAATNPDESAWRKWCEEVRLPSKSGLGARIMRVLVYYGEADEYKDLSKDGCGAYRKGDGHKGQVIWESVDGKYYVEPVYVHASKAGVMAALNANPKKKRICGMFNSHCTVDVGDVYNDKGDFILPAGRYMVNTIQKNGQCVLTNADGEKRNPININYLMRAGMRRVELSEL

SEQ ID NO: 196 - protein, 1073 aa, unidentified
  REGION 1..1073: note = Description of Unknown: uncultivated organism
  REGION 1..1073: note = MG1-200 effector
MYTKDIIWGFDIGKGSLGEAVRVGNEFKHVQSLEIAPDFAETKTTAAARRAWRTREAHKARELWLEKCLSEAGIEVLLRRKVGVVDGAWKLVSKGDVRLEREFPPAGEDLCYNSIALRCKLLLGEKLESWQVFKALNSAIQNRGYDANIPWGDEDAADGGDGSSRKSSDSDASGDGESYAEKLAHYEREFDGILAELDNREKYEFPCFFKAAKMGLWSPENPDFVGVRIDNTAEKAKGYVVPREAVVREFRALVNAAALQYPNLKGKADFIMFGRACEPYASYNPELRKRFGLKRGAATDWTALGQKTPRFDNRVIDKCKLIPRLNVCKIKPLDECKTDDDFLSYTITLSLKLLNLRFFRGAGVDSLSFDEFLRAFELAKNSKFKLGKAALKKFFKTIGAEVMDESQSEIEQPRNGGRAAFSRPAMRILRDLIFSGKSPAEFYAAAIENIANTDKNKGLVAGDLDFLKLMGDAPWSGIFIPDVGLSDFADASEAAREAQINKLIGSQNDPIVRHRLSFFYECIKSLEAKFGVPDKIVLEFVRDDFLGKKAKSDLNKAIKTRFDEKKKLAEDLDSKREEFGFKYASKKMLLKFELYKKQGGKCVYTGNALPLSELESLEIEHIVPRSRGGPDAMYNYVLTDEKTNKEKGDRTPFEWLSTMGAEWESYCERVRKLTKELGAKRCKLLLSPNAAELVEKYTALAETAWISKLAQRICCLHFGFQFGGLAGAKKVWTVSGNTTAMIRGRYALNRLLHDEESAEDLSLFDRICMEKKFEEKNRKNKKHHALDAMCLCFAPTSNAKKASAYKNILPEEITRNPESDEARKFFGKYLANVIPNKVAVEKPTLEQTIYAMRNGRIVKKCNVRDLAYTGINPKYNYSTLVKSIKSIVGEVPKRIISDFVLSNPKLSESEWEDWCKNEALIPSKNGAPTKLLRVLCDVGSPEEYKDLSKDGCGAYRKGDSHKGQFIWETKQGRYVVAPVYAHASKAKVLAALKNNPDCAEVCGFFRQNCLVEIPNDVIDKSGKMLLKSGIYKSNTIMSDGRAKFTNSDGISTNPISIQYLMPAGMKRIKLDTV

SEQ ID NO: 197 - protein, 1073 aa, unidentified; identical to SEQ ID NO: 121
  REGION 1..1073: note = Description of Unknown: uncultivated organism with predicted taxonomy: Verrucomicrobia
  REGION 1..1073: note = MG1-201 effector

SEQ ID NO: 198 - protein, 1073 aa, unidentified
  REGION 1..1073: note = Description of Unknown: uncultivated organism with predicted taxonomy: Coraliomargarita sp. CAG:312
  REGION 1..1073: note = MG1-202 effector
MYTKEIIWGFDIGKGSLGEAVRVGNEFKHVQSLEIAPDFAETKTTAAARRAWRTREAHKARELWLEKCLSEAGIEVLLRRKVGVVDGAWKLVSKGDVRLEREFPPAGEDLCYNSIALRCKLLLGEKLESWQVFKALNSAIQNRGYDANIPWGDEDAADGGDGSSRKSSDSDASGDGESYAEKLAHYEREFDGILAELDNREKYEFPCFFKAAKMGLWSPENPDFVGVRIDNTAEKAKGYVVPREAVVREFRALVNAAALQYPNLKGKADFIMFGRACEPYASYYPELRKRFGLKRGAATDWTALGQKTPRFDNRVIDKCKLIPRLNVCEIKPLDKCKTDDDFLSYTITLSLKLLNLRFFRGAGVDSLSFDEFLRAFELAKNSKFKLGKAALKKFFKTIGAEVMDESQSEIEQPRNEGRAAFSRPAMRILRDLIFSGKSPAEFYAAAIENIANTDKNKGLVAGDLDFLKLMGDAPWSGIFIPDVGLSDFADTSEAAREAQINKLIGSQNDPIVRHRLSFFYERIKSLEAKFGVPDKIVLEFVRDDFLGKKAKSDLNKAIKTRFDEKKKLAEELDSNRAEFGPKYASKKMLLKYELYKKQGGKCVYTGKALPLSELENLEIEHIVPRSRGGPDAMYNYVLTDEKTNKEKGDRTPFEWRSTMGAEWESYCERVRKLTKELGAKRCKLLLAPNAAELVEKYTALAETAWISKLAQRICCLHFGFQFGGLAGAKKVWTVSGNTTAMIRGRYGLNRLLHDEESAEDLSLFDRICMEKKFEEKNRKNKKHHALDAMCLCFAPTSNAKKASAYKNILPEEITRNPESDEARKFFGKYLANVIPNKVAVEKPTLEQTIYAMRKGRIVKKCNVRDLAYEGINPKYNYTKLVKRIESIVGDVSKRIISDFVLSNPDLNESEWEEWCKYKAAIPSKNGAPTKLLRVLCDAGNPEEYKDLSKDGCGAYRKGDSHKGQFIWKTKQGRYVVAPVYAHASKAKVLAALKNNPDCAEVCGFFRQNCLVEIPNDVIDKSGKMLLKSGIYKSNTIMSDGRAKFTNSDGISTNPISIQYLMPAGMKRIKLDTV

SEQ ID NO: 199 - protein, 1062 aa, unidentified; identical to SEQ ID NO: 146
  REGION 1..1062: note = Description of Unknown: uncultivated organism with predicted taxonomy: Coraliomargarita sp. CAG:312
  REGION 1..1062: note = MG1-203 effector

SEQ ID NO: 200 - protein, 1073 aa, unidentified; identical to SEQ ID NO: 107
  REGION 1..1073: note = Description of Unknown: uncultivated organism with predicted taxonomy: Verrucomicrobia
  REGION 1..1073: note = MG1-204 effector

SEQ ID NO: 201 - protein, 759 aa, unidentified
  REGION 1..759: note = Description of Unknown: uncultivated organism with predicted taxonomy: Coraliomargarita sp. CAG:312
  REGION 1..759: note = MG1-205 effector
FPPAGEDLCYNSIALRCKLLLGEKLESWQVFKALNSAIQNRGYDANIPWGDEDAADGGDGSSRKSSDSDASGDGESYAEKLAHYEREFDGILAELDNREKYEFPCFFKAAKMGLWSPENPDFVGVRIDNTAEKAKGYVVPREAVVREFRALVNAAALQYPNLKGKADFIMFGRACEPYASYNPELRKRFGLKRGAATDWTALGQKTPRFDNRVIDKCKLIPRLNVCKIKPLDECKTDDDFLSYTITLSLKLLNLRFFRGAGVDSLSFDEFLRAFELAKNSKFKLGKAALKKFFKTIGAEVMDESQSEIEQPRNGGRAAFSRPAMRILRDLIFSGKSPAEFYAAAIENIANTDKNKGLVAGDLDFLKLMGDAPWSGIFIPDVGLSDFADASEAAREAQINKLIGSQNDPIVRHRLSFFYERIKSLEAKFGVPDKIVLEFVRDDFLGKKAKSDLNKAIKTRFDEKKKLAEDLDSKREEFGFKYASKKMLLKFELYKKQGGECVYTGNALPLSELESLEIEHIVPRSRGGPDAMYNYVLTDEKTNKEKGDRTPFEWRSTMGAEWESYCERVRKLTKELGAKRCKLLLSPNAAELVEKYTALAETAWISKLAQRICCLHFGFQFGGLAGAKKVWTVSGNTTAMIRGRYGLNRLLHDEESAEDLSLFDRICMEKKFEEKNRKNKKHHALDAMCLCFAPTSNAKKASAYKNILPEEITRNPESDEARKFFGKYLASVIPNKVAVEKSKLEQTIYSLRKGRKIGRA

SEQ ID NO: 202 - protein, 1062 aa, unidentified; identical to SEQ ID NO: 130
  REGION 1..1062: note = Description of Unknown: uncultivated organism with predicted taxonomy: Coraliomargarita sp. CAG:312
  REGION 1..1062: note = MG1-206 effector

SEQ ID NO: 203 - protein, 1036 aa, unidentified
  REGION 1..1036: note = Description of Unknown: uncultivated organism with predicted taxonomy: unclassified Verrucomicrobia (miscellaneous)
  REGION 1..1036: note = MG1-207 effector
MKVMEAENGNHIWGFDIGKGSLGEAVLMGAEFRHVTSLLLDEDFGEIKTAAGLRRQMRTRKAHKAREKWLERCLLEFGIEPLKRREVGIVNGRWMLISKGDERLEREFPPDGEDICYNAIALRCKLLLGEKLESWQIFKALNSAIQNRGYDENIPWKESDVSLPKKDDDDYAKKLSQYSREKGELLESFEDGEKYDYPCFFKAYKMGLWSPENPERVEIRIGNDAQKAKGYVIPRKDVEREFESLVEAASKWHPAMKGKAMYIMYGIAETPYASFKPALRKKFDLKRGAESDWTALGQKIPRFDNRIIDKCRLIPRLNVCKIRPLSEARDEGDLLHYEITLSLKLLNLRFFRNSNVESLSFEEFKAAFEIAKGAKYKMGKAALKKFLKSISASVLSEDQSEIEAPRESGRASFSRPAMLLLKELIFSGMPPAEFYAKKAGEISNADPNKGIVASDLDFIKLMGNCGWNGIFIPDVETYRFANNGADSAKLINGLIGSQNNPIVRHRLAFFYERIKFLESKFGVPDKVVLEFVREDFMGKEQKKRMQIEMKKRASEKMLIAKKLDEAGYKGGNLLLKMELLEKQGGICLYTGEPLLPSELGVLEIEHIVPRSRGGPDAQYNYALTREKTNKEKADRTPFEWLSSDPVKWAGYSDRVKARAGQLGRKRCELLLEKNAEELVEKYTALAETAHISKLAQKIVCLHFGFQFGGLGGTKRVFTVPGALTARIRSFYGLNKILHNEDLAKDALSYEEVLKRGEELDKKNRKNKKHHALDAMCLCFAPTGVNSKRARIDMLLPPDIRGEREAELFFRKYLDRLIPVDVAPKKPRLEDGIYSMRAVGGKKFMARRVNLVDLAYKSGLKPVYDISALIKLLDKKEKGIINAQIRKLVADFARTNPTEDEWRKWCGECRLPSKNGIGTRVIRVLLNYGEPAEYKDLSKDGRGAFRRGDGHKGQIVWESTDGKYYVVPIYVHASKAKLLAELDANPKKKRVCDIFTSHCMVKIGNTYNDKGELLLHEGVYMVNTIKTDGRGKLTNPN

SEQ ID NO: 204 - protein, 1059 aa, unidentified
  REGION 1..1059: note = Description of Unknown: uncultivated organism with predicted taxonomy: unclassified Verrucomicrobia (miscellaneous)
  REGION 1..1059: note = MG1-208 effector
MEKEKNNHVWGFDIGKGSLGEAVRIGGDFKHIASVLLDPEFGEIKTAALVRRQMRTRKAHKAREKWLEECLEGTGVEILKRREVGIVDGQWQLISKGDERLEREFPPSGEDVCYNSIALRCKLLLGEKLEGWQVFKALNSAIQKRGYDENIPWGEAEEKSSKKDDDDYAQKLSQYEKEKSELFESFADGEKYDFPCFFKAYKMGLWSPENPTRVEVRIDCRAQKAKSYVIARKYVEREFECLVEAAAKFFPKLKGRAKFILYGVSETPYASYYGNMRKKFGLKRGAESDWTALGQKVPRFDNRIIDKCRLIPRMNVCKIRPLNEARNEKDLLYYEVTLALKLLNLRFFRNSNIEQLTFEEFKKAFEIAAGAKYKMTKTAMKKFLKSISATALGDDYAEIEPPKESGRASFSRPAMEILKELIFSGMPPREFYGRKISEISNTDKNKGVVSSDLDFIKLMGDCPWGGIFIPDVQTYQFANAAFPDPDAQINKLIGSQNNPIVRHRLTFFFERIKFLESKYGVPDKVVLEFVRDDFMGEKEKKEMRIAMKKRAEEKMRIAKDLDEHGFKGGNLLLKMELYRKQNGICLYTGDALPLSELATLEIEHIVPRSRGGPDAQYNYVITREKTNKLKGDKTPYEWLSSDAKEWASYTDRVNACAKALGKKRCRLLLEKDAEELVEKYTALAETAHIAKLAQKIVCMHFGFQFGGLSGTKRVFTVPGALTSRIRKFYGLDRILHNSAAESENLSFEEFLKFSEDLEKKNRKNKKHHALDAMCLCFAPTGVDSRRAKLGEILPEKLRSEKAAREFFKSYLDKIMPVDVAPKKPRLEDGIYSKRIIGGKACMVKRNNLVDLAYKSGLKPVFDIPTLIKLVDKKEKGIINPQIRKMIGEFAATNPDESAWRKWCEEVRLPSKSGLGARIMRVLVYYGEADEYKDLSKDGCGAYRKGDGHKGQVIWESVDGKYYVEPVYVHASKAGVMAALNANPKKKRICGMFNSHCTVDVGDVYNDKGDFILPAGRYMVNTIRSDNQCVLTNADGEKRNPININYLMRAGMRRVDLSEL

SEQ ID NO: 205 - protein, 1059 aa, unidentified; identical to SEQ ID NO: 106
  REGION 1..1059: note = Description of Unknown: uncultivated organism with predicted taxonomy: unclassified Verrucomicrobia (miscellaneous)
  REGION 1..1059: note = MG1-209 effector

SEQ ID NO: 206 - protein, 1059 aa, unidentified
  REGION 1..1059: note = Description of Unknown: uncultivated organism with predicted taxonomy: unclassified Verrucomicrobia (miscellaneous)
  REGION 1..1059: note = MG1-210 effector
MEKEKNNHVWGFDIGKGSLGEAVRIGGDFKHIASVLLDPEFGEIKTAALARRQMRTRKAHKAREKWLEECLEGTGVEILKRREVGIVDGQWQLISKGDERLEREFPPSGEDVCYNSIALRCKLLLGEKLEGWQVFKALNSAIQKRGYDENIPWGEAEEKSSKKDDDDYAQKLSQYEKEKSELFESFADGEKYDFPCFFKAYKMGLWSPENPTRVEVRIDCRAQKAKSYVIARKYVEREFECLVEAAAKFFPKLKGRAKFILYGVSETPYASYYGNMRKKFGLKRGAESDWTALGQKVPRFDNRIIDKCRFIPRMNVCKIRPLNEARNEKDLLYYEVTLALKLLNLRFFRNSNIEQLTFEEFKKAFEIAAGAKYKMTKTAMKKFLKSISATALGDDYAEIEPPKESGRASFSRPAMEILKELIFSGMPPREFYGRKISEISNTDKNKGVVSSDLDFIKLMGDCPWGGIFIPDVQTYQFANAAFPDPDAQINKLIGSQNNPIVRHRLTFFFERIKFLESKYGVPDKVVLEFVRDDFMGEKEKKEMRIAMKKRAEEKMRIAKDLDEHGFKGGNLLLKMELYRKQNGICLYTGDALPLSELATLEIEHIVPRSRGGPDAQYNYVITREKTNKLKGDKTPYEWLSSDAKEWASYTDRVNACAKALGKKRCRLLLEKDAEELVEKYTALAETAHIAKLAQKIVCMHFGFQFGGLSGTKRVFTVPGALTSRIRKFYGLDRILHNSAAESENLSFEEFLKFSEDLEKKNRKNKKHHALDAMCLCFAPTGVDSRRAKLGEILPEKLRSEKAAREFFKSYLDKIMPVDVAPKKPRLEDGIYSKRIIGGKACMVKRNNLVDLAYKSGLKPVFDIPTLIKLVDKKEKGIINPQIRKMIGEFAATNPDESAWRKWCEEVRLPSKSGLGARIMRVLVYYGEADEYKDLSKDGYGAYRKGDGHKGQVIWESVDGKYYVEPVYVHASKAGVMAALNANPKKKRICGMFNSHCTVDVGDVYNDKGDFILPAGRYMVNTIQKNGQCVLTNADGEKRNPININYLMRAGMRRVDLSEL

SEQ ID NO: 207 - protein, 1062 aa, unidentified; identical to SEQ ID NO: 83
  REGION 1..1062: note = Description of Unknown: uncultivated organism with predicted taxonomy: Coraliomargarita sp. CAG:312
  REGION 1..1062: note = MG1-211 effector

SEQ ID NO: 208 - protein, 1059 aa, unidentified; identical to SEQ ID NO: 85
  REGION 1..1059: note = Description of Unknown: uncultivated organism with predicted taxonomy: unclassified Verrucomicrobia (miscellaneous)
  REGION 1..1059: note = MG1-212 effector

SEQ ID NO: 209 - protein, 798 aa, unidentified
  REGION 1..798: note = Description of Unknown: uncultivated organism with predicted taxonomy: unclassified Verrucomicrobia (miscellaneous)
  REGION 1..798: note = MG1-213 effector
MEKEKNNHVWGFDIGKGSLGEAVRIGGDFKHIASVLLDPEFGEIKTAALARRQMRTRKAHKAREKWLEECLEGTGVEILKRREVGIVDGQWQLISKGDERLEREFPPSGEDVCYNSIALRCKLLLGEKLEGWQVFKALNSAIQKRGYDENIPWGEAEEKSSKKDDDDYAQKLSQYEKEKSELFESFADGEKYDFPCFFKAYKMGLWSPENPTRVEVRIDCRAQKAKSYVIARKYVEREFECLVEAAAKFFPKLKGRAKFILYGVSETPYASYYGNMRKKFGLKRGAESDWTALGQKVPRFDNRIIDKCRFIPRMNVCKIRPLNEARNEKDLLYYEVTLALKLLNLRFFRNSNIEQLTFEEFKKAFEIAAGAKYKMTKTAMKKFLKSISATALGDDYAEIEPPKESGRASFSRPAMEILKELIFSGMPPREFYGRKISEISNTDKNKGVVSSDLDFIKLMGDCPWGGIFIPDVQTYQFANAAFPDPDAQINKLIGSQNNPIVRHRLTFFFERIKFLESKYGVPDKVVLEFVRDDFMGEKEKKEMRIAMKKRAEEKMRIAKDLDEHGFKGGNLLLKMELYRKQNGICLYTGDALPLSELATLEIEHIVPRSRGGPDAQYNYVITREKTNKLKGDKTPYEWLSSDAKEWASYTDRVNACAKALGKKRCRLLLEKDAEELVEKYTALAETAHIAKLAQKIVCMHFGFQFGGLSGTKRVFTVPGALTSRIRKFYGLDRILHNSAAESENLSFEEFLKFSEDLEKKNRKNKKHHALDAMCLCFAPTGVDSRRAKLGEILPEKLR

SEQ ID NO: 210 - protein, 920 aa, unidentified
  REGION 1..920: note = Description of Unknown: uncultivated organism with predicted taxonomy: unclassified Verrucomicrobia (miscellaneous)
  REGION 1..920: note = MG1-214 effector
MLEVAAYAHGLAERAFSDVKSPKKDDDDYAQKLSQYEKEKSELFESFADGEKYDFPCFFKAYKMGLWSPENPTRVEVRIDCRAQKAKSYVIARKYVEREFECLVEAAAKFFPKLKGRAKFILYGVSETPYASYYGNMRKKFGLKRGAESDWTALGQKVPRFDNRIIDKCRFIPRMNVCKIRPLNEARNEKDLLYYEVTLALKLLNLRFFRNSNIEQLTFEEFKKAFEIAAGAKYKMTKTAMKKFLKSISATALGDDYAEIEPPKESGRASFSRPAMEILKELIFSGMPPREFYGRKISEISNTDKNKGVVSSDLDFIKLMGDCPWGGIFIPDVQTYQFANAAFPDPDAQINKLIGSQNNPIVRHRLTFFFERIKFLESKYGVPDKVVLEFVRDDFMGEKEKKEMRIAMKKRAEEKMRIAKDLDEHGFKGGNLLLKMELYRKQNGICLYTGDALPLSELATLEIEHIVPRSRGGPDAQYNYVITREKTNKLKGDKTPYEWLSSDAKEWASYTDRVNACAKALGKKRCRLLLEKDAEELVEKYTALAETAHIAKLAQKIVCMHFGFQFGGLSGTKRVFTVPGALTSRIRKFYGLDRILHNSAAESENLSFEEFLKFSEDLEKKNRKNKKHHALDAMCLCFAPTGVDSRCAKLGEILPEKLRSEKAAREFFKSYLDKIMPVDVAPKKPRLEDGIYSKRIIGGKACMVKRNNLVDLAYKSGLKPVFDIPTLIKLVDKKEKGIINPQIRKMIGEFAATNPDESAWRKWCEEVRLPSKSGLGARVMRVLVYYGEADEYKDLSKDGCGAYRKGDGHKGQVIWESVDGKYYVEPVYVHASKAGVMAALNANPKKKRICGMFNSHCTVDVGDVYNDKGDFILPAGRYMVNTIRSDNQCVLTNADGEKRNPININYLMRAGMRRVDLSEL

SEQ ID NO: 211 - protein, 1059 aa, unidentified; identical to SEQ ID NO: 137
  REGION 1..1059: note = Description of Unknown: uncultivated organism with predicted taxonomy: unclassified Verrucomicrobia (miscellaneous)
  REGION 1..1059: note = MG1-215 effector

SEQ ID NO: 212 - protein, 1059 aa, unidentified
  REGION 1..1059: note = Description of Unknown: uncultivated organism with predicted taxonomy: unclassified Verrucomicrobia (miscellaneous)
  REGION 1..1059: note = MG1-216 effector
MEKEKNNHVWGFDIGKGSLGEAVRIGGDFKHIASVLLDPEFGEIKTAALARRQMRTRKAHKAREKWLEECLEGTGVEILKRREVGIVDGQWQLISKGDERLEREFPPSGEDVCYNSIALRCKLLLGEKLEGWQVFKALNSAIQKRGYDENIPWGEAEEKSSKKDDDDYAQKLSQYEKEKSELFESFADGEKYDFPCFFKAYKMGLWSPENPTRVEVRIDCRAQKAKSYVIARKYVEREFECLVEAAAKFFPKLKGRAKFILYGVSETPYASYYGNMRKKFGLKRGAESDWTALGQKVPRFDNRIIDKCRLIPRMNVCKIRPLNEARNEKDQLYYEVTLALKLLNLRFFRNSNIEQLTFEEFKKAFEIAAGAKYKMTKTAMKKFLKSISATALGDDYAEIEPPKESGRASFSRPAMEILKELIFSGMPPREFYGRKISEISNTDKNKGVVSSDLDFIKLMGDCPWGGIFIPDVQTYQFANAAFPDPDAQINKLIGSQNNPIVRHRLTFFFERIKFLESKYGVPDKVVLEFVRDDFMGEKEKKEMRIAMKKRAEEKMRIAKDLDEHGFKGGNLLLKMELYRKQNGICLYTGDALPLSELATLEIEHIVPRSRGGPDAQYNYVIIREKTNKLKGDKTPYEWLSSDAKEWASYTDRVNACAKALGKKRCRLLLEKDAEELVEKYTALAETAHIAKLAQKIVCMHFGFQFGGLSGAKRVFTVPGALTSRIRKFYGLDRILHNSAAESENLSFEEFLKFSEDLEKKNRKNKKHHALDAMCLCFAPTGVDSRRAKLGEILPEKLRSEKAAREFFKSYLDKIMPVDVAPKKPRLEDGIYSKRIIGGKACMVKRNNLVDLAYKSGLKPVFDIPTLIKLVDKKEKGIINPQIRKMIGEFAATNPDESAWRKWCEEVRLPSKSGLGARIMRVLVYYGEADEYKDLSKDGCGAYRKGDGHKGQVIWESVDGKYYVEPVYVHASKAGVMAALNANPKKKRICGMFNSHCTVDVGDVYNDKGDFILPAGRYMVNTILTTGRCVLTNADGEKRNPININYLMRAGMRRVELSEL

SEQ ID NO: 213 - protein, 777 aa, unidentified
  REGION 1..777: note = Description of Unknown: uncultivated organism with predicted taxonomy: Coraliomargarita sp. CAG:312
  REGION 1..777: note = MG1-217 effector
GSDSDWTALGQKIPRFDNRMIGKCKLIPRLNTCKIKSPDKIKSEEDLLHYDITLALKLLNLRFFKDSEICALSFEEFKKLFEIGKSNKYKISKTDLKKFLKSIGASVLSQDHSEIEAPRTSGRSSFSRPAMKILKELIFSGEPPSKFLKAKIDKIANTDPNKGIIREDLDFIRIMGDCPWNGIFIPDVETYKYASQTQESSEAQINKLIGSQNDPIVRHRLSFFYERIKALSEKFGVPDKIVLEFVREDFMGKQAKKDLSLSMKKRFEEKIDIAKKLDDIGYKGNKMLLKMELLQKQGFACLYTGEALQETDLPILEIEHIVPRSLGGPDAAYNYVLTSESTNKAKGNQTPYKWLSPDRDKWRAYTERVRARAAELGSKRCRLLLSENAEELINKYTALAETAWISKLAQRIVCMHFGFQFGGNTGEKRVFTVPGNITAKIRSAFGLNKILHNIDADKKNMSEFDIVKLDYELDKKNRKNKKHHALDAMCLCFAPTGPNAQKLGIGALLPPEIAAKAEEFFRGYIEKVVPNEVAPKKPKLEESIYSKRTINGKECIVRKFNLVDLAYKSGLKPVYDISAIEKLLEDKPKKIPPIINPTVRRIVRDFVSTNPNEDEWRNWCKTVRMPSKNRNGTRIIRVLVYVGTPEEYKDLSKDGCGAFRKGDSHKGQIIWMDKNGRYKVSPVYVHSSKSQTMESIKSNPDFIKIAGFFKSHCLVEIESPVVNGKGDVLLSPGTYMINTIMAAGMAILSDTNGVKSPAININYLMNAGMRRVSIKYK

SEQ ID NO: 214 - protein, 1059 aa, unidentified; identical to SEQ ID NO: 125
  REGION 1..1059: note = Description of Unknown: uncultivated organism with predicted taxonomy: unclassified Verrucomicrobia (miscellaneous)
  REGION 1..1059: note = MG1-218 effector

SEQ ID NO: 215 - protein, 1059 aa, unidentified
  REGION 1..1059: note = Description of Unknown: uncultivated organism with predicted taxonomy: unclassified Verrucomicrobia (miscellaneous)
  REGION 1..1059: note = MG1-219 effector
MEKEKNNHVWGFDIGKGSLGEAVRIGGDFKHIASVLLDPEFGEIKTAALVRRQMRTRKAHKAREKWLEECLEGTGVEILKRREVGIVDGQWQLISKGDERLEREFPPSGEDVCYNSIALRCKLLLGEKLEGWQVFKALNSAIQKRGYDENIPWGEAEEKSPKKDDDDYAQKLSQYEKEKSELFESFADGEKYDFPCFFKAYKMGLWSPENPTRVEVRIDCRAQKAKSYVIARKYVEREFECLVEAAAKFFPKLKGRAKFILYGVSETPYASYYGNMRKKFGLKRGAESDWTALGQKVPRFDNRIIDKCRFIPRMNVCKIRPLNEARNEKDLLYYEVTLALKLLNLRFFRNSNIEQLTFEEFKKAFEIAAGAKYKMTKTAMKKFLKSISATALGDDYAEIEPPKESGRASFSRPAMEILKELIFSGMPPREFYGRKISEISNTDKNKGVVSSDLDFIKLMGDCPWGGIFIPDVQTYQFANAAFPDPDAQINKLIGSQNNPIVRHRLTFFFERIKFLESKYGVPDKVVLEFVRDDFMGEKEKKEMRIAMKKRAEEKMRIAKDLDEHGFKGGNLLLKMELYRKQNGICLYTGDALPLSELATLEIEHIVPRSRGGPDAQYNYVITREKTNKLKGDKTPYEWLSSDAKEWASYTDRVNACAKALGKKRCRLLLEKDAEELVEKYTALAETAHIAKLAQKIVCMHFGFQFGGLSGTKRVFTVPGALTSRIRKFYGLDRILHNSAAERENLSFEEFLKFSEDLEKKNRKNKKHHALDAMCLCFAPTGVDSRRVKLGEILPEKLKSEKAAREFFKSYLDKIMPVDVAPKKPRLEDGIYSKRIIGGKACMVKRNNLVDLAYKSGLKPVFDIPTLIKLVDKKEKGIINPQIRKMIGEFAATNPDESAWRKWCEEVRLPSKSGLGARIMRVLVYYGEADEYKDLSKDGCGAYRKGDGHKGQVIWESVDGKYYVEPVYVHASKAGVMAALNANPKKKRICGMFNSHCTVDVGDVYNDKGDFILPAGRYMVNTIRSDNQCVLTNADGEKRNPININYLMRTGMRRVDLSEL

SEQ ID NO: 216 - protein, 1059 aa, unidentified
  REGION 1..1059: note = Description of Unknown: uncultivated organism with predicted taxonomy: unclassified Verrucomicrobia (miscellaneous)
  REGION 1..1059: note = MG1-220 effector
MEKEKNNHVWGFDIGKGSLGEAVRIGGDFKHIASVLLDPEFGEIKTAALARRQMRTRKAHKAREKWLEECLEGTGVEILKRREVGIVDGQWQLISKGDERLEREFPPSGEDVCYNSIALRCKLLLGEKLEGWQVFKALNSAIQKRGYDENIPWGEAEEKSSKKDDDDYAQKLSQYEKEKSELFESFADGEKYDFPCFFKAYKMGLWSPENPTRVEVRIDCRAQKAKSYVIARKYVEREFECLVEAAAKFFPKLKGRAKFILYGVSETPYASYYGNMRKKFGLKRGAESDWTALGQKVPRFDNRIIDKCRLIPRMNVCKIRPLNEARNEKDLLYYEVTLALKLLNLRFFRNSNIEQLTFEEFKKAFEIAAGAKYKMTKTAMKKFLKSISATALGDDYAEIEPPKESGRASFSRPAMEILKELIFSGMPPREFYGRKISEISNTDKNKGVVSSDLDFIKLMGDCPWGGIFIPDVQTYQFANAAFPDPDAQINKLIGSQNNPIVRHRLTFFFERIKFLESKYGVPDKVVLEFVRDDFMGEKEKKEMRIAMKKRAEGKMRIAKDLDEHGFKGGNLLLKMELYRKQNGICLYTGDALPLSELATLEIEHIVPRSRGGPDAQYNYVITREKTNKLKGDKTPYEWLSSDAKEWASYTDRVNACAKALGKKRCHLLLEKDAEELVEKYTALAETAHIAKLAQKIVCMHFGFQFGGLSGTKRVFTVPGALTSRIRKFYGLDRILHNSAAESENLSFEEFLKFSEDLEKKNRKNKKHHALDAMCLCFAPTGVDSRRAKLGEILPEKLRSEKAAREFFKSYLDKIMPVDVAPKKPRLEDGIYSKRIIGGKACMVKRNNLVDLAYKSGLKPVFDIPTLIKLVDKKEKGIINPQIRKMIGEFAATNPDESAWRKWCEEVRLPSKSGLGARVMRVLVYYGEADEYKDLSKDGCGAYRKGDGHKGQVIWESVDGKYYVEPVYVHASKAGVMAALNANPKKKRICGMFNSHCTVDVGDVYNDKGDFILPAGRYMVNTIQKNGQCVLTNADGEKRNPININYLMRAGMRRVELSEL

SEQ ID NO: 217 - protein, 759 aa, unidentified
  REGION 1..759: note = Description of Unknown: uncultivated organism with predicted taxonomy: unclassified Verrucomicrobia (miscellaneous)
  REGION 1..759: note = MG1-221 effector
FNNNKEFNKNMEKEKNNHVWGFDIGKGSLGEAVRIGGDFKHIASVLLDPEFGEIKTAALARRQMRTRKAHKAREKWLEECLEGTGVEILKRREVGIVDGQWQLISKGDERLEREFPPSGEDVCYNSIALRCKLLLGEKLEGWQVFKALNSAIQKRGYDENIPWGEAEEKSSKKDDDDYAQKLSQYEKEKSELFESFADGEKYDFPCFFKAYKMGLWSPENPTRVEVRIDCRAQKAKSYVIARKYVEREFECLVEAAAKFFPKLKGRAKFILYGVSETPYASYYGNMRKKFGLKRGAESDWTALGQKVPRFDNRIIDKCRLIPRMNVCKIRPLNEARNEKDLLYYEVTLALKLLNLRFFRNSNIEQLTFEEFKKAFEIAAGAKYKMTKTAMKKFLKSISATALGDDYAEIEPPKESGRASFSRPAMEILKELIFSGMPPREFYGRKISEISNTDKNKGVVSSDLDFIKLMGDCPWGGIFIPDVQTYQFANAAFPDPDAQINKLIGSQNNPIVRHRLTFFFERIKFLESKYGVPDKVVLEFVRDDFMGEKEKKEMRIAMKKRAEEKMRIAKDLDEHGFKGGNLLLKMELYRKQNGICLYTGDALPLSELATLEIEHIVPRSRGGPDAQYNYVITREKTNKLKGDKTPYEWLSSDAKEWASYTDRVNACAKALGKKRCRLLLEKDAEELVEKYTALAETAHIAKLAQKIVCMHFGFQFGGLSGTKRVFAVPGALTSRIRKFYGLDRILHNSEAESENLSFEE

SEQ ID NO: 218 - protein, 1059 aa, unidentified
  REGION 1..1059: note = Description of Unknown: uncultivated organism with predicted taxonomy: unclassified Verrucomicrobia (miscellaneous)
  REGION 1..1059: note = MG1-222 effector
MEKEKNNHVWGFDIGKGSLGEAVRIGGDFKHISSVLLDPEFGEIKTAALARRQMRTRKAHKAREKWLEECLEGTGVEILKRREVGIVDGQWQLISKGDERLEREFPPSDEDVCYNSIALRCKLLLGEKLEGWQVFKALNSAIQKRGYDENIPWGEAEEKSSKKDDDDYAQKLSQYEKEKSELFESFADGEKYDFPCFFKAYKMGLWSPENPTRVEVRIDCRAQKAKSYVIARKYVEREFECLVEAAAKFFPKLKGRAKFILYGVSETPYASYYGNMRKKFGLKRGAESDWTALGQKVPRFDNRIIDKCRLIPRMNVCKIRPLNEARNEKDLLYYEVTLALKLLNLRFFRNSNIEQLTFEEFKKAFEIAAGAKYKMTKTAMKKFLKSISATALGDDYAEIEPPKESGRASFSRPAMEILKELIFSGMPPREFYGRKISEISNTDKNKGVVSSDLDFIKLMGDCPWGGIFIPDVQTYQFANAAFPDPDAQINKLIGSQNNPIVRHRLTFFFERIKFLESKYGVPDKVVLEFVRDDFMGEKEKKEMRIAMKKRAEEKMRIAKDLDEHGFKGGNLLLKMELYRKQNGICLYTGDALPLSELATLEIEHIVPRSRGGPDAQYNYVITREKTNKLKGDKTPYEWLSSDAKEWASYTDRVNACAKALGKKRCRLLLEKDAEELVEKYTALAETAHIAKLAQKIVCMHFGFQFGGLSGTKRVFTVPGALTSRIRKFYGLDRILHNSAAESENLSFEEFLKFSEDLEKKNRKNKKHHALDAMCLCFAPTGVDSRRAKLGEILPEKLRSEKAAREFFKSYLDKIMPVDVAPKKPRLEDGIYSKRIIGGKACMVKRNNLVDLAYKSGLKPVFDIPTLIKLVDKKEKGIINPQIRKMIGEFAATNPDESAWRKWCEEVRLPSKSGLGARIMRVLVYYGEADEYKDLSKDGCGAYRKGDGHKGQVIWESVDGKYYVGPVYVHASKAGVMAALNANPKKKRICGMFNSHCTVDVGDVYNDKGDFILPAGRYMVNTIQKNGQCVLTNADGEKRNPININYLMRAGMRRVELSEL

SEQ ID NO: 219 - protein, 1059 aa, unidentified
  REGION 1..1059: note = Description of Unknown: uncultivated organism with predicted taxonomy: unclassified Verrucomicrobia (miscellaneous)
  REGION 1..1059: note = MG1-223 effector
MEKEKNNHVWGFDIGKGSLGEAVRIGGDFKHIASVLLDPEFGEIKTAALVRRQMRTRKAHKAREKWLEECLEGMGVEILKRREVGIVDGQWQLISKGDERLEREFPPSGEDVCYNSIALRCKLLLGEKLEGWQVFKALNSAIQKRGYDENIPWGEAEEKSSKKDDDDYAQKLSQYEKEKSELFESFADGEKYDFPCFFKAYKMGLWSPENPTRVEVRIDCRAQKAKSYVIARKYVEREFECLVEAAAKFFPKLKGRAKFILYGVSETPYASYYGNMRKKFGLKRGAESDWTALGQKVPRFDNRIIDKCRLIPRMNVCKIRPLNEARNEKDLLYYEVTLALKLLNLRFFRNSNIEQLTFEEFKKAFEIAAGAKYKMTKTAMKKFLKSISATALGDDYAEIEPPKESGRASFSRPAMEILKELIFSGMPPREFYGRKISEISNTDKNKGVVSSDLDFIKLMGDCPWGGIFIPDVQTYQFANAAFPDPDAQINKLIGSQNNPIVRHRLTFFFERIKFLESKYGVPDKVVLEFVRDDFMGEKEKKEMRIAMKKRAEEKMRIAKDLDEHGFKGGNLLLKMELYRKQNGICLYTGDALPLSELATLEIEHIVPRSRGGPDAQYNYVITREKTNKLKGDKTPYEWLSSDAKEWASYTDRVNACAKALGKKRCRLLLEKDAEELVEKYTALAETAHIAKLAQKIVCMHFGFQFGRLSGTKRVFTVPGALTSRIRKFYGLDRILHNSAAESENLSFEEFLKFSEDLEKKNRKNKKHHALDAMCLCFAPTGVDSRRAKLGEILPEKLRSEKAAREFFKSYLDKIMPVDVAPKKPRLEDGIYSKRIIGGKACMVKRNNLVDLAYKSGLKPVFDIPTLIKLVDKKEKGIINPQIRKMIGEFAATNPDESAWRKWCEEVRLPSKSGLGARVMRVLVYYGEADEYKDLSKDGCGAYRKGDGHKGQVIWESVDGKYYVEPVYVHASKAGVMAALNANPKKKRICGMFNSHCTVDVGDVYNDKGDFILPAGRYMVNTIRSDNQCVLTNADGEKRNPININYLMRAGMRRVDLSEL

SEQ ID NO: 220 - protein, 1025 aa, unidentified; identical to SEQ ID NO: 141
  REGION 1..1025: note = Description of Unknown: uncultivated organism with predicted taxonomy: unclassified Verrucomicrobia (miscellaneous)
  REGION 1..1025: note = MG1-224 effector

SEQ ID NO: 221 - protein, 1062 aa, unidentified; identical to SEQ ID NO: 81
  REGION 1..1062: note = Description of Unknown: uncultivated organism with predicted taxonomy: Coraliomargarita sp. CAG:312
  REGION 1..1062: note = MG1-225 effector

SEQ ID NO: 222 - protein, 1062 aa, unidentified; identical to SEQ ID NO: 114
  REGION 1..1062: note = Description of Unknown: uncultivated organism with predicted taxonomy: Coraliomargarita sp. CAG:312
  REGION 1..1062: note = MG1-226 effector

SEQ ID NO: 223 - protein, 899 aa, unidentified
  REGION 1..899: note = Description of Unknown: uncultivated organism with predicted taxonomy: Coraliomargarita sp. CAG:312
  REGION 1..899: note = MG1-227 effector
MNNNNTQIWGFDIGKASLGEAVWCGGEFKHVESLILDKDFAEIKTSAGRRRQARTRKAHKAREEWLEKCLEDCGIEILKRRKVGIVNGQWKLISKGDARLEKEFPAEGEEVCYNSIALRCKLILGEKLESWQIFKALNSSIQHRGYDENIPWKETQNESKKEDGDYFKKIVLYESEKEDILNRLPQECKREDFDFPCFFKAKKMGIWSEENPYKVGLRISNNAQKAKGYVIPRKYVENEFVRLVQMASLQYPKLKDKQMFILYGISETPYASRFKDARKKFGLKRGADSDWTALGQKIPRFDNRMIGKCKLIPRLNTCKIKSPEKIKSEEDLLHYDITLALKLLNLRFFKDSEICALSFEEFKKLFEIGKSNKYKISKTDLKKFLKSIGASVLSQDHSEIEAPRTSGRSSFSRPAMKILKELIFSGEPPSKFLKAKIDKIANTDPNKGIIREDLDFIRIIGDCPWNGIFIPDVETYKYASQTQESSEAQINKLIGSQNDPIVRHRLSFFYERIKALSEKFGVPDKIVLEFVREDFMGKQAKKDLSLYMKKRFEEKIDIAKKLDDIGYKGNKMLLKMELLQKQGFACLYTGEALQETDLPILEIEHIVPRSLGGPDAAYNYVLTSESTNKAKGNQTPYKWLSPDRDKWRAYTERVRARAAELGSKRCRLLLSENAEELINKYTALAETAWISKLAQRIVCMHFGFQFGGNTGEKRVFTVPGNITAKIRSAFGLNKILHNIDADKKNMSEFDIVKLDYELDKKNRKNKKHHALDAMCLCFAPTGPNAQKLGIGALLPPEIAAKAEEFFRGYIEKVVPNEVAPKKPKLEESIYSKRTINRKECIVRKFNLVDLAYKSGLKPVYDISAIEKLLEDKPKKIPPIINPTVRRIVRDFVSTNPNED

SEQ ID NO: 224 - protein, 1059 aa, unidentified
  REGION 1..1059: note = Description of Unknown: uncultivated organism with predicted taxonomy: unclassified Verrucomicrobia (miscellaneous)
  REGION 1..1059: note = MG1-228 effector
MEKEKNNHVWGFDIGKGSIGEAVRIGGDFKHIASVLLDPEFGEIKTAALARRQMRTRKAHKAREKWLEECLEGTGVEILKRREVGIVDGQWQLISKGDERLEREFPPSGEDVCYNSIALRCKLLLGEKLEGWQVFKALNSAIQKRGYDENIPWGEAEEKSSKKDDDDYAQKLSQYEKEKSELFESFADGEKYDFPCFFKAYKMGLWSPENPTRVEVRIDCRAQKAKSYVIARKYVEREFECLVEAAAKFFPKLKGRAKFILYGVSETPYASYYGNMRKKFGLKRGAESDWTALGQKVPRFDNRIIDKCRLIPRMNVCKIRPLNEARNEKDLLYYEVTLALKLLNLRFFRNSNIEQLTFEEFKKAFEIAAGAKYKMTKTAMKKFLKSISATALGDDYAEIEPPKESGRASFSRPAMEILKELIFSGMPPREFYGRKISEISNTDKNKGVVSSDLGFIKLMGDCPWGGIFIPDVQTYQFANAAFPDPDAQINKLIGSQNNPIVRHRLTFFFERIKFLESKYGVPDKVVLEFVRDDFMGEKEKKEMRIAMKKRAEEKMRIAKDLDEHGFKGGNLLLKMELYRKQNGICLYTGDALPLSELATLEIEHIVPRSRGGPDAQYNYVITREKTNKLKGDKTPYEWLSSDAKEWASYTDRVNACAKALGKKRCRLLLEKDAEELVEKYTALAETAHIAKLAQKIVCMHFGFQFGGLSGTKRVFTVPGALTSRIRKFYGLDRILHNSEAESENLSFEEFLKFSEDLEKKNRKNKKHHALDAMCLCFAPTGVDSRRAKLGEILPEKLRSEKAAREFFKSYLDKIMPVDVAPKKPRLEDGIYSKRIIGGKACMVKRNNLVDLAYKSGLKPVFDIPTLIKLVDKKEKGIINPQIRKMIGEFTATNPDESAWRKWCEEVRLPSKSGLGARVMRVLVYYGEADEYKDLSKDGCGAYRKGDGHKGQVIWESVDGKYYVEPVYVHASKAGVMAALNANPKKKRICGMFNSHCTVDVGDVCNDKGDFILPAGRYMVNTILTTGRCVLTNADGEKRNPININYLMRAGMRRVDLNEL

SEQ ID NO: 225 - protein, 1059 aa, unidentified
  REGION 1..1059: note = Description of Unknown: uncultivated organism with predicted taxonomy: Verrucomicrobia
  REGION 1..1059: note = MG1-229 effector
MEKEKNNHVWGFDIGKGSLGEAVRIGGDFKHIASVLLDPEFGEIKTAALARRQMRTRKAHKAREKWLEECLEGTGVEILKRREVGIVDGQWQLISKGDERLEREFPPSGEDVCYNSIALRCKLLLGEKLEGWQVFKALNSAIQKRGYDENIPWGEAEEKSSKKDDDDYAQKLSQYEKEKSELFESFADGEKYDFPCFFKAYKMGLWSPENPTRVEVRIDCRAQKAKSYVIARKYVEREFECLVEAAAKFFPKLKGRAKFILYGVSETSYASYYGNMRKKFGLKRGAESDWTALGQKVPRFDNRIIDKCRLIPRMNVCKIRPLNEARNEKDLLYYEVTLALKLLNLRFFRNSNIEQLTFEEFKKAFEIAAGAKYKMTKTAMKKFLKSISATALGYDYAEIEPPKESGRASFSRPAMEILKELIFSGMPPREFYGRKISEISNTDKNKGVVSSDLDFIKLMGDCPWGGIFIPDVQTYQFANAAFPDPDAQINKLIGSQNNPIVRHRLTFFFERIKFLESKYGVPDKVVLEFVRDDFMGEKEKKEMRIAMKKRAEEKMRIAKDLDEHGFKGGNLLLKMELYRKQNGICLYTGDALPLSELATLEIEHIVPRSRGGPDAQYNYVITREKTNKLKGDKTPYEWLSSDAKEWASYTDRVNACAKALGKKRCRLLLEKDAEELVEKYTALAETAHIAKLAQKIVCMHFGFQFGGLSGTKRVFTVPGALTSRIRKFYGLDRILHNSAAESENLSFEEFLKFSEDLEKKNRKNKKHHALDAMCLCFAPTGVDSRRAKLGEILPEKLRSEKAAREFFKSYLDKIMPVDVAPKKPRLEDGIYSKRIIGGKACMVKRNNLVDLAYKSGLKPVFDIPTLIKLVDKKEKGIINPQIRKMIGEFAATNPDESAWRKWCEEVRLPSKSGLGARVMRVLVYYGEADEYKDLSKDGCGAYRKGDGHKGQVIWESVDGKYYVEPVYVHASKAGVMAALNANPKKKRICGMFNSHCTVDVGDVYNDKGDFILPAGRYMVNTIRSDNQCVLTNADGEKRNPININYLMRSGMRRVDLNEL

SEQ ID NO: 226 - protein, 1059 aa, unidentified
  REGION 1..1059: note = Description of Unknown: uncultivated organism with predicted taxonomy: Verrucomicrobia
  REGION 1..1059: note = MG1-230 effector
MEKEKNNHVWGFDIGKGSLGEAVCIGGDFKHIASVLLDPEFGEIKTAALARRQMRTRKAHKAREKWLEECLEGTGVEILKRREVGIVDGQWQLISKGDERLEREFPPSGEDVCYNSIALRCKLLLGEKLEGWQVFKALNSAIQKRGYDENIPWGEAEEKSSKKDDDDYAQKLSQYEKEKSELFESFADGEKYDFPCFFKAYKMGLWSPENPTRVEVRIDCRAQKAKSYVIARKYVEREFECLVEAAAKFFPKLKGRAKFILYGVSETPYASYYGNMRKKFGLKRGAESDWTALGQKVPRFDNRIIDKCRFIPRMNVCKIRPLNEARNEKDLLYYEVTLALKLLNLRFFRNSNIEQLTFEEFKKAFEIAAGAKYKMTKTAMKKFLKSISATALGDDYAEIEPPKESGRASFSRPAMEILKELIFSGMPPREFYGRKISEISNTDKNKGVVSSDLDFIKLMGDCPWGGIFIPDVQTYQFANAAFPDPDAQINKLIGSQNNPIVRHRLTFFFERIKFLESKYGVPDKVVLEFVRDDFMGEKEKKEMRIAMKKRAEEKMRIAKDLDEHGFKGGNLLLKMELYRKQNGICLYTGDALPLSELATLEIEHIVPRSRGGPDAQYNYVITREKTNKLKGDKTPYEWLSSDAKEWASYTDRVNACAKALGKKRCRLLLEKDAEELVEKYTTLAETAHIAKLAQKIVCMHFGFQFGGLSGTKRVFTVPGALTSRIRKFYGLDRILHNSAAESENLSFEEFLKFSEDLEKKNRKNKKHHALDAMCLCFAPTGVDSRRAKLGEILPEKLRSEKAAREFFKSYLDKIMPVDVAPKKPRLEDGIYSKRIIGGKACMVKRNNLVDLAYKSGLKPVFDIPTLIKLVDKKEKGIINPQIRKMIGEFAATNPDESAWRKWCEEVRLPSKSGLGARVMRVLVYYGEADEYKDLSKDGCGAYRKGDGHKGQVIWESVDGKYYVEPVYVHASKAGVMAALNANPKKKRICGMFNSHCTVDVGDVYNDKGDFILPAGRYMVNTIQKNGQCVLTNADGEKRNPININYLMRAGMRRVDLSEL

SEQ ID NO: 227 - protein, 1059 aa, unidentified; identical to SEQ ID NO: 87
  REGION 1..1059: note = Description of Unknown: uncultivated organism with predicted taxonomy: unclassified Verrucomicrobia (miscellaneous)
  REGION 1..1059: note = MG1-231 effector

SEQ ID NO: 228 - protein, 1073 aa, unidentified; identical to SEQ ID NO: 126
  REGION 1..1073: note = Description of Unknown: uncultivated organism with predicted taxonomy: Verrucomicrobia
  REGION 1..1073: note = MG1-232 effector

SEQ ID NO: 229 - protein, 1034 aa, unidentified; identical to SEQ ID NO: 110
  REGION 1..1034: note = Description of Unknown: uncultivated organism
  REGION 1..1034: note = MG1-233 effector

SEQ ID NO: 230 - protein, 1058 aa, unidentified
  REGION 1..1058: note = Description of Unknown: uncultivated organism with predicted taxonomy: unclassified Verrucomicrobia (miscellaneous)
  REGION 1..1058: note = MG1-234 effector
MEKEKNNHVWGFDIGKGSLGEAVRIGGDFKHIASVLLDPEFGEIKTAALVRRQMRTRKAHKAREKWLEECLEGTGVEILKRREVGIVDGQWQLISKGDERLEREFPPSGEDVCYNSIALRCKLLLGEKLEGWQVFKALNSAIQKRGYDENIPWGEAEEKSSKKDDDDYAQKLSQYEKEKSELFESFADGEKYDFPCFFKAYKMGLWSPENPTRVEVRIDCRAQKAKSYVIARKYVEREFECLVEAAAKFFPKLKGRAKFILYGVSETPYASYYGNMRKKFGLKRGAESDWTALGQKVPRFDNRIIDKCRLIPRMNVCKIRPLNEARNEKDLLYYEVTLALKLLNLRFFRNSNIEQLTFEEFKKAFEIAAGAKYKMTKTAMKKFLKSISATALGDDYAEIEPPKESGRASFSRPAMEILKELIFSGMPPREFYGRKISEISNTDKNKGVVSSDLDFIKLMGDCPWGGIFIPDVQTYQFANAAFPDPDAQINKLIGSQNNPIVRHRLTFFFERIKFLESKYAVPDKVVLEFVRDDFMGEKEKKEMRIAMKKRAEEKMRIAKDLDEHGFKGGNLLLKMELYRKQNGICLYTGDALPLSELATLEIEHIVPRSRGGPDAQYNYVITREKTNKLKGDKTPYEWLSSDAKEWASYTDRVNACAKALGKKRCRLLLEKDAEELVEKYTALAETAHIAKLAQKIVCMHFGFQFGGLSGTKRVFTVPGALTSRIRKFYGLDRILHNSAAESENLSFEEFLKFSEDLEKKNRKNKKHHALDAMCLCFAPTGVDSGRAKLGEILPEKLRSEKAAREFFKSYLDKIMPVDVAPKKPRLEDGIYSKRIIGGKACMVKRNNLVDLAYKSGLKPVFDIPTLIKLVDKKEKGIINPQIRKMIGEFAATNPDESAWRKWCEEVRLPSKSGLGARVMRVLVYYGEADEYKDLSKDGCGAYRKGDGHKGQVIWESVDGKYYVEPVYVHASKAGAMAALNANPKKKRICGMFNSHCTVDVGDVYNDNGDFILPAGRYMVNTIKKNGQCVLSDANNEKNTININYLMRAGMRRIELSEL

SEQ ID NO: 231 - protein, 1059 aa, unidentified; identical to SEQ ID NO: 115
  REGION 1..1059: note = Description of Unknown: uncultivated organism with predicted taxonomy: unclassified Verrucomicrobia (miscellaneous)
  REGION 1..1059: note = MG1-236 effector

SEQ ID NO: 232 - protein, 1056 aa, unidentified
  REGION 1..1056: note = Description of Unknown: uncultivated organism with predicted taxonomy: Verrucomicrobia
  REGION 1..1056: note = MG1-237 effector
MEKEKNNHVWGFDIGKGSLGEAVRIGGDFKHIASVLLDPEFGEIKTAALVRRQMRTRKAHKAREKWLEECLEGTGVEILKRREVGIVDGQWQLISKGDERLEREFPPSGEDVCYNSIALRCKLLLGEKLEGWQVFKALNSAIQKRGYDENIPWGEAEEKSSKKDDDDYAQKLSQYEKEKSELFESFADGEKYDFPCFFKAYKMGLWSPENPTRVEVRIDCRAQKAKSYVIARKYVEREFECLVEAAAKFFPKLKGRAKFILYGVSETPYASYYGNMRKKFGLKRGAESDWTALGQKVPRFDNRIIDKCRFIPRMNVCKIRPLNEARNEKDLLYYEVTLALKLLNLRFFRNSNIEQLTFEEFKKAFEIAAGAKYKTAMKKFLKSISATALGDDYAEIEPPKESGRASFSRPAMEILKELIFSGMPPREFYGRKISEISNTDKNKGVVSSDLDFIKLMGDCPWGGIFIPDVQTYQFANAAFPDPDAQINKLIGSQNNPIVRHRLTFFFERIKFLESKYGVPDKVVLEFVRDDFMGEKEKKEMRIAMKKRAEEKMRIAKDLDEHGFKGGNLLLKMELYRKQNGICLYTGDALPLSELATLEIEHIVPRSRGGPDAQYNYVITREKTNKLKGDKTPYEWLSSDAKEWASYTDRVNACAKALGKKRCRLLLEKDAEELVEKYTALAETAHIAKLAQKIVCMHFGFQFGGLSGTKRVFTVPGALTSRIRKFYGLDRILHNSASESENLSFEEFLKFSEDLEKKNRKNKKHHALDAMCLCFAPTGVDSRRAKLGEILPEKLRSEKAAREFFKSYLDKIMPVDVAPKKPRLEDGIYSKRIIGGKACMVKRNNLVDLAYKSGLKPVFDIPTLIKLVDKKEKGIINPQIRKMIGEFAATNPDESAWRKWCEEVRLPSKSGLGARIMRVLVYYGEADEYKDLSKDGYGAYRKGDGHKGQVIWESVDGKYYVEPVYVHASKAGVMAALNANPKKKRICGMFNSHCTVDVGDVYNDKGDFILPAGRYMVNTIRSDNQCVLTNADGEKRNPININYLMRAGMRRVDLSEL

SEQ ID NO: 233 - protein, 1062 aa, unidentified; identical to SEQ ID NO: 97
  REGION 1..1062: note = Description of Unknown: uncultivated organism with predicted taxonomy: Coraliomargarita sp. CAG:312
  REGION 1..1062: note = MG1-238 effector

SEQ ID NO: 234 - protein, 1061 aa, unidentified; identical to SEQ ID NO: 131
  REGION 1..1061: note = Description of Unknown: uncultivated organism with predicted taxonomy: unclassified Verrucomicrobia (miscellaneous)
  REGION 1..1061: note = MG1-239 effector

SEQ ID NO: 235 - protein, 1059 aa, unidentified
  REGION 1..1059: note = Description of Unknown: uncultivated organism with predicted taxonomy: unclassified Verrucomicrobia (miscellaneous)
  REGION 1..1059: note = MG1-240 effector
MEKEKNNHVWGFDIGKGSLGEAVRIGGDFKHIASVLLDPEFGEIKTAALARRQMRTRKAHKAREKWLEECLEGTGVEILKRREVGIVDGQWQLISKGDERLEREFPPSGEDVCYNSIALRCKLLLGEKLEGWQVFKALNSAIQKRGYDENIPWGEAEEKSSKKDDDDYAQKLSQYEKEKSELFESFADGEKYDFPCFFKAYKMGLWSPENPTRVEVRIDCRAQKAKSYVIARKYVEREFECLVEAAAKFFPKLKGRAKFILYGVSETPYASYYGNMRKKFGLKRGAESDWTALGQKVPRFDNRIIDKCRLIPRMNVCKIRPLNEARNEKDLLYYEVTLALKLLNLRFFRNSNIEQLTFEEFKKAFEIAAGAKYKMTKTAMKKFLKSISATALGDDYAEIEPPKESGRASFSRPAMEILKELIFSGMPPREFYGRKISEISNTDKNKGVVSSDLDFIKLMGDCPWGGIFIPDVQTYQFANAAFPDPDAQINKLIGSQNNPIVRHRLTFFFERIKFLESKYGVPDKVVLEFVRDDFMGEKEKKEMRIAMKKRAEEKMRIAKDLDEHGFKGGNLLLKMELYRKQNGICLYTGDALPLSELATLEIEHIVPRSRGGPDAQYNYVITREKTNKLKGDKTPYEWLSSDAKEWASYTDRVNACAKALGKKRCRLLLEKDAEELVEKYTALAETAHIAKLAQKIVCMHFGFQFGGLSGTKRVFTVPGALTSRIRKFYGLDRILHNSAAESENLSFEEFLKFSEDLEKKNRKNKKHHALDAMCLCFAPTGVDSRRAKLGEILPEKLRSEKAAREFFKSYLDKIMPVDVAPKKPRLEDGIYSKRIIGGKACMVKRNNLVDLAYKSGLKPVFDIPTLIKLVDKKEKGIINPQIRKMIGEFAATNPDESAWRKWCEEVRLPSKSGLGARIMRVLVYYGEADEYKDLSKDGCGAYRKGDGHKGQVIWESVDGKYYVEPVYVHASKAGVMAALNANPKKKRICGMFNSHCTVDVGDVYNDKGDFILPAGRYMVNTIRSDNQCVLTNADGEKRNPININYLMRAGMRRVDLNEL

SEQ ID NO: 236 - protein, 1062 aa, unidentified; identical to SEQ ID NO: 81
  REGION 1..1062: note = Description of Unknown: uncultivated organism with predicted taxonomy: Verrucomicrobia
  REGION 1..1062: note = MG1-241 effector

SEQ ID NO: 237 - protein, 1062 aa, unidentified
  REGION 1..1062: note = Description of Unknown: uncultivated organism with predicted taxonomy: Coraliomargarita sp. CAG:312
  REGION 1..1062: note = MG1-242 effector
MNNNNTQIWGFDIGKASLGEAVWCGGKFKHVESLILDKDFAEIKTSAGRRRQARTRKAHKAREEWLEKCLEDCGIEILKRRKVGIVNGQWKLISKGDARLEKEFPAEGEEVCYNSIALRCKLILGENLESWQIFKALNSSIQHRGYDENIPWKETQNESKKEDGDYFKKIVLYESEKEDILNRLPQECKREDFDFPCFFKAKKMGIWSEENPYKVGLRISNNAQKAKGYVIPRKYVESEFVRLVQMASLQYPKLKDKQMFILYGISETPYASLFKDARKKFGLKRGADSDWTALGQKIPRFDNRMIGKCKLIPRLNTCKIKSPDKIKSEEDLLHYDITLALKLLNLRFFKDSEICALSFEEFKKLFEIGKSNKYKISKTDLKKFLKSIGASVLSQDHSEIEAPRTSGRSSFSRPAMKILKELIFSGEPPSKFLKAKIDKIANTDPNKGIIREDLDFIRIMGDCPWNGIFIPDVETYKYASQTQESSEAQINKLIGSQNDPIVRHRLSFFYERIKALSEKFGVPDKIVLEFVREDFMGKQAKKDLSLSMKKRFEEKIDIAKKLDDIGYKGNKMLLKMELLQKQGFACLYTGEALQETDLPILEIEHIVPRSLGGPDAAYNYVLTSESTNKAKGNQTPYKWLSPDRDKWRAYTERVRARAAELGSKRCRLLLSENAEELINKYTALAETAWISKLAQRIVCMHFGFQFGGNTGEKRVFTVPGNITAKIRSAFGLNKILHNIDADKKNMSEFDIVKLDYELDKKNRKNKKHHALDAMCLCFAPTGPNAQKLGIGALLPPEIAAKAEEFFRGYIEKVVPNEVAPKKPKLEESIYSKRTINGKECIVRKFNLVDLAYKSGLKPVYDISAIEKLLEDKPKKIPPIINPTVRRIVRDFVSTNPNEDEWRNWCKTVRMPSKNRNGTRIIRVLVYVGTPEEYKDLSKDGCGAFRKGDSHKGQIIWMDKNGRYKVSPVYVHSSKSQTMESIKSNPDFIKIAGFFKSHCLVEIESPVVNGKGDVLLSPGTYMINTIMAAGMAILSDTNGVKSPAININYLMNAGMRRVSIKYK

SEQ ID NO: 238 - protein, 1074 aa, unidentified; identical to SEQ ID NO: 151
  REGION 1..1074: note = Description of Unknown: uncultivated organism with predicted taxonomy: Verrucomicrobia
  REGION 1..1074: note = MG1-243 effector

SEQ ID NO: 239 - protein, 1059 aa, unidentified; identical to SEQ ID NO: 96
  REGION 1..1059: note = Description of Unknown: uncultivated organism with predicted taxonomy: unclassified Verrucomicrobia (miscellaneous)
  REGION 1..1059: note = MG1-244 effector

SEQ ID NO: 240 - protein, 1062 aa, unidentified; identical to SEQ ID NO: 97
  REGION 1..1062: note = Description of Unknown: uncultivated organism with predicted taxonomy: Coraliomargarita sp. CAG:312
  REGION 1..1062: note = MG1-245 effector

SEQ ID NO: 241 - protein, 1061 aa, unidentified
  REGION 1..1061: note = Description of Unknown: uncultivated organism with predicted taxonomy: unclassified Verrucomicrobia (miscellaneous)
  REGION 1..1061: note = MG1-246 effector
MKVMEAENRNHIWGFDIGKGSLGEAVLMGAEFRHVTSLLLDEDFGEIKTAAGLRRQMRTRKAHKAREKWLERCLLEFGIEPLKRREVGIVNGRWMLISKGDERLEREFPPDGEDICYNAIALRCKLLLGEKLESWQIFKALNSAIQNRGYDENIPWKESDVSLPKKDDDDYAKKLSQYSREKGELLESFEDGEKYDYPCFFKAYKMGLWSPENPERVEIRIGNDAQKAKGYVIPRKDVEREFESLVEAASKWHPAMKGKAMYIMYGIAETPYASFKPALRKKFDLKRGAESDWTALGQKIPRFDNRIIDKCRLIPRLNVCKIRPLSEARGEGDLLHYEITLSLKLLNLRFFRNSNVESLSFEEFKAAFEIAKSAKYKMGKAALKKFLKSISASVLSEDQSEIEAPRESGRASFSRPAMLLLKELIFSGMPPTEFYAKKAGEISNADPNKGIVASDLDFIKLMGNCGWSGIFIPDVETYRFANNGADSAKLINGLIGSQNNPIVRHRLAFFYERIKFLESKFGVPDKVVLEFVREDFMGKEQKKRMQIEMKKRASEKMLIAKKLDEAGYKGGNLLLKMELLEKQGGICLYTGEPLLPSELGVLEIEHIVPRSRGGPDAQYNYALTREKTNKEKADRTPFEWLSSDPVKWAGYSDRVKARAGQLGRKRCELLLEKNAEELVEKYTALAETAHISKLAQKIVCLHFGFQFGGLGGTKRVFTVPGALTARIRSFYGLNKILHNEDLAKDALSYEEVLKRGEELDKKNRKNKKHHALDAMCLCFAPTGVNSKRARIDMLLPPDIRGEREAELFFRKYLDRLIPVDVAPKKPRLEDGIYSMRAVGGKKFMARRVNLVDLAYKSGLKPVYDISALIKLLDKKEKGIINAQIRKLVADFARTNPSEDEWRKWCGECRLPSKNGIGTRVIRVLLNYGEPAEYKDLSKDGRGAFRRGDGHKGQIVWESTDGKYYVVPIYVHASKAKLLAELDANPKKKRVCDIFTSHCMVKIGNTYNDKGELLLHEGVYMVNTIQTDGRGKLTNPNGEKSNLININYLMKAGMRKVSVKDL

SEQ ID NO: 242 - protein, 1062 aa, unidentified
  REGION 1..1062: note = Description of Unknown: uncultivated organism with predicted taxonomy: Coraliomargarita sp. CAG:312
  REGION 1..1062: note = MG1-247 effector
MNNNNTQIWGFDIGKASLGEAVWCGGKFKHVESLILDKDFAEIKTSAGRRRQARTRKAHKAREEWLEKCLEDCGIEILKRRKVGIVNGQWKLISKGDARLEKEFPAEGEEVCYNSIALRCKLILGEKLESWQIFKALNSSIQHRGYDENIPWKETQNESKKEDGDYFKKIVLYESEKEDILNRLPQECKREDFDFPCFFKAKKMGIWSEENPYKVGLRISNNAQKAKGYVIPRKYVENEFVRLVQMASLQYPKLKDKQMFILYGISETPYASLFKDARKKFGLKRGADSDWTALGQKIPRFDNRMIGKCKLIPRLNTCKIKSPDKIKSEEDLLHYDITLALKLLNLRFFKDSEICALSFEEFKKLFEIGKSNKYKISKTDLKKFLKSIGASVLSQDHSEIEAPRTSGRSSFSRPAMKILKELIFSGEPPSKFLKAKIDKIANTDPNKGIIREDLDFIRIMGDCPWNGIFIPDVETYKYASQTQESSEAQINKLIGSQNDPIVRHRLSFFYERIKALSEKFGVPDKIVLEFVREDFMGKQAKKDLSLSMKKRFEEKIDIAKKLDDIGYKGNKMLLKMELLQKQGFACLYTGEALQETDLPILEIEHIVPRSLGGPDAAYNYVLTSESTNKAKGNQTPYKWLSPDRDKWRAYTERVRARAAELGSKRCRLLLSENAEELINKYTALAETAWISKLAQRIVCMHFGFQFGGNTGEKRVFTVPGNITAKIRSAFGLNKILHNIDADKKNMSEFDIVKLDYELDKKNRKNKKHHALDAMCLCFAPTGPNAQKLGIGALLPPEIAAKAEEFFRGYIEKVVPNEVAPKKPKLEESIYSKRTINGKECIVRKFNLVDLAYKSGLKPVYDISAIEKLLEDKPKKIPPIINPTVRRIVRDFVSTNPNEDEWRNWCKTVRMPSKNRNGTRIIRVLVYVGTPEEYKDLSKDGCGAFRKGDSHKGQIIWMDKNGRYKVSPVYVHSSKSQTMESIKSNPDFIKIAGFFKSHCLVEIESPVVNGKGDVLLSPGTYMINTIMAAGMAILSDTNGVKSPAININYLMNAGMRRVSIKYK

SEQ ID NO: 243 - protein, 1034 aa, unidentified; identical to SEQ ID NO: 147
  REGION 1..1034: note = Description of Unknown: uncultivated organism with predicted taxonomy: unclassified Verrucomicrobia (miscellaneous)
  REGION 1..1034: note = MG1-248 effector

SEQ ID NO: 244 - protein, 1059 aa, unidentified; identical to SEQ ID NO: 149
  REGION 1..1059: note = Description of Unknown: uncultivated organism with predicted taxonomy: unclassified Verrucomicrobia (miscellaneous)
  REGION 1..1059: note = MG1-249 effector

SEQ ID NO: 245 - protein, 1062 aa, unidentified; identical to SEQ ID NO: 158
  REGION 1..1062: note = Description of Unknown: uncultivated organism with predicted taxonomy: Coraliomargarita sp. CAG:312
  REGION 1..1062: note = MG1-250 effector

SEQ ID NO: 246 - protein, 1062 aa, unidentified; identical to SEQ ID NO: 184
  REGION 1..1062: note = Description of Unknown: uncultivated organism with predicted taxonomy: Coraliomargarita sp. CAG:312
  REGION 1..1062: note = MG1-251 effector

SEQ ID NO: 247 - protein, 1060 aa, unidentified; identical to SEQ ID NO: 139
  REGION 1..1060: note = Description of Unknown: uncultivated organism with predicted taxonomy: unclassified Verrucomicrobia (miscellaneous)
  REGION 1..1060: note = MG1-252 effector

SEQ ID NO: 248 - protein, 1059 aa, unidentified
  REGION 1..1059: note = Description of Unknown: uncultivated organism with predicted taxonomy: unclassified Verrucomicrobia (miscellaneous)
  REGION 1..1059: note = MG1-253 effector
MEKEKNNHVWGFDIGKGSLGEAVRIGGDFKHIASVLLDPEFGEIKTAALARRQMRTRKAHKAREKWLEECLEGTGVEILKRREVGIVDGQWQLISKGDERLEREFPPSGEDVCYNSIALRCKLLLGEKLEGWQVFKALNSAIQKRGYDENIPWGEAEEKSSKKDDDDYAQKLSQYEKEKSELFESFADGEKYDFPCFFKAYKMGLWSPENPTRVEVRIDCRAQKAKSYVIARKYVEREFECLVEAAAKFFPKLKGRAKFILYGVSETPYASYYGNMRKKFGLKRGAESDWTALGQKVPRFDNRIIDKCRLIPRMNVCKIRPLNEARNEKDLLYYEVTLALKLLNLRFFRNSNIEQLTFEEFKKAFEIAAGAKYKMTKTAMKKFLKSISATALGDDYAEIEPPKESGRASFSRPAMEILKELIFSGMPPREFYGREISEISNTDKNKGVVSSDLDFIKLMGDCPWGGIFIPADLTYQFANAAFPDPDAQINKLIGSQNNPIVRHRLTFFFERIKFLESKYGVPDKVVLEFVRDDFMGEKEKKEMRIAMKKRAEEKMRIAKDLDEHGFKGGNLLLKMELYRKQNGICLYTGDALPLSELATLEIEHIVPRSRGGPDAQYNYVITREKTNKLKGDKTPYEWLSSDAKEWASYTDRVNACAKALGKKRCRLLLEKDAEELVEKYTALAETAHIAKLAQKIVCMHFGFQFGGLSGTKRVFTVPGALTSRIRKFYGLDRILHNSAAESENLSFEEFLKFSEDLEKKNRKNKKHHALDAMCLCFAPTGVDSRRAKLGEILPEKLRSEKAAREFFKSYLDKIMPVDVAPKKPRLEDGIYSKRIIGGKACMVKRNNLVDLAYKSGLKPVFDIPTLIKLVDKKEKGIINPQIRKMIGEFAATNPDESAWRKWCEEVRLPSKSGLGARIMRVLVYYGEADEYKDLSKDGCGAYRKGDGHKGQVIWESVDGKYYVEPVYVHASKAGVMAALNANPKKKRICGMFNSHCTVDVGDVYNDKGDFILPAGRYMVNTIQKNGQCVLTNADGEKRNPININYLMRAGMRRVELSEL

SEQ ID NO: 249 - protein, 1059 aa, unidentified; identical to SEQ ID NO: 136
  REGION 1..1059: note = Description of Unknown: uncultivated organism with predicted taxonomy: unclassified Verrucomicrobia (miscellaneous)
  REGION 1..1059: note = MG1-254 effector

SEQ ID NO: 250 - protein, 1059 aa, unidentified; identical to SEQ ID NO: 134
  REGION 1..1059: note = Description of Unknown: uncultivated organism with predicted taxonomy: unclassified Verrucomicrobia (miscellaneous)
  REGION 1..1059: note = MG1-255 effector

SEQ ID NO: 251 - protein, 1059 aa, unidentified; identical to SEQ ID NO: 119
  REGION 1..1059: note = Description of Unknown: uncultivated organism with predicted taxonomy: unclassified Verrucomicrobia (miscellaneous)
  REGION 1..1059: note = MG1-256 effector

SEQ ID NO: 252 - protein, 1059 aa, unidentified; identical to SEQ ID NO: 143
  REGION 1..1059: note = Description of Unknown: uncultivated organism with predicted taxonomy: unclassified Verrucomicrobia (miscellaneous)
  REGION 1..1059: note = MG1-257 effector

SEQ ID NO: 253 - protein, 1074 aa, unidentified; identical to SEQ ID NO: 157
  REGION 1..1074: note = Description of Unknown: uncultivated organism with predicted taxonomy: Verrucomicrobia
  REGION 1..1074: note = MG1-258 effector

SEQ ID NO: 254 - protein, 1059 aa, unidentified; identical to SEQ ID NO: 161
  REGION 1..1059: note = Description of Unknown: uncultivated organism with predicted taxonomy: unclassified Verrucomicrobia (miscellaneous)
  REGION 1..1059: note = MG1-259 effector

SEQ ID NO: 255 - protein, 1059 aa, unidentified
  REGION 1..1059: note = Description of Unknown: uncultivated organism with predicted taxonomy: unclassified Verrucomicrobia (miscellaneous)
  REGION 1..1059: note = MG1-260 effector
MEKEKNNHVWGFDIGKGSLGEAVRIGGDFKHIASVLLDPEFGEIKTAALACRQMRTRKAHKAREKWLEECLEGTGVEILKRREVGIVDGQWQLISKGDERLEREFPPSGEDVCYNSIALRCKLLLGEKLEGWQVFKALNSAIQKRGYDENIPWGEAEEKSSKKDDDDYAQKLSQYEKEKSELFESFADGEKYDFPCFFKAYKMGLWSPENPTRVEVRIDCRAQKAKSYVIARKYVEREFECLVEAAAKFFPKLKGRAKFILYGVSETPYASYYGNMRKKFGLKRGAESDWTALGQKVPRFDNRIIDKCRFIPRMNVCKIRPLNEARNEKDLLYYEVTLALKLLNLRFFRNSNIEQLTFEEFKKAFEIAAGAKYKMTKTAMKKFLKSISATALGDDYAEIEPPKESGRASFSRPAMEILKELIFSGMPPREFYGRKISEISNTDKNKGVVSSDLDFIKLMGDCPWGGIFIPDVQTYQFANAAFPDPDAQINKLIGSQNNPIVRHRLTFFFERIKFLESKYGVPDKVVLEFVRDDFMGEKEKKEMRIAMKKRAEEKMRIAKDLDEHGFKGGNLLLKMELYRKQNGICLYTGDALPLSELATLEIEHIVPRSRGGPDAQYNYVITREKTNKLKGDKTPYEWISSDAKEWASYTDRVNACAKALGKKRCRLLLEKDAEELVEKYTALAETAHIAKLAQKIVCMHFGFQFGGLSGTKRVFTVPGALTSRIRKFYGLDRILHNSAAESENLSFEEFLKFSEDLEKKNRKNKKHHALDAMCLCFAPTGVDSRRAKLGEILPEKLRSEKAAREFFKSYLDKIMPVDVAPKKPRLEDGIYSKRIIGGKACMVKRNNLVDLAYKSGLKPVFDIPTLIKLVDKKEKGIINPQIRKMIGEFAATNPDESAWRKWCEEVRLPSKSGLGARIMRVLVYYGEADEYKDLSKDGCGAYRKGDGHKGQVIWESVDGKYYVEPVYVHASKAGVMAALNANPKKKRICGMFNSHCTVDVGDVYNDKGDFILPAGRYMVNTIRSDNQCVLTNADGEKRNPININYLMRAGMRRVDLSEL

SEQ ID NO: 256 - protein, 1059 aa, unidentified; identical to SEQ ID NO: 94
  REGION 1..1059: note = Description of Unknown: uncultivated organism with predicted taxonomy: unclassified Verrucomicrobia (miscellaneous)
  REGION 1..1059: note = MG1-261 effector

SEQ ID NO: 257 - protein, 1061 aa, unidentified
  REGION 1..1061: note = Description of Unknown: uncultivated organism with predicted taxonomy: unclassified Verrucomicrobia (miscellaneous)
  REGION 1..1061: note = MG1-262 effector
MKVMEDEGGNHIWGFDIGKGSLGEAVLDGSEFKHVASLLLDADFGEIETAAGLRRQMRTRKAHKAREKWLESCLSGFGIETLKRREVGIVNGQWTLISKGDERLEREFPPDGENICYNSIALRCKLLLGEKLEGWQIFKALNSAIQNRGYDENIPWKESDASPSKKEGGDYAQKLSQYSREKSELFESFEGGEKYDYPCFFKAYKMGLWSPDNPERVEVRIGSDAQKAKDYVIPRKDVEREFERLVEAASKWYPAMKGKAMYIMYGIAETPYASYKPLLRKKFDLKRGAESDWTALGQKIPRFDNRIIDKCRLIPRLNVCKIRPLSKIRGEADLLHYEITLSLKLLNLRFFRNSNVESLSFGEFKAAFEIAKGAKYKMGKAALKKFLKSISASVLSEDQSEIEAPRESGRAAFSRPAMLLLKELIFSGMTPAEFYAKKSGEISNADPNKGIVASDLDFIKLMGNCGWSGIFIPDVDTFHFANKGAEPAKLINELIGSQNNPIVRHRLSFFYERIKFLESKFGIPDKVVLEFVREDFMGKEQKKRMQIEMKKRASEKMLIAKKLDEAGYKGGNLLLKMELLEKQGGVCLYTGEPLLPSELGVLEIEHIVPRSRGGPDAQYNYVLTREKTNKEKADRTPFEWLSSDPVKWAGYSDRVKARAGQLGRKRCELLLEKNAEELVEKYTALAETAHISKLAQKIVCLHFGFQFGGLSGTKRVFTVPGALTARIRTFYGLNKILHNEDLAHETLSFEGFLKRGEELDKKNRANKKHHALDAMCLCFAPTGVNSKRARVDMLLPPKIRSEKEAELFFRKYLDKLIPVDVAPKKPKLEDGIYSMRTVGGKKIMARRVNLVDLAYKSGLKPVYDVSVLIKLLDKKERGIINPQIRKLVADFARTNPSEDEWKKWCGECRLPSKNGLGTRVIRVLLNYGEPAEYKDLSKDGRGAFRRGDGHKGQIVWESTDGKYYVLPIYVHASKAKLPAELCANPKKKRICGIFTSHCMVKVGNTYNNKGELLLPEGVYMLNTIRTDGWIQLTSANGDKSKPININYLMKAGMKKVPVKDL

SEQ ID NO: 258 - protein, 1055 aa, unidentified; identical to SEQ ID NO: 153
  REGION 1..1055: note = Description of Unknown: uncultivated organism with predicted taxonomy: Verrucomicrobia
  REGION 1..1055: note = MG1-263 effector

SEQ ID NO: 259 - protein, 1075 aa, unidentified
  REGION 1..1075: note = Description of Unknown: uncultivated organism with predicted taxonomy: unclassified Verrucomicrobia (miscellaneous)
  REGION 1..1075: note = MG1-264 effector
MSLYFIEQISDWKIMKVMEDEGGNHIWGFDIGKGSLGEAVLDGSEFKHVASLLLDADFGEIETAAGLRRQMRTRKAHKAREKWLESCLSGFGIETLKRREVGIVNGQWTLISKGDERLEREFPPDGENICYNSIALRCKLLLGEKLEGWQIFKALNSAIQNRGYDENIPWKESDASPSKKEGGDYAQKLSQYSREKSELFESFEGGEKYDYPCFFKAYKMGLWSPDNPERVEVRIGSDAQKAKDYVIPRKDVEREFERLVEAASKWYPAMKGKAMYIMYGIAETPYASYKPLLRKKFDLKRGAESDWTALGQKIPRFDNRIIDKCRLIPRLNVCKIRPLSKIRGEADLLHYEITLSLKLLNLRFFRNSNVESLSFGEFKAAFEIAKGAKYKMGKAALKKFLKSISASVLSEDQSEIEAPRESGRAAFSRPAMLLLKELIFSGMTPAEFYAKKSGEISNADPNKGIVASDLDFIKLMGNCGWSGIFIPDVDTFHFANKGAEPAKLINELIGSQNNPIVRHRLSFFYERIKFLESKFGIPDKVVLEFVREDFMGKEQKKRMQIEMKKRASEKMLIAKKLDEAGYKGGNLLLKMELLEKQGGVCLYTGEPLLPSELGVLEIEHIVPRSRGGPDAQYNYVLTREKTNKEKADRTPFEWLSSDPVKWAGYSDRVKARAGQLGRKRCELLLEKNAEELVEKYTALAETAHISKLAQKIVCLHFGFQFGGLSGTKRVFTVPGALTARIRTFYGLNKILHNEDLAHETLSFEGFLKRGEELDKKNRANKKHHALDAMCLCFAPTGVNSKRARVDMLLPPKIRSEKEAELFFRKYLDKLIPVDVAPKKPKLEDGIYSMRTVGGKKIMARRVNLVDLAYKSGLKPVYDVSVLIKLLDKKERGIINPQIRKLVADFARTNPSEDEWKKWCGECRLPSKNGLGTRVIRVLLNYGEPAEYKDLSKDGRGAFRRGDGHKGQIVWESTDGKYCVLPIYVHASKAKLLAELCANPKKKRICGIFTSHCMVKVGNTYNNKGELLLPEGVYMLNTIRTDGWIQLTSANGDKSKPININYLMKAGMKKVPVKDL

SEQ ID NO: 260 - protein, 1063 aa, unidentified; identical to SEQ ID NO: 159
  REGION 1..1063: note = Description of Unknown: uncultivated organism with predicted taxonomy: unclassified Verrucomicrobia (miscellaneous)
  REGION 1..1063: note = MG1-265 effector

SEQ ID NO: 261 - protein, 1022 aa, unidentified
  REGION 1..1022: note = Description of Unknown: uncultivated organism with predicted taxonomy: Coraliomargarita sp. CAG:312
  REGION 1..1022: note = MG1-266 effector
NNNNTQIWGFDIGKASLGEAVWCGGKFKHVESLILDKDFAEIKTSAGRRRQARTRKAHKAREEWLEKCLEDCGIEILKRRKVGIVNGQWKLISKGDARLEKEFPAEGEEVCYNSIALRCKLILGEKLESWQIFKALNSSIQHRGYDENIPWKETQNESKKEDGDYFKKIVLYESEKEDILNRLPQECKREDFDFPCFFKAKKMGIWSEENPYKVGLRISNNAQKAKGYVIPRKYVENEFVRLVQMASLQYPKLKDKQMFILYGISETPYASLFKDARKKFGLKRGADSDWTALGQKIPRFDNRMIGKCKLIPRLNTCKIKSPEKIKSEEDLLHYDITLALKLLNLRFFKDSEICALSFEEFKKLFEIGKSNKYKISKTDLKKFLKSIGASVLSQDHSEIEAPRTSGRSSFSRPAMKILKELIFSGEPPSKFLKAKIDKIANTDPNKGIIREDLDFIRIMGDCPWNGIFIPDVETYKYASQTQESSEAQINKLIGSQNDPIVRHRLSFFYERIKALSEKFGVPDKIVLEFVREDFMGKQAKKDLSLSMKKRFEEKIDIAKKLDDIGYKGNKMLLKMELLQKQGFACLYTGEALQETDLPILEIEHIVPRSLGGPDAAYNYVLTSESTNKAKGNQTPYKWLSPDRDKWRAYTERVRARAAELGSKRCRLLLSENAEELINKYTALAETAWISKLAQRIVCMHFGFQFGGNTGEKRVFTVPGNITAKIRSAFGLNKILHNIDADKKNMSEFDIVKLDYELDKKNRKNKKHHALDAMCLCFAPTGPNAQKLGIGALLPPEIAAKAEEFFRGYIEKVVPNEVAPKKPKLEESIYSKRTINRKECIVRKFNLVDLAYKSGLKPVYDISAIEKLLEDKPKKIPPIINPTVRRIVRDFVSTNPNEDEWRNWCKTVRMPSKNRNGTRIIRVLVYVGTPEEYKDLSKDGCGAFRKGDSHKGQIIWMDKNGRYKVSPVYVHSSKSQTMESIKSNPDFIKIAGFFKSHCLVEIESPVVNGKRDVLLSPGTYMIN

SEQ ID NO: 262 - protein, 1073 aa, unidentified
  REGION 1..1073: note = Description of Unknown: uncultivated organism with predicted taxonomy: Verrucomicrobia
  REGION 1..1073: note = MG1-267 effector
MHTKDIIWGFDIGKGSLGEAVRVGNEFKHVQSLEIAPDFAETKTTAAARRAWRTREAHKARELWLEKCLSEAGIEVLLRRKVGVVDGAWKLVSKGDVRLEREFPPAGEDLCYNSIALRCKLLLGEKLESWQVFKALNSAIQNRGYDANIPWGDEDAADGGDGSSRKSSDSDASGDGESYAEKLAHYEREFDGILAELDNREKYEFPCFFKAAKMGLWSPENPDFVGVRIDNTAEKAKGYVVPREAVVREFRALVNAAALQYPNLKGKADFIMFGRACEPYASYNPELRKRFGLKRGAATDWTALGQKTPRFDNRVIDKCKLIPRLNVCKIKPLDECKTDDDFLSYTITLSLKLLNLRFFRGAGVDSLSFDEFLRAFELAKNSKFKLGKAALKKFFKTIGAEVMDESQSEIEQPRNGGRAAFSRPAMRILRDLIFSGKSPAEFYATELGKIANTDKNKGLVAGDLDFLKLMSDAPWSGIFIPDVGLSDFADTSEAARAAQINKLIGSQNDPIVRHRLSFFYERIKSLEAKFGVPDKIVLEFVRDDFLGKKAKSDLNKAIKTRFDEKKKLAEDLDSKREEFGLKYASKKMLLKFELYKKQGGECVYTGNALPLSELENLEVEHIVPRSRGGPDAMYNYVLTDEKTNKEKGDRTPYEWHSLKGAEWDSYCDRVRELTKNLGAKRCRLLLAPNAAELVEKYTALAETAWISKLAQRICCLHFGFQFGGLAGAKKVWTVSGNTTAMIRGRYGLNRLLHDEEAAEDLSLFDRICMEKKFEEKNRKNKKHHALDAMCLCFAPTSNAKKASAYKNILPEEITRNPESDEARKFFGRYLATVIPNKVAVEKSKLEQTIYSLRKGRIVKKCNVRDLAYEGINPKYNYTKLVKRIESIVGDVSKRIISDFVLSNPDLKESEWEDWCKYEAAIPSKNGAPTKLLRVLCEVGSPEEYKDLSKDGCGAYRKGDSHKGQFIWKTQKGKYMVAPVYAYASKAKVFAALKSNPDCAEVCGFFRQNCLVEISNDVIDKSGKMLLKSGIYKSNTIMSDGRAKFTNSDGISTNPISIQYLMPAGMKRIKLDTV

SEQ ID NO: 263 - protein, 1059 aa, unidentified; identical to SEQ ID NO: 100
  REGION 1..1059: note = Description of Unknown: uncultivated organism with predicted taxonomy: Verrucomicrobia
  REGION 1..1059: note = MG1-268 effector

SEQ ID NO: 264 - protein, 1078 aa, unidentified
  REGION 1..1078: note = Description of Unknown: uncultivated organism with predicted taxonomy: unclassified Verrucomicrobia (miscellaneous)
  REGION 1..1078: note = MG1-269 effector
VDFCSHCKYFNNNKEFNKNMEKEKNNHVWGFDIGKGSLGEAVRIGGDFKHIASVLLDPEFGEIKTAALARRQMRTRKAHKAREKWLEECLEGTGVEILKRREVGIVDGQWQLISKGDERLEREFPPSGEDVCYNSIALRCKLLLGEKLEGWQVFKALNSAIQKRGYDENIPWGEAEEKSSKKDDDDYAQKLSQYEKEKSELFESFADGEKYDFPCFFKAYKMGLWSPENPTRVEVRIDCRAQKAKSYVIARKYVEREFECLVEAAAKFFPELKGRAKFILYGVSETPYASYYGNMRKKFGLKRGAESDWTALGQKVPRFDNRIIDKCRFIPRMNVCKIRPLNEARNEKDLLYYEVTLALKLLNLRFFRNSNIEQLTFEEFKKAFEIAAGAKYKMTKTAMKKFLKSISATALGDDYAEIEPPKESGRASFSRPAMEILKELIFSGMPPREFYGRKISEISNTDKNKGVVSSDLDFIKLMGDCPWGGIFIPDVQTYQFANAAFPDPDAQINKLIGSQNNPIVRHRLTFFFERIKFLESKYGVPDKVVLEFVRDDFMGEKEKKEMRIAMKKRAEEKMRIAKDLDEHGFKGGNLLLKMELYRKQNGICLYTGDALPLSELATLEIEHIVPRSRGGPDAQYNYVITREKTNKLKGDKTPYEWLSSDAKEWASYTDRVNACAKALGKKRCRLLLEKDAEELVEKYTALAETAHIAKLAQKIVCMHFGFQFGGLSGTKRVFTVPGALTSRIRKFYGLDRILHNSAAESENLSFEEFLKFSEDLEKKNRKNKKHHALDAMCLCFAPTGVDSRRAKLGEILPEKLRSEKAAREFFKSYLDKIMPVDVAPKKPRLEDGIYSKRIIGGKACMVKRNNLVDLAYKSGLKPVFDIPTLIKLVDKKEKGIINPQIRKMIGEFAATNPDESAWRKWCEEVRLPSKSGLGARIMRVLVYYGEADEYKDLSKDGYGAYRKGDGHKGQVIWESVDGKYYVEPVYVHASKAGVMAALNANPKKKRICGMFNSHCTVDVGDVYNDKGDFILPAGRYMVNTIRSDNQCVLTNADGEKRNPININYLMRAGMRRVDLSEL

SEQ ID NO: 265 - protein, 1055 aa, unidentified; identical to SEQ ID NO: 98
  REGION 1..1055: note = Description of Unknown: uncultivated organism with predicted taxonomy: Verrucomicrobia
  REGION 1..1055: note = MG1-270 effector

SEQ ID NO: 266 - protein, 1059 aa, unidentified
  REGION 1..1059: note = Description of Unknown: uncultivated organism with predicted taxonomy: unclassified Verrucomicrobia (miscellaneous)
  REGION 1..1059: note = MG1-271 effector
MEKEKNNHVWGFDIGKGSLGEAVRIGGDFKHIASVLLDPEFGEIKTAALARRQMRTRKAHKAREKWLEECLEGTGVEILKRREVGIVDGQWQLISKGDERLEREFPPSGEDVCYNSIALRCKLLLGEKLEGWQVFKALNSAIQKRGYDENIPWGEAEEKSSKKDDDDYAQKLSQYEKEKSELFESFADGEKYDFPCFFKAYKMGLWSPENPTRVEVRIDCRAQKAKSYVIARKYVEREFECLVEAAAKFFPKLKGRAKFILYGVSETPYASYYGNMRKKFGLKRGAESDWTALGQKVPRFDNRIIDKCRLIPRMNVCKIRPLNEARNEKDLLYYEVTLALKLFNLRFFRNSNIEQLTFEEFKKAFEIAAGAKYKMTKTAMKKFLKSISATALGDDYAEIEPPKESGRASFSRPAMEILKELIFSGMPPREFYGRKISEISNTDKNKGVVSSDLDFIKLMGDCPWGGIFIPDVQTYQFANAAFPDPDAQINKLIGSQNNPIVRHRLTFFFERIKFLESKYGVPDKVVLEFVRDDFMGEKEKKEMRIAMKKRAEEKMRIAKDLDEHGFKGGNLLLKMELYRKQNGICLYTGDALPLSELATLEIEHIVPRSRGGPDAQYNYVITREKTNKLKGDKTPYEWLSSDAKEWASYTDRVNACAKALGKKRCRLLLEKDAEELVEKYTALAETAHIAKLAQKIVCMHFGFQFGGLSGTKRVFTVPGALTSRIRKFYGLDRILHNSASESENLSFEEFLKFSEDLEKKNRKNKKHHALDAMCLCFAPTGVDSRRAKLGEILPEKLRSEKAAREFFKSYLDKIMPVDVAPKKPRLEDGIYSKRIIGGKACMVKRNNLVDLAYKSGLKPVFDIPTLIKLVDKKEKGIINPQIRKMIGEFAATNPDESAWRKWCEEVRLPSKSGLGARVMRVLVYYGEADEYKDLSKDGYGAYRKGDGHKGQVIWESVDGKYYVEPVYVHASKAGVMAALNANPKKKRICGMFNSHCTVDVDDVYNDKGDFILPAGRYMVNTIRSDNQCVLTNADGEKRNPININYLMRAGMRRVDLSEL

SEQ ID NO: 267 - protein, 1273 aa, unidentified
  REGION 1..1273: note = Description of Unknown: uncultivated organism
  REGION 1..1273: note = MG1-272 effector
MKDYVLKAANQSPTNNDSFLTGLVFGFDVGTGSIGYAVRKKDKFLDAGVLICPEGINDLSGRNGLRRGRRTLDHRQNRRDWFAENLAKVLGLSLHKGTRLPNTAWTQNEKAGWIPVSPKFANPVSLRIDALGGKPLTAEQLFTALAHLIKHRGPSEKVPWSKTIAEEQRDLDEKESVSDTIPADQVRAEFEKARKEFTLSNADASGFHPAHYLQQLGEERKLQRKRAWPRDLVETEAAAILEAQANHHQKLKEEIKFVDVSGENRKATVAEWLLHGNSSIKSVREGDAEMSFHVFDRNYPNRERAPFTFQAARIHNRKPGLDLVEPRDEFGRPRYVMSRERPEYGQWQVEVALLNFKVLDLTSLKKDKAKIVPSAEALAELREIITRTGRLSVEDLQTWIKPYKENGIYDLVKEQPALVGEGKGRGRFSRVGLQRATEIIRPLQTEHNAMSKLTPKGQRAKKKLKTPEDKADAYVRQYVNYTPKLRYAWKNPATQITEPEPLPRALRRYILEIRDPVVRHRVELFDRMLDDLLGKYRSDGNPTHIVIECVRELEQDAEAAQDAWERRKKDREENQTARATLKDMGVKAPTDKDVRKFRLLQECKWRCPYTLERFMQTEFDDLVIQRIVPPAGDPRRSAYLEAARSAMQGTQVEHMVPQAAIVCDEWFNVTVTRPTTNTTKGDRTPYDFVLRDGDKDRRKQLLENAEQCFGKDSLKFKIFSSDNARSLIQERDKLQRTAYIARCLRYVCLLKFGWLSPEDRDPGHEKANDATRSYLVTNGGTTRRLRQAWNLDELLRETVSPEKWAGMTDVEKERALAQGARIPTEEWKKLDKAKQDDVLRARRTKNRQDVRHHALDAMVVACTLPWAANLTVWASGWCNLDTDDGSVSSVRCPIFGENDFGEGIYAAIEAKLSELKTALPEATSNAITHYRSHERHKQVFDSGLYGKRTTYGGKPLEKDEPVFFVIAKQLSRLTPAVLSYPAKGGGDSIFSPKLREHIASAWKTYTADNANWQHLLTRSEEDLQRELQDAENSKDNQYKFKTIKALKDRLRRVSQWRVAIPNETLWAELQEYLQQEKARRLKKPEARNNVFPDHFIEGLRHPNYNTPIHSVKVIALTKDEDAYVELRTGSKTFWKYKGGYEAMRVYGSPPKTRTGKGKFICWLVRRFYKRKKKENGQLQTVKEAHAAAMPAVCQGQKLLATFHNGQVVRFKQLAKDMDISHNWIICETNADTRNPRNSKIVVMPAHLAKIVADPENPKRTISLKETEGVPLFL

SEQ ID NO: 268 - protein, 992 aa, unidentified
  REGION 1..992: note = Description of Unknown: uncultivated organism with predicted taxonomy: Rhizobiales
  REGION 1..992: note = MG1-273 effector
MDKTDYVLKNKPEPASNDKFLTGLVFGFDVGTGSIGYAVRKGSEFKDVGVLICDSEGSELEGRRNLRRQRRTIRSRKSRREWFARELVKLGLPKSETALDDPISLRLRALNGEVLKPEELHAALTHLFKRRGYTKVPWANVEAVRKDGEKAKKEEGDTQKAISELEQEMKNAGCDYPCQLLDQRRKKLGERPQTKWGRNFPWGRATLEKEFWKIVEAQKEHCPELAKNAEKLLHGNTHKVTRIIDGQKREFHVYFKTDKEHKAGVLGVRWPKFENRSPGLDALEPFRKDPKTGAWIPQHTMRRDNLLFKEWQLEKSLHDFRVKRRMISSGRSKKEKFEFIPPPPAALAALRKLWNERGHLWAADLQEWAKAYEGQFELHYPDRDLTPRNNFSGRARFSKIGMASIRKVIDEARVRHDVAYEAWELKFKEKNKEAKEEDIFNGYARFLTQQSNAPVLAAGVADNSYARTVAPPPVLILPGETPEAAFQRYLNAIRDPQVRHRVELFGRELRRLMTLHSQNQAPDFIVIEMARDLMMNQEQKDAKEAKDKERRKERDEAAQILRDMGFAPDADNIKKFLLAQEAGWRCPFTLRPFCQSDFSQLTVTQLIQAENKPRFVKEASSVFDRLEIEHLVPRTPVVCNEWFNLTVTLHSTNAQKRKRTPFQWLFADKDGLPADLDWERIRKNAVERFGESSLKYQVFTSPDGAKLVEDNAKKSIQQTAYIARCLREACLIIFGKEWLDWTDGAGRDPRLLTDNRASKNYLTTNGVITSRLRGAWHLNEVLWPKPERLNDTEWDKLTDDEKIPLKAKYKEERELRALKNRQDHRHHAIDAMVISCAMPWQTCKTRTGSQQSDDGLCEVDSETGAITKIWNPVFNDYGYGIKQAAEAKSALLLKFSSERQVDLLRHHKSNNRNAQAFDTTIYGRRENFGGEILPQTLFVARKRLLDLKVSHLDPRGKGGFIFSKLLRDHIEKEWKLFSGDEKNWLRVQSDWM

SEQ ID NO: 269 - protein, 1258 aa, unidentified
  REGION 1..1258: note = Description of Unknown: uncultivated organism
  REGION 1..1258: note = MG1-274 effector
MPKENESSFLNGLVFGFDVGTGSIGYAVRKGAEFLDVGVLICDSKGSDLSKRRELRRQRRTLRSRKYRRQWLANELSELGLTKPVPSPDDPVSLRLRALNGEALKPEELHAALTHLFKRRGYSKVPWAKVEALRKNGEKAKQEDSDTQKGITELEQEMNEKGCTYPCQLLDLRRKDAGTLPKRKWGRNFPWGRQMLETEFRAIAEAQKDHFPELVQNVESLLHRNTLEIRREVDGKKQTFHVFFKTDTGKKPGVLGIRWPKFENRGPGLDALEPFRKDRKTGAWIPQHTLRRDSLFFKEWQSEVALRNFRVKRRLITVGRSKKEKFELIPPPPVALERLRNLWNEHGHLWAEDLREWAKNYEGQFELRDPDFNLTPRNDFSGRARFSKNGMAAIRQIIANAREKHDAAYNTWEQRFKDKNLKANEEDIANGYARFLTQLTNEAASNQATADNSYARTVAPPPVLILPGETTDGAFQRYLNSIRNPQVRHRVELFGRELQRLMNLHSEDQAPDFIIIEMARDLMMNQKQKDAKEAKDRERRDERDKAAQILRDMGYAPTADNIKKFLLAQEVGWRCPFTLQAFCQSDFSRLTITQLAQAENKPRFLKEASSVFRRLEVEHLVPRTPVVCNEWYNLTVTLHSTNAQKGKRTPFQWLSIDKDGVPPDLDWDCACKNAADRFGANSLKYQIFTSPNAAEIIADNAKRSIQQTAYIARCLREACLIHFGKEWLDWTDGAGRDPRLLPDNRASKSYLTTSGATTARLRGAWHLNEILWPKPQRLNDAEWDKLTDEEKTILKAKYKEERAVRALKNRQDHRHHALDAMVISCAVPWQTFKVRLGNQQPEDGLCELDAETGEITKIWNPVFNDYGYGIMRAVESRMDLLLKFSTDRQTDLLRHHKSSQRNAQAFDTTPYGRREKFGGDELGQPLFVARKRILDLKTSHLNPRNTGGFIFSPLIRDHIAKEWESFSGNEKNWIRIESDWIAIFEAQIATLRASGKDDQKTRLGIKARESRIYKLRQMEGCKDWEELLSFIAKELGAQQPQPKFPSQFIETLCHPIYKTPITSVKVTAQSKNDESFSLVRRPTSEKARSGTYVMRKQEDKYREMRVYRLPKPGRSGAYACWLLLPWYGMLDARGKRFKTVEKDLMTRACKGAKFVRAFRRDDIVCFANNLLANKGIKQNESWRIVRTDAKGDCLANVGLLPANLARETSHPITGEKVKLEPVVVALNDFMNALEPRLPTDELSHSPPVKPKSPGAAET

SEQ ID NO: 270 - protein, 1260 aa, unidentified
  REGION 1..1260: note = Description of Unknown: uncultivated organism
  REGION 1..1260: note = MG1-275 effector
VLISAQWKTISTNLSIMDYIIKPAPGSTSSPYDWANDPFYKSAIVLGIDIGIEGIGVWLRKGRNHVFARTFLFNTPEAAPLKGRRLLRGGRRCRQSEQHREVLLKQFCAEFGLPWTEIKDQENEDGPFKLRLRAVRSKLGSKEALVVCLRHIIRHRGYDYHETDGGSFPWGDELKADVATGWAKAAYCSPEDAAEFLHDVSDCGWNDKQLASFRHALTAAVERHKQGIEAALEKHFAQDKNNLRIPARKHNFPRSLIWKHMEKICANHRDFLGGEAGLSAALLKLKPILNYHRKKPGALAERKVNRCPVAIHLFGGTAPKCDPNSNPHIRRFKLLEFLATRSFVAKDGTRLLANADLMKWLLDEVLAEDIRAVVVNKVKGGQKQERRKFGGFRDEFIARFDPNGKIELAGDRVSHNKDFFEQLGDLLRPKLSVLNARASICGKSAEELFKRATKDGYQAEIISRNLKEKQFDGQSFYTLRQAAAAGFGIYPQVEFLLGRRGKKGNQAVPGVLRQMLELPEVSAKLDGQKIPDYVIIETVGDMPRNVVQAKEIQDEQKRRREFKEGLFEKFGVHDKQQDSEARKRVLLYDQQGGNRGEAICPYTGEPLGDPLSPKLQIDHIFPESLGGISEMVNLVLTHETTNNQRKGNQTPYQAFGGQQNTAEWQALVARVQKMGWNKQKRELVLREESSCPEWDNMTRIAQLARQLREEAARWLGVFGDDAKVRQKIGTPTGYQTSVCREAWSENVPKKDRTNLRHHLWDAAVISHIPPDRGMQLSHCGGIFFHAGEKKNGNILMRALPGLGPDLNSFENATKDQCLVEKKKTNRSKKSRFQQWIYGFPDKNGQMWARDSLKSLADKANLLELLRDAGIGENQLPTSHFEEWQEKRKAQFFTREEAWAAVEALALPPEQKIPEPIFEEWWSYRFSGDKRKVDEKLLRILIAKAGVKESVSKERLASVLTNRGDPGPLTRKDGTPINGVSGTAKQMTPMAIIPHRNHKREIIGFKLATESFVRAEIWVTEKPTKDGNAELNYHCRLIPHPRGLANLRQRVMQCTGKQLTWERRLTDEELRELGLLKELAALKREQEKISATHAKAVQKWQKEQQAKTNTLDLASSPSVQPIELKLPWLSLRKCYAGLPLYARRLTNKHGADISRIAKDDLLRVPLNSEGDICKREESAYQTLWYRVSAINKSGKIEMKMAERKQIKPPSERELRDGKRKPLTTDELWRVYAYTKEPSSTDVLAYLLEITRGNDQPPHPVK

SEQ ID NO: 271 - protein, 780 aa, unidentified
  REGION 1..780: note = Description of Unknown: uncultivated organism with predicted taxonomy: Verrucomicrobia bacterium IMCC26134
  REGION 1..780: note = MG1-276 effector
LFGPPARAYASFFVEERKRHGLREGSASDWQGVLSQKIPRFDNRIIGKCVLIPRLNVCKIRTGPDGGLLPQSRVAAEVVFLMKLKNMRLHRDGGARGLTAAEIGKILGDPKRSKLGLTPTQWKKWCVRFGGLPLPGQYEEVEEPRFSGRSRFCRPALEILRRLILSGDAPPLAHEKEVARLNGNTDPLKGLVPDDLRFLKQMGSTWEGIYVPNQKLDALARLTDDPQEAIRRLIGSQNDPIVRHRLALFAKRLDYLAVTKKFGPPDYVVLEFVREDFMGQKAKLEYLKFQRERARARAEAREEAAKAGATENSAGLKMELHKAQGGICLYTGDGLAVTSLDDYDIDHIVPESQGGPDALLNKVLTTRLANREKANRTPYEWLASSDRWDAYVERGKKRLTTLRNKKVQLLTSPEATALVEKYTALAETAWISKLAQTIVGLRFGWPGGIVDGKRKVIVVSGGLTGRIRRKYKLNRLLNPNASSEEEAETKNRDDDRHHALDAMVISFIPNWTRNAKLAGFFRFPEGVHGEFFANEIADVVPKNVALEKAAFEETCYGRRTLQGEQFAVGREDLSGLAVRLVGAKRVLKKRADIETHRIVDARIRSDVEAFLDANVGLTLEAWGAWCSTYKQGGNGPRVAKVMVTKSKADSLEEYKDVSKDGTGQLRRGAKHRGYFVYEHLAATKKDPDRKQLEVRPVYVHESKKAVAAGITGRIYAYFESGCLVRLAKPWVFQGKPYPPGQYICTSIWANRNAKLRHPEYGDIGPVGLRLLLDAGFERVE

SEQ ID NO: 272 - protein, 1068 aa, unidentified
  REGION 1..1068: note = Description of Unknown: uncultivated organism
  REGION 1..1068: note = MG1-277 effector
MKDYVLKNKPEPASNDKFLTGLVFGFDVGTGSIGYAVRRGADFKDVGVLICDSEGSDLSKRRDLRRQRRTLRSKKFRRQWFAKELAKLGLPKSQTALDDPISLRLRALNGEALKPEELHAALTHLFKRRGYSAVPWAKETKETVKPKTEDDDGEILKQAHGLKAEMDKRGCKHPCQYLAQRRKEVGESPTDYWGRKLYWLRELLEAEFRAITEAQQKYFPQLAEKSDWLLYGDSQPKKTKDEETFHVFFKATEARSPGVLGLRWPRFDNRGPALDSLQPVDEQGRTQHVVRKNKEAFTKAQWELALMNFRVIDRASGKLVAPDRKSLVRLREIWESGKRKKKKESASDTEESETIKISEPVLKRWAKDFVGQYKLVDGQQPLTPQTGAGRARYSSPTLERIIAGEQFNPPQPLLRRKNESPEQALNRYMTDIKHPLVRHRLILFQRLLKKLVSQFGEPDTIVMEAVRSLALGKTKKRELIQRIHNNREERDGIRKELSKDGFSSSKNSILRYRLFKEAKGRCPFCLCPFCLQAVLFKEAEIEHIVPRSRVDCNEFYNLTVAHADCNKKKDNRTPWEAFGQTPDWEALRRNAEECFGLGSMKYKLFTNPDAQDLVEEKSDLQHTAYIARVIRQTSLIQLGWLGEDGRDPTGLKDPQKTAWKFQVTNGHLTSRLRKAWGLNQILHPFPSKDEWGAMTPDEQENKKSELQEKNRGDLRHHALDAIVIACTMPWLAHRTVRVKDPETGEDGWWDLDERTQRSVARNPICPNEGQMYGLAKEEIEKVVVRHHVAKGNKRQFFDTTRYGKRGKDLFIARKVLAKMNPKQLAKIYPESQSLYLTEAWNRFTAENPNVDLLLKEENRGKEQGAKVALPGKFISRLCFSEYQRWVESQKTSAPLGFRWPERVKIPFKSVSVIADDGDSAMFETKLGSKTYVSQTEFKEVRVFLPPNGKKFITQFVRPWVRKGIAEQSSIPEGSKHICTLTKGDILVMKNADLEKKIEAGTRWILKKTFSSGRVSILPSHLSPNREVLISLGFDPINFLRISMNDLMRVLGHELPHPPSVKPQSESSD

SEQ ID NO: 273 - protein, 788 aa, unidentified
  REGION 1..788: note = Description of Unknown: uncultivated organism with predicted taxonomy: Pedosphaera sp. Tous-C6FEB
  REGION 1..788: note = MG1-278 effector
MKSAKPQPMKTIWAFDLGKGSIGEAVRLDDKFPHAESLLIPAELARRGPATVSGTPANRYRALKTREAHHERERWLETVWKSAGLIPLYPREVWENPNTGKWELKRNGDHRLEREFAPKLGEKTKDGAPSDEAGAEVCYTSCLLRINLLQGNKLADWQIFKALRAALQCRGYGPVPWATKEARKQGRTAEEIQLEEEKKLQQADARYRDAVGKWPEFKRSVPAQFHFACYYDASKIGLWDVSNPNIFLHRANHLAASTRNVRFDRVDVRAEMIKLGDQAAAILPELRIAFARWQKDGWKFRHPNGKELTYPVRAKTFGEFLCDGPAGKPDETSFEAFLSQRRDVKVQRGSYEEWMAALGQKTPSFDNRILNICVLIPRFHVCKVDVRLETQKDENKKDKFTGNIVPESLLASEVTFLLKLKNLLVADGQRKLTAGEIQFVFNYAHRQLKELKLVTPGGELIKNWPGKIADCFALSKSEWGGKKSLSKLALRPLPGHEEVKAPKTSGRSAYSRVALRILKELILSGEAPSVFHAKLLRRDADLLRRLGSNSDRPLVLFDDSVAKDEKQRERENNENRKHVVLVSEVHFLCQMRKDNSAADSWENIFIPSQTLDALQQRHTNDGKLDADDAIQELLGTINDPIVRHRLGVFAGRLKKLQHGDGKEETPKCGVPDFIVLEFAREDFMGEEAVKKYQRFLNDRADERKKAREEAEKLGLESRSSGLRYELFKAQGGICLYTGKSLGETSLDDYEIDHIVPRSLGVPDAALNYVLTFHDVNHAKEKGKLTPYA

SEQ ID NO: 274 - protein, 1024 aa, unidentified
  REGION 1..1024: note = Description of Unknown: uncultivated organism
  REGION 1..1024: note = MG1-279 effector
MKDYVLKNKPEPASNDKFLTGLVFGFDVGTGSIGYAVRKGADFKDVGVLICDSEGSDLSKRRDLRRQRRTLRSKRFRRQWFAKELVKLGLPKSETALDDPISLRLRALNGEELKPEELHAALTHLFKRRGYSKVPWANEAKIVKETAKSKKDDDEGIIKEAVKEMKAKLGDKHPCQFLAEEKARVGNSPTTNWARKIYWPREVLRAEFLAILKAQQNNFPQLAEKADWLLYGDSQAKEKNGETFHVFFKSTEARNPGVLGLRWPRFDNRGPALDSLQPVDGQGRPLHVVRKNKEAFGNAQWELALMNFRVLDVETRQKRDPRTDFPIFIENVRNEWNKKGKVTEARLKTLAKPFKDKFLLIKDQKPLTPDHGGGRARYSSPTLDLIHKEISEGRRVDPPQPILQRKGENAEQALNRYLADVKHPVVQHRLVLFRRLLMQLVSRYGQPDMIVLEAVRSLALGQKAKNELNQRNEKFRKERENAREQLSSNKESFSRKAIQRYRLWQEAKGRCPFCLQMIERTELGHGADIEHLVPRSIVDCNEFYNLTVAHIKCNRELKGDRTPFAAFSGTSQWPDIKDHAEKTFFGRKLEIFLSPDAEQLIEQKSDLQHTAYIARVIRHISLIQLGWLNDAGRDPTPEKQNPALSFQVTNGQLTSRLRKSWGLNQILHPLPPGKRWDELTDEEQTQFTEKNRGDLRHHSLDAMVIACTLPWLAHRTHGATDQFGHHGWWTQDEKQRSKAANPLFPNEGQMHDVVKKEIEKVIVRHHVSRSNHKRTYDTTIYGKKSSNVYVAREKLTDLKEKDFESVYPKIFGVYIAAAWERFTTETPGLPEMLKATKNKLPEMFARKLCFSHFQNWREKKPVAFDWPDKVRIPIRSVKYIGVHDDKAVAKASSGTHGYVARGGYKEVRIHKTTDGKGWVPVFVPYWKGDRLIHEQPFQAEKPVQTIRLGDLIELKNGYGPNNPPGTYRVVSTMQKQIQLMPPNIADTKEALKASGYLENGINLRWPAFFKAAGYELPHPPSVKP

SEQ ID NO: 275 - protein, 1214 aa, unidentified
  REGION 1..1214: note = Description of Unknown: uncultivated organism
  REGION 1..1214: note = MG1-280 effector
KVLGLSLHKGTRLPNTAWTQNEKAGWIPVSPKFANPVSLRIDALGGKPLTAEQLFTALAHLIKHRGPSEKVPWSKTIAEEQRDLDEKESVSDTIPADQVRAEFEKARKEFTLSNADASGFHPAHYLQQLGEERKLQRKRAWPRDLVETEAAAILEAQANHHQKLKEEIKFVDVSGENRKATVAEWLLHGNSSIKSVREGDAEMSFHVFDRNYPNRERAPFTFQAARIHNRKPGLDLVEPRDEFGRPRYVMSRERPEYGQWQVEVALLNFKVLDLTSLKKDKAKIVPSAEALAELREIITRTGRLSVEDLQTWIKPYKENGIYDLVKEQPALVGEGKGRGRFSRVGLQRATEIIRPLQTEHNAMSKLTPKGQRAKKKLKTPEDKADAYVRQYVNYTPKLRYAWKNPATQITEPEPLPRALRRYILEIRDPVVRHRVELFDRMLDDLLGKYRSDGNPTHIVIECVRELEQDAEAAQDAWERRKKDREENQTARATLKDMGVKAPTDKDVRKFRLLQECKWRCPYTLERFMQTEFDDLVIQRIVPPAGDPRRSAYLEAARSAMQGTQVEHMVPQAAIVCDEWFNVTVTRPTTNTTKGDRTPYDFVLRDGDKDRRKQLLENAEQCFGKDSLKFKIFSSDNARSLIQERDKLQRTAYIARCLRYVCLLKFGWLSPEDRDPGHEKANDATRSYLVTNGGTTRRLRQAWNLDELLRETVSPEKWAGMTDVEKERALAQGARIPTEEWKKLDKAKQDDVLRARRTKNRQDVRHHALDAMVVACTLPWAANLTVWASGWCNLDTDDGSVSSVRCPIFGENDFGEGIYAAIEAKLSELKTALPEATSNAITHYRSHERHKQVFDSGLYGKRTTYGGKPLEKDEPVFFVIAKQLSRLTPAVLSYPAKGGGDSIFSPKLREHIASAWKTYTADNANWQHLLTRSEEDLQRELQDAENSKDNQYKFKTIKALKDRLRRVSQWRVAIPNETLWAELQEYLQQEKARRLKKPEARNNVFPDHFIEGLRHPNYNTPIHSVKVIALTKDEDAYVELRTGSKTFWKYKGGYEAMRVYGSPPKTRTGKGKFICWLVRRFYKRKKKENGQLQTVKEAHAAAMPAVCQGQKLLATFHNGQVVRFKQLAKDMDISHNWIICETNADTRNPRNSKIVVMPAHLAKIVADPENPKRTISLKETEGVPLFLNEFMWALGYETPTKDNELPHPTSVKPQS

SEQ ID NO: 276 - protein, 837 aa, unidentified
  REGION 1..837: note = Description of Unknown: uncultivated organism with predicted taxonomy: Thermoflexibacter ruber
  REGION 1..837: note = MG1-281 effector
ESPTDYWGRKLYWLRELLEAEFRAITEAQQKYFPQLAEKSDWLLYGDSQPKKTKDEETFHVFFKATEARSPGVLGLRWPRFDNPGPALDSLQPVDEQGRTQHVVRKNKEAFTKAQWELALMNFRVIDRASGKLVAPDRKSLVRLREIWESGKRKKKKESASDTEESETIKISEPVLKRWAKDFVGQYKLVDGQQPLTPQTGAGRARYSSPTLERIIAGEQFNPPQPLLRRKNESPEQALNRYMTDIKHPLVRHRLILFQRLLKKLVSQFGEPDTIVMEAVRSLALGKTKKRELIQRIHNNREERDGIRKELSKDGFSSSKNSILRYRLFKEAKGRCPFCLCPFCLQAVLFKEAEIEHIVPRSRVDCNEFYNLTVAHADCNKKKDNRTPWEAFGQTPDWEALRRNAEECFGLGSMKYKLFTNPDAQDLVEEKSDLQHTAYIARVIRQTSLIQLGWLGEDGRDPTGLKDPQKTAWKFQVTNGHLTSRLRKAWGLNQILHPFPSKDEWGAMTPDEQENKKSELQEKNRGDLRHHALDAIVIACTMPWLAHRTVRVKDPETGEDGWWDLDERTQRSVARNPICPNEGQMYGLAKEEIEKVVVRHHVAKGNKRQFFDTTRYGKRGKDLFIARKVLAKMNPKQLAKIYPESQSLYLTEAWNRFTAENPNVDLLLKEENRGKEQGAKVALPGKFISRLCFSEYQRWVESQKTSAPLGFRWPERVKIPFKSVSVIADDGDSAMFETKLGSKTYVSQTEFKEVRVFLPPNGKKFITQFVRPWVRKGIAEQSSIPEGSKHICTLTKGDILVMKNADLEKKIEAGTRWILKKTFSSGRVSILPSHLSP

SEQ ID NO: 277 - protein, 947 aa, unidentified
  REGION 1..947: note = Description of Unknown: uncultivated organism
  REGION 1..947: note = MG1-282 effector
MKDYVLKNKPEPASNDKFLTGLVFGFDVGTGSIGYAVRRGADFKDVGVLICDSEGSDLSKRRDLRRQRRTLRSKKFRRQWFAKELAKLGLPKSQTALDDPISLRLRALNGEALKPEELHAALTHLFKRRGYSAVPWAKETKETVKPKTEDDDGEILKQAHGLKAEMDKRGCKHPCQYLAQRRKEVGESPTDYWGRKLYWLRELLEAEFRAITEAQQKYFPQLAEKSDWLLYGDSQPKKTKDEETFHVFFKATEARSPGVLGLRWPRFDNRGPALDSLQPVDEQGRTQHVVRKNKEAFTKAQWELALMNFRVIDRASGKLVAPDRKSLVRLREIWESGKRKKKKESASDTEESETIKISEPVLKRWAKDFVGQYKLVDGQQPLTPQTGAGRARYSSPTLERIIAGEQFNPPQPLLRRKNESPEQALNRYMTDIKHPLVRHRLILFQRLLKKLVSQFGEPDTIVMEAVRSLALGKTKKRELIQRIHNNREERDGIRKELSKDGFSSSKNSILRYRLFKEAKGRCPFCLCPFCLQAVLFKEAEIEHIVPRSRVDCNEFYNLTVAHADCNKKKDNRTPWEAFGQTPDWEALRRNAEECFGLGSMKYKLFTNPDAQDLVEEKSDLQHTAYIARVIRQTSLIQLGWLGEDGRDPTGLKDPQKTAWKFQVTNGHLTSRLRKAWGLNQILHPFPSKDEWGAMTPDEQENKKSELQEKNRGDLRHHALDAIVIACTMPWLAHRTVRVKDPETGEDGWWDLDERTQRSVARNPICPNEGQMYGLAKEEIEKVVVRHHVAKGNKRQFFDTTRYGKRGKDLFIARKVLAKMNPKQLAKIYPESQSLYLTEAWNRFTAENPNVDLLLKEENRGKEQGAKVALPGKFISRLCFSEYQRWVESQKTSAPLGFRWPERVKIPFKSVSVIADDGDSAMFETKLGSKTYVSQTEFKEVRVFLPPN

SEQ ID NO: 278 - protein, 1319 aa, unidentified
  REGION 1..1319: note = Description of Unknown: uncultivated organism with predicted taxonomy: Verrucomicrobia bacterium IMCC26134
  REGION 1..1319: note = MG1-283 effector
MDKTNYVLKNKPEPAANETVWAFDLGKGSIGEAVRRGNEFLHKASLLIPAELARRGPAKVSGTPANRHRALKTREAHYERERWLETVWRTAKVTSLLTPLRPREVWENPETHKWELKHPADYQLEREFAPAEFRRNSKTGEKEKIVYPNGHAENDGAPASTSEDFNLCYTSCLLRIKLLNGDSDLKAWQIYKALRAAIQCRGYGKVPWAAKEARKQGKTAEELELEEEKKLLQADPRYREAVGRWPDFKRSIQKLKLPLFDGMQPRKADNFYFVPPCYYDASKMGLWNPSAPDKLLSHSNLANSTRNVRFDRFDVRNELIMLGDQAAALLPEIRDAFARWQREGWKIKHPVTGKELTYPVHAKTFGEFFCDGPAGKPDETSFEAFLNQREKAGLHRGSFEEWMAALGQKTPSFDNRILNDCTLIPRFHVCKVDLKLETAKHGEITGKILSESLLASEVTLLLKLKNLLISDPVNGQRKLTVEEVRDVFAYAQRQLKALNLIAADGDLIKGWPEKVADRFALNNSDWEKIAAEAEFFRKMSAFNLSQGGENRRLTEVEIYSLLRAAADSKRKLEHELPDNLKTLFKAAKAEWKKAKVVADTTMLRPLTNHEIVKAPKTSGRSGYSRVALRIIKELILSGQAPSVFHARLLRRESKLLGKLGASPAKPLCLFADSTATSEEQRKKEDTENRKRGLLESELNFLLQMRKDDATEDSWKDISPPSQTIDALQQRHTKGNKLDADAAISELLGSINDPIVRHRLEVFDKRLKKFELGDVKESIPAFGVPDAIVLEFVREDFMGEKAKRELKDFQDKREAARKKAREKATAAGSEEKSAALKFELCEAQGFICLYCGQPFATTKLNECRIEHIVPTAQGGPDAMVNYVAAHDECNEAKGKQTPFQWWHHNTSGKAPTISWDGYKALVDKYATTLRNKKVQLLTREDAVELVGRYTALAETAWVSKLAQTIANLRFNWTNGYDQNRKKRVIVISGGVTARVRRKYGLDKLLYNKDTDAEVFAKKLKNRADKRHHALDAMVLTFVPQWARDPGKEGFFRFPAEFRDANGREDYEQIRKLFGDSIAKVMPRYLTYERPVLRDRAYGQRDNKTMMVQRTPLRELAYKPVQQKLVYDLTYAVDQIKDVRDERIKQELQKFIAASPEEPAWNVFCDRLGKGELESLPGIKVSKVSQNLNGDLSEYKDMSKDGCGAFRRRKERHRGQFVYLDEKGKPRVEVVRVFDSIAKVKTELGAKGQGIKIIGFFQSDCLVKIGKPVAHGTITLAPGTYQLNKIVKEGQGRVQVTSAGGEKSPAISLSKFLEAGFERVD

SEQ ID NO: 279 - protein, 1053 aa, unidentified
  REGION 1..1053: note = Description of Unknown: uncultivated organism
  REGION 1..1053: note = MG1-284 effector
MKFNISTNTDPFLTGLVFGFDVGTGSIGYAVRRGSTFLPDGVGVLICDSEGSKLDERRNFRRQRRTLRSKKFRRQWFAKELVKLGLPKPTKEQLKRANNETNEQFDQRTNPVSLRVRALNEPLEKWQLFIALTHLFKRRGYEKDVPWANKEKDTKANKENDAEEWGSGTVPPEKVQSEFDASGCKYPCEFLARNPKHQRRRVWPRVLLENEFHAIAKAQTENKNFPQLTEKTNWLLYGETKEVKGHHVYFKTTEAQNPGVLGLRWPRFDNRGPALDSLQPLDEQGRPLHVVRKNKETFRKAQWELALINFRVIDRATGNLVRPDDKSLTRLREIWESGKRKKKKESGSNAAESEIIKISEPVLKRWAKDFAGQYKLVDGQQPLTPQTGAGRARYSSPTLERIIAGEQFNPPQPLLRRKNESAEQALNRYMADIKHPLVRHRLTLFQKLLQQLVSRFGEPDMIVLEAIRSLAMGEKKRREHIQRIKENRDERESIRTELKKDNFSSSKNSILRYRLFKEAKGRCPFCLCPFCLQEVVYKEAEIEHIVPRSRVDCNEFYNLTVAHQECNKKKDSRTPWEAYGTTKDWEALRKNAEDCFGLGSLKYRLFTNPDAQNLVEEKSDLQHTAYIARVIRQVSLIQLGWLAEDGRDATGLKDPEMTAWRFQVTNGSLTSRLRKSWGLNQILNPFPSKDAWEAMTPEEQEKKKTEMQEKNRGDLRHHSLDAMVIACTLPWLAHRTHGAKDSFGRPGWWWLDEKKRSQASTPIFPKEGQMHEVVKKEIEKVLVRHHVSRSNHQQSYATTLYAKKAENKYVAREVFTSLTPKNLGNIWPDKFALYCEAAWRRYSDESANLEGELKKTKGNVPASFTNKLCFAHFQKWRADDCPEFYWPKEIKIPIRSVRLISVKDDTAVVPFSPGTHAYVKRTGFKEVQVFLAEDEKSFVPAFIPHWKSDKPICEKPIKADRKPIAVIRRGELVKLLKPTGPKNPPGAYRVSTTMQDNIQLIPAHIAKDKDALLASGFLANGVTISWKSFFAAVGYELPHPPSVKSQPPGAAEA

SEQ ID NO: 280 - protein, 1065 aa, unidentified
  REGION 1..1065: note = Description of Unknown: uncultivated organism with predicted taxonomy: Verrucomicrobia
  REGION 1..1065: note = MG1-285 effector
MITYELKKVALQNQTDEIVWAFDLGKGSIGEAVRRGNEFLHKASLLIPAEFAETRTARDRRRMFRTREAHKAREKWLCKVMHEAGIEILHGRNYDAAGNWKLGEPAEKRLEQEFPAPGDDTCYTSCLLRIKLLRGEKLEPWQVFKAFHSAIQRRGYDKDIPWKTRESRNPKAKDGDDDDAGTEKRMHDFELALEKMAPGKTAFHFPAYFDAHEMGLWSPDKPDGLKLRSDCHAKTTRNQIVPRKLVEAEIRQMVEGAAKHYPALADKADYLLYGIAQQSYASYKPELRQKFKLREGGATDWQGVVGQKIPRFENRIIAKCALIPRLNVCKLREGEKGQPHEKSLVAVEVAFLMKLKNLRVQRPGGNGWLSAEEIRGILEDPKRKDWKITESVWRKYCVRIGAGWLLGHEEVKSPRFSGRSRFCRPALEVLKRLILSGQKPSKFLQEEIVRLNGNKDPLKGLVEADLKFIGDMAAKNDAWEGIYIPNQQLDALVELSSDSAEAITTLIGRQNDPIVRHRLSVFYKGLRELEQTTKSRPDQVVLEFVREDFMGKKAKIEYFSFIKRRAEERIKAREEAANAGATEKSAGLKLELLRAQDGCCLYTNEGLVPSRLDEYQIDHIVPRSKGGPDAVVNYALTTQKANEAKADRTPYDWFHQEMPDKWDAYVNRVRSRATHLRNKKVQLLVALNAAELADKYTALAETAWIAKLAQAIVGLHFGWRNGVDESGNKRVTVISGGLTGRIRRKYALNQILNPNAKTEEEAEKKNRDDDRHHALDAMVISFIPSWVRDAMKEKFFRFPEPIHQNAKGFFEKEIQSVKPRNIALQKAAFEETIYGQRTIDGHKFIVGRESLASLAIKTTQNSQTIKKVSDIEFGRIVDARIQKDVKEFWESNPAATLESWKKWCADYRLGANGPLVNFVLVKKSKEDAVEEYKNVSKAGVSSERGQYKRGAKHRGYYIYERPAPTRKEPNKMQVEVCPVFVFQSKKAVQENLLKQTGIKMHGYFESGCQVRTQREWEFQGKKYPADEFILGSVWANRNAKFRHPIHQEIGPVGLRILLDAGFERI

SEQ ID NO: 281 - protein, 1294 aa, unidentified; identical to SEQ ID NO: 16
  REGION 1..1294: note = Description of Unknown: uncultivated organism with predicted taxonomy: Verrucomicrobia
  REGION 1..1294: note = MG1-287 effector

SEQ ID NO: 282 - protein, 1294 aa, unidentified; identical to SEQ ID NO: 16
  REGION 1..1294: note = Description of Unknown: uncultivated organism
  REGION 1..1294: note = MG1-288 effector

SEQ ID NO: 283 - protein, 808 aa, unidentified
  REGION 1..808: note = Description of Unknown: uncultivated organism with predicted taxonomy: Pedosphaera sp. Tous-C6FEB
  REGION 1..808: note = MG1-289 effector
VGNTQEHVWAFDLGKGSIGEAVRQGNDFKHKESLLIPHELARRGPAAVSGTPANKYRAKKTREAHLERERWLDTIWKVAGLTPLQARAVWENPETQKWELKHKGDYRLEREFAPKQFKKGAGGELVPIKYPNGKATDGAPAEKKADFETCYTSALLRIRLLQGDPSLKDWQIFKALRAALQSRGYGPVPWATKEARKQGRTPEELAREEEKKLQSADPRYREAVNKWQAFKDSVPKAFHFPCYFDAWKLGLWLHAKPDELGCRINHLAESTRNIRFDRADVRVELIRLGDQAAEILPALKKAFSDWQSGGWKYQHPVTGEKLTYPLRAKTFGEFLCDGPAGTPDESSFEAFLDQRHKAGLNRGSFEEWMAALGQKTPSFDNRILNNCVLIPRFHVCKMDVRLVMDEQGKLTGQIVTESLLATEVTLLLKLKNILVADPSAKDGQRKLTVGEVQDILAYAHRRLAELELVAADGTLLNLWPSKVAQRFSISKSSWRDVAVEAEFLRRMTASNIVVGSETRRLTIAEASSLLRAIANPKKGLEAQLPKDLQLLTKTAKSEFKKAKTASDEKTLRPMPGHEEVKAPKSSGRCGYSRVALRILKELILSGQAPSAFHSRLRELDTELLRKLGSSPEKPLVLIDDSKSQDQEQRKKENIENGKRGLLVSELNFLRQMRKERATEDSWENLFIPSQTIDALQQRHTQDGKLDSQSAIRELLGTINDPIVRHRLGVLAERLRKLQCGDEKRDSPGFGVPDAIVLEFVREDFMGEEAKREYQNFINEREKDRKAAREEAGKLGFDSRSSGLRYELW

SEQ ID NO: 284 - protein, 1048 aa, unidentified
  REGION 1..1048: note = Description of Unknown: uncultivated organism with predicted taxonomy: Deltaproteobacteria bacterium RIFOXYA12_FULL_61_11
  REGION 1..1048: note = MG1-290 effector
MTETSVLNERFHHGLVIGLDVGTAGLGWAVRRGPDLLDLGVLVVPEKVGNLEERRTLRRMRRTIRSRRQRMQQLRAMLTEVGLPSPGANAELDSPAVLRLQALNGEPLRPEELHAALFHLWKHRGWLDAWWKKKTVERTADDEPELTAEQKTAQKEAKETAARIAGLLAAMKDRGCRFACHYLALKEGRWDRTMGCLPRPKPGQAIAPEGHKNLIFPRELLREEFLAIVEAQRERWPTLYVARERILYGAWGEDSHHPAPEAAGRQHRLHGGVWHQRQARFDNRKPGKCVACGVNNVCRADAPEFAEAQRAIVLGNYRVFSAVQGKAVPVGQAALPELADILAKHQAGLKELRALAKTGGYTPLEPGIKKKDQARDLLVQQWADRNGYELLPGQQLTARKLSDGRCAFCRPCLRAVRYEYERTGTIRTFQPLLRRPGESLASARARYVRELRNPLVRQRVEALDRLLDRLERDHGSPAVIVVEAVRSLGLGKKANDDLKKKQATQREEREAARQEAAEHHAAGSQAVLRFRLAKEVGKVCPYCHQPFHADLADAEIEHILPRALGGSDQQVNLTVAHTHCNHEKHDQLPHAAWGEADRWPCLERFAREHFKGLKLQLFLHQGNPEEALALLAPPADLTQTAYIARALRGLCLLRQNWLTPEGRDPSDQPGGPGQFFQLTNGYLTAGIRRCWGLDELLPSALDDEGGKNRHDLRHHALDAAVIACTLPWAAHQPLSRGGWREAPPFGSARREQWRTPFDHLRSQIRARVPDIVPTQKVGTSAKQKMMNTTAYGPRPQRDRKGKETTVLVTRVPLVQLKEKQLNDIYPQVLMRYIAAALSEFRRTHGDEHAFQQKAPNTGKLSPAFVATLHNPGTGRPIHKVHVLGKDPAACREVRPNVFVEYTDATAYLVYPDPKKGRTWAVYLVKPWEKLGQLRASFPTPVYVFQKKQLIEFPREVVVSATNKAQAGKYRFMSCNKNGNVRLCPAHIVQGKEGFLSAGLPYYGFELHIRHLMEALGYGASPPPPAEAGVAAHPRPEPPHPQRRRGRRA

SEQ ID NO: 285 - protein, 932 aa, unidentified
  REGION 1..932: note = Description of Unknown: uncultivated organism with predicted taxonomy: Candidatus Termititenax aidoneus
  REGION 1..932: note = MG1-291 effector
ERLLREFPKDGDNTIYTSCLLRIALLQGKKLDGWQIYKAVWSAIQHRGYDKNLPWITRIKRNIEEENEDDSGAKNESTMDEKENIEGVGNYYKYLKDNFGDNKEFWYPCYYEAHKIGIWSPANLNDLSVKIGTNPNSARNKGKDKNYAVIPRELIKKELEELLKKAAEQFHKIKGKEKYIIYGLAEKEYASYIDKTFYKYRGKNWEWQGLLGQKVPRFDNRIISKCALIPRLNVCKAGDQLNKEVTFLMKLKNTKYVSHAGEELSFTSEQINKLFEKYKEKAYITKTQLEKWIKTELNGYSHPVHIKIDKSKTSGRSRFCRPALLIIKEIILSGKSPHDIYKEKITNNIITDSNKGLINGDYYFLLNMPKEWEKFWIPDKRENFSKISENKRIEEIETTIGEINNPIVRHRLNIFCDRLKKLKQKFSEPKKIVIEFIREDFMGDKKRREYIKIMNQRRKAKDEAFNEIKDLVKGKQSLIKQLLLKEQGCKDIYSYETLIPSQLNDYEIDHIVPRSKGGSDAMYNKVLTKASNNQEKGNRIPFEWLSADKEKWNMFYKNVESFRLNWKKKELLLAKDPTLLIEKYTTLAETAYITKLTQKIAHLFFGWDWQTKGSHRKIIVQSGGYTSKIRKIFKLNALLYPEKTGDEIREIVETGKNRDNKRHHALDALVLSITPEIKYDEKKDADVYPVWFNPEYCKNALDKVNPTYIDFEKPVLAETIYGKRTVNENGEKKEYFISKMKTGLEKEWYLDVINAKKYSKDIFDSRINKDFTREIEKNPTQEEWEKFVNIYFKNNRPKKLSLIQSDSPEIFKEINSIKGQYFTDKREHQGQLVYKNEKKWKVEPVFVYESLYLKRKEYEKKYGKVYFFNSLCQVKTNKDISFGRSNQLLSKGFYILRTITEGGQVKLESNNGLEFVIALSILMEEAQMERVD

SEQ ID NO: 286 - protein, 983 aa, unidentified
  REGION 1..983: note = Description of Unknown: uncultivated organism with predicted taxonomy: Candidatus Termititenax aidoneus
  REGION 1..983: note = MG1-292 effector
ERLLREFPKDGDNTIYTSCLLRIALLQGKKLDGWQIYKAVWSAIQHRGYDEKNHWKNDDDSAENKKNVNEYIKYCKDNKFEEKYWLPCYVDAHRMGIWSPEDSNNLYRKRNNETNPAPARNKNHSKYHLVFPRSKVEEELKHLLSQAAKLFPKLAGKENYIVYGPGEVQYASMKKMEFSKYRGKEWDWQGLLGQKIPRFDNRMLNKCCCMSHFNVCRADDMLNQEVMFLMMLKNMRYHSKNKPDEMLTAEQIKELFNKFKDRLKFEKNEKDKVKNRKKEVIPKSLLRKWVIEKLNGEIHPAHSLIPMPNAGGRSRYCRPALEVIREVILSGKTPKQVYEECVAKNKIENPEQNSKKGRIQSDFDFLIKKGTSEKWENFYISDNRYELREMSADERKIEIEKTLNEINNPIVSHRLKWFKKELNKLAFGEPEKKNPGYGIPEKVVLEFARDEFMGKQAKEDYYKFIKEQTKERKIVVEELEKAGFSKPSGEMIRKMMLFRQQDGIDFYSMQNIKLSHLGEYEIDHVIPRSRGGSDAFYNIILTTNKNNSAKGDKTPYEWLGKGDIWDNISEKLKVNKKMGSKKKLLFMASSEEQYKLLIDKYTQLSQTAYISKLAQKVTALTFGWGMQTKDDNRNIVIATGGQTARIRSRFKLDRLLHSGMTDEEFEKALRNGEIEKKNRSNPRHHALDALVLSAVPEIRVDKNRKGKYDDIYPSWLTRDFCEKEVAHVYPKQIKFSKAQLAEVLYGKREVKKEDGLWYTYAITRQNEGTRIEDYYVKKSEKKSDIEDMEKLRNKILKKVNHIFSNDIRTDFKKKLEEKPTEEQWNDFIKNYKVNGTCPHRISVIGNPGVKGFKEKQPLPPNYKEIRPNSKQYYETKTGQKWSYTAQLICLNEKDEWEVHPVYAWDSLYERIKKAEQEFKKVVKFHSRQSVEIKNDCANGKIKKGIYILATIQNGNWGVLESQGEKIDASLNELMNIGEMWPII

SEQ ID NO: 287 - protein, 983 aa, unidentified; identical to SEQ ID NO: 286
  REGION 1..983: note = Description of Unknown: uncultivated organism with predicted taxonomy: Elusimicrobia bacterium HGW-Elusimicrobia-1
  REGION 1..983: note = MG1-293 effector

SEQ ID NO: 288 - protein, 1033 aa, unidentified
  REGION 1..1033: note = Description of Unknown: uncultivated organism with predicted taxonomy: Endomicrobium proavitum
  REGION 1..1033: note = MG1-294 effector
MADEKLIYSFDLGSGSLGICVREGSNIKYLDSLLIDSEYASIKEVANRRRQIRTRLAHKARESWWIQQAQSAGIEVLSTKQPNKNNPNDKADVKMLKQFDKNDNQTIYSSLLLRIALLQGKKLEGWQIFKAVWSAMQRRGYEKVPWANDSDAEKNSKAVTEYEKKLENLFGDKKEYYYPCYYEAYIQGIWSPSEPSNFSKKLSNNPEPIRNKDKENMIVPNRELVYKELKDLLTQAAKQYPKLKGKEDFIIYGPSEEKNASYNNPKYKKYRGTNWDWQGLLGQKIPRFDNRIISKCKLIPRLNVCKANKKLNKEVTFLLMLKNMRFTKDGVTSCSLNHEQIRKLFETYKDNFSTKESRTNKALINSKKWKNYLEEIGAEANPNQKDIPQPKLCGRSKFCRPALNILHSLILSGKNPHDYYKELISVNNNTNPQKGLIKDDYKFLLNMPNDWNSISIQDTREEDKNLNEEERLYKIDRIISATQNRIARHRLLVLFEYLQKLKKQYGEPEKIVFEIAREDFAGEEKRKEYIDTQNKNTKNIELAVKLLKEANKQLNNRNILKARLLIEQNNVDLYEIDEHRKISITNIDDYEIDHIIPRSRGGSDSFSNFVITSINNNQTKLNRTPYEWFHQDKSFDAWNTYIKNIEGIKGLSKHKIKLLISDKAIELENKKTDLQATSQIEKEAQTIASLLFGWGINTKGDKKKILFFTGGNTADVRKNLNLNRLLHPALSDEEYNELKKKKDFKDKNRKNTKHHALDALVLSVLPEITMDKKSIENKPEFFNIKFCEEQLKKVYPIIIKQTKPKLRETIYSLKCRKENGKNLYYFVSRFEKNISMFKILSDAKKQVEKIFSLQIQKDFNDKLNDKNLTQEKWEKFLDEYTLNGRKIKKVSMIDSKSFKENDVFDINGNIKKIIGEYGQNKINGQWIKAKESHQGQIAFKENNKWKIVPIYVFESKYLKLKQYKEKYNDILFFKTGDLVELTKNYDEVKAGIYKLRTLKSSGTTKLTSLDTYEDIEKTISMFIEKCGMKLYKK

SEQ ID NO: 289 - protein, 1049 aa, unidentified
  REGION 1..1049: note = Description of Unknown: uncultivated organism with predicted taxonomy: Verrucomicrobia bacterium 12-59-8
  REGION 1..1049: note = MG1-295 effector
RLRMSEKSERLVFAFDVGTGSLGLAARRGNTMLEARSLLLDENYGKRDEQRKIIRAFRTRKAHLAREKYLQAVCEEVGIPVLKGRENSKKGDPRLEREFPRQGDSTVYNSALLRIMLLQGKKLEPWQVYKALHSAIQRRGFDKSVPWKNRPSNRKDSEEEDSKTAESASAYRQELIAAVGEDTQYQYPCYFAAYKMGLWDPKTHQLKQRINHHADTVRNYIIPRDLVVKELVDLLKAASRQFPRLEGREMRIIYGPSARAYASYYPDARAEYGLKEGGENDWQGLLGQKIPRFDNRLPAPCALIPRFNVARSNDIAIYEATFLMKLKNIRFYRDHLQNKDFNESSLTVEEIHQLLKEARQRAKEARQNGETEEHIAAAYSLNKTEWKKWLKKNCHAPISTHPCIEAPSSTGRSRYSRPAARLIRELVLSGQSPADFYKEAQDLCGKKGTPYYKLSKDDLVFLRYIKGEWQNIYIPVLPLSGDWSGKSTEMDLIREQIKKLIGAQRNVLVVHRIGLFYEQLERMISLYGVPDEIIMEFIREDFMGEEAKKKLQKFQNENRKAWDQARSQARELNLSGGGNVRKLRMLREQNFICPYTGDTLSENEVDTLEVEHIVPRARGGSDNQYNKVVTRTRTNREKGDHTPYEWLTQKEEFAAFCERVEKMGLSRKKKEILTAKDPFTLDQKWDSLAETAYIARVARDVAALRCGWQPGEAGEKRHIHIINGANTAKVRGLYHLNSLLASDQGGLEPDKFMKKVRENKKHHALDAMVLSFIREWIRNPKTRQYEFPAGIDREYFRKCLENVVPYNCILPKASLQETFYGTRLLEGSAGGKTVVVRTKITELGVTFNKFDQKKALKEAASIIDPFLKESIISALESRDFKLNEWQEWCQNFRHPRTEARVLKVQITAQKPDTKEYVNMAKEGEEDGFRGQYKLGAQHQGYFVYLEKDKKGNDIPKVRPVYAFHSHRKVEKELRAQGCDVIGFFQSQCLVEFKNDYEHGNIVIPAGKYILSTILSDGRFKLEGINDIPCPLKKIQDIRHSFRRVDGPDQ

SEQ ID NO: 290 - protein, 1089 aa, unidentified
  REGION 1..1089: note = Description of Unknown: uncultivated organism
  REGION 1..1089: note = MG1-296 effector
MNKIFSFDLGSGSIGECVREGKNILHLNSLLIDNDFASLAEVRKNRRAFRTRIAHKSREDWWRHCAKIGKLEILSTEQPSVKNPYAKPDKRMLTEFSKEGDNTIYTSCLLRIALLQGQKLESWQIYKAVWSALQHRGYDANVPWAKNIREIQKKKKEELTAKEKELLKDLEEENKASKLYSEKISVLPQEYQFPCYFEAYTLGLWNPNNPNNFIRNINCSTKNIRNKENREQIIIPRSFIQKELRQMLDNARKQYPNLPETDFILYGTPKKEYASYYKPAENKKYEREGILGQKIPRFDNRMISKCCCMPRFNVCKANDELSIEVRFLLALLNMRFTKGNTTTAQLSPEELKQIFEKYKGNLSNIKNDNVLVIKQAEWKKEIENKIGGKVNENQKAIPHPNTTGRTKYCRPALEVLKDLILSGKNPHDFYEEQIAKLNNTDPMKGIVKEDLSFLKLMPNKWEKIYIPDQREENKQLSFEEAQVKIEDIIKNITNAVVKHRLTMFYRRLTALTQQYGMPNKVVLELAREEFLGEDKRAQYIKTQNENRKDKDLAKEELMTVIKSADPSYQTKLLKVRLLREQHYKDVYDLTENCALSIQDIDDYDIDHIVPISCGGADSMVNKVLTKKELNETKKQNQTPYEMYFQNASAETWAKYLEHLKDVYGKNISKHLEKKYELLTSDKAIEIESKRNDLQATMYIEKYAQKITALFFGWGEQTKGDERHIFVCNGGLTAKLRKENGLDRLLWSEEEFYKLMASGKLDEKNRENKKHHALDALVISFADDLRTDPKTGRKLFPEFAQNNPAFFSEAMDKVFPKQLRKKAPPLRETIYALRCRKEKGVDKYYMVSRFNTELKTNFGDLKEASKQIDKIFDYQIKKDLQAKLADKPTKEEWLNFLENYKLLGKTPVYKVAMIASKAFSKEEVFDENGNKRHVIGEYKEMGKMKGQYLMPKEGNKGQIIFKQGKKWKVTPIYPFDSVTVKLKAAKQKYGKALFWSSGDTLILQNDIEGSEIYKEETKELVEYKNKKGKILTREKISSKEKTRPATLPKGKYKLNTLKTEGRIIITNLSSSKKYVTNLNIFIEGKVYKEK

SEQ ID NO: 291 - protein, 969 aa, unidentified
  REGION 1..969: note = Description of Unknown: uncultivated organism with predicted taxonomy: Verrucomicrobia bacterium 12-59-8
  REGION 1..969: note = MG1-297 effector
MSEKSERLVFAFDVGTGSLGLAARRGNTMLEARSLLLDENYGKRDEQRKIIRAFRTRKAHLAREKYLQAVCEEVGIPVLKGRENSKKGDPRLEREFPRQGDSTVYNSALLRIMLLQGKKLEPWQVYKALHSAIQRRGFDKSVPWKNRPSNRKDSEEEDSKTAESASAYRQELIAAVGEDTQYQYPCYFAAYKMGLWDPKTHQLKQRINHHADTVRNYIIPRDLVVKELVDLLKAASRQFPRLEGREMRIIYGPSARAYASYYPDARAEYGLKEGGENDWQGLLGQKIPRFDNRLPAPCALIPRFNVARSNDIAIYEATFLMKLKNIRFYRDHLQNKDFNESSLTVAEIHQLLKEARQRAKEARQNGETEEHIAAAYSLNKTEWKKWLKKNCHAPISTHPCIEAPSTTGRSRYSRPAARLIRELVLSGQSPADFYKEAQDLCGKKGTPYYKLSKDDLVFLRYIKGEWQNIYIPVLPLSGDWSGKSTEMDLIREQIKKLIGAQRNVLVVHRIGLFYEQLERMISLYGVPDEIIMEFIREDFMGEEAKEKPKKFQNENRKAWDQARSQARELNLSGGGNVRKLRMLREQNFICPYTGDTLSENEVDTLEVEHIVPRARGGSDNQYNKVVTRSQTNREKGDHTPYEWLTQKGEFAAFCERVEKMGLSRKKKEILTAKDPFTLDQKWDSLAETAYIARVARDVAALRCGWQPGEAGEKRHIHIINGANTAKVRGLYHLNSLLASDQGGLEPDKFMKKVRENKKHHALDAMVLSFIREWIRNPKTRQYEFPAGIDREYFRKCLENVVPYNCILPKALLAETFYGTRELNGKDGGKTVVIRTKIMELGVTFNKFDQMKALREASSIIDPFLRDAVSTALKSRDFKINEWQEWCRNFRHPRTGARVLKVQITAQKPDTKEYVNMAKEGEEDGFRGQYKLGDQHQGYFIYLEKDKKENDVPKVRPVYAFHSRRKVEEE

SEQ ID NO: 292 - protein, 1045 aa, unidentified
  REGION 1..1045: note = Description of Unknown: uncultivated organism
  REGION 1..1045: note = MG1-298 effector
MTKIFAFDLGSGSIGECVREEGKSPIHLNSLLIDSDFASLDLIRAQRRAFRTRLAHKARESWWIQIAQEAGLPIPAADIKKDKFGHYVFTADEKMLREFPKTNDETVYNSALLRIALIEGKKLEGWQIFKAVWSAFQHRGYETNNWKDEELSEEEKKAEQEEQKASELYKEKLSVLPKEYQLPCYYEAYKMGLLNPQTKQIVTRLKTSTGNARNKDGRGEQIIAPRNIVEKELRLLLKQAKKQYAALPDTEYILYGTNRKAHAGLKDHSARKFESEGLLGQKTPRFDNRIIAKCSLIPRLNVCKSKEPLSREVRFLLALKNFRFIKNGQVSAFDFEEINELFNMYKGRLLDKVHANYIDKRDIKNYLKSKQYEIFSEDVIPMPKDGGRSRFCRPALRILKELILSGKNPHDFYRESTENITNTDTTKGLVKEDYKFLLAMPNDWYKIHIPDFREEDKNLSQEERLAKIDNLLNSITNAVVRHRLIMLMHRIEYLHKIYGVPDYCIMEIGRDEFLSEEEKADLNRANKERQKNNKKAYEELKKYGLEISHDNMEKYKLCESQKWTDIYNVFDDKKKISPEDLPNYDIDHIVPVSSGGADSLANKVVTARHLNQSQKSNKTPYQWLFEDKIKWADFLENIKNAGIDKNSKKYLFLTAKDAVSQAKSLNDLQATRYIEKLAQKLISLYFGWGEQTTGDKRKMFVCTGGLTAKIRSQYGLNRLLHKDLSGEEFKKIVAEGKLDEKNRNNKRHHALDALVISFTRDIKYDNKGKPVLPDYACNPAFFADAIEKVFPVTIRSKKPALRETVYALRARQEGKELKYYMVSRFNTRIDELFKKISDAKDNVKKIFDLSVKKAFEDKLNTNPSQEEWEQFLKDFRVSGNPVYKISMINSKGFKKQDVLNPDGSFKNPIGEYRAMGKVKGQYLMPKEGNKGQIIYNNGRKWVVEQIYPFDSIVKKLKAAKEKYGKVLFWNTGITLCLPNTIKGSLITKDENKKQQSIPTDVKVSKYKLNTIKGTTVIITDLSSGLKYSASLTTLIEEGKAYKERS

SEQ ID NO: 293 - protein, 1097 aa, unidentified
  REGION 1..1097: note = Description of Unknown: uncultivated organism
  REGION 1..1097: note = MG1-299 effector
MNSTETVFAFDCGLASLGEAVRQGQSFPLVESWLIPDKFAETKSAAMRRRMMTTRDAHKERELWLLKTFEDLGIEVLRGKEVSKTPAGWSVTRKADPRLTREFPKPGDDTCYTSCLLRIKLLRGEKLAPWQIYKAIRSAIQKRGYDPDIPWKNREEKQQKKEEESAAVLFDETLLRKTVGDHPDWLYPCFLDAFRMGLWSPANPTQLGTRIDHKAQSTRKTIMLRALVEKELRDLLHQAAQQLPALAGKEEFVLYGPNGKYSSSSVRAGALAQKVPRFDNRIIDKCALIPRLNVCKVRMEGTHPHPASQIIFEITFLQKLKNMRVQGSSGIRGLAPAEIALAAFSQKNSLPSKAWAAFCEERGLYPAPAFKKLAFKDVAPVLPPEVFRSALLEKLASVSVLDSGKRVRNLTDDERSALLALMQKPRDSFSFTSSQWANFCEDLGASPLPGHEEIKPPKAAGRARFCRPAAHILKRLILSGQAPATFHAAEILNLGGSADPRKGLVAADLDFLLNMGDSWDAIRIPDGKLDAIACQYTDADEAIRKLIGSQNNPVVRHRLGVFAQRLRELERRFGVPDQVVLEFVREDFMGDKARMELKKFQNDRAKARAEARERVAELGISEKNSLRYELWKAQGGRCLYTDDPLAETELDNYHVDHIVPRAKGGPDSRLNYVLTLNQTNDDKDDRTPFEWLSCNPARWLAYVNRVESRLKAADGISRKTAQLLTLPNAVELAEKYTALAETAWISRLAQKIADLSFGWKNGIDAAGRKRTVVVSGGLTARIRRKYGLNRILNPGASSEEEAEKKNRSDKRHHALDAMTISFIPQWARDPGKTGFFRFPKAIRDNPLPFFQARIDAVVPRQLCYEKAPLAETIYGLRKTPEGNQVVKRTDLRDLAYQTVNMKTVFNIDSAVKNGIPKILDERIQSALLEFARLKPTEEEWNRFVADFTPFGSRVRRVRLVETALPPDTMGEFKNMSKDGTAMLRKPLKANKGQYVFTEPDGKIKVRPVYSFESPFQVRTLLLAEEPGRVIQGFYQTGCLVSLERDVEAGKHKIPKGVYRLSTIRADAFVGIFNTHGNLLGPVGIQHLLRSGFRRIDG

SEQ ID NO: 294 - protein, 1059 aa, unidentified
  REGION 1..1059: note = Description of Unknown: uncultivated organism
  REGION 1..1059: note = MG1-300 effector
MRPTESVFAFDCGLASLGEAVRQDLAFPHVESWLIPEDFAETKSAAGRRRMLVTRQAHKEREAWLRMTFQDLGIETLNGKEVAKTPQGWQEVKKADERLTREFPKPGDDTCYTSCLLRIKLLRGEKLAPWQIFKAIRSAIQKRGYDPDIPWKNRETEKKEEDKEKPAVTYDAETLQKIIGSNESWLYPCYFEAHQMGLWSPERPDHLEARITHMAGSTRKTVMFRSLVEKEVRALLQAAALQIPALKGKEESILYGPDGKYSSSSVREGVLSQKVPRFDNRIIDKCALIPRMNVCKIRMDGTKPHPASRVIFEVTFLQKLKNMRVQSAAGIRGLTHEEIELATVLQKNSAAPKAWAEFCDSRGLTPSPSCKKLVFKETTPTLPPDQFRAAILEKLKSVSVMDGQKMIRDLTGDETLAALELFQKPRESLGFTAAQWTSFCEDLGVSSIPGHEEVKPPKASGRARFCRPAAFILKRLILSGQSPKDLHVAEIKSLNGNTEPNKGLVPSDLDFLLKMGDSWVNIHIPDGKLDAISQQSGSPDEAIRKLIGSQNNPVVRHRLSVFAQRLLSLASRFGTPDHVVLEFVREDFMGEEAKKRYLKFMNDRAKSRAEAREKVAALGISDKNILRYELWKSQGCRCLYTDLPLEETKLDDYKVDHIVPRAQGGPDSRLNYALTHNATNDEKDDRTPYEWLSGDSVKWQAYLNRVNARLKAADGISRKTAQLLTLPNAAELAEKYTALAETAWISRLSQKIIDLTFGWSNGVDASGRKRSIIVSGGLTARIRRKYHLNHILNPDAETDEEAEKKNRKDKRHHALDAMTISFIPQWARDPDKTGFFRLPKEIRDNPLPFFAKRIDTVIPRQLCFEKSPLAETIYGTRSEDGVVQVVKRSDLRDLAYKTENMKTTFNMEFAKEKSIPRIVDERIRNALLHLVEKDLSEEEWNHAITQFAPFGSIVRRVKLIETTLSPGSMGEFKNMSKDGTPMLRKPKKANKGQFVYLEENGEIEVRPVYPFESTHQIKREILSGRKGRSIQGFYQTGCLVELTSEVRSGNTVIPPGVYR

SEQ ID NO: 295 - protein, 1098 aa, unidentified
  REGION 1..1098: note = Description of Unknown: uncultivated organism
  REGION 1..1098: note = MG1-301 effector
MKSKETVFAFDCGVASLGEAVRQGLDFPQVESWLIPDTFAETKTAAMRRRMMTTRDAHKEREMWLLNTFRDLGIEVLRGKEVSKTSAGWAVTRKADPRLTREFPKPGDDTCYTSCLLRIKLLRGEKLAPWQIYKAIRSATQKRGYDPDIPWKNREEKNQKKEEEETAAILFDEKLLRKTVGDNPDWLYPCYLDAFRMGLWNPARPNQLETRINHKAQSTRKTVMLRALVEKELRDLLRQAALQLPALAGREEFILYGPDGKYSSSSVRAGALSQKVPRFDNRIIDKCALIPRLNVCKIRMEGNHPHPASQIIFEITFLQKLKNMRVQGASDIRGLTPAEIALAAFSQKNALTPKVWASFCEDRGLHPAPAYKKLAFKDVSPVLPPETFRTALIEKLNAVSILDSNKRIRNLTEEEHAALLALFQKPRDSFSFSATQWSNFCEDLGVSPLPGHEEVKPPKAAGRARFCRPAAQILKRLILSGQAPAAFHAAEIHNLNGNVDPRKGLVASDLDFLLNMGDSWDAIRIPDGKLDAIANQCSSADEAIRKLIGSQNNPVVRHRLGVFSQRLRQLERRFGAPDHVVLEFVREDFMGEKARMELRNFQNRRAKARAEARERVAELGISEKNSLRYELFKAQGGRCLYTDDPLAETELDNYRVDHIVPRAKGGPDSRLNYALTLNQTNDDKGDRTPYEWLSGNPVRWQAYLNRVEARLKTTDGISRKTAQLLTLPNAVELAEKYTALAETAWISRLAQKIADLTFGWQNGVDAAGRKRTIIVSGGLTARIRRKYGLNRLLNPDASSEEEAEKKNRSDKRHHALDAMTISFIPQWARDPDKTGFFRFPKEIRDNSLPFFKARIDAVVPRQLCYEKAPLAETIYGLRKTPKENQIVKRTDLRDLAYQTVNMKTVYNIDYAVKTSIPKIMDDRIKSALLEFAQSKPPEEDWNRFVAQFAPFGSLVRRVRLVETALPPDSMGEFKNMSKDGTPMLRKPLKANKGQYVFVEPDGKIKVRPVYSFESPFQVQAHLLADNAGRTIQGFYQTGCLVELAKDTEAGKHKIPKGVYRLSTIRADAYVGIFNTSGNLLGPIGIQHLLPSGFKRIDG

SEQ ID NO: 296 - protein, 1098 aa, unidentified
  REGION 1..1098: note = Description of Unknown: uncultivated organism
  REGION 1..1098: note = MG1-302 effector
MKTPETVFAFDCGLASLGEAVRQGLEFPQLESWLIPDTFAETQTAALRRRMMTTRAAHKERELWLQKTFEDLGLEVLYGKEVSKTPAGWAVTREADPRLTREFPKPGDETWYTSCLLRIKLLRGEKLAPWQIYKAIRSAIQKRGYDPDIPWKNREEKQQQKEDKETAAVLFDEKLLRQTVGDNPEWLYPCYLDASRMGLWNPARPDQLETRQDHKAQSTRKTVMLRALVEKELRDLLRQAARQLPVLAGKEEFILYGPNGKYSSSAVRAGVLAQKVPRFDNRIIDKCALIPRLNVCKIRMADNRPHPASQIIFEITFLQKLKNMRVQGSGGIRGLTPAEIALATFSQKNALPPKAWTAFCEERGLHPDPAHKKLAFQDISPVLPPEAFRSALAAKLNGISIMDSGKRVRNLTEEERAALLALFQQPRDSYSFTSSKWADFCEDIGVASLPGHEEVKPPKAAGRARFCRPAAQILKRLILSGQAPAAFHAAEIRALNGNADPRQGLVASDLDFLLNMGDSWDAIRIPDGKLDAIASRCADADEAIRKLIGSQNNPVVRHRLGVFAQRLRELKRRFGEPDHVVLEFVREDFMGDKARKELQKFQNDRAKARAEARERVAELGISEKNSLRYELWKAQGGRCLYNDDPLAETDLDNYHVDHIVPRAKGGPDSRLNYALTLNQTNDDKGDRTPYEWLSGNPVRWQAYLNRVEARLKAADGISRKTAQLLTLPNAAELAEKYTALAETAWISRLAQKIADLAFGWHNGVDAAGRKRTVVVSGGLTARIRRKYGLNRILNPNVATEEEAEKKNRADKRHHALDAMTISFIPQWARDPDKTGFFRLPREIRDNPWPFFQARIDAVVPRQLCYEKAPLAETIYGLRKTPEGDQVVKRTDLRELAYQTVNMKTVYNIDYAVKTSIPKILDERIQSPLLEFARTKPTEEDWNRFVSGFAPFGSLVRRVRLAETALPPDSMGEFKNMSKDGTPMLRKRLKANKGQYVLVEPDGKILVRPVYSFESPFQVRAQLLAEKAGRTIQGFYQTGCLVELEKEVEAGKRILPKGIYRLSTVLADGRAWLFSHEGPLLPRLSLKPLLSAGFKRIDS

SEQ ID NO: 297 - protein, 1098 aa, unidentified
  REGION 1..1098: note = Description of Unknown: uncultivated organism
  REGION 1..1098: note = MG1-303 effector
MKTPETVFAFDCGLASLGEAVRQGLEFPQLESWLIPDTFAETQTAALRRRMMTTRAAHKERELWLQKPFEDLGLEVLYGKEVSKTPAGWAVTREADPRLTREFPKPGDETWYTSCLLRIKLLRGEKLAPWQIYKAIRSAIQKRGYDPDIPWKNREEKQQQKEDKETAAVLFDEKLLRQTVGDNPEWLYPCYLDASRMGLWNPARPDQLETRQDHKAQSTRKTVMLRALVEKELRDLLRQAARQLPVLAGKEEFILYGPNGKYSSSAVRAGVLAQKVPRFDNRIIDKCALIPRLNVCKIRMADNRPHPASQIIFEITFLQKLKNMRVQGSGGIRGLTPAEIALATFSQKNALPPKAWTAFCEERGLHPDPAHKKLAFQDISPVLPPEAFRSALAAKLNGISIMDSGKRVRNLTEEERAALLALFQQPRDSYSFTSSKWADFCEDIGVASLPGHEEVKPPKAAGRARFCRPAAQILKRLILSGQAPAAFHAAEIRALNGNADPRQGLVASDLDFLLNMGDSWDAIRIPDGKLDAIASRCADADEAIRKLIGSQNNPVVRHRLGVFAQRLRELKRRFGEPDHVVLEFVREDFMGDKARKELQKFQNDRAKARAEARERVAELGISEKNSLRYELWKAQGGRCLYNDDPLAETDLDNYHVDHIVPRAKGGPDSRLNYALTLNQTNDDKGDRTPYEWLSGNPVRWQAYLNRVEARLKAADGISRKTAQLLTLPNAAELAEKYTALAETAWISRLAQKIADLAFGWHNGVDAAGRKRTVVVSGGLTARIRRKYGLNRILNPNVATEEEAEKKNRADKRHHALDAMTISFIPQWARDPDKTGFFRLPREIRDNPWPFFQARIDAVVPRQLCYEKAPLAETIYGLRKTPEGDQVVKRTDLRELAYQTVNMKTVYNIDYAVKTSIPKILDERIQSPLLEFARTKPTEEDWNRFVSGFAPFGSLVRRVRLAETALPPDSMGEFKNMSKDGTPMLRKRLKANKGQYVLVEPDGKILVRPVYSFESPFQVRAQLLAEKAGRTIQGFYQTGCLVELEKEVEAGKRILPKGIYRLSTVLADGRAWLFSHEGPLLPRLSLKPLLSAGFKRIDS

SEQ ID NO: 298 - protein, 941 aa, unidentified
  REGION 1..941: note = Description of Unknown: uncultivated organism with predicted taxonomy: Verrucomicrobia
  REGION 1..941: note = MG1-304 effector
VRNDKDNSLEGQKRTQVYQDILKRNEDRRETARKALRASSLPDSDEMVVRWLLYQEQGPFCIYSGQPIRCSELPNLQIEHIVPRALGGPDAYWNWVLCKTDQNVEKGNRVPYQWFHEEKKSGEWEDYRRRVRNRATWLGSRKVDLLLRADAKELVGEKYTALAATSWIARITQSIVRLHFGWQLDDEPGKEKVMTISGGLTARIRRKYLLDSLLGTDKESQKVCEQVDQVLAEMEKLKSQPRSEETKVQWRELSQKRSQLARDSEKNRGDQRHHALDAMLLTFLPNWARDRNKEDFLRLEDIGDNAPYTDEGKRNAEKITDEIKKLVEETKPIYKQIKTARKANDFGEVDRLKHSIFPQRKRMAELFQSRDRLKQPRNIHKVRNWFREQLGGDRPVLPRPAAFKKVNIEATLYRCAYLIRNQTEPRRIPLPMLGRRPDFADDTQELFDLKWLRTRIQSITDADYDRAKLKALLGDRLKAAMSACLTHGHQFGEADWLAIVESKEVRELFSGKGRGKSKALPESADCQVKVFKVEMLPVKRYPLADLAYATGKTDVWNPVYFEDSISKILRRDESQPRGSRGKRRFQQIRPAPELPQGIASRWKGFFLDTDTQQKLKELQGEVAKIAALLPGPKPKKGETEKQNWEAADEKFGEALEEFRKKHDLPRKLFLFTSESDPPPKSPKTSLKRILFEPKDRIFSASVLKGQAADVVDLHFGRSLECFAESLLLVPDEQQRENLWKEFCNVVCIPTKKALQEFVAQKESISAKQWIDFFKSQDGPRVDQAEQEIGTLNEYCDLSKDGTGQFAKAGGMGGKPSYEGYFICKCKTDERIQAFPIRFFESKKTVRDRLNRSGWEMLDNSIWRSGELLHLKNKAVTKPKKQSQKPKEISSGYFMLGSIQKGTGVNLNACLGGEIPKAISLKILWDCGLRRASEPPHPSANV

SEQ ID NO: 299 - protein, 917 aa, unidentified
  REGION 1..917: note = Description of Unknown: uncultivated organism with predicted taxonomy: Verrucomicrobia bacterium IMCC26134
  REGION 1..917: note = MG1-305 effector
VFAFDCGVASLGEAVRRGLEFPQVESWLIPETFAETKTAAMRRRMMKTREAHTEREVWLLKTFEDLGIEVLCGKEVSKTPAGWTVTRKADSRLTREFPKPGDDTCYTSCLLRIKLLRGEKLAPWQIFKAIRSAIQKRGYDPDIPWKNREDAGQKKKDEESTAVLYDEHLLRKTVGDNPDWLYPCYLDAFRMGLWNPDRPEKLETRITHKAQSTRKTVMLRALVEKELRGLLRQAACQLPALAGKEEFILYGPDGKYSSSAVRAGALAQKVPRFDNRIIDKCALIPRLNVCKIRMEGNRPHPASQIIFETTFLQKLKNMRVQGSAGIRGLTAAEIALAAFTQRNSLPTKVWNAFCEERGLHPAPACKKLSFKDVSPALSPDVFRSALAEKLNGVAVMDSSKCVRNLTGEERASLLALFQKPRDSHSFTAAQWANFCEDLGVSPLPGHEEVKPPKASGRARFCRPAAQILKRLILSGQAPTTFHSAENRNIGVNADPRKGLVAADLDFLLNMGDSWDSLRIPDGKLDAIASQCSNADEAIRKLIGSQNNPVVRHRLGVFAQRLRELERRFGTPDQIVLEFVREDFMGDKARMELKKFQNDRAKARAEARERVAELGISEKNSLRYELWKAQGGRCLYMDDPLAETELDNYRIDHIVPRAKCGPDSRLNYALTLNQTNDDKGDRTPYEWLSGNPERWRAYLNRVEARLRAADGISRKTAQLLTLPNAVELAEKFTALAETAWISRLAQKIADLSFGWQNGVDAAGRKRTIVVSGGLTARIRRKYGLNRLLNPNATSEEEAEKKNRADKRHHALDAMTISFIPQWARDPDKTGFFRFPKEIRDNPHPFFQARIEAVVPRQLCYEKAPLAETIYGLRKTPEENQVVKRTDLRDLAYQTVDMKTVYKIDYAVKTGIPKIMDER

SEQ ID NO: 300 - protein, 1037 aa, unidentified
  REGION 1..1037: note = Description of Unknown: uncultivated organism with predicted taxonomy: Verrucomicrobia
  REGION 1..1037: note = MG1-306 effector
MTANETIWAFDLGKGSIGEAVRQGNKFLHKASLLIPADFAETKTAAGRRRMWRTRQAHKAREAWLDEVMRAAGIPVLQGRRVTWNEATKKWDVSLGDPRLEREFPAECDSTCYTSCLLRIKLLRGEKLEPWQIYKALHSAIQRRGYDPDIPWKNRAQRKAGTPDDDEAGTETRMKEFERRLEEMAPGKTEFQWPCYFDAKEMGLWHPAKPDELKLRQDCHAKTTRKQIVPRKLVEKEVRALVEAAAKFHPKLNGRADFILFGPAQRQYASFYADERKKHHLREGGANDWQGVLGQKIPRFDNRIIGKCVLIPRLNVCKIRTDDKGALLTQSRPAAEAVFLMKLKNMRLQCPGGQRGLTAKEIATIFTDPKRKKLGLTPTQWKNWCLLFGGKPLPGQYQEVKEPSFSGRSRFCRPALEILQRLILTGDTPQVAHDKERARLNGNTSPLKGLVPDDLMFLLKMGTTWEGIYIPNQKLDALAQSTDDPSETIRTLIGSQNDPIVRHRLTLFAERLNELAEKFGIPDAVVLEFVREDFMGKKAKIEYFKFQRDRAAQRAKAREEAAKAGAGEGAAGLKMELLEAQGGACLYTGEALAPTSLDDYVIDHIVPRAKGGPDSALNYVLTTRRANDDKADRTPHEWLSATNGWDAYVERVKKRTTALRNKKASLLVSPEAETLVQRYTALAETAWISKLAQTIIGLRFGWPNGIANGERKVIVISGGLTGRIRRKYKLNSLLNPDAKSEEEAEIKNRGDDRHHALDAMVISFLPTWARNSRFTGFFRFPDEVTRELFKREIAEVIPQNVCFERPALAETIYGARHDHGEKVIVQRAELISLAYKPTAPGKSVFDLKYAGKQTQSIRDNSIREGLAEFLSSGPTEIQWREFCGKYCLKNKDGTDGSRVRFVNMTVGDPTEYKDLSKDGTGAYRKALKGHKGQIVYLDEKGKPRVRPIYAFESAAAAKTELLSRNPKFRICGLFQSGCLVELTKPIEHPTNPLLPGTYKLNTILADGRAKVTDKTGKMTLPMSLEKFLAAGMKRIES

SEQ ID NO: 301 - protein, 760 aa, unidentified
  REGION 1..760: note = Description of Unknown: uncultivated organism with predicted taxonomy: Verrucomicrobia bacterium IMCC26134
  REGION 1..760: note = MG1-307 effector
HGHLRSEDLREWAKNYEGQFELRDPDFNLTPRNDFSGRARFSKNGMAAIRQIIANAREKHDAAYNTWEQRFKDKNLKANEEDIANGYARFLTQLTNEAASNQATADNSYARTVAPPPVLILPGETTDGAFQRYLNSIRNPQVRHRVELFGRELQRLMNLHSEDQAPDFIIIEMARDLMMNQKQKDAKEAKDRERRDERDKAAQILRDMGYAPTADNIKKFLLAQEVGWRCPFTLQAFCQSDFSRLTITQLAQAENKPRFLKEASSVFRRLEVEHLVPRTPVVCNEWYNLTVTLHSTNAQKGKRTPFQWLSIDKDGVPPDLDWDCACKNAADRFGANSLKYQIFTSPNAAEIIADNAKRSIQQTAYIARCLREACLIHFGKEWLDWTDGAGRDPLLLPDNRASKSYLTTSGATTARLRGAWHLNEILWPKPQRLNDAEWDKLTDEEKTILKAKYKEERAVRALKNRQDHRHHALDAMVISCAVPWQTFKVRLGNQQPEDGLCELDAETGEITKIWNPVFNDYGYGIMRAVESRMDLLLKFSTDRQTDLLRHHKSSQRNAQAFDTTPYGRREKFGGDELGQPLFVARKRILDLKTSHLNPRNTGGFIFSPLIRDHIAKEWESFSGNEKNWIRIESDWIAIFEAQIATLRASGKDDQKTRLGIKARESRIYKLRQMEGCKDWEELLSFIAKELGAQQPQPKFPSQFIETLCHPIYKTPITSVKVTAQSKNDESFSLVRRPTSEKARSGTYVMRKQEDKYREMR

SEQ ID NO: 302 - protein, 1129 aa, unidentified
  REGION 1..1129: note = Description of Unknown: uncultivated organism
  REGION 1..1129: note = MG1-308 effector
MKMTQKQANNVFQRETVITKWQGAPFYTKDVVLGIDIGIEGIGIAVRRGPELLYCKTLMMKLPEQAPLEARRVLRSSRRARKSRRVRMNRLKQLFQKHGLPWVDDEIMARSDPFLLRDRAVNKNGLASKEALSICIRHLVAHRGYDFYAFLSDGEAPWGECSDFKAAKKWLSSTFVSEDIQEELLQDAENFFAEKDLEVWKALVQERLDWSRQNSMEKNLREYASNKANWRRGRGISYPRPQIEAHLRQIIERHKHLIKSHKKFTGVLFKKCDDDNKDICIFHYNRKTKEECEKVYERKIRTCPFAKYWDGAAQKCASRGDHAVRKWNLLDFLSNRRFRFAEGSIQIMRTMPEDCVKLLIDSLEESFDQKLTWSDHKQKLVESLKQHGLKIANPPKELSGKAKKSDAWKQLQDLLAPGKPLTSRAKLSSESAQKLFDTTTRNGTSFDPAQISARKKEMDYYEILSHTSMDYGVYPQVQKLLGTLRKPKAGEAPSFGTKGFLQRLFETELKDQLKRKTVPDRCIIECIKDPPRNKKEQDARASLNVENREFIENLLKDYGYEGAHSRSLINRLKLYRQQGGEAKDGQVTKEAVCPFTGMPLGKNPLSSDLDLAHLFPDGRGGLAIEDNLVLTKRSVNQDMGQRTPREVAGTRMGKTSFLSWNEMLARSKSFKWNDKKRELFAFEPAKGQPVPDFENLTRTAQLARQLRRMICFWMGIQEDSKETRERIGNPSGLHTAAARRGWKITKDRSDLTHHRMDAAVLSFIPPGAGLNSVMYGGIFEEVHSTKEINGNKFKVVQMRGAPELKPDLSALKKDSLTECPVINIRSKSKCKPLGDSTFWSVDEKGETWQRTTLIPLDKDALKDFTPEKIREKLAAEGIKESDIPGDRKLEAWLQNPKYSLHLKHGQPVRFVHKKGNKGDFRNPVGWSGIRHPNGKIDQLRKLDLVNDRLELWVGYDPKKGWQYYKRVIPSKDSMRGLKRLGIPWHGQEGLSEYTKKLINEENCKDLKEFYCGTLPQYSHKVGEFKLGDTFLIDVSKKKQKKQNAEGTEIFKDTPIPNSKEWFRVSAIILFREKGKKGIKRKVEFKPIITKGDSFTKEIACDLAQLLGKPKSPEKCAQQNGWKAPSNKKG

SEQ ID NO: 303 - protein, 892 aa, unidentified
  REGION 1..892: note = Description of Unknown: uncultivated organism
  REGION 1..892: note = MG1-309 effector
DELKLDSIRAWGKRGVLPEKYGNYLKLLIEDAGDFRGDKQAEALRIIDEAVARYRSDPIRTMLEEHLHERQHVNLRTPARGHNFPRELVKAHLREICERHRHFFPAEGFEEAMRELIGPVKNGAEEYDSKAESIMDWHRRTPGEARRLWERREGHCLLAPHLISTGLLPAGVYRRSPAGAGGIRRWKLVQFLAERRVELATGERTHVTADVVRQALDFVTADNAAVCERRRRPHAPKMPQAIEKAVGALASKKDSRLNADFFDQLGDLLKPSLSKLRGKAPLAEATAEALFQLATNGGANFEPEAIRARLNDSGYYDWRKHPGATRALYHQVDYLLGDARQYDPDTGEPKDHRDGAPRYHGLLRRLFAGQLRLDTGEIVDLRDRLDGRKVPDYVIIESVRDMPRNQDQSREIQKEQKERREERRHIAAIYGLDFDVLTEPQKRRLFLFHEQAGRDGEAVCPYTGESLGRDPLAADLEIEHIYPQRRGGLSIMENLAITRRATNAEKGNRTPVEWLGYEKAAEQASRMRWSKRKLEVFLWREERCPDWENLTRTAQLARELRRRVVEWLGIERRHAGIADPTQRALAREAEERRRVAAPAGALTAACREAWKDRLPEAYFTPIEIRGQTVLTKNRGNLRHHMWDAGVLAHIPPGDGLNHVRYGGIFETADIGGAPRPVPLPELAPDLAEIEKADPLACRVFHLRPRHPRSSRTTQQPVSLPDAEGRSWQRVAIRKTIHEKDGVVKTVEPENLLDAIRRAGLGPDRIADAEIERWKNDPRPIEQHPLRLRDGTPVHGLKIPIAQKKNEFGQYPHLTDAATAPDAPAYRSRDGRRQSRLIGIKGSTDTYDRLEIWRGPDLDRRGERRLDAKGQPKWKYFSFPVPGPRNLAAYRRM

SEQ ID NO: 304 - protein, 1205 aa, unidentified
  REGION 1..1205: note = Description of Unknown: uncultivated organism
  REGION 1..1205: note = MG1-310 effector
MNEYILREPDRKPLAEEWLNHEFYRSAVVLGIDIGLEGIGVYLRRGPQEIFARSIMLELPEAEALAERRQKRAWRHCRKNRKRRLHRLKLLFAKHGLPWLDADRISRAHPFRERYRAINNGVASKEALSICIRHCVVHRGYDYGGTEEGTFPWGESPLLSKAAEWLATAYVTPELKEQIEQLAPGLVPGKNEEEQRNKFAELLRERLEWSQQHDIARVLAEHVKGGHDNLRTRARGYNFPRQKVWEHLETIVRKHAHLIDDVEGFLAVLGLNPNRAANAKEAAKARKRAIFFYNRKTRFDMERHWEKKVNRCPFAGKLGGNPDERCAENGDLNVRRWKALEFATTRRVEIEATEGKGATKKKRRCLHSLSASATRKLIEFIEKHHGAASPATAPKWEEGKAIILDDITAVHGEKAKPVAEKQSEWNKSYFTQLKDLLTPTIANRKKRASLSAFAAGQLFNIATADGSDFTPENVVARLREARFYDWRRNASVDFNPFPQVELLLGRRIKHGKRRGELSPTCQGLLRRIFAEHREALGGATAPDYCVIEVIGDPPRNAQQRAERQKEIEANREKHEKLFEQYGIEDSGVASKRRRIMLYEQQRGKCPYTGKDLPSNPLDPSLEIEHIFPAEMGGLSVDDNLVLTWRSVNAEKGKRTPLQWAGERFDAMLANTRDMRWSARKREIFAWGTIREDKPDKPSHYNADGTLRVPDFGNTTRTAQLARQLRAEIMRWMQVDDKPDEAARRIGTPSGWLAAQARKSWLPAEEYEKVRNNVTHHLIDAAILAHIPPREGMNSVPCKGIFYVESVPVRDPVTGDTTYRLETKALPELSPLPRLKHWLPDNGEYDVCPVWKPRRQSKTQSLGDSTFWKQVRPTEATVAQRTALDADSLTKLRIVDGESLHAHLCRMGIQATKIPNRDALQKWLDEATAATKADKDKPIAPLKLTDGTPVKNLWKFDSKGSFSSPVGWSGKRNPDGKLRELRTISLKYDRLELWLGYDHQKAERARRAKQPDWEQAGWVYQKRLIPDARALRHVKQMGFSFARDKRHKAPAFMQNKPDKPETHQTLRDLVLGGRLLPFSHKVGEIRKGDVFKLHLLPDGSIRKRTPVGQPEPAAALSTFYVVTALKHGRGNPVVELTSQLFKDKEGTPMERFAGDVLSKILSTADDLAYVLGLPPAAEEAQKHGWRIPTSPPPPAAAAKETDGNLL

SEQ ID NO: 305 - protein, 1231 aa, unidentified
  REGION 1..1231: note = Description of Unknown: uncultivated organism
  REGION 1..1231: note = MG1-311 effector
MNELISPNTAWKTQSEYWLQHEFYRTAVVLGIDIGLEGIGLYLRKGPQEIFARSLILDLPQAEALAERRAKRAWRHCRKNRKRRLHRLQLLFAKYRLSWLPAERMSRSNPFKERLRAVTTGVASREALSICLRSCVAHRGFDYGGTEEGQYPWGGSSKLSDATQWLHTAVVTNELKDLIEDKLDELEADKSPEERRAAFRDLLRERLDWSLHHDIEMILREHAKGGHDNLRPRARGVNFPRKEVWKHIEKIVRHPRHREFLPDPEAFLKELGIDPNKAGGASPKERLANAARARRKAIFFYNRKAYPEMERHWAKKVNDCPYGQRLDPGLQGSKITCGEKGELPIRKWSALEFSATRRVEMETIFGKGKEKTIRRSLHSLSGGAVGKILKAIEQHDRALKSGDKSAAPSWDEVKAMLVEDLPPLANAKVKLATSKKGDWNETFLEQLRNLTLPSLANRKQRASLSALAAERLFALATQDGRDIDPAQFAPRLKAIGFYDWRRAATVDFNPYRQVEVLLGRRIKRGKKHGQLAESCQGWLRRIFADQSEALDGCTAPDYCVIEVIGDAPRTSRQAQEIKSAQDERGQKRRELFAAHNLEDSGIASKRRRISLWDQQKGVCPYTGKELPKDPLDPALELEHIFPAEMGGLSTDENLVLTWRTVNGDKGKHTPLQFASKLGVPFDQLVAHTKEMRWSGKKREIFAWGTLREAKDDQKSHYLPDGVTLRVPDFGKTTRTAQLARQLRAEVMRWMQVEDQPDEAARRIGTPSGWLAAQARKSWLAAIDYQKVRNNLTHHLIDAAVLAHIPPREGMNSVICKGIFYVEREPVRDEATGITSHRFVTKALPELSALPRIKQWLPDNGEYAVCPVLKPRRQSKTQSLGDATFWRQVRQGEPTLAQRTVLNPENITDADELKATLQRMRVDWNKQKQQTESKIPSRDALQDWLDAATPTTKADKNRPIPTLKLTDGTPIKSMWKIDSKGSLTSPVGWSGKRNADGKLRELRSISLKYDRLELWLGYDHREAERARKSKTLDWEQSGWVYQKRLIPDARALRHLKQMGFSFGRDKRRKAPAFMQGKPDKPETHLSVRDLVLGGRLLPFSCRVGAIKKGDEFLLHLLPDGSVRKRTPGGEAEPAAAFSTFYAVTALSHEGGNPRVELKSRLFKEKEGTPLERFPGDLTTRKVAVSSDLAFLLGLPPAWIAAQQRGLRPPSPQIEHAKTTTERNSRDPNPRLL

SEQ ID NO: 306 - protein, 923 aa, unidentified
  REGION 1..923: note = Description of Unknown: uncultivated organism
  REGION 1..923: note = MG1-312 effector
MERHWAKKVNDCPYGQRLDPGLQGSKITCGEKGELPIRKWSALEFSATRRVEMETIFGKGKEKTIRRSLHSLSGGAVGKILKAIEQHDRALKSGDKSAAPSWDEVKAMLVEDLPTLANAKVKLATSKKGDWNETFLEQLRNLTLPSLANRKQRASLSALAAERLFALATQDGRDIDPAQFAPRLKAIGFYDWRRAATVDFNPYRQVEVLLGRRIKRGKKHGQLAESCQGWLRRIFADQSEALDGCTAPDYCVIEVIGDAPRTSRQAQEIKSAQDERGQKRRELFAAHNLEDSGIASKRRRISLWDQQKGVCPYTGKELPKDPLDPALELEHIFPAEMGGLSTDENLVLTWRTVNGDKGKHTPLQFASKLGVPFDQLVAHTKEMRWSGKKREIFAWGTLREAKDDQKSHYLPDGVTLRVPDFGKTTRTAQLARQLRAEVMRWMQVEDQPDEAARRIGTPSGWLAAQARKSWLAAIDYQKVRNNLTHHLIDAAVLAHIPPREGMNSVICKGIFYVEREPVRDEATGITSHRFVTKALPELSALPRIKQWLPDNGEYAVCPVLKPRRQSKTQSLGDATFWRQVRQGEPTLAQRTVLNPENITDADELHATLQRMRVDWNKQKQQTESKIPSRDALQDWLDAATPTTKADKNRPIPTLKLTDGTPIKSLWKFDSKGSLSSPVGWSGKRNADGKLRELRSISLKYDRLELWLGYDHREAERARKSKTLDWEQSGWVYQKRLIPDARALRHLKQMGFSFGRDKRRKAPAFMQGKPDKPETHLSVRDLVLGGRLLPFSCRVGAIKKGDEFLLHLLPDGSVRKRTPGGEAEPAAAFSTFYAVTALSHEGGNPRVELKSRLFKEKEGTPLERFPGDLTTRKVAVSSDLAFLLGLPPAWIAAQQRGLRPPSPQIEHAKTTTERNSRDPNPRLL

SEQ ID NO: 307 - protein, 1129 aa, unidentified
  REGION 1..1129: note = Description of Unknown: uncultivated organism
  REGION 1..1129: note = MG1-314 effector
MKMTQKQANNVFQRETVITKWQGAPFYTKDVVLGIDIGIEGIGIAVRRGPELLYCKTLMMKLPEQAPLEARRVLRSSRRARKSRRVRMNRLKQLFQKHGLPWVDDEIMARSDPFLLRDRAVNKNGLASKEALSICIRHLVAHRGYDFYAFLSDGEAPWGECSDFKAAKKWLSSTFVSEDIQEELLQDAENFFAEKDLEVWKALVQERLDWSLQNSMEKNLREYASNKANWRRGRGISYPRPQIEAHLRQIIERHKHLIKSHKKFTDVLFKKCDDDNKDICIFHYNRKTKEECEKVYERKIRTCPFAKYWDGAAQKCASRGDHAVRKWNLLDFLSNRRFRFAEGSIQIMRTMPEDCVKLLIDSLEESFDQKLTWSDHKQKLVESLKQHGLKIANPPKELSGKAKKSDAWKQLQDLLAPGKPLTSRAKLSSESAQKLFDTTTRNGTSFDPAQISARKKEMDYYEILSHTSMDYGVYPQVQKLLGTLRKPKAGEAPSFGTKGFLQRLFETELKDQLKRKTVPDRCIIECIKDPPRNKKEQDARASLNVENREFIENLLKDYGYEGAHSRSLINRLKLYRQQGGEAKDGQVTKEAVCPFTGMPLGKNPLSSDLDLAHLFPDGRGGLAIEDNLVLTKRSVNQDMGQRTPREVAGTRMGKTSFLSWNEMLARSKSFKWNDKKRELFAFEPAKGQPVPDFENLTRTAQLARQLRRMICFWMGIQEDSKETRERIGNPSGLHTAAARRGWKITKDRSDLTHHRMDAAVLSFIPPGAGLNSVMYGGIFEEVHSTKEINGNKFKVVQMRGAPELKPDLSALKKDSLTECPVINIRSKSKCKPLGDSTFWSVDEKGETWQRTTLIPLDKDALKDFTPEKIREKLAAEGIKESDIPGDRKLEAWLQNPKYSLHLKHGQPVRFVHKKGNKGDFRNPVGWSGIRHPNGKIDQLRKLDLVNDRLELWVGYDPKKGWQYYKRVIPSKDSMRGLKRLGIPWHGQEGLSEYTKKLINEENCKDLKEFYCGTLPQYSHKVGEFKLGDTFLIDVSKKKQKKQNAEGTEIFKDTPIPNSKEWFRVSAIILFREKGKKGIKRKVEFKPIITKGDSFTKEIACDLAQLLGKPKSPEKCAQQNGWKAPSNKKG

SEQ ID NO: 308 - protein, 953 aa, unidentified
  REGION 1..953: note = Description of Unknown: uncultivated organism with predicted taxonomy: Verrucomicrobia bacterium
  REGION 1..953: note = MG1-315 effector
AGASKKERLPHAAPPRRKAIFFYNRKSRPEMERHWATKVNECPYAHRLDPGLAGTKITCGENGELPIRKWSALEFSATRRVEMETIFGKGKEKRIRRSLHSLSGRVVGKILETIERHDRALNSGDKAAAPSWDEVKAIIEDDLRTLADAKVKLATSKKGDWNETFLAQLRNLTLPSLANRKQRASLSALAAERLFALATHDASDIDPAQFAPRLKAIGFYDWRRAATVDFNPYRQVEVLLGRRIKRGKKRGQLAESCQGLLRRIFAEHSEALDSSAAPDYCVIEVIGDAPRTTKQAQEIKFAQDERGQKRRELFAARNLEDSGVASKRRRISLWDQQKGVCPYTGNELPKDPLDPSLELEHIFPAEMGGLSTDENLVLTSRTVNSDKGKHTPLQFANKLRVPFDQLVAHTQDMRWSAKKREIFAWGTLREDKDDQKSHYLPDGVSLRVPDFGNTTRTAQLARQLRAEVMRWMHVEDQPDEAARRIGTPSGWLVAQARKSWLAASDYQKVRNNLTHHLIDAAVLAHIPPREGMNSIICKGIFYDVRERVRDEATGITSHRFLTKALPELSPLPRLKQWLPDNGEYAVCPVLKPRHQSKTQSLGDATFWRQVRQGEPALAQRTALNPENITDADELHATLQRMRVDWNKQKQQTENKIPSRDALQNWLDTATPATKADKHKPIPPLKLTDGTPIKSLWKFDSKGSLSSPVGWSGKRNLDGKLRELRSISLKYDRLELWLGYDHKQAERAHKSNTPDWEQSGWVYQKRLIPDARALRHLKQMGFSFGRDKRRKAPAFMQDKPDKPETHLSLRDLVLGGRLLPFSCNVGAIKKGDEFLLHLLPDGSVRKRTPAGQAEPAAAFATFYAVTALSHEGGNLRVELKSRLFKEKEGTPLERFPGDLTTRKVTVSADLAFLLGLPPAAVAAQHHGLRPPPPRIEHPKATTEMIPRDANPRLL

SEQ ID NO: 309 - protein, 993 aa, unidentified
  REGION 1..993: note = Description of Unknown: uncultivated organism with predicted taxonomy: Thiorhodospira sibirica
  REGION 1..993: note = MG1-316 effector
GPGLDALEPFRKDRKTGAWIPQHTLRRDSLFFKEWQSEVALRNFRVKRRLITVGRSKKEKFELIPPPPVALERLRNLWNEHGHLWAEDLREWAKNYEGQFELRDPDFNLTPRNDFSGRARFSKNGMAAIRQIIANAREKHDAAYNTWEQRFKDKNLKANEEDIANGYARFLTQLTNEAASNQATADNSYARTVAPPPVLILPGETTDGAFQRYLNSIRNPQVRHRVELFGRELQRLMNLHSEDQAPDFIIIEMARDLMMNQKQKDAKEAKDRERRDERDKAAQILRDMGYAPTADNIKKFLLAQEVGWRCPFTLQAFCQSDFSRLTITQLAQAENKPRFLKEASSVFRRLEVEHLVPRTPVVCNEWYNLTVTLHSTNAQKGKRTPFQWLSIDKDGVPPDLDWDCACKNAADRFGANSLKYQIFTSPNAAEIIADNAKRSIQQTAYIARCLREACLIHFGKEWLDWTDGAGRDPRLLPDNRASKSYLTTSGATTARLRGAWHLNEILWPKPQRLNDAEWDKLTDEEKTILKAKYKEERAVRALKNRQDHRHHALDAMVISCAVPWQTFKVRLGNQQPEDGLCELDAETGEITKIWNPVFNDYGYGIMRAVESRMDLLLKFSTDRQTDLLRHHKSSQRNAQAFDTTPYGRREKFGGDELGQPLFVARKRILDLKTSHLNPRNTGGFIFSPLIRDHIAKEWESFSGNEKNWIRIESDWIAIFEAQIATLRASGKDDQKTRLGIKARESRIYKLRQMEGCKDWEELLSFIAKELGAQQPQPKFPSQFIETLCHPIYKTPITSVKVTAQSKNDESFSLVRRPTSEKARSGTYVMRKQEDKYREMRVYRLPKPGRSGAYACWLLLPWYGMLDARGKRFKTVEKDLMTRACKGAKFVRAFRRDDIVCFANNLLANKGIKQNESWRIVRTDAKGDCLANVGLLPANLARETSHPITGEKVKLEPVVVALNDFMNALEPRLPTDELSHSPPVKPKSPGAAET

SEQ ID NO: 310 - protein, 1119 aa, unidentified
  REGION 1..1119: note = Description of Unknown: uncultivated organism
  REGION 1..1119: note = MG1-317 effector
AERMSRSLPFRERHRAVNKGVASKEALSICIRHCVEHRGYDYGGTEEGAFPWGDSPLLSKAAAWLSTAYVTPDLADKLQDIEPQLQAGRKEEEQREHFLYLLRDRLAWSGENDIARVLADHSQGGHDNLRTRARGHNFPRTKVWEHLEGIIRRHAHLRADVEGLLAVLGLDPNREPDAKRAVKAKRRAIFFYNRKTRLEMERHWAKKVNICPFAAKLGLDHPEERCAENGDVNIRRWKLLEFAATRRLEIDVAEGKGATKKRRSLLHRLSADAIRKLVETVQKHHAAVVASNRDAEPKWDESKDTILEDITTAWGERAKPIPETKSDWNKSYFSQLKDLLVPTLSNRKQRAALSAASAVRLFDLASADGMSFTPEEVIERLRKAGFYDWRRDASVDFNPYPQVEVLLGRRIKRGAKRGHLSETCQGLLRRIFAEHEEQLEGKTAPDYCVIEVIGDPPRNALQRAERDQEMKERREKRNKLFEQHHLDDSGVASRRRRVTLWEQQKGKCPFTGKELPANPLDPSLELEHIFPEDMGGLSVEENLALTWRTVNADKGKRTPLQFAAKLGVPFDQLMAHTQEMRWSAKKREIFAWGAIKEDRGDQASHYNPDGALRIPDFGNITRMAQLARQLRAEVMRWMKVEGDPDEAARRIGTPSGWLAAQARKSWLAQGDYEKVRNNLTHHLIDAAVLAHIPPREGMNSVLYKGIFYVVREPVRNEITGTTSQRLLTKALPQLSPLPRLNHWLPDNGEYAVCPVLKPRRQSKTQSLGDATFWRQVSPVEGTLAQRTVLNPEKITDADELHATLQRMRVDWNKKQQQTENKIPNRDALQAWLDAATPATRADKDKPVPPLKLTDGTPIKNLWKFDSKGSLSSPVGWSGKRNADGRLRELRSISLKYDRLELWLGYDHQKAERARKAKTPDWEQAGWVYQKRLIPDSRALRHLKQMGFSFGRDKRRKAPAFMQAKPDQPETHLTVRDLVLGGRLLPFSCKVGAIKKGDEFLLHLLPDGSIRKRTPAGQPEPSSAYSTFYAVTALSHEGGNPRVELKSRLFKEKQGTPLERFPGDLITRKVAVPSDLAFLLGLPPAGMAAQQRGLRLPPPQIEQITTTTEMNSRDPNPGLL

SEQ ID NO: 311 - protein, 1000 aa, unidentified
  REGION 1..1000: note = Description of Unknown: uncultivated organism
  REGION 1..1000: note = MG1-318 effector
HRLQLLFAKYRLSWLPAERMSRSNPFKERLRAVTTGVASREALSICLRSCVAHRGFDYGGTEEGQYPWGGSSKLSDATQWLHTAVVTNELKDLIEDKLDELEADKSPEERRAAFRDLLRERLDWSLHHDIEMILREHAKGGHDNLRPRARGVNFPRKEVWKHIEKIVRHPRHREFLPDPEAFLKELGIDPNKAGGASPKERLANAARARRKAIFFYNRKAYPEMERHWAKKVNDCPYGQRLDPGLQGSKITCGEKGELPIRKWSALEFSATRRVEMETIFGKGKEKTIRRSLHSLSGGAVGKILKAIEQHDRALKSGDKSAAPSWDEVKAMLVEDLPTLANAKVKLATSKKGDWNETFLEQLRNLTLPSLANRKQRASLSALAAERLFALATQDGRDIDPAQFAPRLKAIGFYDWRRAATVDFNPYRQVEVLLGRRIKRGKQRGQLAESCQGLLRRIFAEHHEALDGSAAPDYCVIEVIGDAPRTSRQAQEIKSAQDERGQKRRELFAAHNLEDSGIASKRRRISLWDQQKGVCPYTGKELPKDPLDPALELEHIFPAEMGGLSTDENLVLTWRTVNGDKGKHTPLQFASKLGVPFDQLVAHTKEMRWSGKKREIFAWGTLREAKDDQKSHYLPDGVTLRVPDFGKTTRTAQLARQLRAEVMRWMQVEDQPDEAARRIGTPSGWLAAQARKSWLAAIDYQKVRNNLTHHLIDAAVLAHIPPREGMNSVICKGIFYVEREPVRDEATGITSHRFVTKALPELSALPRIKQWLPDNGEYAVCPVLKPRRQSKTQSLGDATFWRQVRQGEPTLAQRTVLNPENITDADELHATLQRMRVDWNKQKQQTESKIPSRDALQDWLDAATPTTKADKNRPIPTLKLTDGTPIKSLWKFDSKGSLSSPVGWSGKRNADGKLRELRSISLKYDRLELWLGYDHREAERARKSKTLDWEQSGWVYQKRLIPDARALRHLKQMGFSFGRDKRRKAPAFMQGKPDKPETHLS

SEQ ID NO: 312 - protein, 1078 aa, unidentified
  REGION 1..1078: note = Description of Unknown: uncultivated organism with predicted taxonomy: Verrucomicrobia bacterium IMCC26134
  REGION 1..1078: note = AKC83434.1 effector
MVLAFDLGKGSIGEAVRLGNDFVHVASWLIPQDLAARGPSAKPGTPASRYRAWRTRVAHRERENALRRICADAGIEVLAAKRVARDAADKKKWIVVSKADERLTREFPKKGDSTCYNSALLRIQLLRGVKLEGWQVFKALHAAIQRRGYDNAVPWKHRAVRDTETEEDGITQQRADSYCLALEQMAPNKPECQLPSYLDAHRLGLWDASRPDEYILRIDHHVAPARNREHPDNTPIVAPRELVIKETRALLTAAAKFFPKLAGREDEILFGRGGKAYASYFDDVRRAHSLRLGGANDWDGILGQKVPRFDNRIIAKCALIPRLNVCKATTRKDKTGAIISESLLPSEVTFLFKLKNVRVQRPDKSITGLKPDEIRTLFNDPKREPEKLSYTKKQWSKEIARFGCEAAAGHEEIAAPSFGGRSRFCRPALEILKKLILSGESPATAHSRELAERVKGNTNPQQGLVVSDLDFLSPARIGETWDGIHVADQQHGALLRLAAEQGPEVAIRALIGKVNNPVVRHRLEAFWGRLRAIEADLKKRFGRGPDEIAIEFIRTDFMGPKAKLALAKFQSERAEAREDARAQVGKIGADGRASPLKYELWKAQGGICLFVGESLAPTDIESLEIEHIVPRSQGGSDAFINYVVTTKATNKLKDNRTPYAWFEANGFTGWDAYVKRVEACATALRNKKVRLLTAPDAIELVERYTALAETAYIARLAQTVAALHFGWPINSQPGERRITIVNGGLTARVRRNYRLNSLLNPCPTGKDQKEWEEDADVEKNRKDDRHHALDAMVISFIPAWTRDPKKEKFFRLPDGVTPETFQERLEEVLPRQLHYERSELEATAFGQRTLGGKLYGVARVDFCNLVVKVALNGNRSLNIKPDGSGEADTIVDQAIRRDVQAFIDQNRATITLAIWDAWVSSYHRGGSNGPLVKKVLVTITNPDSLEEYADLAKDQSGQLRRGKKHKGYWILRILSPTKKDPTKTTLQVRPIYAHANPHALKAEIGEDHGCEIILELESGCLVQIDKPIAHAKTPLAAGIYKLNSVWTQGNVVVSSQSGVTSAPIGLAKFIEAGLRRLK

SEQ ID NO: 313 - protein, 1078 aa, unidentified; identical to SEQ ID NO: 312
  REGION 1..1078: note = Description of Unknown: uncultivated organism with predicted taxonomy: Verrucomicrobia bacterium IMCC26134
  REGION 1..1078: note = AKC83434.1 effector

SEQ ID NO: 314 - protein, 862 aa, unidentified
  REGION 1..862: note = Description of Unknown: uncultivated organism with predicted taxonomy: Verrucomicrobia bacterium 61-8
  REGION 1..862: note = OJV06180.1 effector
MEAYVDELNAMSPLQLEFQLPSYFDAWKMGLWNPKNPTELKDRIDCHAQSTRNKIVPRWLVEKEIRLLAENAGKQIPELAGKSDYLLWGPTRRPYASYDCSVRKEFGLREGSVTDWQGVVGQKTPRFDNRIIEKCTLIPRLNVCKIKSDGKNPLPESRIVFETTFLMKLKNMRVQQGPTEQRGLSAAEINAIFKDEKFRSFKITEAQWNKLCISMGVRPQPGYETVDPPRSGGRSRFCRTSLEILKRLILSGKNPPEFLEEELRRLNGNTDPKRGLIADDLKFIEKMGSTWEEIHIPNQRLEAILQLAGGADAAVRQIIGSQTDPIVRHRLDIFYQRLQSLREAYGTPKSVVIEFVREDFMGKKAVIEYRAFLKKREAERKRAREDAAKTGSTERSAALKLELLREQGGICLYTGSALKETALEQYEIDHIVPRSKGGPDAVINYVLTLRSANDEKGDRTPFEWLSRTNQWDAYVQRVDSRGTVLRNKKTKLLLNENASELAERYTALAETAWIAKLSQAILDAFFGWKNGVDDEGRKRVISVNGGLTARIRRKYQLNSILNPSLNEEEAEKKNRSDKRHHALDAMVINFIPSWTRDTAKEHFFRFPSGIHRETFVQQIANVTPRNLCLEKPTLTETIYGARRGDQGLVIVQRAKIVDLAYRSITPSKSVYDLTYAAKQFKAIRDAHIRRLLEDFLKRNPTEQDWQEFCASFALPRRDGTLGSRVAQVTMNIGSASEYKDLSKDESGSWRRGKRHRGQIVYLTDGKPKVKPIYAFESEQEALKELLLSGAKIVGIFRSTCAVRLTEAVTHPKTPLVAGLYVLNTIREDAFAVLTDRSGARSQPISLNKLLAAGFQRVESLEI

SEQ ID NO: 315 - protein, 862 aa, unidentified; identical to SEQ ID NO: 314
  REGION 1..862: note = Description of Unknown: uncultivated organism with predicted taxonomy: Verrucomicrobia bacterium 61-8
  REGION 1..862: note = OJV06180.1 effector

SEQ ID NO: 316 - protein, 1324 aa, unidentified
  REGION 1..1324: note = Description of Unknown: uncultivated organism with predicted taxonomy: Pedosphaera sp. Tous-C6FEB
  REGION 1..1324: note = PAW75411.1 effector
MLRPCVRKDRLTVLCRPPGRLPSRREFLRLDQPRRAEGQLGIVTSDPCPCAGGKHLICRKAAGNNGSMSAKDYVLRGAVPMDSTLMPNHIWAFDLGKGSEGEAVRHGTDFPHVESLLIPAELARRGPAATSGTPANKYRALKTREAHRARERWLETVWTAAGFTPLHGRQVAKVCSLPVKLDENGEPKFDKGHWAQVAKGDYRLEMEFAPKLGTKTKDGAPSDLAGADICYTSCLLRIKLLTWKESGPKVADWQIYKALRSALQTRGYGRVPWAAKESQREQQTKEEEAKETETATRWAEFKQSVAPEFRFPCYYDAAKMGLWNPAAPNEPTPQNSHLANSTRNVRFDRADVECEIKQLAENADRILEGRLSLAKEKLVQEFMEGRRKRVREINERRALKNLTLPPDKRKQPRKDPAFQRISASVADFFCYGPSGVSCASYDRSLQADLALRAGSAYDWQGALGQKVPRFDNRILNDCVLIPRFHVCKVDVRVAEKDDDKQGVKAGQVFADSLLATEVTFLLKLKNVLVADLEKGQRKLKAHEVRAIFEYAHRQLQSLKLLSQDGGLVKNWPGKVADCFALTKSEWGNKKKGIGLLGLRPLAGHEEVKAPKTGGRSAYSRAALRILKELILSGEAPSVFHARLLKREPELLGRLGSSLAKPLALHADSTAQDAEQSKREDTEHRKCGLLVSELKFLLQMRKEDGQPDSWENLFAPSQTLDALKGRHTTDGKLDSEAAIRELLGTINDPIVRHRLGVFAGRLKKLQFGDAKENIQAFGVPDAIVLEFVREDFMGEKALAELQDFQRRREADRKEAKEMAAAAGATSSLSALKYQLWKAQGGECLYGKEVFNESGVSKAQCLYRGTALPFTKLDDYVIDHIVPRAKGGPDAMVNYVLTTHETNEAKGDRTPFEWLRSAPDWDAYNKRVAARAHTLRNKKVQLLTREDAPELVQRYTALAETAWVSKLAQAIVNLTFGWTNANDEEGRKRVIVVSGGLTARVRRKYSLDKLLYTNTTDPEVLTKQVKNRSDKRHHALDAMVLTYIPQWARDPGKEGFFRFPAEFRDATGREDYSAIQRLFKDKLAKTTPRFLAYERSGLADTAYGRRTDGEKCVVVQRTPLRGLAYKQVKMKSVFSLEYAATQVAAIRDGRIQAEMKRVIAAQPNEAQWRAICDALENGTHSGFEGVRVVKVTVNRNEDPAEFKDLSKDGTGALRMRKKEHQGQFVFLDSKGRPRVEVVRVFDSLRDVKARLAKEHAGLKEVGFFQSMCQVELDQPVKHGNCTLLPGTYLLNTIKQDGRAQLTSAGGDKSPEIGLVKLLPAGFRRKA

SEQ ID NO: 317 - protein, 1324 aa, unidentified; identical to SEQ ID NO: 316
  REGION 1..1324: note = Description of Unknown: uncultivated organism with predicted taxonomy: Pedosphaera sp. Tous-C6FEB
  REGION 1..1324: note = PAW75411.1 effector

SEQ ID NO: 318 - protein, 1086 aa, unidentified
  REGION 1..1086: note = Description of Unknown: uncultivated organism with predicted taxonomy: Verrucomicrobia bacterium IMCC26134
  REGION 1..1086: note = WP_082083265.1 effector
MSQVTGLPLVLAFDLGKGSIGEAVRLGNDFVHVASWLIPQDLAARGPSAKPGTPASRYRAWRTRVAHRERENALRRICADAGIEVLAAKRVARDAADKKKWIVVSKADERLTREFPKKGDSTCYNSALLRIQLLRGVKLEGWQVFKALHAAIQRRGYDNAVPWKHRAVRDTETEEDGITQQRADSYCLALEQMAPNKPECQLPSYLDAHRLGLWDASRPDEYILRIDHHVAPARNREHPDNTPIVAPRELVIKETRALLTAAAKFFPKLAGREDEILFGRGGKAYASYFDDVRRAHSLRLGGANDWDGILGQKVPRFDNRIIAKCALIPRLNVCKATTRKDKTGAIISESLLPSEVTFLFKLKNVRVQRPDKSITGLKPDEIRTLFNDPKREPEKLSYTKKQWSKEIARFGCEAAAGHEEIAAPSFGGRSRFCRPALEILKKLILSGESPATAHSRELAERVKGNTNPQQGLVVSDLDFLSPARIGETWDGIHVADQQHGALLRLAAEQGPEVAIRALIGKVNNPVVRHRLEAFWGRLRAIEADLKKRFGRGPDEIAIEFIRTDFMGPKAKLALAKFQSERAEAREDARAQVGKIGADGRASPLKYELWKAQGGICLFVGESLAPTDIESLEIEHIVPRSQGGSDAFINYVVTTKATNKLKDNRTPYAWFEANGFTGWDAYVKRVEACATALRNKKVRLLTAPDAIELVERYTALAETAYIARLAQTVAALHFGWPINSQPGERRITIVNGGLTARVRRNYRLNSLLNPCPTGKDQKEWEEDADVEKNRKDDRHHALDAMVISFIPAWTRDPKKEKFFRLPDGVTPETFQERLEEVLPRQLHYERSELEATAFGQRTLGGKLYGVARVDFCNLVVKVALNGNRSLNIKPDGSGEADTIVDQAIRRDVQAFIDQNRATITLAIWDAWVSSYHRGGSNGPLVKKVLVTITNPDSLEEYADLAKDQSGQLRRGKKHKGYWILRILSPTKKDPTKTTLQVRPIYAHANPHALKAEIGEDHGCEIILELESGCLVQIDKPIAHAKTPLAAGIYKLNSVWTQGNVVVSSQSGVTSAPIGLAKFIEAGLRRLK

SEQ ID NO: 319 - protein, 1086 aa, unidentified; identical to SEQ ID NO: 318
  REGION 1..1086: note = Description of Unknown: uncultivated organism with predicted taxonomy: Verrucomicrobia bacterium IMCC26134
  REGION 1..1086: note = WP_082083265.1 effector

SEQ ID NO: 320 - protein, 1333 aa, unidentified
  REGION 1..1333: note = Description of Unknown: uncultivated organism
  REGION 1..1333: note = MG2-1 effector
MPTTNPYVITHVTKNWMKDEFYDSALVLGLDIGIEGIGVWLRKGREPLFARTFMVSLPEAAPLKNRRAKRAQRHARQSLRRREAMLREWVVRYGLLPQEKTDGRWWKNPAVFERAFEHRHRAITTGVASPECLVVCIRHLLRHRGFDYHLTDEGAFPWGDELDDKEIIQWAKNSCCAPEYRTHLCNLIEADAAWAKNSDGSFTEKYLKVRQALDDAVREYENRPVERMLEQHMSEKNHPHLRPRARGRNFARELVKQHLYAICEKHRHFFAPGTFDQAMRELLGDQTGPSQWKLTWMDQDGKARQTILDYHRRTREEAEELWKRKVKKCPFAPLLFEKRHPTTPQHDCAVRSDPRIRRFNLLMFLAERRIELETHDAEGRLQNPRVNLDANVVRDLLGDLEQDIRAVEALRNKQSASRPDKPGKKTFEQRWRICNDCGKETGQDETGKSSCCKAKTKPKMPLAGVAKGSFNADFFDQLGDLLRPELRSLKGRASLSGEAAEVLFKLVTRNGTDFEPARIRQALEDCGYYDWRTNLPAGLGIYPQVTFLLGNRGHYDKDGNPRQIDKTTGNPVHHGILRRLFAGQLRLDDGTLVGLKDKLDDKVVPDYVVIETIGEIPKNQKEKKEFQDEIKANRSRKTDIIEKKYGLKLDSLSDWQVKQVLLFDQQANEEGEAFSPYSGVSLGTNPLAHDLEVEHIYPERRGGISVMDNLVITWRTENQTKGDRTPWEWAKDEGWRVDVHLQKMHWSANKRALFVRQESDPPQWDNTTRMAQLARHLRAEVIHWLGLDQIQDQKERNKEIARRIGTPTGFQTSVCRESWTPPHVFPQMYRLLCDKKGVPVRDRNGQERWVKDRTNLRHHLWDAAVLSHIPPGVGLNSADCGGIFVHRRDPQNGEWSVSALADLGPDLVAFEKANADRCLVVRLRQRKSKKSRYKETIFSLPDQQNRVFAREPLSKVVTSLLKSKKKNPDAELRKLLDRPGLLNPLEITNKKTGQTKQIKLLNKADVERWLSCKDVSLDQEGFRKFIEDVGVPTEQIPDDAVKAAFMKRNGETLLRKTFKPNSLVSFIRQKCRIKDSEIEARVEIAIAERNERTVLRAANGRDGQPGQVIRSILIEQDKLPPCGFGLHFNPTAKPKRGSEVAGFKPVDNSNSVVYLRREIWIGQRTKKKGRKTTVETFYKSRLIPHPRHLASYQKLHGQPWKADPLPLGMKLAGKLAVGDLLRIPLKKEKRNRNDNLIAKRGETPLESRFYRVKSMKTNGTIEFQMAEFAEPKLVKGQIPDPATERLLETYELTCSNEADLLWLLEVTTGKRIKLPPPVVENAPTTGKREGELL

SEQ ID NO: 321 - protein, 1080 aa, unidentified
  REGION 1..1080: note = Description of Unknown: uncultivated organism
  REGION 1..1080: note = MG2-7 effector
MKQGQIAFSFDIGHSSIGWAAFQVSDAPGTFHSLLGTGVVLFPKDACLASARRGFRRSRRNIAARRSRIDRLKNYLAGLGVLSRDQLDANSNSYPWLLAARILASDGKKTLTWEELWSVLRWYAHNRGYDGNALWAGDDADAGDKEDTDKVKNSIALMEKHKTATMAETVCKALGLDPMGEVKASRIYFKGNNAAFPRGVVTEEVRRILAAHAGKLPKVDDALSDILLRNAATSGLELPARFKGGLLFGQYVPRFDNRIIPACRITGKNTPLKRCPEYLLYRWGRLLNNLTVFGADGQIRTLLPAERQALHSRMEADGFFTKRTLNAALKDVTGCTPANTESFFLTEEMEEALVLDPVKKLLATNQIMKDLWPQLSAESREKAQSSLSAGKKIRLGDILAEMETAGQDTTAASDALASHQKKAKKKNADLATRRLSADYPKGRAAYCREILAKTFDESISGKDSTKEGGCLYETEEIRNRLLREPLVQQTNNHLVRHRLLVFERLLAHMVEEFAGGDEKRIAATVVEVVRELQEFSGLNSKEITHKLNEKLGNFRSVVKNLEEAIANSEERVAITGSLIRKARILEDQGFVCPYTGTHLSYNHLLADRLEIEHIIPRSLRPSDALSSCVMTFRSVNDMKGQRTAMQFICEEQGREVPGHENIQITTKKAYVDYVAKHKKQYPQKSDDRRRCERRAELMLMERYDQRNADFTERDLTQTSHLNKMAIRLVKQRIGIDAKHLPGNVTAFIRQKLHIDECLFNAVPRLQTAAKGQPKSSKRKKKAEEAPVEPIQDDMPPRKLTKADIRELTYLHHAMDAVTQGLALLLFAPEDWPLLVKRNLPDSEQRHLKARYPFLDFSADKHISIQDLPEDTLHTISERLAECRVVRHIPAKMHGIIVDQTTWGTVAAGAITTLRQKTTEKNARCDENGKRFIKTTEKKRSLLLGGPDAPDGKLAKIKGAILVTENWGCALDPSPTVIPHFKVYPQLRALREKNGGRPIRILRKGSLIQVKAGTYQGIWSVASIKDNADGICLDINAADKVKLENRSDDSKINVRLDSLRKSGLKILKPKLTGACPTTSSP

SEQ ID NO: 322 - protein, 1471 aa, unidentified
  REGION 1..1471: note = Description of Unknown: uncultivated organism
  REGION 1..1471: note = MG2-3 effector
MGNRADLELAFDVGHSSIGWAVLKTQPELEMKGCGTVIFRPDDCLASKRRDYRRQRRHIRSTRLRIERMTNLLLGIGAITQSDVESGKKQHKGEPPPWLLAARVLAARTETEKAKALLTWPELWKVLRWYAHNRGYDANVRWSGESKVEAFSPSPQINTEDVEEQAVEAEESELADVEVAEDSDSDSDKLRAGKHLMSSKYGFHTATFAETVAKILLGPKRDVKPGQAGKTGKLAETTESFSESDFRKLLFDTPTESWSHPRHLSIYFKGIRAAFPRRIVKVIGGQRTLVGGTEWEVRAILRAHFDAPKGKALCDETFEAAICGRLPETREDWRAYAETHPTLYLSSDDQAKLRSLRAPPKASQEKSERIRQQRRNILTGKLFLPSRYEGGLLFGQLGTRFFNRIISRCPFSFARIVAAILSGDENTLRLYGTTLAAVNRSRHSRNGVMETDLDLARRWAAKLSKVPAAKSREFLLYRWAMTLANVIVARPGRERLTGYERRCIHRRLRRTGYFTKDSFKEAVRQTTGCEPANLDQMFDTTTEAENSLFIDPVRKYLATNEVAGVVLPVLSQFLQVRLARLLQKGKGVRVREIAEWLDETAKRELSQRIEQYVQENNAKAKAAKKKPHDTHSPDEDRRKKQNKLTAAAVLRVRLEAPLPKGRASYHRVVLRKAVAEVLKGFDPRKPKRDRSNTDGENKPSHGCLFRTPETNRQLLGNPNNEAEYERWKQRWLSHQKNYQRYIARERLSPGSGEAFVRSEYHAAQSYRWLASQSNNHIVRHRLTILDRLLRDIIADQNYCAGDPKRIRRISIEVANDILTFSGLERKQLSGQVMPSLREHHDHVVRLLQQELKGTQWENKIDGELIWKAKIADDLGWWCPYTGKKYSPCELASGEMDVDHIIPKSRRLTNAMSAVVVTFKTINNLKGDLTAWEFVERYQDQPVGPHGEKVRKLWDYERFVKNPDNEMDKPRLSGETGHSDYPRWPKYLPGSRRKLHPDYVRRKLRRRYLLLKHYEKDKDTFTPRDLTITSHLNRLAQQVLLRSLPHLAEHQITAIPGSVIGVLRDAPGWRLLGCLDGAATADVIRKVLQLDHEGKPMCASDVAPLMKRIPKPKGEIRELTHLHHAVDACAIAIINHLLPKDGKLWELVAKRELTDADKNAYDDLRQKNQSQWQPRRLARLFSIVPNLDDKGQQPKHDHKWRIRPCRLKDVLPDIGAQVNKCLRERRVVEHTPADMSGLAAEETVWRIFDPSDNHPSARRLKQWFEKKIKDGEIQKLPDPTNEADKTVLIVCRKRRDAKSNDKGKTLHDTGNVWRWVYDEVNKVRVVGLNPGKLHRIKAVKLIRENFGIALDPEPTIVPFHKVWQRLMELKAKNGGKMPRVLRNGQLIRVLSGSRAGLWRVTSVKQTEAYGLVLDLAYPDSVHLSRPNAPVEQLLKEGLEILKHSLTGYDASVVAYAPVKRRPRKPKAAQSEQ

SEQ ID NO: 323 - protein, 1196 aa, unidentified
  REGION 1..1196: note = Description of Unknown: uncultivated organism with predicted taxonomy: Verrucomicrobia
  REGION 1..1196: note = MG2-5 effector
MNNKMKIPTMKIAASKADLQLAFDVGHSSLGWAVLQTTPEKASSIELLGCGVVTFRADDCLASARRGYRRQRRHIRSTRQRIKRMKTLLIHLGVLTKAQLDQPGCAWPWLLAARVLHGGKLLSWPELWDVLRWYAHNRGYDGNRRWTKQEVTPDESTDFDDSELERILSDATATEDEKSDAEKVKEAKILMRSHGVKTMAETFCAICGLDPLGQKKSCNLPGDKRPKAMNAAFPRAVVEGEVRRIMRAHFGGKLPKVDEALERMLLGLNSQDKVAWRAIPCPGLKLPKRYQGALLFGQLVPRFDNRIIATCPITHYQEYQRALGAIRDNDPAYLKKHSVNLDNHDPSWWAKHIADKLAKVPSRDCVEFMNFRWGMQLANIRVARFGEKELSPLKVEERKQLDDMMRAAGAMGPGEFKKSVRHVTSAIRDNLDTMLMHPDAKDALVLDAVQKLIRSDDLESIWKLLPERLQKRTRGRWRQGWRISFADLRRQLAELGGDTEAFDAELTRQVDAANVNLKKKGKQTTREELLKKPFFVKKLGQRAAFARHLLKQAYEEVMAGSHPKEKDGCLFISEEMREAQLQREIAQQTNNHLVRHRLLILTGNEKAKPHPKEGLLQHIIKEYAGGDGTRIGKITIEVNRDLREMSGKSNYDKQADLNNRVKNHHSVVEYLHEHLPAKYHNRINGSLIRKARVAADLDWKCPYTNEAIQPIHLITKVVDLDHVVPHALRPSDGLDSLVVTFCAVNKMKGKRTAWQFIKDEETRSVSYRNEQGKEEKVDGMPNLKIRFFSDYKKFVDDLKIKAKGEHKADAERRERRQQLLRLANYEEKAFLPRDLTQTSQLVRLAAQALRRNLPHLGPENVVSLPGSVTGMVRKSWNVTGCLELACPQVMEEVVDQDGKAVRRAKDKGEIRGITHLHHALDACVIGFSSHFIPNNGGLWELMVKRRWTPAEEKELEARRVFSKGMDGRFQMTDLHKRHKEAIRQRLAEKRVVQHIPARMDGLRVEQNMWRVVSVKDGEATLRQRIRHVDGSRPKKAGTEKKTKLLGLEPGKLQTNKGVLIIPDNFGVALVQPEPVIVPFHKVWVRLRDLKKVNSGTKPEIIRNGQIIRIAEGKYKGVWRVFSAKNNSTGMALDIGLPDVVRLKNKTEGHKINVLLSSLVKNGIEAIKAPLTGVPVSAGKGESHSSPLEPRQSSNAS

SEQ ID NO: 324 - protein, 1119 aa, unidentified
  REGION 1..1119: note = Description of Unknown: uncultivated organism with predicted taxonomy: Verrucomicrobia bacterium
  REGION 1..1119: note = MG2-6 effector
MQVENFLNKVENRELEVAFDVGHSSIGWAVLSRKTSQESQNVAEYFYPEIIGCGVVIFEPDTCLAKKRRDYRRQRRHIRSTRQRIKRMKSLLQHLGVLTEAELDKPGNSSPWKLAAKVLQNSGLLTWQELWDVLRWYAHNRGYDENRLWSETLPDDEKEESKRVENARKLMAQFQCGSMAETVCKMLGVDPLSTDKRSSHLRYKGTDIAFPRNVVVREVREILKKHIGKLPQVSEQLVETLTGDKENSWKTIPCPSINLPKRYYGSLLFGQLLPRFNNRNIARCPISGEKLPLKECVEFYRYRWAMLLCNIRVKVNGSKERPLNVNEREYINGIMEKKGFFTKHELRIAVNDAVMQTLKNENYNGTPVILTNISAMFLTEDMEKALTLYPVKKIINSEKVQVFWNIIPERLQKRISGLWRKGKQITPQEFRNQLEKISPEKLLDFDNAVEEFLKKNRKEKNYLESKIPDSPLKDLQGRAPFSKAILKKAYEEVLSGRDPREEGGCLFRSEEIRLRELNKKITEQTNNHLIRHRLLILERLFDDIVKEYANNDKNRIGQVTIEVNRDLREFSGMTAKEIASELTKITSDHRKAVQYLEENLKGKPYKITASLIRKTRIAMDLDWTCPYTGQKYDIYDLLEKRVDLDHIIPQSIRPSNSLESLVITFPEVNRFKAQRLAFQFVKEEQTKTVKGLPNLQIRTLENYKNWGENLKESRFDRNKSPQSKRKKLLLLPEYVQEEFLPRDLTQTSQLVRLAAQVIRKKYVDSKEPKIVSMPGSVTAVFRKSWKVMGCLSKAVPAILDENGEVRPKDEIRNITHLHHAIDACVLALASHLFPNNGRLWELLVKNKLNSSEVDELKKIPLVQVGVDNKINISDLPEFIKEQISNRLLERRVVQHISKDMSGLKCDETVWRVVDQNCDNSYGKKLLRWCKEMNVEIPAPDSDSVLIVSRKRKDKGTTKPTKILHESQSFWWQYDIVKKSKVIGLNPENGDGKLKKLKAVKIIGDNWGLALDPKPQIIRAFKIYQQVREIKNANDGKPPRIIRKGQLIYVPNGRYKGLWKVFSVKDKKTGIYLDIGEVDQVSLRSERKSAKENVDVRTLMKNGLRPLSTPYTGINACLIT

SEQ ID NO: 325 - protein, 1056 aa, unidentified
  REGION 1..1056: note = Description of Unknown: uncultivated organism with predicted taxonomy: Verrucomicrobia
  REGION 1..1056: note = MG2-8 effector
MASRRNAPDLQLAFDVGHSSIGWAVLQANPDVEIAGCGVVIFRADDCLASARRGYRRQRRHIRSTRQRIKRMKALLLHLGVLTQTQLDKSGCAWPWKLAARVLVGGKTLTWPELWDVLRWYAHNRGYDANRRWSAAEAEAEKEDTEKLENAKTLMDKHGVKTMAETFCKELGVDPRGAKSSSMTRFKGLNAAFPRGVVEAEVARILQAHFGKLKGADEKFAAALFSDWRAIPCPKIKLPQRYQGGLLFGQLVPRFDNRIISICPISGQKVPSRNTPEFLNFRWGMLLANVRVARLVDRELKPLTVEERRELDRLTRAEGAMTAKQFTDAVEKVTGAIRHNLATMLMHPDAKDALVLDPVQKLVTTGHRAALWPTLPERIQKRARGQLRRGKPVTLGDLGNEVPAFHAQVQSILDKTAGRGRKKDKALTRDDLLREILQVRKLDGRAAYSRPILRKAFEQVMDGKHPAEDGGCLFVTEQTRQAQLSRSLTQQTNNHLVRHRLLILSRLLNAIVKEYADGDKTRIGKMTIEVNRDLREMSGKTAKEVAQDLGLRLANFKNVVKKLEGDESFMRELNQRGLHHIPPGIIRKARVAEDLGWRCPYTGMEYEPVHLLTRRVDKDHIIPHADRASDSLDSLVITFSAINAMKGKRTALQFVNEEQGKTVEDLPNLSIVSVNRYREFVEGLEAFRGHDDDRRRKKRRKDLLLLPSYEEKEFTPRDLTVTSQLVRLGALTLKREFADVKQPPVIVSLPGAVTGEVRKAWDVLGCLGLACSQVLDVEGKPKTKTEIRDITHLHHALDACVLGLASHFIPNNGRVWELITKRNLTSAEQKELIALNVFATGPQGRVQLRDLRPERKEQIRQRLAEKRVVQHIPKRIAGLRVEQNTWRVRGSKDGDVTLQQRIRQPDGKRPLKQAVERASKLIGLEDGKLHRLSGALVVGENFGVALDPQPTIIPFHKVWPRLQELKKANGGKLPRVLRNGQIIYIPKGTYSGVWKVFSAKNNKSGMALDMGRPDVVRLRNKTDGHKINVLLSSLLKDGMTIVDAPLTGVSSAPKQS

SEQ ID NO: 326 - protein, 985 aa, unidentified
  REGION 1..985: note = Description of Unknown: uncultivated organism with predicted taxonomy: Verrucomicrobia
  REGION 1..985: note = MG2-10 effector
MKALLLHLGVLTQTQLDKSGCAWPWKLAARVLVGGKTLTWPELWDVLRWYAHNRGYDANRRWSAAEAEAEKEDTEKLENAKTLMDKHGVKTMAETFCKELGVDPRGAKSSSMTRFKGLNAAFPRGVVEAEVARILQAHFGKLKGADEKFAAALFSDWRAIPCPKIKLPQRYQGGLLFGQLVPRFDNRIISICPISGQKVPSRNTPEFLNFRWGMLLANVRVARLVDRELKPLTVEERRELDRLTRAEGAMTAKQFTDAVEKVTGAIRHNLATMLMHPDAKDALVLDPVQKLVTTGHRAALWPTLPERIQKRARGQLRRGKPVTLGDLGNEVPAFHAQVQSILDKTAGRGRKKDKALTRDDLLREILQVRKLDGRAAYSRPILRKAFEQVMDGKHPAEDGGCLFVTEQTRQAQLSRSLTQQTNNHLVRHRLLILSRLLNAIVKEYADGDKTRIGKMTIEVNRDLREMSGKTAKEVAQDLGLRLANFKNVVKKLEGDESFMRELNQRGLHHIPPGIIRKARVAEDLGWRCPYTGMEYEPVHLLTRRVDKDHIIPHADRASDSLDSLVITFSAINAMKGKRTALQFVNEEQGKTVEDLPNLSIVSVNRYREFVEGLEAFRGHDDDRRRKKRRKDLLLLPSYEEKEFTPRDLTVTSQLVRLGALTLKREFADVKQPPVIVSLPGAVTGEVRKAWDVLGCLGLACSQVLDVEGKPKTKTEIRDITHLHHALDACVLGLASHFIPNNGRVWELITKRNLTSAEQKELIALNVFATGPQGRVQLRDLRPERKEQIRQRLAEKRVVQHIPKRIAGLRVEQNTWRVRGSKDGDVTLQQRIRQPDGKRPLKQAVERASKLIGLEDGKLHRLSGALVVGENFGVALDPQPTIIPFHKVWPRLQELKKANGGKLPRVLRNGQIIYIPKGTYSGVWKVFSAKNNKSGMALDMGRPDVVRLRNKTDGHKINVLLSSLLKDGMTIVDAPLTGVSSAPKQS

SEQ ID NO: 327 - protein, 952 aa, unidentified
  REGION 1..952: note = Description of Unknown: uncultivated organism
  REGION 1..952: note = MG2-11 effector
WTAADIETLKEDTEKEENAINLMQKNGLTTMAETFCKELGIDPLGSKKSSIVRFKGFNAAFPRKTVEDEVRRILRAHFNKLEKANADLERALLGRDRNDKLAWQAIPCPNLKLPARYQGGLLFGQLIPRFDNRIIVRCPITGQKVPTRHCAEFLNFRWGMQLANIRVACGGERWLHPLNVEERKAIDARMREQGSMTEGELKKAVRTNTGCSRDNLDTMLMHPDAKGALLLDPVRKLTKSEKLKTLWPLLPEPVQRRAANMWRRGKAITLLALRDRIETAGSSPAAFDAEVERLLDAANTKKRRKDQPITREELLAEPLVVRPLDGRAAYARRILRQAFEEVMAGKHPTKEGGCLFRSEEIRAAQLQCRVDEQTNNHLVRHRLLILERLQSDIIKEYANRDPARIGRATIEVNRDLREISGKTAKEKAQELGQRLANFKSVTKKLEEAFEGRNVHISPGLIRKARVAEDLGWTCPYTGQRYDPLDLLNAKVDKDHVIPRTERASDSLDSLVITFPAVNKWKDKRTALKFIEDEQGQPVLDMPNLSIKTFAQYEADVKALRPSFDPRPAKRDGRTKGPIDDDLRRWNRKQLLLNVRKWEEKEFLPRDLTQTSQLVRLGAQILKKGFTGLERQPVITSMPGSVTGVMRKGWNLIGCLSAANPNVLDEIGQPKIKTEIRDITHLHHALDACVLVLASYFIPNKGAVWELIVKRRLDETEQLQLRTATRGIFNFSPGRRFGLADLPNSLKEQIRQRLAERRVVQHVPSEMTGLRTEENSWRVVGIENGEALLRQRIRQPDGSRPVKEMRERTEKLIGPEPRNRTGKLKRNKAALIISDNYGVALDPEPTIIPFHNVWKRLAELKQANGGRPPRVLRNGQLIVVPNGKFKGAWKVFSAKNNKSGMALDIGWPDVVRLRNKVEGHKINVLLASLLRSEMRLAKTPLTGMAACPSTSSA

SEQ ID NO: 328 - protein, 829 aa, unidentified
  REGION 1..829: note = Description of Unknown: uncultivated organism with predicted taxonomy: Verrucomicrobia bacterium
  REGION 1..829: note = MG2-12 effector
MNAKRKNEVAGGTKPDLQLAFDVGHSSLGWAVLQTGEANSFEVSLLGCGVVTFGADDCLASQRRAYRRQRRHSRSTRQRIVRMEKLLLYLKLIEPQQLATKHQQAGGHPAPWLLAARILASNGDPRYLLDWPELWDVIRWYAHNRGYDGNARWANACDRALSDAEQEEKKADTEKEKKADELMENYGKKTMAETVFADLFAPFHLNDPTKVSSLPFFQRRFKANQCAFSRETVEAEVARLLDAHTGNLKGCNKQFIRLLLTRKLMGEDRGMLSEAGIRLPKRFEGGLLFGQLVPRFDNRIIAACPVTGEKVPNKHCLEFLEFRWAMTLANIGVGFGTETYRNREGNESTLRPLTGDERRKVDARARRLGFLKAEPDRPGKDGLVRSGRNELREIVVAATNCDRHNLDTLLLHPDAREGLRLLRVKGDTTAFRVAWGSFGDPLDIQGHYHDDPLRHRFTTQLLRLKKLNLRSILSELERLGKVEVALCLRAAAELQAKGKKVKLDPIKLDGLLDAEFSCDKLKGRARYSRAKLAQAVQEVFNKSEPIHPLQKGGCLEQTNEIKQAALDKPMDQQTNNHLVRHRLLILKRLQEHLFNDYADGDKLRVSRITVEVARDVQTTSGMTNKEKAKELGSKIKHHHETAAWLAERLEDERDENGRRFVIGPSLIRKARIADDLGWECPYTGRKFEPADLIHRRYDKDHIVPRSKRLSDALEAMVITSCEVNREKKNRTALQFIKDMNLPENRAVRERLNIRTEAQFREFVDELKAKGSHADDVRRRKRRKELLLVQKYEEKEFTPADLTKTRFINKLAAQQLQAAFRDLPEQQRPP

SEQ ID NO: 329 - protein, 1083 aa, unidentified
  REGION 1..1083: note = Description of Unknown: uncultivated organism with predicted taxonomy: Verrucomicrobia bacterium
  REGION 1..1083: note = MG2-13 effector
MNTTASPDTTSKKSIGDLSLAFDVGHSSIGWAVLQNIDASAPSILGCGAVIFAADDCLASQRRTFRRQRRHVRSTRQRIARMKALLAHLGVLSREQLDQPGCAWPWQLAARALCGGPLLNWSELWDVLRWYAHNRGYDGNRRWSAADIEMLKEDTEKEENAINLMQKNAVTTMAETFCKELGVDPLGSKKSSTVRFKGFNAAFPRKTVEDEARRILRAHFGKLEKVNTDFKRALLGRDTNDKLAWQAISCPDLKLPKRYQGGLLFGQLVPRFDNRIIMRCPITGEKVPTRHCAEFLNFRWGMQLANIRVASGDGRELRPLNVEERKATDAQMREQGSMTEGELKKAVRSVTGCSRDNLDTMLMHPDAKDALLLDPVPKLTKSDKLKPLWPVLPERVQRRAANIWRRGKAITLLGLRERIQMAGGSLATFDGEVERLLDAANTKRRRKVQPITREEFLAEPLVVRRLEGRAAYARLILRRAFEEVMAGKHPKEEGGCLFRSEEVRAAQLQRRIDEQTNNHLVRHRLLILERLQRDIVKEYLGGKSAHIGRVTIEVNRDLREMSGKTAKEKAQDLGQRLANFKNVAEKLEEAFEGKDVHISPGLIRKARIAEDLGWTCPYTHHSYDAFQLLNRTVDKDHIIPRTERASDSLDSLVITFSAINKWKGKRTAMKFVEDEQGNPVPDMPNLSIVTLTHYKAFVEGLDTFRGHDDDKRRKKNRQRLLLVRDYEKPEFTPRDLTQTSQLVRLGAQVLKKGFTGLERQPVITSMPGSVTGVMRKGWNLIGCLSAANPNVLDEIGQPKIKTEIRDITHLHHALDACVLALVSHFIPNNGGVWELIVKRRLDETEQLQLRAATHGIFNFSPGRRFGLADLPDSLKEQIRQRLAERRVVQHVPTEMTGLRVEQNAWRVVGIADGEALLRQRIRQPDGSRPVKEKRERTEKLIGPEPHNGTGKLKRNKAALIIPDNYGLALDPEPTIIPFHKVWTRLQDLKGANNSKTPRVLRNGQLIRVAESAGEYKGIWRVFSTKNAAVGFLVDMGRPDVVRLKNGVEGHKINVRLSSLLKHGVELVRSNYAGMAACPSTLSA

SEQ ID NO: 330 - protein, 1077 aa, unidentified
  REGION 1..1077: note = Description of Unknown: uncultivated organism with predicted taxonomy: Verrucomicrobia bacterium
  REGION 1..1077: note = MG2-14 effector
MSLALSFDIGHSSIGWAVLDVKGKDPEIVGCGSVVFPAEDCQNQQRASFRRQRRHIAATRNRIKRLEAFFVASGVLSEKDIWECRRRPHPWPWLLAARTIVSGQTLSGVELWAVVRWYAHNRGYDGNALWAGEDSNQDDVMKVQAARQLMDKCGTETMCETICSLLEADPRSDSNPKPKHYFKGENAAFPRQTVTDEARSVLELHIAKIDGVNEAFVSALVDEWRRAKSAGFDVKLPQRYCGGLLFGQLKPRFENRIIPKCRLTGEKTPSKHSREFYRYRWAMFLNNLRVHDLMTGFSRPLDSNERVKLDGIMREAGYFTKTTLTKALVKELQLEPANLEAMLLLPEMENALTLDPALREVSTNKILKTIWPCVDNVWQRVFLNQLFHERRFRGQPVSLNQWRDRLLSDGKSVEDFDKALQSAFETEASFLWNKKNLKVTFEQFLSRPICLTSKHVASGRAPYSKSKLRAAVDAVMQGEDPRMIGGPLEETIEVGQRQRDKEIDQNSNNHLVRHRLKIFARTLNDLVARYASGDASRVNWFAVEVVRDLVQFSGKTAKEKSQILGQQLWHHRKIVSYLEEERENTNGTWDINAGLIKKVRIADDMGWQCPYTGKTYSLNDIIHGEVDREHIIPRSSRPTDALHALTLTFRQINKEKGARTALQYIEDTRGESHTFSPKEFREFVGGLKNKNGPAKDDEVRCKKRKIALLTPIYERRGKVKQTDTGEEVLEAFTDGTLSQTSYLNKLAVQQANHWFRQQLGLDTKLPLVIQLSGSVTAAIRTGWDLFGQLNEVCPATRNKTKTEVREITHLHHALDAIVIGLSAHYFPRDKRLWSLMSRRAVKNSVDQAYMKQQLGDLVCFNSDGKWKLQELDIGIKKQVAARLSEKRVVRHNPRTMRGLRVQQNVWRVEGEDPQDDSKLLISMRPRNEEGSKGFSKQRSEKKSKLLGPSPNIGSGKLKELKGALIVEDNFGLALLASGPVVIPYIGVWKRIKELTQMNNGVRPEILRNGSIVEIPKQEGKPYKYEGRWLVRGIDNSAQGMRIKFDTVDGVGGIAFKSFINPLLKRGMRILSADLSGE

SEQ ID NO: 331 - protein, 1079 aa, unidentified
  REGION 1..1079: note = Description of Unknown: uncultivated organism with predicted taxonomy: Verrucomicrobia bacterium
  REGION 1..1079: note = MG2-15 effector
LRMSLALSFDIGHSSIGWAVLDVKGKDPEIVGCGSVVFPAEDCQNQQRASFRRQRRHIAATRNRIKRLEAFFVASGVLSEKDIWECRRRPHPWPWLLAARTIVSGQTLSGVELWAVVRWYAHNRGYDGNALWAGEDSNQDDVMKVQAARQLMDKCGTETMCETICSLLEADPRSDSNPKPKHYFKGENAAFPRQTVTDEARSVLELHIAKIDGVNEAFVSALVDEWRRAKSAGFDVKLPQRYCGGLLFGQLKPRFENRIIPKCRLTGEKTPSKHSREFYRYRWAMFLNNLRVHDLMTGFSRPLDSNERVKLDGIMREAGYFTKTTLTKALVKELQLEPANLEAMLLLPEMENALTLDPALREVSTNKILKTIWPCVDNVWQRVFLNQLFHERRFRGQPVSLNQWRDRLLSDGKSVEDFDKALQSAFETEASFLWNKKNLKVTFEQFLSRPICLTSKHVASGRAPYSKSKLRAAVDAVMQGEDPRMIGGPLEETIEVGQRQRDKEIDQNSNNHLVRHRLKIFARTLNDLVARYASGDASRVNWFAVEVVRDLVQFSGKTAKEKSQILGQQLWHHRKIVSYLEEERENTNGTWDINAGLIKKVRIADDMGWQCPYTGKTYSLNDIIHGEVDREHIIPRSSRPTDALHALTLTFRQINKEKGARTALQYIEDPRGESHTFSPKEFREFVGRLKNKNGPAKDDEVRCKKRKIALLTPIYERRGKVKQTDTGEEVLEAFTDGTLSQTSYLNKLAVQQANHWFRQQLGLDTKLPLVIQLSGSVTAAIRTGWDLFGQLNEVCPATRNKTKTEVREITHLHHALDAIVIGLSAHYFPRDKRLWSLMSRRAVKNSVDQAYMKQQLGDLVCFNSDGKWKLQELDIGIKKQVAARLSEKRVVRHNPRTMRGLRVQQNVWRVEGEDPQDDSKLLISMRPRNEEGSKGFSKQRSEKKSKLLGPSPNIGSGKLKELKGALIVEDNFGLALLASGPVVIPYIGVWKRIKELTQMNNGVRPEILRNGSIVEIPKQEGKPYKYEGRWLVRGIDNSAQGMRIKFDTVDGVGGIAFKSFINPLLKRGMRILSADLSGE

SEQ ID NO: 332 - protein, 1137 aa, unidentified
  REGION 1..1137: note = Description of Unknown: uncultivated organism with predicted taxonomy: Verrucomicrobia bacterium
  REGION 1..1137: note = MG2-16 effector
MKTSHSSPDLELAFDVGHGSIGWAVLQNGSQTQIKGCGVVIFRPDDCLASKRREFRRQRRHIRSTRQRIKRMKLLLAHLGVLTQEQLDKPGCAWPWKLAAQVLVGGPTLTWPELWDVLRRYAHNRGYDANRRWSTIEIDLDEEQEDTEKLKTAEGLLKKHGVRTMAEAFCKELGVDPLGSKCASKVWFKGVNAAFPREVVEAEVRSILRAHFGKLKAVDELLEKALCDDWRAIECPAIRLPKRYEGGLLFGQLIPRFNNRIISKCPITGKKVPSRNCPEFLKFRWAMLLANVKVAGTADRELRPLTVAERQAVDAKMREKGALTAEEFKHAVRTASGCSRDNLDAMLMHPDAHEALLLDPVQRELSRDELIAALFAKLPVRIQKRARGQLRRGKTITLGQLRDQAIALGESVEAFDNELNRLLEAATIRRRRKKDAALTAESVLKRSLYVEKLTGRAPYSREILVKAYEEVMAGKHPAEEGGCLFVTDQMREAQLQREIDEQTNNHLVRHRLKILDRLLRDIITEYAGNDKTRIAKITIEVNRDLREMSGKTAKEKAQYFRLLTADHHRVAEKLKKALAGQTVDGKPIRISASRIRKARVAEDLNWTCPYTGQKYEPIDLVTERVDEDHIVPRSQRMSDSLESLVISFSAVNKWKGKRTAMRFIKEEQGKPVPGLPNLSIVSLNRYLEFVDSLPPRNDPRKLKRHLKLLQPIDDDLRKWRRKELLKLEEYEQEEFTPRDLTQTSQLARMAAQMVKRTFQDVEQKPVIVSMPGSVTSTVRKGWDLLGCLSKACPEVLDETGQVKTKSEIRDITHLHHALDACVLGLAAHFIPNNGDIWKLIIKQDLNETEKDLLRPLGIFDIGEKRFRLKDLPNELKNQLRERLAELRVVQHIPKRMTGMRVDQTVWRVFDPQDQHPSARRLARWFKKAGVNVPAPDADTVLIVCRKRRSQPDSETGKTLHETKTWRWVYQEIAKSKLIGLQPRPGSEGRLKKLKAVKILADNYGVALDPEPQIIRFHKVWPQLNELRQKNGSKPVRVLRNGQLIRVPRGTYAGIWRIVSTKSTEAFGLALDLALPDRVKLTRGNVPIKRLIEDGLEVVDCPYTGVDASKIEFAPVKKRPRKSKTAPAETTTPPSSSA

SEQ ID NO: 333 - protein, 1471 aa, unidentified
  REGION 1..1471: note = Description of Unknown: uncultivated organism
  REGION 1..1471: note = MG2-17 effector
MGNRADLELAFDVGHSSIGWAVLKTQPELEMKGCGTVIFRPDDCLASKRRDYRRQRRHIRSTRLRIERMTNLLLGIGAITQSDVESGKKQHKGEPPPWLLAARVLAARTETEKAKALLTWPELWKVLRWYAHNRGYDANVRWSGESKVEAFSPSPQINTEDVEEQAVEAEESELADVEVAEDSDSDSDKLRAGKHLMSSKYGFHTATFAETVAKILLGPKRDVKPGQAGKTGKLAETTESFSESDFRKLLFDTPTESWSHPRHLSIYFKGIRAAFPRRIVKVIGGQRTLVGGTEWEVRAILRAHFDAPKGKALCDETFEAAICGRLPETREDWRAYAETHPTLYLSSDDQAKLRSLRAPPKASQEKSERIRQQRRNILTGKLFLPSRYEGGLLFGQLGTRFFNRIISRCPFSFARIVAAILSGDENTLRLYGTTLAAVNRSRHSRNGVMETDLDLARRWAAKLSKVPAAKSREFLLYRWAMTLANVIVARPGRERLTGYERRCIHRRLRRTGYFTKDSFKEAVRQTTGCEPANLDQMFDTTTEAENSLFIDPVRKYLATNEVAGVVLPVLSQFLQVRLARLLQKGKGVRVREIAEWLDETAKRELSQRIEQYVQENNAKAKAAKKKPHDTHSPDEDRRKKQNKLTAAAVLRVRLEAPLPKGRASYHRVVLRKAVAEVLKGFDPRKPKRDRSNPDGENKPSHGCLFRTPETNRQLLGNPNNEAEYERWKQRWLSHQKNYQRYIARERLSPGSGEAFVRSEYHAAQSYRWLASQSNNHIVRHRLTILDRLLRDIIADQNYCAGDPKRIRRISIEVANDILTFSGLERKQLSGQVMPSLREHHDHVVRLLQQELKGTQWENKIDGELIWKAKIADDLGWWCPYTGKKYSPCELASGEMDVDHIIPKSRRLTNAMSAVVVTFKTINNLKGDLTAWEFVERYQDQPVGPHGEKVRKLWDYERFVKNPDNEMDKPRLSGETGHSDYPRWPKYLPGSRRKLHPDYVRRKLRRRYLLLKHYEKDKDTFTPRDLTITSHLNRLAQQVLLRSLPHLAEHQITAIPGSVIGVLRDAPGWRLLGCLDGAATADVIRKVLQLDHEGKPMCASDVAPLMKRIPKPKGEIRELTHLHHAVDACAIAIINHLLPKDGKLWELVAKRELTDADKNAYDDLRQKNQSQWQPRRLARLFSIVPNLDDKGQQPKHDHKWRIRPCRLKDVLPDIGAQVNKCLRERRVVEHTPADMSGLAAEETVWRIFDPSDNHPSARRLKQWFEKKIKDGEIQKLPDPTNEADKTVLIVCRKRRDAKSNDKGKTLHDTGNVWRWVYDEVNKVRVVGLNPGKLHRIKAVKLIRENFGIALDPEPTIVPFHKVWQRLMELKAKNGGKMPRVLRNGQLIRVLSGSRAGLWRVTSVKQTEAYGLVLDLAYPDSVHLSRPNAPVEQLLKEGLEILKHSLTGYDASVVAYAPVKRRPRKPKAAQSEQ

SEQ ID NO: 334 - protein, 1003 aa, unidentified
  REGION 1..1003: note = Description of Unknown: uncultivated organism with predicted taxonomy: Verrucomicrobia
  REGION 1..1003: note = MG2-18 effector
MKTLLRHLGALTQEQLDKPGCAWPWKLAAKVLVSNGAHTLSWPELWDVLRWYAHNRGYDANRRWSGAEVDAQEEQEDAEKLKTAKNLLQKHGVQTVAETFCKELGIDPLGQKSASTVRFKGLNAAFPREIVEEEVRRILRAHFGKLKGVDENLERALCGRDSRDKDAWQAIPCPDIHLPERYEGGLLFGQLVPRFDNRIISKCPITGQKVPARNCREFLEFRWAMQLANVKVAATGNGPLRPLTADERRQVDTKMREKGALTPTEFKEGVRVATGCVRDNLETMLMHPDAREALTLDPVQKALTSDERIAALFAKLPARIQKRARGQLRRGKTITLGQLRDHALAVGESVTDFDEELGRQLNAAAAKKRKKDAGISRESLLARPLHVEKLSGRAAYGREILRKACEEVMAGKHPKEEGGCLFVTEQVRQAQIQRDIDQQINNHLVRHRLKILERLFHDIIAEYAGGDKSRIGRITIEVNRDLREFSGKTAKEKAQDLGLRIADHHRVAEKLQKALAGQTLNGQPIRIGPALIRKARIAEDLGWTCPYTGQKYEPIDLVTRRVDKDHIVPRSQRASDSLDSMVITFSAINKWKGKRTALKFVEDEQGKPVPDLPNLSIVSLSRYRDFVEKLDTFKGHDQDKKRKKRRKALLLVRDYEEEEFTPRDLTQTSQLVRLGAQMLKRPFLREKHQPVITSMPGSVTGEVRKGWNLLGCLSKACPQVLDENGEVRTKTEIREITHLHHALDACVLGLAAHFIPNNGRIWELIVKRNLTDTEKLQLRALGIFDFSPEGFRLKELPDELKNQIRERLAERRVVQHVPKRMTGLRVEQNAWRVVKIEGDEAIIRQRMRQPDGSRPVKETTERVTKLFGLNPVGGSGKLKALKAALIIPENFGIALDPEPTIIPFHKVWPRLQELKKANGGKWPRVLRNGHLIHVPKGRYQGTWRVFSAKNNKSGMAVDMGWPDVVRLRNGVQGHKINVLLASLLRDGMTILDTPLTGVASPVR

SEQ ID NO: 335 - protein, 1125 aa, unidentified
  REGION 1..1125: note = Description of Unknown: uncultivated organism with predicted taxonomy: Verrucomicrobia
  REGION 1..1125: note = MG2-19 effector
MQEKILSTKDGGKNLEVSFDVGHSSIGWAVLKSPDKNGENNPEFPQIELLGCGVVTFEPDTCLAKKRRDYRRQRRHIRSTKMRIKRMKQLLEHLKVLTPSELEKPGSPYPWKLAASVLQGKHLLNWNEIWDVLRWYAHNRGYDENRHWSEVAEKDKDDTESVKKSIELMKEHQTKTMAETICKELGTDPSESDKRASHKSYKEVGAAFPRSVVVNEVREILDKHIGKLPGLSQELVETLVGESKDAWKTIPCPSINLPSHYWGSLLFGQLLPRFNNRNIKKCPFSGDTLPLKECVEFYRYRWGKILTNIRVSANGLFGQKRPLNPEERKYVDSKMRELGSMTETELQKAVEEAVLMTLNKEGILKPGKINTNLETMFLTPEMEKGLVLDPVKNLINSDTVQSFWGVLPPQLQKRLTGKWRRGKQIKIGEIQKELEKIAPEKVEEFISTIKKNLKGKNKNQNYLEIKIPDSPLKQLKGRAPYGRKLLQQAYEEVLEGKDPHEKGGCLYRAENILKEEIQEDIEKQTNNHLVRHRLLILERLFDDIVKEYAGNDKNKIKLITIEVNRDLREFSGMTAKEIESELNARSADFKKAKKQLEDMLLKAGLSNTRITATLIKKARIAQDLDFTCPYTGAKYELIDLINKQVDLEHIIPKSKRPSDSMESLVITFKEVNRWKGNRTALRFIKEEQNKPVQGKGNLMILTEKRYQELVNGLNTKGHPKDTERKKKRKELLLMEDYVEEEFLPRDLTQTSQLVRLAVQVLKKKYIGEKEKPVFVSMPGSITGKFRAAWNLLGCLLKAVPWAADEDNQVKPKDELRNITHLHHAIDACVLALAGHFIPTYKNGKVWELMIKGTVKPSEKSYIEDVPMLQLDSENRLHIKDLPDSIKEQITERLYERRVVQHIPKDMSGVKCDETIYRVVDPNDNHPYAKKLIRWAKEKDIQIPSADDDTALIVAKKRRGADGATGSKILHEGKKYVWQYDIVRKTKLLGIEPIGGNGKLKRLKAAKLIGENYGIALDPKPQIIRHFKVYQTIRELKKLNNGKPPRILRKGSIINVPKGRYKGVWKITSIKDSKDEIKVNILRPQAVKNVGKTNYSKGDVLLRTLIKNGMQVIEAPYTGVNVALYS

SEQ ID NO: 336 - protein, 834 aa, unidentified
  REGION 1..834: note = Description of Unknown: uncultivated organism with predicted taxonomy: Verrucomicrobia bacterium
  REGION 1..834: note = MG2-20 effector
AARQHLTELAARQGAFTKGEFKKAVREAAGWPEKGGHDNLDALLLHPDAEEALVFDPVQAALRKHPLAEAFLTLPPQFLKRLRGKLARGKSVAPGTVRDWLSRAQAPPPSASDPLAAFDAAIQRVLDAANTRKGRKQSALTREQLLEEPLRATYPKGRAPYARPVLRQAYEEVMKGWDPRAEANDHQPRGCLCQTDELKEAQLQRRLEEQTNNHLIRHRLLILGGEQPKPNATPEHERRRLKGLLHDLIQDFANGDKSRIASLTIEVNRELRDLSGKTRKEQEQDLGLRLGDFKRVAAKVEEACRRRGIPCTAGLIRKARVAEDLGWKCPYTGKEFSVDTLLDGVMDKDHIIPHADRQSDSLDSLVITWNEVNKWKGKRTALEFIREEGGKPVPGRPELTVMTLAEFQKHVASLDIRKGHDDDRARKKRRIRRLLTEYYEEKEFTPRDLTVTSHLVRLGAQVLQRAFPPEQRPPVISLPGSVTGEVRKAWKVTACLEAANPAVMEVVEEPDPQTGEMRRIRRAKKKEDIRGITHLHHALDACVLGLASLYFPRHGAVWSAAVKAGQHAATEYDNNEHPLWQAMTKRRPTAQEVVLLKATGLYDGPDSNGRMQLRDLPAELKGQIRRRLAEKRVVQHIPADMSGVKVEENTRGVVAVKDGRVILRQRSARDAKTGLQAVKTTDEAPGKLLGLNPPGGDGKLKRQKGVRVITDNFGVAILDHAPEGEEKFVVIPWHRVWHRVEELKAANGGQRPRLLRNGMLIRVAGLPGKMASKNGVWRVFSVKQTKKLDLGGPDRVAMEDKGLGVWREVSLETLTPARIAILRHGLAGGPQPDP

SEQ ID NO: 337 - protein, 1129 aa, unidentified
  REGION 1..1129: note = Description of Unknown: uncultivated organism
  REGION 1..1129: note = MG2-21 effector
MQEEILNTSDVSKNLEVSFDVGHSSIGWAVLKSPDKNKMNNPEFPQIELLGCGVVTFEPDTCLAKKRRDYRRQRRHIRSTKMRIKRMKQLLEHLKVLTASELEKPGSPYPWKLAASVLQGKRLLNWNEIWDILRWYAHNRGYDENRHWSEVAEKEDEDDTESVKKSIELMKNHQTKTMAETICKELETDPSESDKRALHKSYKEIGAAFPRSVVVNEVREILEKHIGKLPGLSQELVETLAGESKDAWKTIDCPPIKLPSHYWGSLLFGQLLPRFNNRNIKECPFSGDTLPLKECVEFYRYRWGKILTNIRVSADGLFGQKRPLNPDERKYVDSKMQELGSMTKTELRKAVEEAVLMTLNKEGVPQPVKINTNLETMFLTSEMEGGLVLDPVKKLINSDTVQSFWGVLPPQLQKRLAGKWRRGKQITIGEIQKELEKIAPEKVEEFNLAIKSNIKRKKKTENHLNDKIPESPLKMLKGRAPYGRKLLQQAYEEVLAGKDPHEKDGCLYRTENILKKEIRKAIDKQTNNHLIRHRLLILERLFDDIVKEYAGNDKNKIKLITIEVNRDLREFSGMTAKEIESELNARSADFKKAKKQLENMLQEAGLSNTRITATLIKKARIAQDLDFTCPYTGAKYELIDLINKQVDLEHIIPKSKRPSDSMESLVITFKEVNRWKGNRTALRFIKEEQNKPVPGKENLMILTEKRYQELVNGLNTKGHPKDTERKKKRKELLLMEDYVEEKFLPRDLTQTSQLVRLAVQVLMKKYIGEKEKPVFVSMPGSITGKFRAGWNLLGCLLKAVPWAADEDNQVKPKDELRNITHLHHAIDACVLALAAHFIPTYKNGKVWELMFKGTVKPSEKMYIEDVPVLQLDSENRLHIKDLPDSIKEQITERLYERRVVQHIPKDMSGVKCDETIYRVVDPNDNHPYAKKLIRWAKEKDIQIPSADDDTALIVAKKRRGADGATGSKILHEHKGKTKYVWQYDIVKKTKLLGIEPVGGNGKLKRLKAAKLISENYGIALDPKPQIIRHFKVYKTIQELKKLNNGKPPRILRKGSIINVPKGTYKGVWKVISIKEGYSEIKVDILKPQAIKIVDKTDYCKREVLLRTLITSGMQVIEAPYTGVNVALYN

SEQ ID NO: 338 - protein, 1471 aa, unidentified; identical to SEQ ID NO: 333
  REGION 1..1471: note = Description of Unknown: uncultivated organism
  REGION 1..1471: note = MG2-22 effector

SEQ ID NO: 339 - protein, 778 aa, unidentified
  REGION 1..778: note = Description of Unknown: uncultivated organism with predicted taxonomy: Verrucomicrobia bacterium
  REGION 1..778: note = MG2-23 effector
MQLANVRVAGSGNGQMRPLTADERRRVDAKMREKGALTPTEFKDAVRSATGCVRDNLETMLMHPDAKEALTLDPVQKLLTSNECIAALFAKLPARIQKRARGQLRHGKTVTLGQLRGYALAVGESVADFDEELQQQVDAAATKGRKKVAGVSRESLLAQLLRMEKISGRAAYSREILRKACEEVMAGKHPKEEGGCLFVTEQMRQAQIQREIDQQTNNHLVRHRLKILERLFRDIIAEYAGGDKSRIERITIEVNRDLREFSGKTAKEKTQDLGLRVADHHRVAEKLQKALAGQTVNGQPIRIGPGLIRKARIAEDLGWTCPYTGQKYEPIDLVTRRVDKDHIVPRSQRMSDSLDSLVITFSAINKWKGNRTALKFVEDEQGKPVPDLPNLSIVSLSRYREFVEKLETFKGHDDDKKRKKRRKALLLLRDYEEEEFTPRDLTQTSQLVRLGAQMLKRPFLGEKHQPVITSLPGSVTGVVRKGWNLLGCLSKACPQVLDETGEVRTKTDIREITHLHHAVDACVLGLAAHFVPNNGRMELIVKRNLTETEKLQLRALGVFDFSPDGFRLKELPEGLKNQIRDRLAERRVVQHIPKRMSGLRVEQNAWRVLKIEGDEATIRQRVRQPDGSRPLKETTERITKLFGLNPTGGSGKLKALKAALVIPDNFGIALDPEPTIIPFHKVWPRLQALKKANGGKWPRVLRSGQLIHVPKGRYQGTWRVFSTKNNKSGMAVDMGWADVVRLRNGVEGHKINVLLASLLRDGMTILDTPLTGVASPPL

SEQ ID NO: 340 - protein, 1074 aa, unidentified
  REGION 1..1074: note = Description of Unknown: uncultivated organism with predicted taxonomy: Verrucomicrobia bacterium
  REGION 1..1074: note = MG2-24 effector
MTAKQNLADLHLAFDVGHSSIGWAVLRHTPPPALPEILGTGVVIFGADDCLASKRRQYRQQRRHARATRKRIELLARFLFHRLQGETDPATTQFREHLKPYLEQTAATRQLQGDGDSFAWQRAAEILTAARENKPLPDLGWSELWDILRWYAHNRGYFAPPWANRGDESAAPDTDDEVSDTEKVEHANDLMRELGTRTMAETVAAYTARYEREAAEWQQGRRKEKPKHFKGLNAAFLREKIVWPEVCALLTALKGRLPGLDDAFIRTLLGNDVDPLRDRDAWRTIPCPDIQLPKRYHGGLLFGQVIPRFENRIIGVCPIWFSVCQDLCLHHPEITQDDPLRREKEAVVQAFEQWLPRAKKANERLSPEKQKSPEALIAEFAAKQSKLPAKASPEFLRFRWAMQLANVFGAAPGERETRPLTADERKQLTARAEKQGAFTKGEFKQAVREIAGWLEQSSRDNLDALLLHPDAEQALIFEPVQAALRKHSLAEALLALPPQFLKRLRNKLTRGKEVKPQAVRDWLGGAQASTPSASAPLAAFDAEVQRVLEAAATRRAKKQTALTRDTLLAQKLCATYPKGRAPYARPVLRQAYEEVMQGWDPRAEKRADQPRGCLCQTDELKEAQLQRRLEEQTNNHLIRHRLLILERLQRDLIAAPEFANGDKSRIAGMTIEVASDLRDLSGKTRKEQEQDLGLRLGDFKRVAAKVEEACKRRNLRVTAGIIRKARVAEDLGWRCPYTGKEFCIDTLLDGVMDKEHIIPHADRQSDSLDSLVITWNEVNKWKGKRTAMEFIREEGGKPVPGRPELEIMSLAAFQKHVASLDTRKGHDDDRARKKRRIRRLLTEHYEEKEFTPRDLTVTSHLVRLGAQVLQRVFPKDQRPPVVSLPGSVTGEVRKAWRLTGCLEAANPAVMEEVQERNPDTGELQTVRRPKKKDEIRGITHLHHALDACVLGLASLCFPRHGAVWSAMVKAGGDREADDDRRLWLAMTKRRPTPQEATLLKATGRYQQDSEGRLHLADLDEQLKQQIRARLAEKRVVQHVPADMSGVKTEENTRRVLRVREDGRVELRQQAPRDA

SEQ ID NO: 341 - protein, 1337 aa, unidentified
  REGION 1..1337: note = Description of Unknown: uncultivated organism
  REGION 1..1337: note = MG2-25 effector
MGTPTLSSDPNAKLELAFDVGHSSIGWAVLRPVAADVRRLTSTPAKESSQSLVTSAATGIELLGCGVVTFGADDCLASKRRDYRRQRRHARSTRQRIARMEKLLAALNVIPKAELERLHSQAKGHSKQNPHERKGASAPWLLAARVLAARTEEERKKAELDWPELWDVLRWYAHNRGYDGNIRWSGGFRVEAFSETPQVSVSALTEQVDKAKQNEDDPDEDWKKLESAAKRMADYGFTSPTFAEMVAKYLLGPDRTLKPAQPGKPAEVEPTKASFTEADLHKLLFHCEPGFEHHPRHLSNYFKGLRAAFPRRIIKDIDGKPTLVGGTEWEVRYILRAHFGTLTGCDARFEQVVCGGIPEAETDWLALGELLPALYLSDDQKRQLKALRIPKDAFAGDKPGRKREKERLRFLRTAITRDKLVVENRYSGGLLFGQLVPRFDNRIITRCPISGDKVPVKQSPEFLRYRWAMQLANIQVAASAQEKLRKLTADDRAALHKLMQAKGALTEGELKKAVRALPGVARDNLDTMLMHPDAKDALIFDPVQKLLASDELAPFWATLPANLQARFRGKLRHAKAITLADLRTALPDPKAFDVELQRQLDAQNTRKAKKQPAFSRDQFLAQSFDARKALARLSGRAPYARPLLQQAYEQVLAGKDPREEGGCLFRSEEIRQRELHKKLEDQTNNHLVRHRLLILERLLKDLVNAPEFAAGQPERVAQVTIEVNRDLREFSGMTRKAIEMDLGSRLKNFKSVSDKLEKAFDSQTYNGKPVQVTAGLIRKARIAEDLGWQCPYTGQSFEPVHLVSRAVDKDHVIPRSQRPSDSLESLVVTFSEVNKMKGQRTAWQFIQEFGGKPVEGMPNLMIRTPKQFEEFVTKLESFKGHEDDKRRKKRRKDLLLLPKFEDKGFVPRDLTLTSQLVRLGAQVIKRFFAGGARVNNPREAPTDSTARGFVNPRSGPRITSLPGAVTGAVRKGWRVLGCLAQAAPQILEPTGEPKSKTDIRDLTHLHHALDACVLALAAHYFPKDGSLWEAMIVRAPNAAQKQLLHATGFYEFIAEDKPNLKDLPIELKQQIANRLAEKRVVQHIPADMSGMKVEENTRGVVKVENGRATLRQQKRNAEGKLEVKETEEVVGKLVGLHPEPKREAHPSPALRAPSPLAGRGEREESNDAAAGSPPSPFAQRGERDGVRGAAQGKLTPMRGVRVITDNFGVAILDHASNPDDRFVIIPWHKVWHRIEALKEKNGGQPARVLRIGTLIRVPNKSGRSDYRGTWMIRGAQLNQNAGMLVDLSNPDVITYRVSGRKDCKQNVSLKSLVEGGLEILKPSLCGVAQTAQAMAPG

SEQ ID NO: 342 - protein, 853 aa, unidentified
  REGION 1..853: note = Description of Unknown: uncultivated organism with predicted taxonomy: Verrucomicrobia bacterium
  REGION 1..853: note = MG2-26 effector
QRLAKGASAAEATAHARKLAKVPSRNCPEFHRFRWAMQLANVQVASGRSPELRPLTVPERRQVHARMLQRGFLTAAEFKKAVREITGATRDNLDQMLMHPDAQEALILDPVRRLVTTSPILEAVWPQLPEAAQKRAAGQWRRGKTLTLQDVVRHTNAAERARIEAAVKNHLDLENTRRKKKDKTLRADEIMTQPLSIKRLSQRAPYTRVVMDEVWADVMERGLHPKEKGGCLYRDEAIRQAQLQREIDEQTNNHLVRHRLRILERLHRDILQEYAQADPARVARVTIEVNRDLRELSGKTRKEQEQDLGQRLANFKSVVRKLEESFDGKKVKITPGLIRKARVAEDLGWTCPYTGKAYDAFDLLNRAVDKDHIIPRSQRASDSLDSLVITFAEVNKMKGKRTALRFIEEFQGQPVPGAPRLSLRTLRDYQQWVEGLETFKGHPDDQRRKKQRKKLLLLPEYVEKDFVPRDLTQTSQLVRLGAQVLQRAYLGLARPPVVTSLPGSVTGTVRKGWDLLGCLATANPGVLDESGEVKNKTEIRDITHLHHALDACVLALAARAIPNNGRVWELLTRRDNGLNEVERQQLLALGIYARDSEGRLVLRDLSPDLNEQVRQRLAERRVVQHIPSDMTGLAADQTVWRVFDPADSHPSARRLARWFKEAGVKVPPAGADTVLITCRKRRSQAGAETGRLLHQSPTWRWIYQEIPRSKVIGLEPRPGSPARLQRLKAVKILGDNYGLALDPEPQVIRFHKVWSQLQELKRRNEGKPVRVLRNGQLFRVQNGRYRGIWRVFSTKDNSSGMALDMGYADVVRLRNKTEGHKINVLLSTLLRDGLCILQSSYIGVSTCPTTSSA

SEQ ID NO: 343 - protein, 1016 aa, unidentified
  REGION 1..1016: note = Description of Unknown: uncultivated organism
  REGION 1..1016: note = MG2-27 effector
MASLEFSLDVGHSSIGWAVFQSDPFQPLGAGSVIFGADDCLAKKRRDYRRQRRHIRSTRQRIERMKQLLSHVGFLTREQLDQPGTAWPWLKAAEVLKPEGGVKLSAQELWDVLRWYAHNRGYDGNRAWARDETEAQEDTAREQAARQWMQDHNTQTMAETVCAVLDVGPGKRSDGGDKRSSNLRFKGRGVAFPRSVVTSEVRHILENHQGKLPGLDSRTIRILMDDARHENLAAEAGIRLPHRYEGGLLFGQLIPRFDNRIISSCPVTYEREYARALDEGKSEDEAKHQAVRQAKVPAKKSREFLLFRWAMILANVQVADASGTRPLSVEERQSLHQLMVKSGKLTKREFLKTLDATVGSPRHNGSALLMPPDADKALVLRPEKDALKRLSGRAPHARVVMKQAVKDVFAGRHPMAEGGALFRSEELRALQLRRTVEEKTNNHLLRHRLLILRRLVKDMLATYAGNDPSRISQVTIEVNPDLRSFSGMTAEEKKQEMGQRLGDFKKVVQKLRGDLPEVTAISAGLIRKARIAQDMNWTCPYTGMEYDALDLLHGHVDKDHIIPRSLRPSDSLDSLVLTLRTINEMKGQRTAVQFIKEFEGREVQDGKKRSLEILPWSQFQKLVESLDAKGIHDQDRARKKRRKALLLQEHYTEKEFVPKDLTQTSHLVRLAAEELKKEFGGVQCSTRIVSMPGSVTAETRKAWKLEACLAQANPEVAELRERRKTEPAPVSIKQELRDISHLHHALDACVLACAAHYLEKKGNIWKALVQRRKSEAENLELLSTGLFKRGQDGQARLQDLPAQLKNQISRVLAECRVVQHIPSNRRGLKAEETVWRVLDSEDHHPSAEKLRKWAQLAQVELPNPDSGKVLLVKRIRHTAAGAKAPKNLLHQGSEFWWAYEVVALSKLVGPGASGKLRKIKGAKQIGDNFAVTLGPKMEVIPHHQVQERWKGLGCPRYLRNGQIIEMPTGKYSGAWKVFSIKNARQGILLDIARADSPRAKQGNPGTRINVLLKTLV

SEQ ID NO: 344 - protein, 1081 aa, unidentified
  REGION 1..1081: note = Description of Unknown: uncultivated organism with predicted taxonomy: Verrucomicrobia
  REGION 1..1081: note = MG2-28 effector
MTTQRNSSPNASRKFGGQLAFAFDVGHSSIGWSVLTAPERDHPEILGCGVVLFEKDSALACQRRQHRRQRRHIRATRQRIARMEKLFMHIGALTREVIESKHRAGGGNSAPWLLAARVLASNGQKTLSWQELWDVLRWYAHNRGYEPVSDEAEADKEDIEKVENAKREMGRLGTVTMAETITAWLGLDTFGKRAASRENYKARNCAFDRGMVVAEVRRILEAHVDRLPGLDERVVKAILDDVHAIEVPSIRWPRRYRGGFLFGRLATRYHNRIIGKCPISGAKLPKKRCREFLCYRWAMLLANIRVVDSDDGRSRPLSREERSNIHKSMERKGYLTPGDLKRLVGTLPGVKQHNVDQIVVHPDAGEALVFDPIRKLIVSNERVAAVWETLPPQVKKRATGKWRRGKSLNLAALRAEVVELGHDVSGFDSAVTTFVSSRQKTRRRSRTHSKETVDDIIEAPIDARRDLAKLSGRAPYARQLLDQAFKEVMDGKDPRARGGCLEETEEVRRRREERPIAEQTNNHLVRHRLQILGRLLNHLIEDPAYGANRPERIRRITIEVNRDLREMAGRTSQEIAKELGARVANHKKVANRLFGELPEGTRITGSLIRKARIADDLGWRCPYTGVEFEPVDLVEGRVDRDHIIPRSQRMSDSLDSLVITFSAVNKWKGQRTAWQFIQEEGGKPVPDAPNLSIVTPARFRDFVEHLDTKGHRDDYRRKKRRKELLLLERYEERTSGFTPGQLTQTSQLARLAAQILRTPFNDTSNPPEIVSLPGFVTATVRRSWDVLGCLSQAAPGVLNTDGSTRSKTEIRNITHLHHALDACVIGLASHFIPNRGDVWRLLAQRNLRAWEKQQLADLGVFDFDAHGGLRLRDLPQQLKEQLRQRLTERRVVQHVPADMNGMRVEENTRGIVRREDGRVYLRQKTLTSDGRRNVKNSDELDIMVVGLNAGGKLAELKGIRVVKENFGVAILENTSLPSGDRFVIIPHVRVWKQLQELRMRNGGKPPEVWRKGQIVRIPSGNREGKWRIFSVMASNRGIMLKLDRPDSPSFDDSGGASGFKMTLTSLIKRGTIRLETRLTGS

SEQ ID NO: 345 - protein, 1026 aa, unidentified
  REGION 1..1026: note = Description of Unknown: uncultivated organism with predicted taxonomy: Verrucomicrobia bacterium
  REGION 1..1026: note = MG2-29 effector
TVTFESDGCLASKRRVHRGMRRNIRSRRLRIADIEKLFVHQGILSADQIAEKHKPGAGSSSPWLLSAAVLASGGTFVLNAEELFDVVRWYAHNRGYDGNRRWAHNAEDDDGDSDREKAAFSLMDAHHTSTMAETICAQLGLMPGGQKKASMAPYKDSDIGAAFPRKTVVAEVVRVLEAHVGKIEGCSAEFIEALCGENDGAWKTIAVPNLGKPKTFKGGLLFGQKVPRFDNRILPFCPVTNKPTPLKSCIEFMEFRGAMFLSNVRVGSGDGFELRPLSADELNVVWDKIHKKGYLTSRQFKDEIRGLEGVEKDNLQALMTIDSADKNLVVDPALKLISSSTVLKPVMSLLSEASREELLSNLRRKHGVTISEMISDLSISEELTKAIDTSFKKESKKKREKYGTQERWLSERVFSAEFDSGRAPYGRLVMKQAVEEILSGKDPRAKGGCLYLTDEMQKRQESRSLESLTNNHLVRHRLLILKRLFNDMVKEFCEDDKGRILSVVVEVNREVSSMSGKTMKLIKMEEGLKRSDHKKASKIMEAAVEESGENIRVGAGLIRKARVAQDLDWTCPYTGEKFDPLALIHSQVDLDHIIPRSERLSDAMAGLVVTFSEINRWKGARTAYQFISEEQGKQVPGKPNLSIMSLKAYEDFVGKLKISGGHDSDVGRRKARKGYLLLASYQDKEFTPRDLTISSYVAKLAVGQIKKEFSELSKKPPVISLPGRLTGEARKSWKLLGLLSAVNENITSETPKNDIRGLTHLHHAMDAAVMGLMAHCADNLSDGTSWQLLLKRNLRPEEKNLLKANMRNIGFDGNRAHLLDVPNEIKEQLRRCLLERRVVQHVPSSMEGLKVEENTRGIVAFNEERKKVTLRQTGNETEEVSGKLLGYKTEGSKLADQKGVRVINQNFGVALTHPPQIITWHKVYPKLKKIEQETGRWPQVLRNGMLIHVPEGNYAKASKIWKIFSLKNNASGMAVDMGYADSVKPVKINVLLKSLIKDGLQIIGSDFSGEGICHITSSTLEAQPSD

SEQ ID NO: 346 - protein, 1065 aa, unidentified
  REGION 1..1065: note = Description of Unknown: uncultivated organism with predicted taxonomy: Verrucomicrobia bacterium
  REGION 1..1065: note = MG2-30 effector
MKKRDLIFSFDEGHSSIGWNVIQETEAGPNVLALGTVTFTADGCLASKRRIFRGQRRTVRSRRQRIEDIEKLFIHQGILSETQAKEKHEQAGGNACPWLLASAVLASNGKFTLNEKELFDVIRWYAHNRGYDGNKRWAGSADDENKEDSAKEEVAIDLMKNLSTQTMAETICAQLGLQPNGHKKASMKKYKDAGAAFPRKIVEKEVFKILQAHVGKIAGCTETFIETLCGENDSAWKKIPVENIKKTKTFRGGLLFGQKIPRFDNRILSFCPITDKPVPLKSAKEFMEFRCAMFLANIRVKDVIASEMRSLSKNELHIIWELIKEKGYLTASEFKRAVRSLGKFSQDNLDGLMIITESATNLIIDPVQKLIHSNQILSVLWSEIPDFIAKECLFQLGKKRSITLSEIISKMEENLSEGFVTALDKAYKKVQKKNPDKQQWLERKNYRASFDKGRAPYGRDIMKKVVLEVLGGKDPREKGGCLYITEEIREKVNHRKLDELTNNHLVRHRLLILNRLFDDMVDDFADGDKERIKTVVLEVNREISELSGKTTKEIKKEEGLKRAEHKKAREKMEAAVKDSGENIVITAGLIRKARIAQDLNWTCPFTGKEYDPIDLIHKQVDLDHIIPRAERLSDSMGGLVVTFSEVNRMKGKRTAWQFIQDEQGKPVKGKPVLSIRTMKNYETFVSKLKTFGGVKSDEARRKMRKQFLLMPDYKEKGFTPRDLTLTSYVTKLALQQIKNQFDTCRKKPQVIALPGRLTGETRKTWKLMGLLHVVNEKIDGKTLKNDIRSMSHLHHAIDATIMGLLAYYIKDLADGTTWQLLLKRYLTASEIQHLKDNLNHFKIDSKNRAHLCDIPSHVQKQIEQCLKERRVVQHVPSNMGGMHVEENTRGIVGFDSEKGKVLLQQKKDGLKNITTEVAGKLLGYDAEDGSKLKKQKGVRVINKNFGVALTQSTPEIITWHKVYPKLSSIYKRDGVWPNVLRNGMIVYIPDGNYAKVSKVWRILSIKNEKRYMAVDIGFPDSCKSVKRSVNLTTLLKDGMKIVYTKLTGDGICHITSSKSIAPPFD

SEQ ID NO: 347 - protein, 1062 aa, unidentified
  REGION 1..1062: note = Description of Unknown: uncultivated organism with predicted taxonomy: Verrucomicrobia bacterium
  REGION 1..1062: note = MG2-31 effector
MKKRDLIFSFDEGHSSIGWNVIQETEAGPNVLALGTVTFTADGCLASKRRIFRGQRRTVRSRRQRIEDIEKLFIHQGILSETQAKEKHEQAGGNAYPWLLASAVLASNGKFTLNEKELFDVIRWYAHNRGYDGNKRWAGSADDENKEDSAKEEVAIDLMKNLSTQTMAETICAQLGLQPNGHKKASMKKYKDAGAAFPRKIVEKEVLKILQAHVGKIAGCTETFIETLCGENDSAWKKIPVENIKKTKTFRGGLLFGQKIPRFDNRILSFCPITDKPVPLKSAKEFMEFRCAMFLANIRVKDVIASEMRSLSKNELHIIWELIKEKGYLTASEFKRAVRSLGKFSQDNLDGLMIITESATNLIIDPVQKLIHSNQILSVLWSEIPDFIAKECLFQLGKKRSITLSEIISKMEENLSEGFVTALDKAYKKVQKKNPDKQQWLERKNYRASFDKGRAPYGRDIMKKVVLEVLGGKDPREKGGCLYITEEIREKVNHRKLDELTNNHLVRHRLLILNRLFDDMVDDFADGDKERIKTVVLEVNREISELSGKTTKEIKKEEGLKRAEHKKAREKMEAAVKDSGENIVITAGLIRKARIAQDLNWTCPFTGKEYDPIDLIHKQVDLDHIIPRAERLSDSMGGLVVTFSEVNRMKGKRTAWQFIQDEQGKPVKGKPVLSIRTMKNYETFVSKLKTFGGVKSDEARRKMRKQFLLMPDYKEKGFTPRDLTLTSYVTKLALQQIKNQFDTCRKKPQVIALPGRLTGETRKTWKLMGLLHVVNEKIDGKTLKNDIRSMSHLHHAIDATIMGLLAYYIKDLADGTTWQLLLKRYLTASEIQHLKDNLNHFKIDSKNRAHLCDIPSHVQKQIEQCLKERRVVQHVPSNMGGMHVEENTRGIVGFDSEKGKVLLQQKKDGLKKITTEVAGKLLGYDAEDGSKLKKQKGVRVINKNFGVALTQSTPEIITWHKVYPKLSSIYKRDGVWPNVLRNGMLISVFSGRYAGIWRILSIKNNATGINFSIAKPDAIAPFKQNVLLKSLMSAGLKKVETKLTGDGICHITSSKSIAPLFD

SEQ ID NO: 348 - protein, 1062 aa, unidentified; identical to SEQ ID NO: 347
  REGION 1..1062: note = Description of Unknown: uncultivated organism with predicted taxonomy: Verrucomicrobia bacterium
  REGION 1..1062: note = MG2-32 effector

SEQ ID NO: 349 - protein, 789 aa, unidentified
  REGION 1..789: note = Description of Unknown: uncultivated organism with predicted taxonomy: Verrucomicrobia bacterium
  REGION 1..789: note = MG2-33 effector
MKKRDLIFSFDEGHSSIGWNVIQETEAGPNVLALGTVTFTADGCLASKRRIFRGQRRTVRSRRQRIEDIEKLFIHQGILSETQAKEKHEQAGGNACPWLLASAVLASNGKFTLNEKELFDVIRWYAHNRGYDGNKRWAGSADDENKEDSAKEEVAIDLMKNLSTQTMAETICAQLGLQPNGHKKASMKKYKDAGAAFPRKIVEKEVLKILQAHVGKIAGCTETFIETLCGENDSAWKKIPVENIKKTKTFRGGLLFGQKIPRFDNRILSFCPITDKPVPLKSAKEFMEFRCAMFLANIRVKDVIASEMRSLSKNELHIIWELIKEKGYLTASEFKRAVRSLGKFSQDNLDGLMIITESATNLIIDPVQKLIHSNQILSVLWSEIPDFIAKECLFQLGKKRSITLSEIISKMEENLSEGFVTALDKAYKKVQKKNPDKQQWLERKNYRASFDKGRAPYGRDIMKKVVLEVLGGKDPREKGGCLYITEEIREKVNHRKLDELTNNHLVRHRLLILNRLFDDMVDDFADGDKERIKTVVLEVNREISELSGKTTKEIKKEEGLKRAEHKKAREKMEAAVKDSGENIVITAGLIRKARIAQDLNWTCPFTGKEYDPIDLIHKQVDLDHIIPRAERLSDSMGGLVVTFSEVNRMKGKRTAWQFIQDEQGKPVKGKPVLSIRTMKNYETFVSKLKTFGGVKSDEARRKMRKQFLLMPDYKEKGFTPRDLTLTSYVTKLALQQIKNQFDTCRKKPQVIALPGRLTGETRKTWKLMGLLHVVNEKIDGKTLKNDIRS

SEQ ID NO: 350 - protein, 789 aa, unidentified; identical to SEQ ID NO: 349
  REGION 1..789: note = Description of Unknown: uncultivated organism with predicted taxonomy: Verrucomicrobia bacterium
  REGION 1..789: note = MG2-34 effector

SEQ ID NO: 351 - protein, 783 aa, unidentified
  REGION 1..783: note = Description of Unknown: uncultivated organism with predicted taxonomy: Thermogutta terrifontis
  REGION 1..783: note = MG2-35 effector
VVIGGSRPLLKEERFALNSIMEATGYFTKATLKKAFEKSLKLDPVNLDAMFLIPEMEQALTLDPARREVTTNKIIKPVWKTVPAIWKNIFSNQLFHGRNYQGKPPSFSQWRDRIKEKGDSIEEFDDSVASAYKVECQNLSKKGLEVSFEEFCGRPIRVSKRHMASGRAPYSRGKLTEAVHCVFNGDDPKAEGGPLEETEAVRCAQWNLEIDENTNNHLVRHRLKVFVRVLEDLVKRYADNDPRNVSSVCVEVVRDLVEFSGKSAKEKARILGQQLWHHRKISKFLEEEKAKNEGNWEISAGLIKKARIADDLNWICPYTGKQYSLNQIIHGDVDLEHIIPRSKRPTDALHALVLTFSHINREKGARTGLQYIEDTKDSPHTLTPEQYRKFVGRLKKNGPSKDDELRCTKRKIALLTQDYEPRGKAKEKSDSESVSGFTEGSLTQTSYLNKLAAQQVQRWFSDQLDEDVKLPPVVQLSGSVTAAVRRSWDLFDQLQQVCPETRGKSKSDIRGMTHLHHALDAVTVGLAAHLFPKDGHLWALMSKRKITRPSDRDYMRSRLGDLVSFNNDGKWRLEALPESLLFEVAGKLAEQRVVRHMPGTMRGLKVQQNVWRILGEDSRDESKMVIRMRPRGEDGKKTIKQKTEKKSKLLGALPKNASSKLKDLKGALIVEENYGVALDPEPVVMPYRQVWKQLVELRKQNGGQPVRVIRNGNVISVKKGRYAGKWRVHSIKDASMGLVLDMAAPDLVKAENQSHRSKMNVLLKTLLKNGLVVMQSDSALFSL

SEQ ID NO: 352 - protein, 1114 aa, unidentified
  REGION 1..1114: note = Description of Unknown: uncultivated organism with predicted taxonomy: Coraliomargarita sp. CAG:312
  REGION 1..1114: note = MG2-36 effector
LASYSTKKNGAIIRAAEQENSFTFEVPYERAVFKFEPLILSLIPFKINDNNLKMSTTNLSNFNLSFDIGYSSIGWSISSKPANAVFPNWLGAGVVVFDDDSCMAKSRAEFRRMRRNIASKRNRIKRMREVLSGLGVMGKDELDNAKTEHPWFLAAETLASGKILSWSELWSVLRYYAHNRGYDGNSMWAKFGDDSGGDSEREANAEKLMADLGTSTQAETICAYLGVDAKSPKPLRFKKYFKGQNLAFPREIVFKEVERIIDAHIGILPKCDENFKKLMIGNWREVPSNIKLPGRFTSDRGLLFGQYMPRFSNRIITKCPLSGEKTPNCHSREFLDFRWKSLLANMAFPDGTDLMETRRKIDDFMLLYGALSKNALKKILKEVIGELPSNYNGMFLASEMEKALEVDPVRALILRTVYPNISFSLPNAELVEKLWKLIPKFVFTRMFRLKEYSFADICALLSPEKSAELAEFVRVIFDSSPASKKSPKPDFETAFNFKMRVQKISGRSPYSRQLMKSASEEIMRGVDPRSEGGSLYPRSESTKKEVLSNIDTWTNNHLVRHRLKIFKRLYMDIVREYCGADKSLVKSVAIEVVKDITAFSGLDSKKKAAKLNDLVAHHKSVSAYLKKEYPELSPNGSILRKARIADDLGWVCPYTGCHFSPRQLFESGNMEREHIIPRSLRPSDSLESLVITWKEVNDMKGQRTAYEFIKECQGMKVPGRQNLSIVTPERFEAFVRRLKKPMHPAGKADIERIKIRNKLLLTEHYKKREGGFLPSDLTQTSHLNKLAFKVVKSLYADAEKAPELIHVPGIVTSVVRKNWDLLPCMGDACPEIYETLENGDKVLRLKDEIRSITHLHHAVDAVAMGLAASVFPRTRNFYEAVSKRRLNQADRQELLKTGLVLFSGDKWKLVELEKSYLKEISGRISENRVVKFLPRKMSGMDVEQTLWGVVKENENGTVTIRQYGAGKGESRRSIKKAYEPKLKLLGYESKNTAKSKLARNKAVIIIKGNFGVALANPPQIIPHHNVWQRLSELAEKNGGRFPKILRRNQIIEIPSGRYKGIWRITSIKNNSNYIGVDMIHPIYVRIKEKSKINVNLNTIIKDGMKIIDTRLIGA

SEQ ID NO: 353 - protein, 817 aa, unidentified
  REGION 1..817: note = Description of Unknown: uncultivated organism with predicted taxonomy: Coraliomargarita sp. CAG:312
  REGION 1..817: note = MG2-37 effector
MSRSDFCLFKLSFDIGYSSIGWSVFKIAHGDAFPILCGCGSLVFDDDCCMAKSRAAFRRARKNIASRRNRIKRMRKVLLSMGVMGPEELDNAKTDYPWLLASRVLSCGNKLSWGELWSVLRYYAHNRGYDGNSAWAKFDGDDGDSEKEANAIKLMQELGTRSQAETVCAYLGVDPSSSAKPALRKYFKGQNVAFPRQIVISEVGRIIDAHIGHLPGCDENFKKLIMGNWREVPSPIEMPGRFTSDRGLLFGQYVPRFNNRIIPKCPIEGRNVPSCHSREFLNFRWKSLLSNMSFSEGIDIAAARKNIDSAMRLYGSFKKTTLKTIFKSLLGELPLNYESMFLSEEMDKALLLDPVRALILKTIYPNISHSLPSAELVQNLWDLIPKFIFTQMFRLKEYSLEDIYGLLEDKKRARFRSLLLEIFDSSPNSKKTPRGDFENVFKLKMRINKISGRAPYSRIAMKKACAEIMEGRDPRANGGALYRNAENARSELLSNIDTWSNNHLVRHRLKMFKRLYVEIVNRYCGGDLSAVKSVSVEVVKDMGEFSGLDPKERAAKLNDLVCHHKSVSEYLEETYPELKISGSIIRKARIADDLGWVCPYTGRHFSPRELFESGNMELDHIIPYSLRPSNSLESLVATWKAVNEMKGQRCAAEFIKECQGMEVPGMPNVSIVTPERFEKFVSGLKKPQHNARYPDLKRIKKRNKLLLTLKYNKREGEFLPADLTQTSHLNKLAFKVVDSLYVDSEEKPELVHLPGSVTSVLRTNWDLSACMAKACPEIIVTVKSADSASGERGMGGDGLPQGLNGSVTDTAACCGGE

SEQ ID NO: 354 - protein, 1061 aa, unidentified
  REGION 1..1061: note = Description of Unknown: uncultivated organism with predicted taxonomy: Coraliomargarita sp. CAG:312
  REGION 1..1061: note = MG2-38 effector
MSTTNLSNFNLSFDIGYSSIGWSISSKPANAVFPNWLGAGVVVFDDDSCMAKSRAEFRRMRRNIASKRNRIKRMREVLSGLGVMGKDELDNAKTEHPWFLAAETLASGKILSWSELWSVLRYYAHNRGYDGNSMWAKFGDDSDGDSEREANAEKLMADLGTSTQAETICAYLGVDVKSPKPLRFKKYFKGQNLAFPREIVFKEVERIIDAHIGILPKCDENFKKLMIGNWREVPSNIKLPGRFTSDRGLLFGQYMPRFSNRIITKCPLSGEKTPNCHSREFLDFRWKSLLANMAFPDGTDLMETRRKIDDFMLLYGALSKNALKKILKEVIGELPSNYNGMFLASEMEKALEVDPVRALILRTVYPNISFSLPNAELVEKLWKLIPKFVFTRMFRLKEYSFADICALLSPEKSAELAEFVRVIFDSSPASKKSPKPDFETAFNFKMRVQKISGRSPYSRQLMKSASEEIMRGVDPRSEGGSLYPRSESTKKEVLSNIDTWTNNHLVRHRLKIFKRLYMDIVREYCGADKSLVKSVAIEVVKDITAFSGLDSKKKAAKLNDLVAHHKSVSAYLKKEYPELSPNGSILRKARIADDLGWVCPYTGCHFSPRQLFESGNMEREHIIPRSLRPSDSLESLVITWKEVNDMKGQRTAYEFIKECQGMKVPGRQNLSIVTPERFEAFVRRLKKPMHPAGKADIERIKIRNKLLLTEHYKKREGGFLPSDLTQTSHLNKLAFKVVKSLYADAEKAPELIHVPGTVTSVVRKNWDLLPCMGDACPEIYETLENGDKVLRLKDEIRSITHLHHAVDAVAMGLAASVFPRTRNFYEAVSKRRLNQADRQELLKTGLVLFSGDKWKLVELEKSYLKEISGRISENRVVKFLPRKMSGMDVEQTLWGVVKENENGTVTIRQYGAGKGESRRSIKKVYEPKLKLLGYESKNTAKSKLARNKAVIIIKGNFGVALANPPQIIPHHNVWQRLSELAEKNGGRFPKILRRNQIIEIPSGRYKGIWRITSIKNNSNYIGVDMIHPIYARIKEKSKINVNLNTIIKDGMKIIDTRLIGA

SEQ ID NO: 355 - protein, 1108 aa, unidentified
  REGION 1..1108: note = Description of Unknown: uncultivated organism with predicted taxonomy: Verrucomicrobia bacterium
  REGION 1..1108: note = MG2-39 effector
MSRSDFCLFKLSFDIGYSSIGWSVFKIAHGDAFPILCGCGSLVFDDDCCMAKSRAAFRRARKNIASRRNRIKRMRKVLLSMGVMGPEELDNAKTDYPWLLASRVLSCGNKLSWGELWSVLRYYAHNRGYDGNSAWAKFDGDDGDSEKEANAIKLMQELGTRSQAETVCAYLGVDPSSSAKPALRKYFKGQNVAFPRQIVISEVGRIIDAHIGHLPGCDENFKKLIMGNWREVPSPIEMPRRFTSDRGLLFGQYVPRFNNRIIPKCPIEGRNVPSCHSREFLNFRWKSLLSNMSFSEGIDIAAARKNIDSAMRLYGSFKKTTLKTIFKSLLGELPLNYESMFLSEEMDKALLLDPVRALILKTIYPNISHSLPSAELVQNLWDLIPKFIFTQMFRLKEYSLEDIYGLLEDKKRARFRSLLLEIFDSSPNSKKTPRGDFENVFKLKMRINKISGRAPYSRIAMKKACAEIMEGRDPRANGGALYRNAENARSELLSNIDTWSNNHLVRHRLKMFKRLYVEIVNRYCGGDLSAVKSVAVEVVKDMGEFSGLDPKERAAKLNDLVCHHKSVSEYLEETYPELKISGSIIRKARIADDLGWVCPYTGRHFSPRELFESGNMELDHIIPYSLRPSNSLESLVATWKAVNEMKGQRCAAEFIKECQGMEVPGMPNVSIVTPERFEKFVSGLKKPQHNARYPDLKRIKKRNKLLLTLKYNKREGEFLPADLTQTSHLNKLAFKVVDSLYVDSEEKPELVHLPGSVTSVLRTNWDLSACMAKACPEIIVTVKSADSASGERGMGGDGLPQGLNGSVTDTAACCGGEADAPQSGGSSGGEKKVLLMKGKIRSITHLHHAVDAVAIGLAAAVFPHTNRFYELVSKRNLNRSEREELYRTGLFVFSERNWRLKELPAKLINEISDRIAEGRVVKYLPRKMSGMDVEQTLWGVVKEDVGGLVTIRQYHSKANSAKRRERKIEIEKKIKLLGYEPENVAESKLARNKAVIIIKGNFGVALTTPPKIIPRHKVWQRLGKLAAENGGKFPIVLRKNQIIDVACGRYAGRWRITSIKNNAGYIGIDMIPPIYASGAKNRLKVNVNLNTLVRDGMSIKSGCLTGAC

SEQ ID NO: 356 - protein, 1114 aa, unidentified
  REGION 1..1114: note = Description of Unknown: uncultivated organism with predicted taxonomy: Coraliomargarita sp. CAG:312
  REGION 1..1114: note = MG2-40 effector
LASYSTKKNGAIIRAAEQENSFTFEVPYERAVFKFEPLILSLIPFKINDNNLRMSTTNLSNFNLSFDIGYSSIGWSISSKPANAVFPNWLGAGVVVFDDDSCMAKSRAEFRRMRRNIASKRNRIKRMREVLSGLGVMGKDELDNAKTEHPWFLAAETLASGKILSWSELWSVLRYYAHNRGYDGNSMWAKFGDDSDGDSEREANAEKLMDDLGTSTQAETICAYLGVDAKSPKPLRFKKYFKGQNLAFPREIVFKEVERIIDAHIGILPKCDENFKKLMIGNWREVPSNIKLPGRFTSDRGLLFGQYMPRFSNRIITKCPLSGEKTPNCHSREFLDFRWKSLLANMAFPDGTDLMETRRKIDDFMLLYGALSKNALKKILKEVIGELPSNYNGMFLASEMEKALEVDPVRALILRTVYPNISFSLPNAELVEKLWKLIPKFVFTRMFRLKEYSFADICALLSPEKSAELAEFVRVIFDSSPASKKSPKPDFETAFNFKMRVQKISGRSPYSRQLMKSASEEIMRGVDPRSEGGSLYPRSESTKKEVLSNIDTWTNNHLVRHRLKIFKRLYMDIVREYCGADKSLVKSVAIEVVKDITAFSGLDSKKKAAKLNDLVAHHKSVSAYLKKEYPELSPNGSILRKARIADDLGWVCPYTGCHFSPRQLFESGNMEREHIIPRSLRPSDSLESLVITWKEVNDMKGQRTAYEFIKECQGMKVPGRQNLSIVTPERFEAFVRRLKKPMHPAGKADIERIKIRNKLLLTEHYKKREGGFLPSDLTQTSHLNKLAFKVVKSLYADAEKAPELIHVPGIVTSVVRKNWDLLPCMGDACPEIYETLENGDKVLRLKDEIRSITHLHHAVDAVAMGLAASVFPRTRNFYEAVSKRRLNQADRQELLKTGLVLFSGDKWKLVELEKSYLKEISGRISENRVVKFLPRKMSGMDVEQTLWGVVKENENGTVTIRQYGAGKGESRRSIKKVYEPKLKLLGYESKNTAKSKLARNKAVIIIKGNFGVALANPPQIIPHHNVWQRLSELAEKNGGRFPKILRRNQIIEIPSGRYKGIWRITSIKNNSNYIGVDMIHPIYARIKEKSKINVNLNTIIKDGMKIIDTRLIGA

SEQ ID NO: 357 - protein, 1108 aa, unidentified
  REGION 1..1108: note = Description of Unknown: uncultivated organism with predicted taxonomy: Coraliomargarita sp. CAG:312
  REGION 1..1108: note = MG2-41 effector
MSRSDFCLFKLSFDIGYSSIGWSVFKIAHGDAFPILCGCGSLVFDDDCCMAKSRAAFRRARKNIASRRNRIKRMRKVLLSMGVMGPEELDNAKTDYPWLLASRVLSCGNKLSWGELWSVLRYYAHNRGYDGNSAWAKFDGDDGDSEKEANAIKLMQELGTRSQAETVCAYLGVDPSSSAKPALRKYFKGQNVAFPRQIVISEVGRIIDAHIGHLPGCDENFKKLIMGNWREVPSPIEMPGRFTSDRGLLFGQYVPRFNNRIIPKCPIEGRNVPSCHSREFLNFRWKSLLSNMSFSEGIDIAAARKNIDSAMRLYGSFKKTTLKTIFKSLLGELPLNYESMFLSEEMDKALLLDPVRALILKTIYPNISHSLPSAELVQNLWDLIPKFIFTQMFRLKEYSLEDICGLLEDKKRARFRSLLLEIFDSSPNSKKTPRGDFENVFKLKMRINKISGRAPYSRIAMKKACAEIMEGRDPRANGGALYRNAENARSELLSNIDTWSNNHLVRHRLKMFKRLYVEIVNRYCGGDLSAVKSVAVEVVKDMGEFSGLDPKERAAKLNDLVCHHKSVSEYLEETYPELKISGSIIRKARIADDLGWVCPYTGRHFSPRELFESGNMELDHIIPYSLRPSNSLESLVATWKAVNEMKGQRCAAEFIKECQGMEVPGMPNVSIVTPERFEKFVSGLKKPQHNARYPDLKRIKKRNKLLLTLKYNKREGEFLPADLTQTSHLNKLAFKVVDSLYVDSEEKPELVHLPGSVTSVLRTNWDLSACMAKACPEIIVTVKSADSASGERGMGGDGLPQGLNGSVTDTAACCGGEADAPQSGGSSGGEKKVLLMKGKIRSITHLHHAVDAVAIGLAAAVFPHTNRFYELVSKRNLNRSEREELYRTGLFVFSERNWRLKELPAKLINEISDRIAEGRVVKYLPRKMSGMDVEQTLWGVVKEDVGGLVTIRQYHSKANSAKRRERKIEIEKKIKLLGYEPENVAESKLARNKAVIIIKGNFGVALTTPPKIIPRHKVWQRLGKLAAENGGKFPIVLRKNQIIDVACGRYAGRWRITSIKNNAGYIGIDMIPPIYASGAKNRLKVNVNLNTLVRDGMSIKSGCLTGAC

SEQ ID NO: 358 - protein, 1108 aa, unidentified
  REGION 1..1108: note = Description of Unknown: uncultivated organism with predicted taxonomy: Coraliomargarita sp. CAG:312
  REGION 1..1108: note = MG2-42 effector
MSRSDFCLFKLSFDIGYSSIGWSVFKIAHGDAFPILCGCGSLVFDDDCCMAKSRAAFRRARKNIASRRNRIKRMRKVLLSMGVMGPEELDNAKTDYPWLLASRVLSCGNKLSWGELWSVLRYYAHNRGYDGNSAWAKFDGDDGDSEKEANAIKLMQELGTRSQAETVCAYLGVDPSSSAKPALRKYFKGQNVAFPRQIVVPEVGRIIDAHIGHLPGCDENFKKLIMGNWREVPSPIEMPGRFTSDRGLLFGQYVPRFNNRIIPKCPIEGRNVPSCHSREFLNFRWKSLLSNMSFSEGIDIAAARKNIDSAMRLYGSFKKTTLKTIFKSLLGELPLNYESMFLSEEMDKALLLDPVRALILKTIYPNISHSLPSAELVQNLWDLIPKFIFTQMFRLKEYSLEDICGLLEDKKRARFRSLLLEIFDSSPNSKKTPRGDFENVFKLKMRINKISGRAPYSRIAMKKACAEIMEGRDPRANGGALYRNAENARSELLSNIDTWSNNHLVRHRLKMFKRLYVEIVNRYCGGDLSAVKSVAVEVVKDMGEFSGLDPKERAAKLNDLVCHHKSVSEYLEETYPELKISGSIIRKARIADDLGWVCPYTGRHFSPRELFESGNMELDHIIPYSLRPSNSLESLVATWKAVNEMKGQRCAAEFIKECQGMEVPGMPNVSIVTPERFEKFVSGLKKPQHNARYPDLKRIKKRNKLLLTLKYNKREGEFLPADLTQTSHLNKLAFKVVDSLYVDSEEKPELVHLPGSVTSVLRTNWDLSACMAKACPEIIVTVKSADSASGERGMGGDGLPQGLNGSVTDTAACCGGEADAPQSGGSSGGEKKVLLMKGKIRSITHLHHAVDAVAIGLAAAVFPHTNRFYELVSKRNLNRSEREELYRTGLFVFSERNWRLKELPAKLINEISDRIAEGRVVKYLPRKMSGMDVEQTLWGVVKEDVGGLVTIRQYHSKANSAKRRERKIEIEKKIKLLGYEPENVAESKLARNKAVIIIKGNFGVALTTPPKIIPRHKVWQRLGKLAAENGGKFPIVLRKNQIIDVACGRYAGRWRITSIKNNAGYIGIDMIPPIYASGAKNRLKVNVNLNTLVRDGMSIKSGCLTGAC

SEQ ID NO: 359 - protein, 1108 aa, unidentified; identical to SEQ ID NO: 357
  REGION 1..1108: note = Description of Unknown: uncultivated organism with predicted taxonomy: Verrucomicrobia
  REGION 1..1108: note = MG2-43 effector

SEQ ID NO: 360 - protein, 1114 aa, unidentified
  REGION 1..1114: note = Description of Unknown: uncultivated organism with predicted taxonomy: Coraliomargarita sp. CAG:312
  REGION 1..1114: note = MG2-44 effector
LASYSTKKNGAIIRAAEQENSFIFEVPYERAVFKFEPLILSLIPFKINDNNLRMSTTNLSNFNLSFDIGYSSIGWSISSKPANAVFPNWLGAGVVVFDDDSCMAKSRAEFRRMRRNIASKRNRIKRMREVLSGLGVMGKDELDNAKTEHPWFLAAETLASGKILSWSELWSVLRYYAHNRGYDGNSMWAKFGDDSDGDSEREANAEKLMDDLGTSTQAETICAYLGVDAKSPKPLRFKKYFKGQNLAFPREIVFKEVERIIDAHIGILPKCDENFKKLMIGNWREVPSNIKLPGRFTSDRGLLFGQYMPRFSNRIITKCPLSGEKTPNCHSREFLDFRWKSLLANMAFPDGTDLMETRRKIDDFMLLYGALSKNALKKILKEVIGELPSNYNGMFLASEMEKALEVDPVRALILRTVYPNISFSLPNAELVEKLWKLIPKFVFTRMFRLKEYSFADICALLSPEKSAELAEFVRVIFDSSPASKKSPKPDFETAFNFKMRVQKISGRSPYSRQLMKSASEEIMRGVDPRSEGGSLYPRSESTKKEVLSNIDTWTNNHLVRHRLKIFKRLYMDIVREYCGADKSLVKSVAIEVVKDITAFSGLDSKKKAAKLNDLVAHHKSVSAYLKKEYPELSPNGSILRKARIADDLGWVCPYTGCHFSPRQLFESGNMEREHIIPRSLRPSDSLESLVITWKEVNDMKGQRTAYEFIKECQGMKVPGRQNLSIVTPERFEAFVRRLKKPMHPAGKADIERIKIRNKLLLTEHYKKREGGFLPSDLTQTSHLNKLAFKVVKSLYADAEKAPELIHVPGIVTSVVRKNWDLLPCMGDACPEIYETLENGDKVLRLKDEIRSITHLHHAVDAVAMGLAASVFPRTRNFYEAVSKRRLNQADRQELLKTGLVLFSGDKWKLVELEKSYLKEISGRISENRVVKFLPRKMSGMDVEQTLWGVVKENENGTVTIRQYGAGKGESRRSIKKAYEPKLKLLGYESKNTAKSKLARNKAVIIIKGNFGVALANPPQIIPHHNVWQRLSELAEKNGGRFPKILRRNQIIEIPSGRYKGIWRITSIKNNSNYIGVDMIHPIYVRIKEKSKINVNLNTIIKDGMKIIDTRLIGA

SEQ ID NO: 361 - protein, 1101 aa, unidentified
  REGION 1..1101: note = Description of Unknown: uncultivated organism with predicted taxonomy: Coraliomargarita sp. CAG:312
  REGION 1..1101: note = MG2-45 effector
MSRSDFCLFKLSFDIGYSSIGWSVFKIAHGDAFPILCGCGSLVFDDDCCMAKSRAAFRRARKNIASRRNRIKRMRKVLLSMGVMGPEELDNAKTDYPWLLASRVLSCGNKLSWGELWSVLRYYAHNRGYDGNSAWAKFDGDDGDSEKEANAIKLMQELGTRSQAETVCAYLGVDPSSSAKPALRKYFKGQNVAFPRQIVISEVGRIIDAHIGHLPGCDENFKKLIMGNWREVPSPIEMPGRFTSDRGLLFGQYVPRFNNRIIPKCPIEGRNVPSCHSREFLNFRWKSLLSNMSFSEGIDIAAARKNIDSAMRLYGSFKKTTLKTIFKSLLGELPLNYESMFLSEEMDKALLLDPVRALILKTIYPNISHSLPSAELVQNLWGLIPKFIFTQMFRLKEYSLEDICGLLEDKKRARFRSLLLEIFDSSPNSKKTPRGDFENVFKLKMRINKISGRAPYSRIAMKKACAEIMEGRDPRANGGALYRNAENARSELLSNIDTWSNNHLVRHRLKMFKRLYVEIVNRYCGGDLSAVKSVAVEVVKDMGEFSGLDPKERAAKLNDLVCHHKSVSEYLEETYPELKISGSIIRKARIADDLGWVCPYTGRHFSPRELFESGNMELDHIIPYSLRPSNSLESLVATWKAVNEMKGQRCAAEFIKECQGMEVPGMPNVSIVTPERFEKFVSGLKKPQHNARYPDLKRIKKRNKLLLTLKYNKREGEFLPADLTQTSHLNKLAFKVVDSLYVDSEEKPELVHLPGSVTSVLRTNWDLSACMAKACPEIIVTVKSADSASGERGMGGDGLPQGLNGSVTDTAACCGGEADAPQSGGSSGGEKKVLLMKGKIRSITHLHHAVDAVAIGLAAAVFPHTNRFYELVSKRNLNRSEREELYRTGLFVFSERNWRLKELPAKLINEISDRIAEGRVVKYLPRKMSGMDVEQTLWGVVKEDVGGLVTIRQYHSKANSAKRRERKIEIEKKIKLLGYEPENVAESKLARNKAVIIIKGNFGVALTTPPKIIPRHKVWQRLGKLAAENGGKFPIVLRKNQIIDVACGRYAGRWRITSIKNNAGYIGIDMIPPIYASGAKNRLKVNVNLNTLVRDGMSIKS

SEQ ID NO: 362 - protein, 1114 aa, unidentified; identical to SEQ ID NO: 356
  REGION 1..1114: note = Description of Unknown: uncultivated organism with predicted taxonomy: Coraliomargarita sp. CAG:312
  REGION 1..1114: note = MG2-46 effector

SEQ ID NO: 363 - protein, 1108 aa, unidentified; identical to SEQ ID NO: 357
  REGION 1..1108: note = Description of Unknown: uncultivated organism with predicted taxonomy: Verrucomicrobia bacterium
  REGION 1..1108: note = MG2-47 effector

SEQ ID NO: 364 - protein, 1114 aa, unidentified
  REGION 1..1114: note = Description of Unknown: uncultivated organism with predicted taxonomy: Coraliomargarita sp. CAG:312
  REGION 1..1114: note = MG2-48 effector
LASYSTKKNGAIIRAAEQENSFIFEVPYERAVFKFEPLILSLIPFKINDNNLRMSTTNLSNFNLSFDIGYSSIGWSISSKPANAVFPNWLGAGVVVFDDDSCMAKSRAEFRRMRRNIASKRNRIKRMREVLSGLGVMGKDELDNAKTEHPWFLAAETLASGKILSWSELWSVLRYYAHNRGYDGNSMWAKFGDDSDGDSEREANAEKLMADLGTSTQAETICAYLGVDAKSPKPLRFKKYFKGQNLAFPREIVFKEVERIIDAHIGILPKCDENFKKLMIGNWREVPSNIKLPGRFTSDRGLLFGQYMPRFSNRIITKCPLSGEKTPNCHSREFLDFRWKSLLANMAFPDGTDLMETRRKIDDFMLLYGALSKNALKKILKEVIGELPSNYNGMFLASEMEKALEVDPVRALILRTVYPNISFSLPNAELVEKLWKLIPKFVFTRMFRLKEYSFADICALLSPEKSAELAEFVRVIFDSSPASKKSPKPDFETAFNFKMRVQKISGRSPYSRQLMKSASEEIMRGVDPRSEGGSLYPRSESTKKEVLSNIDTWTNNHLVRHRLKIFKRLYMDIVREYCGADKSLVKSVAIEVVKDITAFSGLDSKKKAAKLNDLVAHHKSVSAYLKKEYPEISPNGSILRKARIADDLGWVCPYTGCHFSPRQLFESGNMEREHIIPRSLRPSDSLESLVITWKEVNDMKGQCTAYEFIKECQGMKVPGRQNLSIVTPERFEAFVRRLKKPMHPAGKADIERIKIRNKLLLTEHYKKREGGFLPSDLTQTSHLNKLAFKVVKSLYADAEKAPELIHVPGIVTSVVRKNWDLLPCMGDACPEIYETLENGDKVLRLKDEIRSITHLHHAVDAVAMGLAASVFPRTRNFYEAVSKRRLNQADRQELLKTGLVLFSGDKWKLVELEKSYLKEISGRISENRVVKFLPRKMSGMDVEQTLWGVVKENENGTVTIRQYGAGKGESRRSIKKVYEPKLKLLGYESKNTAKSKLARNKAVIIIKGNFGVALANPPQIIPHHNVWQRLSELAEKNGGRFPKILRRNQIIEIPSGRYKGIWRITSIKNNSNYIGVDMIHPIYVRIKEKSKINVNLNTIIKDGMKIIDTRLIGA

SEQ ID NO: 365 - protein, 1108 aa, unidentified; identical to SEQ ID NO: 357
  REGION 1..1108: note = Description of Unknown: uncultivated organism with predicted taxonomy: Coraliomargarita sp. CAG:312
  REGION 1..1108: note = MG2-49 effector

SEQ ID NO: 366 - protein, 1114 aa, unidentified
  REGION 1..1114: note = Description of Unknown: uncultivated organism with predicted taxonomy: Coraliomargarita sp. CAG:312
  REGION 1..1114: note = MG2-50 effector
LASYSTKKNGAIIRAAEQENSFIFEVPYERAVFKFEPLILSLIPFKINDNNLRMSTTNLSNFNLSFDIGYSSIGWSISSKPANAVFPNWLGAGVVVFDDDSCMAKSRAEFRRMRRNIASKRNRIKRMREVLSGLGVMGKDELDNAKTEHPWFLAAETLASGKILSWSELWSVLRYYAHNRGYDGNSMWAKIGDDSDGDSEREANAEKLMADLGTSTQAETICAYLGVDAKSPKPLRFKKYFKGQNLAFPREIVFKEVERIIDAHIGILPKCDENFKKLMIGNWREVPSNIKLPGRFTSDRGLLFGQYMPRFSNRIITKCPLSGEKTPNCHSREFLDFRWKSLLANMAFPDGTDLMETRRKIDDFMLLYGALSKNALKKILKEVIGELPSNYNGMFLASEMEKALEVDPVRALILRTVYPNISFSLPNAELVEKLWKLIPKFVFTRMFRLKEYSFADICALLSPEKSAELAEFVRVIFDSSPASKKSPKPDFETAFNFKMRVQKISGRSPYSRQLMKSASEEIMRGVDPRSEGGSLYPRSESTKKEVLSNIDTWTNNHLVRHRLKIFKRLYMDIVREYCGADKSLVKSVAIEVVKDITAFSGLDSKKKAAKLNDLVAHHKSVSAYLKKEYPELSPNGSILRKARIADDLGWVCPYTGCHFSPRQLFESGNMEREHIIPRSLRPSDSLESLVITWKEVNDMKGQRTAYEFIKECQGMKVPGRQNLSIVTPERFEAFVRRLKKPMHPAGKADIERIKIRNKLLLTEHYKKREGGFLPSDLTQTSHLNKLAFKVVKSLYADAEKAPELIHVPGIVTSVVRKNWDLLPCMGDACPEIYETLENGDKVLRLKDEIRSITHLHHAVDAVAMGLAASVFPRTRNFYEAVSKRRLNQADRQELLKTGLVLFSGDKWKLVELEKSYLKEISGRISENRVVKFLPRKMSGMDVEQTLWGVVKENENGTVTIRQYGAGKGESRRSIKKVCEPKLKLLGYESKNTAKSKLARNKAVIIIKGNFGVALANPPQIIPHHNVWQRLSELAEKNGGRFPKILRRNQIIEIPSGRYKGIWRITSIKNNSNYIGVDMIHPIYVRIKEKSKINVNLNTIIKDGMKIIDTRLIGA

SEQ ID NO: 367 - protein, 888 aa, unidentified
  REGION 1..888: note = Description of Unknown: uncultivated organism with predicted taxonomy: Coraliomargarita sp. CAG:312
  REGION 1..888: note = MG2-51 effector
VDAKSPKPLRFKKYFKGQNLAFPREIVFKEVERIIDAHIGILPKCDENFKKLMIGNWREVPSNIKLPGRFTSDRGLLFGQYMPRFSNRIITKCPLSGEKTPNCHSREFLDFRWKSLLANMAFPDGTDLMETRRKIDDFMLLYGALSKNALKKILKEVIGELPSNYNGMFLASEMEKALEVDPVRALILRTAYPNISFSLPNAELVEKLWKLIPKFVFTRMFRLKEYSFADICALLSPEKSAELAEFVRVIFDSSPASKKSPKPDFETAFNFKMRVQKISGRSPYSRQLMKSASEEIMRGVDPRSEGGSLYPRSESTKKEVLSNIDTWTNNHLVRHRLKIFKRLYMDIAREYCGADKSLVKSVAIEVVKDITAFSGLDSKKKAAKLNDLVAHHKSVSAYLKKEYPELSPNGSILRKARIADDLGWVCPYTGCHFSPRQLFESGNMEREHIIPRSLRPSDSLESLVITWKEVNDMKGQRTAYEFIKECQGMKVPGRQNLSIVTPERFEAFVRRLKKPMHPAGKADIERIKIRNKLLLTEHYKKREGGFLPSDLTQTSHLNKLAFKVVKSLYADAEKAPELIHVPGIVTSVVRKNWDLLPCMGDACPEIYETLENGDKVLRLKDEIRSITHLHHAVDAVAMGLAASVFPRTRNFYEAVSKRRLNQADRQELLKTGLVLFSGDKWKLVELEKSYLKEISGRISENRVVKFLPRKMSGMDVEQTLWGVVKENENGTVTIRQYGAGKGESRRSIKKVYEPKLKLLGYESKNTAKSKLARNKAVIIIKGNFGVALANPPQIIPHHNVWQRLSELAEKNGGRFPKILRRNQIIEIPSGRYKGIWRITSIKNNSNYIGVDMIHPIYARIKEKSKINVNLNTIIKDGMKIIDTRLIGA

SEQ ID NO: 368 - protein, 1108 aa, unidentified
  REGION 1..1108: note = Description of Unknown: uncultivated organism with predicted taxonomy: Verrucomicrobia bacterium
  REGION 1..1108: note = MG2-52 effector
MSRSDFCLFKLSFDIGYSSIGWSVFKIAHGDAFPILCGCGSLVFDDDCCMAKSRAAFRRARKNIASRRNRIKRMRKVLLSMGVMGPEELDNAKTDYPWLLASRVLSCGNKLSWGELWSVLRYYAHNRGYDGNSAWAKFDGDDGDSEKEANAIKLMQELGTRSQAETVCAYLVVDPSSSAKPALRKYFKGQNVAFPRQIVISEVGRIIDAHIGHLPGCDENFKKLIMGNWREVPSPIEMPGRFTSDRGLLFGQYVPRFNNRIIPKCPIEGRNVPSCHSREFLNFRWKSLLSNMSFSEGIDIAAARKNIDSAMRLYGSFKKTTLKTIFKSLLGELPLNYESMFLSEEMDKALLLDPVRALILKTIYPNISHSLPSAELVQNLWDLIPKFIFTQMFRLKEYSLEDICGLLEDKKRARFRSLLLEIFDSSPNSKKTPRGDFENVFKLKMRINKISGRAPYSRIAMKKACAEIMEGRDPRANGGALYRNAENARSELLSNIDTWSNNHLVRHRLKMFKRLYVEIVNRYCGGDLSAVKSVAVEVVKDMGEFSGLDPKERAAKLNDLVCHHKSVSEYLEETYPELKISGSIIRKARIADDLGWVCPYTGRHFSPRELFESGNMELDHIIPYSLRPSNSLESLVATWKAVNEMKGQRCAAEFIKECQGMEVPGMPNVSIVTPERFEKFVSGLKKPQHNARYPDLKRIKKRNKLLLTLKYNKREGEFLPADLTQTSHLNKLAFKVVDSLYVDSEEKPELVHLPGSVTSVLRTNWDLSACMAKACPEIIVTVKSADSASGERGMGGDGLPQGLNGSVTDTAACCGGEADAPQSGGSSGGEKKVLLMKGKIRSITHLHHAVDAVAIGLAAAVFPHTNRFYELVSKRNLNRSEREELYRTGLFVFSERNWRLKELPAKLINEISDRIAEGRVVKYLPRKMSGMDVEQTLWGVVKEDVGGLVTIRQYHSKANSAKRRERKIEIEKKIKLLGYEPENVAESKLARNKAVIIIKGNFGVALTTPPKIIPRHKVWQRLGKLAAENGGKFPIVLRKNQIIDVACGRYAGRWRITSIKNNAGYIGIDMIPPIYASGAKNRLKVNVNLNTLVRDGMSIKSGCLTGAC

SEQ ID NO: 369 - protein, 1108 aa, unidentified
  REGION 1..1108: note = Description of Unknown: uncultivated organism with predicted taxonomy: Verrucomicrobia bacterium
  REGION 1..1108: note = MG2-53 effector
MSRSDFCLFKLSFDIGYSSIGWSVFKIAHGDAFPILCGCGSLVFDDDCCMAKSRAAFRRARKNIASRRNRIKRMRKVLLSMGVMGPEELDNAKTDYPWLLASRVLSCGNKLSWGELWSVLRYYAHNRGYDGNSAWAKFDGDDGDSEKEANAIKLMQELGTRSQAETVCAYLGVDPSSSAKPALRKYFKGQNVAFPRQIVISEVGRIIDAHIGHLPGCDENFKKLIMGNWREVPSPIEMPGRFTSDRGLLFGQYVPRFNNRIIPKCPIEGRNVPSCHSREFLNFRWKSLLSNMSFSEGIDIAAARKNIDSAMRLYGSFKKTTLKTIFKSLLGELPLNYESMFLSEEMDKALLLDPVRALILKTIYPNISHSLPSAELVQNLWDLIPKFIFTQMFRLKEYSLEDIYGLLEDKKRARFRSLLLEIFDSSPNSKKTPRGDFENVFKLKMRINKISGRAPYSRIAMKKACAEIMEGRDPRANGGALYRNAENARSELLSNIDTWSNNHLVRHRLKMFKRLYVEIVNRYCGGDLSAVKSVAVEVVKDMGEFSGLDPKERAAKLNDLVCHHKSVSEYLEETYPELKISGSIIRKARIADDLGWVCPYTGRHFSPRELFESGNMELDHIIPYSLRPSNSLESLVATWKAVNEMKGQRCAAEFIKECQGMEVPGMPNVSIVTPERFEKFVSGLKKPQHNARYPDLKRIKKRNKLLLTLKYNKREGEFLPADLTQTSHLNKLAFKVVDSLYVDSEEKPELVHLPGSVTSVLRTNWDLSACMAKACPEIIVTVKSADSASGERGMGGDGLPQGLNGSVTDTAACCGGEADAPQSGGSSGGEKKVLLMKGKIRSITHLHHAVDAVAIGLAAAVFPHTNRFYELVSKRNLNRSEREELYRTGLFVFSERNWRLKELPAKLINEISDRIAEGRVVKYLPRKMSGMDVEQTLWGVVKEDVGGLVTIRQYHSKANSAKRRERKIEIEKKIKLLGYEPENVAESKLARNKAVIIIKGNFGVALTTPPKIIPRHKVWQRLGKLAAENGGKFPIVLRKNQIIDVACGRYAGRWRITSIKNNAGYIGIDMIPPIYASGAKNRLKVNVNLNTLVRDGMSIKSGCLTGAC

SEQ ID NO: 370 - protein, 865 aa, unidentified
  REGION 1..865: note = Description of Unknown: uncultivated organism with predicted taxonomy: Coraliomargarita sp. CAG:312
  REGION 1..865: note = MG2-54 effector
MSINILNNLRESNKFELSFDIGYSSIGWSVFKKQSGGIFPTLLGAGTVIFDDDACLAKSRAGFRRMRKNIASRRNRIKRLRDAMLNLDVMAVDELDNAKTAYPWFLSAKVLACGKKLSWSELWSVIRYYAHNRGYDGNSAWAEIESDSDGDFEKEANAKKLMAELGTSTQAETVCAYLGVDVKSDKPLSLRKYFKGQNLAFPRETVVKEVERIIDAHIGVLPKCDGNFKKLMIGNWREVPSNIELPRRFTSDRGLLFGQYIPRFDNRIITKCPISGEKTPNCHSREFLDFRWKSLLANMAFPDGADLIAARAKVDAAMFLYGALKKTVLKKILKEVLGELPSNYNAMFLASEMEKALELDPVKALILKTAYPNISFSLPSAELVEKLWKLIPKFVFTRMFKLKEYSFADICALLDSEKSEELKNVVRAIFDSSASSKKSPKPDFETAFNYKMRVKKISGRSPYSRRLMKLASEEIMRGIDPRSEGGSLYPRRDSTRKELLSNIDSWTNNHLVRHRLKMFKRLYMDIVNEYCGGDISLVKSVAIEVVKDMTAFSGLDSKKKAAKLKDLVAHHESVSKYLKNEYPNLKTNGSILRKARIADDLGWVCPYTGCHFSPRQLFESGNMEKEHIIPRSLRPSDSLESLVVTWKEVNDMKGQRTALEFIKECQGMKVPGRPNLSIVTPARFEEFVSGLRKPMHRAGKADIERIKIRNKLLLTEHYKNREGEFLPSDLTQTSHLNKLAFKLVKSLYVDAGKTPELVHLPGSVTSAVRKNWELLPCMGDVCPEIYETLENGDKVLLLKDKIRSITHLHHAVDAVAMGLAASVFPRTKRFYEAVSKRHLSEADREELLNTGLVLFSDDKWKLVEL

SEQ ID NO: 371 - protein, 1061 aa, unidentified
  REGION 1..1061: note = Description of Unknown: uncultivated organism with predicted taxonomy: Coraliomargarita sp. CAG:312
  REGION 1..1061: note = MG2-55 effector
MSTTNLSNFNLSFDIGYSSIGWSISSKPANAVFPNWLGAGVVVFDDDSCMAKSRAEFRRMRRNIASKRNRIKRMREVLSGLGVMGKDELDNAKTEHPWFLAAETLASGKILSWSELWSVLRYYAHNRGYDGNSMWAKFGDDSDGDSEREANAEKLMADLGTSTQAETICAYLGVDAKSPKPLRFKKYFKGQNLAFPREIVFKEVDRIIDAHIGILPKCDENFKKLMIGNWREVPSNIKLPGRFTSDRGLLFGQYMPRFSNRIITKCPLSGEKTPNCHSREFLDFRWKSLLANMAFPDGTDLMETRRKIDDFMLLYGALSKNALKKILKEVIGELPSNYNGMFLASEMEKALEVDPVRALILRTVYPNISFSLPNAELVEKLWKLIPKFVFTRMFRLKEYSFADICALLSPEKSAELAEFVRVIFDSSPASKKSPKPDFETAFNFKMRVQKISGRSPYSRQLMKSASEEIMRGVDPRSEGGSLYPRSESTKKEVLSNIDTWTNNHLVRHRLKIFKRLYMDIVREYCGADKSLVKSVAIEVVKDITAFSGLDSKKKAAKLNDLVAHHKSVSAYLKKEYPELSPNGSILRKARIADDLGWVCPYTGCHFSPRQLFESGNMEREHIIPRSLRPSDSLESLVITWKEVNDMKGQRTAYEFIKECQGMKVPGRQNLSIVTPERFEAFVRRLKKPMHPAGKADIERIKIRNKLLLTEHYKKREGGFLPSDLTQTSHLNKLAFKVVKSLYADAEKAPELIHVPGTVTSVVRKNWDLLPCMGDACPEIYETLENGDKVLRLKDEIRSITHLHHAVDAVAMGLAASVFPRTRNFYEAVSKRRLNQADRQELLKTGLVLFSGDKWKLVELEKSYLKEISGRISENRVVKFLPRKMSGMDVEQTLWGVVKENENGTVTIRQYGAGKGESRRSIKKVYEPKLKLLGYESKNTAKSKLARNKAVIIIKGNFGVALANPPQIIPHHNVWQRLSELAEKNGGRFPKILRRNQIIEIPSGRYKGIWRITSIKNNSNYIGVDMIHPIYARIKEKSKINVNLNTIIKDGMKIIDTRLIGA

SEQ ID NO: 372 - protein, 1114 aa, unidentified
  REGION 1..1114: note = Description of Unknown: uncultivated organism with predicted taxonomy: Coraliomargarita sp. CAG:312
  REGION 1..1114: note = MG2-56 effector
LASYSTKKNGAIIRAAEQENSFIFEVPYERAVFKFEPLILSLIPFKINDNNLKMSTTNLSNFNLSFDIGYSSIGWSISSKPANAVFPNWLGAGVVVFDDDSCMAKSRAEFRRMRRNIASKRNRIKRMREVLSGLGVMGKDELDNAKTEHPWFLAAETLASGKILSWSELWSVLRYYAHNRGYDGNSMWAKFGDDSDGDSEREANAEKLMADLGTSTQAETICAYLGVDAKSPKPLRFKKYFKGQNLAFPREIVFKEVERIIDAHIGILPKCDENFKKLMIGNWREVPSNIKLPRRFTSDRGLLFGQYMPRFSNRIITKCPLSGEKTPNCHSREFLDFRWKSLLANMAFPDGTDLMETRRKIDDFMLLYGALSKNALKKILKEVIGELPSNYNGMFLASEMEKALEVDPVRALILRTVYPNISFSLPNAELVEKLWKLIPKFVFTRMFRLKEYSFADICALLSPEKSAELAEFVRVIFDSSPASKKSPKPDFETAFNFKMRVQKISGRSPYSRQLMKSASEEIMRGVDPRSEGGSLYPRSESTKKEVLSNIDTWTNNHLVRHRLKIFKRLYMDIVREYCGADKSLVKSVAIEVVKDITAFSGLDSKKKAAKLNDLVAHHKSVSAYLKKEYPELSPNGSILRKARIADDLGWVCPYTGCHFSPRQLFESGNMEREHIIPRSLRPSDSLESLVITWKEVNDMKGQRTAYEFIKECQGMKVPGRQNLSIVTPERFEAFVRRLKKPMHPAGKADIERIKIRNKLLLTEHYKKREGGFLPSDLTQTSHLNKLAFKVVKSLYADAEKAPELIHVPGIVTSVVRKNWNLLPCMGDACPEIYETLENGDKVLRLKDEIRSITHLHHAVDAVAMGLAASVFPRTRNFYEAVSKRRLNQADRQELLKTGLVLFSGDKWKLVELEKSYLKEISGRISENRVVKFLPRKMSGMDVEQTLWGVVKENENGTVTIRQYGAGKGESRRSIKKAYEPKLKLLGYESKNTAKSKLARNKAVIIIKGNFGVALANPPQIIPHHNVWQRLSELAEKNGGRFPKILRRNQIIEIPSGRYKGIWRITSIKNNSNYIGVDMIHPIYARIKEKSKINVNLNTIIKDGMKIIDTRLIGA

SEQ ID NO: 373 - protein, 1108 aa, unidentified
  REGION 1..1108: note = Description of Unknown: uncultivated organism with predicted taxonomy: Coraliomargarita sp. CAG:312
  REGION 1..1108: note = MG2-57 effector
MSRSDFCLFKLSFDIGYSSIGWSVFKIAHGDAFPILCGCGSLVFDDDCCMAKSRAAFRRARKNIASRRNRIKRMRKVLLSMGVMGPEELDNAKTDYPWLLASRVLSCGNKLSWGELWSVLRYYAHNRGYDGNSAWAKFDGDDGDSEKEANAIKLMQELGTRSQAETVCAYLGVDPSSSAKPALRKYFKGQNVAFPRQIVISEVGRIIDAHIGHLPGCDENFKKLIMGNWREVPSPIEMPGRFTSDRGLLFGQYVPRFNNRIIPKCPIEGRNVPSCHSREFLNFRWKSLLSNMSFSEGIDIAAARKNIDSAMRLYGSFKKTTSKTIFKSLLGELPLNYESMFLSEEMDKALLLDPVRALILKTIYPNISHSLPSAELVQNLWDLIPKFIFTQMFRLKEYSLEDICGLLEDKKRARFRSLLLEIFDSSPNSKKTPRGDFENVFKLKMRINKISGRAPYSRIAMKKACAEIMEGRDPRANGGALYRNAENARSELLSNIDTWSNNHLVRHRLKMFKRLYVEIVNRYCGGDLSAVKSVAVEVVKDMGEFSGLDPKERAAKLNDLVCHHKSVSEYLEETYPELKISGSIIRKARIADDLGWVCPYTGRHFSPRELFESGNMELDHIIPYSLRPSNSLESLVATWKAVNEMKGQRCAAEFIKECQGMEVPGMPNVSIVTPERFEKFVSGLKKPQHNARYPDLKRIKKRNKLLLTLKYNKREGEFLPADLTQTSHLNKLAFKVVDSLYVDSEEKPELVHLPGSVTSVLRTNWDLSACMAKACPEIIVTVKSADSASGERGMGGDGLPQGLNGSVTDTAACCGGEADAPQSGGSSGGEKKVLLMKGKIRSITHLHHAVDAVAIGLAAAVFPHTNRFYELVSKRNLNRSEREELYRTGLFVFSERNWRLKELPAKLINEISDRIAEGRVVKYLPRKMSGMDVEQTLWGVVKEDVGGLVTIRQYHSKANSAKRRERKIEIEKKIKLLGYEPENVAESKLARNKAVIIIKGNFGVALTTPPKIIPRHKVWQRLGKLAAENGGKFPIVLRKNQIIDVACGRYAGRWRITSIKNNAGYIGIDMIPPIYASGAKNRLKVNVNLNTLVRDGMSIKSGCLTGAC

SEQ ID NO: 374 - protein, 1108 aa, unidentified; identical to SEQ ID NO: 357
  REGION 1..1108: note = Description of Unknown: uncultivated organism with predicted taxonomy: Verrucomicrobia bacterium
  REGION 1..1108: note = MG2-58 effector

SEQ ID NO: 375 - protein, 1061 aa, unidentified; identical to SEQ ID NO: 354
  REGION 1..1061: note = Description of Unknown: uncultivated organism with predicted taxonomy: Coraliomargarita sp. CAG:312
  REGION 1..1061: note = MG2-59 effector

SEQ ID NO: 376 - protein, 1114 aa, unidentified; identical to SEQ ID NO: 366
  REGION 1..1114: note = Description of Unknown: uncultivated organism with predicted taxonomy: Coraliomargarita sp. CAG:312
  REGION 1..1114: note = MG2-60 effector

SEQ ID NO: 377 - protein, 1114 aa, unidentified
  REGION 1..1114: note = Description of Unknown: uncultivated organism with predicted taxonomy: Coraliomargarita sp. CAG:312
  REGION 1..1114: note = MG2-61 effector
LASYSTKKNGAIIRAAEQENSFIFEVPYERAVFKFEPLILSLIPFKINDNNLRMSTTNLSNFNLSFDIGYSSIGWSISSKPANAVFPNWLGAGVVVFDDDSCMAKSRAEFRRMRRNIASKRNRIKRMREVLSGLGVMGKDELDNAKTEHPWFLAAETLASGKILSWSELWSVLRYYAHNRGYDGNSMWAKFGDDSDGDSEREANAEKLMADLGTSTQAETICAYLGVDAKSPKPLRFKKYFKGQNLAFPREIVFKEVERIIDAHIGILPKCDENFKKLMIGNWREVPSNIKLPGRFTSDRGLLFGQYMPRFSNRIITKCPLSGEKTPNCHSREFLDFRWKSLLANMAFPDGTDLMETRRKIDDFMLLYGALSKNALKKILKEVIGELPSNYNGMFLASEMEKALEVDPVRALILRTVYPNISFSLPNAELVEKLWKLIPKFVFTRMFRLKEYSFADICALLSPEKSAELAEFVRVIFDSSPASKKSPKPDFETAFNFKMRVQKISGRSPYSRQLMKSASEEIMRGVDPRSEGGSLYPRSESTKKEVLSNIDTWTNNHLVRHRLKIFKRLYMDIVREYCGADKSLVKSVAIEVVKDITAFSGLDSKKKAAKLNDLVAHHKSVSAYLKKEYPELSPNGSILRKARIADDLGWVCPYTGCHFSPRQLFESGNMEREHIIPRSLRPSDSLESLVITWKEVNDMKGQRTAYEFIKECQGMKVPGRQNLSIVTPERFEAFVRRLKKPMHPAGKADIERIKIRNKLLLTEHYKKREGGFLPSDLTQTSHLNKLAFKVVKSLYADAEKAPELIHVPGIVTSVVRKNWDLLPCMGDACPEIYETLENGDKVLRLKDEIRSITHLHHAVDAVAMGLAASVFPRTRNFYEAVSKRRLNQADRQELLKTGLVLFSGDKWKLVELEKSYLKEISGRISENRVVKFLPRKMSGMDVEQTLWGVVKENENGTVTIRQYGAGKGESRRSIKKAYEPKLKLLGYESKNTAKSKLARNKAVIIIKGNFGVALANPPQIIPHHNVWQRLSELAEKNGGRFPKILRRNQIIEIPSGRYKGIWRITSIKNNSNYIGVDMIHPIYVRIKEKSKINVNLNTIIKDGMKIIDTRLIGA

SEQ ID NO: 378 - protein, 1101 aa, unidentified
  REGION 1..1101: note = Description of Unknown: uncultivated organism with predicted taxonomy: Verrucomicrobia
  REGION 1..1101: note = MG2-62 effector
MDPANLALSFDIGYASLGWAVFLLKDPFPSLLGSGSVLFQKDSCLASSRRAFRRARRNIAARRSRVARLKKYLASLGVLEREQLDENACAYPWLLAARVLASDGKEKLSWQELWHVLRWYAHSRGYDGNALWAGDALDETGADDEDTQKVKAARALMEKYGKTTMAETVCADLQLEPFGEKRASRRYFKGNNAAFPRETVRDEVRRILLAHAGVLPKVDDALAATLLNDVPENLCAALRLPARFSAKGGLLFGQYVPRFDNRIIGHCRITGKNVPLKNCREYLLYRWGRLLNNLTVFARDGSIRTLSADKPNGRPSEREKLDAEMRSRGFFDKKKLNDLLKEITGCEPANTESYFLIPEMEDALILDPVRKLIATKKLVKDFWGYFSERGKKIFAAELAKGKTLKLSDCIKRMDGWGGWKTKPLFAAALEKLKAAEMKKKPEKRRNLLNLRIKAEFPTGRASYCREILKKTYEEALAGKDSTQPGGCLYETPEIRERLLRGNAVGDDAGTVATEQWLAGQTNNHMVRHRMLIFSRLLRDIIREYAEGDAARVKDVVVEVVRELKEFSGLSAQEIATKLNEKFANFNSVAEKIEAAAQEKGVSVSASLIRKARLLEDQGFACPYTGKNISYNELFSGALEIEHIIPRSLRPSDALSSCVMTFRAVNDMKGQRTAMQFMKECAGKDVPGTNLQIQPLANFKEWVEAHRSQKLRRGFSKEDQARCKRRAELLLVERYEERNADFTERDLTQTSHLNKLAIRLVKRELGIDARHLAGAVTGFVRKNLSIDECLVAAVPRMQRAQRVSEHDSRKLLKSQMRELSHLHHAMDAITQGLTGILFRVEDWKLLVKRHLTERERAVLAAKYPTLLRFSANGEIALKPLPDSLLSEITARLKECRVVQHVPAKMHGLAVEQTTWSIVSQDEATRKVSLEQHTTDLKKGRYKDDGTRFVKNCEEKPALLLGFGVPEEQKSKLQAIKGVVKICENWGCALDPEPVVIPYFKVFPRLRELRERNGGKPVRVLRRGQQIEVLSGKFKGVWTIVSIKDATRDGILLDICAPDKVRQTEHGTTDSKVGVLLKSLLRAGLKILKPPLTGFACPTTSSQ

SEQ ID NO: 379 - protein, 1114 aa, unidentified
  REGION 1..1114: note = Description of Unknown: uncultivated organism with predicted taxonomy: Coraliomargarita sp. CAG:312
  REGION 1..1114: note = MG2-63 effector
LASYSTKKNGATIRAAEQENSFIFEVPYERAVFKFEPLILSLIPFKINDNNLRMSTTNLSNFNLSFDIGYSSIGWSISSKPANAVFPNWLGAGVVVFDDDSCMAKSRAEFRRMRRNIASKRNRIKRMREVLSGLGVMGKDELDNAKTEHPWFLAAETLASGKILSWSELWSVLRYYAHNRGYDGNSMWAKFGDDSDGDSEREANAEKLMADLGTSTQAETICAYLGVDAKSPKPLRFKKYFKGQNLAFPREIVFKEVERIIDAHIGILPKCDENFKKLMIGNWREVPSNIKLPGRFTSDRGLLFGQYMPRFSNRIITKCPLSGEKTPNCHSREFLDFRWKSLLANMAFPDGTDLMETRRKIDDFMLLYGALSKNALKKILKEVIGELPSNYNGMFLASEMEKALEVDPVRALILRTVYPNISFSLPNAELVEKLWKLIPKFVFTRMFRLKEYSFADICALLSPEKSAELAEFVRVIFDSSPASKKSPKPDFETAFNFKMRVQKISGRSPYSRQLMKSASEEIMRGVDPRSEGGSLYPRSESTKKEVLSNIDTWTNNHLVRHRLKIFKRLYMDIVREYCGADKSLVKSVAIEVVKDITAFSGLDSKKKAAKLNDLVAHHKSVSAYLKKEYPELSPNGSILRKARIADDLGWVCPYTGCHFSPRQLFESGNMEREHIIPRSLRPSDSLESLVITWKEVNDMKGQRTAYEFIKECQGMKVPGRQNLSIVTPERFEAFVRRLKKPMHPAGKADIERIKIRNKLLLTEHYKKREGGFLPSDLTQTSHLNKLAFKVVKSLYADAEKAPELIHVPGIVTSVVRKNWDLLPCMGDACPEIYETLENGDKVLRLKDEIRSITHLHHAVDAVAMGLAASVFPRTRNFYEAVSKRRLNQADRQELLKTGLVLFSGDKWKLVELEKSYLKEISGRISENRVVKFLPRKMSGMDVEQTLWGVVKENENGTVTIRQYGAGKGESRRSIKKAYEPKLKLLGYESKNTAKSKLARNKAVIIIKGNFGVALANPPQIIPHHNVWQRLSELAEKNGGRFPKILRRNQIIEIPSGRYKGIWRITSIKNNSNYIGVDMIHPIYVRIKEKSKINVNLNTIIKDGMKIIDTRLIGA

SEQ ID NO: 380 - protein, 888 aa, unidentified; identical to SEQ ID NO: 367
  REGION 1..888: note = Description of Unknown: uncultivated organism with predicted taxonomy: Coraliomargarita sp. CAG:312
  REGION 1..888: note = MG2-64 effector

SEQ ID NO: 381 - protein, 1108 aa, unidentified; identical to SEQ ID NO: 369
  REGION 1..1108: note = Description of Unknown: uncultivated organism with predicted taxonomy: Coraliomargarita sp. CAG:312
  REGION 1..1108: note = MG2-65 effector

SEQ ID NO: 382 - protein, 1046 aa, unidentified
  REGION 1..1046: note = Description of Unknown: uncultivated organism with predicted taxonomy: Coraliomargarita sp. CAG:312
  REGION 1..1046: note = MG2-66 effector
LPSYSTKKNGAIIRAAEQENSFIFEVPYERAVFKFEPLILSLIPFKINDNNLRMSTTNLNNFNLSFDIGYSSIGWSISSKPANAVFPNWLGAGVVVFDDDSCMAKSRAEFRRMRRNIASKRNRIKRMREVLYGLGVMGKDELDNAKTEHPWFLAAETLASGKILSWSELWSVLRYYAHNRGYDGNSMWAKFGDDSDGDFEREANAEKLMADLGTSTQAETICAYLGVDAKSPKPLRFKKYFKGQNLAFPREIVFKEVERIIDAHIGILPKCDENFKKLMIGNWREVPSNIKLPGRFTSDRGLLFGQYMPRFSNRIITKCPLSGEKTPNCHSREFLDFRWKSLLANMAFPDGTDLMETRRKIDDFMLLYGALSKNALKKILKEVIGELPSNYNGMFLASEMEKALEVDPVRALILRTVYPNISFSLPNAELVEKLWKLIPKFVFTRMFRLKEYSFADICALLSPEKSAELAEFVRVIFDSSPASKKSPKPDFETAFNFKMRVQKISGRSPYSRQLMKSASEEIMRGVDPRSEGGSLYPRSESTKKEVLSNIDTWTNNHLVRHRLKIFKRLYMDIVREYCGADKSLVKSVAIEVVKDITAFSGLDSKKKAAKLNDLVAHHKSVSAYLKKEYPELSPNGSILRKARIADDLGWVCPYTGCHFSPRQLFESGNMEREHIIPRSLRPSDSLESLVITWKEVNDMKGQRTAYEFIKECQGMKVPGRQNLSIVTPERFEAFVRRLKKPMHPAGKADIERIKIRNKLLLTEHYKKREGGFLPSDLTQTSHLNKLAFKVVKSLYADAEKAPELIHVPGTVTSVVRKNWDLLPCMGDACPEIYETLENGDKVLRLKDEIRSITHLHHAVDAVAMGLAASVFPRTRNFYEAVSKRRLNQADRQELLKTGLVLFSGDKWKLVELEKSYLKEISGRISENRVVKFLPRKMSGMDVEQTLWGVVKENENGTVTIRQYGAGKGESRRSIKKVYEPKLKLLGYESKNTAKSKLARNKAVIIIKGNFGVALANPPQIIPHHNVWQRLSELAEKNGGRFPKILR

SEQ ID NO: 383 - protein, 1114 aa, unidentified; identical to SEQ ID NO: 352
  REGION 1..1114: note = Description of Unknown: uncultivated organism with predicted taxonomy: Coraliomargarita sp. CAG:312
  REGION 1..1114: note = MG2-67 effector

SEQ ID NO: 384 - protein, 1114 aa, unidentified; identical to SEQ ID NO: 364
  REGION 1..1114: note = Description of Unknown: uncultivated organism with predicted taxonomy: Coraliomargarita sp. CAG:312
  REGION 1..1114: note = MG2-68 effector

SEQ ID NO: 385 - protein, 1114 aa, unidentified; identical to SEQ ID NO: 356
  REGION 1..1114: note = Description of Unknown: uncultivated organism with predicted taxonomy: Coraliomargarita sp. CAG:312
  REGION 1..1114: note = MG2-69 effector

SEQ ID NO: 386 - protein, 1114 aa, unidentified; identical to SEQ ID NO: 360
  REGION 1..1114: note = Description of Unknown: uncultivated organism with predicted taxonomy: Coraliomargarita sp. CAG:312
  REGION 1..1114: note = MG2-70 effector

SEQ ID NO: 387 - protein, 1114 aa, unidentified; identical to SEQ ID NO: 356
  REGION 1..1114: note = Description of Unknown: uncultivated organism with predicted taxonomy: Coraliomargarita sp. CAG:312
  REGION 1..1114: note = MG2-71 effector

SEQ ID NO: 388 - protein, 1114 aa, unidentified
  REGION 1..1114: note = Description of Unknown: uncultivated organism with predicted taxonomy: Coraliomargarita sp. CAG:312
  REGION 1..1114: note = MG2-72 effector
LASYSTKKNGAIIRAAEQENSFIFEVPYERAVFKFEPLILSLIPFKINDNNLRMSTTNLSNFNLSFDIGYSSIGWSISSKPANAVFPNWLGAGVVVFDDDSCMAKSRAEFRRMRRNIASKRNRIKRMREVLSGLGVMGKDELDNAKTEHPWFLAAETLASGKILSWSELWSVLRYYAHNRGYDGNSMWAKFGDDSDGDSEREANAEKLMADLGTSTQAETICAYLGVDAKSPKPLRFKKYFKGQNLAFPREIVFKEVERIIDAHIGILPKCDENFKKLMIGNWREVPSNIKLPGRFTSDRGLLFGQYMPRFSNRIITKCPLSGEKTPNCHSREFLDFRWKSLLANMAFPDGTDLMETRRKIDDFMLLYGALSKNALKKILKEVIGELPSNYNGMFLASEMEKALEVDPVRALILRTVYPNISFSLPNAELVEKLWKLIPKFVFTRMFRLKEYSFADICALLSPEKSAELAEFVRVIFDSSPASKKSPKPDFETAFNFKMRVQKISGRSPYSRQLMKSASEEIMRGVDPRSEGGSLYPRSESTKKEVLSNIDMWTNNHLVRHRLKIFKRLYMDIVREYCGADKSLVKSVAIEVVKDITAFSGLDSKKKAAKLNDLVAHHKSVSAYLKKEYPELSPNGSILRKARIADDLGWVCPYTGCHFSPRQLFESGNMEREHIIPRSLRPSDSLESLVITWKEVNDMKGQRTAYEFIKECQGMKVPGRQNLSIVTPERFEAFVRRLKKPMHPAGKADIERIKIRNKLLLTEHYKKREGGFLPSDLTQTSHLNKLAFKVVKSLYADAEKAPELIHVPGIVTSVVRKNWDLLPCMGDACPEIYETLENGDKVLRLKDEIRSITHLHHAVDAVAMGLAASVFPRTRNFYEAVSKRRLNQADRQELLKTGLVLFSGDKWKLVELEKSYLKEISGRISENRVVKFLPRKMSGMDVEQTLWGVVKENENGTVTIRQYGAGKGESRRSIKKAYEPKLKLLGYESKNTAKSKLARNKAVIIIKGNFGVALANPPQIIPHHNVWQRLSELAEKNGGRFPKILRRNQIIEIPSGRYKGIWRITSIKNNSNYIGVDMIHPIYVRIKEKSKINVNLNTIIKDGMKIIDTRLIGA

SEQ ID NO: 389 - protein, 1108 aa, unidentified; identical to SEQ ID NO: 368
  REGION 1..1108: note = Description of Unknown: uncultivated organism with predicted taxonomy: Verrucomicrobia bacterium
  REGION 1..1108: note = MG2-73 effector

SEQ ID NO: 390 - protein, 1101 aa, unidentified
  REGION 1..1101: note = Description of Unknown: uncultivated organism with predicted taxonomy: Verrucomicrobia
  REGION 1..1101: note = MG2-74 effector
MDPANLALSFDIGYASLGWAVFLLKDPFPSLLGSGSVLFQKDSCLASSRRAFRRARRNIAARRSRVARLKKYLASLGVLEREQLDENACAYPWLLAARVLASDGKEKLSWQELWHVLRWYAHSRGYDGNALWAGDALDETGADDEDTQKVKAARALMEKYGKTTMAETVCADLQLEPFGEKRASRRYLKGNNAAFPRETVRDEVRRILLAHAGVLPKVDDALAATLLNDVPENLCAALRLPARFSAKGGLLFGQYVPRFDNRIIGHCRITGKNVPLKNCREYLLYRWGRLLNNLTVFARDGSIRTLSADKPNGRPSEREKLDAEMRSRGFFDKKKLNDLLKEITGCEPANTESYFLIPEMEDALILDPVRKLIATKKLVKDFWGYFSERGKKIFAAELAKGKTLKLSDCIKRMDGWGGWKTKPLFAAALEKLKAAEMKKKPEKRRNLLNLRIKAEFPTGRASYCREILKKTYEEALAGKDSTQPGGCLYETPEIRERLLRGNAVGDDAGTVATEQWLAGQTNNHMVRHRMLIFSRLLRDIIREYAEGDAARVKDVVVEVVRELKEFSGLSAQEIATKLNEKFANFNSVAEKIEAAAQEKGVSVSASLIRKARLLEDQGFACPYTGKNISYNELFSGALEIEHIIPRSLRPSDALSSCVMTFRAVNDMKGQRTAMQFMKECAGKDVPGTNLQIQPLANFKEWVEAHRSQKLRRGFSKEDQARCKRRAELLLVERYEERNADFTERDLTQTSHLNKLAIRLVKRELGIDARHLAGAVTGFVRKNLSIDECLVAAVPRMQRAQRVSEHDSRKLLKSQMRELSHLHHAMDAITQGLTGILFRVEDWKLLVKRHLTERERAVLAAKYPTLLRFSANGEIALKPLPDSLLSEITARLKECRVVQHVPAKMHGLAVEQTTWSIVSQDEATRKVSLEQHTTDLKKGRYKDDGTRFVKNCEEKPALLLGFGVPEEQKSKLQAIKGVVKICENWGCALDPEPVVIPYFKVFPRLRELRERNGGKPVRVLRRGQQIEVLSGKFKGVWTIVSIKDATRDGILLDICAPDKVRQTEHGTTDSKVGVLLKSLLRAGLKILKPPLTGFACPTTSSQ

SEQ ID NO: 391 - protein, 1089 aa, unidentified
  REGION 1..1089: note = Description of Unknown: uncultivated organism with predicted taxonomy: Coraliomargarita sp. CAG:312
  REGION 1..1089: note = MG2-75 effector
VPYERAVFKFEPLILSLIPFKINDNNLRMSTTNLSNFNLSFDIGYSSIGWSISSKPANAVFPNWLGAGVVVFDDDSCMAKSRAEFRRMRRNIASKRNRIKRMREVLSGLGVMGKDELDNAKTEHPWFLAAETLASGKILSWSELWSVLRYYAHNRGYDGNSMWAKFGDDSDGDSEREANAEKLMADLGTSTQAETICAYLGVDAKSPKPLRFKKYFKGQNLAFPREIVFKEVERIIDAHIGILPKCDENFKKLMIGNWREVPSNIKLPGRFTSDRGLLFGQYMPRFSNRIITKCPLSGEKTPNCHSREFLDFRWKSLLANMAFPDGTDLMETRRKIDDFMLLYGALSKNALKKILKEVIGELPSNYNGMFLASEMEKALEVDPVRALILRTVYPNISFSLPNAELVEKLWKLIPKFVFTRMFRLKEYSFADICALLSPEKSAELAEFVRVIFDSSPASKKSPKPDFETAFNFKMRVQKISGRSPYSRQLMKSASEEIMRGVDPRSEGGSLYPRSESTKKEVLSNIDTWTNNHLVRHRLKIFKRLYMDIVREYCGADKSLVKSVAIEVVKDITAFSGLDSKKKAAKLNDLVAHHKSVSAYLKKEYPELSPNGSILRKARIADDLGWVCPYTGCHFSPRQLFESGNMEREHIIPRSLRPSDSLESLVITWKEVNDMKGQRTAYEFIKECQGMKVPGRQNLSIVTPERFEAFVRRLKKPMHPAGKADIERIKIRNKLLLTEHYKKREGGFLPSDLTQTSHLNKLAFKVVKSLYADAEKAPELIHVPGIVTSVVRKNWDLLPCMGDACPEIYETLENGDKVLRLKDEIRSITHLHHAVDAVAMGLAASVFPRTRNFYEAVSKRRLNQADRQELLKTGLVLFSGDKWKLVELEKSYLKEISGRISENRVVKFLPRKMSGMDVEQTLWGVVKENENGTVTIRQYGAGKGESRRSIKKAYEPKLKLLGYESKNTAKSKLARNKAVIIIKGNFGVALANPPQIIPHHNVWQRLSELAEKNGGRFPKILRRNQIIEIPSGRYKGIWRITSIKNNSNYIGVDMIHPIYVRIKEKSKINVNLNTIIKDGMKIIDTRLIGA

SEQ ID NO: 392 - protein, 876 aa, unidentified
  REGION 1..876: note = Description of Unknown: uncultivated organism with predicted taxonomy: Verrucomicrobia bacterium
  REGION 1..876: note = MG2-76 effector
MSAKQNPPPDLSLSFDVGHSSIGWAVLQTSPDVEIKGCGVVIFRADDCLASARRGYRRQRRHIRSTRQRIKRMKALLLHLCVLTQAQLDKPGCAWQWKLAGRVLAGGKTLTWTELWDVLRWYAHNRGYDGNRRWSAGEAANEKEDQEKVQNAHALMREHDKQTMAETFCAVCGIDPMGAKCSSNIDPAKRFKAKNAAFPRGIVEAEVARLLRTHFVKLKGVDEKFATAMFSDWRALSCPAIKLPIRYQGGLLFGQLVPRFDNRIISKCPITGQKVPSRNTREFLSYRWGMLLANVRVARLADRELKPLTVEERKELDKLMRAEGSMTAKQFTEAVEKVAGSIRHNLSTMLMHPDAKDALVLDAVQECLTTEKPMPVKALFAALPTRIQKRARGQLRRGQSFTFAALYEAAKQAEELVAAFDAAVQQQLDKAAGKGRKKDKPLTRDELLAKSLSVRKLSGRAAYARPILVQAFAEVMNGKHPKEEGGCLFVTEKMREAQLNRTLAQQTNNHLVRHRLLILARVLKDIIEEYAGGDKKRVGKMTIEVNRDLREMSGKTAKEKAQDLGLRLANFKSVVKKLEEAFEGKQIRITPGLIRKARIAEDIGWVCPYTGEHYDAFDLLHKNVDLDHIIPRADRPSNSLDSLVVTFPEVNRMKGKRTALAFMKEAETKQVEGLPRLTLKSLNHFKADIEALRPGSDPRKAKRRGAVTGPIDDDLRRWKRKELLLKVEKWDGGDFLPADLTVTSQLVRLGAQALKREFIDLEEPPVTVSLPGAVTGEVRKAWDVLGCLSKACPEVLDAEGKVKTKTEIRDITHLHHALDACVIGLAAHFIPNRGRVWELITKRRLTAAEQSELVALKVFTPESHGEVRLNDLKPDR

SEQ ID NO: 393 - protein, 1090 aa, unidentified
  REGION 1..1090: note = Description of Unknown: uncultivated organism
  REGION 1..1090: note = MG2-77 effector
MSAKQNPPPDLSLSFDVGHSSIGWAVLQTSPDVEIKGCGVVIFRADDCLASARRGYRRQRRHIRSTRQRIKRMKALLLHLCVLTQAQLDKPGCAWPWKLAGRVLAGGKTLTWHELWDVLRWYAHNRGYDGNRRWSAGEAANEKEDQEKVQNAHALMREHDKQTMAETFCAVCGIDPMGAKCSSNIDPAKRFKAKNAAFPRGIVEAEVARLLRTHFGKLKGVDEKFATAMFSDWRALSCPAIKLPIRYQGGLLFGQLVPRFDNRIISKCPITGQKVPSRNTREFLSYRWGMLLANVRVARLADRELKPLTVEERKELDKLMRAEGSMTAKQFTEAVEKVAGSIRHNLSTMLMHPDAKDALVLDAVQECLTTEKPMPVKALFAALPTRIQKRARGQLRRGQSFTFAALYEAAKQAEELVAAFDAAVQQQLDKAAGKGRKKDKPLTRDELLAKSLSVRKLSGRAAYARPILVQAFAEVMNGKHPKEEGGCLFVTEKMREAQLNRTLAQQTNNHLVRHRLLILARVLKDIIEEYAGGDKKRVGKMTIEVNRDLREMSGKTAKEKAQDLGLRLANFKSVVKKLEEAFEGKQIRITPGLIRKARIAEDIGWVCPYTGEHYDAFDLLHKNVDLDHIIPRADRPSNSLDSLVVTFPEVNRMKGKRTALAFMKEAETKQVEGLPRLTLKSLNHFKADIEALRPGSDPRKAKRRGAVTGPIDDDLRRWKRKELLLKVEKWDGGDFLPADLTVTSQLVRLGAQALKREFIDLEEPPVTVSLPGAVTGEVRKAWDVLGCLSKACPEVLDAEGKVKTKTEIRDITHLHHALDACVIGLAAHFIPNRGRVWELITKRRLTAAEQSELVALKVFTPESHGEVRLNDLKPERKEQIRQRLAERRVVQHIPKRITGLRVEQNTWRVQSIEDGDVTLTQRIRQPDGKRPRKQVIQRSGKLIGLEPGKLQTLKGALVIGENFGVALDPTPTVIHFHKVWSRLRELKKVNGGKMPRVLRNGHLIRVSEGSRAGLWRVTSIKQTEAYGLALDLAYPDSVGLSRPNAPILQLQAEGLAIVGTSLTGFDASAVMYAAIKRRPRKLKTEQSESS

SEQ ID NO: 394 - protein, 1090 aa, unidentified
  REGION 1..1090: note = Description of Unknown: uncultivated organism with predicted taxonomy: Verrucomicrobia bacterium
  REGION 1..1090: note = MG2-78 effector
MSAKQNPPPDLSLSFDVGHSSIGWAVLQTSPDVEIKGCGVVIFRADDCLASARRGYRRQRRHIRSTRQRIKRMKALLLHLCVLTQAQLDKPGCAWPWKLAGRVLAGGKTLTWPELWDVLRWYAHNRGYDGNRRWSAGEAANEKEDQEKVQNAHALMREHDKQTMAETFCAVCGIDPMGAKCSSNIDPAKRFKAKNAAFPRGIVEAEVARLLRTHFGKLKGVDEKFATAMFSDWRALSCPAIKLPIRYQGGLLFGQLVPRFDNRIISKCPITGQKVPSRNTREFLSYRWGMLLANVRVARLADRELKPLTVEERKELDKLMRAEGSMTAKQFTEAVEKVAGSIRHNLSTMLMHPDAKDALVLDAVQECLTTEKPMPVKALFAALPTRIQKRARGQLRRGQSFTFAALYEAAKQAEELVAAFDAAVQQQLDKAAGKGRKKDKPLTRDELLAKSLSVRKLSGRAAYARPILVQAFAEVMNGKHPKEEGGCLFVTEKMREAQLNRTLAQQTNNHLVRHRLLILARVLKDIIEEYAGGDKKRVGKMTIEVNRDLREMSGKTAKEKAQDLGLRLANFKSVVKKLEEAFEGKQIRITPGLIRKARIAEDIGWVCPYTGEHYDAFDLLHKNVDLDHIIPRADRPSNSLDSLVVTFPEVNRMKGKRTALAFMKEAETKQVEGLPRLTLKSLNHFKADIEALRPGSDPRKAKRRGAVTGPIDDDLRRWKRKELLLKVEKWDGGDFLPADLTVTSQLVRLGAQALKREFIDLEEPPVTVSLPGAVTGEVRKAWDVLGCLSKACPEVLDAEGKVKTKTEIRDITHLHHALDACVIGLAAHFIPNRGRVWELITKRRLTAAEQSELVALKVFTPESHGEVRLNDLKPERKEQIRQRLAERRVVQHIPKRITGLRVEQNTWRVQSIEDGDVTLTQRIRQPDGKRPRKQVIQRSGKLIGLEPGKLQTLKGALVIGENFGVALDPTPTVIHFHKVWSRLRELKKVNGGKMPRVLRNGHLIRVSEGSRAGLWRVTSIKQTEAYGLALDLAYPDSVGLSRPNAPILQLQAEGLAIVGTSLTGFDASAVMYAAIKRRPRKLKTEQSESS

SEQ ID NO: 395 - protein, 1087 aa, unidentified
  REGION 1..1087: note = Description of Unknown: uncultivated organism with predicted taxonomy: Verrucomicrobia bacterium
  REGION 1..1087: note = MG2-79 effector
MNATQKIQPATNSDLQLAFDVGHSSLGWAVLQSSAGIPPAAKRTAGDNSINILSCGAVVFRADDCLASSRRTYRRQRRHIRSTKQRIARMKIILRHLGVLKENELNQPGCAWPWQLAARILQGGKLLTWPELWDVLRWYAHNRGYDGNRRWSAAEAEAQKEDSEKEANARTLMGKHGVHSMAETFCKELGVDPLGKKKSSMKRFKGLNAAFPREVVEGEVRKVLQAHSGKLKGVDVNLEKNLFSDWRAIPCPDLKLPKRYEDGLLFGQLVPRFDNRIISICPISGQKVPSRNCPEFLNFRWAMQLANIKVGKTKDRELQPLKTEYRVALDKQMRERGYLTPKELKDTVRSITSCERDNLDTMLMHPDAKEALLLDPVQKLICSNDLQPLWKLLPERLQKRLRGQWRHNKVFTLAQIRKQLESLGDVSAFDAEFQKQLDTQNSKAKKKEKQVTREQLLQQHFPSRPLKLDGRAAFARHLLKQAYEDVLAGKPHPKEEGGCLFITKKIREAQLNRAIADQTNNHLVRHRLLILERLLADIIKEYAAGDKKRVGKITIEVNRDLREMSGKTAKEKAQDLGLRIANHHAVAEKLEKAFAEERNGKSIPITAGLIRKARIAEDLGWRCPYTGIDYEPKDLVTKRVDKDHIVPRSERASDSLDSLVITLSAINKWKGKRTAWQFVEQEQGKPVPDLPNLSIVSLTRYKQFVESLETYKGHDDDKRRKKKRKELMLLPKYEEREFVPRDLTQTSQLVRLGGQVLKRAFANSEEKPTLVSLPGSVTGAVRKAWKVLGCLSLANQQVLDENGDVKTKTDIRDITHLHHALDACVLGLTSHFIPNNGRVWELIVKRNPNDLERQQLMALGVFGFNAEKRFEMRDLDNKLKEQIRQRLAEKRVVQHIPARMDGLRVEQNTWRVVSSDENGNVTIRQRIRQADGSRPEKLGEEKTTKLLGLKPANGNGKLAANKGVLVIPDNYGVALDPLPTIIPFHKVWPRLQELKKANGGKLPRVLRNGQTIKVPEGKYKGVWRIFSAKNNATGMAIDIGQPDVVRLKNKTEGHKINVLLTSLLKNKMEVVKTPFTGISAIPATSST

SEQ ID NO: 396 - protein, 974 aa, unidentified
  REGION 1..974: note = Description of Unknown: uncultivated organism with predicted taxonomy: Verrucomicrobia bacterium
  REGION 1..974: note = MG2-80 effector
DVLRWYAHNRGYDGNRRWSAGEAANEKEDQEKVQNAHALMREHDKQTMAETFCAVCGIDPMGAKCSSNIDPAKRFKAKNAAFPRGIVEAEVARLLRTHFGKLKGVDEKFATAMFSDWRALSCPAIKLPIRYQGGLLFGQLVPRFDNRIISKCPITGQKVPSRNTREFLSYRWGMLLANVRVARLADRELKPLTVEERKELDKLMRAEGSMTAKQFTEAVEKVAGSIRHNLSTMLMHPDAKDALVLDAVQECLTTEKPMPVKALFAALPTRIQKRARGQLRRGQSFTFAALYEAAKQAEELVAAFDAAVQQQLDKAAGKGRKKDKPLTRDELLAKSLSVRKLSGRAAYARPILVQAFAEVMNGKHPKEEGGCLFVTEKMREAQLNRTLAQQTNNHLVRHRLLILARVLKDINEEYAGGDKKRVGKMTIEVNRDLREMSGKTAKEKAQDLGLRLANFKSVVKKLEEAFEGKQIRITPGLIRKARIAEDIGWVCPYTGEHYDAFDLLHKNVDLDHIIPRADRPSNSLDSLVVTFPEVNRMKGKRTALAFMKEAETKQVEGLPRLTLKSLNHFKADIEALRPGSDPRKAKRRGAVTGPIDDDLRRWKRKELLLKVEKWDGGDFLPADLTVTSQLVRLGAQALKREFIDLEEPPVTVSLPGAVTGEVRKAWDVLGCLSKACPEVLDAEGKVKTKTEIRDITHLHHALDACVIGLAAHFIPNRGRVWELITKRRLTAAEQSELVALKVFTPESHGEVRLNDLKPERKEQIRQRLAERRVVQHIPKRITGLRVEQNTWRVQSIEDGDVTLTQRIRQPDGKRPRKQVIQRSGKLIGLEPGKLQTLKGALVIGENFGVALDPTPTVIHFHKVWSRLRELKKVNGGKMPRVLRNGHLIRVSEGSRAGLWRVTSIKQTEAYGLALDLAYPDSVGLSRPNAPILQLQAEGLAIVGTSLTGFDASAVMYAAIKRRPRKLKTEQSESS

SEQ ID NO: 397 - protein, 851 aa, unidentified
  REGION 1..851: note = Description of Unknown: uncultivated organism with predicted taxonomy: Verrucomicrobia bacterium
  REGION 1..851: note = MG2-81 effector
MSPKLEFSFDVGHSSIGWAVLQSSAVVSPVANAPRVNILGCGVVTFGADDCLASKRRDYRRQRRHARSTRHRIAQLEKLLAHLKVLSADQLKQKHQQAGGHAAPWFLAARVLASNGAAKYLLDWPQLWDVLRWYAHNRGYDGNRRWSAQEAEAQSEDTEKEKTANALMEKHGTTTMAETLCKALGLEPLGDKQSSKENFKRLNAAFPRSIVEKEVRRLLELHQKKLPAITDTFLKSLFEDWRAAKISDLKLPDRYQGGLLFGQLVPRFDNRIISTCPITGEKVPSKNCPEFLKFRWAMTLANIRVAGAKEKELRPLAADERKKINVVMESEGALTPRELTKLVRETTGCTRDNLDTMLMHPDAKDGLLLNPIQKLVQGDKLKTLWPTFSPRVQKRARDLWERGKPVTLEHICGIAKKLGESLANFEAKLNKLADSANTKRSKKAGSLDSEALLKEPLTIKKSDGRAAYARPLLVRAYAEVMAGKHPKEDGNSLCVTEEMRQAQLQKQIDQQTNNHLVRHRLLILERLLKDLIADSAFANGDKSRIARTTIEVNRDLREMSGKSAKEIQQDLGRRLANHHGVAAKLDADLDGRTFNGKPIQITAGLIRKARIAEDLGWTCPYTGKTYDAIDLVSRQVDKDHIIPRSLRPSDSLDSLVVTFAEVNKMKGQRTAWKFVSDEQGKVVEGSPQLSIVSLTRFKQWAESLETYKGHDDDKRRKKKRKELLLLPNYEEKGFVPRDLTVTSQLVRLGAQIIKKTFAGSEKPPMVVSLPGSVTGTVRKGWNLLGCLELAAPQVKEADGGIKNKTDIRDVTHLHHALDACVLGLASYYLPNNGGLWEVMIKRNPNDGEKAL

SEQ ID NO: 398 - protein, 1082 aa, unidentified
  REGION 1..1082: note = Description of Unknown: uncultivated organism with predicted taxonomy: Verrucomicrobia bacterium
  REGION 1..1082: note = MG2-82 effector
PDLSLSFDVGLSSIGWAVLQTSPDVEIKGCGVVIFRADDCLASARRGYRRQRRHIRSTRQRIKRMKALLLHLCVLTQAQLDKPGCAWPWKLAGRVLAGGKTLTWPELWDVLRWYAHNRGYDGNRRWSAGEAANEKEDQEKVQNAHALMREHDKQTMAETFCAVCGIDPMGAKCSSNIDPAKRFKAKNAAFPRGIVEAEVARLLRTHFGKLKGVDEKFATAMFSDWRALSCPAIKLPIRYQGGLLFGQLVPRFDNRIISKCPITGQKVPSRNTREFLSYRWGMLLANVRVARLADRELKPLTVEERKELDKLMRAEGSMTAKQFTEAVEKVAGSIRHNLSTMLMHPDAKDALVLDAVQECLTTEKPMPVKALFAALPTRIQKRARGQLRRGQSFTFAALYEAAKQAEELVAAFDAAVQQQLDKAAGKGRKKDKPLTRDELLAKSLSVRKLSGRAAYARPILVQAFAEVMNGKHPKEEGGCLFVTEKMREAQLNRTLAQQTNNHLVRHRLLILARVLKDIIEEYAGGDKKRVGKMTIEVNRDLREMSGKTAKEKAQDLGLRLANFKSVVKKLEEAFEGKQIRITPGLIRKARIAEDIGWVCPYTGEHYDAFDLLHKNVDLDHIIPRADRPSNSLDSLVVTFPEVNRMKGKRTALAFMKEAETKQVEGLPRLTLKSLNHFKADIEALRPGSDPRKAKRRGAVTGPIDDDLRRWKRKELLLKVEKWDGGDFLPADLTVTSQLVRLGAQALKREFIDLEEPPVTVSLPGAVTGEVRKAWDVLGCLSKACPEVLDAEGKVKTKTEIRDITHLHHALDACVIGLAAHFIPNRGRVWELITKRRLTAAEQSELVALKVFTPESHGEVRLKDLKPERKEQIRQRLAERRVVQHIPKRITGLRVEQNTWRVQSIEDGDVTLTQRIRQPDGKRPRKQVIQRSGKLIGLEPGKLQTLKGALVIGENFGVALDPTPTVIHFHKVWSRLRELKKVNGGKMPRVLRNGHLIRVSEGSRAGLWRVTSIKQTEAYGLALDLAYPDSVGLSRPNAPILQLQAEGLAIVGTSLTGFDASAVMYAAIKRRPRKLKTEQSESS

SEQ ID NO: 399 - protein, 1075 aa, unidentified
  REGION 1..1075: note = Description of Unknown: uncultivated organism
  REGION 1..1075: note = MG2-83 effector
MSIKGKISNGADANLQISFDVGHSSIGWAVLEKTGQQVSDIKINGCGSVVFRADDCLASSRRAYRRQRRHIRSTRQRIARMKILLKHLGVLTEKELDKPGCAWPWKLAAQILQGGKLLTWPELWDVLRWYAHNRGYDGNRRWSAAENDAQSEDSEKEENARSLMGKYGTKSMAETFCAISGINPLGEKKSANLSGDKRPKGQNAAFPREIVELEVRQILQKHFGKLKNADENLEKVLFTDWQTISCPDLKLPKRYEGGLLFGQLVPRFDNRIISTCPISGQKVPTRNCTEFLNFRWAMQLANIRIACAGEKELRPLTAAERKIIDQAVSEKGGVTPFQLKLIVREKTKCVRDDLEQMLMLPDFEKALLLNPIQKMISADDFQPYWKLLPDRLQKRLRGKWRRGKVFSLAQIRTQLESLGDASAFDAELQRQLDAHNSNAKKKDKQITRENLLQKHFPSKPLKLDGRAAFARHLLKQAYDEVLAGKDPNGKGGCLFRSEEIRQKELNREISDQTNNHLVRHRLLILERVLNDIIKEYAGGKKDRIGKITIEVNRDLREMSGKTAKEKAQDLGLRIANHHNVAEKLEKAFAEEGIKQTITAGLIRKARIAEDLGWHCPYTGIQYEPKDLITRRVDKDHIVPRSERASDSLDSLVVTFSAINKWKNKRTAWQFVTDEQGKTVPDLPNLSIMSLARYKQFVESLESYKGHDDDKRRKKKRKELMLLPKYEEKEFMPRDLTQTSQLVRLGAQVLKKNLPHLTTGDVTSLPGSVTGTVRKGWKLEACLGLANPQVFDGNGGAKTKTEIRDITHLHHALDACVLGIAANYFQNQKLGASSLWELLIKRKYNEQEKTILRALGIFQFDKEGNSQIKELPKEIREQIRQRLAEKRVVQHIPARMDGLRVEQNTWRVVAVKDGEVILKQRIRQPDGTRPEKIAEEKPGKLLGLNPTNGNGKLAANKGALVIPDNFGVALDPQPIVIPFHKVWTRLQELKKANAGKLPRVLRNGQLIRVKDGTYKGVWRVFSAKNNATGMALDIGSPDVVRLKNKTEGHKINVLLSSLIKGGLEPIQSSFTGITSK

SEQ ID NO: 400 - protein, 938 aa, unidentified
  REGION 1..938: note = Description of Unknown: uncultivated organism with predicted taxonomy: Verrucomicrobia bacterium
  REGION 1..938: note = MG2-84 effector
VYHNGDMASRRNAPDLQLAFDVGHSSIGWAVLQANPDVEIAGCGVVIFRADDCLASARRGYRRQRRHIRSTRQRIKRMKALLLHLGVLTQTQLDKSGCAWPWKLAARVLVGGKTLTWPELWDVLRWYAHNRGYDANRRWSAAEAEAEKEDTEKLENAKTLMDKHGVKTMAETFCKELGVDPRGAKSSSMTRFKGLNAAFPRGVVEAEVARILQAHFGKLKGADEKFAAALFSDWRAIPCPKIKLPQRYQGGLLFGQLVPRFDNRIISICPISGQKVPSRNTPEFLNFRWGMLLANVRVARLVDRELKPLTVEERRELDRLTRAEGAMTAKQFTDAVEKVTGAIRHNLATMLMHPDAKDALVLDPVQKLVTTGHRAALWPTLPERIQKRARGQLRRGKPVTLGDLGNEVPAFHAQVQSILDKTAGRGRKKDKALTRDDLLREILQVRKLDGRAAYSRPILRKAFEQVMDGKHPAEDGGCLFVTEQTRQAQLSRSLTQQTNNHLVRHRLLILSRLLNAIVKEYADGDKTRIGKMTIEVNRDLREMSGKTAKEVAQDLGLRLANFKNVVKKLEGDESFMRELNQRGLHHIPPGIIRKARVAEDLGWRCPYTGMEYEPVHLLTRRVDKDHIIPHADRASDSLDSLVITFSAINAMKGKRTALQFVNEEQGKTVEDLPNLSIVSVNRYREFVEGLEAFRGHDDDRRRKKRRKDLLLLPSYEEKEFTPRDLTVTSQLVRLGALTLKREFADVKQPPVIVSLPGAVTGEVRKAWDVLGCLGLACSQVLDVEGKPKTKTEIRDITHLHHALDACVLGLASHFIPNNGRVWELITKRNLTSAEQKELIALNVFATGPQGRVQLRDLRPERKEQIRQRLAEKRVVQHIPKRIAGLRVEQNTWRVRGSKDGDVTLQQRIRQPDGKRPLKQAVERASKLIGLEDGKLHRL

SEQ ID NO: 401 - protein, 1090 aa, unidentified
  REGION 1..1090: note = Description of Unknown: uncultivated organism with predicted taxonomy: Verrucomicrobia bacterium
  REGION 1..1090: note = MG2-85 effector
MSAKQNPPPDLSLSFDVGHSSIGWAVLQTSPDVEIKGCGVVIFRADDCLASARRVYRRQRRHIRSTRQRIKRMKALLLHLCVLTQAQLDKPGCAWPWKLAGRVLAGGKTLTWPELWDVLRWYAHNRGYDGNRRWSAGEAANEKEDQEKVQNAHALMREHDKQTMAETFCAVCGIDPMGAKCSSNIDPAKRFKAKNAAFPRGIVEAEVARLLRTHFGKLKGVDEKFATAMFSDWRALSCPAIKLPIRYQGGLLFGQLVPRFDNRIISKCPITGQKVPSRNTREFLSYRWGMLLANVRVARLADRELKPLTVEERKELDKLMRAEGSMTAKQFTEAVEKVAGSIRHNLSTMLMHPDAKDALVLDAVQECLTTEKPMPVKALFAALPTRIQKRARGQLRRGQSFTFAALYEAAKQAEELVAAFDAAVQQQLDKAAGKGRKKDKPLTRDELLAKSLSVRKLSGRAAYARPILVQAFAEVMNGKHPKEEGGCLFVTEKMREAQLNRTLAQQTNNHLVRHRLLILARVLKDIIEEYAGGDKKRVGKMTIEVNRDLREMSGKTAKEKAQDLGLRLANFKSVVKKLEEAFEGKQIRITPGLIRKARIAEDIGWVCPYTGEHYDAFDLLHKNVDLDHIIPRADRPSNSLDSLVVTFPEVNRMKGKRTALAFMKEAETKQVEGLPRLTLKSLNHFKADIEALRPGSDPRKAKRRGAVTGPIDDDLRRWKRKELLLKVEKWDGGDFLPADLTVTSQLVRLGAQALKREFIDLEEPPVTVSLPGAVTGEVRKAWDVLGCLSKACPEVLDAEGKVKTKTEIRDITHLHHALDACVIGLAAHFIPNRGRVWELITKRRLTAAEQSELVALKVFTPESHGEVRLNDLKPERKEQIRQRLAERRVVQHIPKRITGLRVEQNTWRVQSIEDGDVTLTQRIRQPDGKRPRKQVIQRSGKLIGLEPGKLQTLKGALVIGENFGVALDPTPTVIHFHKVWSRLRELKKVNGGKMPRVLRNGHLIRVSEGSRAGLWRVTSIKQTEAYGLALDLAYPDSVGLSRPNAPILQLQAEGLAIVGTSLTGFDASAVMYAAIKRRPRKLKTEQSESS

SEQ ID NO: 402 - protein, 985 aa, unidentified; identical to SEQ ID NO: 326
  REGION 1..985: note = Description of Unknown: uncultivated organism
  REGION 1..985: note = MG2-86 effector

SEQ ID NO: 403 - protein, 909 aa, unidentified
  REGION 1..909: note = Description of Unknown: uncultivated organism with predicted taxonomy: Methylococcales bacterium
  REGION 1..909: note = MG2-87 effector
LENAKTLMDKPGVKTMAETFCKELGVDPRGAKSSSMTRFKGLNAAFPRGVVEAEVARILQAHFGKLKGADEKFAAALFSDWRAIPCPKIKLPQRYQGGLLFGQLVPRFDNRIISICPISGQKVPSRNTPEFLNFRWGMLLANVRVARLVDRELKPLTVEERRELDRLTRAEGAMTAKQFTDAVEKVTGAIRHNLATMLMHPDAKDALVLDPVQKLVTTGHRAALWPTLPERIQKRARGQLRRGKPVTLGDLGNEVPAFHAQVQSILDKTAGRGRKKDKALTRDDLLREILQVRKLDGRAAYSRPILRKAFEQVMDGKHPAEDGGCLFVTEQTRQAQLSRSLTQQTNNHLVRHRLLILSRLLNAIVKEYADGDKTRIGKMTIEVNRDLREMSGKTAKEVAQDLGLRLANFKNVVKKLEGDESFMRELNQRGLHHIPPGIIRKARVAEDLGWRCPYTGMEYEPVHLLTRRVDKDHIIPHADRASDSLDSLVITFSAINAMKGKRTALQFVNEEQGKTVEDLPNLSIVSVNRYREFVEGLEAFRGHDDDRRRKKRRKDLLLLPSYEEKEFTPRDLTVTSQLVRLGALTLKREFADVKQPPVIVSLPGAVTGEVRKAWDVLGCLGLACSQVLDVEGKPKTKTEIRDITHLHHALDACVLGLASHFIPNNGRVWELITKRNLTSAEQKELIALNVFATGPQGRVQLRDLRPERKEQIRQRLAEKRVVQHIPKRIAGLRVEQNTWRVRGSKDGDVTLQQRIRQPDGKRPLKQAVERASKLIGLEDGKLHRLSGALVVGENFGVALDPQPTIIPFHKVWPRLQELKKANGGKLPRVLRNGQIIYIPKGTYSGVWKVFSAKNNKSGMALDMGRPDVVRLRNKTDGHKINVLLSSLLKDGMTIVDAPLTGVSSAPKQS

SEQ ID NO: 404 - protein, 985 aa, unidentified; identical to SEQ ID NO: 326
  REGION 1..985: note = Description of Unknown: uncultivated organism
  REGION 1..985: note = MG2-88 effector

SEQ ID NO: 405 - protein, 985 aa, unidentified; identical to SEQ ID NO: 326
  REGION 1..985: note = Description of Unknown: uncultivated organism with predicted taxonomy: Verrucomicrobia
  REGION 1..985: note = MG2-89 effector

SEQ ID NO: 406 - protein, 807 aa, unidentified
  REGION 1..807: note = Description of Unknown: uncultivated organism with predicted taxonomy: Verrucomicrobia bacterium
  REGION 1..807: note = MG2-90 effector
MSIKGKISNGADANLQISFDVGHSSIGWAVLEKTGQQVSDIKINGCGSVVFRADDCLASSRRAYRRQRRHIRSTRQRIARMKILLKHLGVLTEKELDKPGCAWPWKLAAQILQGGKLLTWPELWDVLRWYAHNRGYDGNRRWSAAENDAQSEDSEKEENARSLMGKYGTKSMAETFCAISGINPLGEKKSANLSGDKRPKGQNAAFPREIVELEVRQILQKHFGKLKNADENLEKVLFTDWQTISCPDLKLPKRYEGGLLFGQLVPRFDNRIISTCPISGQKVPTRNCTEFLNFRWAMQLANIRIACAGEKELRPLTAAERKIIDQAVSEKGGVTPFQLKLIVREKTKCVRDDLEQMLMLPDFEKALLLNPIQKMISADDFQPYWKLLPDRLQKRLRGKWRRGKVFSLAQIRTQLESLGDASAFDAELQRQLDAHNSNAKKKDKQITRENLLQKHFPSKPLKLDGRAAFARHLLKQAYDEVLAGKDPNGKGGCLFRSEEIRQKELNREISDQTNNHLVRHRLLILERVLNDIIKEYAGGKKDRIGKITIEVNRDLREMSGKTAKEKAQDLGLRIANHHNVAEKLEKAFAEEGIKQTITAGLIRKARIAEDLGWHCPYTGIQYEPKDLITRRVDKDHIVPRSERASDSLDSLVVTFSAINKWKNKRTAWQFVTDEQGKTVPDLPNLSIMSLARYKQFVESLESYKGHDDDKRRKKKRKELMLLPKYEEKEFMPRDLTQTSQLVRLGAQVLKKNLPHLTTGDVTSLPGSVTGTVRKGWKLEACLGLANPQVFDGNGGAKTKTEIRDITH

SEQ ID NO: 407 - protein, 1075 aa, unidentified; identical to SEQ ID NO: 399
  REGION 1..1075: note = Description of Unknown: uncultivated organism
  REGION 1..1075: note = MG2-91 effector

SEQ ID NO: 408 - protein, 774 aa, unidentified
  REGION 1..774: note = Description of Unknown: uncultivated organism with predicted taxonomy: Verrucomicrobiae bacterium Tous-C5FEB
  REGION 1..774: note = MG2-92 effector
ELWDVLRWYAHNRGYDGNQRWSNREMIRAFNSEGLHQTSKPSADDEKSLVAAAEKADAEAGVQNEADSDVKKVKEAFKQMHDYGTSTMAETMASHIAKFEIQAAEHRLGKRQEKPTRFKGLGAAFPRRIIRVINNEQTLAGGVEWEVRYILRAHFGHLPNCDANFERAICGGLPESKFDWRAYEQSHPTLYLTSKAEKLKLRELRIPRKADKQTKADKKKLRTEFLRNKLVLSSHFEGGVLFGQAVPRFDNRIISICPITGEKVPSKNCREFLKFRWAMMLANIHVAGAKEKELHPLTGDERKKINAVMENEGALTPTTLKRSVRETTNCTRDNLEMMLMHPDAKDALLLNPIQKLVRSEKLKTIWPTFSYPVQKRARDLWLRGKLVTLERICGIAQKLGESLTGFEAELNKLADVANTKRGKKESSFNREALMREPLTIIKLDGRAAYARPLLVRANAEVMAGKHPKEEGGCLEVTDAMRQVQLQKQIDQQTNNHLVRHRLLILERLVKDLVAEPAFASGDKSRIAKCTIEVNRDLREMSGKSSKEIQQDLGRRLANHHGVAAKLEKDLDGRTFNGKPIQITAGLIRKARIAEDLSWMCPYTSKAFDAIDLVSRQVDKDHIIPRSLRPSDSLDSLVVTFAEVNKMKGQRTALQFVSDEQGKTVEGSPQLSIVSLTRFKQWAESLETYKGHDDDKRRKKKRKELLLLQTYEEKGFVPRDLTVTSQLVRLGAQIIKKTFAENEKLPTVVSLPGSVTGTVRKGWNLLGCLATAAPQ

SEQ ID NO: 409 - protein, 1081 aa, unidentified
  REGION 1..1081: note = Description of Unknown: uncultivated organism
  REGION 1..1081: note = MG2-94 effector
MKQDQIAFSFDVGHSSIGWAVFKIADTPESFHTLLGTGVVLFPKDSCLASSRRGFRRSRRNIAARRSRIDRLKNYLVGLGVLSREQLDTNSNSYPWLLAARVLASGGKKALTWEELWSVLRWYAHNRGYDGNALWAGDAADAGDKDDNEKVQNAIALMDKHKTGTMAETVCKELGLDPRGEVKASRIYFKGNKAAFPREVVTEEVRRILAAHVGKLPKVDDALSDVLLKNAAPAGLELPARFKGGLLFGQYVPRFDNRIIPACRITGKNVPLKKCPEYLLYRWGRLLNNLTVFGTDGQIRTLLPAERKALHARMEAEGYFTKRTLNAALKEATGCTPANTESYFLTEEMEEALVLDPVKKLLATNQVLREVWPHLSAESRTQAQSALAAGKKIRLADILAAMESAGQDTAAAREALAHLQKKAKKKDADLVAHYFKANYPTGRAAYCREILAKTFAESMAGKDSTKEGGCLYETEEIRNRLLREPLVKQTNNHLVRHRLLIFERLLDQMVAEFADGDKKRIGATVVEVVRELQEFSGLNAKEVAQKLNEKLGNFRAVVKGLEEAIRGSGEKVAITGSLIRKARILEDQGFICPYTGAPLGYPDLLNDRLEIEHVIPRSLRPSDALSSCVMTFRSVNDMKGQRTAMQFIGEEQGREVPGHGNLQITTKKAYEAYVAKHKKQYRYGTDDRRRCERRAELMLMERYDQRNADFTERDLTQTSHLNKMAISLVKQRIGIDAKHLPGSVTAFIRQKLHIDECLFNAVPRLQKAAKGEGKKLKLKKNTEEPPAEPLLNDLPPRKLTKADIRELTHLHHAMDAVTQGLALLLFAPEDWPLLVKRHLSDSERRLLKSRYPYLVFTENSRMDIQDLPDATLKTISGRLAECRVVRHIPAKMHGIVVDQTTWGIVASGAITKLCQKTTEKNARYDENGRRFVKTAEEKRSLLLGGPNAPEGKLARIKGAILITENWGCALDPAPPTVIPHFKVYPQLRALREKNGGRPVRILRKGSLIQIKTGRFQGIWSVASIKDNADGICLDINAADKIKIENGSVDSKINVRLNSLLNSGLKILKPKLTGTCPTTSSP

SEQ ID NO: 410 - protein, 1081 aa, unidentified; identical to SEQ ID NO: 409
  REGION 1..1081: note = Description of Unknown: uncultivated organism
  REGION 1..1081: note = MG2-95 effector

SEQ ID NO: 411 - protein, 1080 aa, unidentified
  REGION 1..1080: note = Description of Unknown: uncultivated organism
  REGION 1..1080: note = MG2-96 effector
MKQGQIAFSFDIGHSSIGWAAFQVSDAPGTFHSLLGTGVVLFPKDACLASARRGFRRSRRNIAARRSRIDRLKNYLAGLGVLSRDQLDANSNSYPWLLAARILASDGKKTLTWEELWSVLRWYAHNRGYDGNALWAGDDADAGDKEDTDKVKNSIALMEKHKTATMAETVCKALGLDPMGEVKASRIYFKGNNAAFPRGVVTEEVRRILAAHAGKLPKVDDALSDILLRNAATSGLELPARFKGGLLFGQYVPRFDNRIIPACRITGKNTPLKRCPEYLLYRWGRLLNNLTVFGADGQIRTLLPAERQALHSRMEADGFFTKRTLNAALKDVTGCTPANTESFFLTEEMEEALVLDPVKKLLATNQIMKDLWPQLSAESREKAQSSLSAGKKIRLGDILAEMETAGQDTTAASDALASHQKKAKKKNADLATRRLSADYPKGRAAYCREILAKTFDESISGKDSTKEGGCLYETEEIRNRLLREPLVQQTNNHLVRHRLLVFERLLAHMVEEFAGGDEKRIAATVVEVVRELQEFSGLNSKEITHKLNEKLGNFRSVVKNLEEAIANSEERVAITGSLIRKARILEDQGFVCPYTGTHLSYNHLLADRLEIEHIIPRSLRPSDALSSCVMTFRSVNDMKGQRTAMQFICEEQGREVPGHENIQITTKKAYVDYVAKHKKQYPQKSDDRRRCERRAELMLMERYDQRNADFTERDLTQTSHLNKMAIRLVKQRIGIDAKHLPGNVTAFIRQKLHIDECLFNAVPRLQTAAKGQPKSSKRKKKAEEAPVEPIQDDMPPRKLTKADIRELTYLHHAMDAVTQGLALLLFAPEDWPLLVKRNLPDSEQRHLKARYPFLDFSADKHISIQDLPEDTLHTISERLAECRVVRHIPAKMHGIIVDQTTWGIVAAGAITTLRQKTTEKNARCDENGKRFIKTTEKKRSLLLGGPDAPDGKLAKIKGAILVTENWGCALDPSPTVIPHFKVYPQLRALREKNGGRPIRILRKGSLIQVKAGTYQGIWSVASIKDNADGICLDINAADKVKLENRSDDSKINVRLDSLRKSGLKILKPKLTGACPTTSSP

SEQ ID NO: 412 - protein, 953 aa, unidentified
  REGION 1..953: note = Description of Unknown: uncultivated organism with predicted taxonomy: Acidobacteria bacterium RIFCSPLOWO2_12_FULL_68_19
  REGION 1..953: note = MG2-97 effector
MKQDQIAFSFDVGHSSIGWAVFKIADTPESFHTLLGTGVVLFPKDSCLASSRRGFRRSRRNIAARRSRIDRLNNFLVGLGVLSREQLDTNSNSYPWLLAARVLASGGKKALTWEELWSVLRWYAHNRGYDGNALWAGDAADAGDKDDNEKVQNAIALMDKHKTGTMAETVCKELGLDPRGEVKASRIYFKGNKAAFPREVVTEEVRRILAAHVGKLPKVDDALSDVLLKNAAPAGLELPARFKGGLLFGQYVPRFDNRIIPACRITGKNVPLKKCPEYLLYRWGRLLNNLTVFGADGQIRTLLPAERKALHARMEAEGYFTKRTLNAALKEATGCTPANTESYFLTEEMEEALVLDPVKKLLATNQVLREVWPHLSAESRTQAQSALAAGKKIRLADILAAMESAGQDTAAAREALAQLQKKAKKKDADLVAHYFKANYPTGRAAYCREILAKTFAESMAGKDSTKEGGCLYETEEIRNRLLREPLVKQTNNHLVRHRLLIFERLLDQMVAEFADGDKKRIGATVVEVVRELQEFSGLNAKEVAQKLNEKLGNFRAVVKGLEEAIRGSGEKVAITGSLIRKARILEDQGFICPYTGAPLGYPDLLNDRLEIEHVIPRSLRPSDALSSCVMTFRSVNDMKGQRTAMQFIGEEQGREVPGHGNLQITTKKAFEAYVAKHTKQYRYGTDDRRRCERRAELMLMERYDQRNADFTERDLTQTSHLNKMAISLVKQRIGIDAKHLPGSVTAFIRQKLHIDECLFTAVPRLQKTAKGEGKRPKRKNADEVTAEPMQSDMPPRKLTKADIRELTHLHHAMDAVTQGLALLLFAPEDWPLLVKRNLTDSERRLLKSRYPYLVFTENSRMEIQDLPEATLKTISDRLAECRVIRHIPAKMHGIVVDQTTWGIVAAGTITKLRQKTTEKNARCDENGHRFVKTIEEKRSLLLGGPNAPDGKLA

SEQ ID NO: 413 - protein, 1101 aa, unidentified
  REGION 1..1101: note = Description of Unknown: uncultivated organism with predicted taxonomy: Verrucomicrobia bacterium
  REGION 1..1101: note = MG2-98 effector
MTRREKSATAKFITFSFDVGHSSIGWAVLGSGQKRPSIQDAQILGCGVVTFPVDDCLANQRRDFRRQRRHIRSTRLRIERMKRLLLHLGVMTREQLDKPGCAWPWLLAAQAFHGLRTLTWPELWDVLRWFAHNRGYDGNRAWSRFEEEEPEDTERVGQGRALLIEHKTQSMAEVFCHVLGINSRDPAAQKSSRKRIREVLQAAFPRETVKAEVSAILKNHEGKLPKCDDKLATALLTDRKAIDCPTVKFPLRYIWGYLFGQLAPRFENRILTRCPFTDEKVPAKDCPEFYRFRWAMQLANVVVDEDGNSRPLTQTERQAVNARMAECGALTKSEFKKAVADATGGRPNNLETMLMHPDAEKSLVLMPARKTALSGKNKDVFNLLPSALQARLLGKLIRRGSVRLRDIRSWTENDPALLAKFDAVISSWKTKAAGREKTKLDEDETQDPLDRTWKAHPESGRAPFARPILQQAYDDVMAGKDPRMEGGILYRSEEVLRRERDRTLAEQTNNHLIRHRLLILQRLAKDLLKDYAGGKASRIVKAIIEVNSDLRTMSGMTAKERETEMKKRLSNFTSAKIALEKALTGKKIGGKPIPITAGLIRKARLAMDLDMTCPYTGQIYDFIDIAKGRMQRDHVIPYAERASDSLAAQVLTFAEVNKWKDKRTAAQFVREEQGKAVKGKPNLVVLPFEKYKAFVEGLDKGKHPHPDDKARKEKRKKLLLLEEYAEKEFLPADLTITSQLVRLGARTLEKAFTDGNHAPKIVSMPGSVTGRVQRAWSLMGCIAKANPSVLDENGKPKPKGDIRDISHLHHAVDACVLGIAGTLFPNDGSLWKAMAARSPARAEAEQLLATGLYERDSEKHLRLRDLPAALKNQIADRLSERRVYQHVSADMAGLKADQAVWRVVDFKDNHPSAQKLVRAIRIAKLDKDMAEDMAFLAHWKRKGKGVERPKNLLKETESYFVEYDIVPKAKLMGLQPGKLQELKAVKVISENYGLALDPKPEIIPFAQVWRRLAELRAENDGKPVRVLRKGSLFRVGQGKFAGEFKVFSIKKNHNGLSLDIGPRDIPRPLNKMTAQGHYINVLLSSLLKGGLEIMDTDYAMN

SEQ ID NO: 414 - protein, 1080 aa, unidentified; identical to SEQ ID NO: 411
  REGION 1..1080: note = Description of Unknown: uncultivated organism
  REGION 1..1080: note = MG2-99 effector

SEQ ID NO: 415 - protein, 1038 aa, unidentified
  REGION 1..1038: note = Description of Unknown: uncultivated organism with predicted taxonomy: Proteobacteria
  REGION 1..1038: note = MG2-100 effector
MKQDQIAFSFDVGHSSIGWAVFKIADTPESFHTLLGTGVVLFPKDSCLASSRRGFRRSRRNIAARRSRIDRLKNYLVGLGVLSREQLDTNSNSYPWLLAARVLASGGKKALTWEELWSVLRWYAHNRGYDGNALWAGDAADAGDKDDNEKVQNAIALMDKHKTGTMAETVCKELGLDPRGEVKASRIYFKGNKAAFPREVVTEEVRRILAAHVGKLPKVDDALSDVLLKNAAPAGLELPARFKGGLLFGQYVPRFDNRIIPACRITGKNVPLKKCPEYLLYRWGRLLNNLTVFGTDGQIRTLLPAERKALHARMEAEGYFTKRTLNAALKEATGCTPANTESYFLTEEMEEALVLDPVKKLLATNQVLREVWPHLSAESRTQAQSALAAGKKIRLADILAAMESAGQDTAAAREALAHLQKKAKKKDADLVAHYFKANYPTGRAAYCREILAKTFAESMAGKDSTKEGGCLYETEEIRNRLLREPLVKQTNNHLVRHRLLIFERLLDQMVAEFADGDKKRIGATVVEVVRELQEFSGLNAKEVAQKLNEKLGNFRAVVKGLEEAIRGSGEKVAITGSLIRKARILEDQGFICPYTGAPLGYPDLLNDRLEIEHVIPRSLRPSDALSSCVMTFRSVNDMKGQRTAMQFICDCEKHGRDVPGHGNLQITTKKAYEAYVAKHKKQYRYGTDDRRRCERRAELMLMERYDQRNADFTERDLTQTSHLNKMAISLVKQRIGIDAKHLPGSVTAFIRQKLHIDECLFNAVPRLQKAAKGEGKKLKLKKNTEEPPAEPLLNDLPPRKLTKADIRELTHLHHAMDAVTQGLALLLFAPEDWPLLVKRHLSDSERRLLKSRYPYLVFTENSRMDIQDLPDATLKTISGRLAECRVVRHIPAKMHGIVVDQTTWGIVASGAITKLCQKTTEKNARYDENGRRFVKTAEEKRSLLLGGPNAPEGKLARIKGAILITENWGCALDPAPPTVIPHFKVYPQLRALREKNGGRPVRILRKGSLIQIKTGRFQGIWSVAYIKDNADGICLDIN

SEQ ID NO: 416 - protein, 916 aa, unidentified
  REGION 1..916: note = Description of Unknown: uncultivated organism with predicted taxonomy: Bradyrhizobium
  REGION 1..916: note = MG2-101 effector
MKQDQIAFSFDVGHSSIGWAVFKIADTPESFHTLLGTGVVLFPKDSCLASSRRGFRRSRRNIAARRSRIDRLKNYLVGLGVLSREQLDTNSNSYPWLLAARVLASGGKKALTWEELWSVLRWYAHNRGYDGNALWAGDAADAGDKDDNEKVQNAIALMDKHKTGTMAETVCKELGLDPRGEVKASRIYFKGNKAAFPREVVTEEVRRILAAHVGKLPKVDDALSDVLLKNAAPAGLELPARFKGGLLFGQYVPRFDNRIIPACRITGKNVPLKKCPEYLLYRWGRLLNNLTVFGTDGQIRTLLPAERKALHARMEAEGYFTKRTLNAALKEATGCTPANTESYFLTEEMEEALVLDPVKKLLATNQVLREVWPHLSAESRTQAQSALAAGKKIRLADILAAMESAGQDTAAAREALAHLQKKAKKKDADLVAHYFKANYPTGRAAYCREILAKTFAESMAGKDSTKEGGCLYETEEIRNRLLREPLVKQTNNHLVRHRLLIFERLLDQMMAEFADGDKKRIGATVVEVVRELQEFSGLNAKEVAQKLNEKLGNFRAVVKGLEEAIRGSGEKVAITGSLIRKARILEDQGFICPYTGAPLGYPDLLNDRLEIEHVIPRSLRPSDALSSCVMTFRSVNDMKGQRTAMQFIGEEQGREVPGHGNLQITTKKAYEAYVAKHKKQYRYGTDDRRRCERRAELMLMERYDQRNADFTERDLTQTSHLNKMAISLVKQRIGIDAKHLPGSVTAFIRQKLHIDECLFNAVPRLQKAAKGEGKKLKLKKNTEEPPAEPLLNDLPPRKLTKADIRELTHLHHAMDAVTQGLALLLFAPEDWPLLVKRHLSDSEKRLLKARYPFLLFNGDNNISIQDLPEAALQTISDRLAECRVVRHIPAKMHGIDLKQTTWGVVTSGAIKKLRQK

SEQ ID NO: 417 - protein, 1088 aa, unidentified
  REGION 1..1088: note = Description of Unknown: uncultivated organism with predicted taxonomy: Methylococcales bacterium
  REGION 1..1088: note = MG2-102 effector
MNEKQKISPVTVPDLQLAFDVGHSSIGWAVLQNNTGISPATAKPGNDNRSINILGCGSVVFRADDCLASSRRAYRRQRRHIRSTKQRIARMKIILNYLGALTENELNQPGCAWPWQLAARVLQGGKLLTWPELWDVLRWYAHNRGYDGNRRWSAAEAEAQKEDSEKEANARTLMGKYGVHSMAETFCRELGVEPLGKKKSSMKRFKGLNAAFPREVVEGEVRNILQAHSGKLKGVDVNLEKVLFSGWRAIPCPDLKLPKRYEGGLLFGQLVPRFDNRIISICPISGQKVPSRNCPEFLNFRWAMQLANIKVGKVKDRELQPLKVEHRSALDKQMRERGYLTPKELKDAVRSIAGCERDNLDTMLMHPDAKDALLLDPVQKLICSDDLQPFWKLLPERLQKRLRGQWRRGKVFSLTQIRKQLELLDDAGAFDSKLQKQLDTQNTKAKKKDRQVTREELLQKHFPSRPLKLDGRAAFARHLLKQACEDVLAGRPHPKEEGGCLFISEEIRQKQLNREIAEQTNNHLVRHRLLILERLFGDIIKEYAAGKKGRIGKITIEVNRDLREMSGKTAKEKAQDLGLRIANHHAVAEKLEKAFAEERNGKSIRITAGLIRKARIADDLGWKCPYTGQPYEPKHLITRFVDKDHIVPRSDRASDSLDSLVITFSAINKWKGKRTAWQFVSEEQGKPVPDLPNFSILSLARYKQFVETLETYKGHDDDKRRKKKRKELMLLPKYEEKEFVPGDLTQTSQLVRLGAQVLKRVFANSEKKSPVVSLPGSVTGAVRKAWKVLGCLSLANQQVLDENGDVKTKTDIRDITHLHHALDACVLGLTSHFIPNNGRVWELIVKRNPNELEKRELMALGVFGFNAEKRFEMRDLDNKLKEQIRQRLAEKRVVQHIPARMDGLRVEQNTWRVVSSDENGNVTIRQRIRQPDGSRPEKVGEEKATKLLGLKPVNSNGKLAANKGVLIIPDNYGVVLDPVPTIIPFHKVWPRLQELKKANGGKMPRVLRNGQTIKVPEGKYKGVWRVFSAKNNSTGMAVDIGQPDVVRLKNKTEGHKINVLLASLLKNKMQVVKTPFTGIASCPTTSPA

SEQ ID NO: 418 - protein, 961 aa, unidentified
  REGION 1..961: note = Description of Unknown: uncultivated organism with predicted taxonomy: Verrucomicrobia bacterium
  REGION 1..961: note = MG2-103 effector
YDGNQRWSKNASSESESHTLDDASLDKILSDASATEADKDDAKKVKEAKNLMQKNGTHSMAETFCKELGLHPMGKAKASMKRFKGLNAAFPREIVEGEVRRILKAHFGKLPKVDAHFERVLLGKDNQDKLAWQAIPCPELKLPKRYQGGLLFGQLVPRFDNRIISTCPISGEKVPSRNCPEFLNFRWAMQLANVQVARFGEQKLSPLKPDERADLDKQMRAAGGMTAKQFTEAVRSTTSAIRDNLDTMLMHPDAKEALLLDPVQKVVCSDDLAPFWKLLPERLQKRLRGKWRHGKVFTLAQIRTQLELLGDATAFEVELQNQLDTRNTKTKKKDKQVSREELLQKHFPSKPLKLDGRAAFARHLLKKAYEEVLTGKHPKEEGNCLFLTEEIRKKQQEREIADQTNNHLVRHRLLILERLVGDIVKEYAGGDKEQISKATIEVNRDLREMSGKTAKEKAQDLGLRIANHHAVSDKLEKAFAEEGKRTPITAGLIRKARIADDLGWKCPYTGQDYEPKQLVSRYVDKDHIVPRSQRASDSLDSLVITFGAINKWKGNRTAWQFVEQEQSKPVPDLPNLSILTLTRYKQFVESLETYKGHDDDKRRKKRRKDLLLLPKYEEKTFVPRDLTQTSQLVRLGAQVLRNVLPHLKQNDVISLPGSVTGTVRKAWKVLGCLSLANPQVLDENGDVKTKTDIRDITHLHHALDACVLGLVSHFIPNSGQVWELIVKRNPNDTEKKQLTALGVFGFGKDNRFEMRDLDDRLKEQIRQRLAEKRVVQHVPARMDGLRVEQNTWRVVSIKDGEATIQQRIRQADGSRPLKQTEEKVGKLLGLEPGKLSANKGALVIPDNFGVALDPQPTIIPFHKVWTRLQELKKANSGKMPRVLRNGQIIQVPTGRYKGIWRVFSAKATLTLDLGSPDKVRLESKGDGQKREVQIKTLLQDGMVFQKIPLTGIAACPTTSSS

SEQ ID NO: 419 - protein, 1011 aa, unidentified
  REGION 1..1011: note = Description of Unknown: uncultivated organism with predicted taxonomy: Verrucomicrobia bacterium
  REGION 1..1011: note = MG2-104 effector
DAVPDTEKVKNAGELAHDLGTETMAETIAAYTVRYEAAMQAWHRARTAAVTEGKEFKEPKPMVHFKGRNCAFPRESVVWPEVQRLLTALKGKLLNLDDALIRALLGNDVDPLKDREAWKTLPCPALKLPKRYHGGLLFGQMIPRFENRIIGVCPIQFARLEARYLSEGLDAAEAKHRAAKEAKLPAKATPEFLRFRWAMQLANVFGAAPGESKTRPLSAEERRKLTEQAEQRGAFGKVEFKKAVRAVTGWLDKPARDNLDSLLLHPDAERALELDPVQNEIRKSSLRPALDALPDRYRKRLHGKLASGKTVTLAEVRGWLEAGSRRREEAESLAAFDAVLDQEVEKANTKRGKKQEATTRESLLAEKLTAAFPTGRAPYARPILRQAYEEAMSGIDPRAEKSADQPRGVLCQTDELKEAQLHRRLDEQTNNHLIRHRLLILERLLEDLIAAPEFADGDKARVAGLTIEVNRELRDLSGKTRKEQEKDLGIRLKDFKDVAKKVEDACKRRGVSITAGIIRKARVAEDLGWKCPYTGKAFEIDALLGDTMDKDHIIPHADRQSDSLDSLVMTWKEVNTWKGKRTAMQFIREEGGKTVPGRPELSIMPLEPFKKHVASLDTRKGHNDDKARKKRRVQRLLTENYEEKEFTPRDLTVTSHLVRLGAQVLKRHFSDLPREHRIQLEPVSLPGSVTGEIRKAWKLIGCLAVANPQVLNPDGTVKPKQDIRGITHLHHALDACVLGLAAFYFPRHGSLWAAMVKRRPSAEEAALLRQTGFYQTDSEGRFRLIDFPEVLAQQIRQRLAEKRVVQHVPADMGGVLVEENTRGIQGISEDGRRVALRQRAPRDPKTGVRPSAKTTDEAAGKLLGLQPEGGSGKLKRQNGVRVITDNFGVAILDHAPEGEEKFVVIPWHRVWHRLEELKERNGGNRPMLIRNGQLIRVAKGNYAGVWRVFSAKNNTSGMALDIGWPDVVRLQNKTEGHKINVLLASLVKAGLEALPNSLLGLDSRAVCQTAT

SEQ ID NO: 420 - protein, 762 aa, unidentified
  REGION 1..762: note = Description of Unknown: uncultivated organism with predicted taxonomy: Verrucomicrobia bacterium
  REGION 1..762: note = MG2-105 effector
HGGLLFGQMIPRFENRIIGVCPIQFARLEARYLSEGLDAAEAKHRAAKEAKLPAKATPEFLRFRWAMQLANVFGAAPGESKTRPLSAEERRKLTEQAEQRGAFGKVEFKKAVRAVTGWLDKPARDNLDSLLLHPDAERALELDPVQNEIRKSSLRPALDALPDRYRKRLHGKLASGKTVTLAEVRGWLEAGSRRREEAESLAAFDAVLDQEVEKANTKRGKKQEATTRESLLAEKLTAAFPTGRAPYARPILRQAYEEAMSGIDPRAEKSADQPRGVLCQTDELKEAQLHRRLDEQTNNHLIRHRLLILERLLEDLIAAPEFADGDKARVAGLTIEVNRELRDLSGKTRKEQEKDLGIRLKDFKDVAKKVEDACKRRGVSITAGIIRKARVAEDLGWKCPYTGKAFEIDALLGDTMDKDHIIPHADRQSDSLDSLVMTWKEVNTWKGKRTAMQFIREEGGKTVPGRPELSIMPLEPFKKHVASLDTRKGHNDDKARKKRRVQRLLTENYEEKEFTPRDLTVTSHLVRLGAQVLKRHFSDLPREHRIQLEPVSLPGSVTGEIRKAWKLIGCLAVANPQVLNPDGTVKPKQDIRGITHLHHALDACVLGLAAFYFPRHGSLWAAMVKRRPSAEEAALLRQTGFYQTDSEGRFRLIDFPEVLAQQIRQRLAEKRVVQHVPADMGGVLVEENTRGIQGISEDGRRVALRQRAPRDPKTGVRPSAKTTDEAAGKLLGLQPEGGSGKLKRQNGVRVITDNFGVAILDH

SEQ ID NO: 421 - protein, 1134 aa, unidentified
  REGION 1..1134: note = Description of Unknown: uncultivated organism with predicted taxonomy: Rothia
  REGION 1..1134: note = MG3-6 effector
MSTDMKNYRIGVDVGDRSVGLAAIEFDDDGLPIQKLALVTFRHDGGLDPTKNKTPMSRKETRGIARRTMRMNRERKRRLRNLDNVLENLGYSVPEGPEPETYEAWTSRALLASIKLASADELNEHLVRAVRHMARHRGWANPWWSLDQLEKASQEPSETFEIILARARELFGEKVPANPTLGMLGALAANNEVLLRPRDEKKRKTGYVRGTPLMFAQVRQGDQLAELRRICEVQGIEDQYEALRLGVFDHKHPYVPKERVGKDPLNPSTNRTIRASLEFQEFRILDSVANLRVRIGSRAKRELTEAEYDAAVEFLMDYADKEQPSWADVAEKIGVPGNRLVAPVLEDVQQKTAPYDRSSAAFEKAMGKKTEARQWWESTDDDQLRSLLIAFLVDATNDTEEAAAEAGLSELYKSWPAEEREALSNIDFEKGRVAYSQETLSKLSEYMHEYRVGLHEARKAVFGVDDTWRPPLDKLEEPTGQPAVDRVLTILRRFVLDCERQWGRPRAITVEHTRTGLMGPTQRQKILNEQKKNRADNERIRDELRESGVDNPSRAEVRRHLIVQEQECQCLYCGTMITTTTSELDHIVPRAGGGSSRRENLAAVCRACNAKKKRELFYAWAGPVKSQETIERVRQLKAFKDSKKAKMFKNQIRRLNQTEADEPIDERSLASTSYAAVAVRERLEQHFNEGLALDDKSRVVLDVYAGAVTRESRRAGGIDERILLRGERDKNRFDVRHHAVDAAVMTLLNRSVALTLEQRSQLRRTFYEQGLDKLDRNQLKPEEDWRDFTGLAPASQEKFLEWRKAATILGDLLAEAIEDDSIAVVSPLRLRPQNGSVHLETISAVKKQTLGSDWPADAVKRIVDPEIYLAMKDALGKLKELPEDSARSLELPDGRFVEADDEVLFFPENAASILTPRGVAEIGGSIHHARLYGWLTKKGELKVGMLRVYGAEFPWLMRESGSRNVLSMPIHRGSQSFRDMQDTTRKAVESGEAVEFAWITQNDELEFDPDDYIAHGGKDELRQFLGFMPECRWRVDGFKKNYQIRIRPAMLSREQLPSDIQRRLESKTLTKNESLLLKALDTGLVVAIGGLLPLETLKVIRRNNLGFPRWRGNGNLPTSFEVRSSALRALGVEG

SEQ ID NO: 422 - protein, 1131 aa, unidentified
  REGION 1..1131: note = Description of Unknown: uncultivated organism with predicted taxonomy: Rothia
  REGION 1..1131: note = MG3-7 effector
MSEHTKYRIGIDVGDRSVGLAAIEFDDDGFPLSNLAMVTYRHDGGLDPTTNKSPKSRKETRGVALRTMRMRRRKKSRLKDLDKTLRALGYVVPACEEPQTYEAWKSRALLATTKVEGAQELGEHLVRAVRHMARHRGWRNPWWTFNQLEIASTAPSDTFAKIRERAEKEWPGVVPEEATLGMIGALAASNNVLLRPRTYRKDQPRHSKKLNVLGQEPILVDKVRQEDLLAELRTICKKQDIEDQYEKLAQAVFEQTRPYVPLDRVGKDPLQPNKSRASRASLEFQRFRILDAVAHLRVRVGASDRRALTDEEHDKAVHFLMGYSKKDVPTWGDVADEIGVEPAHLIAPVIDDVRLNKAPYDRSSTEFEQKMKKKTRARQWWDEANLESRSQLILLVSDPTDETMRLAEVSGLYEVFESWPDEEKEALEGLKVESGRAAYSTDTLNKLSDHMRLKRIDLHEARKIAFGVDDMWHPPLDRIDEPTGQPTVDRVLTIVRRFIFDCERAWGCPENVVIEHARTGLMGPAQRADVLNEIAKNRKKNDKIREDLRAGGINNPTRADIRRNAIVQDQESQCLYCGATIGVSYSELDHIVPRAGGGSSRRENLAAVCRACNDSKKDTPFAVWAKNTSRPVTLEGTIQRLRELKAFKRPKDRRMVDLIIRRLKQTEKDDPIDERSLASTSYAATAIRERIEQYFNEKAEKLDLAKVHIDVYSGSLTRESRRAGGIDKMVLLRGQSDKNRFDVRHHAIDAAVLTLLNRSVAVTLEQRRLIKQQREYSLEKSRRERDNVWRDFMGLGPAAQEKFAKWKKTAYVLADIIKEAISNDAIPVVSPLRLRPQNGSVHLDTVDAVLERTIGDAWTVDQVHRIVNPQIYLAFAGYLGNQKALDPDSSRVLALNDGRKLTAEDVIYVFPEKAASILTPRGVVKIGESVHHVRLYAWKNRKGKAEVGMLRVFGAEFPWLMRESGVKDVLRVPIHTGSQSYRDLSFTVRKNIEKGEAAEIGWLTQNEELEFNPESYLQEGGKDKLAKFLAFLPETRWRVDGFPMPDKLRIRPALLSREEIPEGVFRTEEQSLLEEALTKGLIIATKGLLSLPDVKVLRRNNLGIPRWRGGSYRPVSLDIQRAALAALDEQE

SEQ ID NO: 423 - protein, 1132 aa, unidentified
  REGION 1..1132: note = Description of Unknown: uncultivated organism with predicted taxonomy: Rothia
  REGION 1..1132: note = MG3-8 effector
MSTDMKNYRIGVDVGDRSVGLAAIEFDDAGFPIQKLALVTFRHDGGLDPTDNPKSRKETRGEARRRMRMTRRRKQRLRDLDKVLENLGYTVPEGPEPETYEAWTSRALLASIKLASADELNEHLVRAVRHIARHRGWVNPWWSLDQLERASQEPSETFEIILARARELFGERVPANPTLGMLGALAANNEVLLRPRAEKKKKTGYVRGTPLLAAQVRQIDQVAELRRICEVQGIEEQYETLRNAIFAHKVAYVPTERVGKDPLAPSKNRTIRASLEFQEFRILDSVANLRVRTDSRAKRELTEGEYDAAVEFLMGYTAKEQPSWADVAEEIGVPGNRLIAPVLEDVQQKTAPFDRSSAAFEKAMSKRTEARQWWEANDDDQLRSLFIMFLADATNDTEEAAAVAGLPELYMSWPAEEREALSNIDFEKGRVAYSHETLSKLSEYMHEHRVGLHEARKAVFGVDDTWRPPLAKLEEPTGQPTVDRVLTILRRFVLDCERQWGRPRAITVEHARIGLVGPAQRQNILKEQEDNRKNNECIRDELRKSGVENPSRTEVRRHLVVQDQESQCLYCGAVIRTDTSELDHIVPRAGGGSSRRENLAAVCRYCNSKKDRTLFYDWAGSVRLQETIDRVRQLKAFKDSKKAKMFKNQIRRLRQTEADEPIDERSLASTSYAAVAVRERLEQHFNEGLAPDDKNRVVLDVYAGSVTRESRRAGGIDERILLRGERDKNRFDVRHHAIDAAVMTLLNRSVALTLEQRSQLRRAFYEQGLDKLDRDQLKPEEDWRNFIGLSLASQEKFLEWKKVTTVLGDLLAEAIEDDSIAVVSPLRLRPQNGRVHKDTIAAVKKQTLGSAWSADAVKRIVDPEIYLAMKDALGKSKVLPEDSARTLELSDGRYLEADDEVLFFPKNAASILTPRGVAEIGGSIHHARLYSWLTKKGELKIGMLRVYGAEFPWLMRESGSHDVLRMPIHPGSQSFRDMQDTTRKAVESSEAVEFAWITQNDELEFEPEDYIAHGGKDELRQFLEFMPECRWRVDGFKKNYQIRIRPAMLSREQLPSDIQRRLESKTLTENESLLLKALDTGLVVAIGGLLPLGTLKVIRRNNLGFPRWRGNGNLPTSFEVRSSALRALGVEG

SEQ ID NO: 424 - protein, 1050 aa, unidentified
  REGION 1..1050: note = Description of Unknown: uncultivated organism with predicted taxonomy: Dermabacter hominis
  REGION 1..1050: note = MG3-1 effector
MRKRKRQRLKALDRYLAEHGYPDVQPQITPYDAWHARARLVSTKVDDPAQLKNDLALALRHIARHRGWRNPWKTLASTRKLPVPSETLLANQARAREHFGDEVNDSTTVGQIGALAASRDYLLRPRNITVTKGVNQKKNVNDLERSSEEALAAGHPTAPILGWQVRQEDQINEVERIWERQGLPSEELPQILTLLFAQTKPHVPSERVGRDALQPKLYRAPIAALEFQDFRILAAIANLRVRTEGGRRLTKDERFTAFQFMSGWREKEPLSWADVAEELGFSAHALAAPTTETNQRLAFAPTNRTLTTLGTFFKGKKIDAGAREWWQSASYAERSLLAQLIADATPDTQEQADASGLSDVLLQWDEDTVADLMELDLQSGRAAYSTDTLLRLNARMENDGTDLFESIQAEFNIDPSRLPRPDWDDQTGQPTVDRVLTIVRRFVGGCERKYGKPESVTVEHVRTGLMGAEQRSSIIAENNRNRRDSDRIRAELQADGLSEPSRLDVRRHRQVQRQNCTCLYCGTPITTTTSELDHIVPRRGGGSSQGSNLVAVCRECNASKAHRIFAEWAEDSQREGVSVKEAAKRVRHWLNASASMKREVTRRLQQKRTDPPIDERDLASTSYAATEITRRILGHFHDEVPVVAFGGSGTREARRAGRVDHIIRLRGSLDKSRLDTRHHAIDAAVLTLQSPAIYRVLLTRVNLKHEHEVTGEAPEWRDYEGADQAEKVLYRRWQKNIATLAELMRQEIENNRVPVTRPIRLRKSRGAVHDATVMKALERDLWGEWDAQAIDRLVDPELHLALRKLFTSTKSKKIDVDATSQGLPERYLANQTVQLFDADAPSVMSPRGILRIGAGTHHARLLTWDDPKKGPQLGIQRVFAAEFGEILKDASSNDLFEAPIPFHTMSHRDLQPKVRAAVEQGLTRQIGWITQGDELEIDPADFVGEANAFGNFLREFPERSWSIAGLKKSNTIVIRPLLLSQEGVTAAISPHAAKIVENGIELSNSTLFTAPGTGIIRRTGLGRPRWDSGPAHLPESFNVHARMTQQSARD

SEQ ID NO: 425 - protein, 1134 aa, unidentified
  REGION 1..1134: note = Description of Unknown: uncultivated organism with predicted taxonomy: Micrococcales
  REGION 1..1134: note = MG3-5 effector
MCINGDSMAAVSGFSPCKFGIGIDVGDRSVGFATIEFDDDGFPLSVLASVSYKHDGGLDPTKNKNPISRKATAGVAHRVRRMRKRRRRRLEMLDVKLRSLGFPVPNGEEPQTYQAWQSRAKLIDGRVDEVRELNDHLVRAVRHIARHRGWRNPWWRFPQLLEASENPSDALVAMRREAAQRWPGQALESATIGQLGWLGAHPDVLVRPRSARSEVPVLSSRVMQQDQCAEIRRYWQLQDLPQEALHPILKAVFHQEPPTVPAERIGRDALPGQDAPRAIRAALEFQEYRIRDAVANLRVRTGGANRKRKLTPEENHAVVKYLMEFRQNPSPSWAEVAEHIDIAPTSLIAPIIDDMRIAAAPTDRSTITAEAVLSNMKKDSGARLWWESADQKMRSLLIRFLADTSDYTQPEAEMAGLVDIVSTWPDSEIEKLSSASWQSGRAAYSLQSLERMNAYMAEYSTGAHEARKGVFGVDDSWKPEADPWDAQTGQPVVDRVMTIVRRFVGACERKWGEPERIVIEHVRTGLMGPAQRAEVLREMASGRRKNDRIRQELRTSGIDEPNLSDVKRHRKIQMQGGVCLYCGTDITSATAELDHIVPRAGGGNSTSTNLVAVCRVCNAAKGRRTFPEFASSDTRDAVSLEAAVERVKLWIDDKGIKNIGESRYARDVIRRLKQSTQDEPIDERSLSATAFAAVEIRRKLENHFKDRTKPVRVDVYRGALTRESRRAGRIDAKIRLRGNIDKDRLDIRHHAIDAAVLTLLDPSVAKTLAMRLDLKREQQDSGRDTRWKEFKGLTPASQERFIKWCQASECLADMLRQQIEADRVPVVVPLRISPSNGAVHDDSVRPLTRQKIDSTWDRKSINRIVDPEIHVAMRRLLNNGTSLPEDKNRVLDLPDGNELGPHDEVELFSTSAASIKLRRGGSAEIGGSIHHARVYAWMGAKGQLEYGMMRVFGAEFPTLTKLSGSKDILRMPIHAGSMSYRDMQDRVRKPIESDIAVELGWITQGDELEILPEAHLETAGGLGDFLKSFPETQWTIDGFNDPSRLRVRPRLMSLEGRDTIDAMGHLSDTEKLKIKQALSKGLMVSASELLSHGAKIIRRDHLGRPRWRGNARPVSIELEQVANQLVNHRSVDGQ

SEQ ID NO: 426 - protein, 1132 aa, unidentified
  REGION 1..1132: note = Description of Unknown: uncultivated organism with predicted taxonomy: Rothia
  REGION 1..1132: note = MG3-6 effector
MSADSLNYRIGVDVGDRSVGLAAIELDDDGFPLKKLAMVTFRHDGGKDPATGKTPKSRKETAGVARRTMRMRRRKKKRLKDLDKKLRDLGYFVPRDEEPQTYEAWSSRARLAESRFEDPHERGEHLVRAVRHMARHRGWRNPWWSFSQLEEASQEPSETFGRILERAQHEWGERVSDNATLGMLGALAANNNILLRPRRYEHNPKTGKNAEKLNVRGQEPILLDKVRQEDVLAELRRICKVQGIEDQYPELAHAVFTQVRPYVPTERVGKDPLQPMKIRASRASLEFQEFRIRDAVANLRIRVGGSERRPLTEEEYDRAVDYLMEYSDTTPPTWGEVADELEIAENTLIAPVIDDVRLNVAPYDRSSAIVEAKLKRKTQARQWWDDDANLDLRSQLILLVSDATDDTARVAENSGLLEVFESWSDEEKQTLQDLKFDSGRAAYSIDTLNKLNAYMHEHRVGLHEARQNVFGVSDTWRPPRDRLDEPTGQPTVDRVLTIVRRFILDCERAWGRPQKIVVEHARTGLMGPSQRADVLKEIARNRNANERIRQELREGGIEAPNRADIRRNSIIQDQESQCLYCGKEIGVLTAELDHIVPRAGGGSSKRENLAAVCRACNASKGSRPFAVWAGPARLERTIQRLRELQAFKTKSKKRTLNAIIRRLKQREEDEPIDERSLASTSYAATSIRERLEQHFNDDLPDGFAPVAVDVYGGSLTRESRRAGGIDKSIMLRGQSDKNRFDVRHHAIDAAVMTLLNPSVAVTLEQRRMLKQENDYSSPRGQHDNGWRDFIGRGEASQSKFLHWKKTAVVLADLISEAIEQDTIPVVNPLRLRPQNGSVHKDTVEAVLERTVGDSWTDKQVSRIVDPNTYIAFLSLLGRKKELDADHQRLVSVSAGVKLLADERVQIFPEEAASILTPRGVVKIGDSIHHARLYGWKNQRGDIQVGMLRVFGAEFPWFMRESGVKDILRVPIPQGSQSYRDLAATTRKFIENGQATEFGWITQNDEIEISAEEYLATDKGDILSDFLGILPEIRWKVTGIEDNRRIRLRPLLLSSEAIPNMLNGRLLTQEEHDLIALVINKGVRVVVSTFLALPSTKIIRRNNLGIPRWRGNGHLPTSLDIQRAATQALEGRD

SEQ ID NO: 427 - protein, 1134 aa, unidentified
  REGION 1..1134: note = Description of Unknown: uncultivated organism with predicted taxonomy: Rothia
  REGION 1..1134: note = MG3-7 effector
MSTDPKNYRIGVDVGDRSVGLAAIEFDDAGFPIQKLALVTFRHDGGLDPTKNKTPVSRKKTRGDARRTMRMNRRRKQRLRDLDMMLTNLGYTVPEGPEPETYEAWTSRALLASIKLANVDELNEHLVRAVRHMARHRGWANPWWSIDRLENASREPSETFEIILARARELFGEKVPADPTLGMLGALAANNEVLLRPRDGKKKKTGYVRGTPLLVAKVRQEDQLAELRRICEIQGIEGQYDALRSAIFTHKMAYVPTERVGKDPLNPSKNRTIRASLEFQEFRILDSVANLRVRTDSRSKRELTEAEYDVAVEFLMSYTANEQPSWADVAEVIGVPGNRLIAPVLEDVQQKTAPFDRSSAAFEKAMGKKTEARQWWESTDDDQLRSLFISFLVDATDDTEEAAAEAGLPELYMSWPAEEREVLSDIDFEKGRVAYSQETLSKLSEYMHEYRVGLHEARKAVFGVDDTWRPPLDKLDEQTGQPTVDRVLTILRRFVLDCERQWGRPRAITVEHARTGLVGPAQRQEILNEQKKNRENNELIRGDLRKSGVENPSRAEVRRHLIVQEQESQCLYCGAVIRTDTSELDHIVPRAGGGSSRRENMAAVCHYCNSKKKRTLFYDWAGPVKLQETVDRVRQLEAFKDSKKAKMFKNQIRRLKQTEADVPIDERSLASTSYAAVAVRERLEQHFNEGLAPDDKSRVVLDVYAGAVTRESRRAGGIDERILLRGERDKNRFDVRHHAIDAAVMTLLNRSVALTLEQRSQLRRAFYELELDKLDRDQLKPGEDWRNFTGLYEASQNKFSEWKKAATVLGDLLAEAIEDDAIAVVSPLRLRPQNGSVHDDTINAVKKLTLGSAWPADAVKRIVDPEIYLAMKDVLGKLKELPEDSARSLELSDGRYIEADDEVLFFPKKAASILTPRGAAEIGNSIHHARLYSWLTKKGELKFGMLRVYGAEFPWLMRESGSRDVLHMPIHPGSQSFRGMQDGVRKAVESGEAVEFGWITQDDELEFDPEDYIAHGGDDELNRLLRVMPERRWRVDGFYNAGTLRIRPALLSAEQLPSELQKKVADKTLSDVELILLRAVQRGLFVAISSFLPLESLKVIRRNNLGFPRWRGNGNLPTSFEVRSSALRALGVEG

SEQ ID NO: 428 - protein, 1132 aa, unidentified; identical to SEQ ID NO: 423
  REGION 1..1132: note = Description of Unknown: uncultivated organism with predicted taxonomy: Rothia
  REGION 1..1132: note = MG3-8 effector

SEQ ID NO: 429 - protein, 1110 aa, unidentified
  REGION 1..1110: note = Description of Unknown: uncultivated organism with predicted taxonomy: Brevibacterium
  REGION 1..1110: note = MG3-42 effector
MNKDYAVGFDVGDRSVGVAFVEFDGDVPVKLLRAVAYRHDGGIDPTTNKTPQSRKATAGVARRVRRMRKERRRRLNELDKFLRQAGYPVEGDDRGETYEPWKARANCVTGFIEDEAQRKLELSRAIRHMARHRGWRNPWHTVSQELREHVPSSQHQKNVANAQEIFPGELDANATVGQLGAVAGKYNRLLRPRTNEKAKESGLIPVLSYKVLQCDQLDELQRMCKMQRLDEDFESELLELVFGQKRPVVRAENIGRDELPGMNGHPRAPRSSLEFQEFRIRDSIANLRVKSSRRDRKGVGLASEVVNNVVDYLLEWREPDDPTWAEVAELIGVDPDLLVAPVFDDVRRMIAPVDRTSRLLEKTLSKKAFKPVLEWWNNTSFEQKSMLVALISDPTDHHEDWAVSAGIADVIASWPDGLLEELNSLNFESGRSAYSLLSLKKMNDCMAIRGCNLHDARKEVFDVDDSWRPTPPKIHEPVGHPTVDRVLPIVRRTIMEAHRRWGVPRSIHIEHTRSSLLGPAARAEYQREVNANRRARERSLESLREQGVADPTVATVRRFSAVQHQNGVCLYCGSAITAKPGDSGCELDHVVPRSGGGSSKRENLVAACRRCNSEKGNLPFSLWAAESTRPEVSVEAALTRLQNFNWERRDRAVKKGLIRRLKQTSEDEPIDERSLESTAYAATEIRRRLQYYFEENCGANSPQPEILVLPGAVTREARRAGGFDSRIKLRGKNDKDRFDARHHALDAAIMTVVDRSVARTLQQRSDLKYSNFLTGAEPRWKDFKGDSPESRKKFERWVQTSNRLADLVSDAIVTDSIPVIFPLRLGTNRGPLHKDTVRCADWKPIAEEWSEKEIERIVSPDVHAAVTEAIGLKGGKLSATSCSNVILQNGKFGEKVALAKSSAACIQVNGGVVEIGESIHHARLFAWRGRRGAIEMGMVRVFTAELPYILKNSTHGDVLTATIPASTFSFRNTPATLRKKLLAGEAVSVGWLTQNDEIEIEVDEFACGNTSFAKFLTEIPEKRWRVDGFYDNRRLRIRPAYLSAEGLTDNHSKVVHETLEKGQFVNAGALLSASRTLLIRRTALGAPRWKLDSSGLPVSFSPLKLAEEAL

SEQ ID NO: 430 - protein, 819 aa, unidentified
  REGION 1..819: note = Description of Unknown: uncultivated organism with predicted taxonomy: Brevibacterium mcbrellneri
  REGION 1..819: note = MG3-68 effector
MNKDYAVGFDVGDRSVGVAFVEFDGDVPVKLLRAIAYRHDGGIDPTTNKTPQSRKATSGVARRVRRMRKERRRRLNELDKFLRQEGYPVEGDDRGETYEPWNARANCVIGFIEDEAQRKLELSRAIRHMARHRGWRNPWHTVAQELREEVPSSQHQKNVANAQEIFPGELDANATVGQLGAVAGKYNRLLRPRTNEKAKESGIIPVLSYKVLQCDQLDELQRICRMQRVGEDFESELLELVFGQKRPVVRAENIGRDELPGMNGHPRAPRSSLEFQEFRIRDSIANLRVKSSRRDRKGVGLASEVVNDVVDYLLEWREPDDPTWAEVAELIGIDPDLLVAPVFDDVRRMSAPVDRTSRLLEKTLSKKAFKPVLEWWNNTSFEQKSMLVALISDPTDHHEDWAVSAGIADVIASWPDGLLEELNSLNFESGRSAYSLLSLKNMNECMATRGCNLHDARKEVFDVDDSWRPTPPKIHEPVGHPTVDRVLPIVRRTIMEAHRRWGVPRSIHIEHTRSSLLGPAARAEYQREVNANRRARERSIESLREQGVADPTVATVRRFSAVQHQNGVCLYCGSTITAKPGDSGCELDHVVPRSGGGSSKRENLVAACRRCNSEKGNLPFSIWAATCTRPEVSVEAALVRLENFNWEKRDRAVKKGLIRRLKQTSEDEPIDERSLESTAYAATEIRRRVQYYFEENCGANVPQPEIFVLPGAVTREARRAGGFDSRIKLRGKGDKDRFDARHHALDAAIMTVVDWSVARTLQQRSDLKYSNFLTGAEPRWKEFKGDSPEARKKFERWIQTSNRLADLVSDAIVAAAIPV

SEQ ID NO: 431 - protein, 1110 aa, unidentified; identical to SEQ ID NO: 429
  REGION 1..1110: note = Description of Unknown: uncultivated organism with predicted taxonomy: Brevibacterium mcbrellneri
  REGION 1..1110: note = MG3-88 effector

SEQ ID NO: 432 - protein, 1055 aa, unidentified
  REGION 1..1055: note = Description of Unknown: uncultivated organism with predicted taxonomy: Planctomycetes
  REGION 1..1055: note = MG4-5 effector
MGDQQTLQATSYCLGLDVGVQGVGWAVIDLDDQGQPLGVRRTGVRCFDSGVGSETEFEKGVDEPPSTKRRQARQQRRQLWRRAQRQRRVFRALQEAGLLPPGPPTPVSRDKILRTLDADLAIQFGSLEDRIAAHLLPYRLRALALDTPLPPYALGRAFYHLAQRRGFLSNKKALKEEKEAGEVKKGIAELQEEMNRAGARALGEYFSSLDPEQRRIRNRWTARQMYLDEFDRVWEAQSRYHPRLTDELKTKVRRAIFFQRPLKSQKGLIGRCELEPRHRRAPLASLLAQRFRYWQKINDLEVIQPDGVVRPLSPEERHKLAHFLETQAEATFARIRKLLDLKKPKGSQEDFAFNLERGGEKRILGNRTAAKMAAVLGQRWAAMDDEDKRRLVNEILSFEKEAPLARRLVRAWNLDEPTAAQLAALDFEPGYAALSARAIRKLLPLMQREGMRFATARKQVYGDHLLGTRAYDALPPVAKAIPSLRNPAVCRALTEVRKVVNALVRAYGKPAMVRIELARDMKRGRKQRKETWQAMRENERCRLDARKLLQDHGIQEPRPADILKVLLAEECNWECPYTGKAISMDALIGSQPQFDVEHIIPFSRSLDNSFLNKTLCYHEENRNVKQNRTPFEAYGGDEQRWHEILQRVRRFRGSAAESKLRKFQLRQLPADFTNRHLNDTRYASRLAADYLALLYGGRVDANGRQRVQVGTGATTGFLRDEWGLNAILGDNDEKERADHRHHAIDAVVIALTGPGTVQALTRAALRAKELGRRLFVPLDPPWADRDSFLRDVRASVEAITVSYRVDRKVSGQLHEESNYSKPHMTVDNKGNLVEHRHIRKPLKDMSVEEVEAIVDDRVRKLVQEKLRQLGQEPKKAFADEANHPYFTTADGRLVPIHKARIRKTVATITVGPPQCPRHVAPGLNHHIEILAVRDPAGAVTHWEGELVSLFEAARRVKAGEPVVRRNHGPNKDFLFSLAKGEYVEMELQPGKRQLFRVTVISAKQIEFRLHHDARPTMLLRKTPGARVIRSPGSLFKAKARKVAVDPLGNVFPAND

SEQ ID NO: 433 - protein, 1026 aa, unidentified
  REGION 1..1026: note = Description of Unknown: uncultivated organism
  REGION 1..1026: note = MG4-11 effector
LVGYEKSFFLGDLSKWQPVSAGMVAKGNLEGGPYLNYPGPLDRGPGRWTARAYSNVGRADHNQVLNKQNRKNLSMNKKNSYVLGLDLGTASIGWSIIPLDSAAIDADNINMGVVIVDEPVDKKKKTPLNVDRRNARQQRRMKDRKNRRKVHLFNCLQRAGLLPSTPCHTPFQRQDLLNELDSTHYGLDMSGNDLDLLLYRLRAMALDEKLELYAIGRILYQLAERRGFKSNRKDTTKDNEDGEVKKAIAGLGEEIDKAGSRTIGEHFAAYDTTQKKIRQTYTSRQWYEDEFDLIWAKQSSYYPDMLTDALRKEIRDIIYYQRPLKAPKRGMCDLEKGQVRVSKSDVAFQRFRYWQVLNNLEVADGHSSFRPLRAKEKAVLVQKLEVTKKVTYKAIKKLLGFSESAVFNYEAMTDTIPGNSTIASVYAVLKDKKTKPSLELCATIAEKILAFEDTGALVKNLVRKYHINRDVAEKLAGLEFEDGVAMHSKQAIERILNKMKHEGKSYATALKELYPDRNRADKVYDLLPPVDEWTKGSTKITNPSVHRILTQLRKLVNALVREYGKPALIRIELARDLKHNVKTKSKIIAQIKSREEEREAARKGLADLGIDNPTPANIKKWVIAERCNWTCVYTGKRADKRVEFGPHPQFDIDHIQPYSRSGNDSLGNKVLCFSAENRHVKKNQTPLECYGDDEERWNEIMGRVSAITGPDRVKTYRYFITTAEENEGFTARSLTDTSYISKKAVEYVSLLFGGSIDAKGKRRVFATKGGITGRLRREWGLNVLLGGEDEKNRADHRHHAIDALVIALSTPAVIKKIGGEDTRPKEDILPPIDNLADVAREVLEKVNVVYRCSQKIRGELHDAGIERYPGRKQKRKGEVYCIGTAERTKRYVHLNSNHHMEVVEGKDGRWEAVTVPRMEVYQRCRAKRPIVNRNHGDKWYVCSLAIGDYFTVDGGEKKLYVVKMLSGQVVGYMEHNDGRLQKTSGDDMSVFRTSINKLRQKGFRKVQLDVMGRLAVGKERCPTPQF

SEQ ID NO: 434 - protein, 1111 aa, unidentified
  REGION 1..1111: note = Description of Unknown: uncultivated organism
  REGION 1..1111: note = MG4-12 effector
MPNSNAPYVLGLDLGIASVGWAIRPINPSDITVDNLKMGARIFDLAVEDDIEKGKDKPKNATRRDARSARRRLWRRRRRKLKIFNLLVRYGLLPEGDYPTPDARQDMLSALDLQLVKEYFPNATHHDQQTFTYALRALALDRELSPHAFGRALYALAQRRGFKSNKKLDGREKEGEKETSQIKQDIAELEKNVAEHARTLAEYFTTVNPEEERIRARWVGRKSYEEEFEAIWTAQARFKPELLTDELKAKIEDAIFFQRPLKSQKGKIAKCELELDENGKRYLPVARKGEPCFQKFRVWEKIINLRVWDDAVDGRYGGGWRPLTHQEQDAAYELAEKSEKVTYKALRKELGFKSIKGVKKGEAVFETGYFNLEVAEDAMIGDRTSARIWKVLNETGDTLTQEEVDQAALYILDYESEDGLRRRLLKSFPTLSDAAATKLAYDVVLEEGYGAYSSVALNKLLAVMTKKRVNQALAKMEVYKAQYGEACDLLPPLEEAVGDIRNPTVTRTLAEMRKVVNAIIRRYGKPAQIYVELARDLKRSRKQRDEIFRKNQARKKERENIEKTLQNEFYIKSPKGRDVLKYRLWKECGGICPYTGMVISPDDLFGPNSRFDIEHIIPFSRSMDDSFANKTLCYAEENRNVKKNQTPIECYGDSPKFREILERVRKTFTGEFKFRKLKLFETQEPESITEFSKACLNDSRYMSKLALRYLGVLYGAVNGCVGGQDEDEGGKRVIFASTGKVTAWIRREWRLNEILCDDDEPTGEGADVEKNRNDHRHHAIDALVISLSTPSYVQQLNRAAQLADNDAKARLFKKGNFMPPVTGFKALVAQVVDGIVVSKRVDSKVRGALHEETNLGAIAYPDPYTKKQRRKKRVFVTGLTSSKLLDSVVDPGVRRAIAEKLEEVGDAKKLADNPPRLPAHNRNFGVLIVKTAIWETNNPIRVGKGRSARFVKSGDNHHMEFYAVLDDKGNEIEWKFNIVSLYEAYERRRKHLPIVSRDFGPKTRFKFSLVKGDAIREKATGKIYFIAGLSTQGEGKGIYITGALNTCAKPVTVIKEEYSKMSKMKRGVAQGDMKGLPKEVAYFRSTNLVDLMKRFEKVRIDPLGNVERSNS

SEQ ID NO: 435 - protein, 1102 aa, unidentified
  REGION 1..1102: note = Description of Unknown: uncultivated organism
  REGION 1..1102: note = MG4-13 effector
MEQKESYILGLDLGANSIGWALLEAHPDPEEKGRLKAHGIKQIGVRIFEAGVEGEIEQGKDQSRAVDRRDARLARRRLDRISRRLSHLFYLLMSAGLLPEHPAYKTELGKKKSAKERKQERDLKAKARHEVINQLDQDLVKKWREKEPLAKETLPYILRAKALDEKLELYELGRALFHLAQRRGFLCNRKAKAKDDEELGKVNQGILELEGKIEGAGARTLGEYFSKLNPKEERIRSRWTSREMYLKEFEQIWNAQEKHYPKILTPEFKKKIWRCIFYQRPLKIQHHLIGECQYEKGKKRAPSACLAFQRFRMLQQLNNSYLISPDGEILNDGRLTKEQRERLIEVLEKKAELKFSKAKKILGLTKEYRFNFEKEDGKGEFLGNETAEKLIKVFGEERWSRFSEQEKNEIVQDLISIQHKSGLVKRGKNKWGLDDENAEEFSKINLEEGYCGLSRLALSKLIPLMETGLTYMEAVKQVYPDRLQNEAFDQLPMVINQMPELKNPVVKRVLTELRKIVNAIIRKYGKPEQIRIELAREMKKTRQQREEIWKKNKQNEEKRKQAAQAIIKEAGENPKPADIEKYLLWDECNGICPYTGKSISLKQLFSGEVDVEHIIPYSICLDNSYFNKTLCFHDENAKVKNNKTPWQAYGSDEKKWNEILERVKRFKGDAAKEKLKKFQIKDLEELDDFISSQLNDTKYASKLAKKFLGLLYPGQEALSRVQATKGGITANLRDVFNLNSILKDGDSVERDGYEPKKTRADHRHHAIDAICIALTEPSTVKMLSEASSRALKERKRRFGKVQPPWENFWEDVKKAIDNTIVSHRVSKKVNGPLHQETFYSPPKEVQGKIICHVRKPLENLSAGDIEDIVDPVVKKKVQEKIKELGGGDPKKLFAGSSTLPPEKLPCMTAKDGRVIPIRKVRIKCVMTPFQVGDKGRERFVTSDTNHHLEIFETKDKKGNVRWDGAIVSQYEAMRRLRAGEPIVKREHGKGKEFKFSLALNECVKLLDEKGQEIVCVVKGISQLSAGPIVITLRHICDARPTSEYQKQIKMRKELKKNYDKKLAEEIEKMLPVFIFKGPDSLREAKGQKILITPLGEIRTAND

SEQ ID NO: 436 - protein, 1047 aa, unidentified
  REGION 1..1047: note = Description of Unknown: uncultivated organism
  REGION 1..1047: note = MG4-14 effector
MAQLPFSDYVLGLDIGANSLGWALVSLKDGIPQSILKVGVRVFEAGVEGDIESGKDQSRAAKRREARLHRRMLERRSRRLAKIAGLLQRAGLLPDGDLKSEESRIKVLRELDDSISARHHPTSEKPDPASAHLLPYRLRALALDQKLHPFELGRALYHLAHRRGFLSNRKAPAKDPNEEGKVNQGIHTLRQKIEESGARTLGEYFSRLDPEQERIRQRWTARDMLDQEFEAIWNAQAKHHPTILTHDFKKQLRRAIFHQRPLKIKKNLIADCELEKGQKVAPRCCLLFQRFRLLQQVNNLKVTEPTGKSRPLTRDERETLLHALETQDKLSFSEIKRLLKLRDHRFRMGEGDEEVLTGNKTAAKLREIFGDRWDELSPQERDRVVEDWWSIQKSETLRKHGVKYWRLDPEAAERLGKLALETGYCKLSKKAMRKLLPLMEEGISHAKAQEQLYGNEPPPKPFDKLPPLDRAPLPKPHNPAVHRALTEVRKVVNAIIRRYGRPSLIRVELARDLKKSKEDRKKISDQIARNRRDRERAKKALIDNGIQEPSRDDIEKWLLYEECNGICPYTGKSISLASLFGPNPQFDVEHIIPFSRCLDNSFTNKTLCDIEENRNRKRNQTPYEAYGADPARWEEIIQRVKRFRGKAAAAKLHRFQLESVDSLEEFASKQLNDTAHASRSALRYLGLLYGSNKAGVGPDGRRRVQAGRGQVTAFLRDEWRLNSILGDLQKSRADHRHHAVDALAIALTDSRIIKTLSDAASRALSERRRRFGRVAPPWKSFLEEAKNAIAATIVSHRVSRKVSGALHEETIYSKPHTDKDGRVCHHIRKRLDKYFTRPMLDKIVDPVIRDIVRKHFQANGSDPKKAFSDPGNHPFLCAKDGRHIPIHSVRVREDRSTVQVGSGVSRRQVLTGSNHHVEIVEVEDEKGQPRWEGRIVTLIEAIKRLRNRQPIVQRDHGEGKKWVFSLAGGETIQLTDGGITKLYTVRTITVRRGQYVEIAYVPISDARTKTEIREKKEWRTDLLEPLRKLQCRKVLVTPLGEVRYARD

SEQ ID NO: 437 - protein, 943 aa, unidentified
  REGION 1..943: note = Description of Unknown: uncultivated organism with predicted taxonomy: Thermogutta terrifontis
  REGION 1..943: note = MG4-15 effector
MKTKNGQVDYVLGIDLGVVSLGWAAIEIDNDGGQSLLGAGVRCWELSNASLEEVEKGKEEPPGQSRRQARRLRRQMFRRAQRLRRTYRVLQEMGLFLTGPRSSTARKAYLETLDQKAQEWLRTNVPDANDDGLLAHTFIYRLRAAALDHPLPPELLGRVFFHLAQRRGFLSNRRTLEKNKDEELGVVKQGISQLQDEIQKSGARTLGEFFSRLNPHEQRIRNRYTSRKMFQDEFEQIWNAQRSHHPNSLTDSKKARLYKAIFFQRPLKLQHGLVGRCPLEVLPRKRPNGQVEYIYPFRRAPMASLEAQRIRYMQRINDLEFTDPQGQRRVLSPEERQKLYDLAERNEDLSFTLIKKTLGIPTGKKGEGWECNLERGGEKKLPGNRASAQIRKVIDDATWEDLGRERQKALVDTLIAFLRADTLEEHLHRVWGFNREVASQLAGLPLEQGYHSFSRRAIRRLLPLLEQGERLNAAIQKVYGGTQRKINQHAELPPVRQVLPTVRNPLLIRALTELRKVVNAIIRKYGIPRCIRVEVARELKRSRKEREEISKRMREQQKRREEAAQRVLQELGRTAAPRDIEKYLLAEECNWICPYTGKQITTQALLGDHPEFDVEHIWPLHRSLDDSFMNKTLCYHQENRSVKAGRTPYEAYATDPVRWQEIITRVRNFRGPFARQKLVRFQAEEIPPDFALRQLSDTRWISKAAADYLGHLYGGRIDPTGQQRVFTVAGGLTGLFRRAWNLNAILGGSPEKNRYDHRHHAIDAIVVALTDPSMIQRFAHEASRLLKAWPRVAVRLDPPWSTFLSDVQRHVEGIVVSFRVSRRLSGALHDQTYYAPPTEQGKTKVRKPLREMSSHEVERIVDPTVRDLVKEKLKRLGTSDPKKAFATDANLPIIRGKNNTALPVKSARIWVSSSVIAVGDGPRQRYVVPGNNHHIEIYALLDG

SEQ ID NO: 438 - protein, 1062 aa, unidentified
  REGION 1..1062: note = Description of Unknown: uncultivated organism with predicted taxonomy: Thermogutta terrifontis
  REGION 1..1062: note = MG4-16 effector
MKTKNGQVDYVLGIDLGVVSLGWAAIEIDNDGGQSLLGAGVRCWELSNASLEEVEKGKEEPPGQSRRQARRLRRQMFRRAQRLRRTYRVLQEMGLFLTGPRSSTARKAYLETLDQKAQEWLRTNVPDANDDGLLAHTFIYRLRAAALDHPLPPELLGRVFFHLAQRRGFLSNRRTLEKNKDEELGVVKQGISQLQDEIQKSGARTLGEFFSRLNPHEQRIRNRYTSRKMFQDEFEQIWNAQRSHHPNSLTDSKKARLYKAIFFQRPLKLQHGLVGRCPLEVLPRKRPNGQVEYIYPFRRAPMASLEAQRIRYMQRINDLEFTDPQGQRRVLSPEERQKLYDLAERNEDLSFTLIKKTLGIPTGKKGEGWECNLERGGEKKLPGNRASAQIRKVIDDATWEDLGRERQKALVDTLIAFLRADTLEEHLHRVWGFNREVASQLAGLPLEQGYHSFSRRAIRRLLPLLEQGERLNAAIQKVYGGTQRKINQHAELPPVRQVLPTVRNPLLIRALTELRKVVNAIIRKYGIPRCIRVEVARELKRSRKEREEISKRMREQQKRREEAAQRVLQELGRTAAPRDIEKYLLAEECNWICPYTGKQITTQALLGDHPEFDVEHIWPLHRSLDDSFMNKTLCYHQENRSVKAGRTPYEAYATDPVRWQEIITRVRNFRGPFARQKLVRFQAEEIPPDFALRQLSDTRWISKAAADYLGHLYGGRIDPTGQQRVFTVAGGLTGLFRRAWNLNAILGGSPEKNRYDHRHHAIDAIVVALTDPSMIQRFAHEASRLLKAWPRVAVRLDPPWSTFLSDVQRHVEGIVVSFRVSRRLSGALHDQTYYAPPTEQGKTKVRKPLREMSSHEVERIVDPTVRDLVKEKLKRLGTSDPKKAFATDANLPIIRGKNNTALPVKSARIWVSSSVIAVGDGPRQRYVVPGNNHHIEIYALLDGQGQEVRWKGKIVSLYEAYERKKRGEPVVCRDHGPNTRFKFSLAKSEYIEWINDDGQKQLLRVVGISDDNLELRLPHDARPITLIREQRERIRATYRQLFQRRARKVMVTPLGEVLPAND

SEQ ID NO: 439 - protein, 1060 aa, unidentified
  REGION 1..1060: note = Description of Unknown: uncultivated organism with predicted taxonomy: Thermogutta terrifontis
  REGION 1..1060: note = MG4-17 effector
MNTKNGQVDYVLGIDLGVVSLGWAAIQIEGNGGRSLLGAGVRCWDLSSGSLEKVEKGKEEPPGQLRRQARQLRRQMYRRAQRLRRTFRVLQDMGLFPAGSCSSMARKAYLEKLDRQAQQWLRQHVPNSDGGGLLAHTFIYRLRAVALDHPLPAELLGRVFFHLAQRRGFLSNRRDSQKEEERGVVKQAISQLRADIEKLGARTLGEFLSKLNPHEQRIRNRYTSRRMFQDEFEQIWNTQRRHHPNSLTDSNKARLYKALFFQRPLKSQRGLVGRCPLEVLTRNHSNGQVAYIHAFRRAPMACLEAQRIRYMQRINDLEFTDPQGGARLLSPDERQKLYDLAERNEDLSFTVIRKALGIPTGKKDQGWQCNLERGGEKKLPGNRTAARIRKIIGDVAWENLGSVKQKPLVDTLIALLSPDALTEHLRTVWGFDCKIASQLAELQLEQGYHSFSRRAIRRLLPLLEQGERLNAAIQKVYGGTRLRITQHLKLPPVRQVLPTTRNPLLVRALTELRKVVNAIIQKYGIPQFIRVELARELKRSRKERAEISKRMREQQKRREEAAQKVLEELGRTATPRDIEKYLLAQECNWQCPYTGRQITVQSLLGDDPQFDVEHIWPLHRSLDDSFMNKTLCYHHENRSVKAGRTPYEAYATDPLRWQEILSRVRSFRGPFARQKLDRFQAVEIPPDFAMRQLNDTRWISKAAADYFGYLYGGRIAPTGQQRVFTVTGGLTALFRRAWNLNAVLGGNPEKNRYDHRHHAIDAIVVALTEPSMIQRFSNEAEKLIKAFPRVAVRLDPPWDTFLSDVQQHVERIVVSFRVNRRLSGALHDQTHYSPPVEEGKTKVRKRLNALSAHEVERIVDPEVRRLVQEKLKQLKMSDPKKAFATDVNLPIIHGKNHTALPVKSVRIWVNSLVIPVGDGPRRRYVVRGNNHHIEIYAVLDGQGYEIEWKGKIVSLYEAYERKKRGEPVVCRDHGPNTRFKFSLAKSEYIEWIRIDGQKELVRVVAISDNKLEFRLPYDARPSTLIREAHERIFATYRQLFERRARKVLVTPLGEVLPAND

SEQ ID NO: 440 - protein, 1062 aa, unidentified
  REGION 1..1062: note = Description of Unknown: uncultivated organism with predicted taxonomy: Thermogutta terrifontis
  REGION 1..1062: note = MG4-18 effector
MKTKNGQVDYVLGIDLGVVSLGWAAIEIDNDGGQSLLGAGVRCWELSNASLEEVEKGKEEPPGQSRRQARQLRRQMFRRAQRLRRTYRVLQEMGLFLTGPRSSTARKAYLETLDQKAQEWLRTNVPGANNDGLLAHTFIYRLRAAALDHPLPPELLGRVFFHLAQRRGFLSNRRTLEKNKDEELGVVKQGISQLQDEIQKSGARTLGEFFSRLNPHEQRIRNRYTSRKMFQDEFEQIWNAQRSHHPNSLTDSKKARLYKAIFFQRPLKLQHGLVGRCPLEVLPRKRPNGQVEYIYPFRRAPMASLEAQRIRYMQRINDLEFTDPQGQRRVLSPEERQKLYDLAERNEDLSFTLIKKTLGIPTGKKGEGWECNLERGGEKKLPGNRTSAQIRKVIGDATWEDLGRERQKALVDTLIAFLRADTLEEHLHRVWGFNREVASQLAGLPLEQGYHSFSRRAIRRLLPLLEQGERLNAAIQKVYGGTQRKINQHAELPPVRQVLPTVRNPLLIRALTELRKVVNAIIRKYGIPRCIRVEVARELKRSRKEREEISKRMREQQKRREEAAQRVLQELGRTAAPRDIEKYLLAEECNWICPYTGKQITTQALLGDHPEFDVEHIWPLHRSLDDSFMNKTLCYHQENRSVKAGRTPYEAYATDPVRWQEIITRVRNFRGPFARQKLDRFQAEEIPPDFALRQLSDTRWISKAAADYLGHLYGGRIDPTGQQRVFTVAGGLTGLFRRAWNLNAILGGSPEKNRYDHRHHAIDAIVVALTEPSMIQRFAHEASRLLKAWPRVAVRLDPPWSTFLSDVQRHVEGIVVSFRVSRRLSGALHDQTYYAPPTEQGKTKVRKPLREMSSHEVERIVDPTVRDLVKEKLKQLGTSDPKKAFATDANLPIIRGKNNTALPVKSARIWVSSSVIAVGDGPRQRYVVPGNNHHIEIYALLDGQGQEVRWKGKIVSLYEAYERKKRGEPVVCRDHGPNTRFKFSLAKSEYIEWINDDGQKQLLRVVGISDDNLELRLPHDARPITLIREQRERIRATYRQLFQRRARKVMVTPLGEVLPAND

SEQ ID NO: 441 - protein, 1081 aa, unidentified
  REGION 1..1081: note = Description of Unknown: uncultivated organism
  REGION 1..1081: note = MG4-19 effector
MGETNTQTGSYILGIDLGSASLGWAAISLDGAGMATGLLRSGVRLFNPAVTGDIEKGQDESNAVARRTARLIRRQLRRRAARQSELFQLLQRYTLLPPYKGAEADASQQRHSILNALDQELTAKWVKPGNAGAQAAIELPLYLLRKTALDAALEPFELGRVFYHLSQRRGYRSNRKDQASDKGTPGKAKKADDLGAVQGGIKELEDAIRSSGTRTLGEYFTSLDPHSQKVRGRWTARRMYEEEFAAIWAKQVTFHPALLTEELHYKIKHLLFYQRPIKAQSHLIGDCELEPGERRAAWATLEAQQFRVLQKVNDLEIILPGNVTGIPLTPEQRQTVLNLLESSSEATFKKIRKALGLGENIGFNLQRGGETKLKGNLTNSHMADVFAERWLEMSEEDKKQVVEDWRTIEREESLIRRATEHWKLDETGAKWLASRPAPSGYCSISRKAIRKLLPLMMEGKRFKEAENEIWGSRFSGGQVYDRIPPVRQALKSLRNPAVERALTELRKVVNALIRELGKPTEVRIELARDLKKPRHERAKAVSQNRDREKQRSAAKVKMLQEIGPGFEHPSRADVEKALLWEECQGECPYTGKRFPLSSLFGENPPLQVEHIIPFSRIPDDSFQNKTLCYHEENQIKGNRTPFEAYKDAEQFETILNRVRNWRTPNPGKQRRFELRTLEELEGFSSRQLNDTRYASKLACELVGTLFGGRDIPTESGSRQVVFASSGMVTATLRKGWGLEAILREAAPSANGQNRGKPRTDHRHHAIDAITIALSAPRMIAALSRNNAQDPYWPRNGRTAPKLQSPWNGFVDSIRPHFEQMLVSHRPEHRLTGALHDETNYGRPHKEGGKDVVHIRKQVVGMSAGDIENIVDPAVRESVREKAASFGGDLKKWTPKEGSEDWPLLRTKTGKEIPIKRVRIKKSLGVETIAKGDRARHVALSSNHHVAIFALLDERGGERRWEPMIVSLFEAMERKRKGQPLIQTRYPVVGEFIFKFSLMGGDTVLLHKDCDHKNNHCNPSVWRLRTIGSNGQLSLVRINDARLKAEIQKAKEWWSPTQDALRKLDAVKVVIDSLGRIHQSGG

SEQ ID NO: 442 - protein, 1081 aa, unidentified; identical to SEQ ID NO: 441
  REGION 1..1081: note = Description of Unknown: uncultivated organism
  REGION 1..1081: note = MG4-20 effector

SEQ ID NO: 443 - protein, 1081 aa, unidentified; identical to SEQ ID NO: 441
  REGION 1..1081: note = Description of Unknown: uncultivated organism
  REGION 1..1081: note = MG4-21 effector

SEQ ID NO: 444 - protein, 895 aa, unidentified
  REGION 1..895: note = Description of Unknown: uncultivated organism with predicted taxonomy: Planctomyces sp. SH-PL14
  REGION 1..895: note = MG4-22 effector
MGETNTQTGSYILGIDLGSASLGWAAISLDGAGMATGLLRSGVRLFNPAVTGDIEKGQDESNAVARRTARLIRRQLRRRAARQSELFQLLQRYTLLPPYKGAEADASQQRHSILNALDQELTAKWVKPGNAGAQAAIELPLYLLRKTALDAALEPFELGRVFYHLSQRRGYRSNRKDQASDKGTPGKAKKADDLGAVQGGIKELEDAIRSSGTRTLGEYFTSLDPHSQKVRGRWTARRMYEEEFAAIWAKQVTFHPALLTEELHYKIKHLLFYQRPIKAQSHLIGDCELEPGERRAAWATLEAQQFRVLQKVNDLEIILPGNVTGIPLTPEQRQTVLNLLESSSEATFKKIRKALGLGENIGFNLQRGGETKLKGNLTNSHMADVFAERWLEMSEEDKKQVVEDWRTIEREESLIRRATEHWKLDETGAKWLASRPAPSGYCSISRKAIRKLLPLMMEGKRFKEAENEIWGSRFSGGQVYDRIPPVRQALKSLRNPAVERALTELRKVVNALIRELGKPTEVRIELARDLKKPRHERAKAVSQNRDREKQRSAAKVKMLQEIGPGFEHPSRADVEKALLWEECQGECPYTGKRFPLSSLFGENPPLQVEHIIPFSRIPDDSFQNKTLCYHEENQIKGNRTPFEAYKDAEQFETILNRVRNWRTPNPGKQRRFELRTLEELEGFSSRQLNDTRYASKLACELVGTLFGGRDIPTESGSRQVVFASSGMVTATLRKGWGLEAILREAAPSANGQNRGKPRTDHRHHAIDAITIALSAPRMIAALSRNNAQDPYWPRNGRTAPKLQSPWNGIVDSIRPHFEQMLVSHRPEHRLTGALHDETNYGRPHKEGGKDVVHIRKQVVGMSAGDIENIVDPTVRESVREKAASFGGDLKKWTPK

SEQ ID NO: 445 - protein, 1081 aa, unidentified
  REGION 1..1081: note = Description of Unknown: uncultivated organism
  REGION 1..1081: note = MG4-23 effector
MGETNTQTGSYILGIDLGSASLGWAAISLDGAGMATGLLRSGVRLFNPAVTGDIEKGQDESNAVARRTARLIRRQLRRRAARQSELFQLLQRYTLLPPYKGAEADASQQRHSILNALDQELTAKWVKPGNAGAQAAIELPLYLLRKTALDAALEPFELGRVFYHLSQRRGYRSNRKDQASDKGTPGKAKKADDLGAVQGGIKELEDAIRSSGTRTLGEYFTSLDPHSQKVRGRWTARRMYEEEFAAIWAKQVTFHPALLTEELHYKIKHLLFYQRPIKAQSHLIGDCELEPGERRAAWATLEAQQFRVLQKVNDLEIILPGNVTGIPLTPEQRQTVLNLLESSSEATFKKIRKALGLGENIGFNLQRGGETKLKGNLTNSHMADVFAERWLEMSEEDKKQVVEDWRTIEREESLIRRATEHWKLDETGAKWLASRPAPSGYCSISRKAIRKLLPLMMEGKRFKEAENEIWGSRFSGGQVYDRIPPVRQALKSLRNPAVERALTELRKVVNALIRELGKPTEVRIKLARDKKNPRHERAKAVSQNRDREKQRSAAKVKMLQEIGPGFEHPSRADVEKALLWEECQGECPYTGKRFPLSSLFGENPPLQVEHIIPFSRIPDDSFQNKTLCYHEENQIKGNRTPFEAYKDAEQFETILNRVRNWRTPNPGKQRRFELRTLEELEGFSSRQLNDTRYASKLACELVGTLFGGRDIPTESGSRQVVFASSGMVTATLRKGWGLEAILREAAPSANGQNRGKPRTDHRHHAIDAITIALSAPRMIAALSRNNAQDPYWPRNGRTAPKLQSPWNGFVDSIRPHFEQMLVSHRPEHRLTGALHDETNYGRPHKEGGKDVVHIRKQVVGMSAGDIENIVDPAVRESVREKAASFGGDLKKWTPKEGSEDWPLLRTKTGKEIPIKRVRIKKSLGVETIAKGDRARHVALSSNHHVAIFALLDERGGERRWEPMIVSLFEAMERKRKGQPLIQTRYPVVGEFIFKFSLMGGDTVLLHKDCDHKNNHCNPSVWRLRTIGSNGQLSLVRINDARLKAEIQKAKEWWSPTQDALRKLDAVKVVIDSLGRIHQSGG

SEQ ID NO: 446 - protein, 1081 aa, unidentified; identical to SEQ ID NO: 441
  REGION 1..1081: note = Description of Unknown: uncultivated organism
  REGION 1..1081: note = MG4-24 effector

SEQ ID NO: 447 - protein, 1081 aa, unidentified; identical to SEQ ID NO: 441
  REGION 1..1081: note = Description of Unknown: uncultivated organism
  REGION 1..1081: note = MG4-25 effector

SEQ ID NO: 448 - protein, 1081 aa, unidentified; identical to SEQ ID NO: 441
  REGION 1..1081: note = Description of Unknown: uncultivated organism
  REGION 1..1081: note = MG4-26 effector

SEQ ID NO: 449 - protein, 1081 aa, unidentified; identical to SEQ ID NO: 441
  REGION 1..1081: note = Description of Unknown: uncultivated organism
  REGION 1..1081: note = MG4-27 effector

SEQ ID NO: 450 - protein, 1081 aa, unidentified; identical to SEQ ID NO: 441
  REGION 1..1081: note = Description of Unknown: uncultivated organism
  REGION 1..1081: note = MG4-28 effector

SEQ ID NO: 451 - protein, 1081 aa, unidentified; identical to SEQ ID NO: 441
  REGION 1..1081: note = Description of Unknown: uncultivated organism
  REGION 1..1081: note = MG4-29 effector

SEQ ID NO: 452 - protein, 770 aa, unidentified
  REGION 1..770: note = Description of Unknown: uncultivated organism with predicted taxonomy: Alphaproteobacteria bacterium
  REGION 1..770: note = MG4-30 effector
LNLERDYVFSIERGGEKTLKGNPTNADFRKALGERWDKMTPEERDRAVEYVHAFQRPDKIKVAAMKKWGLDEQSAEELAKISLEPDYLNLSRVAIEKLMPLLEGGFPYGALAPRYSAIGAEAVQKLLASAEAGTPFKETCETILGEPTVSSQEHDLLPPVGQALSEIRNPAVMRSLTELRKVVNGVLRHFGKPAQIRIELARELKKSKKQREAESKRNRENEAVRVKAKQTIKEITGDEHPSTDDVRRVQLFNDCRGTCVYCGETIAARNFLGRESQVDIDHIIPFSRSMDNSYANLVICHARCNRNKGDRTPFEAFSVDPESYGQIRDRVKIFAGDGRTVSEKIKRFEMDEGELEKFLGDFRNRQLNDTAYASRLAADYLGILYGGRTDREHRLRVQATAGQATARLRARWNLDSILDDGPTKHGGRASKERTDHRHHAIDAVVIGVTDQGMMERLSDAAKRGQEVGKRFARLDEPWNGFLEQVRKEVGQIVVSHRVSKKVSGALHEETIYSRPFPVGAGFKPAPTKAKPRCTDAEATEVRVRRGLSPSAKSTKQISAPEVEDIADPAVRKLVVAKLAELGGDLKKFADEKNLPFFETKDGRRIPIKRVRVSKALPTFTLGHGRSARHVASESNHHVEIYAELDQNGTEGEWDGEVISMYEAYQRLKAGRPVVQRDHGPLARFKFSLAPGEVVECDDKNGARSLFVMRKASQISSGQLQIGFAPPNDARKAREIQTSRAWLWANPNTLGDRNSRKVVVNPLGEVSESHE

SEQ ID NO: 453 - protein, 866 aa, unidentified
  REGION 1..866: note = Description of Unknown: uncultivated organism
  REGION 1..866: note = MG4-31 effector
DKEDDKNETEFKQDMAELSQLVKQHDPPYLGAYLACLNPDEQRLRGKRTSRQMYLDEFDAIWDEQSKHHGDLLTAEVQKTLHNTIFYQRPLKSQRHLRGKCSLTGKTRAPIALRIVQRFRAIQKLNDLQIVFADGTKRKLDEQERAKVFELQMTKGDVTFHSLKAKKVLGLPKDATFNLAEIDKKLIGHRTDAKLRKALGDRFDGLSEDQRDAIVQDIRSYRDTGPLAKRLKATYDLPSDIAADLSKVKLEKDRAAHATEAIRALLPLMERGIQYATARKQVYPESFASNTKTYDLLPSVNDWLKQHEKAVAIRNPAVMRGLTELRKVVNAIIRRYGKPKCIRIELARDLKNSRKKRADISKQNMERRGQREKAAELLAKQFGIEQPSHHDREKVLLHWECGGFCPYTGKPIELNDLFGPNPSFQVEHIWPLSASMDDSFMNKTLCHVDENARKGGRSPVDCYDQKTLDLIKERIGRFNCDWKVREAKRRRFTEPIPEDFHQRHLNDTRYLARESANYLGCLFTAEETEGPNPLRVFVVTGGLTNMMRGLWGLNTLAGGPANEKDRIDHRHHAIDALVVALTKQAHTQKLMSAAARAERQHLLRNFQDVAHPWADFAEQAKVAVDKIVVSYRPDRKLRGKLHQDTLYSEEIHGTRRIRRELHSLKPNEVEKIIDPRIRSVVSKKLAELKESNPAKAFADPTNLPTLTDHNGRTTRLRKARVRVSAKPTKIGKGASERSVNLGSNYHTVISQDERGRWCETTVSLIEAMRRKEDGEPVIQTPEGHTFLYSLVKNDHVEIPNGNGMGRIMRVESISQGFVEFGEHNDARTQAERGSERFYLRSGKKWTEVRPRKVAVTHLGEVKHAGG

SEQ ID NO: 454 - protein, 1036 aa, unidentified
  REGION 1..1036: note = Description of Unknown: uncultivated organism
  REGION 1..1036: note = MG4-32 effector
MASEFILGLDVGVASIGWAIIDWDGAPCGIRLAGTHLFEAGVDPGKSDPETAMLLGREQSRAKPRRDARAMRRQTWRRARRKKKVLGALIRADLLPPGDIRTPAAIDAYMKSLDASLRDRWESKGASHRDRQLLPYRLRAAAVTREVERHELGRGLYHLAQRRGFLSNRKAPDRADEDRSEMKKAIGDLATQIAAHDPPTLGAYLASLDPDDARLRGRWTSRQMYLDEFDRIWDTQAERIGLTQAQREEIHNAIFHQRPLKDQSHLVGRCSLVDGAKRCPIGERIAQRFRVLQQVNHLRVVLDDRTERPLTPGERQAMLDALLTKGDLKVAAARRAAGLPRSATLSIERGGEKRLVGHRTDAKLRKVFGDERWASMSEEEKDAAVHDLRSVRLPATLRRIGLTRWGLDTESAEEFAGLSLEEGHAAHSREALRRLVPRMEQDGLSYSEARKDEFPGSFESDEPHDLLPALDQWDRDLRNPSVARALTELRKLVNAIVRRYGKPVRIHIELARDLKSGRGRRERIANRMRDREKEREAAASAIAREIGVADPPRWMIEKHLLAEECGWRCPYTGKGFGIHDLLGRNSQFDLEHIWPFSRSLDNSYANKTICYHEENRNRKQGRTPAEAYSEEELQAILERVRAFKGDPFLIQAKLRRFTDPIEEGFTERHLQETRYIGRLACDYLGLLYGGQVEAQGTAVSERRILTPTGGLVAWLRRGWGLNSVLSDRDEKERNDHRHHAVDAIVIACADQRAIQRLSESAERMEREGRERPYESVDPPWEGFEQSVQEAIHAVVVSHRQSRKVRGPLHKETLYSKEHNGRRRVRKRVETLSKTDVEKGRIVDERALAAIRAKLDELGEPNPAKAFKDPANLPTVRGHDGRSVTLRKVRVEVGVQPRAFGKGAKRRYAQTARNHHMAFYKRSLPGGRMERTTKLVALADMVDRSSVVDREADDGFEFAFSLAPNEFVVIKDDQGDDRLCRVLSISADDLELVEHTDGRTSTDRKGERIRFRRRALSEDPIRKVHVNYLGEVHDAGG

SEQ ID NO: 455 - protein, 787 aa, unidentified
  REGION 1..787: note = Description of Unknown: uncultivated organism with predicted taxonomy: Insolitispirillum peregrinum
  REGION 1..787: note = MG4-33 effector
MLDYTLGLDLGAASVGWAVVKEPTTDQDTDSVLHLGVHRFEAGVADPGKMGHGGEESSAKPRRDARQMRRQLWRRKRRRRLLLARLQEHGLLPAGELDTPEAIHVYLRELDQAILDRNYPSATHEQQLKLPYLLRAKAVSERIEIDELGRVLYHLAHRRGFLSNRKTDKEDDKNETEFKQDMAELSQLVKQHDPPYLGAYLACLNPDEQRLRGKRTSRQMYLDEFDAIWDEQSKHHGDLLTAEVQKTLHNTIFYQRPLKSQRHLRGKCSLTGKTRAPIALRIVQRFRAIQKLNDLQIVFADGTKRKLDEQERAKVFELQMTKGDVTFHSLKAKKVLGLPKDATFNLAEIDKKLIGHRTDAKLRKALGDRFDGLSEDQRDAIVQDIRSYRDTGPLAKRLKATYDLPSDIAADLSKVKLEKDRAAHATEAIRALLPLMERGIQYATARKQVYPESFASNTKTYDLLPSVNDWLKQHEKAVAIRNPAVMRGLTELRKVVNAIIRRYGKPKCIRIELARDLKNSRKKRADISKQNMERRGQREKAAELLAKQFGIEQPSHHDREKVLLHWECGGFCPYTGKPIELNDLFGPNPSFQVEHIWPLSASMDDSFMNKTLCHVDENARKGGRSPVDCYDQKTLDLIKERIGRFNCDWKVREAKRRRFTEPIPEDFHQRHLNDTRYLARESANYLGCLFTAEETEGPNPLRVFVVTGGLTNMMRGLWGLNTLAGGPANEKDRIDHRHHAIDALVVALTKQAHTQKLMSAAARAERQHLLRNFQDVAHPWADFAEQA

SEQ ID NO: 456 - protein, 1066 aa, unidentified
  REGION 1..1066: note = Description of Unknown: uncultivated organism with predicted taxonomy: Planctomycetes bacterium
  REGION 1..1066: note = MG4-34 effector
MIAERRREREFILGLDLGVASIGWALLEVDESMRPTGVIRAGAHLFEAGVEGAIEQGRDESRAAPRRGARAMRKGHWRRQRRRRQVLLALQRHGLLPPGDVSTPSAVDRYIKSVDERLRETWCSNGDHRAQLVFPLQLRAAAATQDLGPHDIGRAIYHLAQRRGFLSNRRTEAVRGDEEDEGKVKSAIKDLAQAIDHSEQPTLGAYLATLDPDTERIRGRWTGRQMLLDEFETIWSRQAPKHEAMTDTAYEEIRHAIFHQRPLRKQQHLIGRCSLIPDKRRAPVAHRLYQRFRLLQKLNDLEILEPGRLQRPISAQERAIALALLEKNESVRFTTLRKKKGGLGLPKGTTFNFETDGESSLIGHRTDAKLRDVFGDDYDALSEREKDQIVEDLRSIREPAALKQRGVQRWGLAEEQAIRFASVRLEEGYGSHSLAAIRRLLPHMEEGARYAAARLAEFPESFTAVEPVDALAPVESALGKIRNPAVERALTELRKVVNAIIAEHGKPQLIRIELGRDLKRGRKEREKQSKRMAARRKQREEAKRRLLKETGIADPRRSDIERVLLADECNWICPFTGVKFGWSDLFGPTPRFDVEHIWPYSRSLDDSFLNKTICDQRENRTRKRNQTPHEAYGATPEVYERILQRVRAFSGDPWVLAAKLSRFEAESIPEGHVDRHLNDTRYMSRVACEYLGALYGGLSDEYHRRRVQSTTGGLTFELRRGWSLNSILGIGDEKNRADHRHHAVDAIVVALTGPKAIQQASRAAQRAETRGGARLFEEFEDPWPGFRDDVKAIVKSIVVSHRQSRKLSGALHAETNYSRPIHPAGAHHVRKELHKLTASDVDRIIDPRIRELVRQKLETIGEPNPKKAFAAPEHLPTITGSDGRTRTVRKARVRTGVKAKPIGKGVNRRYVAPTQGSNHHTVIVAHLNDAGEEVRWTDHPVTLLEAQQRKSNGEPVVQRDWGPGKRFKFSFASNEFIEMDADDGVRRIYRVLSLSEGNYELSEHIDGRKKTDRIQDQKRVKTEWERSKKVGTLIRERIVESAESMRRRKAGKISVSHLGEVRRAGG

SEQ ID NO: 457 - protein, 1036 aa, unidentified; identical to SEQ ID NO: 454
  REGION 1..1036: note = Description of Unknown: uncultivated organism
  REGION 1..1036: note = MG4-35 effector

SEQ ID NO: 458 - protein, 1053 aa, unidentified
  REGION 1..1053: note = Description of Unknown: uncultivated organism with predicted taxonomy: Proteobacteria
  REGION 1..1053: note = MG4-36 effector
MTYVLGLDIGARSVGWALLEKEGDTFTRIVRAGVRVFEAGTEGDIERGRDESRGATRRLKRLARRQIRRRRQRARALYRELANAGLLPAIKPSPGSPMALLIQDEINRLDHELRERYAGERAVSQLPYLLRARALDHRLEPYELGRAVYHLGQRRGFRSNRKAESGKKATEDPSKAKEEKSLVYRGIDDLKEQIRQAGARTLGEYFATLDPAEQRIRNRYTHRSMYEEEFEAIWEAQRPHHAALTRELKDRLREILFGQRPLRDTEDLVGECEWIPGEKRAPVWSLEYQRFRLLQTVNHLRVTENRSSPRPLTPEERQCLLEELEKKPKVTIAQAKRVLGLQRAEFTIEEGGQKDLPGDKVASQFHEILGQRWLELRPEQQRALVECVASAGSDEQLLEDLKQQWRLSDDQATQIVRNVHLPSGYASLSLKAIQKVMPYLEQGMDVQRARLEARIPLDRPVPVRELLPPLADSGVAVFNPAVKRALTEMRKVVNAVIRRYGKPDEIHLETARELRKSREERMNESKRMRGREKEREEILRRIRDEVGIPEEKISRDDVLKGLLWQECDGKCPYCGESLGGFASLYGGNSPAQIEHIIPFSRSLDNSFVNLTLAHVSDNNYKGDRTPWEAYGSNPERWDQILQRVSVFRGSYSKAKLNRFKMDENAVRELSEQFSSRALNDTRAASVAAARYLALLYGGEIVDGKRKILKITGQVTAYLRDVWGLNGLIPSIHREARGEAADAEAESRTLKSRDDHRHHAVDAVVVALCNQRWIQRLSEANRGALAARRRWFAPVEPPWVGFKEQLKDTLKSMNISFRPDHRVTGALHKETFYTRIGQNEKGGDVVRVRMPVTNLGSKEVEAIADPAVRQIVQAELKEVGGDARKLENNWPLLPNRHGKPVPIRKVRVNLNRAVVSVGKGPWQRWAEPSETHHIEIYEVEENGRRVWRGDVVSMREAIERATRGEPVTRRRGGAGVRYLFSVSKEDTLRLHGKYEGLWVVKKIAQKGQITLVSQFDARSEQNRTVFSPRVGGLQGYSAEKVVVLPIGDVVPCNE

SEQ ID NO: 459 - protein, 754 aa, unidentified
  REGION 1..754: note = Description of Unknown: uncultivated organism with predicted taxonomy: Solemya velesiana gill symbiont
  REGION 1..754: note = MG4-37 effector
MPYVLGLDIGARSVGWALLEKEGDSFTRILRAGVRVFEAGTEGDIEQGRDESRGATRRAKRLARRQIRRRRQRARALYRELSGAGLLPPITPVPGSPMAVLIQEAINRLDCELRRKYAGERAVNQLPYLLRARALDHRLEPHELGRALYHLGQRRGFKSNRKAESGKKAMEDSSKAGEEKSLVYRGIDDLKRQIREAGARTLGEYFATLDPAEQRIRNRYTHRSMYEEEFEAIWEAQRRHHAALTRELKDRLWQILFEQRPLRDTEDLVGECAWIPREKRAPVWSLDYQRYRVLQTVNHLRVAENRCAPRPLTHEERWRLLEELEKKPKVTVAQAKRVLGLQKAEFTVEEGGEKELPGDKVAAQFYEKLGESWSRLNPEERRALVECVATAESDEQLSETLQQQWGLSADQANKVVREVHLPSGYAPLSLKAIRAVMPYLEQGMDVQRARLAAGIPLDRPVPVHALLPPVADSRVAVFNPAVKRALTEMRKVVNAIIRRYGKPDEIHLETARELRKSREERMKESRRMRDREKEREEIIRRIRDEVGIPEEKISRDDVLKGLLWQECEGRCPYCGESLGGFASLFGGNSPAQIEHIIPFSRSLDNSFVNLTLAHVSDNAYKGDRTPREAYGSDPERWNEILQRVEVFKGSYSKAKLNRFKMDESAVGELFEQFSSRALNDTRASAVAAARYLSLLYGGETVDGKRKILKVTGQVTAYLRDVWGLNGLIPSIHREARGEAEDGQAEARPVKSRDD

SEQ ID NO: 460 - protein, 1032 aa, unidentified
  REGION 1..1032: note = Description of Unknown: uncultivated organism with predicted taxonomy: Acidobacteria
  REGION 1..1032: note = MG4-38 effector
VDYVLGLDLGARSVGWALIELQGDEPKRVVAAGVRVFEAGAEGNIEEGREESRGVKRRQARLARRQTRRRRQRLRQLYRELAGAGLLPAVQASPGRPFAVAVQEAINVLDGQCRLQYQHDPCANRIPYLLRARALDEPLAPWELGRVFYHIGQRRGFKSNRKAEARDPEERSLVYDGIRRLEEEIQRTGARTLGEYLSKLDPRQERIRCRYTQRSMYEREFDAIWAAQSPHHPCLTTELRERLAAVLFSQRPLKDGAELVGSCSWDPSQKRAPAWSLEYQRFRVLQEVAHLRYADESQVWQPLDAEQRSKLVAALSTTRELDFRAIRKLLGFAGKVRFSVEAGGEKKLRGNVVAAEFIRAIGEEWNALGAERQAELVRQVALAEDDDKLREELITNWRLTPEQAGRLVADVRLPRGYAALSLKAIRAALPYLEQGMSVQQAREAAGYELMPPVPARDLLPPLASSGIEVFNPAVKRSLTELRKVVNAVVRKYGKPAEIHIEVARELRKSREERQKESRRMREREAERERMRQKIHKEVGIPLEQIREEDVRKGLLYEECCRTCPYTGKPLGGFAGLFSGTSPVQIEHIIPYSISLDDSFANLTLCLASENAVKHNRTPYQAYSADPGRWEDIQARVRAFRGPYAAEKLRRFLMDEQAAAALLQRFSARHLNDTRYAAVVAGRYLSLLYGGEVIDGKRKILKVTGQITAHLRRVWGMNEILGRAGVKSRDDHRQHAIDAALVAVADQRSVQRLSQAAARAELQHRRRLPALEPPFVGFKEGLQCLVQTMNISFRPDHRVSGPLHKETFYAVSGAPAAPTGTIRTRKPVFRLTEEDVDRIADPAVRCLVKQKLAGVGEARKLEKDWPVLPNAHGQPVPIKRVRLELRDAVRAVGQGHRRRWAEVGESHHVAVFEVTKRSRQGTRTAWEGEVVSLWEALERLRLGKPVIDRAGGPDRRFLFSLCKNDTLQLNGPRPGIYVVRKIRQNKQITLVPQHDARPEKQREQFSPTVSGLLEYAARKVVVTPLGELVESHE

SEQ ID NO: 461 - protein, 784 aa, unidentified
  REGION 1..784: note = Description of Unknown: uncultivated organism with predicted taxonomy: Planctomycetes
  REGION 1..784: note = MG4-39 effector
VLQPMRVPYVLGLDIGVQSVGWALAQLDEEGNPCGILRLGVRSFESSSGSEQEIEKGTDEPASRQRREKRLMRRQLFRRQQRLRRTARVLQQAGLLPQFSLEPASRDAAITQLDAQLRSQFIGSGNHVDAQLLPYRIRAAALDEVLPAYALGRAFYHLAQRRGFLSNKKASAKKDDEDKGKVKAGIAELTRQIEVAGARTLGEFFARLDPHQQRIRSRWTSRKMYQQEFDAIWEAQAPHHPQTLTAELKARLYRAIFFQRPLKSQKGLIGRCSLEKGRRRAPLACLEAQRLRYWQKLNDLRLKDARRILNAIPEAERLIDWLPQEGQGRLTLYAKQLLAQEFETNEELTFNRIRQILGLKKKKDSDLDFTFNLEEGDEKKLPGNRTAAKLLKALGQRWQDMPEDQRQRLVDEILSFEKEEPLARRLEKAWGFSPSEAANVAAIDFEQGYHSFSRQAIRKILPHLQQGQALATIIKQLYKDTQPQATVWDRLPPLRDVFPQVNNPVVRRALTEVRKVVNAILRVYGKPQRVHIELARDLKKSRHERQQLSKGMRQQQKQREDARNWLQHEMGISNPTAHDILKYRLWIECEKLCPYTGKPISKEALFGSEPQFDVEHIIPYSRCLDNSFANKTLCEVAENRAAKKNRTPYEAYGNAPQRWHEILQRVSRFRGDAAKAKLRRFQLTEIPADFANRHLNDTRYSSRLASEYLSLLYGGRSDAQGNLRVQASTGAVTSLLRDQWGLNAILAELGRQLGVSGLDDDVEKARFDHRHHAVDALVIALTTP

SEQ ID NO: 462 - protein, 1106 aa, unidentified
  REGION 1..1106: note = Description of Unknown: uncultivated organism with predicted taxonomy: Thermogutta terrifontis
  REGION 1..1106: note = MG4-40 effector
VDHLEVHVSDSAGGHVSEIPEYLLGIDLGVLSLGWAAVKLQDGRPIGLLDAGVRAWDLQNIAESDIAVGKEEPPSQTRRQMRQMRRQLFRRAQRLRRTWRALQQLGLFPPGSRHCAARKAFLDQLDGQAKAWLCQHRFGSADPPPHWEDTWIYHLRAAALDQPLPPELLGRVFFHLAQRRGFQSTAKTRSAGDQKDGEDRKNKKNKKGKKSEKSERERIRAAISQLQQAMQTSGARTLGEYFARLDPHQERIRGRWTSRRMYKEEFEAIWTAQAPFHPEWTAADKDRLFRALFFQRPLKSQRGLVGLCPLESKVLPPAQPGQKAKVLYRHRRAPLASLEAQRIRYMQRINDLEIIAPDGTHWVLRDPAYQLMRSKLYDLAEHHEELTFPAIRKALGIPTGKKGEDWKFNLEAGGEKKLPGNTTAARIRRILGDQRWDSLGPDGQKQLVDTLLAFLSEEALQQHLEAHWHLDPPTAQALAHLELEPGYHSYSRRAIRKLLPLLEQGLRLNEARRKLYPQKEADAGGWDRLPPVCQVLPQVRNPLLVRALTELRKVVNALLHKYGKPVQIRIELARDIKRSRREREALSRRMRKQEDSRKKAAQIAREHLGREPSPFEITKVLLAEECNWKCPYTGREKIELAALLGPEPQFDVEHIWPFDRSLDDSFANKTLCYHEENRLRKSNRTPWEAYGSDPHRWGEIIARVKQFKGEWAKEKLRRFLAQELPEDFPQRHLSDTRWISRTAADYLGLLYGGRIDPTGKQRIQTTAGRLTALLRRAWDLDSILGPGTEKNRADHRQHAIDAVVIALTDPAVVHRLSRWASHRPSWVRITPQLDSPWPGFFDQVKHRILSILVSFRQHRRLSGPLHDQTFYAPPVPSPEDPKKLRTKVRKKLSELSDNAVEDIVDPEVRRLVQEKLRALSEHDPKKAFASPENLPYLRSRRTGQIIPIKSVRIWVTAHLEKIGSGMRQRYVIPGTNHHLEIFAHLDAQGNETRWDGHVVSLLEAVRRKRLGQPVVCRDHGPNTRFKFTLAKGDYIQWTDDQGQPQILRVIGISHNNIEFRLPSDARPITIIKQEKQRIRARYQTLFQRRARKVAVSPLGEVYPAGD

SEQ ID NO: 463 - protein, 811 aa, unidentified
  REGION 1..811: note = Description of Unknown: uncultivated organism with predicted taxonomy: Planctomycetes
  REGION 1..811: note = MG4-41 effector
VLQPMRVPYVLGLDIGVQSVGWALAQLDEEGNPCGILRLGVRSFESSSGSEQEIEKGTDEPASRQRREKRLMRRQLFRRQQRLRRTARVLQQAGLLPQFSLEPASRDAAITQLDAQLRSQFIGSGNHVDAQLLPYRIRAAALDRPLPVYALGRAFYHLAQRRGFLSNKKASAKKDDEDKGKVKAGIAELTRQIEAADARTLGEFFARLDPHQQRIRSRWTSRKMYQQEFDAIWEAQAPHHPQTLTAELKARLYRAIFFQRPLKSQKGLIGRCSLEKGRRRAPLACLEAQRLRYWQKLNDLRLKDARRILNAIPEAERLIDWLPQEGQGRLTLYAKQLLAQEFETNEELTFNRIRQILGLKKKKDSDLDFTFNLEEGDEKKLPGNRTAAKLLKALGQRWQDMPEDQRQRLVDEILSFEKEEPLARRLEKAWGFSPSEAANVAAIDFEQGYHSFSRQAIRKILPHLQQGQALATIIKQLYKDTQPQATVWDRLPPLRDVFPQVNNPVVRRALTEVRKVVNAILRVYGKPQRVHIELARDLKKSRHERQQLSKGMRQQQKQREDARNWLQHEMGISNPTAHDILKYRLWIECEKLCPYTGKPISKEALFGSEPQFDMEHIIPHSRCLDDSFANKTLCELAENRAAKKNRTPYEAYGHDPQRWHEILQRVSRFQGDAAKAKLRRFQLTEIPADFANRHLNDTRYSSRLAAEYLSLLYGGRYDAQGNLRVQASTGTVTAQLRGQWGLNAILAELGRQLGVRDLDNDVEKARFDHRHHAVDALVIALTTPAMIKRFSDESQRARQYGRQFRCFFDPP

SEQ ID NO: 464 - protein, 1111 aa, unidentified
  REGION 1..1111: note = Description of Unknown: uncultivated organism with predicted taxonomy: Thermogutta terrifontis
  REGION 1..1111: note = MG4-42 effector
VDHLEVHVSDSAGGHVSEIPEYLLGIDLGVLSLGWAAVKLQDGRPIGLLDAGVRAWDLQNIAESDIAVGKEEPPSQTRRQMRQMRRQLFRRAQRLRRTWRALQQLGLFPPGSRHCAARKAFLDQLDGQAKAWLCQHRFGSADPPPHWEDTWIYHLRAAALDQPLPPELLGRVFFHLAQRRGFQSTAKTRSGGEQKDGEDRKNKKNKKGKKSEKSERERIRAAISQLQQAMQTSGARTLGEYFARLDPHQERIRGRWTSRRIYKEEFEAIWAAQAPFHPEWTAADKDRLFRALFFQRPLKSQRGLVGLCPLESKVLPPAQPGQKAKVLYRHRRAPLASLEAQRIRYMQRINDLEIIAPDGTHWVLRDPAYQLMRSKLYDLAEHHEELTFPAIRKALGIPTGKKGEDWKFNLEAGGEKKLPGNTTAARIRRILGDQRWDSLGPDGQKQLVDTLLAFLSEEALQQHLEAHWHLDPPTAQALAHLELEPGYHSYSRRAIRKLLPLLEQGLRLNEARRKLYPQKEADAGGWDRLPPVCQVLPQVRNPLLVRALTELRKVVNALLHKYGKPVQIRIELARDIKRSRREREALSRRMRKQEDSRKKAAQIAREHLGREPSPFEITKVLLAEECNWKCPYTGREKIELAALLGPEPQFDVEHIWPFDRSLDDSFANKTLCYHEENRLRKSNRTPWEAYGSDPHRWGEIIARVKQFKGEWAKEKLRRFLAQELPEDFPQRHLSDTRWISRTAADYLGLLYGGRIDPTGKQRIQTTAGRLTALLRRAWDLDSILGPGTEKNRADHRQHAIDAVVIALTDPAVVHRLSRWASHRPSWVRITPQLDSPWPGFFDQVKHRILSILVSFRQHRRLSGPLHDQTFYAPPVPSPEDPKKLRTKVRKKLSELSDNAVEDIVDPEVRRLVQEKLQALSQHDPKLADPKKAFASPENLPYLRSRRTGQIIPIKSVRIWVTAHLEKIGSGMRQRYVIPGTNHHLEIFAHLDAQGNETRWDGHVVSLLEAVRRKRLGQPVVCRDHGPNTRFKFTLAKGDYIQWTDDQGQPQILRVIGISHNNIEFRLPSDARPITIIKQEKQRIRARYQTLFQRRARKVAVSPLGEVYPAGD

SEQ ID NO: 465 - protein, 1111 aa, unidentified; identical to SEQ ID NO: 464
  REGION 1..1111: note = Description of Unknown: uncultivated organism
  REGION 1..1111: note = MG4-43 effector

SEQ ID NO: 466 - protein, 1056 aa, unidentified
  REGION 1..1056: note = Description of Unknown: uncultivated organism with predicted taxonomy: Proteobacteria
  REGION 1..1056: note = MG4-44 effector
MSGENIETILGLDLGANSVGWALIECVDGKARRILGMGSRIFEAAIEGDLEKGQEEPRAVERRMARQMRRQHKRRVMRMIRVGELLQQAGWFPPGNLRDSVERDRILKELDKSLRQQYADRGFHLSGIDAIRGIAYFLRARALDEPLEPYALGRAIYHLAMRRGFLSNRKAPMKKDEELGAVKKGISDLESEMKQCQARTLGEYFYKVDPVHEKRIRKRWTARQMYKDEFDTILQQQVKLGAIRDDPKFFRKLRKAIFRQRPLKSQCGLIGPCQFEKNEKRAPWHNLLAQEFRLLQKINDLRLIDPSTREERPLNAEERKILYDWLMEHGEATFAELRKKLGFNPRDGQKFNLEAGDETRLKGNEVAARLIAVLGEERWRGITDQEKAQLISELNSDITEERLRYRAEKVWGITDPERVDKLVKLTLPKGYCSLSKIALKKLVPLMREGKDYVTAAREVYGDLQYKNQTFDRLPPFLKVDRTLRSPVVIRTLSETRKVVNEILRVFGRPNRIHIELAREMKQSRIQRQKRYQTMRDREKMRNQARQSLQAELGWDPNDIKGRDIEKWLLAEECSWVCPYSGKPINYHNLFGEKAEFDIEHIIPYSKSLDDSFVNKTLCHREWNQKKGNRTPAQAFKNTPEWEAMLQRVRAFKPLHAVHMKKGESSKRNPKYDLFCMEEIPPDYVDNKLNDTRHAAKVAMGYLGLLYPKEERLKRVKAFAGGVTGELRKCWKLNSILGDPDSVEPKKNRADHRHHAIDALVLALATPGMVQYLSKAAAQQLACQRSIRGYQKFMEDPWPHFLEDVRKAVNAIVVSHRVDHRLQGRLHNDTLYSPPRVDENGKTYHVVRKPLDGNFKKVGDIEDPEVRRIVQEHLADHDGDPKKAFNDPDNHPKINDIPIHAVRVRDYVKPEKIGKDFCPRYALTDSNHHMEIIEEKDKKGNPRWTAIVVSRFEAMQRKIRGEPIVQREHGEGRRFVCSIASGDTFSYREKEDGPGIFARVRSIWKQNVEFVQINDARLKAEIKKENEWYVRSVNELRKMGFQKVSVSPIGEVYPAND

SEQ ID NO: 467 - protein, 1056 aa, unidentified; identical to SEQ ID NO: 466
  REGION 1..1056: note = Description of Unknown: uncultivated organism
  REGION 1..1056: note = MG4-45 effector

SEQ ID NO: 468 - protein, 1111 aa, unidentified; identical to SEQ ID NO: 464
  REGION 1..1111: note = Description of Unknown: uncultivated organism
  REGION 1..1111: note = MG4-46 effector

SEQ ID NO: 469 - protein, 1056 aa, unidentified
  REGION 1..1056: note = Description of Unknown: uncultivated organism with predicted taxonomy: Proteobacteria
  REGION 1..1056: note = MG4-47 effector
MPYVLGLDIGARSVGWALLEKEGDSFTRILRAGVRVFEAGTEGDIEQGRDESRGATRRAKRLARRQIRRRRQRARALYRELSGAGLLPPITPVPGSPMAVLIQEAINRLDCELRRKYAGERAVNQLPYLLRARALDHRLEPHELGRALYHLGQRRGFKSNRKAESGKKAMEDSSKAGEEKSLVYRGIDDLKRQIREAGARTLGEYFATLDPAEQRIRNRYTHRSMYEEEFEAIWEAQRRHHAALTRELKDRLWQILFEQRPLRDTEDLVGECAWIPDEKRAPVWSLDYQRYRVLQTVNHLRVAENRSAPRPLTHEERWRLLEELEKKPKVTIAQAKKLLGLKKAEFTVEEGGEKELPGDKVAAQFYEKLGESWSRLNPEERRALVECVATAESDEQLSETLQQQWGLSADQANKVVREVHLPSGYAPLSLKAIRAVMPYLEQGMDVQRARLAAGIPLDRPVTVHPLLPPVADSGVAVFNPAVKRALTEMRKVVNAIIRRYGKPDEIHLETARELRKSREERMKESRRMRDREKEREEIIRRIRDEVGIPEEKISRDDVLKGLLWQECEGRCPYCGESLGGFASLFGGNSPAQIEHIIPFSRSLDNSFVNLTLAHVSDNAYKGDRTPREAYGSDPERWDEILQRVEVFKGSYSKAKLNRFKMDESAVGELFEQFSSRALNDTRASAVAAARYLSLLYGGETVDGKRKILKVTGQVTAYLRDVWGLNGLIPSIHREARGEAEDRQAEARPVKSRDDHRHHAVDAVVVALCNQGWIQRLSEANRGALAARRRLFAPVEPPWVGFKEQLKDILKSMNISFRPDHRVTGALHKESHYGYSKVSESDNPVFKIRKPVYELTKSMVQKIVDPAVRSAVQEKLAAVGGKVEALKGNWPVLQSKNGQSRPIKKVRIQVALSPIEVGKNHRKRFVEVEDTHHMEVFEVPGRLSKWKARVVKMHEAAARLVCGANIFDRHLDSKSRYLFSLMKGDCLQMHGEMSGIWIIKTIRANTQIELVSQYDARPVGSSKGGARVTRKCISEFQKFSPRKVVVLPIGDVVRCNE

SEQ ID NO: 470 - protein, 1026 aa, unidentified
  REGION 1..1026: note = Description of Unknown: uncultivated organism
  REGION 1..1026: note = MG4-48 effector
VRQDEHGTVHIVDSGVRVFPWTIEEDTLKSRNIERRTARHRRRQLERRARRRRVLARLLHHYGFLPPWPADWRTFDFHRDPAWGPLLAKDPYELRAKALDQLLEPWEFGQVIYHLAHRRGFAGFRKVRDDEELGNIRREIEQLDQEIKRSGARTLGEYLAQLDPRERRRRGRHTSRDWYRAEFELIVATQQRLGLPLTPDMVRTLRRAIFHPRPLKVVPSAIGRCPLVRGRRRAPQGLREAQEFRYLQNLANLRIILPNGVQRGLTPPERKTVIQHLEQVEEMTFNELRKLLFADRVESARSRSQTAPERSHTPAAVTADGRTPAAMPVDTTVPSTMEQWNPGWKLQDIRFNLEEGEREEIEGNVTAARIRKAIGAKWDPATPDIRRAMVEMWIGIEDEDVCKQVALRQTEWGLTESEAEALSQVAFEGGRCRFSSTALRRLLPHLRQGRSLYDAIQQEFPEHGEQVALDEVPPLGEEIPNPLVRRALSETRRIVNAILTTYGKPSEIHIELARDLRRPLCEVREMIKQMRKREKMRREAERKLCEEHGIRKPTAREIEKYLLWKECNARCPYTNQDIRAEALFGSHPRFDVEHIIPWSRCLDDSFANKTLCEAKHNREQKRNRMPTEAYSREALEQIWERVRRFQGDYAAEKLRRFQMDPPPELHLIHRGDQLHATAYAARVAARELARLYPNQERAHRIWVSSGRATACLRDAWQLNQLLGRKDEKNRADHRHHMVDAVVVALTTPKIVQDLTHAAQNAVRARRFQGMEPPSGLHEALRQRLEKVIVSHRVERKVQGPLHEETFYGLIRSPETGEIRPVVRKRIDTLTLNEVKNIVDPNIRQIVLERCGEKDPKTVFKDPQQIPWLDFGSKRVRLRRVRIYVNQEPIEIGQNPPRRCFTGSNHHLEIFDCRGQWRCEVVSRWEAMRRLRAGEPVVRRQDAHGCPLVFSLARGDTVELKWKSGTLIAVVQKFSERDYTFRAHDDGRMDKEIREDRIRIRSDRRLQEVLVRKLSVDVLGRAYVSRE

SEQ ID NO: 471 - protein, 1088 aa, unidentified
  REGION 1..1088: note = Description of Unknown: uncultivated organism
  REGION 1..1088: note = MG4-49 effector
VLQPMRVPYVLGLDIGVQSVGWALAQLDEEGNPCGILRLGVRSFESSSGSEQEIEKGTDEPASRQRREKRLMRRQLFRRQQRLRRTARVLQQAGLLPQFSLEPASRDAAITQLDAQLRSQFIGSGNHVDAQLLPYRIRAAALDEVLPAYALGRAFYHLAQRRGFLSNKKASAKKDDEDKGKVKAGIAELTRQIEAADARTLGEFFARLDPHQQRIRSRWTSRKMYQQEFDAIWEAQAPHHPQTLTAELKARLYRAIFFQRPLKSQKGLIGRCSLEKGRRRAPLACLEAQRLRYWQKLNDLRLKDARRILNAIPEAERLIDWLPQEGQGRLTLYAKQLLAQEFETNEELTFNRIRQILGLKKKKDSDLDFTFNLEEGDEKKLPGNRTAAKLLKALGQRWQDMPEDQRQRLVDEILSFEKEEPLARRLEKAWGFSPSEAANVAAIDFEQGYHSFSRQAIRKILPHLQQGQALATIIKQLYKDTQPQATVWDRLPPLRDVFPQVNNPVVRRALTEVRKVVNAILRVYGKPQRVHIELARDLKKSRHERQQLSKGMRQQQKQREDARNWLQHEMGISNPTAHDILKYRLWIECEKLCPYTGKPISKEALFGSEPQFDMEHIIPHSRCLDDSFANKTLCELAENRAAKKNRTPYEAYGHDPQRWHEILQRVSRFQGDAAKAKLRRFQLTEIPADFANRHLNDTRYSSRLAAEYLSLLYGGRYDAQGNLRVQASTGTVTAQLRGQWGLNAILAELGRQLGVRDLDNDVEKARFDHRHHAVDALVIALTTPAMIKRFSDESQRARQYGRQFRCFFDPPWGTRAQFVADVRNAVLAINVSRRVDRRLKGPLHEETIYGKPKQCVDEKGKTIQVAHVRKPLESLSPNNVDHIVDPVIRELVKKKLQELGTTDPKKAFQAKDNHPYMKARDGRIIPIHKVRIRVPTETLMAIGHGPTLRHVKPGVNHHMEIVATLDAAGNEIRWEGITVSLFEALQRLRNKQPVVQRDHGPGKRFKFSLSGGEYLEFVENGRNKLVRVSVISGDDVEFRLHNDARPNTMLRGVKGARAGLVRSADALRKLKARKVLVDPLGNILPAND

SEQ ID NO: 472 - protein, 770 aa, unidentified
  REGION 1..770: note = Description of Unknown: uncultivated organism with predicted taxonomy: Solemya velesiana gill symbiont
  REGION 1..770: note = MG4-51 effector
MALVLGLDLGARSVGWALLEKQGDNWTRIVRAGVRVFEAGTEGNIEQGRDQSRGATRRIARLARRQIRRRRQRARALYRELASAGLLPEVTPSPGSPLAVLIQQAINDLDEHLRQKYAQESAVSQLPYFLRARALDHRLEPHELGRVIYHLGQRRGFKSNRKAEAREKADGDPLKEQKDKSVVYREIEELKAQIQDTGARTLGEYLSRVDPAVERIRHRYTQRRMYEEEFEAIWEAQRPHHAALTRDLKDRLWDILFKQRPLRATDDLVGECDWIPGEKRAPVWSMDYQRFRLLQAVNHLRVSENHSAPRPLSSEERLRLLDVLETQSKISFAQAKKILGLRKAEFTIEEGGETNLPGNAVAAQFYEKLGQDWIRLKPEDRQALVECVAVAESDEQLLEALKQQWGLSEDQARRIVQEVSLPSGYARLSLKAIRAVMPYLEEGWDVQRARIEAGIPLHRPVELHDLLPPLADSGVAVYNPAVKRVLTEMRKVVNAIITHYGKPDEIHLETARELRKSREEREKDSKRMREHEKEREAIIRRICEEIGIPETGISRDDVRKAMLWEECNGMCPYSGRSLGGFASLFSGNSPAQIEHIIPFSRSLDNSFVNLTLAHVSENAYKGDKTPWEAYGSNPEQWDRILQRVALFKGSYKKAKLNRFKMDSNAVGEFLEQFSSRALNDTRAAAVAAARYLALLFGGETVGGKLKILKITGQVTAHLRDAWDLNGLIPSIHRETRGEAADKEPKTPPLKSRDDHRHHAVDAVVVALCDQ

SEQ ID NO: 473 - protein, 1053 aa, unidentified
  REGION 1..1053: note = Description of Unknown: uncultivated organism
  REGION 1..1053: note = MG4-52 effector
MPYVLGLDIGARSVGWALLEKEGDSFTRILRAGVRVFEAGTEGDIEQGRDESRGATRRAKRLARRQIRRRRQRARALYRELSGAGLLPPITPVPGSPMAVLIQEAINRLDCELRRKYAGERAVNQLPYLLRARALDHRLEPHELGRALYHLGQRRGFKSNRKAESGKKAMEDSSKAGEEKSLVYRGIDDLKRQIREAGARTLGEYFATLDPAEQRIRNRYTHRSMYEEEFEAIWEAQRRHHAALTRELKDRLWQILFEQCPLRDTEDLVGECAWIPGEKRAPVWSLDYQRYRVLQTVNHLRVAENRSAPRPLTHEERWRLLEELEKKPKVTIAQAKKLLGLKKAEFTIEEGGEKELPGDKVAAQFYEKLGESWSRLNPEERRALVECVATAETDEQLSETLQQQWGLSADQANKVVREVHLPSGYAPLSLKAIRAVMPYLEQGMDVQRARLAAGIPLDHPVSVHALLPPVADSRVAVFNPAVKRALTEMRKVVNAIIRRYGKPDEIHLETARELRKSREERMKESRRMRDREKEREEIIRRIRDEVGIPEEKISRDDVLKGLLWQECEGRCPYCGESLGGFASLFGGNSPAQIEHIIPFSRSLDNSFVNLTLAHVSDNAYKGDRTPREAYGSDPERWDEILQWVEVFKGSYSKAKLNRFKMDESAVGELFEQFSSRALNDTRASAVAAARYLSLLYGGETVDGKRKILKVTGQVTAYLRDVWGLNGLIPSIHREARGEAEDGQAEARPVKSRDDHRHHAVDAVVVALCNQGWIQRLSEANRGALAARRRLFAPVEPPWVGFKEQLKDILKSMNISFRPDHRVTGALHKETFYTRIGKNEKGGDVVRVRVPVTGLGSKDVEAIADPAVRAIVRAKLEEVGGNAKKLENNWPLLPNRNGKPVPIKKVRVNLNRAVVSVGKGRWQRWAEPSETHHIEIYEVDEKGKKVWRGDVVSMREATERAARGTPITHRRGGVNTRYLFSVSKEDTLRLHGEHEGLWVVKKIAQKGQITLVSQYDARPEQGRTVFSPRLGGLQVHSAEKVVVLPIGDVVRCNE

SEQ ID NO: 474 - protein, 1055 aa, unidentified
  REGION 1..1055: note = Description of Unknown: uncultivated organism
  REGION 1..1055: note = MG4-53 effector
MSSYILGLDVGANSIGWAVVPLQNGAPAGVTRAGVRVFAAAVANLEEAQPETANAQRRLARLTRRRLDRLARRLEHLFRLLQRHGLLPPDPAPSPPASRLEAAHRRHDLLRRLDADLLSEWAARGARGEVPLPDPATLPHVLPYLLRARALDEKLSPYALGRALYHLGQRRGFLSNRRAGAKEEEGEVKKGIDSLAAEMAAAGARTLGEYFSRLDPQSARIRGRYTSRRMHEDEFALIWAAQCVHYPDRLTDDLKKQVHHAIFYQRPLRFRKDAIGPCQFELNRRRAPMALLACQRFRLLQSVNHLQVLLPDGRPRPLAESERQALIAALEEQGDLKFAQVRKLLALPRDTAFNLERGGEKKLPGNRTAAALRAVFGAARWAQLTPADRDRLVDDLRSIQQDEALVRRAMRVWGLDAAAAQQLAAVRLEQGYLNLSRQAVAKLLPLLEAGKPYATAVAEVYGPRPAPPPVDQLPLVSAALPHLTNPVVQRALTEVRRVVNALIRQYGKPECIRVELAREVKKNARQRHQIALRNRENERLRRAAAERIVREVGIANPSRADIEKVLLAEECNWHCPYTGKPISMAALFGEHPQFDVEHIIPFARSLDDSFMNKTLCDAEENRRVKRGRTPFEAYGSQPERWAEILRRVRAFKGSAADAKLERFRCESPPDATELCSRLLNDTRYAARAAAEYLGRLYGGQSDAGHRRRIQVATGQVTAFLRREWGLNAILGDGDEKSRDDHRHHAVDALCVALTDAGIVQALAAAAARAPAEGRRCFARLAPPWPSFLADARRAVLEITVSHRVRRKVSGPLHAESFYSRPHRDPQGRECRHIRKPVEALSPDEVAAIVDDKVRECVRAALRAKNLDPDAIRNSRAIAQAFASPADHPCLVARDGRRIPIHRVRIRKVVNAFTLGDRHVVTETNHHVEIFARLNPDGEVARWEGKVVTLLEAVQRLRAGLPIVNRDHGPDTRFLFSLALREAVRMDDGQGGRMLCVVVVVSQTQQGRIDLEFRRHHDARPGMQGERIRKTPNSLRLAHAEKVVVDPLGRVWPAHD

SEQ ID NO: 475 - protein, 813 aa, unidentified
  REGION 1..813: note = Description of Unknown: uncultivated organism
  REGION 1..813: note = MG4-54 effector
EFDAIWAAQSPHHPCLTTELRERLAAVLFSQRPLKDGAELVGSCSWDPSQKRAPAWSLEYQRFRVLQEVAHLRYADESQVWQPLDAEQRSKLVAALSTTRELDFRAIRKLLGFAGKVRFSVEAGGEKKLRGNVVAAEFIRAIGEEWNALGAERQAELVRQVALAEDDDKLREELITNWRLTPEQAGRLVADVRLPRGYAALSLKAIRAALPYLEQGMSVQQAREAAGYELMPPVPARDLLPPLASSGIEVFNPAVKRSLTELRKVVNAVVRKYGKPAEIHIEVARELRKSREERQKESRRMREREAERERMRQKIHKEVGIPLEQIREEDVRKGLLYEECCRTCPYTGKPLGGFAGLFSGTSPVQIEHIIPYSISLDDSFANLTLCLASENAVKHNRTPYQAYSADPGRWEDIQARVRAFRGPYAAEKLRRFLMDEQAAAALLQRFSARHLNDTRYAAVVAGRYLSLLYGGEVIDGKRKILKVTGQITAHLRRVWGMNEILGRAGVKSRDDHRQHAIDAALVAVADQRSVQRLSQAAARAELQHRRRLPALEPPFVGFKEGLQCLVQTMNISFRPDHRVSGPLHKETFYAVSGAPAAPTGTIRTRKPVFRLTEEDVDRIADPAVRCLVKQKLAGVGEARKLEKDWPVLPNAHGQPVPIKRVRLELRDAVRAVGQGHRRRWAEVGESHHVAVFEVTKRSRQGTRTAWEGEVVSLWEALERLRLGKPVIDRAGGPDRRFLFSLCKNDTLQLNGPRPGIYVVRKIRQNKQITLVPQHDARPEKQREQFSPTVSGLLEYAARKVVVTPLGELVESHE

SEQ ID NO: 476 - protein, 950 aa, unidentified
  REGION 1..950: note = Description of Unknown: uncultivated organism with predicted taxonomy: Flavobacterium hercynium
  REGION 1..950: note = MG4-55 effector
LKELDKSLRQQYADRGFHLSGIDAIRGIAYFLRARALDEPLEPYALGRAIYHLAMRRGFLSNRKAPMKKDEELGAVKQGISELEREMKQCQARTLGEYFYKVDPVYEKRIRKRWTARQMYKDEFDTILQQQVKLGAIRDDPKFFRKLRKAIFRQRPLKSQCGLIGPCQFEKNEKRAPWHNLLAQEFRLLQKINDLRLIDPSTREERPLNAEERKILYDWLMEHGEATFAELRKKLGFNPRDGQKFNLEAGDETRLKGNEVAARLIAVLGEERWRGITDQKKAQLISELNSDITEERLRYRAKKVWGITDPERVDKLVKLTLPKGYCSLSKKALKKLVPLMREGKDYVTAAREVYGDLQYKNQTFDRLPPFLKVDRTLRSPVVIRTLSETRKVVNEILRVFGRPDRIHIELAREMKQSRIQRQKRYQTMRDREKMRNQARQSLQAELGWDPNDIKGRDIEKWLLAEECGWVCPYSGKPINYHNLFGEKAEFDIEHIIPYSKSLDDSFVNKTLCHREWNQKKGNRTPAQAFKNTPEWETMLQRVRAFKPLHAVHMKKGESSKHNPKYDLFCMEEIPPDYVDNKLNDTRHAAKVAMGYLGLLYPKEERLKRVKAFAGGVTGELRKCWKLNSILGDPDSVEPKKNRADHRHHAIDALVLALATPGMVQYLSKAAEQQLACQRSIRGYQKFMEDPWPHFLEDVRKAVNAIVVSHRVDHRLQGRLHNDTLYSPPRVDENGKTYHVVRKPLDGNFKKVGDIEDPEVRRIVQEHLAAHDGDPKKAFNDPDKHPKINDIPIHAVRVRDYVKPEKIGKDFCPRYALTDSNHHMEIIEEKDKKGNPRWTAVVVSRFEAMQRKIRGEPIIQRNHGEGKIFVCSIATGDMALVDLEPTNPNVLVRVRGISFNEVSLVRANDARQKKEIVSSGDFIRKTPLMLQKMNFRKVSVSPIGEVYPAND

SEQ ID NO: 477 - protein, 878 aa, unidentified
  REGION 1..878: note = Description of Unknown: uncultivated organism with predicted taxonomy: Pseudoxanthobacter soli
  REGION 1..878: note = MG4-56 effector
SGAGLLPPITPVPGSPMAVLIQEAINRLDCELRRKYAGERAVSQMPYLLRARALDHRLEPYELGRAVYHLGQRRGFRSNRKAESGKKATEDPSKAKEEKSLVYRGIDDLKEQIRQAGARTLGEYFATLDPAEQRIRNRYTHRSMYEEEFEAIWEAQRPHHAALTRELKDRLREILFGQRPLRDTEDLVGECEWIPGEKRAPVWSLEYQRSRLLQTVNHLRVAENRCAPRPLTPEERQCLLEELEKKPKVTIAQAKRVLGLQRAEFTIEEGGQKDLPGDKVASQFHEILGQRWLELRPEQQRALVECVASAGSDEQLLEDLKQQWRLSDDQATQIVRNVHLPSGYASLSLKAIQKVMPYLEQGMDVQRARLEARIPLDRPVRVRELLPPLADSGVAVFNPAVKRALTEMRKVVNAVIRRYGKPDEIHLETARELRKSREERMNESKRMRGREKEREEILRRIRDEVGIPEEKISRDDVLKGLLWQECDGKCPYCGESLGGFASLYGGNSPAQIEHIIPFSRSLDNSFVNLTLAHVSDNNYKGDRTPWEAYGSNPERWDQILQRVSVFRGSYSKAKLNRFKMDENAVRELSEQFSSRALNDTRAASVAAARYLALLYGGEIVDGKRKILKITGQVTAYLRDVWGLNGLIPSIHREARGEAADAEAESRTLKSRDDHRHHAVDAVVVALCNQRWIQRLSEANRGALAARRRWFAPVEPPWVGFKEQLKDTLKSMNISFRPDHRVTGALHKETFYTRIGQNEKGGDVVRVRMPVTNLGSKEVEAIADPAVRQIVQAELKEVGGDARKLENNWPLLPNRHGKPVPIRKVRVNLNRAVVSVGKGPWQRWAEPSETHHIEIYEVTSRGKTAWSGDVVTMRDAIGR

SEQ ID NO: 478 - protein, 911 aa, unidentified
  REGION 1..911: note = Description of Unknown: uncultivated organism with predicted taxonomy: candidate division Zixibacteria bacterium CG_4_9_14_3_um_filter_46_8
  REGION 1..911: note = MG4-57 effector
MEGKKVGGYILGLDIGANSVGWAILSQKDGKPTGIVKTGVRVFEAATEGDISAGKDESRNKKRRQMRLQRRQAERRARRKRKVFNLLVKSGLLPPGHITGVINDIDKAAYAKYVASADKSARPILAHVVPYILRARALDHPLSREELGRALYHLCQRRGYKSNAKMQEDEKEKGEVKEGIGKLEQAIKASGARTLGEYFSKINPEEERIRQRWTSREMYENEFEQIWEAQKKHYPELLTDALKEKMRDAIFHQRKVTWDKNTIGDCELEPGQKRAVAALLICQRFRFLQRLNDLKIISPLGEIVDLTPEQRRALAEKLDVEGDLSWTKVRKILQLTKEHHFNLEKVSDKGLIGNRTAGKLHKIFGDKWLSFTEEQRNRIVDDVRSFEDRRALALRAMKTWGLTDEKAADLAAVAFEPDYFNLSLRAIRKLLPLLENGMPFATARDQVYGKPKPVEPVDALPVVNEALPALRNPVVARSLTQLRKVVNNIIREYGKPAAIRVELARDLKRSKKQRQTLTERIRSREKLREDARKRLENEKLVERPTRNDIDKVLLADECNWICPYTGRQIGWKTLFGPSPQFDIEHIIPFSRCLDDSLANKTLCDIEENRNVKRNRTPWEAYGSNPEKWGQILDRVRRFKGDDAILKLQRFQLKDVGDFEEFSSRQLNDTRYASVLAAKYLGALYGGAIDAEHTRRIQVSAGMVTAYLRNEYGLNPILGDGGEKSRDDHRHHAIDAICVALTDAATVKMLSDAASRALSERRRQFGHIDPPWPSFLADVRKHIDDLIVSHAVSRKVNGPLHEETLYTKPRIDKDGNQVVCVRKPLDALSESEAKQIVDPVIRKMVLDRIEKEGAPPKKVFADKSRHPVICGKNGTRIPVHSVRIAKTGSVIPIASGGRSRNIMPGSNHHMEI

SEQ ID NO: 479 - protein, 976 aa, unidentified
  REGION 1..976: note = Description of Unknown: uncultivated organism
  REGION 1..976: note = MG4-58 effector
SGAGLLPPITPVPGSPMAVLIQEAINRLDCELRRKYAGERAVNQLPYLLRARALDHRLEPHELGRALYHLGQRRGFKSNRKAESGKKAMEDSSKAGEEKSLVYRGIDDLKRQIREAGARTLGEYFATLDPAEQRIRNRYTHRSMYEEEFEAIWEAQRRHHAALTRELKDRLWQILFEQRPLRDTEDLVGECAWIPREKRAPVWSLDYQRYRVLQTVNHLRVAENRCAPRPLTHEERWRLLEELEKKPKVTVAQAKRVLGLQKAEFTVEEGGEKELPGDKVAAQFYEKLGESWSRLNPEERRALVECVATAESDEQLSETLQQQWGLSADQANKVVREVHLPSGYAPLSLKAIRAVMPYLEQGMDVQRARLAAGIPLDRPVPVHALLPPVADSRVAVFNPAVKRALTEMRKVVNAIIRRYGKPDEIHLETARELRKSREERMKESRRMRDREKEREEIIRRIRDEVGIPEEKISRDDVLKGLLWQECEGRCPYCGESLGGFASLFGGNPPAQIEHIIPFSRSLDNSFVNLTLAHVSDNAYKGDRTPREAYGSDPERWNEILQRVEVFKGSYSKAKLNRFKMDESAVGELFEQFSSRALNDTRASAVAAARYLSLLYGGETVDGKRKILKVTGQVTAYLRDVWGLNGLIPSIHREARGEAEDGQAEARPVKSRDDHRHHAVDAVVVALCNQGWIQRLSEANRGALAARRRLFAPVEPPWVGFKEQLKDILKSMNISFRPDHRVTGALHKETFYTRIGKNEKGGDVVRVRVPVTGLGSKDVEAIADPAVRAIVRAKLEEVGGNAKKLENNWPLLPNRNGKPVPIKKVRVNLNRAVVSVGKGRWQRWAEPSETHHIEIYEVTSRGKTAWSGDVVTMRDAIGRASRGEPVVRRDGGPNSRFLFSLAKEDTLRLQGEKPGIWVVKKIRANTQMMLVPQYDARKEKDSSNGRESFSPTPGGLQKYSAEKVLVLPIGDVVRCNE

SEQ ID NO: 480 - protein, 1057 aa, unidentified
  REGION 1..1057: note = Description of Unknown: uncultivated organism with predicted taxonomy: Proteobacteria
  REGION 1..1057: note = MG4-60 effector
MPYVLGLDIGARSVGWALLEKEGDSFTRILRAGVRVFEAGTEGDIEQGRDESRGATRRAKRLARRQIRRRRQRARALYRELSGAGLLPPITPVPGSPMAVLIQEAINRLDCELRRKYAGERAVNQLPYLLRARALDHRLEPHELGRALYHLGQRRGFKSNRKAESGKKAMEDSSKAGEEKSLVYRGIDDLKRQIREAGARTLGEYFATLDPAEQRIRTRYTHRSMYEEEFEAIWEAQRRHHAALTRELKDRLWQILFEQRPLRDTEDLVGECAWIPGEKRAPVWSLDYQRYRVLQTVNHLRVAENRCAPRPLTHEERWRLLEELEKKPKVTIAQAKKLLGLKKAEFTIEEGGEKELPGDKVAAQFYEKLGESWSRLNPEERRALVECVATAETDEQLSETLQQQWGLSADQANKVVREVHLPSGYAPLSLKAIRAVMPYLEQGMDVQRARLAAGIPLDRPVSVHALLPPVADSRVAVFNPAVKRALTEMRKVVNAIIRRYGKPDEIHLETARELRKSREERMKESRRMRDREKEREEIIRRIRDEVGIPEEKISRDDVLKGLLWQECEGRCPYCGESLGGFASLFGGNSPAQIEHIIPFSRSLDNSFVNLTLAHVSDNAYKGDRTPREAYGSDPERWDEILQRVEVFKGSYSKAKLNRFKMDESAVGELFEQFSSRALNDTRASAVAAARYLSLLYGGETVDGKRKILKVTGQVTAYLRDVWGLNGLIPSIHREARGEAEDGQAEARPVKSRDDHRHHAVDAVVVALCNQGWIQRLSEANRGALAARRRLFAPVEPPWVGFKEQLKDILKSMNISFRPDHRVTGALHKETFYTRIGKNEKGGDVVRVRVPVTGLGSKDVEAIADPAVRAIVRAKLEEVGGNAKKLENNWPLLPNRNGKPVPIKKVRVNLNRAVVSVGKGRWQRWAEPSETHHIEIYEVTSRGKTAWSGDVVTMRDAIGRASRGEPVVRRDGGPNSRFLFSLAKEDTLRLQGEKPGIWVVKKIRANTQMMLVPQYDARKEKDSSNGRESFSPTPGGLQKYSAEKVLVLPIGDVVRCNE

SEQ ID NO: 481 - protein, 1111 aa, unidentified; identical to SEQ ID NO: 464
  REGION 1..1111: note = Description of Unknown: uncultivated organism with predicted taxonomy: Thermogutta terrifontis
  REGION 1..1111: note = MG4-61 effector

SEQ ID NO: 482 - protein, 1054 aa, unidentified
  REGION 1..1054: note = Description of Unknown: uncultivated organism
  REGION 1..1054: note = MG4-62 effector
MSTPSNVPYVLGLDLGVASIGWAVLDTDAKGRPTSIRAAGSHLFEAGVGGGSQSTPEMAMARGKEESKAAPRREARAMRRQTMRRARRKKKLLGALIRHGLLPEGDIRTPAAIDAYVKALDAALRATWCPPGSSHVEYQNMAYRLRAEAAQRPLDAHAVGRALYHLAQRRGFESNRKTPKRDDEDTSDFQNKLDDLGDAIRSHTTQTLGAYLASLDPDEKRLRGRWTHRSMYEQEFETIWDAQAGALGLDGGAKQDIHHAIFYQRPLKDQSHLVGRCSLVPGKKRAPIAMRIAQDFRVLERVNHLRIVHDDHSERPLSKDERDNLLAALRREEKLTMHQAKKAAGLPTKHVKFSIEAGGETKLVGHRTDAKLCKIFGDRWDEMSEQEKDTVVEDVRCVRLPDTLRRIGEVRWGLSREKAQELADVQLEEGHSAHCLRALRKLVARMDADGLAYSTARKDEYPASFQSVEPMDLLPPVDAWEKDLRNPAVSRALTELRKLVNAIIDRHGKPVRIHLELARDLKQSRKKRKTASDRMRTREKEREKAAQRIITQPGLGIQHPKRWQIEKVLLAEECNWRCPFTDRGFCMADLLGSTPQVDVEHIWPYSRSMDDSFLNKTLCYHEENRNRKRGHTPMEAYGPTPEQYEAILDRVRRFKGDHFAVREKLRRFTDALDEDFPLRHLQDTRYITTLARDFVSLLYGKDASAIVTPSGPLTAWLRRGWHLNSVLGFTDEKEREDHRHHAVDAIVIALATRSNIKRLSDAAERVEREGREKAFGTVDPPWDGFEHEVRSIIDGVVVSHRQSQRVRGPLHKDTIYSPKIDGKHRVRKELHKLTAKEVQSGKIVDTRALAAIQAKLAELAKTDPALADPAKAFKAPENAPLVPGPNGSKVRLRRVRIDTGDKPTRFGGAKGKGSARYAKNELNHHVAFYDQPLPGGGVERTAEVVPLHEAMRRHASGEPIVDRTPRGKKGEYAFAFSLAKNGYVWYRQKNSDEPVLCMVDGIADGDIELKRHTDGRGRPQRGKDRIRLRSKSIREGLFEKAHVTYLGEVRRAGG

SEQ ID NO: 483 - protein, 787 aa, unidentified
  REGION 1..787: note = Description of Unknown: uncultivated organism with predicted taxonomy: Planctomyces sp. SH-PL14
  REGION 1..787: note = MG4-63 effector
PAGPASITQAKTAVNKLSDADKKDVAIVAITLDPEGDTRTDQWKRIRGRRTHRAMYVEEFEHIVQRQADFHPVLKDKAFVRRLSHAIFDQRPLKSQASLIGVCDLVPGRRRAAIASLPYQRFRLLQKLNDLSYVDHDGQKKRPTENQIRPLREKLQTEGDLTWATVGRLLGLDRKSKETGLPRLSHEEGGDKKLIGDRTSAKLRRVMAQKLDALSVAEQTAIIDEILSYGDVEEKLAERLRKAWQLTDAEAAEVAALRFEPGYGSVSRTAIARLMPHLEQGTPYATARKIEFGEVEESVPWPLLPPQGDNAKLWKENKKPDRLVYQSFSNPTVARCLSEMRKVVNALIRRYGKPAYIRVELARDLKNSRSRRADLTTRRNRNQARRERAKEAIEKECNNSRPSRFDIEKWLLAEECGFQCPYTGQSIPRHRVLSAEFEVEHIVPFSRSLDNSFTNKTLSHRDANAKKGNRTPMEAFGQPEEKWEQILARVKRFDGPFARRKLDLFQQRTPPEADFYERQLSETRYIARQAADYLGLLYGGRIEQRAGDEVGRRRVLVTPGRATALLRNGWQLASVTGGLKNRQDHRHHAIDALIVGLTQDGFLKQLSEAAARADELQLTRLTTEMDSPWETFLDDVGKGYERIHVSTRPTRKLNGPLHKETVFSKPHEASGSAKVFHAVRRPLQLMTKSEVGNIVDKRVREAVLEHLDRHDGDLTAAFGDPNNHPQLPCKDGRTIPIHRARVQRREKPWPIGKKSSKRYVVPGANHRLEIIARLNEEGEEIRWLGNI

SEQ ID NO: 484 - protein, 1054 aa, unidentified; identical to SEQ ID NO: 482
  REGION 1..1054: note = Description of Unknown: uncultivated organism
  REGION 1..1054: note = MG4-64 effector

SEQ ID NO: 485 - protein, 1041 aa, unidentified
  REGION 1..1041: note = Description of Unknown: uncultivated organism
  REGION 1..1041: note = MG4-65 effector
MPEQPKMTYVLGLDLGAESLGWAILETRDGEPVRIERTGVHTFEAGVEGDIESGKDESRAKARRDARLPRRQLWRRAARRRKVLHILQRHGLLPPGEARTPEQIHDLLLKLDADLRAAYLPAGDEVAAHLLPYRLRAKALDEKLEPWALGRVFYHLAQRRGFLSNRRSPERKDEDEGKVKAAIGELAADMKARGARTLGEYLAGLDPRCQGVRRRWTARTMFLEEFDRIWAAQAPHHPCLTEELRGQLRRALFFQRPLKSQKALVGRCELIPDRRRVALALPIAQRFRLLQKVNDLKVREPEGTERFLTPQEREKLARELDDKGDLKFDKVRKCLGLPRGVTFNLQEGGEEKLPGNRTYAKLKAVLGARWGGLSAADREQIVVELLSFQKPEALARRLMKVWNLDEPSATKLAEVRLEQGYARHCRKAIARLLPLMESGVPYATARKEVFPESFAAGTPVDRLPPVTDVLKDLRNPAVCRALTELRKVVNAIVRRYGKPECIRIELANDLKRPRKQREEISKRNRGRQKDREEAAEAIRSALPGLEPRRADIEKWLLAEECNWRCPYTGRSINAAALLGSTPQFDVEHIWPMSRSLDNTFANKTLCYHEENRARKGNRTPLEAYGSDPQRWEEILQSVRRFNGPLAWEKLRRFMAREIPQDFTDRQLQDTRYACRLAADYLGRLYGGRVDAQGKMRIEVRPGGLTAHVRNELMLHAILDDGGAKTRADHRHHAVDALAVGLTSQSMVQQLQTAAGRALQAGRRLFAPVPEPWTGFLEDARRSIGQIIVSRRPDRKVAGKLHAETFYSKPIPGADGDVRHVRKELRKLTLGEIQGDRIVDPVIRRLVQERHRQLGGGKPDSVFADPASHPVLRTRDGREVPIHKVRIRSKEKPWPIASGSRLRYVVAGGGTNHHLAIVARPGRRGRGEYWEDHIVSRYTAQQRLARGEPVIQKDWGPGRRLVMVLMPNDFIVMPDDRGVQQVYRVLSISEGDTELRLHCDARRAEDLKKARERVRVSGEKLRKLGGRRVEVSLLGELIGAHD

SEQ ID NO: 486 - protein, 1088 aa, unidentified
  REGION 1..1088: note = Description of Unknown: uncultivated organism
  REGION 1..1088: note = MG4-66 effector
MLQPLQVPYILGLDIGVQSIGWALVRLDEEGNPCGILRLGVRSFESSSGSEQEIEKGTDEPASRQRREKRLMRRQLFRRQQRLRRTARVLQQAGLLPPFPLQPASRDAAITQLDAQLRSQFIDSGNHVDAQLLPYRIRAAALDQPLPAYALGRAFYHLAQRRGFLSNKKAGGKKDEEEKGKVKAGIAELAKQIEAAGARTLGEFFARLDPHQQRIRSRWTSRKMYQQEFDAIWAAQEPHHPQILTAELKAKLYRAIFFQRPLKSQKGLIGRCSLEKGRRRAPLACLEAQRLRYWQKLNDMRLKDARRILNAIPEAEGLIDWLPQEGQGRLSLYAKQLLAQHLETSEELTFNQIRHILGLKKKKNSDLDFTFNLEEGDEKKLLGNRTAARLLKALGQRWQDMPEDQRQRLVDEILSFEKEEPLARRLEKAWGFTPAEAANVAALDFEQGYHSFSRQAIRKILPHLQQGQSLASIIKQLYKDTQPQATAWDRLPPLRDVFPHVNNPVVRRALTEVRKVVNAILRVYGKPQQVHIELARDLKKSRYERQQLFKGMRQQQKQREEAKSWLQCQMGITNPTAHDILKYRLWIECNQQCPYTGKPISKEALFGREPQFDVEHIIPFSRCLDNSFTNKTLCEIAENRNVKKNRTPYEAYGHDPQRWHEILQRVSRFQGDAAKAKLRRFQLTEIPADFANRHLNDTRYSSRLAAEYLALLYGGRSDAQGNLRVRAITGAVTAQLRDQWGLNAVLAELGRQLGVRDLDDNVEKARFDHRHHAVDALVIALTTPGMVKRFSDESQRARQYGRQLRCFFDPPWGTRTEFVADVRNAVLAINVSRRLDRRLKGPLHEETIYGKPKQYVDEKGKTIQVAHVRKPLESLSPKNVDDIVDPVIRELVKKKLQDLNTTDPKKAFQKKENHPYMIARDGRIIPIHKVRIRVTTETIMTVGHGPTLRHVKPGTNHHMEIVATLDAAGNEIRWEGITVSLFEALHRLRNKQPVVQRDHGPGKRFKFSLAGGEYLEFVENGQKKLVRVTTVYHSNVEFRLHNDARPITMLLGVKGARAGLGHSVDALRKLKARKVLVDPLGNILPAND

SEQ ID NO: 487 - protein, 1042 aa, unidentified
  REGION 1..1042: note = Description of Unknown: uncultivated organism with predicted taxonomy: Proteobacteria
  REGION 1..1042: note = MG4-67 effector
MSISDLSPSYILGIDLGAESIGWLLLDVDGDRPTAIRRAGTHCFDAAVEGDLESGKDESKAKARRDARSPRRQHWRRARRRRRVLRTLQQAGLIPPGPLASPIDIHELILRLDQALREKFIPADDRVAAHLLPYRLRAKALDERLEPFEVGRALYHLAQRRGFLSNRKAGKKGDDEGMVKAAISELSDRMTAAGARTLGEYFSGMDPEEERIRKRWTSRQMYLDEFEKIWTKQAEFHPQMTDEVKAQIHAAIFFQRPLKPQTHLIGVCDCDPPHRRAPVALRLAQRFRLLQKVNDLEVLEPTGFPRPLSSDERAKLIAALEQSGDLTFAKIRGKSILALPKETSFNLEKGGEKKLPGHRTDAKLAEIFGDKWPRLSEAERDQIVEDILTFEKSEALAARAQRAYGLDREAALRLAELELEPGYAMHCRKVLRQLVAKMEGGTRYAAARRELYPDQFQAKPAVDLLPPVKDALRNLRNPAVCRALTELRKLINAIIRRYGKPAEIHIELARDLKRSRKDRQELSKVIRENEKLREKAKERILRELGDQQPTRADIEKVLLAEECGWECPYTGKRFGMQELLGQNPQFDVEHIIPLSRSLDNSFGNKTLCYHEENRNHKRNRTPWEAYHADEQRWHQILERVRRFQGASARGKMRRFLMEAIPDDFTSRQLNDTRYASRLAAEYVGLLYGGRADAEHRQRVYVCTGGTTAFLRNEWKLNTILGDGGPKTRDDHRHHAVDALVIALTGPATVKMLADAADNPWQHRRRLFAPIQEPWVGFLDQAREAILRINVSHRVNRRVAGPLHDESIYSPPQRGVGSSPKVVPSYHIRKPLASLSIHEVEDIVDPIIRARVKAVLDEKGGDPKKVFSVAANLPALRTRDGRTIPIRKARIRKSQNMVAIGKGPTQRYVAPGSNHHMAIVAKVDSEGNDREWEGVLVSRLEAAERARRRVPVVQREWGEGRVFRFSLAPGEMFTLEDGNGKGLYIVRSISQNRVEFVKANDARKKVDIKAAKHWLTHPPSVLFRKRCQKVSVGYLGDIVPAND

SEQ ID NO: 488 - protein, 1061 aa, unidentified
  REGION 1..1061: note = Description of Unknown: uncultivated organism with predicted taxonomy: Thermogutta terrifontis
  REGION 1..1061: note = MG4-68 effector
MSAECQVRANEKNYVLGIDLGVLSLGWAVVEYAGDKPVGILKTGARIWEYSDASTLTVQKGQETPPGQERRQARQQRRQIFRRAQRLRRTCSVLQAMGLLDPGRRNSRARKQLWETVDQQAKEWLKSNIPGLADDPQLDHKFVYHLRAAALDHPLPKILLARVFFHLAQRRGFQSNRRVVSRSEEEGEVKKAISLLEHEISESGCRTLGEYFATLDPYTTRIRGRWTSRKMYQDEFERIWSAQIAINPGILDLSQKSRLFKAIFYQRPLKSQKRLVGRCSLEVIVRRGPDGPREVRPRQAALASLEAQRIRYMQRINDLEFTDPEGERRTPTQLEREQLYQLAETVEEISFSQIRKALGIPTGKKGAEWECNLERGGETKIPGNKTAARLRKILGNKTWDGFSESDQKKLVDTILAYLSPEALQSHLENVWKFDSDTARQLSNIELEQGYHSFSRRAIRKLLPLMHQGKRLNEAIKAVYGHTGRLRSVQERLPPVWKVMPELRNPLLVRALTELRKVINNLIRKFGKPQYIRIELGRELKLGKKRRQELAKEMRKREAERERAAKVIEETLHRKARPNEILKYLLADECDWECPYTGKKISVLTLLGDQPQFDVEHIWPFDRTLDDSFGNKTLCYHEENRQVKGNKTPFEAYSDSPDRWREILERVKRFKGPFAKEKLRRFLAADIPQDFPMRHLSDTRWITTAAADYLGYLYGGRIDSEGRQRVFTVTGPLTALIRRGWNLDGILGGPEKNRFDYRQHAIDAIVIALIDQAIVQQISLLSSRLWGTDRPTAVQLPEPWPSFYHDAKNAILNIVVSHRISRRLSGALHEQTHYAPPDNNGRTKIRKPLAALSAKEVENIVDDTIRKYVQHALANAEKKSPKEFFGNPENLPVLKGKNNHVAVVKSVRVWVSAKPVAVGNGDRVRYVKPGNNHHIEIYAIVDEHGNPVKYDGRCVTLLEAVQRKRRGEPVVCRNHGPNTRFLFSLSKNECIEWTNENGEKELLRVVGIADNDIEFRLLYDARPSNLVREAKDRIRGGYSKLFERRARKVLVTPLGEVLPAHD

SEQ ID NO: 489 - protein, 1059 aa, unidentified
  REGION 1..1059: note = Description of Unknown: uncultivated organism with predicted taxonomy: Planctomycetes bacterium
  REGION 1..1059: note = MG4-70 effector
MALVLGLDLGARSVGWALLEKQGDNWTRIVRAGVRVFEAGTEGNIEQGRDQSRGATRRIARLARRQIRRRRQRARALYRELASAGLLPEVTPSPGSPLAVLIQQAINDLDEHLRQKYAQESAVSQLPYFLRARALDHRLEPHELGRVIYHLGQRRGFKSNRKAEAREKADGDPLKEQKDKSVVYREIEELKAQIQDTGARTLGEYLSRVDPAVERIRHRYTQRRMYEEEFEAIWEAQRPHHAALTRELKDRLWDILFKQRPLRATDDLVGECDWIPGEKRAPVWSMDYQRFRLLQAVNHLRVSENHSAPRPLSSEERLRLLDVLETQSKISFAQAKKILGLRKAEFTIEEGGEKNLPGNAVAAQFYEKLGQDWIRLKPEDRQALVECVAVAESDEQLLEALKQQWGLSEDQARRIVQEVSLPSGYARLSLKAIRAVMPYLEEGWDVQRARIEAGIPLHRPVELHDLLPPLADSGVAVYNPAVKRVLTEMRKVVNAIITHYGKPDEIHLETARELRKSREEREKDSKRMREHEKEREAIIRRICEEIGIPETRISRDDVRKAMLWEECNGMCPYSGRSLGGFASLFSGNSPAQIEHIIPFSRSLDNSFVNLTLAHVSENAYKGDKTPWEAYGANPEQWDRILQRVALFKGSYKKAKLNRFKMDSNAVGEFLEQFSSRALNDTRAAAVAAARYLALLFGGETVGGKLKILKITGQVTAHLRDAWDLNGLIPSIHRETRGEAADKEPKTPPLKSRDDHRHHAVDAVVVALCDQGSIHRLSEASKTAVAARRRLLAPMAPPWVGFREQLKDILKSMNISFRPDHRVTGALHKETFYTKLGQNQKGGDMVRLRVPVTSLSSKDIENIADPTVREIVRAKLEEVGGDAAKLEKNWPLLPNRNGNPVPIKKVRVNLNRAVVSVGKGRWQRWAEPSETHHIEIYEVTANGKTTWSGDVVTMRDAISRASRGELVVRRSREPNSRFLFSLAKEDMLRLQGDKSGIWVVKKIKSNTQIVLVPQHDARKEKEKDKSNGRETLNPTASGLRKYYAEKVVVLPIGDVVVCHE

SEQ ID NO: 490 - protein, 1127 aa, unidentified
  REGION 1..1127: note = Description of Unknown: uncultivated organism
  REGION 1..1127: note = MG4-71 effector
MFSRANSVSDNDCSSVNAPAAPRDTASEAQPQPSQPSAGTNVPYVLGLDIGATSVGWAVLDLDAQGEPCCVRAMGARCFEAGVDGDIEHGKDSSRAVARRQARMARRILRRRARRLKKVFHLLQRHGLLPAGPSRTPEERHRLLADLDRQLFPKYAPGGDRVAAHVVCYRLRAAALDRALEDHELGRALYHLAQRRGFLSNRRDDRRASEKGEKSQDTKVIEKEIASLKEQITASGARTLGEYLSRIDPEQQRIRKRWTSRQMYIDEFEAIWSAQSQHRPGRLTEALKRELRQAIFHQRPLKPQTQLIGRCELEPPRHPGALPPRRAPLALPVAQRFRLLQKVNDLQVIEPDGRIRPLTAEERNKLLQALSEQARMEFDDVRKLLGLSAPRKRKDKATGQQICTPGHRFNLEEGGETSIPGDTTTARLLPVLGDKWRTMPEPLRESLVRDLLDFNYPAALAEHLQRVHRFDRHEAEALSEISLEDGYAPYCRMALRKLVARMENGTPFATARKLEYPQSFAAKPPCELLPPVRRAVPDLRNPAVIRALTEVRRVVNALIRRWGKPEIIRVELARDLKKPRKEREKAWKGNREREKERKAAADRLLKEAGITNPSPADIEKVLLMEECGGICPYTGRPITIPALFGDSPQFDVEHIIPFSVSLDDSFVNKTLCWHEENRHHKRNKTPYEAYSGNRERYEEILRRVSRFSGRFRKEKLRRFQMTLADVKAEYGDDFTARHLTDTRYASRLAADYLGLLYGGTVDAAGRRRVQTSSGTATWYLRSEWDMNAVIPGLSGSPTGSASGTFIEKVRTDHRHHAIDAVAIALTSARVVKMLADAARNPEQHRRRRFAPVPPPWPNFKDEVSAAAEKIIVSHRVDRRVAGPLHAETNYSPPIVHENREYRHRRVPLSSITRSQIAQIVDDVIRQLVEQKVGSAGDPAKVFSDPRNLPVLRSRDGTRCIPIKKVRVREHVAATTVGAGPRQRHVVSGKDTLHHTVIVARQTPSGEVWEDNPVDRLEVHRRLRNGQPVIQTDWGSDARYVFHLCKNDCIEMDVESGNPSAGRQIYVVRSISKRDIAVRLHYDARTLEQIVRAKERGKFRISSADLLRRRNARKVMVSPLGEVLPCRE

SEQ ID NO: 491 - protein, 1069 aa, unidentified
  REGION 1..1069: note = Description of Unknown: uncultivated organism with predicted taxonomy: Acidobacteria
  REGION 1..1069: note = MG4-72 effector
VSEHLDYVLGIDLGSNSLGWAVIGLIDGEPAQLVRAGVRVFDAGMEGDLESGREESRNLKRREARLHRRLLWRRQRRLTKLFNLLQRFDLLPPAPSISEHLPNGHRRPITPEQRQDLLNQLDRRILSSAWFQTKVNSGAFPEPEHTMPYILRAAALDEPLEPHMFGRALYHLGQRRGFLSNRKQAPKKNDDEGAVKEGIAELRKAMQTSGARTLGEYFSRLNPSTERIRCRWTARDMYEKEFNAIWDAQAPHHADLLTPERKKQIYDAIFFQRPLWLDPGTVGNCELEPGEKRAPAYLLVSQRFRLLQTVNNLRVLPPDDVDMPLTPTDRKKLVDALEMKGDLTFKEISKLLKLEKGYKFNLESGGEKRIKGNRTNADFYAVFGERWLAMSPEERDRAVEYVHSFQKAEKLKDAARKKYDLTEEQAEQLAGISLEADYINLSRKAIEKFLPLLEEGVTYGEARKKLYPESFEAREAMPLLPPVETALAQIRNPAVMRSLTELRKVVNALVRRYGKPSCVHLELARDLKKSKKQRQAISENNRRNESARAKAAEAIIKADVGISAPSPDDIRKVLLAEECHWTCPYTGRSISMRSLLGPEPQFDIEHIVPFSRSMDNSFQNLTLCYVPENRSVKGNRTPWQAYHGDPERYQAILDRVRKFAGDRQTVAAKLRRFTMTDDELEGFLEDFRNRQLNDTAYATSLAAKYLGLLYGGVNDADGRKRVQATSGQATAYFRSLWKLNSILNDGPTSDGGAVPKSRDDHRHHAVDAVVIGLTDAAMIKRLSDAAQRAQLEHRRRFASLEAPWPNFVDSVRTEIDRIIVSHRVSKKVSGALHEETIYSRPMGKDGEVRVRKPLDSLSRPEVEKIADEGVRKLVQQKLEQLGGIEPKKAFPNPENLPRFPSSGVVIKNVRITKPLPIFTLSEGRRARHVTSESNHHVEIYAELDEHGNEKKWGGEVVSMAEAYQRLKTGKPIVQRDHGPLVKFKFSLAPGEVVECEGKDGMRGLFVMRKASQLTSGQLQIGFAPLADARKAREIQTSRAWLWASPNTLGERNPRKVVVSPIGEVTETHD

SEQ ID NO: 492 - protein, 824 aa, unidentified
  REGION 1..824: note = Description of Unknown: uncultivated organism
  REGION 1..824: note = MG4-73 effector
MFSRANSVSDNDCSSVNAPAAPRDTASEAQPQPSQPSAGTNVPYVLGLDIGATSVGWAVLDLDAQGEPCCVRAMGARCFEAGVDGDIEHGKDSSRAVARRQARMARRILRRRARRLKKVFHLLQRHGLLPAGPSRTPEERHRLLADLDRQLFPKYAPGGDRVAAHVVCYRLRAAALDRALEDHELGRALYHLAQRRGFLSNRRDDRRASEKGEKSQDTKVIEKEIASLKEQITASGARTLGEYLSRIDPEQQRIRKRWTSRQMYIDEFEAIWSAQSQHRPGRLTEALKRELRQAIFHQRPLKPQTQLIGRCELEPPRHPGALPPRRAPLALPVAQRFRLLQKVNDLQVIEPDGRIRPLTAEERNKLLQALSEQARMEFDDVRKLLGLSAPRKRKDKATGQQICTPGHRFNLEEGGETSIPGDTTTARLLPVLGDKWRTMPEPLRESLVRDLLDFNYPAALAEHLQRVHRFDRHEAEALSEISLEDGYAPYCRMALRKLVARMENGTPFATARKLEYPQSFAAKPPCELLPPVRRAVPDLRNPAVMRALTEVRRVVNALIRRWGKPEIIRVELARDLKKPRKEREKAWKGNREREKERKAAADRLLKEAGITNPSPADIEKVLLMEECGGICPYTGRPITIPALFGDSPQFDVEHIIPFSVSLDDSFVNKTLCWHEENRHHKRNKTPYEAYSGNRERYEEILRRVSRFSGRFRKEKLRRFQMTLADVKAEYGDDFTARHLTDTRYASRLAADYLGLLYGGTVDAAGRRRVQTSSGTATWYLRSEWDMNAVIPGLSGSPTGSASGTFIEKVRTDHRHHAIDAVAIA

SEQ ID NO: 493 - protein, 1069 aa, unidentified
  REGION 1..1069: note = Description of Unknown: uncultivated organism with predicted taxonomy: Acidobacteria
  REGION 1..1069: note = MG4-74 effector
VSEHLDYVLGIDLGSNSLGWAVIGLIDGEPAQLVRAGVRVFDAGMEGDLESGREESRNLKRREARLHRRLLWRRQRRLTKLFNLLQRFDLLPPAPSISEHLPNGHRRPITPEQRQDLLNQLDRRILSSAWFQTKVNSGAFPEPEHTMPYILRAAALDEPLEPHMFGRALYHLGQRRGFLSNRKQAPKKNDDEGAVKEGIAELRKAMQTSGARTLGEYFSRLNPSTERIRCRWTARDMYEKEFNAIWDAQAPHHADLLTPERKKQIYDAIFFQRPLWLDPGTVGNCELEPGEKRAPAYLLVSQRFRLLQTVNNLRVLPPDDVDMPLTPTDRKKLVDALEMKGDLTFKEISKLLKLEKGYKFNLESGGEKRIKGNRTNADFYAVFGERWLAMSPEERDRAVEYVHSFQKAEKLKDAARKKYDLTEEQAEQLAGISLEADYINLSRKAIEKFLPLLEEGVTYGEARKKLYPESFEAREAMPLLPPVETALAQIRNPAVMRSLTELRKVVNALVRRYGKPSCVHLELARDLKKSKKQRQAISENNRRNESARAKAAEAIIKADVGISAPSPDDIRKVLLAEECHWTCPYTGRSISMRSLLGPEPQFDIEHIVPFSRSMDNSFQNLTLCYVPENRSVKGNRTPWQAYHGDPERYQAILDRVRKFAGDRQTVAAKLRRFTMTDDELEGFLEDFRNRQLNDTAYATSLAAKYLGLLYGGVNDADGRKRVQATSGQATAYFRSLWKLNSILNDGPTSDGGAVPKSRDDHRHHAVDAVVIGLTDAAMIKRLSDAAQRAQLEHRRRFASLEAPCPNFVDSVRTEIDRIIVSHRVSKKVSGALHEETIYSRPMGKDGEVRVRKPLDSLSRPEVEKIADEGVRKLVQQKLEQLGGIEPKKAFPNPENLPRFPSSGVVIKNVRITKPLPIFTLSEGRRARHVTSESNHHVEIYAELDEHGNEKKWGGEVVSMAEAYQRLKTGKPIVQRDHGPLVKFKFSLAPGEVVECEGKDGMRGLFVMRKASQLTSGQLQIGFAPLADARKAREIQTSRAWLWASPNTLGERNPRKVVVSPIGEVTETHD

SEQ ID NO: 494 - protein, 1059 aa, unidentified
  REGION 1..1059: note = Description of Unknown: uncultivated organism with predicted taxonomy: Proteobacteria
  REGION 1..1059: note = MG4-76 effector
MALVLGLDLGARSVGWALLEKQGDNWTRIVRAGVRVFEAGTEGNIEQGRDQSRGATRRIARLARRQIRRRRQRSRALYRELASAGLLPEVTPSPGSPLAVLIQQAINDLDEHLRQKYAQESAVSQLPYFLRARALDHRLEPHELGRVIYHLGQRRGFKSNRKAEAREKADGDPLKEQKDKSVVYREIEELKAQIQDTGARTLGEYLSRVDPAVERIRHRYTQRRMYEEEFEAIWEAQRPHHAALTRELKDRLWDILFKQRPLRATDDLVGECDWIPGEKRAPVWSMDYQRFRLLQAVNHLRVSENHSAPRPLSSEERLRLLDVLETQSKISFAQAKKILGLRKAEFTIEEGGEKNLPGNAVAAQFYEKLGQDWIRLKPEDRQALVECVAVAESDEQLLEALKQQWGLSEDQARRIVQEVSLPSGYARLSLKAIRAVMPYLEEGWDVQRARIEAGIPLHRPVELHDLLPPLADSGVAVYNPAVKRVLTEMRKVVNAIITHYGKPDEIHLETARELRKSREEREKDSKRMREHEKEREAIIRRICEEIGIPETRISRDDVRKAMLWEECNGMCPYSGRSLGGFASLFSGNSPAQIEHIIPFSRSLDNSFVNLTLAHVSENAYKGDKTPWEAYGANPEQWDRILQRVALFKGSYKKAKLNRFKMDSNAVGEFLEQFSSRALNDTRAAAVAAARYLALLFGGETVGGKLKILKITGQVTAHLRDAWDLNGLIPSIHRETRGEAADKEPKTPPLKSRDDHRHHAVDAVVVALCDQGSIHRLSEASKTAVAARRRLLAPMAPPWVGFREQLKDILKSMNISFRPDHRVTGALHKETFYTKLGQNQKGGDMVRLRVPVTSLSSKDIENIADPTVREIVRAKLEEVGGDAAKLEKNWPLLPNRNGNPVPIKKVRVNLNRAVVSVGKGRWQRWAEPSETHHIEIYEVTANGKTTWSGDVVTMRDAISRASRGELVVRRSREPNSRFLFSLAKEDMLRLQGDKSGIWVVKKIKSNTQIVLVPQHDARKEKEKDKSNGRETLNPTASGLRKYYAEKVVVLPIGDVVVCHE

SEQ ID NO: 495 - protein, 1057 aa, unidentified
  REGION 1..1057: note = Description of Unknown: uncultivated organism
  REGION 1..1057: note = MG4-77 effector
MALVLGLDIGARSVGWALLEKQGDEWKRIVRAGVRVFEAGTEGDIESGRDHSRGATRRIKRLARRQIRRRRQRARALYCALAEAGLLPEISPQPGSPMSLLIQQQINRLDGQFRIKYAAHPAVQQLPYLLRARALDQPLELFELGRVIYHLGQRRGFKSNRKAESRKAGAGDHSRAKEEKGKVYEGIDALRTLIDQAGARTLGEYFSRIDPAKQRIRGRYTHRSMYEQEFDAIWAAQKPHHPALTQELKDRLWNILFQQRPLQDKEEFVGECSWFPGEKRAPVWSLEFQRYRIWATLNHLRITGNRSAPRPLSPEERALLFTSLDAAEKLTIAQAKKALGLRRTAGFTLEEGGENHLPGNKVGAKFHAILGNRWTSLPPEKQNELVTVVARASTDEELEEALQRDWGLDGEMSRRIVREIVLPSGYALLSLRAIREVMPFLQQGYSVQEARQKAGIPLERQVPVHPLLPPLADSGVAVFNPAVKRTLTELRKVVNAIIRHYGKPDEIHIETARELRKSREERAEDSKRMRGREREREAVRDQIHKEIGIPLDQISREDVLKGLLYRECEGMCPYCGQSLGGFASLFGGNSPVQIEHIIPFSRSLDNSFVNLTLAHVSDNAEKGNRTPWEAYGHDPGKWEQILQRVGAFKGSYAKAKLNRFKMDEQAVADLLQQFSSRHLNDTRAAAVAAARYLALLYGGETVDGKRKILKPTGQVTAYLREVWGLNGLIPSIHREAAGAEESDDGRTIRKSRDDHRHHAIDAVAVALCDQGTIQMLSEANRGAAAARRRRFAPVPPPWVGFKDELRQVLRSMNISFRPDHRVTGALHKETLYKYVGRNERDGDVVRVRVPVHTLSVRELGQIVDPNVRVIVQAKLAEIGGDLKKLENNWPCLPNRNGAPVPIRTVRVDLNRAVVTVGTGFRQRWAEPSETHHIEIYEISENGRTVWTGDVVSMREAILRAARGEPVVRRSAGANGRFLFSLAKEDTIRLFGDRAGIWVVKKIKGNEQIILVPQHDARKEGSGAASRTEFAPTAGGLRRYSAEKVTTLPIGDVVPCHE

SEQ ID NO: 496 - protein, 1031 aa, unidentified
  REGION 1..1031: note = Description of Unknown: uncultivated organism
  REGION 1..1031: note = MG4-78 effector
MLIPNDSLVLGLDIGSSSVGWSLIQNRGEAVEIVASGVRVFPWTVDEQTLMSRSVERRRARQRRRQLERRARRRRLVASLLQRQGFLPPGPPDHRDPSWKAVLAMDPYELRGRALETRLEPWEFGRVMYHLAHRRGFAGSGRGADDSETGVIQEQIEKTAREMQKVNARTLGEFLAQLDPRERRRRGWHTAREWYRTEFEAIVQAQQRMGLNLDPDWVKRLRRAIFFQRPLRTSPRAVGRCGLVPGRLRAAWGLLEAQRFRYLQKLNDLRVLLPDGQVRPLTPQERELVRGELERSERLTFDRLRRLLSSCDPSEALGEPSTGKAGNCDEDPGARSTSDFSRQKAGLAFNLECGGQDCLPGNTTAARIRSAIGQKWDQASEDVRRAMVELLLGVKDRKLRARLALRRKEWALSDLEAERLAQVNLEPGRCRFSSAALRRLVPHLEAGCALTEAIAREFPEHEARFRTEADPPPETPVTNPLVRRALAETRRVVNAIVRTWGLPGRIHIELARELRKPLRRLRELLRRNEERQRQRKHAIKYLIEKGIQDPRPDQIEKFLLWVECKQICPYTGQSISDVDLFGPLPRFDVEHIIPWSRCLDDSFANKTLCEVDHNRNRKRNRMPTEVYSQDELSQILRRVRAFQGPYRFEKLRRFQMTEADLTTETGWLLRGDQLQATAHAARLAGRLLGRWYPAEERLSRIQITNGAVTSWLRVAWGLNQLLGVADEKNRSDHRHHLVDATVIALTTAATVKALTEAARRSARPRRFVDMPVPPGLVDSLRQQLETVIVSHRVDRRVQGPLHEETFYGRIQTPPTGESRTVVRKRIDALSATEAQRIVDPRVRELVAQVCNGRAPKEVFRDPSLIPEVPFGSRKVRIRHVRIWVSENPISLKDGDPRLVLPGSNHHLEIFDCREGPRPGWRCVVVSRWEAMRRLRAGKPVVRRFDEHGCPLVCSLARGETVRLNLPGGPVIAVVQKLSQDDYNFRLHTDGRRAADIPASERIRIRSSKALKKCLGCKLVVDVLGRCHVSRD

SEQ ID NO: 497 - protein, 1031 aa, unidentified; identical to SEQ ID NO: 496
  REGION 1..1031: note = Description of Unknown: uncultivated organism
  REGION 1..1031: note = MG4-79 effector

SEQ ID NO: 498 - protein, 1063 aa, unidentified
  REGION 1..1063: note = Description of Unknown: uncultivated organism with predicted taxonomy: Planctomycetes
  REGION 1..1063: note = MG4-80 effector
MLAGKTHPSGSRTAASEYLLGLDIGTTSIGWALIALKNEEPCGILRAGVRCFEAGVEGDIEEGKDSSRAKPRRIARLARRQIWRRAARARKVFRVLQELDLLPPGEARSPHARHALLHALDQKLLQKYDLARDHVKAHLLPYLLRAWAVKRRLERYELGRALYHLAQRRGYQTNRRAEADNDDEDNEKQRKIVQGSIETLQQDLAGRTLGQFLATLDPCQRRIRQRWTSRSMYQDELARIWQRQAAALGLTEEDRKQLYKAIFFQRPLRSARGLIGQCDLETGQRRAPLASLVAQEFRILQQVNHLRVRLPDHTERPLTDQERATLSQILMHQEELSCAEARKLLGLTKHGTKFTIELAREKSLRGNRTQARLVAVLGPRWDTFTPQERNELIWDVIHYEKAAALARRAQKRWGLDPQTAEKLANVRLETGYAAHSAAALEKLNERMRAGEAYATAKQAVYPHAHQPDRVVSRLPPVKEALGELRNPAVLRALTELRKVVNAILRRYGKPKAIHLELARDLRRSRKEREKISAEQAKREKARRDALQKMLREFPNYQPKRGYDPAIEKILLAEECDWECPFTGKKINMQTLLGKSPQFDVAHIYPRRYLDDSFANKTLCYHEENRHRMLDRLPMEAYAGNPQRWQEILARVKRFQGPYAAEKLRRFQTEKVPDDFVSRQLNDTRHSTKLAAQYLGLLYGGPYDAQGHRRLVAVSGSITAHLRRAWRLGVHPGPDQAGPGKNRDDHRHHALDAIVVALTSHATIQKLSTFAARSQPGQQRLITGDLQEPWPSFQRDVRQALMAIYVSFRAEHKLAGPLHAETNYSPPIPTPDGKFVHHVRKSLSKLTETEIRGDAIVDPVIRALVQKKFEELGGKQPEKVFADPANHPYLTARDGRRIPIHKVRIRARANPVRIADDPARQRWVAPSGNHHAVIVAQLDPQGRESRWEDHVVTRLEAHQRLRQAGPRPRNQLIQRDWGPGKRFKFSLMLNDMLELDAPGGGRQVCRVLGISKGDYELCLHYDARSQTEIARQKQRIRVNAEKLRLLRARKVVVTPLGDIQPAGG

SEQ ID NO: 499 - protein, 806 aa, unidentified
  REGION 1..806: note = Description of Unknown: uncultivated organism with predicted taxonomy: Rhodobacteraceae
  REGION 1..806: note = MG4-81 effector
MALVLGLDIGARSVGWALLEKQGDEWKRIVRAGVRVFEAGTEGDIESGRDKSRGATRRIKRLARRQIRRRRQRARALYRALAEAGLLPGISPQPGSPMSLLIQQQINALDAQFRARYAAETGVHQLPYLLRARALDHPLEPFELGRVIYHLGQRRGFRSNRKAESRKAGAGDESKANEDRGKVYEGIDSLRTAMQQAGARTLGEYFSRLNPAEKRIRGRYTHRSMYEQEFDAIWTAQKAHHPALTREFKDRISDILFRQRPLQDKEEFVGECSWLPGEKRAPVWSLEFQRYRIWATLNHLRITGNRSAPRPLSPEERALLFTSLDAAEKLTIAQAKKALGLRRTAGFTLEEGGENHLPGNKVGAKFHAILGNRWTSLPPEKQNELVTVVARASTDEELEEALQRDWGLDGEMSRRIVREIVLPSGYALLSLRAIREVMPFLQQGYSVQEARQKAGIPLERQVPVHPLLPPLADSGVAVFNPAVKRTLTELRKVVNAIIRHYGKPDEIHIETARELRKSREERAEDSKRMRGREREREAVRDQIHKEIGIPLDQISREDVLKGLLYRECEGMCPYCGQSLGGFASLFGGNSPVQIEHIIPFSRSLDNSFVNLTLAHVSDNAEKGNRTPWEAYGHDPGKWEQILQRVGAFKGSYAKAKLNRFKMDEQAVADLLQQFSSRHLNDTRAAAVAAARYLALLYGGETVDGKRKILKPTGQVTAYLREVWGLNGLIPSIHREAAGAEESDDGRTIRKSRDDHRHHAIDAVAVALCDQGTIQMLSEANRGAAAARRRRFAPVPPPWVGFKDELR

SEQ ID NO: 500 - protein, 1081 aa, unidentified
  REGION 1..1081: note = Description of Unknown: uncultivated organism
  REGION 1..1081: note = MG4-82 effector
MESKRLKQPFVLGIDLGVQSLGWAMLSLDDDDNPTGVVRLGVRCFDSGVGSEEEVAQGKEQSQNVERRGARLLRRQTWRRARRIAKVFHALQRFGLLPAEPAPTPEQRDALIKQLDADLRAEFLPAGDRAAFHLLPYRLRALGLDQPLPPFAFGRALLHIAQRRGFLSNRKAEGKENEKERSVVKESISFLQNELVRTGARTIGEYFAGIDPEEQRIRGRYTARQMYLDEFEKLWAVQAPHHQLDESAKKAIHQAVFFQRPLKSQSGLIGLCELEPGQRRAPAASLEAQRFRYLQKVNDLQIITPDGFILAPSEEQRRSLIDYLEHHAEITFDKLRTLWGLKLPRKSKKKSPAASGSDGDSDLASDAAQSDERPGYNFNLERGGEKKLKGNVTRARIEAALGCDLDELPAHVREPLVADVLEYENADALQRRLVQRYGLAEEQAAALAETHFEDGYASLSLAALRKFLPLMEQGMPFATARKELYKDSRQFQPHDILPPLFMVKAQLRNPAVSRGLNELRKVVNAVIRRYGKPKYIRIELARDLKQPRKVREERSKSMRKNEALRQQIIDDIRRFGIANPSETDILKVRLADECNWQCPYTGKAISMETLLGPHPQFDIEHIQPYSRSLDNSFTNKTLCDVHENRIAKRNLTPFEAYSGDEQRWHEIIARVRRFRGPASPAKLRKFLAKAIDSDFVERQLVDTRYMSRAAAEYVGLLYGGAVDSQGTRRVQVSPGGVTADLRRLWGLNRVLPRDPGDDERPGKKSRSDHRHHALDAAVIALTSPAMVQQLSRCAQDALLIGSRRFVALELPFPSLIDDLKKAIDEIVVSYRVKRKVRGRLHDQTYYSPPKPACDENGRTVEYRHVRKPLASISADRIEKIVDPVVRKTVQEHLARHGGDLKKAFGNPNNLPYLTAGDGRIIPIRRVRIRENISVLPIGKPPQLRFAAPGTNHHMEIVEVTDARGRVRWEGKLVNMFEAYQRRRQHLPVVCRDHGPNANFLFSLACGEYVEMEHVPGQRKVYRVTTISGERLEFRLHCDARPITVLKKLPKARINRSASTLLEAKARKVFVDPLGNVYPAGD

SEQ ID NO: 501 - protein, 1045 aa, unidentified
  REGION 1..1045: note = Description of Unknown: uncultivated organism
  REGION 1..1045: note = MG4-83 effector
MKTEYQKSGSVLGLDIGPTSVGWALIEENEQQPCRLIDMGVRIFEAGVEGDIESGRDESRAAKRRMARLHRRQLERASRRLKVLAEELQRRGLLPPGDVSTPDARKRFFDELDKLLAQGLDNPALLPFILRARALHERLDPHETGRALYHLAHKRGFLSNRKSQPKEDEELNTIAQAVGQLRQAMQETGAQTPGEHFAALLRNNGRVRGHHTFRNMNAQEFDLIWDTQRAFHPDVLSDEARKSIGKKIFFQRPLKSNKGLTGRCELEGARRAPLALLVSQRFRMLQKVNDLRLVSPDGLQRELTASERAELLRHLELQQNMKFTAIRKKLKLQGKFNFEIGGEESLPGNRTAARMASVFGQQRWQSMTPGEQDLAVQHVRSIRKPEALERAAADYWKLDPNAARAFAKISLEEGHVMLSQKAMSKLLPLMERGMPFATARKELYGAAPPPRAYDKLPPVHSPEMPAVTNPAVRRALTEMRKVVNAVTAKYGKPGLIRIELARDMKRPRKARQQISKRIRANKNKRDAARQQLLKEASGALGSAWEPKRSDIEKWLLRDECGGICPYTGKPISFHSLFVEPEFDIEHIIPFSRSLDNSFLNKTLCCATENRIKSKRTPWEAYGGTARWDEIIGRVRKFTGDANVAKLQRFQIRDADKEIDGFAARELNDTRYISRLAVQYAGLLYGAGADGVDPSGRRRVQAARGQITAHLRDVYELNSLLGDGGEKYRGDHRHHAVDALCVALTTPRAVKQLSDAAAAGEDRRRAWYDTRLITDPWPGFLDDARNAVNAIVVSHCPSRKVNSAMHDETVYSKPHADPMGRACVHVRKPLAALTDKMVDNIVDDRVREKVRQALNGRAPKDAFKDSASLPFFETRDHRRIPIKTARIRVYQSVNSLGRNAAARNVVPGSNHHVEIFAVEQEKGGVKWEGRMVTTIEAMARLHPKSRIPVVNRAHENGGKFLFSLSPGDTVRVTLDGEQKLLRLRTISKNNQGRLRLDAVCIREARKKAEIMQDKKWIIFPTLHALADMQFQKVTVTPLGEVFPCND

SEQ ID NO: 502 - protein, 1077 aa, unidentified
  REGION 1..1077: note = Description of Unknown: uncultivated organism
  REGION 1..1077: note = MG4-84 effector
MADPGLLKYVLGLDIGANSIGWALLTARGDERLTPTGIVQTGVRIFEAGVEGDLERGREESRGIQRRLARQARRRLDRTARRLAKVFGLLQDAGLLPRADTPASLPGVGVPREHMTARERRDERLRASAERDALLAQLDRELVAQCQDGLRAAGASQGEIWLVPHRLPYLLRARALDNKLPAHQLGRALYHLAQRRGFLSNRKAAPKKDEDQGVVDQGIQKIVAGMRETGARTLGEYFSRLDPTGERIRGRWTSRAMYQDEFDAIWAAQAPHHPEILTADLRKRLKRAIFYQRPLKVQKELIGECEFEKGRKRAPMALLVAQRFRLLQQVNNTRILTPDAVERGLTAEEAGKLIDALDTLGDITFKKAKRLLGLSQQHVFKFESGGEDKFIGNRTATKLIRVFGLDRWKTLKPSDRDRIVDDLLTIQKPETLARRAQRVWGLSPEAARELARTSLEDTHCRLSRLAIKNLLPLMETGMPYMTAARQVYGEKPAEPPRDSLPAVSEALPALRNPAVHRALTELRKVVNAIVRTYGKPAAIRIELARDLRKSPKQREQTWKKNRDNEALRKDAAEKLFREMGIQNPKRSDIEKMLLLQECGCMCPYTGKHISMRDLFGDAPQFDVEHIVPFSRSLDDSFLNKTLCEVAENRNVKGNRTPWEAYGHDLVRWNQILQRVSHFQGSAQREKLRRFQLQTIESPEQFASSQLNDTRYAAVEAMDFLKLLYGEEAQRKVIVQAARGGTTRFLREEFGLNQILGDGGEKSRDDHRHHAVDAICVALTDPATVKMLSDAAARALSEGRRRFASVPFPWGRFLDDVRASIQGINVSFRVSRKVGGALHEATFYSPPKKDPKTGQEHVHVRKPVTALSEQRVGNIVDPVVRAAVQAKLKEVGGDVRKLADNPPTLRAKDGREIPIRKVRLRESITPFGIGQGGARQVVTDTNHHVEIVQVPGKAGQPKWEGCVVSQYEALRRLRAKEPVVRRDHGNGRTFVFSLALGETVQMKGDDGQLALFKVAGVSQTGRGQIMLEFRRNADARPATVLRKIKGGRVFRTPDSLRSAMGTKVLLTPLGELRRVGRD

SEQ ID NO: 503 - protein, 1031 aa, unidentified; identical to SEQ ID NO: 496
  REGION 1..1031: note = Description of Unknown: uncultivated organism
  REGION 1..1031: note = MG4-85 effector

SEQ ID NO: 504 - protein, 1031 aa, unidentified; identical to SEQ ID NO: 496
  REGION 1..1031: note = Description of Unknown: uncultivated organism
  REGION 1..1031: note = MG4-86 effector

SEQ ID NO: 505 - protein, 1045 aa, unidentified
  REGION 1..1045: note = Description of Unknown: uncultivated organism
  REGION 1..1045: note = MG4-87 effector
MSSGYVMGIDIGVASIGWSVVEPGSEERPGRIVRLGTHLFEPGVDGTQTAIEQGKDEPKGAARRGARQVRRQLWRRAHRKRKLLFALMKHGIMPHATVPDGAAIDAYIKALDSRLRAAWCRAGDHQAHQIMPYLIRSAGVQRKITLEEFGRALYHLAQRRGFLSNRKAKKKKDEDTSQVKAEINELQSLIDRHVPATLGAYLASLNPDEQRLRDWWTARSMYLHEFEALWTEQSRHHRELTDEAKAAIHRAIFHQRPLKSQAHLIGRCSLEPGRKRAPLAHREFQYYRVLQGVNHLTIAPPGEAARKLDAAQRKVLTDALLAQGDLTIAKVRTLLKLPKGTDIAGERGEEEKKIVGHRTDAKLRDAIGPRFDAMSDRERDQLVLDLRSFRETEPLIGRLKSHWGLSDEQARKVADADLEEGYASYSLAAIRRLIPHLERGLSVSEARKAEYPESFRATQVHDLLPPVTDVMGDLRNPSVMRALTEARKVVNAIIRRYGKPEKIHVELARDLKHGRDRRAAITKQIRQREKQHADAKHRILAEIKGYEPTRIDREKVLLADECDWRCPYTGKKFGMKELIGEHPQVDVEHIWPFSRSFDNSFMNKTLCWHDENRRVKRGRTPYEAYSASPERYQEILGRVLAFKSDRRTVSEKFRRFTAEAIDEDFTNRHLSDTRYIARAVSEYLGVLYGGRTDADGKQRIVACSGGLTSWLRREWGLDALLSPTGDDAEAEKNRIDHRHHAVDALVVALTTPRTQAMLQAAAARQEQEGRFRLFGRIEPLWSAFPREAKAAVEAIVVSHRQQRAVSGKLHAESNYSKPIHGGHRIRKELHKLTRNEVSRIVDPRCRALVEAQLEKLGVDDPAKAFSKRENCPVIKGRDGVERRLRRVRLFSTASPTIVGQNARIRYVEPDSNHHCIVWAKRTKEGEEGPWEFEPVRLLDAYDRVCRGLPVVNRDGGSDRIFKFSVSINEFIEMDDPDSGGRQLYRIKKTSLREIGVQLHHDARTVDEVRKAGDLNKYRISPSALKSRNARKVFVNHLGEVSGAGG

SEQ ID NO: 506 - protein, 834 aa, unidentified
  REGION 1..834: note = Description of Unknown: uncultivated organism with predicted taxonomy: Planctomycetes bacterium
  REGION 1..834: note = MG4-88 effector
PREERIRQRWTSRPMYLNEFARIWSVQADAHGLTEEDRQRVFKAIFFQRPLKSQKGLIGRCELEPKHRRAALAMLVAQEFRILQKVIDLRVRFPDGTTRPLTADERQTLIDALQQVGEMTSASARKLLGLNKKGITFSIEEWGEKNLPGNRTNAKLAAIFGRRWLQFTPEERDQIVLEVLHYQKPAALVRRAMKHWGLDRQAAEKLSETRLEAGYARHSLAALTKLNASMRTGMPYMTAVKEAYPARFQAGKPMKLLPPVVKALRDLRNPAVCRALSELRKVVNAIVRLYGKPEKIRLELARDLRRSRKDRKRIAEQQREQETRRRKALERMMREFPNYQAKAGFDPAIEKILLAEECNWECPFTGRKIEMATLLGKNAQFDVAHLFPRRYLDDSFLNKTLCYHDENRHRMHDLLPKQAYGGDPQRWAEIIARVKAFKGSAATLKLERFLAAEVPEDFVESQLNDTRHNSKVAAEYLGLLYGGLWDASGKRRIEAITGGITALLRNAWRLRKDRADHRHHALDAIVLALVDPAQVKSLQESAERASEGSARFRLGELDEPWPGFRDAVRSALEEINVSIRADRKVGGALHAATNYSKPVRAANGSAVHHVRKPLHKLSVTEIEGDAIVDPVVRAAVQQRFADLGGKDPQKSFSDKANHPTLTAKDGRSIPIHKVRVRVREKAKMIAKGTVRQRFVTAGANSNHHCVIVAVLDAAGKETKWEEHIVDRLEANKRRASAPPGGMIQRDWGPARRFKFSLMPNDMLEMADESGTRQLYRVANISKGDYELRLHTDARESKELRSLKQRIRVHAEDLRRGRARKVTVTPLGEIQPAGD

SEQ ID NO: 507 - protein, 795 aa, unidentified
  REGION 1..795: note = Description of Unknown: uncultivated organism with predicted taxonomy: Planctomicrobium piriforme
  REGION 1..795: note = MG4-89 effector
MGFLMDASVSYGLGLDQGVASIGWAIVRLDAKGKAIGVERLGVHLFEAGTEGDIEGGRDESRAGPRRMARQARKQYRRRVLRKKRLLRWLQELGLMPAGDISTAEGRDKLLKDLDADLRTRWEADASIDHRLRQLLPYRLRAAGLTRRLEPFELGRALYHLAQRRGYLSNRKAQGASADPCAAGDATKPKKAGKGKKGTPAPPAEHAPAQPGASASPGEDQAGKGSGEAGGKEDPGVVRAAIVELERQMRGAGCTTLAEYFSKLDPTGTLGDRLRGRWTAREMFLEEFGRIMAEQAKHHPALTNEVQRKLHRAIFFQRPLQSMSHLIGTCDLVKGAKRCPLGHRLAQRFRLLQRVNDLDIRLPDFTRRPLTTEERGRLLAALDREGDIAFSTLKRKDWFGLPKGSTFNLEEGGEKKLVGNRTEAKCRCIFGDERWDAMSEADRDAVVHDLIVFEKPSALARRGESVWKLSPQRARALGDCVLEPGFAAHSKEALAVLVPCMEEGTPYAKAVQDKFKKVDATAEVRDRLPPVEKALGNLRNPTVTRALTELRKLVNAVVRKYGKPAWIRLELARDLKRARKQRERLSKEMREQEARRDSARAAIVRKAGLAGPSRSDIERYILAEECGFICPYTGKPMDRERLTDLVGRTPQFDVEHIWPLSRSLDDSYLNKTLCHVEENKAKGNRTPFEAYSQSPERWEQILDRVKRFGGTAARIKLERFTAKEIPDGFAERHLAETRKIGAASAGFLGLLYGGEIDAAHKRRVFVTTGGLTAHLRREWHLNGILGTEGEKARDD

SEQ ID NO: 508 - protein, 1097 aa, unidentified
  REGION 1..1097: note = Description of Unknown: uncultivated organism
  REGION 1..1097: note = MG4-90 effector
MSTPSNVPYVLGLDLGVASIGWAVLDTDAKGRPTSIRAAGSHLFEAGVGGGSQSTPEMAMARGKEESKAAPRREARAMRRQTMRRARRKKKLLGALIRHGLLPEGDIRTPAAIDAYVKALDAALRATWCPPGSSHVEYQNMAYRLRAEAAQRPLDAHAVGRALYHLAQRRGFESNRKTPKRDDEDTSDFQNKLDDLGDAIRSHTTQTLGAYLASLDPDEKRLRGRWTHRSMYEQEFETIWDAQAGALGLDGGAKQDIHHAIFYQRPLKDQSHLVGRCSLVPGKKRAPIAMRIAQDFRVLERVNHLRIVHDDHSERPLSKDERDNLLAALRREEKLTMHQAKKAAGLPTKHVKFSIEAGGETKLVGHRTDAKLCKIFGDRWDEMSEQEKDTVVEDVRCVRLPDTLRRIGEVRWGLSREKAQELADVQLEEGHSAHCLRALRKLVARMDADGLAYSTARKDEYPASFQSVEPMDLLPPVDAWEKDLRNPAVSRALTELRKLVNAIIDRHGKPVRIHLELARDLKQSRKKRKTASDRMRTREKEREKAAQRIITQPGLGIQHPKRWQIEKVLLAEECNWRCPFTDRGFCMADLLGSTPQVDVEHIWPYSRSMDDSFLNKTLCYHEENRNRKRGHTPMEAYGPTPEQYEAILDRVRRFKGDHFAVREKLRRFTDALDEDFPLRHLQDTRYITTLARDFVSLLYGKDASAIVTPSGPLTAWLRRGWHLNSVLGFTDEKEREDHRHHAVDAIVIALATRSNIKRLSDAAERVEREGREKAFGTVDPPWDGFEHEVRSIIDGVVVSHRQSQRVRGPLHKDTIYSPKIDGKHRVRKELHKLTAKEVQSGKIVDTRALAAIQAKLAELAKTDPALADPAKAFKAPENAPLVPGPNGSKVRLRRVRIDTGDKPTRFGGAKGKGSARYAKNELNHHVAFYDQPLPGGGVERTAEVVPLHEAMRRHASGEPIVDRTPRGKKGEYAFAFSLAKNGYVWYRQKNSDEPVLCMVDGIADGDIELKRHTDGRGRPQRGKDRIRLRSKSIREGLFEKAHVTYLGEVRRAGGWARARLRRSARAPFRSPRAAGHPRRRRTRGHHAIGRGRHRRGR

SEQ ID NO: 509 - protein, 930 aa, unidentified
  REGION 1..930: note = Description of Unknown: uncultivated organism with predicted taxonomy: Deltaproteobacteria bacterium
  REGION 1..930: note = MG4-91 effector
VSSQPRRQGYILGLDLGIASVGWACLEHDGQGKPTGILAAGTHVFEAAVENGQAADQTPAAKRRAVRSQRRLLWRRRQRRRKTARLLQQAGLLPVGPMDTSEELDKLIKDLDADLAKRWSGRVPPSRRDRLVYHIRAAAAQGPVEPDELGRAIYHLAQRRGFKSNRRTDRKADDKEIGKVKEGINELRRLMHEAGARTLGAYFATVDPHERRIRNRYTHRAMYEEEFEAIWSAQQPHHAVLTPELHDALHDALFFQRPIRKQPGLVGMCSLVQGKRRAPKALRAYQRFRMLQGVNHLRVDEPGRSARPLTAEERKKVIEALEREGDLTFAKLRQKKLLALPKEVEFDLAQAQFDRGEDKKGDRKIIGHRTDAKLRKVLGDRFDALTEEEKDQLVHELRSIPTEEGLIRRATRHWHFTMEQAEQLADLQLEDGYAALSLTAINRLLPHLEQGLSYAEARKREFPESFKSEDALDALPPVDKAIDNLNNPSVRRAMRELRMVVNALIREHGKPGRIHIELARELKHGRSRREQTERRMRERAKQREAAAETIIRETTARGFRIDKPRRDDIEKYLLAEECGWICPYTGRSIGWESLFGPHPEFDIEHIWPFSRSLDNRFLNKRLCHAATNRSVKKNRTPYEAFGQDTEQWEQILDRVRRFKGDPYARREKLRRFEAQEIDEGFLERHLRETSYFARLAQEYVGLLYGGIVDAEGTRRVIASSGGATHWLRRELGLDSILSDDEEKNRSDHRHHAVDAITTALLDSRTIQLLARAAQEAEERGSRRLFLSLQEEPWQGCRRDVEEAVARINVSHRQRRRVRGPLHEETNLSELINGGHRVRKALASLSPAEIKSDRIVDPRARELIRRALEEHAGGEITKKTITQVFSDENNLPLVPGPGGRLVRIRHVRVEVRDKPTLFGRDASRRWANTGS

SEQ ID NO: 510 - protein, 1062 aa, unidentified
  REGION 1..1062: note = Description of Unknown: uncultivated organism with predicted taxonomy: Alphaproteobacteria
  REGION 1..1062: note = MG4-92 effector
MTNGNLGKERFILGLDLGTNSIGWAMVGLDDNDKPCSVIRTGVHVFPAGTQGTDEDFAQGRDESRAQRRRMKRLLRRQIYRRKARARDAYKHLAEYGLLPKLEGYKGQNRDKAIKRLDVELLDRYLTAHPELIDEYELRDRVTAQTLVYRLRKEALDRQLQPDELGRILYHLSQRRGFKSNRKAPMKEDEKPGEVKAAIESLADEIKSAGARTLGEYFAGLDPEQRAIRRRKTDRSMYEQEFELIKKAQAPHHQRLDEKFWGRMRRILFYQRPLKSTKGLVGRCPLEPPRRRAPMASPAYQEFRLLQKLNDLCWIEVETGDSFALVDHPEHYETLYDALHKTDYLKFTEIAKLLKLKRNGKERTRFNLEAGGEKGLYGNRYASLMYQLFGENWQKEPSSCLSGIWQDLRSIQNETLLKRRAEEKWGLDASQIEILLQADIEEGYAAYSAKALQKLNQEMAQKIPFATALKSCYPEQAAEECVDLLPPYAEVGSDLRNPVVNRTLTELRKVVNAIVRRYGKPEKIRLEIVRDIKLGRKRRAEISKKMRTRQSEREDAKEQLRQWGVPVTHDAIERELLRRECNGVCPYTGREISPSQLFGESPQFDIEHIIPYSRSLDNSFANKTLCWHATNRNRKRGKTPYEVFSQDGDWEVILRRVAAFKGGYRDEKLRRFKLADLSEFDDFERRQLTDTAYAARLARDYLGVLYGAESLRRIQVLPGRLTSLLRGAWQLNRILGDPERNTKSRADHRHHAIDALVAAVTDRSMVQKICTRAKQLEDLKQVRLLPEIDPPWAGLLNDTREALARTIPSSRVDRKANGKLHEETIYGRILHKGEERTVLRRPLEALSSKEIDNIVDECIKDRVVQALEASGEKNPNKAFANPANLPRMVVRDRNGRSREVFIRRVRVFRSDNPVPVGRDRRLVKTGGNHHMELYEVRKKGERRMVGVIVTTLVAAQRKAARRSVYNCRLIPNGSYMFSIHKGDVLRLEHPRKGEVLVTIRKISRLPGGNYVEGTEIKDARLDKDIKPKSIENGWFKLSDKQLGEMQARVVRITPLGEELDRV

SEQ ID NO: 511 - protein, 1062 aa, unidentified
  REGION 1..1062: note = Description of Unknown: uncultivated organism with predicted taxonomy: Proteobacteria
  REGION 1..1062: note = MG4-93 effector
MTNGNLGKERFILGLDLGTNSIGWAMVGLDDNDKPCSVIRTGVHVFPAGTQGTDEDFAQGRDESRAQRRRMKRLLRRQIYRRKARARDAYKHLAEYGLLPKLEGYKGQNRDKAIKRLDVELLDRYLTAHPELIDEYELRDRVTAQTLVYRLRKEALDRPLQPDELGRILYHLSQRRGFKSNRKAPMKEDEKPGEVKAAIESLADEIKSAGARTLGEYFAGLDPEQRAIRRRKTDRSMYEQEFELIKKAQAPHHQRLDEKFWGRMRRILFYQRPLKSTKGLVGRCPLEPPRRRAPMASPAYQEFRLLQKLNDLCWIEVETGDSFALVDHPELYETLYDALHKTDYLKFTEIAKLLKLKRNGKERTRFNLEAGGEKGLYGNRYASLMYQLFGENWQKEPSSCLSGIWQDLRSIQNETLLKRRAEEKWGLDASQIEILLQTDIEEGYAAYSAKALQKLNQEMAQKIPFATALKSCYPEQAAEECVDLLPPYAEVGSDLRNPVVNRTLTELRKVVNAIVRRYGKPEKIRLEIVRDIKLGRKRRAEISKKMRTRQSEREDAKEQLRQWGVPVTRDAIERELLRRECNGVCPYTGREISPSHLFGESPQFDIEHIIPYSRSLDNSFANKTLCWHATNRNRKRGKTPYEVFSQDGDWEVILRRVAAFKGGYRDEKLRRFKLADLSEFDDFERRQLTDTAYAARLARDYLGVLYGAESLRRIQVLPGRLTSLLRGAWQLNRILGDPERNTKSRADHRHHAIDALVAAVTDRSMVQKICTRAKQLEELKQARLLPEIDPPWAGLLNDTREALARTIPSSRADRKANGQLHEETIYGRILFKGEEKTVLRRPLEALSSKEIDNIVDECIKDRVVQALEASGEKNPNKAFANPANLPRMVVRDRNGRSREVFIRRVRVFRSDNPVPVGRDRRLVKTGGNHHMELYEVRKKGERRMVGVIVTTLVAAQRKAARRSVYNCRLIPNGSYMFSIHKGDVLRLEHPRKGEVLVTIRKISRLPGGNYVEGTEIKDARLDKDIKPKSIENGWFKLSDKQLGEMQARVVRITPLGEELDRV

SEQ ID NO: 512 - protein, 1039 aa, unidentified
  REGION 1..1039: note = Description of Unknown: uncultivated organism with predicted taxonomy: Planctomycetales bacterium 4484_113
  REGION 1..1039: note = MG4-94 effector
MEDSPALLGIDIGPNSIGWALLDSEGKAIDDMGARVFEAGLADIEQDGKGKSRNVERRDARCIRRRLERTGRRLSKLARILQDAGLLPPGDVLSDEKRHQLVKRLDAQMDSPYSLRAKALDEKLKPYELGRALYHLAQRRGFLSNRKSAPKDEKEEGVVKEGIGQLRRDIDEAGARTLGEYFAKLDPHQQRIRGRYTSRKMYEDEFKMIWQEQRQYYPDLLTDDLKKAIHSAIFYQRPLKSAKHLIGGCQLENGKRRAPWALLIAQRYRYLSVLNNLTIRLPDGSERELTADERSKLIDYLEKNAELKFTTARGKKLLALPRGTKFNLEEGGEKRMLGNATAAKLRKIFGDRWDSFSEEEQDQIVEDIRSIVKDEALVKRGITKWGLDEESARKLTEVQLPDGYCRFSRKALEKLVPLLEQGKRLQTAIRELYPEKWARGSQPLDSLPPLSQCEDPALSELRNPIVSRALTEIRRVVNGVIAKHGKPDVIRVELARDVAQPAKRRQQAWKQNRQQERARKDAAERITKEAGIEKPSRDDILKVLLADECNWECPYTGRRINITELFGEHPQFDIEHIIPFDRCLDDSYVNKTLCEANENRNIKKGKTPYEAYYGTDKWENIISRVSRFNGRDRIKQAKLRRFKMHGEELEEFLDNFTNRQLNDTRYGSKLAKKYLGLLYGGVDNDGIDASRKRRVQATIGAVTAKLRDAMGLNAVLGKGAKSRDDHRHHAVDAVVIALTSPGTIKGISDASQHPALTDVRKIKLAEPWQGFLAEVRQAVDRIVVSHRVDRRVRGPLHEETFYGKPRKDESGKSYVHTRKPLSGISAKDVDSIVDPVIRRIVQQKLSELGESDPKKAFKDAANLPLDPQGRVVRRVRLKRNLEVFPIAKEEHRRRYVVLGNNHHMEIVGVGEPDEHGEHPKWEAHVVSMFEAYQRKKNKEPIVKRDWSDETEKDGKPRKFLFSLAGGDTIELQKEEGKRELFIVRTVPQMKQVRFVPINDARRLKDIGKVGFTAYPETLRKWHCRKVAVNPIGEVHYQND

SEQ ID NO: 513 - protein, 1072 aa, unidentified
  REGION 1..1072: note = Description of Unknown: uncultivated organism with predicted taxonomy: Planctomycetes bacterium
  REGION 1..1072: note = MG4-95 effector
MTNQEAEEKYILGLDLGSNSVGWTLLAARQGKPDTPLRPVGLVAAGTRVFDAGVEGDIEKGREKSRAVQRREARLARRGTDRRARRMHLVYSILERAGLLPSLDPPSNSSEGNSRGIREQESQLRHETLVTLDRELAEKWREKLRSEGADKDKLRQINHTIPYILRARALDEKLEPYEVGRAIYHLAQRRGFLSNRKSPLKKDEDLGKVKGDINKLQEKIEETGSRTLGEYFSKLDPEEERIRQRWTGRKMYEEEFGKIWAVQQKHHPNILTEDLKKQLIGSKRHPAIFYQRPLKSQKHLIGKCELEKDRRRAPMAILDFQRFRMIQMLNDTRVITPMGELREMTAEEREKLLAELDIKGDLTFAKAKKVLGLSREHHFNWEGGIEKRIIGNRTAAKLVEIFGIERWKGFSEEERNRIIEDVLSIQKEDTLFRRGINAWGLDEESAKKFSELQLKPDYARFSRRALKKLLPLMQQGIPYKTAEKQVYGDRLAADAHASLPAVADVLPELRNPIVNRTLNELRKVVNAVIRKYGKPALIRIELARDLRNSAKQRKNIMKKIEDNRKAREKAAEGILKEMPHFGEPKRADREKWLLADECNWECPYTGRQISVSALFGENPQFDVEHIIPFSRSLDDSFLNKTICEIAENRNVKRNYTPYEAYGRDEEKWNQILHRVKNFRGRAGNLKLERFQVKEAKFEDFASQQLNDTRYASKLAKKYLGLLYGKDAAKHVQAGRGGVTKFIRDELCLNAILGDGGDEKKRTDHRHHAVDAIAIALTSPGVVKMLSDAARYNEEKGLRRRFGNIKSPWPGFFEDVRKAVENIVASHRVSRRVNGPLHEETNYSPIKKDENGRDCVHIRKPVESLDKKNLKDIVDPVVRERVREWMEQANEHRPYPVHKTKDGREIPIKKVRIRKYDKPMTIGRDHRSRNVLSGSNHHLDIFEVTDKKGRPKWEGRLVSAFEAMQLKRQGKSVYSRERKEGGKFLFSLSQGEIIELDEKDGNRGLYRVRILSQLNQRGIKYPRVSYVRINDARLKADILKAKEWNTKLLEPLRKLNCRKVTITPLGEVRRAND

SEQ ID NO: 514 - protein, 835 aa, unidentified
  REGION 1..835: note = Description of Unknown: uncultivated organism with predicted taxonomy: Planctomycetales bacterium 4484_113
  REGION 1..835: note = MG4-96 effector
MEDSPALLGIDIGPNSIGWALLDSEGKAIDDMGARVFEAGLADIEQDGKGKSRNVERRDARCIRRRLERTGRRLSKLARILQDAGLLPPGDVLSDEKRHQLVKRLDAQMDSPYSLRAKALDEKLKPYELGRALYHLAQRRGFLSNRKSAPKDEKEEGVVKEGIGQLRRDIDEAGARTLGEYFAKLDPHQQRIRGRYTSRKMYEDEFKMIWQEQRQYYPDLLTDDLKKAIHSAIFYQRPLKSAKHLIGGCQLENGKRRAPWALLIAQRYRYLSVLNNLTIRLPDGSERELTADERSKLIDYLEKNAELKFTTARGKKLLALPRGTKFNLEEGGEKRMLGNATAAKLRKIFGDRWDSFSEEEQDQIVEDIRSIVKDEALVKRGITKWGLDEESARKLTEVQLPDGYCRFSRKALEKLVPLLEQGKRLQTAIRELYPEKWARGSQPLDSLPPLSQCEDPALSELRNPIVSRALTEIRRVVNGVIAKHGKPDVIRVELARDVAQPAKRRQQAWKQNRQQERARKDAAERITKEAGIEKPSRDDILKVLLADECNWECPYTGRRINITELFGEHPQFDIEHIIPFDRCLDDSYVNKTLCEANENRNIKKGKTPYEAYYGTDKWENIISRVSRFNGRDRIKQAKLRRFKMHGEELEEFLDNFTNRQLNDTRYGSKLAKKYLGLLYGGVDNDGIDASRKRRVQATIGAVTAKLRDAMGLNAVLGKGAKSRDDHRHHAVDAVVIALTSPGTIKGISDASQHPALTDVRKIKLAEPWQGFLAEVRQAVDRIVVSHRVDRRVRGPLHEETFYGKPRKDESGKSYVHTRKPLSGISAKDVDSIVDP

SEQ ID NO: 515 - protein, 889 aa, unidentified
  REGION 1..889: note = Description of Unknown: uncultivated organism with predicted taxonomy: Planctomycetes bacterium
  REGION 1..889: note = MG4-97 effector
MSTTRVLGLDIGTSSVGWALIEGRDPDHVRIIAAGVRVFPMGVDEATLESRNIQRRQARLRRRQIERRARRKTKARHILQSHGFLPPGDPSHADPAWASVLALDPYKVRAEGLHRRLQPYEFGRAIYHICQRRGFKSNRKRPLTKKEKGAVHEDIAGLKREMDAAHAETLGEYLNRLDPRQQRRRGRHTNREWYREEFRQLCERQRDFGLPLSPALQKELEETIFSQRKVWWKRGSIGRCSLEPGKQRAARALPVCQRFRMLQRVNDLQIILPDGTTRQLSDEEREKLLARLDWEENLSFKSIRKLLRLPAEARFNLEEGGETKLPGNSTAYRISRAIGKREWERCSPESKAQILEALMSIEDEDLFKRVALRKQWGLNEEQAERLSEVALEEGRLDLSTKAIRKLLPLMEKQRLSYAEAAWRVYGDRGPAQAYESVPPVEDLRNPTVQRSLAETRRIVNAVIRRYGKPDRIHIELARDLKAPKQIRLRRSRQMRRNEAERKSARKELIEQGLPEPTGRDIEKYRLWKECGKRCPYTGKMISFSDLFGPHPKFDIEHIIPWHRCLLDSFANKTLCEVQENRSRKGNRTPYEAYSGDPDRYEEIKQRVREFTGPFGKAKLRRFRCEDIQKLPESLPLYGGEQLNATAYAARYAARHLALLYPQEERRKRVQVSAGRTTAYLRRAWNLNRLIGLADEKNRADYRHHAVDAVVIALTTPKLTGELSKAAARSVRPGTFQGLTPPPGLTRQLEEILDQMVVSHRVDRRVNGQLHEETFYGRIDNDSVTVVRKPLADLTDRDVAHIVDKKVQRLVREKLSGGAPPSKVFANPANLPAFVSPSGRTMRIRHVRVRVDASPVRIGSGAKTRLVLTGGNHHLEVFRVVEDGREKWRG

SEQ ID NO: 516 - protein, 1034 aa, unidentified
  REGION 1..1034: note = Description of Unknown: uncultivated organism
  REGION 1..1034: note = MG4-98 effector
METAENNSVLLGLDIGPNSIGWSLLQPDNGTSPDVNLISGVHIFEGGLDDLETDGKGKSRNLDRRNARAVRRLLWRRAHRLQKLAVSLQGAGLLPDNSDLENPQQRNALFDKLDKEFKSPYQLRARSLDSKLEPYELGRALYHLGQRRGFLSNRKTPVKDEKELGVVKGGINDLSKKISEAGARTLGEYFANKVIPEGGRVRGHYTSRQMYEDEFELIWNKQKEYYPDLLNDEFKEKIHHHIFYQRPLKSQKHLIGECSLERGRRRAPWALLIAQRFRYLQRLNDLSYFDRDEMRERKIEGDQRKILIELFETKEKVSFGAIRKALKLRGIKFNLELGGEKNLPGNKTTARIIKAIGKTKWFSLSEREKEALVVDLRCIRKEETLKRRGIKAWGLDEEAAEKFGTIQLEDGYCNYSRQALQKLLPLLEKGVPLQTAIKELYPEQFENTGKPMDSLPPILESGLPELRNPVVMRSLTEIRKLVNAIIKRYGKPDIIRIELARELKQSPKQRQETTKRMRRNEKERNDIREQIRNETGIENPTYTDILKVRLAKECNWECPYTGTHISMQQLIGPHPQFDIEHIIPHYRSLDNSFTNLTLCEARENREVKRNRTPYEAYHDTAKWEDIIRRVERFDGPMRNAKLRRFLLQGEELEKFLDGFTNRQLNDTAWASKWAKKYLGLLYGDIKSKGIDSAGKLRVQAVSGRLTSELRRIWGLNNILGDGNTKSRDDHRHHAIDAIVIALSNPAVVKQLAEASKRAVNIGDKLLKDFPQPWEGFHNDVKRVIDGIIASHRVSKRVRGALHQGSNYGKPRKDKNGNQYVHIRKPIDGISKKEVENIVHPTTRKLVMDKLAELGESDPKKAFKEKDNHPRLMTKSGEFPIHRVTVRMNLSATFPVGKNYRTRYVISDRNHHIEIVEKPDGKWDGYVVSMFEAYQRKKNGEPIVKREFENDEKFLFSLANGEIIELDGPDNKSRALYVIRTIPQSKQLYFVPINDARKSGDIGRTGLTAIPNALKSRNCKKMLVTKLGEVRFAND

SEQ ID NO: 517 - protein, 1050 aa, unidentified
  REGION 1..1050: note = Description of Unknown: uncultivated organism with predicted taxonomy: Planctomycetes bacterium
  REGION 1..1050: note = MG4-99 effector
WTLLAARQGKPDTPLRPVGLVAAGTRVFDAGVEGDIEKGREKSRAVQRREARLARRGTDRRARRMHLVYSILERAGLLPSLDPPSNSSEGNSRGIREQESQLRHETLVTLDRELAEKWREKLRSEGADKDKLRQINHTIPYILRARALDEKLEPYEVGRAIYHLAQRRGFLSNRKSPLKKDEDLGKVKGDINKLQEKIEETGSRTLGEYFSKLDPEEERIRQRWTGRKMYEEEFGKIWAVQQKHHPNILTEDLKKQLIGSKRHPAIFYQRPLKSQKHLIGKCELEKDRRRAPMAILDFQRFRMIQMLNDTRVITPMGELREMTAEEREKLLAELDIKGDLTFAKAKKVLGLSREHHFNWEGGIEKRIIGNRTAAKLVEIFGIERWKGFSEEERNRIIEDVLSIQKEDTLFRRGINAWGLDEESAKKFSELQLKPDYARFSRRALKKLLPLMQQGIPYKTAEKQVYGDRLAADAHASLPAVADVLPELRNPIVNRTLNELRKVVNAVIRKYGKPALIRIELARDLRNSAKQRKNIMKKIEDNRKAREKAAEGILKEMPHFGEPKRADREKWLLADECNWECPYTGRQISVSALFGENPQFDVEHIIPFSRSLDDSFLNKTICEIAENRNVKRNYTPYEAYGRDEEKWNQILHRVKNFRGRAGNLKLERFQVKEAKFEDFASQQLNDTRYASKLAKKYLGLLYGKDAAKHVQAGRGGVTKFIRDELCLNAILGDGGDEKKRTDHRHHAVDAIAIALTSPGVVKMLSDAARYNEEKGLRRRFGNIKSPWPGFFEDVRKAVENIVASHRVSRRVNGPLHEETNYSPIKKDENGRDCVHIRKPVESLDKKNLKDIVDPVVRERVREWMEQANEHRPYPVHKTKDGREIPIKKVRIRKYDKPMTIGRDHRSRNVLSGSNHHLDIFEVTDKKGRPKWEGRLVSAFEAMQLKRQGKSVYSRERKEGGKFLFSLSQGEIIELDEKDGNRGLYRVRILSQLNQRGIKYPRVSYVRINDARLKADILKAKEWNTKLLEPLRKLNCRKVTITPLGEVRRAND

SEQ ID NO: 518 - protein, 1050 aa, unidentified; identical to SEQ ID NO: 517
  REGION 1..1050: note = Description of Unknown: uncultivated organism with predicted taxonomy: Planctomycetes bacterium
  REGION 1..1050: note = MG4-100 effector

SEQ ID NO: 519 - protein, 1034 aa, unidentified; identical to SEQ ID NO: 516
  REGION 1..1034: note = Description of Unknown: uncultivated organism
  REGION 1..1034: note = MG4-101 effector

SEQ ID NO: 520 - protein, 1056 aa, unidentified
  REGION 1..1056: note = Description of Unknown: uncultivated organism
  REGION 1..1056: note = MG4-102 effector
VFKDDMILGIDIGSNSVGWALLGYDADSREVTGITDAGVRIFEAGMDGDISTGNATSRCAERRAKRLIRRNLDRRRRRMLKLQHILQRAGLLPEGDDIEKIILDLDAEVRKFCLAVPEGERPSREVLAHTYPYFLRALAINGKLPPHLLGRAVYHLAQRRGFWSNRKSLVDEKELGQVKQGISELRGKMEETGARTLGEYFAYRDPTRDRIRGLWTSRDMYRHEFDLIMNNHPHLVTPDLRKSIEKAIFFQRKLKSVKSLIGHCALEKNKRRCPWYRFEAQEFRILQTITNLKVIEPDGELRELSAEEWENLYRVMMGETGDLDRHGNIKISKAKKLLGLPKGSKFTIEDGGEKTLKGNKTLSSLLAVFGDSWNEFSPRDKEDILHDLRSFEKREPLVRKAMRKWNLEQEEAEAFADIKLPEDYCNLSYKALCKLLPLLREGWSYGSAVKEIYPEAFKSDGIVHELLPGLDTSSIDLRNPVVERSLTELRRVVNAVIRKYGKPGIIRLEMAREMKLSANRKKEIIKRNRDLEKQREKAAEKIRDVFPGMTPGRTDTTKVLLAEECGWRCPYTGRSISIRTLFGPHPQFDIEHIIPRSRSLDDSFLNKTLCYHEENRNVKRNRTPYEAYHGTPRYDEILDRVAKFNGRLAKEKLRRFRMTPEEVEDRFADFTQRQLNDTRYAAKEAAAYLGMLYGGSVTSIDGRKRVQVLSGGLTYKVRSAYNLNGILNDGDVKTRNDHRHHAVDAIAIGMTSPGMVKKLTEIAKELENRRDYIRFGTGKGILPDKWNTFDEDVRRVIGKIKVSHKIPRKVRGAFHEETFYSKEYEHKVNGKTGMYRHVRIPLENLEKNKIPKVVDKGVREAIIRKLDELGIDDPRRAFRNGENLPEIVSADGAKRIPIKKVKIIRKQNTIRVGEGRRARNVVPGNNHHMMIYAVLDKRGEVKKWDGEVVTLLEARRRLMNGEPLVNKVNTPTARYVMTVQRGDVFEMDIKGKRELVITRDVPQTKQMSFVRLNDARLKKEIKSSGEWFTKRPNSMRTSNVKKFTITPLGELRNSNA

SEQ ID NO: 521 - protein, 1056 aa, unidentified; identical to SEQ ID NO: 520
  REGION 1..1056: note = Description of Unknown: uncultivated organism
  REGION 1..1056: note = MG4-103 effector

SEQ ID NO: 522 - protein, 867 aa, unidentified
  REGION 1..867: note = Description of Unknown: uncultivated organism with predicted taxonomy: Planctomycetes bacterium
  REGION 1..867: note = MG4-104 effector
LYHLGQRRGYKSNRKQEAKDSEAGVVLSQIAELKEAIRNSGARTLGEYFSTLDPEQRRIRTRYTERGMFEEEFRKICAAQRPLISEALERALYHAIFFQRKLKSCKHLIGFCRLEPEERRCSFQDPLAQRFRILQEVNHLRVDGRGVLRPLTEEERQKVLTVLDGLSGELNAQGTIALSALGRLAGLRRGEKFTLGDEDKKVYGNELHAILFRVFGARAAAMKEEERQAFFHHLACMEKDDALRRILRTRWGLSEEAAEKAAHISLPDDYCGFSRKALKQLLPDLESGIALSTVIKLKYPEQFQASERVLEFLPPLDETGLQLRNPVVHRTLTEMRQVVNAVIRKYGKPDLIRLELARDLKNSSKDRENITRRNRLREKERERIAREIAQEAGVEKPSRRDILKVMLAEECDYTCPYTGRRFSMRDLLHGGLVHIEHIVPYSRSMDDSFINKTLSCRDANAEKGNRLPFEVFSPEAYREILERVRRFKGPFAEAKLERFKMQKAESRDFIERNLNDTRYASKLATEYLALLYGGRWDRNGVLRLQCSAGGCTAVVRRAWGGNYLLGEGEKERGDFRHHAIDALTVAVVSPAIVKAVAEMPKETVRKAIEEKQPLIVNSLYTQARAKLDAAGISHHTINRARGAFHKETIYSKSHGGDLRHVRRRLDTLEPKTVAEIVDVAIRRAVEEKLAELKMTDPRKAFKDGGNLPVLRDRQGRFVNTIRSVRVRQNVKTRSIGEGDRKREVANGANLVLAIYARHDADGREIGWDGEVVTVLDARLRLQRNEPVFPKVKEGNPLKFTLRKGDVVRWSKDGQEYLCVIRGISLPQFSCMPINDARDVKTLKAAGLWFTPTLSAAFRGKMEKFHTT

SEQ ID NO: 523 - protein, 1021 aa, unidentified
  REGION 1..1021: note = Description of Unknown: uncultivated organism
  REGION 1..1021: note = MG4-105 effector
MKQRILGLDLGINSVGWAIVDDDNDAQVDLLDWGSRIFAPGLAATTEEIVSGKGESRCAERRLKRAQRIAYRRRRQHKDELTRVLSGSGLLPEQVSPEFFLQIDRAFLAGLPEDEQKRAAHVVPYLLRAAALDRPLAPMQLGRALYHLGQRRGYKSNRKQEAKDSEAGVVLSQIAELKEAIRNSGARTLGEYFSTLDPEQRRIRTRYTERGMFEEEFRKICAAQRPLISEALERALYHAIFFQRKLKSCKHLIGFCRLEPEERRCSFQDPLAQRFRILQEVNHLRVDGRGVLRPLTEEERQKVLTVLDGLSGELNAQGTIALSALGRLAGLRRGEKFTLGDEDKKVYGNELHAILFRVFGARAAAMKEEERQAFFHHLACMEKDDALRRILRTRWGLSEEAAEKAAHISLPDDYCGFSRKALKQLLPDLESGIALSTVIKLKYPEQFQASERVLEFLPPLDETGLQLRNPVVHRTLTEMRQVVNAVIRKYGKPDLIRLELARDLKNSSKDRENITRRNRLREKERERIAREIAQEAGVEKPSRRDILKVMLAEECDYTCPYTGRRFSMRDLLHGGLVHIEHIVPYSRSMDDSFINKTLSCRDANAEKGNRLPFEAFSPEAYREILERVRRFKGPFAEAKLERFKMQKAESRDFIERNLNDTRYASKLATEYLALLYGGRWDRNGVLRLQCSAGGCTAVVRRAWGGNYLLGEGEKERGDFRHHAIDALTVAVVSPAIVKAVAEMPKETVRKAIEEKQPLIVNSLYTQARAKLDAAGISHHTINRARGAFHKETIYSKSHGGDLRHVRRRLDTLEPKTVAEIVDVAIRRAVEEKLAELKMTDPRKAFKDGGNLPVLRDRQGRFVNTIRSVRVRQNVKTRSIGEGDRKREVANGANLVLAIYARHDADGREIGWDGEVVTVLDARLRLQRNEPVFPKVKEGNPLKFTLRKGDVVRWAKDGQEYLCVIRGISLPQFSCMPINDARDVKTLKAAGLWFTPTLSAAFRGKMEKFHTTPLGELRRAND

SEQ ID NO: 524 - protein, 1022 aa, unidentified
  REGION 1..1022: note = Description of Unknown: uncultivated organism
  REGION 1..1022: note = MG4-106 effector
MKQRVLGLDLGISSVGWAVIDDDNTNRIELIDWGSRIFEPGVDATEDEIRAGKGESRCSVRRQKRSLRRMYQRRRRHKEEVTAILMREGMLPEKLTPEFFVKVDRDFLLTLPENERKRAAHVVPYLLRSLALDRPLDRYQLGRALYQLAQRRGYKSNRKQEAKDSESGKVLSGIADLKQAMADSGARTLGEYFSMLDPEESRIRTRYTERGMFEDEFHKICVAQRHIISVEVEAELHHAIFFQRKLRSCKHLIGNCRLEPDKKRCSYSTMAAQRFRLVQGVNNLKVSNKSGVIRELTEDERKMLLWCLDGLSGHLNSKGRIALSKLGKLVGLDKGEKFTLGDDDKDICGNELNAILFRAFGDKAVELSEAERNIFLNTLNSVENNAVMRKILMEKWHFNEETAEELSHIVLPDDYCNYSRKAIENLLPDMEAGIALNTIIKLKYPEQYQPSDVVEPVLPRLEEVDLDIRNPIVQRTLSELRRVVNAVIRKYGKPDLIRVELARDLKNSSKDRENISRKNSEREKERKKIAEKIAREAGIENPSPRDILKVMLAEECDYTCPYTGKSFSLNQLLHGGEIHIEHIVPYSRSMDDSYANKTLSYRDANMAKSDKLPFEAFDSAKYVEIIERVRHFKGSFAKIKLEKFELETAEVQDFINRNLNDTRYASKLATEYLALLYGGMNDRNRVQRIQCSAGGCTAVVRRAWGGNYLLGEGEKVRGDHRHHAIDALTIAVTSPAIVKLIAGLKGEDRRRAIEEKRPLVVTDLYTQAKAKLDSAGISHHTVNKLRGALHKETIYSKSYGGDVRHARKALEDLEADKVKDIVDDAIRKAVEEKLDDLGIADPKKAFKGGTNLPVLRDRNGNIVNIIKRVRVLQTQSTRTIGSGDGQREVANGANHVLAIYSVLDKDGNEIGWDGEIVSLMDARLRMLKGEAVYPLEKNGNPLKFTLRKGDIVRWTKDGEELLCVIRGVALPQFQCVPVYEARDVKALKSAKKWFTPTLSAAFKGKMEKYTTTALGELRRAND

SEQ ID NO: 525 - protein, 992 aa, unidentified
  REGION 1..992: note = Description of Unknown: uncultivated organism
  REGION 1..992: note = MG4-107 effector
IDWGSRIFEPGVDATEDEIRAGKGESRCSVRRQKRSLRRMYQRRRRHKEEVTAILMREGMLPEKLTPEFFVKVDRDFLLTLPENERKRAAHVVPYLLRSLALDRPLDRYQLGRALYQLAQRRGYKSNRKQEAKDSESGKVLSGIADLKQAMADSGARTLGEYFSMLDPEESRIRTRYTERGMFEDEFHKICVAQRHIISVEVEAELHHAIFFQRKLRSCKHLIGNCRLEPDKKRCSYSTMAAQRFRLVQGVNNLKVSNKSGVIRELTEDERKMLLWCLDGLSGHLNSKGRIALSKLGKLVGLDKGEKFTLGDDDKDICGNELNAILFRAFGDKAVELSEAERNIFLNTLNSVENNAVMRKILMEKWHFNEETAEELSHIVLPDDYCNYSRKAIENLLPDMEAGIALNTIIKLKYPEQYQPSDVVEPVLPRLEEVDLDIRNPIVQRTLSELRRVVNAVIRKYGKPDLIRVELARDLKNSSKDRENISRKNSEREKERKKIAEKIAREAGIENPSPRDILKVMLAEECDYTCPYTGKSFSLNQLLHGGEIHIEHIVPYSRSMDDSYANKTLSYRDANMAKSDKLPFEAFDSAKYVEIIERVRHFKGSFAKIKLEKFELETAEVQDFINRNLNDTRYASKLATEYLALLYGGMNDRNRVQRIQCSAGGCTAVVRRAWGGNYLLGEGEKVRGDHRHHAIDALTIAVTSPAIVKLIAGLKGEDRRRAIEEKRPLVVTDLYTQAKAKLDSAGISHHTVNKLRGALHKETIYSKSYGGDVRHARKALEDLEADKVKDIVDDAIRKAVEEKLDDLGIADPKKAFKGGTNLPVLRDRNGNIVNIIKRVRVLQTQSTRTIGSGDGQREVANGANHVLAIYSVLDKDGNEIGWDGEIVSLMDARLRMLKGEAVYPLEKNGNPLKFTLRKGDIVRWTKDGEELLCVIRGVALPQFQCVPVYEARDVKALKSAKKWFTPTLSAAFKGKMEKYTTTALGELRRAND

SEQ ID NO: 526 - protein, 1021 aa, unidentified
  REGION 1..1021: note = Description of Unknown: uncultivated organism
  REGION 1..1021: note = MG4-108 effector
MKQRILGLDLGINSVGWAIVDDDNDAQVDLLDWGSRIFAPGLAATTEEIVSGKGESRCAERRLKRAQRIAYRRRRQHKDELTRVLSGSGLLPEQVSPDFFLQIDRAFLAGLPEDEQKRAAHVVPYLLRAAALDRPLEPMQLGRALYHLGQRRGYKSNRKQEAKDSEAGVVLSQIAELKEAIRNSGARTLGEYFSTLDPEQRRIRTRYTERGMFEEEFRKICAAQRPLISEALERALYHAIFFQRKLKSCKHLIGFCRLEPEERRCSFQDPLAQRFRILQEVNHLRVDGRGVLRPLTEEERQKVLTVLDGLSGELNAQGTIALSALGRLAGLRRGEKFTLGDEDKKVYGNELHAILFRVFGARAAAMNEEERQAFFHHLACMEKDDALRRILRTRWGLSEEAAEKAAHISLPDDYCGFSCKALKQLLPDLESGIALSTVIKLKYPEQFQASERVLAFLPPLDETGLQLRNPVVHRTLTEMRQVVNAVIRKYGKPDLIRLELARDLKNSSKDRENITRRNRLREKERERIAREIAQEAGVEKPSRRDILKVMLAEECDYTCPYTGRRFSMRDLLHGGLVHIEHIVPYSRSMDDSFINKTLSCRDANAEKGNRLPFEAFSPEAYREILERVRRFKGPFAEAKLERFKMQKAESRDFIERNLNDTRYASKLATEYLALLYGGRWDRNGVLRLQCSAGGCTAVVRRAWGGNYLLGEGEKERGDFRHHAIDALTVAVVSPAIVKAVAEMPKETVRKAIEEKQPLIVNSLYTQARAKLDAAGISHHTINRARGAFHKETIYSKSHGGDLRHVRRRLDTLEPKTVAEIVDVAIRRAVEEKLAELKMTDPRKAFKDGGNLPVLRDRQGRFVNTIRSVRVRQNVKTRSIGEGDRKREVANGANLVLAIYARHDADGREIGWDGEVVTVLDARLRLQRNEPVFPKVKEGNPLKFTLRKGDVVRWSKDGQEYLCVIRGISLPQFSCMPINDARDVKALKAAGLWFTPTLSAAFRGKMEKFHTTPLGELRRAND

SEQ ID NO: 527 - protein, 883 aa, unidentified
  REGION 1..883: note = Description of Unknown: uncultivated organism with predicted taxonomy: Planctomycetes bacterium
  REGION 1..883: note = MG4-109 effector
MQLGRALYHLGQRRGYKSNRKQEAKDSEAGVVLSQIAELKEAIRNSGARTLGEYFSTLDPEQRRIRTRYTERGMFEEEFRKICAAQRPLISEALERALYHAIFFQRKLKSCKHLIGFCRLEPEERRCSFQDPLAQRFRILQEVNHLRVDGRGVLRPLTEEERQKVLTVLDGLSGELNAQGTIALSALGRLAGLRRGEKFTLGDEDKKVYGNELHAILFRVFGARAAAMKEEERQAFFHHLACMEKDDALRRILRTRWGLSEEAAEKAAHISLPDDYCGFSRKALKQLLPDLESGIALSTVIKLKYPEQFQASERVLEFLPPLDETGLQLRNPVVHRTLTEMRQVVNAVIRKYGKPDLIRLELARDLKNSSKDRENITRRNRLREKERERIAREIAQEAGVEKPSRRDILKVMLAEECDYTCPYTGRRFSMRDLLHGGLVHIEHIVPYSRSMDDSFINKTLSCRDANAEKGNRLPFEVFSPEAYREILERVRRFKGPFAEAKLERFKMQKAESRDFIERNLNDTRYASKLATEYLALLYGGRWDRNGVLRLQCSAGGCTAVVRRAWGGNYLLGEGEKERGDFRHHAIDALTVAVVSPAIVKAVAEMPKETVRKAIEEKQPLIVNSLYTQARAKLDAAGISHHTINRARGAFHKETIYSKSHGGDLRHVRRRLDTLEPKTVAEIVDVAIRRAVEEKLAELKMTDPRKAFKDGGNLPVLRDRQGRFVNTIRSVRVRQNVKTRSIGEGDRKREVANGANLVLAIYARHDADGREIGWDGEVVTVLDARLRLQRNEPVFPKVKEGNPLKFTLRKGDVVRWSKDGQEYLCVIRGISLPQFSCMPINDARDVKTLKAAGLWFTPTLSAAFRGKMEKFHTTPLGELRRAND

SEQ ID NO: 528 - protein, 1021 aa, unidentified
  REGION 1..1021: note = Description of Unknown: uncultivated organism
  REGION 1..1021: note = MG4-110 effector
MKQRILGLDLGINSVGWAIVDDDNDAQVDLLDWGSRIFAPGLAATTEEIVSGKGESRCAERRLKRAQRIAYRRRRQHKDELTRVLSGSGLLPEQVSPDFFLQIDRAFLAGLPEDEQKRAAHVVPYLLRAAALDRPLEPMQLGRALYHLGQRRGYKSNRKQEAKDSEAGVVLSQIAELKEAIRNSGARTLGEYFSTLDPEQRRIRTRYTERGMFEEEFRKICAAQRPLISEALERALYHAIFFQRKLKSCKHLIGFCRLEPEERRCSFQDPLAQRFRILQEVNHLRVDGRGVLRPLTEEERQKVLTVLDGLSGELNAQGTIALSALGRLAGLRRGEKFTLGDEDKKVYGNELHAILFRVFGARAAAMKEEERQAFFHHLACMEKDDALRRILRTRWGLSEEAAEKAAHISLPDDYCGSSRKALKQLLPDLESGIALSTVIKLKYPEQFQASERVLEFLPPLDETGLQLRNPVVHRTLTEMRQVVNAVIRKYGKPDLIRLELARDLKNSSKDRENIARRNRLREKERERIAREIAQEAGVEKPSRRDILKVMLAEECDYTCPYTGRRFSMRDLLHGGLVHIEHIVPYSRSMDDSFINKTLSCRDANAEKGNRLPFEAFSPEAYREILERVRRFKGPFAEAKLERFKLQKAESRDFIERNLNDTRYASKLATEYLALLYGGRWDRNGVLRLQCSAGGCTAVVRRAWGGNYLLGEGEKERGDFRHHAIDALTVAVVSPAIVKAVAEMPKETVRKAIEEKQPLIVNSLYTQARAKLDAAGISHHTINRARGAFHKETIYSKSHGGDLRHVRRRLDTLEPKTVAEIVDVAIRRAVEEKLAELKMTDPRKAFKDGGNLPVLRDRQGRFVNTIRSVRVRQNVKTRSIGEGDRKREVANGANLVLAIYARHDADGREIGWDGEVVTVLDARLRLQRNEPVFPKVKEGNPLKFTLRKGDVVRWSKDGQEYLCVIRGISLPQFSCMPINDARDVKTLKAAGLWFTPTLSAAFRGKMEKFHTTPLGELRRAND

SEQ ID NO: 529 - protein, 879 aa, unidentified
  REGION 1..879: note = Description of Unknown: uncultivated organism with predicted taxonomy: Planctomycetes bacterium
  REGION 1..879: note = MG4-111 effector
KEEVTAILMREGMLPEKLTPEFFVKVDRDFLLTLPENERKRAAHVVPYLLRSLALDRPLDRYQLGRALYQLAQRRGYKSNRRQEAKDSESGKVLSGIADLKQAMADSGARTLGEYFSMLDPEESRIRTRYTERGMFEDEFHKICVAQRHIISVEVEAELHHAIFFQRKLRSCKHLIGNCRLEPDKKRCSYSTMAAQRFRLVQGVNNLKVSNKSGVIRELTEDERENALVVLDGLSGHLNSKGRIALSKLGKLVGLDKGEKFTLGDDDKDICGNELNAILFRAFGDKAVELSEAERNIFLNTLNSVENNAVMRKILMEKWHFSEETAEELSHIVLPDDYCNYSRKAIENLLPDMEAGIALNTIIKLKYPEQYQSSDVVEPDLPRLEEVDLDIRNPIVQRTLSELRRVVNAVIRKYGKPDLIRVELARDLKNSSKDRENISRKNSEREKERKKIAEKIAREAGIENPSPRDILKVMLAEECDYTCPYTGKSFSLNQLLHGGEIHIEHIVPYSRSMDDSYANKTLSYRDANMAKSDKLPFEAFDSAKYAEIIERVRHFKGSFAKIKLEKFELETAEVQDFINRNLNDTRYASKLATEYLALLYGGRNDRNGVQRIQCSAGGCTAVVRRAWGGNYLLGEGEKVRGDHRHHAIDALTIAVTSPAIVKLIAGVKGEDRRRAIEEKRPLVVTDLYTQAKAKLDSAGISHHTVNKLRGALHKETIYSKSYGGDVRHARKALEDLEADKVKDIVDDAIRKAVEEKLDDLGIADPKKAFKGGTNLPVLRDRNGNIVNIIKRVRVLQTQSTRTIGSGDGQREVANGANHVLAIYSVLDKDGNEIGWDGEIVSLMDARLRMLKGEAVYPLEKNGNPLKFTLRKGDIVRWTK

SEQ ID NO: 530 - protein, 1021 aa, unidentified; identical to SEQ ID NO: 526
  REGION 1..1021: note = Description of Unknown: uncultivated organism
  REGION 1..1021: note = MG4-112 effector

SEQ ID NO: 531 - protein, 992 aa, unidentified; identical to SEQ ID NO: 525
  REGION 1..992: note = Description of Unknown: uncultivated organism
  REGION 1..992: note = MG4-113 effector

SEQ ID NO: 532 - protein, 1021 aa, unidentified
  REGION 1..1021: note = Description of Unknown: uncultivated organism
  REGION 1..1021: note = MG4-114 effector
MKQRILGLDLGINSVGWAIVDDDNDAQVDLLDWGSRIFAPGLAATTEEIVSGKGESRCAERRLKRAQRIAYRRRRQHKDELTRVLSGSGLLPEQVSPEFFLQIDRAFLAGLPEDEQKRAAHVVPYLLRAAALDRPLEPMQLGRALYHLGQRRGYKSNRKQEAKDSEAGVVLSQIAELKEAIRNSGARTLGEYFSTLDPEQRRIRTRYTERGMFEEEFRKICAAQRPLISEALERALYHAIFFQRKLKSCKHLIGFCRLEPEERRCSFQDPLAQRFRILQEVNHLRVDGRGVLRPLTEEERQKVLTVLDGLSGELNAQGTIALSALGRLAGLRRGEKFTLGDEDKKVYGNELHAILFRVFGARAAAMKEEERQAFFHHLACMEKDDALRRILRTRWGLSEEAAEKAAHISLPDDYCGFSRKALKQLLPDLESGIALSTVIKLKYPEQFQASERVLEFLPPLDETGLQLRNPVVHRTLTEMRQVVNAVIRKYGKPDLIRLELARDLKNSSKDRENITRRNRLREKERERIAREIAQEAGVEKPSRRDILKVMLAEECDYTCPYTGRRFSMRDLLHGGLVHIEHIVPYSRSMDDSFINKTLSCRDANAEKGNRLPFEAFSPEAYREILERVRRFKGPFAEAKLERFKMQKAESRDFIERNLNDTRYASKLATEYLALLYGGRWDRNGVLRLQCSAGGCTAVVRRAWGGNYLLGEGEKERGDFRHHAIDALTVAVVSPAIVKAVAEMPKETVRKAIEEKQPLIVNSLYTQARAKLDAAGISHHTINRARGAFHKETIYSKSHGGDLRHVRRRLDTLEPKTVAEIVDVAIRRAVEEKLAELKMTDPRKAFKDGGNLPVLRDRQGRFVNTIRSVRVRQNVKTRSIGEGDRKREVANGANLVLAIYARHDADGREIGWDGEVVTVLDARLRLQRNEPVFPKVKEGNPLKFTLRKGDVVRWSKDGQEYLCVIRGISLPQFSCMPINDARDVKTLKAAGLWFTPTLSAAFRGKMEKFHTTPLGELRRAND

SEQ ID NO: 533 - protein, 1015 aa, unidentified
  REGION 1..1015: note = Description of Unknown: uncultivated organism
  REGION 1..1015: note = MG4-115 effector
GLDLGINSVGWAIVDDDNDAQVDLLDWGSRIFAPGLAATTEEIVSGKGESRCAERRLKRAQRIAYRRRRQHKDELTRVLSGSGLLPEQVSPDFFLQIDRAFLAGLPEDEQKRAAHVVPYLLRAAALDRPLEPMQLGRALYHLGQRRGYKSNRKQEAKDSEAGVVLSQIAELKEAIRNSGARTLGEYFSTLDPEQRRIRTRYTERGMFEEEFRKICAAQRPLISEALERALYHAIFFQRKLKSCKHLIGFCRLEPEERRCSFQDPLAQRFRILQEVNHLRVDGRGVLRPLTEEERQKVLTVLDGLSGELNAQGTIALSALGRLAGLRRGEKFTLGDEDKKVYGNELHAILFRVFGARAAAMNEEERQAFFHHLACMEKDDALRRILRTRWGLSEEAAEKAAHISLPDDYCGFSCKALKQLLPDLESGIALSTVIKLKYPEQFQASERVLAFLPPLDETGLQLRNPVVHRTLTEMRQVVNAVIRKYGKPDLIRLELARDLKNSSKDRENITRRNRLREKERERIAREIAQEAGVEKPSRRDILKVMLAEECDYTCPYTGRRFSMRDLLHGGLVHIEHIVPYSRSMDDSFINKTLSCRDANAEKGNRLPFEAFSPEAYREILERVRRFKGPFAEAKLERFKMQKAESRDFIERNLNDTRYASKLATEYLALLYGGRWDRNGVLRLQCSAGGCTAVVRRAWGGNYLLGEGEKERGDFRHHAIDALTVAVVSPAIVKAVAEMPKETVRKAIEEKQPLIVNSLYTQARAKLDAAGISHHTINRARGAFHKETIYSKSHGGDLRHVRRRLDTLEPKTVAEIVDVAIRRAVEEKLAELKMTDPRKAFKDGGNLPVLRDRQGRFVNTIRSVRVRQNVKIRSIGEGDRKREVANGANLVLAIYARHDADGREIGWDGEVVTVLDARLRLQRNEPVFPKVKEGNPLKFTLRKGDVVRWSKDGQENLCVIRGISLPQFSCMPINDARDVKTLKAAGLWFTPTLSAAFRGKMEKFHTTPLGELRRAND

SEQ ID NO: 534 - protein, 1071 aa, unidentified
  REGION 1..1071: note = Description of Unknown: uncultivated organism
  REGION 1..1071: note = MG4-116 effector
MAHGLSEENDYILGIDLGSASLGWALVALSESGDPTGIIKLGVRIFEPAVSGDVEKGQDESNSVARRGARLIRRQRRRRAARQAALFRLLQKQNLLPGTTGVERDSSAQRHVILNELDSALSLKWRQRDSENGFVDLPIYHLRKAALYHALDPFELGRVFYHLSQRRGFRSNRKAERIEKKGEDQGAVKTAISELDEAIRAAGAQTIGEYFAGLDPHTQKVRRIWTGRSMYEEEFGKIWAIQSRFHPTLLTEELHREIWRLLFYQRPIKAQKNLIGECELEPGERRASWATLEAQRFRLLQKVNDLEIIYPGKLMGVALSADQRQHVYRLLDEHGDQTFKAIREHLGLDKNIGFNLERGGERSLKGNIVQRRMIEAFGPRWQALADEEKRQVVDDWRSIESPESLQRKLIAKWRLVPEAASRLAKSSPPSGYCMLSRKAIRRVLPLMFDGKRFMAARQEIPEYVPKLEAPLDRIPPVLDALRNLRNPAVERALTEVRKVVNALVGEYGKPSEVRIELARDLKKPRQERARATDLNRKRQRERDSVKERIVREGGLERPSRDDIEKVLLWEECGGICPYTGKSIAFASLFGEHPQFGVEHIIPFSRLPDNSFQNKTLCDHEQGRNVKRNKTPFEAYPNTEEYDAILTRIKAWETPNLGKQKRFELRTLEELEGFSTRQLNDTRYSSRLACDLIAKLYGGRVIETETGTRQVVFASSGMVTATLRKGLGLEAVLCEASGSSNGETRGKSRTDHRHHAIDALTIALTRQSMIQTMSRTASLEPNWAITSRSLRTIPSPWSNFIDSVRPHVQELLVSHRPEHRLTGALHDETNYSKPRKVNGKSVVHIRKPVNGLSANDIENIVDPVIRDAVRRKAIDLGGDLKRCNPNAGVDDWPQLVTKTGKHVPIKRVRISKSLEVETIATGNRTRYVATSSNHHLAIFAQIDSQGREKHWEPRIVSLYAAMDRKRKGLPVVQRFHPETGDFTFKFSLMGGDTVLLHKDCDHSKGICNASVWRLRTIASNGQLSLVRINDARLKADIQKAKEWWSPATDSLRKFSAIKVSIDSLGRLHGAND

SEQ ID NO: 535 - protein, 1062 aa, unidentified
  REGION 1..1062: note = Description of Unknown: uncultivated organism with predicted taxonomy: Acidobacteriales bacterium 59-55
  REGION 1..1062: note = MG4-117 effector
MSAALEQQKYVLGLDLGSASLGWALIALNDADDPVSLIRAGVRIFEPGVDGTSIEIEQGKDQSKAVERRTARLHRRQLRRRAARQRDLFRLLQRHSLLPTPEGVIGSPEEQRHLILNSLDQQLTDKWQSAFPINRFAELPIYFLRKAALDQPLEAHEIGRILFHLIQRRGFLSNRRENKQNPDQKKELGQVKAEIHSLEQEIQNAGARTLGEFFAGLDPHAQKVRRRWTARKMFQDEFEKIWEAQTAHRPELLTQELHDKIAHLLFFQRPIAAQTHLIGKCELETGKQRAPWAAMEAQRFRILQKVNDLRLINPGSLISDPLTEEGRQRLYHLLDREGDQTFKAIRKYLSFSAEVQFNLEKGDEKRLRGNRTQAAMRKVFGERWDTIGEGKQHQIIENWRNSESDEVLIREAMEQWSLDAAAATLLSEQTPEPGYCAVSLAAISKLLPLMASGKSFKVAETELYGARFSGGTIFETLPEVRKQLESLRNPAVERSLTELRKVVNAIVREYGKPHEIRIELARELKKPRQERIEATKKNRNRQREREDVAVRILRECGLSNPSRRDIEKARLHEECGGYCPYTGRHIPFSTLFDNSEFDVEHIIPRSRYPDDSFQNKTLCYLPENRDVKKGQTPWEAYGKDEQRWAEIMTRVSSWKNRGKMARFAIQTEEALGDFSARQMNDTRYASVLASRFLGALYGGRDLVDAEKVRQVIFASSGAVTATLRSSWGLEAILREIVPTEPGESRGKPRTDHRHHAIDAITIALTRPKVIQSMALAASLEPWQRDSRAWRKIESPWRDFVLSIRPHIEQMLVSHRPEHKMSGELHKGTNYPAPHNYKGKPTVHTRCALSALSAADIADDEVIVDPAVRDAVRAKLEKLGGNPKLFDRPENAPCLESRDGRFIPIRKVRIREAKKPILVGTGVRERYVASGGIHHIGLFVVRDARRREVWESEVVQITDAYERHREHLPVVCRTHDAEEVAFLFSLMKDDTVELEKDGTRGIYRVKKFEATGKITFVPVNNAMLDKMQYTTGAAWSRMPATLKPMSPRKIVIDLLGKVHPAND

SEQ ID NO: 536 - protein, 1071 aa, unidentified; identical to SEQ ID NO: 534
  REGION 1..1071: note = Description of Unknown: uncultivated organism
  REGION 1..1071: note = MG4-118 effector

SEQ ID NO: 537 - protein, 1062 aa, unidentified
  REGION 1..1062: note = Description of Unknown: uncultivated organism
  REGION 1..1062: note = MG4-119 effector
MSSALEQQKYVLGLDLGSASLGWALIALNDADDPVSLIRAGVRIFEPGVDGTSIEIEQGKDQSKAVERRTARLHRRQLRRRAARQRDLFRLLQRHSLLPTPEGVIGSPEEQRHLILNSLDQQLTDKWQSAFPINRFAELPIYFLRKAALDQPLEAHEIGRILFHLIQRRGFLSNRRENKQNPDQKKELGQVKAEIHSLEQEIQNAGARTLGEFFAGLDPHAQKVRRRWTARKMFQDEFEKIWEAQTAHRPELLTQELHDKIAHLLFFQRPIAAQTHLIGKCELETGKQRAPWAAMEAQRFRILQKVNDLRLINPGSLISDPLTEEGRQRLYHLLDREGDQTFKAIRKYLSFSAEVQFNLEKGDEKRLRGNRTQAAMRKVFGERWDTIGEGKQHQIIENWRNSESDEVLIREAMEQWSLDAAAATLLSEQTPEPGYCAVSLAAISKLLPLMASGKSFKVAETELYGARFSGGTIFETLPEVRKQLESLRNPAVERSLTELRKVVNAIVREYGKPHEIRIELARELKKPRQERIEATKKNRNRQREREDVAVRILRECGLSNPSRRDIEKARLHEECGGYCPYTGRHIPFSTLFDNSEFDVEHIIPRSRYPDDSFQNKTLCYLPENRDVKKGQTPWEAYGKDEQRWAEIMTRVSSWKNRGKMARFAIQTEEALGDFSARQMNDTRYASVLASRFLGALYGGRDLVDAEKVRQVIFASSGAVTATLRSSWGLEAILREIVPTEPGESRGKPRTDHRHHAIDAITIALTRPKVIQSMALAASLEPWQRDSRAWRKIESPWRDFVLSIRPHIEQMLVSHRPEHKMSGELHKGTNYPAPHNYKGKPTVHTRCALSALSAADIADDEVIVDPAVRDAVRAKLEKLGGNPKLFDRPENAPCLESRDGRFIPIRKVRIREAKKPILVGTGVRERYVASGGIHHIGLFVVRDARRREVWESEVVQITDAYERHREHLPVVCRTHDAEEVAFLFSLMKDDTVELEKDGTRGIYRVKKFEATGKITFVPVNNAMLDKMQYTTGAAWSRMPATLKPMSPRKIVIDLLGKVHPAND

SEQ ID NO: 538 - protein, 1071 aa, unidentified; identical to SEQ ID NO: 534
  REGION 1..1071: note = Description of Unknown: uncultivated organism
  REGION 1..1071: note = MG4-120 effector

SEQ ID NO: 539 - protein, 972 aa, unidentified
  REGION 1..972: note = Description of Unknown: uncultivated organism with predicted taxonomy: Acidobacteriales bacterium 59-55
  REGION 1..972: note = MG4-121 effector
LLQRHSLLPTPEGVIGSPEEQRHLILNSLDQQLTDKWQSAFPINRFAELPIYFLRKAALDQPLEAHEIGRILFHLIQRRGFLSNRRENKQNPDQKKELGQVKAEIHSLEQEIQNAGARTLGEFFAGLDPHAQKVRRRWTARKMFQDEFEKIWEAQTAHRPELLTQELHDKIAHLLFFQRPIAAQTHLIGKCELETGKQRAPWAAMEAQRFRILQKVNDLRLINPGSLISDPLTEEGRQRLYHLLDREGDQTFKAIRKYLSFSAEVQFNLEKGDEKRLRGNRTQAAMRKVFGERWDTIGEGKQHQIIENWRNSESDEVLIREAMEQWSLDAAAATLLSEQTPEPGYCAVSLAAISKLLPLMASGKSFKEAETELYGARFSGGTIFETLPEVRKQLESLRNPAVERSLTELRKVVNAIVREYGKPHEIRIELARELKKPRQERIEATKKNRNRQREREDVAVRILRECGLSNPSRRDIEKARLHEECGGYCPYTGRHIPFSTLFDNSEFDVEHIIPRSRYPDDSFQNKTLCYLPENRDVKKGQTPWEAYGKDEQRWAEIMTRVSSWKNRGKMSRFAIQTEEALGDFSARQMNDTRYASVLASRFLGALYGGRDLVDAEKVRQVIFASSGAVTATLRSSWGLEAILREIVPTEPGEPRGKPRTDHRHHAIDAITIALTRPKVIQSMALAASLEPWQRDSRAWRKIESPWRDFVLSIRPHIEQMLVSHRPEHKMSGELHKGTNYPAPHNYKGKPTVHTRCALSALSAADIADDEVIVDPAVRDAVRAKLEKLGGNPKLFDRPENAPCLESRNGRFIPIRKVRIREAKKPILVGTGVRERYVASGGIHHIGLFVVRDARRREVWESEVVQITDAYERHREHLPVVCRIHDAEEAAFLFSLMKDDTVELEKDGTRGIYRVKKFEATGKITFVPVNNAMLDKMQYTTGAAWSRMPATLKPMSPRKIVIDLLGKVHPAND

SEQ ID NO: 540 - protein, 853 aa, unidentified
  REGION 1..853: note = Description of Unknown: uncultivated organism with predicted taxonomy: uncultured bacterium
  REGION 1..853: note = MG4-122 effector
MSSALERPQKYVLGLDLGSASLGWALIALNDADNPTSLIRAGVRIFEPGVDGTSMEIEQGKDQSKAVERRTARLHRRQLRRRAARQRDLFRLLQRHSLLPAPGTLDGSPEEQRHSILNELDQALARKWQSAFPDNRFAQLPLYYLRKRALDEPLEAYEIGRILFHLIQRRGFLSNRRENKQNPDQKKELGQVKAEIHSLEQEIQNAGARTLGEFFAGLDPHAQKVRRRWTARKMFQDEFEKIWETQVIHCPNLLTPELHDKIAHLLFFQRPIAAQSHLVGKCELESGKQRAPWAAMEAQRFRILQKVNDLRLVNPGSLISDPLTEEDRQRLNSLLDREGDQTFKAIKKYLSFPADVQFNLEKGDEKRLRGNRTQAAMRKVFADRWDTMSAGKQHQIVENWRNSESDEALIREAEEQWSLDDTAATLLSEQIPEPGYCAVSLTAISKLLPLMQCGKSFKEAETEVYGARFSGGVVFDTLPEVRKQLESLRNPAVERALTELRKVVNAIVREYGKPYEIRIELARELKKPRQERLEATKKNRTRQREREDIAGRILRECGLSNPSRKDIEKARLHEECGGICPYTGRPIPFSTLFDNSEFDVEHIIPRSRYPDDSFQNKTLCYLPENRDVKKGQTPWEAYGKDEQRWAEIMTRVGSWKNRGKMARFSIQTEEALGEFSARQMNDTRYASVLAARFLGSLYGGRDVVDGDNARQVIFASSGAVTASLRSSWGLEAILHEIVPAESGESRGKPRTDHRHHAIDAITIALTRPKVIQSMARTASLEPWQIDSRAWRKIELPWRDFVPSIRPHIEQMLVSHRPEHKMSGELHKGTNYSAPYNYKGKPTVHTRCLLSALS

SEQ ID NO: 541 - protein, 1071 aa, unidentified; identical to SEQ ID NO: 534
  REGION 1..1071: note = Description of Unknown: uncultivated organism
  REGION 1..1071: note = MG4-123 effector

SEQ ID NO: 542 - protein, 1071 aa, unidentified; identical to SEQ ID NO: 534
  REGION 1..1071: note = Description of Unknown: uncultivated organism
  REGION 1..1071: note = MG4-124 effector

SEQ ID NO: 543 - protein, 1071 aa, unidentified; identical to SEQ ID NO: 534
  REGION 1..1071: note = Description of Unknown: uncultivated organism
  REGION 1..1071: note = MG4-125 effector

SEQ ID NO: 544 - protein, 1079 aa, unidentified
  REGION 1..1079: note = Description of Unknown: uncultivated organism
  REGION 1..1079: note = MG4-126 effector
MNESGSLAQDYVLGIDLGSVSLGWAVIGLDKTDMPVVLLRAGVRLFDPAVTGDIEKGQDESNAVARRVARLLRRQLRRRAARQSELFRLLQGHALLPPYEGNEADASQQRHAILNALDLEIAAKWAKSGGAGAQAAIDLPLYMLRKTALDEALEPYELGRVFYHLSQRRGYRSNRKEQAEKKEAAIKGKKDDDLGTVESGIKELGEAMRSFRTLGEYYASLDPHTHNVRRRWTSRKMYEDEFAAIWEKQAALHPTLLTEELHRQIKHLLFYQRPIKAQSHLIGGCELEPGEPRAAWAALEAQQFRVLQQVNELEVISPGRVTGIPLTAEQRQTVLDLLENSSEITFKKISKALGLADYIGFNLQRGGDTKLKGNLTNTHMAEVFAERWTEMSEEEKKQVVEDWRTIDQEDSLIRRAIEYWNLDESSAKWLASRPAPNGYCMYSRKSIRKLLPLMATGARFRAAEKEVYGIRLTGGLVYDSIPPVRDTLKTLRNPAVERALTELRKVVNALVREYGKPTEVRIELANDLKKPRHERAEAFKYKRKWEKQRIDTKEKMLRELGPGFEYPSRADVEKALLWEECQGECPYTGKRFPFSSLYGENPPLQVEHIIPFSRIPDDSFQNKILCYHEDNQHKANRTPFEAYTDPAQYETILSRVRNWRTPNPGKQCRFELRTLEELEGFSERQLNDTRYACKLACELVGTLYGGRDEKTDTDSRQVVFASSGMVTATLRKSWGLEAIMRETAPSANGQNHGKPRTDHRHHAIDAITIALSRPKMIATLSRNNAQDSYRPSNGHTAPRIQSPWEDFVDSIRPHFEKMLVSHRPDHRLTGALHDETNYGRPHKEEGKDVVHIRKPVEGLSARDINNIVDPAVREAVRAKAAQLGGDLKKWTPKEGRGDWPQLGTKNGKQIPVKRVRIKKALSVETIGKDERTRHVALSSNHHVAIFAMLDKRGIEKRWKSIIVSLFEAMDRKRKGQPIVQTSYPEAGDYVFKFSLMGGDTVLLHKDCDHNQNPCNPSVWRLRSIAANGQLSLVRINDARPKSEIIKAKEWWSPIEDTLRELDAVKVVIDSLGRIHQAGG

SEQ ID NO: 545 - protein, 1076 aa, unidentified
  REGION 1..1076: note = Description of Unknown: uncultivated organism
  REGION 1..1076: note = MG4-127 effector
MSSALERPQKYVLGLDLGSASLGWALIALNDADNPTSLIRAGVRIFEPGVDGTSMEIEQGKDQSKAVERRTARLHRRQLRRRAARQRDLFRLLQRHSLLPAPGTLDGSPEEQRHSILNELDQALARKWQSAFPDNRFAQLPLYYLRKRALDEPLEAYEIGRILFHLIQRRGFLSNRRENKQNPDQKKELGQVKAEIHSLEQEIQNAGARTLGEFFAGLDPHAQKVRRRWTARKMFQDEFEKIWETQVIHCPNLLTPELHDKIAHLLFFQRPIAAQSHLVGKCELESGKQRAPWAAMEAQRFRILQKVNDLRLVNPGSLISDPLTEEDRQRLYSLLDREGDQTFKAIKKYLSFPTDVQFNLEKGDEKRLRGNRTQAAMRKVFADRWDTMSAGKQHQIVENWRNSESDEALIREAEEQWSLDDTAATLLSEQIPEPGYCAVSLTAISKLLPLMQCGKSFKEAETEVYGARFSGGVVFDTLPEVRKQLESLRNPAVERALTELRKVVNAIVREYGKPYEIRIELARELKKPRQERLEATKKNRTRQREREDIAGRILRECGLSNPSRKDIEKARLHEECGGICPYTGRPIPFSTLFDNSEFDVEHIIPRSRYPDDSFQNKTLCYLPENRDVKKGQTPWEAYGKDEQRWAEIMTRVGSWKNRGKMARFSIQTEEALGEFSARQMNDTRYASVLAARFLGSLYGGRDVVDGDNARQVIFASSGAVTASLRSSWGLEAILHEIVPAESGESRGKPRTDHRHHAIDAITIALTRPKVIQSMARTASLEPWQIDSRAWRKIELPWRDFVPSIRPHIEQMLVSHRPEHKMSGELHKGTNYSAPYNYKGKPTVHTRCLLSALSAAKIADDEVIIDTAVRDAVRKKLAELGGNPKLFDRPENAPCLCARDGRLIPIRKVRIRETKNPVKVGKGVRERFTSSGGIHHVALFVTRDEKRREKWDSEVAQVTEIYRRCPRNDRRKSRSQPVVIESPISRQLKSDPEAQFLFSVMKDDTIEVTDPNGIYILRVKKFSDNKQMWFVPVNDAHDDTQQMKLGITWSKTPNSLKELRPRKVVVDLLGKVHPAND

SEQ ID NO: 546 - protein, 1062 aa, unidentified
  REGION 1..1062: note = Description of Unknown: uncultivated organism with predicted taxonomy: Acidobacteriales bacterium 59-55
  REGION 1..1062: note = MG4-128 effector
MSAALEQQKYVLGLDLGSASLGWALIALNDADDPVSLIRAGVRIFEPGVDGTSIEIEQGKDQSKAVERRTARLHRRQLRRRAARQRDLFRVLQRHCLLPAPETLVGSPEEQRHSVLNELDQELAQKWQSTYQGKRFAELPLYYLRKMALDERLEAHEIGRILFHLIQRRGFLSNRRENKQNPDQKKELGQVKAEIHSLEQEIQNAGARTLGEFFAGLDPHAQKVRRRWTARKMFQDEFEKIWEAQKAHRPELLTQELHDKIAHLLFFQRPIAAQTHLIGKCELETGKQRAPWAAMEAQRFRILQKVNDLRLINPGSLISDPLTEEGRQRLYHLLDREGDQTFKAIRKYLSFSAEVQFNLEKGDEKRLRGNRTQAAMRKVFGERWDTIGEGKQHQIIENWRNSESDEVLIREAMEQWSLDAAAATLLSEQTPEPGYCAVSLAAISKLLPLMASGKSFKEAETELYGARFSGGTIFETLPEVRKQLESLRNPAVERSLTELRKVVNAIVREYGKPHEIRIELARELKKPRQERIEATKKNRNRQREREDVAVRILRECGLSNPSRRDIEKARLHEECGGYCPYTGRHIPFSTLFDNSEFDVEHIIPRSRYPDDSFQNKTLCYLPENRDVKKGQTPWEAYGKDEQRWAEIMTRVSSWKNRGKMARFAIQTEEALGDFSARQMNDTRYASVLASRFLGALYGGRDLVDAEKVRQVIFASSGAVTATLRSSWGLEAILREIVPTEPGESRGKPRTDHRHHAIDAITIALTRPKVIQSMALAASLEPWQRDSRAWRKIESPWRDFVLSIRPHIEQMLVSHRPEHKMSGELHKGTNYPAPHNYKGKPTVHTRCALSALSAADIADDEVIVDPAVRDAVRAKLEKLGGNPKLFDRPENAPCLESRDGRFIPIRKVRIREAKKPILVGTGVRERYVASGGIHHIGLFVVRDARRREVWESEVVQITDAYERHREHLPVVCRTHDAEEAAFLFSLMKDDTVELEKDGTRGIYRVKKFEATGKITFVPVNNAMLDKMQYTTGAAWSRMPATLKPMSPRKIVIDLLGKVHPAND

SEQ ID NO: 547 - protein, 973 aa, unidentified
  REGION 1..973: note = Description of Unknown: uncultivated organism
  REGION 1..973: note = MG4-129 effector
MSESGVSTQPYVLGLDLGSASLGWALVGIDAMERPSSLIRAGVRIFEPGVDGSALDIQQGKDQSKAVDRREARLRRRQLRRRVARQRELFGVLQGAGLLPTDDTQGTGIGSEQRHRILNNLDVTLSNRYRNGADQEIFAQMPLYALRKKALYEPLALDELGRVFFHLSQRRGFQSNRKDVKKKTKDSEDQGQVKSAIHELEQAIEAAGAQTLGEYLAGLDPHEQKVRRQWTGRKMFEKEFQMIWDKQKEYHTDLLTPELHDRIWNLLFFQRPVAAQKHLVGKCELEPDKRRAPWAALLAQQFRLLQKVNDLRLIGEDGNELPLNEDGRAAVFDLLENHGTQSFAKIKQHLGLPKTAQFNLERGKAKELKGNVTAQSMRKVFGERWKEFSEGKQNQIIENWRNSEKDEELKREAMEHWGLDEAGANALVNEKAPGDYCSLSLVALGKILPLMRAGKSFKEAETEIYGNRFSGAAVHSIIPVLRPNRKHFRNGTPPPQDPLMASIANGLRNPAVERSITEMRKVVNAIVREYGKPCEIRIELARELKKPRSKRLDETARNRKREAENKALAERMHNECGTPQNPSRNDLEKAKLWVEQQGECPYTGRSLPFSRLFDDNNGFDVDHILPRSRHPDDSYQNKVLCWGDTNRMVKRNQTPYEAFAEQDPENWHQILARVARWKNPGKLRKFEIRSTDDLAEFSSRQLNDTRYTSLLAARLLSTLYGGRDVAENGGKRQIIFASTGAVTATLRRNWGFEQILRNIIPPEPSESTGKPRTDHRHHAIDAIVIALTRNDVIQSMARASALEPWQPGTRSWRHVPQPWCTPDFFRSVEEQVREMLTSHRPEHKVSGELHQGSNYARPYMYKGKSIVHSRTLVSELKVEQIEADDVIVDRAVRDILRAKLKEIGGTLKGSDKVKTFEKPENTPYILTPAGKRIPIRKVRIRETKNPLLVGAGSNERFVASGGIHHVDLFVTRD

SEQ ID NO: 548 - protein, 951 aa, unidentified
  REGION 1..951: note = Description of Unknown: uncultivated organism with predicted taxonomy: Planctomycetes
  REGION 1..951: note = MG4-130 effector
MAAAKKPYILGLDLGVQSAGWAMIDVDDHGRPCGIRRSGVRCFDSGVGSETEIASGKDESQNIKRRQMRLQRRQLWRRGRRLKKVFLVLQKAGILPPGETRSPEQRHELLKLLDAELAKTHLPEHDRVAGHLLPYRLRALALDQALPPFAFGRALFHLAQRRGFLSNRKSASKDGDDEGAVKAGIAELQQNMQEAGVRTLGEYFSKLDPEAEKQRIRKRWTARSMYLDEFEKIWVAQSPHHPMLGEEWKTRVYDAIFHQRPLKSQKGLVGVCELEPTCRRAPRASVEAQRFRYLQKVNDLEIVTPDGEIWALTDPEHVDLRKKLIELLDTQAEVKFASLRSKLGLWAKLGRKKPKGTDKDFTFNLEAGGESKLKGNTTATKIRGVLGDDYGKLSPEQLAGLVDDLLEYEKKEALARRLTKNYEIAPAKADQLADVTLEPNYASLSREAMHKLLPIMENGRRFASLTQEELEKLFPNRRKGGITYDLLPPVLGIIDLRNPVVCRGLTELRKVLNALIRQYGKPELIRVELARDLKKSRQQREDLTKQNRDNEKARDAARTKIAERLHCDENAVSNLDILKVRLAEECNWECPYTGKSIAIEALVGKHAQFDIEHIIPFSRSLDNSFLNKTLCDNHFNRHVKKNGTPHETCSSNEREWQEIIGRVKRFRGSAAHAKLRKFQQEKPDEDFAARMLQDTRYMSRLATEYLGLLYGGTIDADHTRRVQVSAGRVTAYLRDEWGLNAILADGGEEEKNRDDHRHHAVDASVIALTNAGTVELLSHSAEVAAERGRRLFVREEIQQPWPTFLDDVRRAIEAINISYRVNRRVTGALHEETNYSKPHKSRDGNGNGKEVEYRHVRKPLQNMSANEVENIVDDIIRKLVQTKLDQIGGEPKKVFADPGNHPYLTAKDGRRIFIHKARIRKTVAVIPLGKSSSPRYAAPGSNHHMELFATL

SEQ ID NO: 549 - protein, 1062 aa, unidentified
  REGION 1..1062: note = Description of Unknown: uncultivated organism
  REGION 1..1062: note = MG4-131 effector
MSAALEQQKYVLGLDLGSASLGWALIALNDADDPVSLIRAGVRIFEPGVDGTSIEIEQGKDQSKAVERRTARLHRRQLRRRAARQRDLFRVLQRHSLLPAPETLVGSPEEQRHSVLNELDQELAQKWQSTYQGKRFAELPLYYLRKMALDERLEAHEIGRILFHLIQRRGFLSNRRENKQNPDQKKELGQVKAEIHSLEQEIQNAGARTLGEFFAGLDPHAQKVRRRWTARKMFQDEFEKIWEAQKAHRPELLTQELHDKIAHLLFFQRPIAAQTHLIGKCELETGKQRAPWAAMEAQRFRILQKVNDLRLINPGSLISDPLTEEGRQRLYHLLDREGDQTFKAIRKYLSFSAEVQFNLEKGDEKRLRGNRTQAAMRKVFGERWDTIGEGKQHQIIENWRNSESDDVLIREAMEQWSLDAAAATLLSEQTPEPGYCAVSLAAISKLLPLMASGKSFKEAETELYGARFSGGTIFETLPEVRKQLESLRNPAVERSLTELRKVVNAIVREYGKPHEIRIELARELKKPRQERIEATKKNRNRQREREDVAVRILRECGLSNPSRRDIEKARLHEECGGYCPYTGRHIPFSTLFDNSEFDVEHIIPRSRYPDDSFQNKTLCYLPENRDVKKGQTPWEAYGKDEQRWAEIMTRVSSWKNRGKMARFAIQTEEALGDFSARQMNDTRYASVLASRFLGALYGGRDLVDAEKVRQVIFASSGAVTATLRSSWGLEAILREIVPTEPGESRGKPRTDHRHHAIDAITIALTRPKVIQSMALAASLEPWQRDSRAWRKIESPWRDFVLSIRPHIEQMLVSHRPEHKMSGELHKGTNYPPPHNYKGKPTVHTRCALSALSAADIADDEVIVDPAVRDAVRAKLEKLGGNPKLFDRPENVPCLESRDGRFIPIRKVRIREAKKPILVGTGVRERYVASGGIHHIGLFVVRDARRREVWESEVVQITDAYERHREHLPVVCRTHDAEEAAFLFSLMKDDTVELEKDGTRGIYRVKKFEATGKITFVPVNNAMLDKMQYTTGAAWSRMPATLKPMSPRKIVIDLLGKVHPAND

SEQ ID NO: 550 - protein, 835 aa, unidentified
  REGION 1..835: note = Description of Unknown: uncultivated organism with predicted taxonomy: Planctomycetes bacterium
  REGION 1..835: note = MG4-132 effector
MSVSAGSEHPYVLGLDLGSASLGWALIGIDAIETPVSLIRAGVRIFEPGVDGSALDIQQGKDQSKAVDRREARLHRRQLRRRVARQRELFGVLQGAGLLPTCDVPGAGIGSEQRHRILNALDMALTVRYRTGADKATFDQMPLYVLRKKALYEPLAFDELGRVFFHLSQRRGFQSNRKDVKKKTKEDEDQGQVKSAIYELEQAIQASDAQTLGEYLAGLDPHEQKVRRQWTGRRMFKEEFERIWVAQQAYHPSLLTPELHDRVWGLLFDQRPVSAQKHLVGKCELEPDKRRSPWAALPAQQFRVLQKVNDLRLLQENGKETPLYPQQRAAVFDLLENHGTQSFVKIKQHLGLPKTAQFNLERGKAKELKGNVTAQSMRKVFGVRWEEFSEGKQNQIIENWRNCEKDEDLKREAIEHWGLDEASANVLLAEKAPADYCALSLTALSKILPLMRAGKSFKEAETEVYDNRFSGAAVHPFIPVLRPHRKHFHNSTPPPQDPLMASIANGLRNPAVERAITEMRKVVNAIVREHGRPYEIRIELARELKKPRSKRLDETANNRKREAENRALAKRMHEECGIPQPPSRKDLEKAKLWVEQATGAGVCECPYTGKKLPFSRLFDDDNGFDVDHILPRSRHPDDSFQNKVLCWGEENRMHKRNQTPYEAYAEQDQERWQEILARVTRWKNPGKLRKFEIRSTDELEAFSSRQLNDTRYTSLLAARLLSTLYGGRDVTENGKNRQVIFASTGAVTATLRRNWGFEQILRGIIPAEPGESSGKPRTDHRHHAIDAIVIALTRNNVIQAMARASALEAWQSGTRSWRHVPQPWRTPDFFRSVEQ

SEQ ID NO: 551 - protein, 785 aa, unidentified
  REGION 1..785: note = Description of Unknown: uncultivated organism
  REGION 1..785: note = MG4-133 effector
MNESGSLAQDYVLGIDLGSVSLGWAVIGLDKTDMPVVLLRAGVRLFDPAVTGDIEKGQDESNAVARRVARLLRRQLRRRAARQSELFRLLQGHALLPPYEGNEADASQQRHAILNALDLEIAAKWAKSGGAGAQAAIDLPLYMLRKTALDEALEPYELGRVFYHLSQRRGYRSNRKEQAEKKEAAIKGKKDDDLGTVESGIKELGEAMRSFRTLGEYYASLDPHTHNVRRRWTSRKMYEDEFAAIWEKQAALHPTLLTEELHRQIKHLLFYQRPIKAQSHLIGGCELEPGEPRAAWAALEAQQFRVLQQVNELEVISPGRVTGIPLTAEQRQTVLDLLENSSEITFKKISKALGLADYIGFNLQRGGDTKLKGNLTNTHMAEVFAERWTEMSEEEKKQVVEDWRTIDQEDSLIRRAIEYWNLDESSAKWLASRPAPNGYCMYSRKSIRKLLPLMATGARFRAAEKEVYGIRLTGGLVYDSIPPVRDTLKTLRNPAVERALTELRKVVNALVREYGKPTEVRIELANDLKKPRHERAEAFKYKRKWEKQRIDTKEKMLRELGPGFEYPSRADVEKALLWEECQGECPYTGKRFPFSSLYGENPPLQVEHIIPFSRIPDDSFQNKILCYHEDNQHKANRTPFEAYTDPAQYETILSRVRNWRTPNPGKQCRFELRTLEELEGFSERQLNDTRYACKLACELVGTLYGGRDEKTDTDSRQVVFASSGMVTATLRKSWGLEAIMRETAPSANGQNHGKPRTDHRHHAIDAITIALSRPKMIATLSRNNA

SEQ ID NO: 552 - protein, 1062 aa, unidentified
  REGION 1..1062: note = Description of Unknown: uncultivated organism with predicted taxonomy: Acidobacteriales bacterium 59-55
  REGION 1..1062: note = MG4-134 effector
MSAALEQQKYVLGLDLGSASLGWALIALNDADDPVSLIRAGVRIFEPGVDGTSIEIEQGKDQSKAVERRTARLHRRQLRRRAARQRDLFRVLQRHSLLPAPETLVGSPEEQRHSVLNELDQELAQKWQSTYQGIRFAELPLYYLRKMALDERLEAHEIGRILFHLIQRRGFLSNRRENKQNPDQKKELGQVKAEIHSLEQEIQNAGARTLGEFFAGLDPHAQKVRRRWTARKMFQDEFEKIWEAQKAHRPELLTQELHDKIAHLLFFQRPIAAQTHLIGKCELETGKQRAPWAAMEAQRFRILQKVNDLRLINPGSLISDPLTEEGRQRLYHLLDREGDQTFKAIRKYLSFSAEVQFNLEKGDEKRLRGNRTQAAMRKVFGERWDTIGEGKQHQIIENWRNSESDDVLIREAMEQWSLDAAAATLLSEQTPEPGYCAVSLAAISKLLPLMASGKSFKEAETELYGARFSGGTIFETLPEVRKQLESLRNPAVERSLTELRKVVNAIVREYGKPHEIRIELARELKKPRQERIEATKKNRNRQREREDVAVRILRECGLSNPSRRDIEKARLHEECGGYCPYTGRHIPFSTLFDNSEFDVEHIIPRSRYPDDSFQNKTLCYLPENRDVKKGQTPWEAYGKDEQRWAEIMTRVSSWKNRGKMARFAIQTEEALGDFSARQMNDTRYASVLASRFLGALYGGRDLVDAEKVRQVIFASSGAVTATLRSSWGLEAILREIVPTEPGESRGKPRTDHRHHAIDAITIALTRPKVIQSMALAASLEPWQRDSRAWRKIESPWRDFVLSIRPHIEQMLVSHRPEHKMSGELHKGTNYPPPHNYKGKPTVHTRCALSALSAADIADDEVIVDPAVRDAVRAKLEKLGGNPKLFDRPENVPCLESRDGRFIPIRKVRIREAKKPILVGTGVRERYVASGGIHHIGLFVVRDARRREVWESEVVQITDAYERHREHLPVVCRTHDAEEAAFLFSLMKDDTVELEKDGTRGIYRVKKFEATGKITFVPVNNAMLDKMQYTTGAAWSRMPATLKPMSPRKIVIDLLGKVHPAND

SEQ ID NO: 553 - protein, 1062 aa, unidentified; identical to SEQ ID NO: 549
  REGION 1..1062: note = Description of Unknown: uncultivated organism with predicted taxonomy: Acidobacteriales bacterium 59-55
  REGION 1..1062: note = MG4-135 effector

SEQ ID NO: 554 - protein, 1062 aa, unidentified; identical to SEQ ID NO: 549
  REGION 1..1062: note = Description of Unknown: uncultivated organism with predicted taxonomy: Acidobacteriales bacterium 59-55
  REGION 1..1062: note = MG4-136 effector

SEQ ID NO: 555 - protein, 1105 aa, unidentified
  REGION 1..1105: note = Description of Unknown: uncultivated organism with predicted taxonomy: Acidobacteriales bacterium 59-55
  REGION 1..1105: note = MG4-137 effector
MSVSAGSEHPYVLGLDLGSASLGWALIGIDAIETPVSLIRAGVRIFEPGVDGSALDIQQGKDQSKAVDRREARLHRRQLRRRVARQRELFGVLQGAGLLPTCDVPGAGIGSEQRHRILNALDMALTVRYRTGADKATFDQMPLYVLRKKALYEPLAFDELGRVFFHLSQRRGFQSNRKDVKKKTKEDEDQGQVKSAIYELEQAIQASDAQTLGEYLAGLDPHEQKVRRQWTGRRMFKEEFERIWVAQQAYHPSLLTPELHDRVWGLLFDQRPVSAQKHLVGKCELEPDKRRSPWAALPAQQFRVLQKVNDLRLLQENGKETPLYPQQRAAVFDLLENHGTQSFVKIKQHLGLPKTAQFNLERGKAKELKGNVTAQSMRKVFGVRWEEFSEGKQNQIIENWRNSEKDEDLKREAIEHWGLDEASANVLLAEKAPADYCALSLTALSKILPLMRAGKSFKEAETEVYDNRFSGAAVHPFIPVLRPHRKHFHNSTPPPQDPLMASIANGLRNPAVERAITEMRKVVNAIVREHGRPYEIRIELARELKKPRSKRLDETANNRKREAENRALAKRMHEECGIPQPPSRKDLEKAKLWVEQATGAGVCECPYTGKKLPFSRLFDDDNGFDVDHILPRSRHPDDSFQNKVLCWGEENRMHKRNQTPYEAYAEQDQERWQEILARVTRWKNPGKLRKFEIRSTDELEAFSSRQLNDTRYTSLLAARLLSTLYGGRDVTENGKNRQVIFASTGAVTATLRRNWGFEQILRGIIPAEPGESSGKPRTDHRHHAIDAIVIALTRNNVIQAMARASALEAWQSGTRSWRHVPQPWRTPDFFRSVEQQVAEVLTSHRPEHKVGGELHRGSNYGRPYMYNGASTIHTRKLISALKIEDIDADDVIVDRVIRDILRAKLAELGGNPKAFEKPENTPYMTTPAGKRIPIRKVRIRETRNPLRVGEGPRERYVASGGIQHVELFVARDEKRREHWLSHVVQTTEMYDLFPKRDHRPGRPKAVTKSIPIRRQMPGQPEAEFLFSLLKNDTIELEKAGCREIFRVKKFEATGKITFVPINNAMPDTLQYGTGSAWSKMPTTLKVMSPQKVVIDLLGRVHPAND

SEQ ID NO: 556 - protein, 1001 aa, unidentified
  REGION 1..1001: note = Description of Unknown: uncultivated organism with predicted taxonomy: uncultured bacterium
  REGION 1..1001: note = MG4-138 effector
DESNAVARRTARLIRRQLRRRAARQSELFRLLQTRGLLPSYQGSEADASQQRHTILNALDLKLAAKWAKSGSNEEQTAIELPLYLLRKTALDAALEPYELGRVFYHLSQRRGYRSNRKEQASGKEASGKAKKADDLGAVEGGIKELEEAMHPFRTLGEYFASLDPHIQKVRRRWTGRKMYEDEFAAIWAKQAAFHPDLLPEELHHQIKRLLFYQRPIKAQSNLIGGCELEPGERRAAWATLEAQQFRVLQKVNDLEIILPGNVTGIPLTPEQRKIVLDLLENSAEATFKKIRKALGLAENIGFNLQRGGDTRLKGNLTNTLMAEAFAERWPEMSNEEKMQAVEDWRTIEQKESLVRRAIEHWKLDETGAQWLAEKPAPNGYCMYSRKAIRKLLPLMATGTRFKAAEKEIYGNRLAGGKVYDRIPPVRDALKTLRNPAIERALTELRKVINALVHEHGKPAEVRIELARDLKKPRHERAKAVSYNRDREKQRTTAKEKMLREVGPGFQHPSRADVEKALLWEECQGECPYTGKRFPFSSLFGENPPLQVDHIIPFSRIPDDSFQNKTLCYHEENQHKGNRTPFEAYTDPAQYEAILNRVRSWRTPNPGKQRRFELRTLEELEGFSERQLNDTRYASKLACELVGTLYGGRDVPLKDGKSRQVVFASSGMVTSTLRKGWGLEAILREAAPSANGQNRGKPRTDHRHHAIDAITIALSRPKMIAALSRNNAQDPYWPNNGRTTPKIQSPWKDFVDSIRPHFEQMLVSHRPEHRLTGALHDETNYGRPRKEGGKDVVHIRKPLVGKNKGEGLSSEDIENIVDPAVREAVKEKAVQFGGSLKTWTPNAAQDDWPLLKTKTGKQIPIKRVRIRKAIKVFPVGETAYRTRHVAPGADSIHHIAVYVTKDKHGRDKWISEIVRIFEEKQRWQAWKKKGGAVVPLVYSTHSEDKDAEFLFYLMKKDTLELEVNGKRAVYLVTSFESDGRINLIPINSSGKREDQKDSKIV

SEQ ID NO: 557 - protein, 1067 aa, unidentified
  REGION 1..1067: note = Description of Unknown: uncultivated organism
  REGION 1..1067: note = MG4-139 effector
MTESGSSQSNYVLGIDLGTTYAGWAAISLNQSGKPTGVLRAGVRVFDTTVTGNVEKGQDESNAIARRNARLVRRQLRRHVARQKALFQLLQQHGLLPPYQGTESDSSRQRHQILNALDHELVIKRASTGDANAKAAVELPLYLLRKIALDAALEPFELGRVFYHLSQRRGYKSNRKEKPTDKKKVAELGVVESGIEDLTEEMHRAHARTLGEYFASLDPHAQKIRGRWTARKMYEEEFALIWEKQATFRPDLLTEELHHQVKHLLFYQRPLKAQSHLIGRCELEPGERRAAWATLEAQEFRLLQEVNNLEIILPGSVIGVPLTAQQRQTVLDLLENSAEVTFKQIRKALGLANNAGFNLQHGGETRLKGNATNAYMNEVFGERWSAMPDGDKKQVVEDWRTIEQEDSLVRRAVSHWHLDEANAQWLASRSAPNGYCAFSRKAISKMLPFLAAGKSGQEAEIKIYGSRLSGGKVYDRIPPVRDFLKNLRNPAVERSLTELRKVVNALVQEYGKPVEIRIQLARELKKSRRERMESVSTNRDREKQRNAAKEKLLKELGLQHPSRADIEKALLWEECQGVCPYTGKQFPFSSLFGENPSMQVQHIIPFSRIPDDSFQNKTLCSVEENQYKANRTPFEAYADPAQYEAILDRVKNWPRPNRGKQRRFELRTLEELEGFSSRQLNCIRYASQMACKLMGTLYGGRDMETAGRSRQIIFASTGMLTGTLRRAWGLEAILREETPSSIEGKPRNDYRHHAIDAIAVALSHPKLIAALSRSDDSYAWATRALLKIESPWKNFIDSIRPHFDQMLISHRPEHRLTGEIHKATNYSMPHEEDGKQVVHLRRPVPGLTMKDIENIVDPATREAVRAKAVEYGNELVKWTPNQGGTDWPQLVNKSGKHIPIKKVRVKEVLNVRAIGKGESTRYVALKNNHHVAIFALLNEVADEKRWVPVVVSLFDAMQRKNKSEAVIQTTYSGSGKAAFKFSLMGGDTLLLHKDCDHGNSKCNPSVWQVRTIAASGQLSLVRINDARQKADILKAKEWWSPSVETLRKLEAIKVTIDSLGGIHQAGG

SEQ ID NO: 558 - protein, 1114 aa, unidentified
  REGION 1..1114: note = Description of Unknown: uncultivated organism with predicted taxonomy: Planctomycetes bacterium
  REGION 1..1114: note = MG4-140 effector
FQGLDRSKAVGRRIARQMRRQIDRKGIRLKALFKLLQSKSLLPIYPELKGEPLAAERHHLFTRLDKELTDALCAEKRKRGTDGLMLEADQALPYVLRKEALERKLELHELGRALYHLCQRRGYRPSAADDSEKEETASTEEEIESKRGRRKKPEPEDKGDKDSESPKKVAEWISDLQAKMDAAHTPTIGAYFADFKHNNPHQERIRHRWTGREMFVKEFDLIWERQSEFYRDSRPGLLNDDLRNRVYDCLFFQRPLASAEHLIGMCDLERGERRAPWATLEAQRFRLLQKVNDLAYIPSGLFNERKLSLEQCATLAAALQDKGDMPFPEIAKLLGLPPKTEFNLMRGKKKKIEGNRINQVMLQVFGDRWRAFTEQERSSAVALWTKTEGFEERKNVAISQCGLDAWKAKEWAENRPPKDCCRHSRKALVKLIKRMEEGVPYATAKLEIYDSQLAGKAPLDFVPKVIETLPSINNPAVLRALTELRKVVNAIIRTYGDKPYEIRIELARELRKNRKQRQNATEAGDKQHLRRIDAARTILRECRNYDAQGRDAERLVRERRDDVTKMLLLMECRCLCPYTGDSISYLDLFGGEVEVEHIIPQSLMVDNSFNNLTLCYRKVNHEKLDKTPRQAFCRAEDDQQWIDIIGRVQKFGNKEKLHRFLLSSREDIDRFSNRRLNDTRYTSKLAGRLLMSLYGGRDIVPAETLDELDEFKDRTGRRAICVSSGMVTSLLRDAWHLNLSGVIGDDAFKCPKKSEDDEESGKRRKGQSNKKDRCDHRHHALDAVVIALTSEKVIREINMLASRLYRERQTPLKYRDLKSIQNPWHNFMDDHFRDIFRRIVVSRRPEHKLSGALHEATSYGKVRYYNAKGDPVRYQRIAIGKLLTDKQIEKIVDEEVKKSVVKLGETIGGYKKWSQEKHGWPKMPNRNGEPVPIKKVRIKITKNAKEIEAERFRGFGTGRPESNVEDKEIAYASFFTVQDRKGTKTVWEIVKLFEAAQRVRALPKSERGHEKICWKYPKYPDATFFRFSLMKGDLVELVLNGKPAIFIVRRFEFDSRLWVAPINAAGKDEEMEAAGHLLRLGFSRFLTMGAGDDKIPRPVFVDLLGQPHYINIGA

SEQ ID NO: 559 - protein, 1079 aa, unidentified; identical to SEQ ID NO: 544
  REGION 1..1079: note = Description of Unknown: uncultivated organism
  REGION 1..1079: note = MG4-141 effector

SEQ ID NO: 560 - protein, 764 aa, unidentified
  REGION 1..764: note = Description of Unknown: uncultivated organism with predicted taxonomy: Polaribacter sp. ALD11
  REGION 1..764: note = MG4-142 effector
MSESGVSTQPYVLGLDLGSASLGWALVGIDAMERPSSLIRAGVRIFEPGVDGSALDIQQGKDQSKAVDRREARLRRRQLRRRVARQRELFGVLQGAGLLPTDDTQGTGIGSEQRHRILNNLDVTLSNRYRNGADQEIFAQMPLYALRKKALYEPLALDELGRVFFHLSQRRGFQSNRKDVKKKTKDSEDQGQVKSAIHELEQAIEAAGAQTLGEYLAGLDPHEQKVRRQWTGRKMFEKEFQMIWDKQKEYHTDLLTPELHDRIWNLLFFQRPVAAQKHLVGKCELEPDKRRAPWAALLAQQFRLLQKVNDLRLIGEDGNELPLNEDGRAAVFDLLENHGTQSFAKIKQHLGLPKTAQFNLERGKAKELKGNVTAQSMRKVFGERWKEFSEGKQNQIIENWRNSEKDEELKREAMEHWGLDEAGANALVNEKAPGEYCSLSLVALGKILPLMRAGKSFKEAETEIYGNRFSGAAVHSIIPVLRPNRKHFRNGTPPPQDPLMASIANGLRNPAVERSITEMRKVVNAIVREYGKPCEIRIELARELKKPRSKRLDETARNRKREAENKALAERMHNECGTPQNPSRNDLEKAKLWVEQQGECPYTGRSLPFSRLFDDNNGFDVDHILPRSRHPDDSYQNKVLCWGDTNRMVKRNQTPYEAFAEQDPENWHQILARVARWKNPGKLRKFEIRSTDDLAEFSSRQLNDTRYTSLLAARLLSTLYGGRDVAENGGKRQIIFASTGAVTATLRRNWGFEQILRNIIPPEP

SEQ ID NO: 561 - protein, 1062 aa, unidentified
  REGION 1..1062: note = Description of Unknown: uncultivated organism
  REGION 1..1062: note = MG4-143 effector
MSSALEQQKYVLGLDLGSASLGWALIALNGADDPVSLIRAGVRIFEPGVDGTSIEIEQGKDQSKAVERRTARLHRRQLRRRAARQRDLFRVLQRHCLLPAPETLVGSPEEQRHSVLNELDQELTQKWQSTYQGIRFAELPLYYLRKMALDERLEAHEIGRILFHLIQRRGFLSNRRENKQNPDQKKELGQVKAEIHSLEQEIQNAGARTLGEFFAGLDPHAQKVRRRWTARKMFQDEFEKIWEAQKAHRPELLTQELHDKIAHLLFFQRPIAAQTHLIGKCELETGKQRAPWAAMEAQRFRILQKVNDLRLINPGSLISDPLTEEGRQRLYHLLDREGDQTFKAIRKYLSFSAEVQFNLEKGDEKRLRGNRTQAAMRKVFGERWDTIGEGKQHQIIENWRNSESDDVLIREAMEQWSLDAAAATLLSEQTPEPGYCAVSLAAISKLLPLMASGKSFKEAETELYGARFSGGTIFETLPEVRKQLESLRNPAVERSLTELRKVVNAIVREYGKPHEIRIELARELKKPRQERIEATKKNRNRQREREDVAVRILRECGLSNPSRRDIEKARLHEECGGYCPYTGRHIPFSTLFDNSEFDVEHIIPRSRYPDDSFQNKTLCYLPENRDVKKGQTPWEAYGKDEQRWAEIMTRVSSWKNRGKMARFAIQTEEALGDFSARQMNDTRYASVLASRFLGALYGGRDLVDAEKVRQVIFASSGAVTATLRSSWGLEAILREIVPTEPGESRGKPRTDHRHHAIDAITIALTRPKVIQSMALAASLEPWQRDSRAWRKIESPWRDFVLSIRPHIEQMLVSHRPEHKMSGELHKGTNYPPPHNYKGKPTVHTRCALSALSAADIADDEVIVDPAVRDAVRAKLEKLGGNPKLFDRPENVPCLESRDGRFIPIRKVRIREAKKPILVGTGVRERYVASGGIHHIGLFVVRDARRREVWESEVVQITDAYERHREHLPVVCRTHDAEEAAFLFSLMKDDTVELEKDGTRGIYRVKKFEATGKITFVPVNNAMLDKMQYTTGAAWSRMPATLKPMSPRKIVIDLLGKVHPAND

SEQ ID NO: 562 - protein, 1076 aa, unidentified; identical to SEQ ID NO: 545
  REGION 1..1076: note = Description of Unknown: uncultivated organism
  REGION 1..1076: note = MG4-144 effector

SEQ ID NO: 563 - protein, 752 aa, unidentified
  REGION 1..752: note = Description of Unknown: uncultivated organism
  REGION 1..752: note = MG4-145 effector
MNESGSLAQDYVLGIDLGSVSLGWAVIGLDKTDMPVVLLRAGVRLFDPAVTGDIEKGQDESNAVARRVARLLRRQLRRRAARQSELFRLLQGHALLPPYEGNEADASQQRHAILNALDLEIAAKWAKSGGAGAQAAIDLPLYMLRKTALDEALEPYELGRVFYHLSQRRGYRSNRKEQAEKKEAAIKGKKDDDLGTVESGIKELGEAMRSFRTLGEYYASLDPHTHNVRRRWTSRKMYEDEFAAIWEKQAALHPTLLTEELHRQIKHLLFYQRPIKAQSHLIGGCELEPGEPRAAWAALEAQQFRVLQQVNELEVISPGRVTGIPLTAEQRQTVLDLLENSSEITFKKISKALGLADYIGFNLQRGGDTKLKGNLTNTHMAEVFAERWTEMSEEEKKQVVEDWRTIDQEDSLIRRAIEYWNLDESSAKWLASRPAPNGYCMYSRKSIRKLLPLMATGARFRAAEKEVYGIRLTGGLVYDSIPPVRDTLKTLRNPAVERALTELRKVVNALVREYGKPTEVRIELANDLKKPRHERAEAFKYKRKWEKQRIDTKEKMLRELGPGFEYPSRADVEKALLWEECQGECPYTGKRFPFSSLYGENPPLQVEHIIPFSRIPDDSFQNKILCYHEDNQHKANRTPFEAYTDPAQYETILSRVRNWRTPNPGKQCRFELRTLEELEGFSERQLNDTRYACKLACELVGTLYGGRDEKTDTDSRQVVFASSGMVTATLRKSWGLEAIMRETAPSANGQNH

SEQ ID NO: 564 - protein, 1035 aa, unidentified
  REGION 1..1035: note = Description of Unknown: uncultivated organism with predicted taxonomy: Acidobacteriales bacterium 59-55
  REGION 1..1035: note = MG4-146 effector
LNGADDPVSLIRAGVRIFEPGVDGTSMEIEQGKDQSKAVERRTARLHRRQLRRRAARQRDLFRVLQRHCLLPAPETLVGSPEEQRHSVLNELDQELAQKWQSTYQGKRFAELPLYYLRKMALDERLEAHEIGRILFHLIQRRGFLSNRRENKQNPDQKKELGQVKAEIHSLEQEIQNAGARTLGEFFAGLDPHAQKVRRRWTARKMFQDEFEKIWEAQKAHRPELLTQELHDKIAHLLFFQRPIAAQTHLIGKCELETGKQRAPWAAMEAQRFRILQKVNDLRLINPGSLISDPLTEEGRQRLYHLLDREGDQTFKAIRKYLSFSAEVQFNLEKGDEKRLRGNRTQAAMRKVFGERWDTIGEGKQHQIIENWRNSESDDVLIREAMEQWSLDAAAATLLSEQTPEPGYCAVSLAAISKLLPLMASGKSFKEAETELYGARFSGGTIFETLPEVRKQLESLRNPAVERSLTELRKVVNAIVREYGKPHEIRIELARELKKPRQERIEATKKNRNRQREREDVAVRILRECGLSNPSRRDIEKARLHEECGGYCPYTGRHIPFSTLFDNSEFDVEHIIPRSRYPDDSFQNKTLCYLPENRDVKKGQTPWEAYGKDEQRWAEIMTRVSSWKNRGKMARFAIQTEEALGDFSARQMNDTRYASVLASRFLGALYGGRDLVDAEKVRQVIFASSGAVTATLRSSWGLEAILREIVPTEPGESRGKPRTDHRHHAIDAITIALTRPKVIQSMALAASLEPWQRDSRAWRKIESPWRDFVLSIRPHIEQMLVSHRPEHKMSGELHKGTNYPPPHNYKGKPTVHTRCALSALSAADIADDEVIVDPAVRDAVRAKLEKLGGNPKLFDRPENVPCLESRDGRFIPIRKVRIREAKKPILVGTGVRERYVASGGIHHIGLFVVRDARRREVWESEVVQITDAYERHREHLPVVCRTHDAEEAAFLFSLMKDDTVELEKDGTRGIYRVKKFEATGKITFVPVNNAMLDKMQYTTGAAWSRMPATLKPMSPRKIVIDLLGKVHPAND

SEQ ID NO: 565 - protein, 1079 aa, unidentified; identical to SEQ ID NO: 544
  REGION 1..1079: note = Description of Unknown: uncultivated organism
  REGION 1..1079: note = MG4-147 effector

SEQ ID NO: 566 - protein, 1062 aa, unidentified; identical to SEQ ID NO: 549
  REGION 1..1062: note = Description of Unknown: uncultivated organism
  REGION 1..1062: note = MG4-148 effector

SEQ ID NO: 567 - protein, 1062 aa, unidentified
  REGION 1..1062: note = Description of Unknown: uncultivated organism
  REGION 1..1062: note = MG4-149 effector
MSAALEQQKYVLGLDLGSASLGWALIALNDADDPVSLIRAGVRIFEPGVDGTSIEIEQGKDQSKAVERRTARLHRRQLRRRAARQRDLFRVLQRHSLLPAPETLVGSPEEQRHSVLNELDQELAQKWQSTYQGKRFAELPLYYLRKMALDERLEAHEIGRILFHLIQRRGFLSNRRENKQNPDQKKELGQVKAEIHSLEQEIQNAGARTLGEFFAGLDPHAQKVRRRWTARKMFQDEFEKIWEAQKAHRPELLTQELHDKIAHLLFFQRPIAAQTHLIGKCELETGKQRAPWAAMEAQRFRILQKVNDLRLINPGSLISDPLTEEGRQRLYHLLDREGDQTFKAIRKYLSFSAEVQFNLEKGDEKRLRGNRTQAAMRKVFGERWDTIGEGKQHQIIENWRNSESDDVLISEAMEQWSLDAAAATLLSEQTPEPGYCAVSLAAISKLLPLMASGKSFKEAETELYGARFSGGTIFETLPEVRKQLESLRNPAVERSLTELRKVVNAIVREYGKPHEIRIELARELKKPRQERIEATKKNRNRQREREDVAVRILRECGLSNPSRRDIEKARLHEECGGYCPYTGRHIPFSTLFDNSEFDVEHIIPRSRYPDDSFQNKTLCYLPENRDVKKGQTPWEAYGKDEQRWAEIMTRVSSWKNRGKMARFAIQTEEALGDFSARQMNDTRYASVLASRFLGALYGGRDLVDAEKVRQVIFASSGAVTATLRSSWGLEAILREIVPTEPGESRGKPRTDHRHHAIDAITIALTRPKVIQSMALAASLEPWQRDSRAWRKIESPWRDFVLSIRPHIEQMLVSHRPEHKMSGELHKGTNYPAPHNYKGKPTVHTRCALSALSAADIADDEVIVDPAVRDAVRAKLEKLGGNPKLFDRPENVPCLESRDGRFIPIRKVRIREAKKPILVGTGVRERYVASGGIHHIGLFVVRDARRREVWESEVVQITDAYERHREHLPVVCRTHDAEEAAFLFSLMKDDTVELEKDGTRGIYRVKKFEATGKITFVPVNNAMLDKMQYTTGAAWSRMPATLKPMSPRKIVIDLLGKVHPAND

SEQ ID NO: 568 - protein, 901 aa, unidentified
  REGION 1..901: note = Description of Unknown: uncultivated organism with predicted taxonomy: Polaribacter sp. ALD11
  REGION 1..901: note = MG4-150 effector
SASLGWALIALDESDNPVSLIRAGVRIFEPGVDGAKPGTPASAQEIQFGKDQSTAVARRQERLRRRQLRRRVARQRKLFGVLQGAGLLPTGDVLGAGIGSEQRHRVLNNLDADLMNRYRSSADKANFGQMPLYALRKKALYEPLALDELGRVFFHLSQRRGFQSNRKDVQKKTKGSEDQGQVKSAIHELEQAIQVAGAQTLGEYLAGLDPHEQKVRRQWTGRKMFEKEFQMIWDKQKEYHTDLLTSELHGRIWDLLFFQRPVAAQKHLVGKCELEPDKRRAPWAALLAQQFRLLQKVNDLRLIEEDGNELPLNEDGRIAVFNLLENHGTQTFAKIKQHLGLPKTAEFNLERGKAKELKGNITAQSMRKVFGERWTQFSAGKQNQIVENWRNSEKDEELRREAMEHWGLDEAGANALVNEKAPGDYCSLSLMALGKILPLMRAGKSFKEAETEIYGNRFSGAAVHSLIPVLRPNRKHFRNSTPPPQDPLMASIANGLRNPAVERSITEMRKVVNAIVREYGKPCEIRIELARELKKPRSKRLDETARNRKREAENKALAERMHNECGMPQNSSRNDLEKAKLWVEQQGQCPYTGRSLPFSRLFDDNNGFDVDHILPRSRHPDDSYQNKVLCWGDTNRMVKRNQTPYEAFAEQDPENWHQILARVARWKNPGKSRKFEIRSTDELAEFSSRQLNDTRYTSLLAARLLSTLYGGRDLAENGRKRQIIFASSGAVTATLRRNWGFEQILRNIIPPEPNESSGKPRTDHRHHAIDAIVIALTRNDVIQAMARASALEPWQPGTRSWRHVPQPWHTPNFFRSVEEQVREMLTSHRPEHKVSGELHKGSNYGRPYLYNGKPTVHSRVSISALRSQDIEDDDVIVDRRVRDILRTKLAEIGGNPKAFEK

SEQ ID NO: 569 - protein, 1105 aa, unidentified; identical to SEQ ID NO: 555
  REGION 1..1105: note = Description of Unknown: uncultivated organism with predicted taxonomy: Acidobacteriales
  REGION 1..1105: note = MG4-151 effector

SEQ ID NO: 570 - protein, 1079 aa, unidentified; identical to SEQ ID NO: 544
  REGION 1..1079: note = Description of Unknown: uncultivated organism
  REGION 1..1079: note = MG4-152 effector

SEQ ID NO: 571 - protein, 1062 aa, unidentified; identical to SEQ ID NO: 549
  REGION 1..1062: note = Description of Unknown: uncultivated organism
  REGION 1..1062: note = MG4-153 effector

SEQ ID NO: 572 - protein, 1076 aa, unidentified
  REGION 1..1076: note = Description of Unknown: uncultivated organism with predicted taxonomy: Acidobacteriales bacterium 59-55
  REGION 1..1076: note = MG4-154 effector
MSSALERPQKYVLGLDLGSASLGWALIALNDADNPTSLIRAGVRIFEPGVDGTSMEIEQGKDQSKAVERRTARLHRRQLRRRAARQRDLFRLLQRHSLLPAPETLGGSPEEQRHSILNGLDQALARKWQSAFPDNRFAQLPLYYLRKRALDEPLEAHEIGRILFHLIQRRGFLSNRRENKQNPDQKKELGQVKAEIHSLEQEIQNAGARTLGEFFAGLDPHAQKVRRRWTARKMFQNEFEKIWEAQVIHCPNLLMPELHDKIAHLLFFQRPIATQSHLVGKCELEPGKQRAPWAAMEAQRFRILQKVNDLRLVNPGSLISDPLTEEDRQRLNSLLDREGDQTFKAIKKYLSFPADVQFNLEKGDEKRLRGNRTQAAMRKVFGDRWDRMSAGKQHQIVENWRNSESDEALIREAEEQWALDDTAATLLSEQIPEPGYCAVSLTAISKLLPLMQCGKSFKEAETVVYGARFSGGVVFDTLPEVRKQLESLRNPAVERALTELRKVVNAIVREYGKPYEIRIELARELKKPRQERLEATKKNRTRQREREDIAGKILRECGLSNPSRKDIEKARLHEECGGICPYTGRHIPFSTLFDNSEFDVEHIIPRSRYPDDSFQNKTLCYLPENRDVKKGQTPWEAYGKDEQRWAEIMTRVGSWKNRGKMARFSIQTEEALGEFSARQMNDTRYASVLAARFLGSLYGGRDVVDGDNARQVIFASSGAVTATLRSSWGLEAILHEIVPAESGESRGKPRTDHRHHAIDAITIALTRSKVIQSMARTASLEPWQIDSRAWRKIELPWRDFVPSIRPHIEQMLVSHRPEHKMSGELHKGTNYSTPYNYKGKPTVHTRCLLSALSAADIAGDEVIVDTAVRDAVRKKLAELGGNPKLFDRPENAPCLSARDGRLIPIRKVRVRETKNPVKVGKGVRERFTSSGGIHHVALFVTRDEKRREKWDSEVAQVTEIYRRCPRNDHRKGRSQPVVTESPISRQLKSDPEAQFLFSVMKDDTIEVTDPNGIHILRVKKFSDNKQMWFVPVNDAHDDTQQMKLGITWSKTPNSLKELRPRKVVVDLLGKVHPAND

SEQ ID NO: 573 - protein, 1026 aa, unidentified
  REGION 1..1026: note = Description of Unknown: uncultivated organism with predicted taxonomy: Deltaproteobacteria
  REGION 1..1026: note = MG4-155 effector
MEIQVAVPYVLGIDLGANSVGWAALLHEHGESVGILDLGVRIFAAGVTGLEAGRDESHAAARRVARLQRRQTDRRRRRIHKIYGILADYGLLPAKATPADRAKALSALDNELSARYGAHDNLPYVLRARALGEALSPFELGRALFHLAQRRGFLSNRKSTKEPDDEKGKVKSGITILAHAIAESGSRTLGEHLSRLDPHEARIRGRYTSRQMYLDEFDKIWESQAANHPELLNPERKRELLQAMFHQRPLRDQSDLIGDCELEEGEKRAPAWHPLAQRFRLLQEVNHLRLIDPAGVSRALSAEERQAVVPLLEKGDLPIRELRKLLEIKRNVEINLDRGGKKALIGDRTEEKMRGAFGAAWDALSQEEKLEAITDLAGDLGDTQLARKAQDRWGLSAEQAERYSSTSLEVGRYLGFSLKAIAKMLPLLESGADATTARDAAYPAGTFRTDLLGALPPVAERLKDLRNPAVLRSLTELRKVVNALIGRYGKPLEIHVELARDLKASRPEREDRWARMRRNEKARAEAAAKIQSEIGIHTPGRADTEKWLLAEECHWRCPYSGRGFSATQLYQSGEIQVEHIIPFSRSLDDSFANKTLAYSWVNKAKGNRSPREAFQEQSQWEAILTEVGSFHGPYAKHKLQRFQWTSEQIAELLDDFTKRQLNDTRYASKLAARYMACLYGGLSDSCGQRIFVSPGQVTAFLRRLWAIEGLLSGGGGKSRDDHRHHAIDAVVVALTGPAWVKALSDAASRAREEGRRRFASLEAPWPGFAAAVQDRLQGLTVSHRANLKVGGAMHDETFYGVIQHPELGPTAVCRKLVHRLSKEDLEHIVDPRVRERVALQLGLQGGDFKQLEAHPPTIPTHDGREVPIRKVRIMKAEHTRRIGQGARARNVMGDDYHHLEVIRQTDPRTGKTKWALAAVTCQQAMERVRDHKPLVSRDHGPHAEFVCSVAKDDTLEINEAGNKRLVVVKALEAGRNVVGFKDLRDARPYSATTKNRERVAVARLMDALKCRKVTVSPLGETHYAND

SEQ ID NO: 574 - protein, 1037 aa, unidentified
  REGION 1..1037: note = Description of Unknown: uncultivated organism with predicted taxonomy: Planctomycetes bacterium
  REGION 1..1037: note = MG4-156 effector
SMLGVDLGSAALGWAVVGVADGKPACHVDGGVRIFPEAVENLEQGKDDPKSAQRRLARQMRRQTDRRARRVASVFRVLQKAGLLPRFSEGADPADPLARHELINRLDEDLACTVPGLIDPAAEHRSRSVFHYRLRALAIHQDLPPYAIGRAFLHIAQRRGFKSGRIEEASGSEKAKERESDSRKERRQVAARIESLPAEFLRLGACTIGEYWSKLDPNQKRIRGIGNWSGRQMHVDEFDRIWERQAPRQQEIMTPLLYRIVKRRIFFQRPLKSAAGLIGHCELERESQRRRAPLAHPLYQRFRILQTVNDLRIVEGSGLSRPLTVEQRIKALDTLSRQQTVTFKSLHKKLGLVPGETFSHEEGDRKDLPGNRTECKLREVFGEQWDSLPEQQKNVIAGYVRSMDDSAVLARIAETRWGLGHLRAARLAGIQLEQGYGRLSVAALRKLLPLMEEGLPYMTAVERIYPDRAFAPTQELLPKVLDLKNVRNPAVVRALTELRKVVNGVIREYGRPERIQIELARELKKPAKARERIAQENRQREDLRKKTIERIFRECGLGKPSNADIEKAILWEECQHHDPYTGGSINFHDLFGSDAKWEIEHIIPHSRSQDDSLTNKTLCSRETNRQKGNRTPFEVFGNTPEWEAMVERVTKFQGDKRAMTRKLARFTMEGGVEELFGEFTQRQLNDTKYASLLAMEFLGQLYGGVCDERGIRRVNAVSGGVTAQIRKGWRLHSILRDGPSQGEAKPRDDHRHHAIDALVIAMTDAGAVQAVSRASERSRLDHRHGFRVDDPWNGFLEQVQAVIRAIRVSHRPDHHLRGALHAESLYSPPRSERGAAPRHRIRKWLSSLTPEQVRDIVDTKVREAVEAKLKELGQTDPRDAFKNNADPPTLGNRHGDPVPIRRVRVYVSVSPQRIGTGATARHVVSKDNHHLAIYRLSADKKGTARWTGEAVSLLEALKRMNLPGRPVIAPVNESGAPLVMALYKGDLVEMTVPKSQPPERDLFVVRGFSIEKRGGPEINFARHTLAAEMASQKKRGG

SEQ ID NO: 575 - protein, 1062 aa, unidentified
  REGION 1..1062: note = Description of Unknown: uncultivated organism
  REGION 1..1062: note = MG4-157 effector
MSAALEQQKYVLGLDLGSASLGWALIALNDADDPVSLIRAGVRIFEPGVDGTSIEIEQGKDQSKAVERRTARLHRRQLRRRAARQRDLFRVLQRHCLLPAPETLVGSPEEQRHSVLNELDQELAQKWQSTYQGKRFAELPLYYLRKMALDERLEAHEIGRILFHLIQRRGFLSNRRENKQNPDQKKELGQVKAEIHSLEQEIQNAGARTLGEFFAGLDPHAQKVRRRWTARKMFQDEFEKIWEAQKAHRPELLTQELHDKIAHLLFFQRPIAAQTHLIGKCELETGKQRAPWAAMEAQRFRILQKVNDLRLINPGSLISDPLTEEGRQRLYHLLDREGDQTFKAIRKYLSFSAEVQFNLEKGDEKRLRGNRTQAAMRKVFGERWDTIGEGKQHQIIENWRNSESDDVLIREAMEQWSLDAAAATLLSEQTPEPGYCAVSLAAISKLLPLMASGKSFKEAETELYGARFSGGTIFETLPEVRKQLESLRNPAVERSLTELRKVVNAIVREYGKPHEIRIELARELKKPRQERIEATKKNRNRQREREDVAVRILRECGLSNPSRRDIEKARLHEECGGYCPYTGRHIPFSTLFDNSEFDVEHIIPRSRYPDDSFQNKTLCYLPENRDVKKGQTPWEAYGKDEQRWAEIMTRVSSWKNRGKMARFAIQTEEALGDFSARQMNDTRYASVLASRFLGALYGGRDLVDAEKVRQVIFASSGAVTATLRSSWGLEAILREIVPTEPGESRGKPRTDHRHHAIDAITIALTRPKVIQSMALAASLEPWQRDSRAWRKIESPWRDFVLSIRPHIEQMLVSHRPEHKMSGELHKGTNYPPPHNYKGKPTVHTRCALSALSAADIADDEVIVDPAVRDAVRAKLEKLGGNPKLFDRPENVPCLESRDGRFIPIRKVRIREAKKPILVGTGVRERYVASGGIHHIGLFVVRDARRREVWESEVVQITDAYERHREHLPVVCRTHDAEEAAFLFSLMKDDTVELEKDGTRGIYRVKKFEATGKITFVPVNNAMLDKMQYTTGAAWSRMPATLKPMSPRKIVIDLLGKVHPAND

SEQ ID NO: 576 - protein, 1062 aa, unidentified; identical to SEQ ID NO: 549
  REGION 1..1062: note = Description of Unknown: uncultivated organism
  REGION 1..1062: note = MG4-158 effector

SEQ ID NO: 577 - protein, 1062 aa, unidentified; identical to SEQ ID NO: 549
  REGION 1..1062: note = Description of Unknown: uncultivated organism with predicted taxonomy: Acidobacteriales bacterium 59-55
  REGION 1..1062: note = MG4-159 effector

SEQ ID NO: 578 - protein, 1075 aa, unidentified
  REGION 1..1075: note = Description of Unknown: uncultivated organism with predicted taxonomy: Planctomycetes
  REGION 1..1075: note = MG4-160 effector
MAAAKKPYILGLDLGVQSAGWAMIDVDDHGRPCGIRRSGVRCFDSGVGSETEIASGKDESQNIKRRQMRLQRRQLWRRGRRLKKVFLVLQKAGILPPGETRSPEQRHELLKLLDAELAKTHLPEHDRVAGHLLPYRLRALALDQALPPFAFGRALFHLAQRRGFLSIRKSASKDGDDEGAVKAGIAELQQNMQEAGVRTLGEYFSKLDPEAEKQRIRKRWTARSMYLDEFEKIWVAQSPHHPMLGEEWKTRVYDAIFHQRPLKSQKGLVGVCELEPTCRRAPRASVEAQRFRYLQKVNDLEIVTPDGEIWALTDPEHVDLRKKLIELLDTQAEVKFASLRSKLGLWAKLGRKKPKGTDKDFTFNLEAGGESKLKGNTTATKIRGVLGDDYGKLSPEQLAGLVDDLLEYEKKEALARRLTKNYEIAPAKADQLADVTLEPNYASLSREAMHKLLPIMENGRRFASLTQEELEKLFPNRRKGGITYDLLPPVLGIIDLRNPVVCRGLTELRKVLNALIRQYGKPELIRVELARDLKKSRQQREDLTKQNRDNEKARDAARTKIAERLHCDENAVSNLDILKVRLAEECNWECPYTGKSIAIEALVGKHAQFDIEHIIPFSRSLDNSFLNKTLCDNHFNRHVKKNGTPHETCSSNEREWQEIIGRVKRFRGSAAHAKLRKFQQEKPDEDFAARMLQDTRYMSRLATEYLGLLYGGTIDADHTRRVQVSAGRVTAYLRDEWGLNAILADGGEEEKNRDDHRHHAVDASVIALTNAGTVELLSHSAEVAAERGRRLFVREEIQQPWPTFLDDVRRAIEAINISYRVNRRVTGALHEETNYSKPHKSRDGNGNGKEVEYRHVRKPLQNMSANEVENIVDDIIRKLVQTKLDQIGGEPKKVFADPGNHPYLTAKDGRRIFIHKARIRKTVAVIPLGKSSSPRYAAPGSNHHMEIFATLDQEGKENRWESKIVSLFEAHRRVRAGEPVIQRDHGSNTEFKFSLAGGEYLELDDDGGGRRLVRITVISGKIAEFRLHTDARPITILRQTKGGRAGLSKPVDSLRKANARKVVVDPLGNILPAND

SEQ ID NO: 579 - protein, 780 aa, unidentified
  REGION 1..780: note = Description of Unknown: uncultivated organism with predicted taxonomy: Acidobacteriales bacterium 59-55
  REGION 1..780: note = MG4-161 effector
LETGKQRAPWAAMEAQRFRILQKVNDLRLINPGSLISDPLTEEGRQRLYHLLDREGDQTFKAIRKYLSFSAEVQFNLEKGDEKRLRGNRTQAAMRKVFGERWDTIGEGKQHQIIENWRNSESDEVLIREAMEQWSLDAAAATLLSEQTPEPGYCAVSLAAISKLLPLMASGKSFKEAETELYGARFSGGTIFETLPEVRKQLESLRNPAVERSLTELRKVVNAIVREYGKPHEIRIELARELKKPRQERIEATKKNRNRQREREDVAVRILRECGLSNPSRRDIEKARLHEECGGYCPYTGRHIPFSTLFDNSEFDVEHIIPRSRYPDDSFQNKTLCYLPENRDVKKGQTPWEAYGKDEQRWAEIMTRVSSWKNRGKMARFAIQTEEALGDFSARQMNDTRYASVLASRFLGALYGGRDLVDAEKVRQVIFASSGAVTATLRSSWGLEAILREIVPTEPGESRGKPRTDHRHHAIDAITIALTRPKVIQSMALAASLEPWQRDSRAWRKIESPWRDFVLSIRPHIEQMLVSHRPEHKMSGELHKGTNYPAPHNYKGKPTVHTRCALSALSAADIADDEVIVDPAVRDAVRAKLEKLGGNPKLFDRPENVPCLESRDGRFIPIRKVRIREAKKPILVGTGVRERYVASGGIHHIGLFVVRDARRREVWESEVVQITDAYERHREHLPVVCRTHDAEEAAFLFSLMKDDTVELEKDGTRGIYRVKKFEATGKITFVPVNNAMLDKMQYTTGAAWSRMPATLKPMSPRKIVIDLLGKVHPAND

SEQ ID NO: 580 - protein, 792 aa, unidentified
  REGION 1..792: note = Description of Unknown: uncultivated organism
  REGION 1..792: note = MG4-162 effector
LHYKIKHLLFYQRPIKAQSHLIGDCELEPGERRAAWATLEAQQFRVLQKVNDLEIILPGNVTGIPLTPEQRQTVLNLLESSSEATFKKIRKALGLGENIGFNLQRGGETKLKGNLTNSHMADVFAERWLEMSEEDKKQVVEDWRTIEREESLIRRATEHWKLDETGAKWLASRPAPSGYCSISRKAIRKLLPLMMEGKRFKEAENEIWGSRFSGGQVYDRIPPVRQALKSLRNPAVERALTELRKVVNALIRELGKPTEVRIDLDRDLKKPRHERAKAVSQNRDREKQRSAAKVKMLQEIGPGFEHPSRADVEKALLWEECQGECPYTGKRFPLSSLFGENPPLQVEHIIPFSRIPDDSFQNKTLCYHEENQIKGNRTPFEAYKDAEQFETILNRVRNWRTPNPGKQRRFELRTLEELEGFSSRQLNDTRYASKLACELVGTLFGGRDIPTESGSRQVVFASSGMVTATLRKGWGLEAILREAAPSANGQNRGKPRTDHRHHAIDAITIALSAPRMIAALSRNNAQDPYWPRNGRTAPKLQSPWNGFVDSIRPHFEQMLVSHRPEHRLTGALHDETNYGRPHKEGGKDVVHIRKQVVGMSAGDIENIVDPAVRESVREKAASFGGDLKKWTPKEGSEDWPLLRTKTGKEIPIKRVRIKKSLGVETIAKGDRARHVALSSNHHVAIFALLDERGGERRWEPMIVSLFEAMERKRKGQPLIQTRYPVVGEFIFKFSLMGGDTVLLHKDCDHKNNHCNPSVWRLRTIGSNGQLSLVRINDARLKAEIQKAKEWWS

SEQ ID NO: 581 - protein, 1106 aa, unidentified
  REGION 1..1106: note = Description of Unknown: uncultivated organism with predicted taxonomy: Acidobacteriales bacterium 59-55
  REGION 1..1106: note = MG4-163 effector
MSESGVSTQPYVLGLDLGSASLGWALVGIDAMERPSSLIRAGVRIFEPGVDGSALDIQQGKDQSKAVDRREARLRRRQLRRRVARQRELFGVLQGAGLLPTDDTQGTGIGSEQRHRILNNLDVTLSNRYRNGADQEIFAQMPLYALRKKALYEPLALDELGRVFFHLSQRRGFQSNRKDVKKKTKDSEDQGQVKSAIHELEQAIEAAGAQTLGEYLAGLDPHEQKVRRQWTGRKMFEKEFQMIWDKQKEYHTDLLTPELHDRIWNLLFFQRPVAAQKHLVGKCELEPDKRRAPWAALLSQQFRLLQKVNDLRLIGEDGNELPLNEDGRAAVFDLLENHGTQSFAKIKQHLGLPKTAQFNLERGKAKELKGNVTAQSMRKVFGERWKEFSEGKQNQIIENWRNSEKDEELKREAMEHWGLDEAGANALVNEKAPGDYCSLSLVALGKILPLMRAGKSFKEAETEIYGNRFSGAAVHSIIPVLRPNRKHFRNGTPPPQDPLMASIANGLRNPAVERSITEMRKVVNAIVREYGKPCEIRIELARELKKPRSKRLDETARNRKREAENKALAERMHNECGTPQNPSRNDLEKAKLWVEQQGECPYTGRSLPFSRLFDDNNGFDVDHILPRSRHPDDSYQNKVLCWGDTNRMVKRNQTPYEAFAEQDPENWHQILARVARWKNPGKLRKFEIRSTDDLAEFSSRQLNDTRYTSLLAARLLSTLYGGRDVAENGGKRQIIFASTGAVTATLRRNWGFEQILRNIIPPEPSESTGKPRTDHRHHAIDAIVIALTRNDVIQSMARASALEPWQPGTRSWRHVPQPWRTPDFFRSVEEQVREMLTSHRPEHKVSGELHQGSNYARPYMYKGKSIVHSRTLVSELKVEQIEADDVIVDRAVRDILRAKLKEIGGTLKGSDKVKTFEKPENTPYILTPAGKRIPIRKVRIRETKNPLLVGAGSNERFVASGGIHHVDLFVTRDEKRRETWDSKVIQTTEMYDRFPKHDRRPGRPHTESKNLSRLRQNDDDDESRFLFSLMKSDTIQLEQDGHRQIFKVKKFEATGKMTFIPINNAMPDKLQYSTGAAWSKMPATLKSMSPQKVVVDLLGRVHPAND

SEQ ID NO: 582 - protein, 1015 aa, unidentified
  REGION 1..1015: note = Description of Unknown: uncultivated organism
  REGION 1..1015: note = MG4-164 effector
ARRVARLLRRQLRRRSARQSELFRLLQGHALLPPYEGNEADASQQRHAILNALDLEIAAKWAKSGGAGAQAAIDLPLYMLRKTALDEALEPYELGRVFYHLSQRRGYRSNRKEQAEKKEAAIKGKKDDDLGTVESGIKELGEAMRSFRTLGEYYASLDPHTHNVRRRWTSRKMYEDEFAAIWEKQAALHPTLLTEELHRQIKHLLFYQRPIKAQSHLIGGCELEPGEPRAAWAALEAQQFRVLQQVNELEVISPGRVTGIPLTAEQRQTVLDLLENSSEITFKKISKALGLADYIGFNLQRGGDTKLKGNLTNTHMAEVFAERWTEMSEEEKKQVVEDWRTIDQEDSLIRRAIEYWNLDESSAKWLASRPAPNGYCMYSRKSIRKLLPLMATGARFRAAEKEVYGIRLTGGLVYDSIPPVRDTLKTLRNPAVERALTELRKVVNALVREYGKPTEVRIELANDLKKPRHERAEAFKYKRKWEKQRIDTKEKMLRELGPGFEYPSRADVEKALLWEECQGECPYTGKRFPFSSLYGENPPLQVEHIIPFSRIPDDSFQNKILCYHEDNQHKANRTPFEAYTDPAQYETILSRVRNWRTPNPGKQCRFELRTLEELEGFSERQLNDTRYACKLACELVGTLYGGRDEKTDTDSRQVVFASSGMVTATLRKSWGLEAIMRETAPSANGQNHGKPRTDHRHHAIDAITIALSRPKMIATLSRNNAQDSYRPSNGHTAPRIQSPWEDFVDSIRPHFEKMLVSHRPDHRLTGALHDETNYGRPHKEEGKDVVHIRKPVEGLSARDINNIVDPAVREAVRAKAAQLGGDLKKWTPKEGRGDWPQLGTKNGKQIPVKRVRIKKALSVETIGKDERTRHVALSSNHHVAIFAMLDKRGIEKRWKSIIVSLFEAMDRKRKGQPIVQTSYPEAGDYVFKFSLMGGDTVLLHKDCDHNQNPCNPSVWRLRSIAANGQLSLVRINDARPKSEIIKAKEWWSPIEDTLRELDAVKVVIDSLGRIHQAGG

SEQ ID NO: 583 - protein, 1062 aa, unidentified; identical to SEQ ID NO: 549
  REGION 1..1062: note = Description of Unknown: uncultivated organism
  REGION 1..1062: note = MG4-165 effector

SEQ ID NO: 584 - protein, 1076 aa, unidentified; identical to SEQ ID NO: 572
  REGION 1..1076: note = Description of Unknown: uncultivated organism with predicted taxonomy: Candidatus Sulfotelmatomonas gaucii
  REGION 1..1076: note = MG4-166 effector

SEQ ID NO: 585 - protein, 1105 aa, unidentified; identical to SEQ ID NO: 555
  REGION 1..1105: note = Description of Unknown: uncultivated organism with predicted taxonomy: Acidobacteriales bacterium 59-55
  REGION 1..1105: note = MG4-167 effector

SEQ ID NO: 586 - protein, 890 aa, unidentified
  REGION 1..890: note = Description of Unknown: uncultivated organism
  REGION 1..890: note = MG4-168 effector
MNESGSLAQDYVLGIDLGSVSLGWAVIGLDKTDMPVVLLRAGVRLFDPAVTGDIEKGQDESNAVARRVARLLRRQLRRRAARQSELFRLLQGHALLPPYEGNEADASQQRHAILNALDLEIAAKWAKSGGAGAQAAIDLPLYMLRKTALDEALEPYELGRVFYHLSQRRGYRSNRKEQAEKKEAAIKGKKDDDLGTVESGIKELGEAMRSFRTLGEYYASLDPHTHNVRRRWTSRKMYEDEFAAIWEKQAALHPTLLTEELHRQIKHLLFYQRPIKAQSHLIGGCELEPGEPRAAWAALEAQQFRVLQQVNELEVISPGRVTGIPLTAEQRQTVLDLLENSSEITFKKISKALGLADYIGFNLQRGGDTKLKGNLTNTHMAEVFAERWTEMSEEEKKQVVEDWRTIDQEDSLIRRAIEYWNLDESSAKWLASRPAPNGYCMYSRKSIRKLLPLMATGARFRAAEKEVYGIRLTGGLVYDSIPPVRDTLKTLRNPAVERALTELRKVVNALVREYGKPTEVRIELANDLKKPRHERAEAFKYKRKWEKQRIDTKEKMLRELGPGFEYPSRADVEKALLWEECQGECPYTGKRFPFSSLYGENPPLQVEHIIPFSRIPDDSFQNKILCYHEDNQHKANRTPFEAYTDPAQYETILSRVRNWRTPNPGKQCRFELRTLEELEGFSERQLNDTRYACKLACELVGTLYGGRDEKTDTDSRQVVFASSGMVTATLRKSWGLEAIMRETAPSANGQNHGKPRTDHRHHAIDAITIALSRPKMIATLSRNNAQDSYRPSNGHTAPRIQSPWEDFVDSIRPHFEKMLVSHRPDHRLTGALHDETNYGRPHKEEGKDVVHIRKPVEGLSARDINNIVDPAVREAVRAKAAQLGGDLKKW

SEQ ID NO: 587 - protein, 1062 aa, unidentified; identical to SEQ ID NO: 575
  REGION 1..1062: note = Description of Unknown: uncultivated organism
  REGION 1..1062: note = MG4-169 effector

SEQ ID NO: 588 - protein, 1079 aa, unidentified; identical to SEQ ID NO: 544
  REGION 1..1079: note = Description of Unknown: uncultivated organism
  REGION 1..1079: note = MG4-170 effector

SEQ ID NO: 589 - protein, 902 aa, unidentified
  REGION 1..902: note = Description of Unknown: uncultivated organism
  REGION 1..902: note = MG4-171 effector
ILFHLIQRRGFLSNRRENKQNPDQKKELGQVKAEIHSLEQEIQNAGARTLGEFFAGLDPHAQKVRRRWTARKMFQDEFEKIWEAQKAHRPELLTQELHDKIAHLLFFQRPIAAQTHLIGKCELETGKQRAPWAAMEAQRFRILQKVNDLRLINPGSLISDPLTEEGRQRLYHLLDREGDQTFKAIRKYLSFSAEVQFNLEKGDEKRLRGNRTQAAMRKVFGERWDTIGEGKQHQIIENWRNSESDEVLIREAMEQWSLDAAAATLLSEQTPEPGYCAVSLAAISKLLPLMASGKSFKEAETELYGARFSGGTIFETLPEVRKQLESLRNPAVERSLTELRKVVNAIVREYGKPHEIRIELARELKKPRQERIEATKKNRNRQREREDVAVRILRECGLSNPSRRDIEKARLHEECGGYCPYTGRHIPFSTLFDNSEFDVEHIIPRSRYPDDSFQNKTLCYLPENRDVKKGQTPWEAYGKDEQRWAEIMTRVSSWKNRGKMARFAIQTEEALGDFSARQMNDTRYASVLASRFLGALYGGRDLVDAEKVRQVIFASSGAVTATLRSSWGLEAILREIVPTEPGESRGKPRTDHRHHAIDAITIALTRPKVIQSMALAASLEPWQRDSRAWRKIESPWRDFVLSIRPHIEQMLVSHRPEHKMSGELHKGTNYPAPHNYKGKPTVHTRCALSALSAADIADDEVIVDPAVRDAVRAKLEKLGGNPKLFDRPENAPCLESRDGRFIPIRKVRIREAKKPILVGTGVRERYVASGGIHHIGLFVVRDARRREVWESEVVQITDAYERHREHLPVVCRTHDAEEAAFLFSLMKDDTVELEKDGTRGIYRVKKFEATGKITFVPVNNAMLDKMQYTTGAAWSRMPATLKPMSPRKIVIDLLGKVHPAND

SEQ ID NO: 590 - protein, 1062 aa, unidentified
  REGION 1..1062: note = Description of Unknown: uncultivated organism
  REGION 1..1062: note = MG4-172 effector
MSAALEQQKYVLGLDLGSASLGWALIALNDADDPVSLIRAGVRIFEPGVDGTSIEIEQGKDQSKAVERRTARLHRRQLRRRAARQRDLFRVLQRHSLLPAPETLVGSPEEQRHSVLNELDQELAQKWQSTYQGIRFAELPLYYLRKMALDERLEAHEIGRILFHLIQRRGFLSNRRENKQNPDQKKELGQVKAEIHSLEQEIQNAGARTLGEFFAGLDPHAQKVRRRWTARKMFQDEFEKIWEAQKAHRPELLTQELHDKIAHLLFFQRPIAAQTHLIGKCELETGKQRAPWAAMEAQRFRILQKVNDLRLINPGSLISDPLTEEGRQRLYHLLDREGDQTFKAIRKYLSFSAEVQFNLEKGDEKRLRGNRTQAAMRKVFGERWDTIGEGKQHQIIENWRNSESDDVLIREAMEQWSLDAAAATLLSEQTPEPGYCAVSLAAISKLLPLMASGKSFKEAETELYGARFSGGTIFETLPEVRKQLESLRNPAVERSLTELRKVVNAIVREYGKPHEIRIELARELKKPRQERIEATKKNRNRQREREDVAVRILRECGLSNPSRRDIEKARLHEECGGYCPYTGRHIPFSTLFDNSEFDVEHIIPRSRYPDDSFQNKTLCYLPENRDVKKGQTPWEAYGKDEQRWAEIMTRVSSWKNRGKMARFAIQTEEALGDFSARQMNDTRYASVLASRFLGALYGGRDLVDAEKVRQVIFASSGAVTATLRSSWGLEAILREIVPTEPGESRGKPRTDHRHHAIDAITIALTRPKVIQSMALAASLEPWQRDSRAWRKIESPWRDFVLSIRPHIEQMLVSHRPEHKMSGELHKGTNYPPPHNYKGKPTVHTRCALSALSAADIADDEVIVDPAVRDAVRAKLEKLGGNPKLFDRPENVPCLESRDGRFIPIRKVRIREAKKPILVGTGVRERYVASGGIHHIGLFVVRDARRREVWESEVVQITDAYERHREHLPVVCRIHDAEEAAFLFSLMKDDTVELEKDGTRGIYRVKKFEATGKITFVPVNNAMLDKMQYTTGAAWSRMPATLKPMSPRKIVIDLLGKVHPAND

SEQ ID NO: 591 - protein, 766 aa, unidentified
  REGION 1..766: note = Description of Unknown: uncultivated organism with predicted taxonomy: Ignavibacteriales bacterium CG_4_9_14_3_um_filter_30_11
  REGION 1..766: note = MG4-173 effector
LRLRLDDGNERKLTPNERAVLLDLCEKREKLTIAKARSEIGISKGQKFTIEEGGEKNVPVNLTATRLRAALGQTWDGLTPLQKDDLVEDVGDGKRNPTDEGLERCGRDKWGLPQEIAEALGKVRLPDAYGRYSLRALVALLPAIEEGLTVEDAIRALYAGARKSAEPLPLLPPVRDEKMKTLLGEIRSPAVQRSLTELRKTVNAIIRRYGLPEKIHIELARDLKKSKKERQKQTEINRDREKLRQEATGELRKHDVVRFANPRNSDIEKYLLATEARWQCPYTSKKYGVTDVFGDHPQVDVEHIIPRSRSLDDSYLNKTLAYRSANMEKGNRTPREWLFESDQEQYDRMIGVVSGFDPRFEVGKKLRRFSMELSDPDSLLKEFTERQLQDTRYASKLACRYLGVLYGGTSDASGNQRVFASAGQVTAKLRRAWDLDRILSPDKPEKSRDDHRHHAIDALTVALSSTTLIRALATAAGEADRLFRRKIILPVPWVGFGEQARSAVENIQPSHRPMRKLSGPLHKETFYSRPRKHAVGTDRKGKPIEEECVHYRVPVTSLSSAKSFESIVDSRVRAAVEERAAQLGGGGNRFEKNWPELVTRKGQTVPIKRVRIRKVEGVVSIGKNGRERFVIPGSNHHAEILAELDANGRVKRYLCETVTMLEAVERKRQSVPVVNRDHGPGYKFHCTLSEGDLVEARGPGDEASRIWKVRTVRESQQLALTPALDARPKAVVQKDGMWSPSVNPLFRGGARKVLITPLGEVIPAND

SEQ ID NO: 592 - protein, 764 aa, unidentified
  REGION 1..764: note = Description of Unknown: uncultivated organism with predicted taxonomy: uncultured bacterium
  REGION 1..764: note = MG4-174 effector
MSDNGSLAQDYILGVDLGSASLGWAAIRQDENGMATRLLRAGVRIFDPAVSGDVEKGQDESNAVARRTARLIRRQLRRRAARQSELFRLLQTRGLLPSYQGSEADASQQRHTILNALDLKLAAKWAKSGSNEEQTAIELPLYLLRKTALDAALEPYELGRVFYHLSQRRGYRSNRKEQASGKEASGKAKKADDLGAVEGGIKELEEAMHPFRTLGEYFASLDPHIQKVRRRWTGRKMYEDEFAAIWAKQAAFHPDLLPEELHHQIKRLLFYQRPIKAQSNLIGGCELEPGERRAAWATLEAQQFRVLQKVNDLEIILPGNVTGIPLTPEQRKIVLDLLENSAEATFKKIRKALGLAENIGFNLQRGGDTRLKGNLTNTLMAEAFAERWPEMSNEEKMQAVEDWRTIEQKESLVRRAIEHWKLDETGAQWLAEKPAPNGYCMYSRKAIRKLLPLMATGTRFKAAEKEIYGNRLAGGKVYDRIPPVRDALKTLRNPAIERALTELRKVINALVHEHGKPAEVRIELARDLKKPRHERAKAVSYNRDREKQRTTAKEKMLREVGPGFQHPSRADVEKALLWEECQGECPYTGKRFPFSSLFGENPPLQVDHIIPFSRIPDDSFQNKTLCYHEENQHKGNRTPFEAYTDPAQYEAILNRVRSWRTPNPGKQRRFELRTLEELEGFSERQLNDTRYASKLACELVGTLYGGRDVPLKDGKSRQVVFASSGMVTSTLRKGWGLEAILREAAPSANGQNRGKPRTDHRHHA

SEQ ID NO: 593 - protein, 1079 aa, unidentified; identical to SEQ ID NO: 544
  REGION 1..1079: note = Description of Unknown: uncultivated organism
  REGION 1..1079: note = MG4-175 effector

SEQ ID NO: 594 - protein, 1062 aa, unidentified
  REGION 1..1062: note = Description of Unknown: uncultivated organism with predicted taxonomy: Acidobacteriales bacterium 59-55
  REGION 1..1062: note = MG4-176 effector
MSAALEQQKYVLGLDLGSASLGWALIALNDADDPVSLIRAGVRIFEPGVDGTSIEIEQGKDQSKAVERRTARLHRRQLRRRAARQRDLFRVLQRHSLLPAPETLVGSPEEQRHSVLNELDQELAQKWQSTYQGKRFAELPLYYLRKMALDERLEAHEIGRILFHLIQRRGFLSNRRENKQNPDQKKELGQVKAEIHSLEQEIQNAGARTLGEFFAGLDPHAQKVRRRWTARKMFQDEFEKIWEAQTAHRPELLTQELHDKIAHLLFFQRPIAAQTHLIGKCELETGKQRAPWAAMEAQRFRILQKVNDLRLINPGSLISDPLTEEGRQRLYHLLDREGDQTFKAIRKYLSFSAEVQFNLEKGDEKRLRGNRTQAAMRKVFGERWDTIGEGKQHQIIENWRNSESDDVLIREAMEQWSLDAAAATLLSEQTPEPGYCAVSLAAISKLLPLMASGKSFKEAETELYGARFSGGTIFETLPEVRKQLESLRNPAVERSLTELRKVVNAIVREYGKPHEIRIELARELKKPRQERIEATKKNRNRQREREDVAVRILRECGLSNPSRRDIEKARLHEECGGYCPYTGRHIPFSTLFDNSEFDVEHIIPRSRYPDDSFQNKTLCYLPENRDVKKGQTPWEAYGKDEQRWAEIMTRVSSWKNRGKMARFAIQTEEALGDFSARQMNDTRYASVLASRFLGALYGGRDLVDAEKVRQVIFASSGAVTATLRSSWGLEAILREIVPTEPGESRGKPRTDHRHHAIDAITIALTRPKVIQSMALAASLEPWQRDSRAWRKIESPWRDFVLSIRPHIEQMLVSHRPEHKMSGELHKGTNYPPPHNYKGKPTVHTRCALSALSAADIADDEVIVDPAVRDAVRAKLEKLGGNPKLFDRPENVPCLESRDGRFIPIRKVRIREAKKPILVGTGVRERYVASGGIHHIGLFVVRDARRREVWESEVVQITDAYERHREHLPVVCRTHDAEEAAFLFSLMKDDTVELEKDGTRGIYRVKKFEATGKITFVPVNNAMLDKMQYTTGAAWSRMPATLKPMSPRKIVIDLLGKVHPAND

SEQ ID NO: 595 - protein, 948 aa, unidentified
  REGION 1..948: note = Description of Unknown: uncultivated organism
  REGION 1..948: note = MG4-177 effector
MSFPDGVRQKYILGLDLGSASIGWAVIDLDGNLDPCGLLAAGSHIFDPGVEVPPAAGKMARDEAVFQGLDRSKAVGRRIARQMRRQIDRKGIRLKALFKLLQSKSLLPIYPELKGEPLAAERHHLFTRLDKELTDALCAEKRKRGTDGLMLEADQALPYVLRKEALERKLELHELGRALYHLCQRRGYRPSAADDSEKEETASTEEEIESKRGRRKKPEPEDKGDKDSESPKKVAEWISDLQAKMDAAHTPTIGAYFADFKHNNPHQERIRHRWTGREMFVKEFDLIWERQSEFYRDSRPGLLNDDLRNRVYDCLFFQRPLASAEHLIGMCDLERGERRAPWATLEAQRFRLLQKVNDLAYIPSGLFNERKLSLEQCATLAAALQDKGDMPFPEIAKLLGLPPKTEFNLMRGKKKKIEGNRINQVMLQVFGDRWRAFTEQERSSAVALWTKTEGFEERKNVAISQCGLDPWKAKEWAENRPPKDCCRHSRKALVKLIKRMEEGVPYATAKLEIYDSQLAGKAPLDFVPKVIETLPSINNPAVLRALTELRKVVNAIIRTYGDKPYEIRIELARELRKNRKQRQNATEAGDKQHLRRIDAARTILRECRNYDAQGRDAERLVRERRDDVTKMLLLMECRCLCPYTGDSISYLDLFGGEVEVEHIIPQSLMVDNSFNNLTLCYRKVNHEKLDKTPRQAFCRAEDDQQWIDIIGRVQKFGNKEKLHRFLLSSREDIDRFSNRRLNDTRYTSKLAGRLLMSLYGGRDIVPAETLDELDEFKDRTGRRAICVSSGMVTSLLRDAWHLNLSGVIGDDAFKCPKKSEDDEESGKRRKGQSNKKDRCDHRHHALDAVVIALTSEKVIREINMLASRLYRERQTPLKYRDLKSIQNPWHNFMDDHFRDIFRGMLVSHRPEHKLSGALHEATSYGKVRYYNAKGDPVRYQRIAIGKLL

SEQ ID NO: 596 - protein, 878 aa, unidentified
  REGION 1..878: note = Description of Unknown: uncultivated organism with predicted taxonomy: Acidobacteriales bacterium 59-55
  REGION 1..878: note = MG4-178 effector
KKELGQVKAEIHSLEQEIQNAGARTLGEFFAGLDPHAQKVRRRWTARKMFQDEFEKIWEAQKAHRPELLTQELHDKIAHLLFFQRPIAAQTHLIGKCELETGKQRAPWAAMEAQRFRILQKVNDLRLINPGSLISDPLTEEGRQRLYHLLDREGDQTFKAIRKYLSFSAEVQFNLEKGDEKRLRGNRTQAAMRKVFGERWDTIGEGKQHQIIENWRNSESDEVLIREAMEQWSLDAAAATLLSEQTPEPGYCAVSLAAISKLLPLMASGKSFKEAETELYGARFSGGTIFETLPEVRKQLESLRNPAVERSLTELRKVVNAIVREYGKPHEIRIELARELKKPRQERIEATKKNRNRQREREDVAVRILRECGLSNPSRRDIEKARLHEECGGYCPYTGRHIPFSTLFDNSEFDVEHIIPRSRYPDDSFQNKTLCYLPENRDVKKGQTPWEAYGKDEQRWAEIMTRVSSWKNRGKMARFAIQTEEALGDFSARQMNDTRYASVLASRFLGALYGGRDLVDAEKVRQVIFASSGAVTATLRSSWGLEAILREIVPTEPGESRGKPRTDHRHHAIDAITIALTRPKVIQSMALAASLEPWQRDSRAWRKIESPWRDFVLSIRPHIEQMLVSHRPEHKMSGELHKGTNYPAPHNYKGKPTVHTRCALSALSAADIADDEVIVDPAVRDAVRAKLEKLGGNPKLFDRPENAPCLESRDGRFIPIRKVRIREAKKPILVGTGVRERYVASGGIHHIGLFVVRDARRREVWESEVVQITDAYERHREHLPVVCRTHDAEEAAFLFSLMKDDTVELEKDGTRGIYRVKKFEATGKITFVPVNNAMLDKMQYTTGAAWSRMPATLKPMSPRKIVIDLLGKVHPAND

SEQ ID NO: 597 - protein, 1106 aa, unidentified
  REGION 1..1106: note = Description of Unknown: uncultivated organism with predicted taxonomy: Acidobacteria
  REGION 1..1106: note = MG4-179 effector
MSESGVSTQPYVLGLDLGSASLGWALVGIDAMERPSSLIRAGVRIFEPGVDGSALDIQQGKDQSKAVDRREARLRRRQLRRRVARQRELFGVLQGAGLLPTDDTQGTGIGSEQRHRILNNLDVTLSNRYRNGADQEIFAQMPLYALRKKALYEPLALDELGRVFFHLSQRRGFQSNRKDVKKKTKDSEDQGQVKSAIHELEQAIEAAGAQTLGEYLAGLDPHEQKVRRQWTGRKMFEKEFQMIWDKQKEYHTDLLTPELHDRIWNLLFFQRPVAAQKHLVGKCELEPDKRRAPWAALLAQQFRLLQKVNDLRLIGEDGNELPLNEDGRAAVFDLLENHGTQSFAKIKQHLGLPKTAQFNLERGKAKELKGNVTAQSMRKVFGERWKEFSEGKQNQIIENWRNSEKDEELKREAMEHWGLDEAGANALVNEKAPGDYCSLSLVALGKILPLMRAGKSFKEAETEIYGNRFSGAAVHSIIPVLRPNRKHFRNGTPPPQDPLMASIANGLRNPAVERSITEMRKVVNAIVREYGKPCEIRIELARELKKPRSKRLDETARNRKREAENKALAERMHNECGTPQNPSRNDLEKAKLWVEQQGECPYTGRSLPFSRLFDDNNGFDVDHILPRSRHPDDSYQNKVLCWGDTNRMVKRNQTPYEAFAEQDPENWHQILARVARWKNPGKLRKFEIRSTDDLAEFSSRQLNDTRYTSLLAARLLSTLYGGRDVAENGGKRQIIFASTGAVTATLRRNWGFEQILRNIIPPEPSESTGKPRTDHRHHAIDAIVIALTRNDVIQSMARASALEPWQPGTRSWRHVPQPWCTPDFFRSVEEQVREMLTSHRPEHKVSGELHQGSNYARPYMYKGKSIVHSRTLVSELKVEQIEADDVIVDRAVRDILRAKLKEIGGTLKGSDKVKTFEKPENTPYILTPAGKRIPIRKVRIRETKNPLLVGAGSNERFVASGGIHHVDLFVTRDEKRRETWDSKVIQTTEMYDRFPKHDRRPGRPHTESKNLSRLRQNDDDDESRFLFSLMKSDTIQLEQDGHRQIFKVKKFEATGKMTFIPINNAMPDKLQYSTGAAWSKMPATLKSMSPQKVVVDLLGRVHPAND

SEQ ID NO: 598 - protein, 1076 aa, unidentified; identical to SEQ ID NO: 545
  REGION 1..1076: note = Description of Unknown: uncultivated organism
  REGION 1..1076: note = MG4-180 effector

SEQ ID NO: 599 - protein, 1079 aa, unidentified; identical to SEQ ID NO: 544
  REGION 1..1079: note = Description of Unknown: uncultivated organism
  REGION 1..1079: note = MG4-181 effector

SEQ ID NO: 600 - protein, 1062 aa, unidentified; identical to SEQ ID NO: 549
  REGION 1..1062: note = Description of Unknown: uncultivated organism
  REGION 1..1062: note = MG4-182 effector

SEQ ID NO: 601 - protein, 766 aa, unidentified
  REGION 1..766: note = Description of Unknown: uncultivated organism
  REGION 1..766: note = MG4-183 effector
MSDNGSLAQDYILGVDLGSASLGWAAIRQDENGMATRLLRAGVRIFDPAVSGDVEKGQDESNAVARRTARLIRRQLRRRAARQSELFRLLQTRGLLPSYQGSEADASQQRHTILNALDLKLAAKWAKSGSNEEQTAIELPLYLLRKTALDAALEPYELGRVFYHLSQRRGYRSNRKEQASGKEASGKAKKADDLGAVEGGIKELEEAMHPFRTLGEYFASLDPHIQKVRRRWTGRKMYEDEFAAIWAKQAAFHPDLLPEELHHQIKRLLFYQRPIKAQSNLIGGCELEPGERRAAWATLEAQQFRVLQKVNDLEIILPGNVTGIPLTPEQRKIVLDLLENSAEATFKKIRKALGLAENIGFNLQRGGDTRLKGNLTNTLMAEAFAERWPEMSNEEKMQAVEDWRTIEQKESLVRRAIEHWKLDETGAQWLAEKPAPNGYCMYSRKAIRKLLPLMATGTRFKAAEKEIYGNRLAGGKVYDRIPPVRDALKTLRNPAIERALTELRKVINALVHEHGKPAEVRIELARDLKKPRHERAKAVSYNRDREKQRTTAKEKMLREVGPGFQHPSRADVEKALLWEECQGECPYTGKRFPFSSLFGENPPLQVDHIIPFSRIPDDSFQNKTLCYHEENQHKGNRTPFEAYTDPAQYEAILNRVRSWRTPNPGKQRRFELRTLEELEGFSERQLNDTRYASKLACELVGTLYGGRDVPLKDGKSRQVVFASSGMVTSTLRKGWGLEAILREAAPSANGQNRGKPRTDHRHHAID

SEQ ID NO: 602 - protein, 1076 aa, unidentified; identical to SEQ ID NO: 545
  REGION 1..1076: note = Description of Unknown: uncultivated organism
  REGION 1..1076: note = MG4-184 effector

SEQ ID NO: 603 - protein, 1062 aa, unidentified
  REGION 1..1062: note = Description of Unknown: uncultivated organism
  REGION 1..1062: note = MG4-185 effector
MSAALEQQKYVLGLDLGSASLGWALIALNDADDPVSLIRAGVRIFEPGVDGTSIEIEQGKDQSKAVERRTARLHRRQLRRRAARQRDLFRVLQRHCLLPAPETLVGSPEEQRHSVLNELDQELAQKWQSTYQGIRFAELPLYYLRKMALDERLEAHEIGRILFHLIQRRGFLSNRRENKQNPDQKKELGQVKAEIHSLEQEIQNAGARTLGEFFAGLDPHAQKVRRRWTARKMFQDEFEKIWEAQKAHRPELLTQELHDKIAHLLFFQRPIAAQTHLIGKCELETGKQRAPWAAMEAQRFRILQKVNDLRLINPGSLISDPLTEEGRQRLYHLLDREGDQTFKAIRKYLSFSAEVQFNLEKGDEKRLRGNRTQAAMRKVFGERWDTIGEGKQHQIIENWRNSESDEVLIREAMEQWSLDAAAATLLSEQTPEPGYCAVSLAAISKLLPLMASGKSFKEAETELYGARFSGGTIFETLPEVRKQLESLRNPAVERSLTELRKVVNAIVREYGKPHEIRIELARELKKPRQERIEATKKNRNRQREREDVAVRILRECGLSNPSRRDIEKARLHEECGGYCPYTGRHIPFSTLFDNSEFDVEHIIPRSRYPDDSFQNKTLCYLPENRDVKKGQTPWEAYGKDEQRWAEIMTRVSSWKNRGKMARFAIQTEEALGDFSARQMNDTRYASVLASRFLGALYGGRDLVDAEKVRQVIFASSGAVTATLRSSWGLEAILREIVPTEPGESRGKPRTDHRHHAIDAITIALTRPKVIQSMALAASLEPWQRDSRAWRKIESPWRDFVLSIRPHIEQMLVSHRPEHKMSGELHKGTNYPAPHNYKGKPTVHTRCALSALSAADIADDEVIVDPAVRDAVRAKLEKLGGNPKLFDRPENVPCLESRDGRFIPIRKVRIREAKKPILVGTGVRERYVASGGIHHIGLFVVRDARRREVWESEVVQITDAYERHREHLPVVCRTHDAEEAAFLFSLMKDDTVELEKDGTRGIYRVKKFEATGKITFVPVNNAMLDKMQYTTGAAWSRMPATLKPMSPRKIVIDLLGKVHPAND

SEQ ID NO: 604 - protein, 1079 aa, unidentified; identical to SEQ ID NO: 544
  REGION 1..1079: note = Description of Unknown: uncultivated organism
  REGION 1..1079: note = MG4-186 effector

SEQ ID NO: 605 - protein, 794 aa, unidentified
  REGION 1..794: note = Description of Unknown: uncultivated organism with predicted taxonomy: Polaribacter sp. ALD11
  REGION 1..794: note = MG4-187 effector
MSESGVSTQPYVLGLDLGSASLGWALVGIDAMERPSSLIRAGVRIFEPGVDGSALDIQQGKDQSKAVDRREARLRRRQLRRRVARQRELFGVLQGAGLLPTDDTQGTGIGSEQRHRILNNLDVTLSNRYRNGADQEIFAQMPLYALRKKALYEPLALDELGRVFFHLSQRRGFQSNRKDVKKKTKDSEDQGQVKSAIHELEQAIEAAGAQTLGEYLAGLDPHEQKVRRQWTGRKMFEKEFQMIWDKQKEYHTDLLTPELHDRIWNLLFFQRPVAAQKHLVGKCELEPDKRRAPWAALLAQQFRLLQKVNDLRLIEKDGNELPLNEDGRAAVFDLLENHGTQSFAKIKQHLGLPKTAQFNLERGKAKELKGNVTAQSMRKVFGERWKEFSEGKQNQIIENWRNSEKDEELKREAMEHWGLDEAGANALVNEKAPGDYCSLSLVALGKILPLMRAGKSFKEAETEIYGNRFSGAAVHSIIPVLRPNRKHFRNGTPPPQDPLMASIANGLRNPAVERSITEMRKVVNAIVREYGKPCEIRIELARELKKPRSKRLDETARNRKREAENKALAERMHNECGTPQNPSRNDLEKAKLWVEQQGECPYTGRSLPFSRLFDDNNGFDVDHILPRSRHPDDSYQNKVLCWGDTNRMVKRNQTPYEAFAEQDPENWHQILARVARWKNPGKLRKFEIRSTDDLAEFSSRQLNDTRYTSLLAARLLSTLYGGRDVAENGGKRQIIFASTGAVTATLRRNWGFEQILRNIIPPEPSESTGKPRTDHRHHAIDAIVIALTRNDVIQ

SEQ ID NO: 606 - protein, 1062 aa, unidentified
  REGION 1..1062: note = Description of Unknown: uncultivated organism with predicted taxonomy: Acidobacteriales bacterium 59-55
  REGION 1..1062: note = MG4-188 effector
MSAALEQQKYVLGLDLGSASLGWALIALNGADDPVSLIRAGVRIFEPGVDGTSMEIEQGKDQSKAVERRTARLHRRQLRRRAARQRDLFRVLQRHCLLPAPETLVGSPEEQRHSVLNELDQELTQKWQSTYQGKRFAELPLYYLRKMALDERLEAHEIGRILFHLIQRRGFLSNRRENKQNPDQKKELGQVKAEIHSLEQEIQNAGARTLGEFFAGLDPHAQKVRRRWTARKMFQDEFEKIWEAQTAHRPELLTQELHDKIAHLLFFQRPIAAQTHLIGKCELETGKQRAPWAAMEAQRFRILQKVNDLRLINPGSLISDPLTEEGRQRLYHLLDREGDQTFKAIRKYLSFSAEVQFNLEKGDEKRLRGNRTQAAMRKVFGERWDTIGEGKQHQIIENWRNSESDDVLIREAMEQWSLDAAAATLLSEQTPEPGYCAVSLAAISKLLPLMASGKSFKEAETELYGARFSGGTIFETLPEVRKQLESLRNPAVERSLTELRKVVNAIVREYGKPHEIRIELARELKKPRQERIEATKKNRNRQREREDVAVRILRECGLSNPSRRDIEKARLHEECGGYCPYTGRHIPFSTLFDNSEFDVEHIIPRSRYPDDSFQNKTLCYLPENRDVKKGQTPWEAYGKDEQRWAEIMTRVSSWKNRGKMARFAIQTEEALGDFSARQMNDTRYASVLASRFLGALYGGRDLVDAEKVRQVIFASSGAVTATLRSSWGLEAILREIVPTEPGESRGKPRTDHRHHAIDAITIALTRPKVIQSMALAASLEPWQRDSRAWRKIESPWRDFVLSIRPHIEQMLVSHRPEHKMSGELHKGTNYPPPHNYKGKPTVHTRCALSALSAADIADDEVIVDPAVRDAVRAKLEKLGGNPKLFDRPENVPCLESRDGRFIPIRKVRIREAKKPILVGTGVRERYVASGGIHHIGLFVVRDARRREVWESEVVQITDAYERHREHLPVVCRTHDAEEAAFLFSLMKDDTVELEKDGTRGIYRVKKFEATGKITFVPVNNAMLDKMQYTTGAAWSRMPATLKPMSPRKIVIDLLGKVHPAND

SEQ ID NO: 607 - protein, 1106 aa, unidentified; identical to SEQ ID NO: 597
  REGION 1..1106: note = Description of Unknown: uncultivated organism with predicted taxonomy: Polaribacter sp. ALD11
  REGION 1..1106: note = MG4-189 effector

SEQ ID NO: 608 - protein, 1076 aa, unidentified; identical to SEQ ID NO: 545
  REGION 1..1076: note = Description of Unknown: uncultivated organism
  REGION 1..1076: note = MG4-190 effector

SEQ ID NO: 609 - protein, 1079 aa, unidentified; identical to SEQ ID NO: 544
  REGION 1..1079: note = Description of Unknown: uncultivated organism
  REGION 1..1079: note = MG4-191 effector

SEQ ID NO: 610 - protein, 983 aa, unidentified
  REGION 1..983: note = Description of Unknown: uncultivated organism
  REGION 1..983: note = MG4-192 effector
RRAARQRDLFRVLQRHCLLPAPETLVGSPEEQRHSVLNELDQELTQKWQSTYQGIRFAELPLYYLRKMALDERLEAHEIGRILFHLIQRRGFLSNRRENKQNPDQKKELGQVKAEIHSLEQEIQNAGARTLGEFFAGLDPHAQKVRRRWTARKMFQDEFEKIWEAQKAHRPELLTQELHDKIAHLLFFQRPIAAQTHLIGKCELETGKQRAPWAAMEAQRFRILQKVNDLRLINPGSLISDPLTEEGRQRLYHLLDREGDQTFKAIRKYLSFSAEVQFNLEKGDEKRLRGNRTQAAMRKVFGERWDTIGEGKQHQIIENWRNSESDEVLIREAMEQWSLDAAAATLLSEQTPEPGYCAVSLAAISKLLPLMASGKSFKEAETELYGARFSGGTIFETLPEVRKQLESLRNPAVERSLTELRKVVNAIVREYGKPHEIRIELARELKKPRQERIEATKKNRNRQREREDVAVRILRECGLSNPSRRDIEKARLHEECGGYCPYTGRHIPFSTLFDNSEFDVEHIIPRSRYPDDSFQNKTLCYLPENRDVKKGQTPWEAYGKDEQRWAEIMTRVSSWKNRGKMARFAIQTEEALGDFSARQMNDTRYASVLASRFLGALYGGRDLVDAEKVRQVIFASSGAVTATLRSSWGLEAILREIVPTEPGESRGKPRTDHRHHAIDAITIALTRPKVIQSMALAASLEPWQRDSRAWRKIESPWRDFVLSIRPHIEQMLVSHRPEHKMSGELHKGTNYPAPHNYKGKPTVHTRCALSALSAADIADDEVIVDPAVRDAVRAKLEKLGGNPKLFDRPENAPCLESRDGRFIPIRKVRIREAKKPILVGTGVRERYVASGGIHHIGLFVVRDARRREVWESEVVQITDAYERHREHLPVVCRIHDAEEAAFLFSLMKDDTVELEKDGTRGIYRVKKFEATGKITFVPVNNAMLDKMQYTTGAAWSRMPATLKPMSPRKIVIDLLGKVHPAND

SEQ ID NO: 611 - protein, 1062 aa, unidentified; identical to SEQ ID NO: 549
  REGION 1..1062: note = Description of Unknown: uncultivated organism with predicted taxonomy: Acidobacteriales bacterium 59-55
  REGION 1..1062: note = MG4-193 effector

SEQ ID NO: 612 - protein, 1022 aa, unidentified
  REGION 1..1022: note = Description of Unknown: uncultivated organism
  REGION 1..1022: note = MG4-194 effector
MNESGSLAQDYVLGIDLGSVSLGWAVIGLDKTDMPVVLLRAGVRLFDPAVTGDIEKGQDESNAVARRVARLLRRQLRRRAARQSELFRLLQGHALLPPYEGNEADASQQRHAILNALDLEIAAKWAKSGGAGAQAAIDLPLYMLRKTALDEALEPYELGRVFYHLSQRRGYRSNRKEQAEKKEAAIKGKKDDDLGTVESGIKELGEAMRSFRTLGEYYASLDPHTHNVRRRWTSRKMYEDEFAAIWEKQAALHPTLLTEELHRQIKHLLFYQRPIKAQSHLIGGCELEPGEPRAAWAALEAQQFRVLQQVNELEVISPGRVTGIPLTAEQRQTVLDLLENSSEITFKKISKALGLADYIGFNLQRGGDTKLKGNLTNTHMAEVFAERWTEMSEEEKKQVVEDWRTIDQEDSLIRRAIEYWNLDESSAKWLASRPAPNGYCMYSRKSIRKLLPLMATGARFRAAEKEVYGIRLTGGLVYDSIPPVRDTLKTLRNPAVERALTELRKVVNALVREYGKPTEVRIELANDLKKPRHERAEAFKYKRKWEKQRIDTKEKMLRELGPGFEYPSRADVEKALLWEECQGECPYTGKRFPFSSLYGENPPLQVEHIIPFSRIPDDSFQNKILCYHEDNQHKANRTPFEAYTDPAQYETILSRVRNWRTPNPGKQCRFELRTLEELEGFSERQLNDTRYACKLACELVGTLYGGRDEKTDTDSRQVVFASSGMVTATLRKSWGLEAIMRETAPSANGQNHGKPRTDHRHHAIDAITIALSRPKMIATLSRNNAQDSYRPSNGHTAPRIQSPWEDFVDSIRPHFEKMLVSHRPDHRLTGALHDETNYGRPHKEEGKDVVHIRKPVEGLSARDINNIVDPAVREAVRAKAAQLGGDLKKWTPKEGRGDWPQLGTKNGKQIPVKRVRIKKALSVETIGKDERTRHVALSSNHHVAIFAMLDKRGIEKRWKSIIVSLFEAMDRKRKGQPIVQTSYPEAGDYVFKFSLMGGDTVLLHKDCDHNQNPCNPSVWRLR

SEQ ID NO: 613 - protein, 1062 aa, unidentified; identical to SEQ ID NO: 594
  REGION 1..1062: note = Description of Unknown: uncultivated organism
  REGION 1..1062: note = MG4-195 effector

SEQ ID NO: 614 - protein, 862 aa, unidentified
  REGION 1..862: note = Description of Unknown: uncultivated organism with predicted taxonomy: Acidobacteriales bacterium 59-55
  REGION 1..862: note = MG4-196 effector
DKQKEYHTDLLTPELHDRIWNLLFFQRPVAAQKHLVGKCELEPDKRRAPWAALLAQQFRLLQKVNDLRLIGEDGNELPLNEDGRAAVFDLLENHGTQSFAKIKQHLGLPKTAQFNLERGKAKELKGNVTAQSMRKVFGERWKEFSEGKQNQIIENWRNSEKDEELKREAMEHWGLDEAGANALVNEKAPGDYCSLSLVALGKILPLMRAGKSFKEAETEIYGNRFSGAAVHSIIPVLRPNRKHFRNGTPPPQDPLMASIANGLRNPAVERSITEMRKVVNAIVREYGKPCEIRIELARELKKPRSKRLDETARNRKREAENKALAERMHNECGTPQNPSRNDLEKAKLWVEQQGECPYTGRSLPFSRLFDDNNGFDVDHILPRSRHPDDSYQNKVLCWGDTNRMVKRNQTPYEAFAEQDPENWHQILARVARWKNPGKLRKFEIRSTDDLAEFSSRQLNDTRYTSLLAARLLSTLYGGRDVAENGGKRQIIFASTGAVTATLRRNWGFEQILRNIIPPEPSESTGKPRTDHRHHAIDAIVIALTRNDVIQSMARASALEPWQPGTRSWRHVPQPWCTPDFFRSVEEQVREMLTSHRPEHKVSGELHQGSNYARPYMYKGKSIVHSRTLVSELKVEQIEADDVIVDRAVRDILRAKLKEIGGTLKGSDKVKTFEKPENTPYILTPAGKRIPIRKVRIRETKNPLLVGAGSNERFVASGGIHHVDLFVTRDEKRRETWDSKVIQTTEMYDRFPKHDRRPGRPHTESKNLSRLRQNDDDDESRFLFSLMKSDTIQLEQDGHRQIFKVKKFEATGKMTFIPINNAMPDKLQYSTGAAWSKMPATLKSMSPQKVVVDLLGRVHPAND

SEQ ID NO: 615 - protein, 1062 aa, unidentified
  REGION 1..1062: note = Description of Unknown: uncultivated organism
  REGION 1..1062: note = MG4-197 effector
MSAALEQQKYVLGLDLGSASLGWALIALNDADDPVSLIRAGVRIFEPGVDGTSIEIEQGKDQSKAVERRTARLHRRQLRRRAARQRDLFRVLQRHSLLPAPETLVGSPEEQRHSVLNELDQELAQKWQSTYQGKRFAELPLYYLRKMALDERLEAHEIGRILFHLIQRRGFLSNRRENKQNPDQKKELGQVKAEIHSLEQEIQNAGARTLGEFFAGLDPHAQKVRRRWTARKMFQDEFEKIWEAQKAHRPELLTQELHDKIAHLLFFQRPIAAQTHLIGKCELETGKQRAPWAAMEAQRFRILQKVNDLRLINPGSLISDPLTEEGRQRLYHLLDREGDQTFKAIRKYLSFSAEVQFNLEKGDEKRLRGNRTQAAMRKVFGERWDTIGEGKQHQIIENWRNSESDDVLIREAMEQWSLDAAAATLLSEQTPEPGYCAVSLAAISKLLPLMASGKSFKEAETELYGARFSGGTIFETLPEVRKQLESLRNPAVERSLTELRKVVNAIVREYGKPHEIRIELARELKKPRQERIEATKKNRNRQREREDVAVRILRECGLSNPSRRDIEKARLHEECGGYCPYTGRHIPFSTLFDNSEFDVEHIIPRSRYPDDSFQNKTLCYLPENRDVKKGQTPWEAYGKDEQRWAEIMTRVSSWKNRGKMARFAIQTEEALGDFSARQMNDTRYASVLASRFLGALYGGRDLVDAEKVRQVIFASSGAVTATLRSSWGLEAILREIVPTEPGESRGKPRTDHRHHAIDAITIALTRPKVIQSMALAASLEPWQRDSRAWRKIESPWRDFVLSIRPHIEQMLVSHRPEHKMSGELHKGTNYPPPHNYKGKPTVHTRCALSALSAADIADDEVIVDPAVRDAVRAKLEKLGGNPKLFDRPENAPCLESRDGRFIPIRKVRIREAKKPILVGTGVRERYVASGGIHHIGLFVVRDARRREVWESEVVQITDAYERHREHLPVVCRTHDAEEAAFLFSLMKDDTVELEKDGTRGIYRVKKFEATGKITFVPVNNAMLDKMQYTTGAAWSRMPATLKPMSPRKIVIDLLGKVHPAND

SEQ ID NO: 616 - protein, 1084 aa, unidentified
  REGION 1..1084: note = Description of Unknown: uncultivated organism
  REGION 1..1084: note = MG4-198 effector
MSAKSEELKGAPYILGLDLGAASLGWAVVGLADGKPACHVDGGVRIFPEAVENLEQGKDDPKSAQRRLARQMRRQTDRRARRVASVFRVLQKAGLLPRFSEGADPADPLARHELINRLDEDLACTVPGLIDPAAEHRSRSVFHYRLRALAIHQDLPPYAIGRAFLHIAQRRGFKSGRIEEASGSEKAKERESDSRKERRQVAARIESLPAEFLRLGACTIGEYWSKLDPNQKRIRGIGNWSGRQMHVDEFDRIWERQAPRQQEIMTPLLYRIVKRRIFFQRPLKSAAGLIGHCELERESQRRRAPLAHPLYQRFRILQTVNDLRIVEGSGLSRPLTVEQRIKALDTLSRQQTVTFKSLHKKLGLVPGETFSHEEGDRKDLPGNRTECKLREVFGEQWDSLPEQQKNVIAGYVRSMDDSAVLARIAETRWGLGHLRAARLAGIQLEQGYGRLSVAALRKLLPLMEEGLPYMTAVERIYPDRAFAPTQELLPKVLDLKNVRNPAVVRALTELRKVVNGVIREYGRPERIQIELARELKKPAKARERIAQENRQREDLRKKTIERIFRECGLGKPSNADIEKAILWEECQHHDPYTGGSINFHDLFGSDAKWEIEHIIPHSRSQDDSLTNKTLCSRETNRQKGNRTPFEVFGNTPEWEAMVERVTKFQGDKRAMTRKLARFTMEGGVEELFGEFTQRQLNDTKYASLLAMEFLGQLYGGVCDERGIRRVNAVSGGVTAQIRKGWRLHSILRDGPSQGEAKPRDDHRHHAIDALVIAMTDAGAVQAVSRASERSRLDHRHGFRVDDPWNGFLEQVQAVIRAIRVSHRPDHHLRGALHAESLYSPPRSERGAAPRHRIRKWLSSLTPEQVRDIVDTKVREAVEAKLKELGQTDPRDAFKNNADPPTLGNRHGDPVPIRRVRVYVSVSPQRIGTGATARHVVSKDNHHLAIYRLSADKKGTARWTGEAVSLLEALKRMNLPGRPVIAPVNESGAPLVMALYKGDLVEMTVPKSQPPERDLFVVRGFSIEKRGGPEINFVRHNLAAEIADLKDAGEWQRIRSWDELRLLNPRIVRLGAMGRVMPDDSQPNS

SEQ ID NO: 617 - protein, 1079 aa, unidentified; identical to SEQ ID NO: 544
  REGION 1..1079: note = Description of Unknown: uncultivated organism
  REGION 1..1079: note = MG4-199 effector

SEQ ID NO: 618 - protein, 1079 aa, unidentified; identical to SEQ ID NO: 544
  REGION 1..1079: note = Description of Unknown: uncultivated organism
  REGION 1..1079: note = MG4-200 effector

SEQ ID NO: 619 - protein, 1106 aa, unidentified
  REGION 1..1106: note = Description of Unknown: uncultivated organism with predicted taxonomy: Acidobacteriales bacterium 59-55
  REGION 1..1106: note = MG4-201 effector
MSESGVSTQPYVLGLDLGSASLGWALVGIDAMERPSSLIRAGVRIFEPGVDGSALDIQQGKDQSKAVDRREARLRRRQLRRRVARQRELFGVLQGAGLLPTDDTQGTGIGSEQRHRILNNLDVTLSNRYRNGADQEIFAQMPLYALRKKALYEPLALDELGRVFFHLSQRRGFQSNRKDVKKKTKDSEDQGQVKSAIHELEQAIEAAGAQTLGEYLAGLDPHEQKVRRQWTGRKMFEKEFQMIWDKQKEYHTDLLTPELHDRIWNLLFFQRPVAAQKHLVGKCELEPDKRRAPWAALLAQQFRLLQKVNDLRLIGEDGNELPLNEDGRAAVFDLLENHGTQSFAKIKQHLGLPKTAQFNLERGKAKELKGNVTAQSMRKVFGERWKEFSEGKQNQIIENWRNSEKDEELKREAMEHWGLDEAGANALVNEKAPGDYCSLSLVALGKILPLMRAGKSFKEAETEIYGNRFSGAAVHSIIPVLRPNRKHFRNGTSPPQDPLMASIANGLRNPAVERSITEMRKVVNAIVREYGKPCEIRIELARELKKPRSKRLDETARNRKREAENKALAERMHNECGTPQNPSRNDLEKAKLWVEQQGECPYTGRSLPFSRLFDDNNGFDVDHILPRSRHPDDSYQNKVLCWGDTNRMVKRNQTPYEAFAEQDPENWHQILARVARWKNPGKLRKFEIRSTDDLAEFSSRQLNDTRYTSLLAARLLSTLYGGRDVAENGGKRQIIFASTGAVTATLRRNWGFEQILRNIIPPEPSESTGKPRTDHRHHAIDAIVIALTRNDVIQSMARASALEPWQPGTRSWRHVPQPWCTPDFFRSVEEQVREMLTSHRPEHKVSGELHQGSNYARPYMYKGKSIVHSRTLVSELKVEQIEADDVIVDRAVRDILRAKLKEIGGTLKGSDKVKTFEKPENTPYILTPAGKRIPIRKVRIRETKNPLLVGAGSNERFVASGGIHHVDLFVTRDEKRRETWDSKVIQTTEMYDRFPKHDRRPGRPHTESKNLSRLRQNDDDDESRFLFSLMKSDTIQLEQDGHRQIFKVKKFEATGKMTFIPINNAMPDKLQYSTGAAWSKMPATLKSMSPQKVVVDLLGRVHPAND

SEQ ID NO: 620 - protein, 1062 aa, unidentified; identical to SEQ ID NO: 549
  REGION 1..1062: note = Description of Unknown: uncultivated organism with predicted taxonomy: Acidobacteriales bacterium 59-55
  REGION 1..1062: note = MG4-202 effector

SEQ ID NO: 621 - protein, 1062 aa, unidentified
  REGION 1..1062: note = Description of Unknown: uncultivated organism with predicted taxonomy: Acidobacteriales bacterium 59-55
  REGION 1..1062: note = MG4-203 effector
MSSALEQQKYVLGLDLGSASLGWALIALNGADDPVSLIRAGVRIFEPGVDGTSMEIEQGKDQSKAVERRTARLHRRQLRRRAARQMDLFRVLQRHFLLPSPETLFGSPEEQMHSVLNELDQELTQKWQSTYQGIRFAELPLYYLRKMALDERLEAHEIGRILFHLIQRRGFLSNRRENKQNPDQKKELGQVKAEIHSLEQEIQNAGARTLGEFFAGLDPHAQKVRRRWTARKMFQDEFEKIWEAQTAHRPELLTQELHDKIAHLLFFQRPIAAQTHLIGKCELETGKQRAPWAAMEAQRFRILQKVNDLRLINPGSLISDPLTEEGRQRLYHLLDREGDQTFKAIRKYLSFSAEVQFNLEKGDEKRLRGNRTQAAMRKVFGERWDTIGEGKQHQIIENWRNSESDEVLIREAMEQWSLDAAAATLLSEQTPEPGYCAVSLAAISKLLPLMASGKSFKEAETELYGARFSGGTIFETLPEVRKQLESLRNPAVERSLTELRKVVNAIVREYGKPHEIRIELARELKKPRQERIEATKKNRNRQREREDVAVRILRECGLSNPSRRDIEKARLHEECGGYCPYTGRHIPFSTLFDNSEFDVEHIIPRSRYPDDSFQNKTLCYLPENRDVKKGQTPWEAYGKDEQRWAEIMTRVSSWKNRGKMARFAIQTEEALGDFSARQMNDTRYASVLASRFLGALYGGRDLVDAEKVRQVIFASSGAVTATLRSSWGLEAILREIVPTEPGESRGKPRTDHRHHAIDAITIALTRPKVIQSMALAASLEPWQRDSRAWRKIESPWRDFVLSIRPHIEQMLVSHRPEHKMSGELHKGTNYPAPHNYKGKPTVHTRCALSALSAADIADDEVIVDPAVRDAVRAKLEKLGGNPKLFDRPENAPCLESRDGRFIPIRKVRIREAKKPILVGTGVRERYVASGGIHHIGLFVVRDARRREVWESEVVQITDAYERHREHLPVVCRIHDAEEAAFLFSLMKDDTVELEKDGTRGIYRVKKFEATGKITFVPVNNAMLDKMQYTTGAAWSRMPATLKPMSPRKIVIDLLGKVHPAND

SEQ ID NO: 622 - protein, 830 aa, unidentified
  REGION 1..830: note = Description of Unknown: uncultivated organism with predicted taxonomy: Acidobacteriales bacterium 59-55
  REGION 1..830: note = MG4-204 effector
MFQDEFEKIWEAQTAHRPELLTQELHDKIAHLLFFQRPIAAQTHLIGKCELETGKQRAPWAAMEAQRFRILQKVNDLRLINPGSLISDPLTEEGRQRLYHLLDREGDQTFKAIRKYLSFSAEVQFNLEKGDEKRLRGNRTQAAMRKVFGERWDTIGEGKQHQIIENWRNSESDEVLIREAMEQWSLDAAAATLLSEQTPEPGYCAVSLAAISKLLPLMASGKSFKEAETELYGARFSGGTIFETLPEVRKQLESLRNPAVERSLTELRKVVNAIVREYGKPHEIRIELARELKKPRQERIEATKKNRNRQREREDVAVRILRECGLSNPSRRDIEKARLHEECGGYCPYTGRHIPFSTLFDNSEFDVEHIIPRSRYPDDSFQNKTLCYLPENRDVKKGQTPWEAYGKDEQRWAEIMTRVSSWKNRGKMARFAIQTEEALGDFSARQMNDTRYASVLASRFLGALYGGRDLVDAEKVRQVIFASSGAVTATLRSSWGLEAILREIVPTEPGESRGKPRTDHRHHAIDAITIALTRPKVIQSMALAASLEPWQRDSRAWRKIESPWRDFVLSIRPHIEQMLVSHRPEHKMSGELHKGTNYPPPHNYKGKPTVHTRCALSALSAADIADDEVIVDPAVRDAVRAKLEKLGGNPKLFDRPENVPCLESRDGRFIPIRKVRIREAKKPILVGTGVRERYVASGGIHHIGLFVVRDARRREVWESEVVQITDAYERHREHLPVVCRTHDAEEAAFLFSLMKDDTVELEKDGTRGIYRVKKFEATGKITFVPVNNAMLDKMQYTTGAAWSRMPATLKPMSPRKIVIDLLGKVHPAND

SEQ ID NO: 623 - protein, 819 aa, unidentified
  REGION 1..819: note = Description of Unknown: uncultivated organism with predicted taxonomy: Acidobacteria
  REGION 1..819: note = MG4-205 effector
MAAIAPPSFRPGLVLGIDLGSNSLGTALIRTDLDLIEFMGVRIFPAGVEGNLEEGKEESRAAKRRQARLARRQTQRRQRRLYKVFHFLQRIGLLPTGDRLEVLGRLQNELEHCYPQTTVLPWFLRARALDQALGPHELGLALYHLAQRRGFLSNRAGGKDNEKERSEVKASIKGLAAAIEAAGKRTLGEYMASLNPREKLRNSAEFSGHYTHRSMFEREFDMIWDSQKAHHPEILTENHGAKLHDAMFHQRPLKDQSYLVGQCELEPTEKRAPLRLLAAQRFRILGFVNNLRLRLEDGNERKLTPNERAVLLDLCEKAEKLSLAAARRVLGLSTAQRFTIEEGGEKNVPVNLTATRLRAALGQAWDGLTAAQKDDLIEDVGDGKRCPTDEDLERCGREKWGWPQEVANALSKVRLPDGYGRYSLRALVALLPALEGGITVEEAIRAIPAYAETRNAAEPLPMLPPVRDLKAMLGEIRNPAVLRSLTELRKTVNAIIRRYGIPEQIHIELARDLKKSKKERQYQAELNREREKMRQEATEELRKYDAVRFANPRNTDIEKYLLAKEARWQCPYTNKKYGFTDVFGDHPQVDVEHIIPRSRSLDDSYVNKTLAYRSANAEKGNRTPREWLFESDQEQYEQMIRVVKQFDPRFEVGKKLRRFSMELSDPDSLLREFTERQLQDTRYASKLACRYLGVLYGGTIDASGKRRVFASAGQVTAKLRRAWDLDRILSPDKPEKCRDDHRHHAIDALTVALSSTTLIRELARAAGEADRLFRRKIILPVPWVGFGEQTRSAVERIQPSHRPMRKLAGPLHEETFYSR

SEQ ID NO: 624 - protein, 1062 aa, unidentified
  REGION 1..1062: note = Description of Unknown: uncultivated organism
  REGION 1..1062: note = MG4-206 effector
MSAALEQQKYVLGLDLGSASLGWALIALNDADDPVSLIRAGVRIFEPGVDGTSIEIEQGKDQSKAVERRTARLHRRQLRRRAARQRDLFRVLQRHSLLPAPETLVGSPEEQRHSVLNELDQELAQKWQSTYQGKRFAELPLYYLRKMALDERLEAHEIGRILFHLIQRRGFLSNRRENKQNPDQKKELGQVKAEIHSLEQEIQNAGARTLGEFFAGLDPHAQKVRRRWTARKMFQDEFEKIWEAQKAHRPELLTQELHDKIAHLLFFQRPIAAQTHLIGKCELETGKQRAPWAAMEAQRFRILQKVNDLRLINPGSLISDPLTEEGRQRLYHLLDREGDQTFKAIRKYLSFSAEVQFNLEKGDEKRLRGNRTQAAMRKVFGERWDTIGEGKQHQIIENWRNSESDEVLIREAMEQWSLDAAAATLLSEQTPEPGYCAVSLAAISKLLPLMASGKSFKEAETELYGARFSGGTIFETLPEVRKQLESLRNPAVERSLTELRKVVNAIVREYGKPHEIRIELARELKKPRQERIEATKKNRNRQREREDVAVRILRECGLSNPSRRDIEKARLHEECGGYCPYTGRHIPFSTLFDNSEFDVEHIIPRSRYPDDSFQNKTLCYLPENRDVKKGQTPWEAYGKDEQRWAEIMTRVSSWKNRGKMARFAIQTEEALGDFSARQMNDTRYASVLASRFLGALYGGRDLVDAEKVRQVIFASSGAVTATLRSSWGLEAILREIVPTEPGESRGKPRTDHRHHAIDAITIALTRPKVIQSMALAASLEPWQRDSRAWRKIESPWRDFVLSIRPHIEQMLVSHRPEHKMSGELHKGTNYPAPHNYKGKPTVHTRCALSALSAADIADDEVIVDPAVRDAVRAKLEKLGGNPKLFDRPENAPCLESRDGRFIPIRKVRIREAKKPILVGTGVRERYVASGGIHHIGLFVVRDARRREVWESEVVQITDAYERHREHLPVVCRIHDAEEAAFLFSLMKDDTVELEKDGTRGIYRVKKFEATGKITFVPVNNAMLDKMQYTTGAAWSRMPATLKPMSPRKIVIDLLGKVHPAND

SEQ ID NO: 625 - protein, 1056 aa, unidentified
  REGION 1..1056: note = Description of Unknown: uncultivated organism
  REGION 1..1056: note = MG4-207 effector
MAAIAPPSFRPGLVLGIDLGSNSLGTALIRTDLDLIEFMGVRIFPAGVEGNLEEGKEESRAAKRRQARLARRQTQRRQRRLYKVFHFLQRIGLLPTGDRLEVLGRLQNELEHCYPQTTVLPWFLRARALDQALGPHELGLALYHLAQRRGFLSNRAGGKDNEKERSEVKASIKGLAAAIEAAGKRTLGEYMASLNPREKLRNSAEFSGHYTHRSMFEREFDMIWDSQKAHHPEILTENHGAKLHDAMFHQRPLKDQSYLVGQCELEPTEKRAPLRLLAAQRFRILGFVNNLRLRLEDGNERKLTPNERAVLLDLCEKAEKLSLAAARRVLGLSTAQRFTIEEGGEKNVPVNLTATRLRAALGQAWDGLTAAQKDDLIEDVGDGKRCPTDEDLERCGREKWGWPQEVANALSKVRLPDGYGRYSLRALVALLPALEGGITVEEAIRAIPAYAETRNAAEPLPMLPPVRDLKAMLGEIRNPAVLRSLTELRKTVNAIIRRYGIPEQIHIELARDLKKSKKERQYQAELNREREKMRQEATEELRKYDAVRFANPRNTDIEKYLLAKEARWQCPYTNKKYGFTDVFGDHPQVDVEHIIPRSRSLDDSYVNKTLAYRSANAEKGNRTPREWLFESDQEQYEQMIRVVKQFDPRFEVGKKLRRFSMELSDPDSLLREFTERQLQDTRYASKLACRYLGVLYGGTIDASGKRRVFASAGQVTAKLRRAWDLDRILSPDKPEKCRDDHRHHAIDALTVALSSTTLIRELARAAGEADRLFRRKIILPVPWVGFGEQTRSAVERIQPSHRPMRKLAGPLHEETFYSRPRKEAVGTDKKGNPIKKEFVHYRVPVTSLASAKDFESIVDSHVRAAVKEKAAQLGGGGNKFEKNWPALVTRKGQTVPIRRVRIRKVQSVVSIGKDERKRFVVPGSNHHAEILKELDANGRVKRYLCETVTMLKALERKRQGVPVVSRDHGPGYKFHCTLSEGDLVEARGPGDEALRIWKVRTVRDSQQLALTPALDARPKADVQKDGMWSPRVNSLFLGGARKVLITPLGEVIPAND

SEQ ID NO: 626 - protein, 1076 aa, unidentified; identical to SEQ ID NO: 545
  REGION 1..1076: note = Description of Unknown: uncultivated organism
  REGION 1..1076: note = MG4-208 effector

SEQ ID NO: 627 - protein, 1079 aa, unidentified; identical to SEQ ID NO: 544
  REGION 1..1079: note = Description of Unknown: uncultivated organism
  REGION 1..1079: note = MG4-209 effector

SEQ ID NO: 628 - protein, 827 aa, unidentified
  REGION 1..827: note = Description of Unknown: uncultivated organism with predicted taxonomy: candidate division Kazan bacterium
  REGION 1..827: note = MG4-210 effector
QMRRQIDRKGIRLKALFKLLQSKSLLPIYPELKGEPLAAERHHLFTRLDKELTDALCAEKRKRGTDGLMLEADQALPYVLRKEALERKLELHELGRALYHLCQRRGYRPSAADDSEKEETASTEEEIESKRGRRKKPEPEDKGDKDSESPKKVAEWISDLQAKMDAAHTPTIGAYFADFKHNNPHQERIRHRWTGREMFVKEFDLIWERQSEFYRDSRPGLLNDDLRNRVYDCLFFQRPLASAEHLIGMCDLERGERRAPWATLEAQRFRLLQKVNDLAYIPSGLFNERKLSLEQCATLAAALQDKGDMPFPEIAKLLGLPPKTEFNLMRGKKKKIEGNRINQVMLQVFGDRWRAFTEQERSSAVALWTKTEGFEERKNVAISQCGLDAWKAKEWAENRPPKDCCRHSRKALVKLIKRMEEGVPYATAKLEIYDSQLAGKAPLDFVPKVIETLPSINNPAVLRALTELRKVVNAIIRTYGDKPYEIRIELARELRKNRKQRQNATEAGDKQHLRRIDAARTILRECRNYDAQGRDAERLVRERRDDVTKMLLLMECRCLCPYTGDSISYLDLFGGEVEVEHIIPQSLMVDNSFNNLTLCYRKVNHEKLDKTPRQAFCRAEDDQQWIDIIGRVQKFGNKEKLHRFLLSSREDIDRFSNRRLNDTRYTSKLAGRLLMSLYGGRDIVPAETLDELDEFKDRTGRRAICVSSGMVTSLLRDAWHLNLSGVIGDDAFKCPKKSEDDEESGKRRKGQSNKKDRCDHRHHALDAVVIALTSEKVIREINMLASRLYRERQTPLKYRDLKSIQNPWHNFMDDHFRDIFRGMLVSH

SEQ ID NO: 629 - protein, 845 aa, unidentified
  REGION 1..845: note = Description of Unknown: uncultivated organism with predicted taxonomy: Acidobacteriales bacterium 59-55
  REGION 1..845: note = MG4-211 effector
RIWNLLFFQRPVAAQKHLVGKCELEPDKRRAPWAALLAQQFRLLQKVNDLRLIGEDGNELPLNEDGRAAVFDLLENHGTQSFAKIKQHLGLPKTAQFNLERGKAKELKGNVTAQSMRKVFGERWKEFSEGKQNQIIENWRNSEKDEELKREAMEHWGLDEAGANALVNEKAPGDYCSLSLVALGKILPLMRAGKSFKEAETEIYGNRFSGAAVHSIIPVLRPNRKHFRNGTPPPQDPLMASIANGLRNPAVERSITEMRKVVNAIVREYGKPCEIRIELARELKKPRSKRLDETARNRKREAENKALAERMHNECGTPQNPSRNDLEKAKLWVEQQGECPYTGRSLPFSRLFDDNNGFDVDHILPRSRHPDDSYQNKVLCWGDTNRMVKRNQTPYEAFAEQDPENWHQILARVARWKNPGKLRKFEIRSTDDLAEFSSRQLNDTRYTSLLAARLLSTLYGGRDVAENGGKRQIIFASTGAVTATLRRNWGFEQILRNIIPPEPSESTGKPRTDHRHHAIDAIVIALTRNDVIQSMARASALEPWQPGTRSWRHVPQPWCTPDFFRSVEEQVREMLTSHRPEHKVSGELHQGSNYARPYMYKGKSIVHSRTLVSELKVEQIEADDVIVDRAVRDILRAKLKEIGGTLKGSDKVKTFEKPENTPYILTPAGKRIPIRKVRIRETKNPLLVGAGSNERFVASGGIHHVDLFVTRDEKRRETWDSKVIQTTEMYDRFPKHDRRPGRPHTESKNLSRLRQNDDDDESRFLFSLMKSDTIQLEQDGHRQIFKVKKFEATGKMTFIPINNAMPDKLQYSTGAAWSKMPATLKSMSPQKVVVDLLGRVHPAND

SEQ ID NO: 630 - protein, 1076 aa, unidentified; identical to SEQ ID NO: 545
  REGION 1..1076: note = Description of Unknown: uncultivated organism
  REGION 1..1076: note = MG4-212 effector

SEQ ID NO: 631 - protein, 1106 aa, unidentified; identical to SEQ ID NO: 597
  REGION 1..1106: note = Description of Unknown: uncultivated organism with predicted taxonomy: Polaribacter sp. ALD11
  REGION 1..1106: note = MG4-213 effector

SEQ ID NO: 632 - protein, 1079 aa, unidentified; identical to SEQ ID NO: 544
  REGION 1..1079: note = Description of Unknown: uncultivated organism
  REGION 1..1079: note = MG4-214 effector

SEQ ID NO: 633 - protein, 1109 aa, unidentified
  REGION 1..1109: note = Description of Unknown: uncultivated organism
  REGION 1..1109: note = MG4-215 effector
RSKAVGRRIARQMRRQIDRKGIRLKALFKLLQSKSLLPIYPELKGEPLAAERHHLFTRLDKELTDALCAEKRKRGTDGLMLEADQALPYVLRKEALERKLELHELGRALYHLCQRRGYRPSAADDSEKEETASTEEEIESKRGRRKKPEPEDKGDKDSESPKKVAEWISDLQAKMDAAHTPTIGAYFADFKHNNPHQERIRHRWTGREMFVKEFDLIWERQSEFYRDSRPGLLNDDLRNRVYDCLFFQRPLASAEHLIGMCDLERGERRAPWATLEAQRFRLLQKVNDLAYIPSGLFNERKLSLEQCATLAAALQDKGDMPFPEIAKLLGLPPKTEFNLMRGKKKKIEGNRINQVMLQVFGDRWRAFTEQERSSAVALWTKTEGFEERKNVAISQCGLDAWKAKEWAENRPPKDCCRHSRKALVKLIKRMEEGVPYATAKLEIYDSQLAGKAPLDFVPKVIETLPSINNPAVLRALTELRKVVNAIIRTYGDKPYEIRIELARELRKNRKQRQNATEAGDKQHLRRIDAARTILRECRNYDAQGRDAERLVRERRDDVTKMLLLMECRCLCPYTGDSISYLDLFGGEVEVEHIIPQSLMVDNSFNNLTLCYRKVNHEKLDKTPRQAFCRAEDDQQWIDIIGRVQKFGNKEKLHRFLLSSREDIDRFSNRRLNDTRYTSKLAGRLLMSLYGGRDIVPAETLDELDEFKDRTGRRAICVSSGMVTSLLRDAWHLNLSGVIGDDAFKCPKKSEDDEESGKRRKGQSNKKDRCDHRHHALDAVVIALTSEKVIREINMLASRLYRERQTPLKYRDLKSIQNPWHNFMDDHFRDIFRGMLVSHRPEHKLSGALHEATSYGKVRYYNAKGDPVRYQRIAIGKLLTDKQIEKIVDEEVKKSVVKLGETIGGYKKWSQEKHGWPKMPNRNGEPVPIKKVRIKITKNAKEIEAERFRGFGTGRPESNVEDKEIAYASFFTVQDRKGTKTVWEIVKLFEAAQRVRALPKSERGHEKICWKYPKYPDATFFRFSLMKGDLVELVLNGKPAIFIVRRFEFDSRLWVAPINAAGKDEEMEAAGHLLRLGFSRFLTMGAGDDKIPRPVFVDLLGQPHYINIGA

SEQ ID NO: 634 - protein, 1062 aa, unidentified
  REGION 1..1062: note = Description of Unknown: uncultivated organism
  REGION 1..1062: note = MG4-216 effector
MSAALEQQKYVLGLDLGSASLGWALIALNDADDPVSLIRAGVRIFEPGVDGTSIEIEQGKDQSKAVERRTARLHRRQLRRRAARQRDLFRVLQRHCLLPAPETLVGSPEEQRHSVLNELDQELAQKWQSTYQGKRFAELPLYYLRKMALDERLEAHEIGRILFHLIQRRGFLSNRRENKQNPDQKKELGQVKAEIHSLEQEIQNAGARTLGEFFAGLDPHAQKVRRRWTARKMFQDEFEKIWEAQKAHRPELLTQELHDKIAHLLFFQRPIAAQTHLIGKCELETGKQRAPWAAMEAQRFRILQKVNDLRLINPGSLISDPLTEEGRQRLYHLLDREGDQTFKAIRKYLSFSAEVQFNLEKGDEKRLRGNRTQAAMRKVFGERWDTIGEGKQHQIIENWRNSESDEVLIREAMEQWSLDAAAATLLSEQTPEPGYCAVSLAAISKLLPLMASGKSFKEAETELYGARFSGGTIFETLPEVRKQLESLRNPAVERSLTELRKVVNAIVREYGKPHEIRIELARELKKPRQERIEATKKNRNRQREREDVAVRILRECGLSNPSRRDIEKARLHEECGGYCPYTGRHIPFSTLFDNSEFDVEHIIPRSRYPDDSFQNKTLCYLPENRDVKKGQTPWEAYGKDEQRWAEIMTRVSSWKNRGKMARFAIQTEEALGDFSARQMNDTRYASVLASRFLGALYGGRDLVDAEKVRQVIFASSGAVTATLRSSWGLEAILREIVPTEPGESRGKPRTDHRHHAIDAITIALTRPKVIQSMALAASLEPWQRDSRAWRKIESPWRDFVLSIRPHIEQMLVSHRPEHKMSGELHKGTNYPAPHNYKGKPTVHTRCALSALSAADIADDEVIVDPAVRDAVRAKLEKLGGNPKLFDRPENVPCLESRDGRFIPIRKVRIREAKKPILVGTGVRERYVASGGIHHIGLFVVRDARRREVWESEVVQITDAYERHREHLPVVCRTHDAEEAAFLFSLMKDDTVELEKDGTRGIYRVKKFEATGKITFVPVNNAMLDKMQYTTGAAWSRMPATLKPMSPRKIVIDLLGKVHPAND

SEQ ID NO: 635 - protein, 754 aa, unidentified
  REGION 1..754: note = Description of Unknown: uncultivated organism with predicted taxonomy: candidate division Zixibacteria bacterium CG_4_9_14_3_um_filter_46_8
  REGION 1..754: note = MG4-217 effector
LSENTPRIAEDLILGLDLGTNSLGWCLLSAPEGNPASIVAIGVRSFDAGGDISAANGKSPCVIRREARVARRVVARRAKRLRDALRALQAAGLLPAGKAKDVIPPLDAAWLEERLSSFPQRDPERLRQAHLLPYLLRKEALDRPLTRQELGRALYHLAQRRGFLTNRKAEPKKDEKPGEVKQSIDSLRGKMEQAHARTLGEYFAGLDPQETRIRRRWTARGMYLDEFECIWTAQAPHHAEVLTSALKADLYRAIFRKRPMSSAASLVGPCAHEPNRRRAPACILPAQRFRLLQQVINCRVIEPNQVGRLLTDEEFAKLVQALEERDEMTVTEAKKVLGLPSRSKFTFEEGGEKKFNGNGTNAGLANVFGPAWETFTPDQRDAVVTEVRSFEDPEALIRRATSGRAFWNLDAQAGKALADVRLQQGYCALSRRALERLLPLMESRVPYQTAVEQIYKESCRKTAVKDLLPRVSELKELRNPVVSRVLTETRKVVNAIIRKYGIPGRVRIELGRDLKQSKDHRLRATKNARDNEESRKAAIRKILAETPVRSPGPDDILRAQLYEECNHECPYTGRKIAFAALFGDSPQFDIEHIIPFSRCLDDSFANKTLCYHEVNRHVKGNRTPLEAFGSTPEWERIVQSVRLFSGKAAEGKLRRFLMTEEEILKLQDFANSQLSDTRYASKLAMRYLALLYGGLSDEGGTQRIQAGSGNVTKHVRQAHRLNGILGDGPGKNRNDHRHHAVDALAIALTDQALV

SEQ ID NO: 636 - protein, 1045 aa, unidentified
  REGION 1..1045: note = Description of Unknown: uncultivated organism with predicted taxonomy: Planctomicrobium piriforme
  REGION 1..1045: note = MG4-218 effector
MANPTGVPYILGLDIGASSIGWALLAANTDRSERLLRCGARVFDAGMEEGDFSAGKENSRSAVRRLARQARKLTSRRMRRQRKLFNLLVKAGLLPAGEPSQVVPALDADLRRKHVAMLPKGSDARRQAEHVLPYRLRALALDQKLEALELGRAIYHLAQRRGFLSNRKAPPRKDEKPGEVKEHITELEKNIKAAGARTLGKYLSGLDPEQERIRRRWTSRPMYLDEFAVLWAAQAAYHPAILTDDLRKRIHRAIFHQRPLKNQSNLIGTCELERGRQRAPKALLLFQRFRTLQQITSARVVARSGAGRELGAAERATLLAALDRQGELAFSKAKKLIGLPPGSTFNWESGGEDKFNGNHTGARLAEIFGDRWHRMCPSGKDQVVEDVLSIHSDAALERRGLKWDLDSEAAARFGHVNLEDGHGGLSRQALQKLVPLMEQGVPYATAVDKVYGRKEHKPLEVLPPPAPTYPHLRNPMVLRVLAELRKVVNAVIAAHGKPDAVRVELARDMRRSKKQRQESWLRMRQNERDRKRAAQKILAEMNNDSPSRQDKEKVLLAEECNWTCPYTGKCISMQSLLGPTPQFDIEHIIPFSRSLDDSFTNKTLCDIAENRDHKRNRTPFEAYAAEPDKWNAILGRVGRFRSNAREEKVRRFRQEEIEGIEDFAARQLNDTRYATRQATDYLALLYGGLYEKGGKRFIQAAKGGTTAYLRNEWQLNSILGDGGTKSRDDHRHHAVDAVAIALTDAGTVKMLSDAAGRAAQEGRRRFGRVEDPWPGFLDDVRQAIEGLNVSHRVSRKVNGPLHEETNYGPGKKRDAAGRPESLSVRKRLDALTPADMKLIADERVRGLVTAKLATLGGDAKKAFSDVKNHPCFELKDGRRIPIHAVRLRRSGTALAVGEGARVRYVLTGSNHHMELYEVTDAKGKTRWKGRVVSRFEAIRRQGRKQPVVDRTPPDGGTFKFSLAPGEIVHLTDEKGEARLYRVRTVSQAASGSIEIAGAKVNDARLKDEIIKGGDWLRITSMDKVAAMSCHKVIITPLGEIRDAND

SEQ ID NO: 637 - protein, 1076 aa, unidentified
  REGION 1..1076: note = Description of Unknown: uncultivated organism with predicted taxonomy: Candidatus Sulfotelmatomonas gaucii
  REGION 1..1076: note = MG4-219 effector
MSSALERPQKYVLGLDLGSASLGWALIALNDADNPTSLIRAGVRIFEPGVDGTSMEIEQGKDQSKAVERRTARLHRRQLRRRAARQRDLFRLLQRHSLLPAPETLGGSPEEQRHSILNGLDQALARKWQSAFPDNRFAQLPLYYLRKRALDEPLEAHEIGRILFHLIQRRGFLSNRRENKQNPDQKKELGQVKAEIHSLEQEIQNAGARTLGEFFAGLDPHAQKVRRRWTARKMFQNEFEKIWEAQVIHCPNLLMPELHDKIAHLLFFQRPIATQSHLVGKCELEPGKQRAPWAAMEAQRFRILQKVNDLRLVNPGSLISDPLTEEDRQRLNSLLDREGDQTFKAIKKYLSFPADVQFNLEKGDEKRLRGNRTQAAMRKVFGDRWDRMSAGKQHQIVENWRNSESDEALIREAEEQWSLDDTAATLLSEQIPEPGYCAVSLTAISKLLPLMQCGKSFKEAETVVYGARFSGGVVFDTLPEVRKQLESLRNPAVERALTELRKVVNAIVREYGKPYEIRIELARELKKPRQERLEATKKNRTRQREREDIAGKILRECGLSNPSRKDIEKARLHEECGGICPYTGRHIPFSTLFDNSEFDVEHIIPRSRYPDDSFQNKTLCYLPENRDVKKGQTPWEAYGKDEQRWAEIMTRVGSWKNRGKMARFSIQTEEALGEFSARQMNDTRYASVLAARFLGSLYGGRDVVDGDNARQVIFASSGAVTATLRSSWGLEAILHEIVPAESGESRGKPRTDHRHHAIDAITIALTRSKVIQSMARTASLEPWQIDSRAWRKIELPWRDFVPSIRPHIEQMLVSHRPEHKMSGELHKGTNYSTPYNYKGKPTVHTRCLLSALSAADIAGDEVIVDTAVRDAVRKKLAELGGNPKLFDRPENAPCLSARDGRLIPIRKVRVRETKNPVKVGKGVRERFTSSGGIHHVALFVTRDEKRREKWDSEVAQVTEIYRRCPRNDHRKGRSQPVVTESPISRQLKSDPEAQFLFSVMKDDTIEVTDPNGIHILRVKKFSDNKQMWFVPVNDAHDDTQQMKLGITWSKTPNSLKELRPRKVVVDLLGKVHPAND

SEQ ID NO: 638 - protein, 1068 aa, unidentified
  REGION 1..1068: note = Description of Unknown: uncultivated organism with predicted taxonomy: Proteobacteria
  REGION 1..1068: note = MG4-220 effector
MSTALVPSDYILGIDLGSNSIGWAMIGLDQGKPTGLIRAGARVFDAGMEGDLESGQEESRNVARRDARMQRRQMARRARRLTKIFHILQRIGLLPPADLKTPEQRQEFLNQLDSNIIGSDWFKTKRAGNNFGEIDQVMPYLLRAAALDEPLDPHQLGRALYHLGQRRGFLSNRKKPMKKGEDEGVVKESIAELRQKMQESGARTLGEYFMRINPFERRIRQRWTHRDMYEGEFEKIWEAQAAHHPLLLTPERKKELKRAIFYQRPLRFPRELVGHCELEPEEIRAPRHYFIAQRFRLLQSLNNLRVAMPGEAERDLTAEERAKLDNELELHGDRTFGQIRKLLGIKRATFNLESGGEKLLRGNRTTAQFYKVFGERWLEMSSVEHEQALQDVRSIVKDETRLRRGSEHWKLDPEHAREFAAISLEPDYFNLSRKAMERLLPLLETGVSYATARRQLYPERFQAREPVPLLPPLHDVFEYLRNPAVERSLTELRKVVNALVRQYGKPAQIRLELARDLRKSRKEREANWKKNRDIEKSRKIMAERITAEAGITDPSREDIRKALLAKECGWVCPYTGRAISMRALVGPDAQFDIEHIIPFSQSLDNSFFNVTLCYHEENRNRKRNQTPYGAYGNEPEKFQEILDRVRRFDSDLADEKLKRFQLTDTADILKGFVDRQLNDTRYASTMAGDYLGFLYGGKIDSQRNLRVRATTGQVTAYLRDEWMLNRILRDGPTEQGGKVAKSREDHRHHAVDAIAIALTDESTIQQLSRAAQQAPQLGRRRFAPVQAPWPDFVDSVRAEIGRIVVSHRPNRKVSGALHEETLYSKSMPVPDSLKSQEKAPRVRKPLERLSKSEVEDIADPIVREMVQKKLEQLDGDPKKFSVAANLPFFKTADGREIPIKSVRVIKKTPTFPLGMGSRMRNVTSESNHHLEIFAELDEHGEEVEWDGVVVPMAEAYKRLAEAKRLRTKVPIVQRDFGAHRHFKFSLAAGDVVQCDNNHEGRRLLVVRGTSIEGGKTGRVALVPINDARKKNEIVASKDYFRFPLEKLRKLHTCKVTLSPLGDLGTAND

SEQ ID NO: 639 - protein, 876 aa, unidentified
  REGION 1..876: note = Description of Unknown: uncultivated organism with predicted taxonomy: Acidobacteriales bacterium 59-55
  REGION 1..876: note = MG4-221 effector
TGRKMFEKEFQMIWDKQKEYHTDLLTPELHDRIWNLLFFQRPVAAQKHLVGKCELEPDKRRAPWAALLAQQFRLLQKVNDLRLIGEDGNELPLNEDGRAAVFDLLENHGTQSFAKIKQHLGLPKTAQFNLERGKAKELKGNVTAQSMRKVFGERWKEFSEGKQNQIIENWRNSEKDEELKREAMEHWGLDEAGANALVNEKAPGDYCSLSLVALGKILPLMRAGKSFKEAETEIYGNRFSGAAVHSIIPVLRPNRKHFRNGTPPPQDPLMASIANGLRNPAVERSITEMRKVVNAIVREYGKPCEIRIELARELKKPRSKRLDETARNRKREAENKALAERMHNECGTPQNPSRNDLEKAKLWVEQQGECPYTGRSLPFSRLFDDNNGFDVDHILPRSRHPDDSYQNKVLCWGDTNRMVKRNQTPYEAFAEQDPENWHQILARVARWKNPGKLRKFEIRSTDDLAEFSSRQLNDTRYTSLLAARLLSTLYGGRDVAENGGKRQIIFASTGAVTATLRRNWGFEQILRNIIPPEPSESTGKPRTDHRHHAIDAIVIALTRNDVIQSMARASALEPWQPGTRSWRHVPQPWCTPDFFRSVEEQVREMLTSHRPEHKVSGELHQGSNYARPYMYKGKSIVHSRTLVSELKVEQIEADDVIVDRAVRDILRAKLKEIGGTLKGSDKVKTFEKPENTPYILTPAGKRIPIRKVRIRETKNPLLVGAGSNERFVASGGIHHVDLFVTRDEKRRETWDSKVIQTTEMYDRFPKHDRRPGRPHTESKNLSRLRQNDDDDESRFLFSLMKSDTIQLEQDGHRQIFKVKKFEATGKMTFIPINNAMPDKLQYSTGAAWSKMPATLKSMSPQKVVVDLLGRVHPAND

SEQ ID NO: 640 - protein, 1062 aa, unidentified
  REGION 1..1062: note = Description of Unknown: uncultivated organism
  REGION 1..1062: note = MG4-222 effector
MSSALEQQKYVLGLDLGSASLGWALIALNDADDPVSLIRAGVRIFEPGVDGTSIEIEQGKDQSKAVERRTARLHRRQLRRRAARQRDLFRVLQRHCLLPAPETLVGSPEEQRHSVLNELDQELAQKWQSTYQGKRFAELPLYYLRKMALDERLEAHEIGRILFHLIQRRGFLSNRRENKQNPDQKKELGQVKAEIHSLEQEIQNAGARTLGEFFAGLDPHAQKVRRRWTARKMFQDEFEKIWEAQTAHRPELLTQELHDKIAHLLFFQRPIAAQTHLIGKCELETGKQRAPWAAMEAQRFRILQKVNDLRLINPGSLISDPLTEEGRQRLYHLLDREGDQTFKAIRKYLSFSAEVQFNLEKGDEKRLRGNRTQAAMRKVFGERWDTIGEGKQHQIIENWRNSESDDVLIREAMEQWSLDAAAATLLSEQTPEPGYCAVSLAAISKLLPLMASGKSFKEAETELYGARFSGGTIFETLPEVRKQLESLRNPAVERSLTELRKVVNAIVREYGKPHEIRIELARELKKPRQERIEATKKNRNRQREREDVAVRILRECGLSNPSRRDIEKARLHEECGGYCPYTGRHIPFSTLFDNSEFDVEHIIPRSRYPDDSFQNKTLCYLPENRDVKKGQTPWEAYGKDEQRWAEIMTRVSSWKNRGKMARFAIQTEEALGDFSARQMNDTRYASVLASRFLGALYGGRDLVDAEKVRQVIFASSGAVTATLRSSWGLEAILREIVPTEPGESRGKPRTDHRHHAIDAITIALTRPKVIQSMALAASLEPWQRDSRAWRKIESPWRDFVLSIRPHIEQMLVSHRPEHKMSGELHKGTNYPPPHNYKGKPTVHTRCALSALSAADIADDEVIVDPAVRDAVRAKLEKLGGNPKLFDRPENVPCLESRDGRFIPIRKVRIREAKKPILVGTGVRERYVASGGIHHIGLFVVRDARRREVWESEVVQITDAYERHREHLPVVCRTHDAEEAAFLFSLMKDDTVELEKDGTRGIYRVKKFEATGKITFVPVNNAMLDKMQYTTGAAWSRMPATLKPMSPRKIVIDLLGKVHPAND

SEQ ID NO: 641 - protein, 1079 aa, unidentified; identical to SEQ ID NO: 544
  REGION 1..1079: note = Description of Unknown: uncultivated organism
  REGION 1..1079: note = MG4-223 effector

SEQ ID NO: 642 - protein, 1076 aa, unidentified; identical to SEQ ID NO: 545
  REGION 1..1076: note = Description of Unknown: uncultivated organism
  REGION 1..1076: note = MG4-224 effector

SEQ ID NO: 643 - protein, 1179 aa, unidentified
  REGION 1..1179: note = Description of Unknown: uncultivated organism
  REGION 1..1179: note = MG4-225 effector
MSFPDGVRQKYILGLDLGSASIGWAVIDLDGNLDPCGLLAAGSHIFDPGVEVPPAAGKMARDEAVFQGLDRSKAVGRRIARQMRRQIDRKGIRLKALFKLLQSKSLLPIYPELKGEPLAAERHHLFTRLDKELTDALCAEKRKRGTDGLMLEADQALPYVLRKEALERKLELHELGRALYHLCQRRGYRPSAADDSEKEETASTEEEIESKRGRRKKPEPEDKGDKDSESPKKVAEWISDLQAKMDAAHTPTIGAYFADFKNNNPHQERIRHRWTGREMFVKEFDLIWERQSEFYRDSRPGLLNDDLRNRVYDCLFFQRPLASAEHLIGMCDLERGERRAPWATLEAQRFRLLQKVNDLAYIPSGLFNERKLSLEQCATLAAALQDKGDMPFPEIAKLLGLPPKTEFNLMRGKKKKIEGNRINQVMLQVFGDRWRAFTEQERSSAVALWTKTEGFEERKNVAISQCGLDAWKAKEWAENRPPKDCCRHSRKALVKLIKRMEEGVPYATAKLEIYDSQLAGKAPLDFVPKVIETLPSINNPAVLRALTELRKVVNAIIRTYGDKPYEIRIELARELRKNRKQRQNATEAGDKQHLRRIDAARTILRECRNYDAQGRDAERLVRERRDDVTKMLLLMECRCLCPYTGDSISYLDLFGGEVEVEHIIPQSLMVDNSFNNLTLCYRKVNHEKLDKTPRQAFCRAEDDQQWIDIIGRVQKFGNKEKLHRFLLSSREDIDRFSNRRLNDTLYTSKLAGRLLMSLYGGRDIVPAETLDELDEFKDRTGRRAICVSSGMVTSLLRDAWHLNLSGVIGDDAFKCPKKSEDDEESGKRRKGQSNKKDRCDHRHHALDAVVIALTSEKVIREINMLASRLYRERQTPLKYRDLKSIQNPWHNFMDDHFRDIFRGMLVSHRPEHKLSGALHEATSYGKVRYYNAKGDPVRYQRIAIGKLLTDKQIEKIVDEEVKKSVVKLGETIGGYKKWSQEKHGWPKMPNRNGEPVPIKKVRIKITKNAKEIEAERFRGFGTGRPESNVEDKEIAYASFFTVQDRKGTKTVWEIVKLFEAAQRVRALPKSERGHEKICWKYPKYPDATFFRFSLMKGDLVELVLNGKPAIFIVRRFEFDSRLWVAPINAAGKDEEMEAAGHLLRLGFSRFLTMGAGDDKIPRPVFVDLLGQPHYINIGA

SEQ ID NO: 644 - protein, 794 aa, unidentified
  REGION 1..794: note = Description of Unknown: uncultivated organism with predicted taxonomy: Polaribacter sp. ALD11
  REGION 1..794: note = MG4-226 effector
MSESGVSTQPYVLGLDLGSASLGWALVGIDAMERPSSLIRAGVRIFEPGVDGSALDIQQGKDQSKAVDRREARLRRRQLRRRVARQRELFGVLQGAGLLPTDDTQGTGIGSEQRHRILNNLDVTLSNRYRNGADQEIFAQMPLYALRKKALYEPLALDELGRVFFHLSQRRGFQSNRKDVKKKTKDSEDQGQVKSAIHELEQAIEAAGAQTLGEYLAGLDPHEQKVRRQWTGRKMFEKEFQMIWDKQNEYHTDLLTPELHDRIWNLLFFQRPVAAQKHLVGKCELEPDKRRAPWAALLAQQFRLLQKVNDLRLIGEDGNELPLNEDGRAAVFDLLENHGTQSFAKIKQHLGLPKTAQFNLERGKAKELKGNVTAQSMRKVFGERWKEFSEGKQNQIIENWRNSEKDEELKREAMEHWGLDEAGANALVNEKAPGDYCSLSLVALGKILPLMRAGKSFKEAETEIYGNRFSGAAVHSIIPVLRPNRKHFRNGTPPPQDPLMASIANGLRNPAVERSITEMRKVVNAIVREYGKPCEIRIELARELKKPRSKRLDETARNRKREAENKALAERMHNECGTPQNPSRNDLEKAKLWVEQQGECPYTGRSLPFSRLFDDNNGFDVDHILPRSRHPDDSYQNKVLCWGDTNRMVKRNQTPYEAFAEQDPENWHQILARVARWKNPGKLRKFEIRSTDDLAEFSSRQLNDTRYTSLLAARLLSTLYGGRDVAENGGKRQIIFASTGAVTATLRRNWGFEQILRNIIPPEPSESTGKPRTDHRHHAIDAIVIALTRNDVIQ

SEQ ID NO: 645 - protein, 1079 aa, unidentified; identical to SEQ ID NO: 544
  REGION 1..1079: note = Description of Unknown: uncultivated organism
  REGION 1..1079: note = MG4-227 effector

SEQ ID NO: 646 - protein, 1059 aa, unidentified
  REGION 1..1059: note = Description of Unknown: uncultivated organism
  REGION 1..1059: note = MG4-247 effector
MKVKQESPQLILGLDIGTNSIGWSLLEDKGQDQGRIVGSGVRVYEAGMEGLIEQGKEESRNKNRRDARLHRRNLQRRARRMGGLWSLLQSSGLLPEGKAEGVLPELDKGLSETWTKKLGLDTKDKVGEKTQFSHVFPYFLRARALDEKLSCHELGRALYHLAQRRGFLSNRKAAPKKKEEEKGMKAEISELGRKIEESEARTLGEYFSRLNPEEGRIRSKHTSRKMYQEEFEAIWNAQTPHYPTILTEELKKKVSHAIFYQRPLKIRKEFIGNCEHEHNPDHPDRSPRRAPWALLDAQRFRLLQKVNDLVLTDTSTGEVRKLTPDERTKLLEALETQGDLTFGKIRKLTGLRKARFNFEAGGNDKLPGNRTASKLIKIFGEEKWKEFSTEQREQIVEDVHSIQSEEAQARRGIRAWGLEGEKAKDFGQLALEDGYCNLSRQALAKLLPRMEKGTAYKTAVKEVYGEPPAEKPLDSLPLVTEHLSSLRNPAVTRTLTELRKVVNNVVRQYGKPNMTRIELARDLKKSKKDREDIWKRNRENEKAREEAAKKILAEIPNLKPSRRDKEKVLLYEECGHKCPYTGKQISMASLLGDHPQFDIEHIIPFPRSLDDSFLNKTLCYAEENRNVKQGKTPHEAYGSNPTRWEEIIQRVKDFKGKARDIKLERFEAHGEKLDKLLGEFANRQLPDTAYASRLAVEYLGRLYGGRGGVDADGNRRVQAGRGQVTAYLRNEWGLNKILNDGGEKSRDDHRHHAVDAICVALTDAGTVKMLSDAASRATIERRRRFGKVNPPWPTFLDDVRKSIEGLIVSHRVSRKVSGPLHKGTNYSKPIRGTDKKGNPCEFRRVRKPLAELSEPEIKDVADPTIRQLVLDKLQALGVKEPKKAFSSNEANHPCLTTKDGREIPIHKVRINKKVTPFTVGEGLRQRHVTTESNHHIEVVEVLDKNGKPKWEGCLVSLKDAYDRLKAGLPVVKLDHGEGRRFVFSLAKGEAIKIDEENGGNRGLYVVKKLGDNRIWFVDTREARKLKEAGYNSKLMEPLRTLNCQKVLITPLGEVRRAND

SEQ ID NO: 647 - protein, 1014 aa, unidentified
  REGION 1..1014: note = Description of Unknown: uncultivated organism with predicted taxonomy: Planctomycetes
  REGION 1..1014: note = MG4-248 effector
MKVKQESPQLILGLDIGTNSIGWSLLEDKGQDQGRIVGSGVRVYEAGMEGLIEQGKEESRNKNRRDARLHRRNLQRRARRMGGLWSLLQSSGLLPEGKAEGVLPELDKGLSETWTKKLGLDTKDKVGEKTQFSHVFPYFLRARALDEKLSCHELGRALYHLAQRRGFLSNRKAAPKKKEEEKGMKAEISELGRKIEESEARTLGEYFSRLNPEEGRIRSKHTSRKMYQEEFEAIWNAQTPHYPTILTEELKKKVSHAIFYQRPLKIRKEFIGNCEHEHNPDHPDRSPRRAPWALLDAQRFRLLQKVNDLVLTDTSTGEVRKLTPDERTKLLEALETQGDLTFGKIRKLTGLRKARFNFEAGGNDKLPGNRTASKLIKIFGEEKWKEFSTEQREQIVEDVHSIQSEEAQARRGIRAWGLEGEKAKDFGQLALEDGYCNLSRQALAKLLPRMEKGTAYKTAVKEVYGEPPAEKPLDSLPLVTEHLSSLRNPAVTRTLTELRKVVNNVVRQYGKPNMTRIELARDLKKSKKDREDIWKRNRENEKAREEAAKKILAEIPNLKPSRRDKEKVLLYEECGHKCPYTGKQISMASLLGDHPQFDIEHIIPFPRSLDDSFLNKTLCYAEENRNVKQGKTPHEAYGSNPTRWEEIIQRVKDFKGKARDIKLERFEAHGEKLDKLLGEFANRQLPDTAYASRLAVEYLGRLYGGRGGVDADGNRRVQAGRGQVTAYLRNEWGLNKILNDGGEKSRDDHRHHAVDAICVALTDAGTVKMLSDAASRATIERRRRFGKVNPPWPTFLDDVRKSIEGLIVSHRVSRKVSGPLHKGTNYSKPIRGTDKKGNPCEFRRVRKPLAELSEPEIKDVADPTIRQLVLDKLQALGVKEPKKAFSSNEANHPCLTTKDGREIPIHKVRINKKVTPFTVGEGLRQRHVTTESNHHIEVVEVLDKNGKPKWEGCLVSLKDAYDRLKAGLPVVKLDHGEGRRFVFSLAKGEAIKIDEENGGNRGLYVVKKLGDNRI

SEQ ID NO: 648 - protein, 1134 aa, unidentified
  REGION 1..1134: note = Description of Unknown: uncultivated organism with predicted taxonomy: Fuerstia marisgermanicae
  REGION 1..1134: note = MG4-249 effector
MADQLEQKPFILGIDLGTNSVGWALIRLEDGKPAGIIRAGARVFDAGMEGSAKDFESGGEKSRNLDRRRMRHQRRQTWRRARRMKKIFGLLQKFGLLPEGRCATPEDRQNFINELDRTIRASPWFQKKHPVCSKQNSELTKDEREEAHRLSQLLPYILRASALSEKLEPYILGRALYNLAQRRGFQSNRKQVAGKKEEDEEKGKVKPAIKALESKIEEQEARTLGSLLSGASPLKERIRGPQRWTGREMFRNEFDEIWKAQSHFHPELLTEDKRNELFDKDYPRHDPRVGAVFYQRPLKIQTHLVGFCELEPNLRRAPIHLLSSQRFRLLQKVNDLRIELPDSGERPLTPEERDKLVRILQDEGNQTVSDVKSKGVLNLRGCTFTLERNREKTIPGNRTAASFRKALGEKWEDMGSEERNDLVAKVYDIDDDESLKKAAVEQWHFTPQEAERLAQIKFEAKYLNLSETAVERLLPLMEIGFSYGSLAPYYSHLSSQEFLAKLFSALEEGVPHAEACRMVFGDLPVPAEAPKDVLPPVVEAFREIRNPAVTRSLTELRKVVNAIVRRYDKPAEIRIELGRELKKPKKRRELISKRNDENRSERETARREITEETGDPYPGKTDIRKVLLRRECGDQCVYCGEQFSGSNFFSDDAPIEIDHIIPRSLHWDDSFLNLALCHAKCNREKGDNTPAQVFSDEVIEQIRDRIRRFSGNEKTKRERFRRFTLAGAELSAYLEEFSRRQLQDTAYASKLAKRYLGLLYGGEIDNLGKRRVTATSGMVTWDLRGGWDLNGILNDGRTSNGSTVVKTRDDHRHHAVDAVVIALTDDRSIQQLNKAAAMGQMQGKRGIIKLPSTWNNFVDTVRAEIGRIIVSHRVSKKVSGALHEETIYSPPIAERGPDGKPNGEAVPHVRKPLFAITKGEIENIADDAVRQRVIARLEELGGGDPKKLFATEANLPFLVTRDGRHIPIKKVRVRKQLSPLVLGAGRVARHVVTEVNHHLEVFAYLDEKGNEYEWDGAVVSMAEAYRRTYSKPPLPPVQRNHGPETQYKFSLSPGEIIQCDPDNKGNSKLLVVRSVSQFETGTVQIGLAEINDARKKSDMTKDRKFIRVVPNKLRQWNARKVAVSPLGEVSEAND

SEQ ID NO: 649 - protein, 1097 aa, unidentified
  REGION 1..1097: note = Description of Unknown: uncultivated organism
  REGION 1..1097: note = MG4-250 effector
MADQLEQKPFVLGIDLGSNSVGWALIRLEDGKPAGIIRAGARAFDAGMKGSIESGREESRNVKRRQMRLQQRQTWRRARRLKKIFRLLQEFKLLPDGEASTPDKRQDLLEALDKNILASAWFKQKESAGSKHEARQVLPYLLRAAALDEKLEPHYLGRALYHLAQRRGFKSNRIQSSVKKKEDDEGPVKQEIKSLGNRMGEATLGQYFSGLSPFVQRIRTQKTLRDWYRKEFDLIWDKQAQHHPELQMTEKKKEELFHAIFDQRPLKDQSHLIGPCELEPGERRAPTYLLSSQRFRLLQKVNDLRVRVPEGSELELLAEDRTKLIQALEEKGNQTFVQVAKKLKLGEPEFNLQRGGEKKLPGDRTGSQFRKVFRKSWDQMTDEERDEKVSVVYDCLDDQKLVGIGEKEWSLDAKFAAKLTEIKFESSYLNLSRAAIGKLLTLMEAGFSYGSLAPFYRHLTPETTASLLSKVQEGMPPKLASQVVFAECINPAGEPKSLLPPVAMEIPWLRNPTVMRSLTELRKVVNAIIRQYGKKPEEIRIELAREMKKPKWRRKQISKRNRENETGRKQAKEEIKRETQNPYPSPYDIRKLILYKECRGQCVYCGAQISRSNLFGDNSDSEVDHIIPFSRLQEDSFTHVVLCHARCNAEKGNRTPSEAFTGEEHERILDRVSRFDNDEATRKAKLRHFTLAGEELANYLNDFSSRQLNDTAYASKLACQYLGVLYGGVEDSTGKKRVKASSGGVTGYLRRLWNLNRILNDGPTKSGGFIPKTRDDHRHHAVDAVVIGLTDESVVHKLSRAAERGFYRGRPFAPLEGLWPNFVPSIKTEIDRVVVSHRVSKKVSGALHEETIYSPSIPERGPDGKPNGEGIPHVRKPLAAITKGEIKDIADDAVRQRVQKRLQELGDGDPKKLFAIEANLPFLIAKDGRHIPIKRVRVKKKLPTFPLGSGRAERNVTTESNHHLEIFSKLDEDGNEVGWDGAVVSMLKVYSRKRLGLPIVQREHGPGTQFKFSLGAGEVVECDIAPGQRGLFVFRKVSRITATDQIQIGFAPLNDARKAKDMQTSRSWLWSGPNRLMERHARKFVVNPLGEVSEAHD

SEQ ID NO: 650 - protein, 1024 aa, unidentified
  REGION 1..1024: note = Description of Unknown: uncultivated organism
  REGION 1..1024: note = MG4-251 effector
MGLTTLGIDLGITSIGWGLITEDAAGIKLNGWGSRIFTPGMDDDIESGKGVSRCAQRRQKRALRIQYRRRRQRKDDLVDLLQRNDLLPTPLTPGFFIDMDKRFLMLFPVAERRVMGHLVPYLYRKKALDTKLEKFELGRTIFHLAQRRGYLSNRKQDLKDEETTGVVKAGIDALKSEMRKVGARTLGEYFCTVDPEKSRIRTRYTDRGMFQEEFRLICSAQRHLISPELEDELYKAIFFQRKLRSAKNLIGRCQIYPEERRCSYAKDEAQRFRIYSTLNHLRVAQKQQIRALTEAERAAAISVLEGFSGHLDRRGKITLAKLAKAVGLGKGEKFTLSDEEKDIHGNVLNAILYHVFGEKASSLTEKERALFFNDLNSIEKTEVLERRLRGFWQLPEDKAAEALKISLPDEYCAYSLRALHEMLPDLEAGIPLSQIRKLSYPTSTGVVYDRLPMLDGDEVDLDLRNPVVHRTLTELRAVVNAVIAKYGKPDRIRVELARDLKSSNKERERRTFEIRKREKARAEIAERIAREAQIEKPSRNDILKVMLADECNFTCPYTGKNFSMKELLYGKDIQIEHIIPYSRSFDDSFRNKTLCFSSANAKKNNRTPFEAFSGAEYEEILQRVGKFKWPFAEDKKDLFKCEKVDSEEFLARNLNDTRYASRLAVKYLGMLYGGVIDAAGKQRVFATTGGATAIVRRAWGANFLLGEGEKVRDDHRHHAIDALTIALTTPDIVKIIAGMPEELRRAKGKTPDDTIIDNAVFKQAKEMLDKAAVSHHIVNKLRGALHRETLYGKNRGGDMRHVRIGVDKLTVKDIPDIVDPVIKKLILERLEIDEDQISTITDKLLKKLVDTENPLFYRNKKGDVVNEIKAVRVKKHVTARTIGAGDGVREVANGANYLLAVFAVQDAQGNESSWEGEIVTLMDAVYRKQHDLPLFERERPGRKFKFTLKKGDIVKWNKDGVEQLCVIRGVSLPQFSCVPVCDARQQKELKNAKCWFTPTLSAAFAGKMTKYRMDILGELRRAND

SEQ ID NO: 651 - protein, 1033 aa, unidentified
  REGION 1..1033: note = Description of Unknown: uncultivated organism with predicted taxonomy: Bdellovibrio exovorus
  REGION 1..1033: note = MG4-252 effector
MRILGLDLGITSIGWALTEQPSASVTDVSEIKLVDWGSRIFEPGMAGTKNDIDTGKGVSRAVERRLARSLRHQYQRRRQRRKELIRIMTEAGFLPQELTPAFFIRMDAKLLSAFPKEDRRILGHVIPYLYRKMALNQDLSPEELGRAIYHLAQRRGYKSNRKKALKENEEEKGKVLQGIQTLKADMEAKGARTLGEYFCMLDPEEERIRGRYTERSMYEHEFHLICERQRELVSEELEKKLYKAIFFQRKLKSVKGLIGACQFEPDEKRCTFACEEAQLYRLYTSIDNLRIQKGGELRKLTDTERVAAIAILNGYSDKLDKSGKISLSALGKELHLLKGEKFTLGDEEKNIYGNALHAMLFYVFGEKSANMTPEEQSKFWHDLNSIEKEEVLQRRLASYWELNDEQVRKAMTLALPDDYCSLSLKALRTILPDLEAGIQLRKILELHYPENFRPSNNELAFLPAVDYSGIELRNPVVHRTLTELQKVVNAIIHRYGKPDYIRIELARDLKNTNKEKERITKQNREKEKERVKIIQQIIKEVGIASPTRNDILKVQLAEECGFECPYTGKHFSMAQLFDGNTIQIEHIIPFSRSFDDSYRNKTLCMATENGRKNNRTPYEAYAKEEYKAILTRVSHFKGPFRESKLQIFETKEFSPDDFLQRNLNDTRYASRLAMNYLGLLYGGAIDRNGKRRIQACSGGCTALIRRAWGANYLLGDGEKKREDHRHHAIDALTIAIITPEIVKTVANISKDEYKRRHMQNLPMLDDALYLQAEGKIDSATVSHHVVNKVRGALHNDTIYSKDGNQTYKRIRLDSISLKDIPKIRDKAIRTAVMKALGIDGDKTEAFMDSSLDPAKVFNDEHNLPWLTDKDGKNINRIKSVKVACNDKTRTIGSGDSRREVKPNDNYGLAIFAKIDANGQDKTWIYQVITLMDACQRLKKQLPIINKELQGFKFRFSLMKGDIVTITKDNHNTLCIVRAISEDEIVCTPVTDARQQKELKAAKVWFRLHPATALQLSLQKYQMNLFGDLRRAND

SEQ ID NO: 652 - protein, 1024 aa, unidentified; identical to SEQ ID NO: 650
  REGION 1..1024: note = Description of Unknown: uncultivated organism
  REGION 1..1024: note = MG4-253 effector

SEQ ID NO: 653 - protein, 1024 aa, unidentified
  REGION 1..1024: note = Description of Unknown: uncultivated organism
  REGION 1..1024: note = MG4-254 effector
MAQTTLGLDLGVASIGWALIREDGTKTTLDGWGSRIFKPGAEDDASDGKGLSLCAIRRQKKALRVQYRRRRKRKDELIRLLQENHLLPDPLTPSFFVNVDRQYLMIFPEEQRKTVGHVIPYLYRRKALDTPLSKEELGRTLYHLAQRRGYLSNRKKDLKDEEESGKVAAGIDTLKKEMEKSGARTLGEYFCLVDPEESRIRTRYTDRAMYQDEFRKICQAQRHLISAELENLLFHVIFFQNKLKSYKHLIGACSVYPEEKRCSYACEEAQIFRIYTTLNHLRIAKADQIRSLTGDEREKVFALLNGFSDLLTRKGSITLRNLGKAIGLGKGEKFTLSDDEKEIYGNVLHAILFSLFGTRAESLSQEEREKFFNDLNSIEKTEVLRRRLKSYWQLPDEKIAAAEKIPVPDDYCAYSLKALKEILPDLAEGIPLATILKLKHPMQAKDEMDQLPILDSDEADIELRNPNVHRVLTELRILINAIIVRYGKPDRIRIELARDLKSSAKERERRMWEMRQREKERTAIAGKIAEEAGIENPSRNDILKVMLAEECGYECPYTGKHFSMRDLLHGKDIHIEHIIPYSRSFDDSYRNKTLCLASANAAKNNRTPFEAFSGKEYQDILQRVARFRGPFAEAKLALFKLEKVEPEEFLERNLNDTRYASRLAMQYLALLYGGIIDKTGKQRIFATSGSCTAMIRRAWGGNYLLGEGEKVRDDHRHHAIDALTIALTTPEMIKVIASMTREERSRKQKSCNDTIIDNEIFRQASADLDNIPVSHHVVNKIRGALHDENPCGKDYGEQIRHKRIELSKLKADSVLKIVDRTVKNIILKRIGCSEKELAGLSEKEFAKRLDAGTPLLFKDKEGGTVNVIKKVRIKAKVTAKTIGSGDSLRNVANGSNYLLAIFAVLDEQGNETAWEGEIVSLMDARYRLTHKMPLFEKDRPGRKFKFTLKKGDIVKFRKDGTEYLCIIRGVSLPQFSCCPVKDARMQRDLKAAKVWFTPTVSAAFQGTMTKYRMNIFGELQRAND

SEQ ID NO: 654 - protein, 1024 aa, unidentified; identical to SEQ ID NO: 650
  REGION 1..1024: note = Description of Unknown: uncultivated organism
  REGION 1..1024: note = MG4-255 effector

SEQ ID NO: 655 - protein, 1024 aa, unidentified; identical to SEQ ID NO: 650
  REGION 1..1024: note = Description of Unknown: uncultivated organism
  REGION 1..1024: note = MG4-256 effector

SEQ ID NO: 656 - protein, 974 aa, unidentified
  REGION 1..974: note = Description of Unknown: uncultivated organism with predicted taxonomy: Planctomycetes
  REGION 1..974: note = MG4-257 effector
VESTGLILGLDIGVRSVGWALLDLKAKEIKGLGVRVFDAGVEGNVERGRDTSKAAARREARLRRRQTERQVRKQVKLAHILQDAGLLPEGKVSKPTERHQLLSVLDRQIGESYSSADRGKLPYILRAAALHVALEPFELGRALYHLAQRRGYKSNRKSDAKVDEKQGKVKPAIHELEKKIISVGAETLGEYLAMQDSPKVALRGPGQYTSRDMYLAEFEAIWSEQAKYYPALLTEKLKANVSDAIFFQRPLKSQAHLVGKCQLETGEKRAPWALPIAQRYRMLQTVNSLKVLAADGKARELSASERAKLLEKLECSKKQSFDEIRKCLKLGDDCSFNLEQLGRKEIPGNKTAALLATAFTKKRWASIPEKDKQRIYAVFNSEEDEDKLILIAQDEWKLDEKQARKIAGVSAEAGYCRFSEKALFRLIPYLEAGSDLESAIHKEYPGSRVASEKRDILPPVLSTVQLRSPAVTRALTEVRKVVNAIVHEYGLPETIRIELARDIKRNREERQNINKKISERTKEREAARTRLQEDFNLADPKSSDIEKYLLWQESGPKCPYCGNPIAGEVLFSGATHIDHIIPRKVSLDNSFVNKVLCCSKCNNDKSDRTPHEAFNGDTQRWEKIAERVGAFRSEYRREKLRRVLMTKKEAQEFYTGFTDSQLNDTKFASREAGDYLGLLYGGRVDADGNTRVQMTKGGITSELRNALQLGSIPSQVEDWICDPEEKRGKDRGDHRHHAIDAIAIALSSPGIIKPLMGAYSSSETAKKEMRRDIWASFAKKAAWPGFSDNVVEAVNSISISRRPKHRVRGKLFDENPLSEKGAARKSGDISEAYIRIGKDEAHSRLLKSAGNHHIEIYETKDAKGRPEWKGKAVTLYEAHNRIIDDEPVVNRHHGPNTRFLFSLAVGDTIELGEKQERKLYNVCSVWEDEPGSCRIEYKPLNSATTDRGVNARLNPIRKLKCKKVEVSPLGEHGS

SEQ ID NO: 657 - protein, 831 aa, unidentified
  REGION 1..831: note = Description of Unknown: uncultivated organism
  REGION 1..831: note = MG4-258 effector
MHSYVLGLDLGSASIGWAILEPNKKVIDCGVRIFDPGVNLEMFNKGQEGSSNNLVRRMARLHRRQLRRRAARQRDLFELLQQHSLLPGNATRDSQQRHDILQHLDSDLRAAWMNRLTAAGVPEQSLIYLVRKQALDAPLEPYEVGRVLYQLAQRRGFKSNRREQAAVEAAEGSKKKSVRAKDEASVVKDGIKELRAEMEAAGARTLGEHFANLSTSGQTIRRHWTDRKWFEAEFEAIWQAQAPHHAALIPELKQQVFQLLFFQRPIATNAHLIGKCELEPTERRAPMANLLAQRFRYLQKLNDLAIDDPLNPQRLTEEQRAVLLSAFECKPDLTFDAIRKLLSFDKAVRFNLERGGEKKLPGNRTNAAMLRAIPDLWPTLSDADKGAIVEQWIDANDDEDLIARLTTHCALSLDDATAICKVHPEDRYHNVSLLAMSRLLPLMEQGVAFKTAENEIYGTRFSGGKPLDLLPPAKDVLASIPNPAVMRALSELRKVVNAIVQKHGKPGQVRIELARDLKRNAKQREMNWRRGRDRETVRTAAVKRILDEAHRPQPWKQDVDRVLLLEECRDLCVYCGQAISFQRLFDGDIDIDHILPRNRFPDDSFANRCLAHRACNQLKLGRTPYEAFGSDEELWPNIIARVKTWDNPDKLERFNLRDDGEFDPEREDSFAARRLNDTRYVSKLAARYVGMLYGGRDVPQPDGAAKRVVFASTGMLTASLRRTWGLEAILREPEPAETSRKPGKQRTDNRHHAIDAIVIALTSNAVIQKASSVAATGSYGDAARAISRVQPPWGDFVGDFVDSIRPAIERMVVSHRPSHKLLGALHEETNY

SEQ ID NO: 658 - protein, 1073 aa, unidentified
  REGION 1..1073: note = Description of Unknown: uncultivated organism with predicted taxonomy: Acidobacteria
  REGION 1..1073: note = MG4-259 effector
MPLRADLPPYVLGLDLGSASLGWALIAIDHQHNPTALIRAGVRIFQPGVEGSAFDIERGKDKSRAADRRTARLHRRQLRRRAARQRDLFNLLQAHALLPGASDGASSSERRHTLLNELDKQLTDCLLRTAADDALAANRIADSLPYQLRKAALDRRLEPHELGRVLYHLIQRRGFKSNRREGKKSKDKQEEQGKVKAGISELQQKIAAAGARTLGEYFAGLDPHQQKIRRLWTARSMFEEEFEQIWRTQEAYAPDLLTQDLKSQIGYLLFYQRPIASQEHLIGRCELEPGEPRAPWATLEAQEFRVLQKVNDLAIVIPGSLHDQSLTREQREKVYLALQDTGDQKFSALRKLFELPRVQFNLERGGEKTLRGNRTHAHMFSVFGARWNEFSTDEKKRAVQVWRTAEDPGDLIAKGMEEFGLEEALARRWADVEPEDGYCSLSLKAIGELLPQMREGVSFKTVEREKYGEPFSGQEPQELLPRIREALPTLRNPAVERAVTEMRNVVNAIIREYGKPYEIRLEMARELRKSRKERENVTKRNRSRERERQQAKARILQECGLQNPSRADIEKALLFEECGGVCPYTGRTIEFSSLFRDSQFDVEHIIPLSRYPDDSFLNKTLCYHEENRSVKRGRTPWEAYGPDSERWDAILSRVQGFNNPAKLTRFKLRTEEELGEFTQRQMNDTRYTTRLAADLLGSLYGGRDETLPDGAKRRAIFATTGQVTATLRRVWNLESILREALPSANGESKGKPRTDHRHHAIDAIVVALTSQRTVQLLSMAAAQSVAGESRSRVFTGIQSPWPNFVDSIRPHIEQMIVSHRPEHKMSGELHDETNYGRPYRDGKKTYVHIRKPIASLSTKDIQAIVDPIVRTAVQKKAEALGGDLSKCEVSQNWPVMPTNKERAVPIRSTRIRKVLDVTAIGEGPRQRFVAESSNHHVEVFASLDAQGRESKWESITVSLLEASERNRKKQKVVQRLYPESEDYTFKFSLMGGDSVDLHRNCDHNLGRCNPALYRVRTIAANGQLSLVKITDARLKQDIQKVSEWWSPMCNALRKLDCRKVVVDLLGRVHPAND

SEQ ID NO: 659 - protein, 815 aa, unidentified
  REGION 1..815: note = Description of Unknown: uncultivated organism with predicted taxonomy: Planctomycetes bacterium
  REGION 1..815: note = MG4-260 effector
KHLLFYQRPIKAQSHLIGGCELEPGERRAPWASLEAQQFRILQKVNDLETILPGNVTGIRLTPEQRKTVLNLLENSPEATFKKIRKALDLAENIGFNLQRGGETRLKGNLTNARMAEAFSDRWPTMSDEEKKQVVEDWRTIEQNESFMRRAIEYWKLDEAGADWLADQSAPQGYCSISRKAIRRLLPLMMEGKRFKEAETEVYGNRLTGGKVYDRIPPVRDVLRTLRNPAVERSLTELRKVVNALVREHGKPAEVRIELARDLKKPRHERAEAITKNRNREKERVAAKTKLLQELGPGFEHPSRADVEKALLHEECGGVCPYTGRHIEFASLFGENPQFDVEHIIPFSRIPDDSFQNKTLCYHEENRLVKRNMTPFEVYKDPAQYEAILNRVRTWKKLNPGKQRRFELRTLEELEGFSARQLNDTRYASKLACELVGSLFGGRDAQTENGSRQIVFASSGMVTATLRKGWGLEAILREAAPSANGQNRGKPRTDHRHHAIDAITIALSRPKMIATLSRNNAQDPYWPQNGRTAPRIQSPWKDFVGSIRPHFEQMLVSHRPEHRLTGALHDETNYGRPRKDGSKDVVHIRKQVAGLSAGDIENIVDPAVRDAVCTKAREFGGDLKKWTPNEDKEDWPLLVTRTGKPIPIKRVRIKKALRVETIAKGERVRHVALSSNHHVAIFALLDERGREKRWESEIVSLLTAMERKRNRQPVIRTRLPEVPEAAFKFSLMWGDILLLHKDCEHSKNICNPSFWRIRSIWEQGTLTLVRINDARLLTEIRAAKDWLLPSPDTLRKLGAVKVVIDSLGRIHQAGG

SEQ ID NO: 660 - protein, 911 aa, unidentified
  REGION 1..911: note = Description of Unknown: uncultivated organism
  REGION 1..911: note = MG4-261 effector
NRIGHVLPYLLRKTALDRPLDKYDLGRALYHLAQRRGYLSNRKQELKDSEDFGVVKSKINELRQAMTSSGARTLGEYFSMVNPEEERIRCRYTDRAMYQDEFRKICNAQRQHISEALETELFQVIFFQRKLKSCKHLIGKCQVYPEQKRCSLCHPEAQLFRICTTVNNLRISCDSQIRSLTDDERLRVTEVLNGFSDLFNKSGKITLAKLKQATGLLSSEKFTFGDDEKEIYGNELHNILYRAFGSEAALMSQEKQSCFINDLRSIEKNEVLKKRLTEYWQLSEEKASEVATIKLPDDYCAYSLKALKQMLPDLQAGVNLADWLKCNNHSTESYIELDQLPLVDECGFELRNPVVHRVLTELRRVVNSIISRYGKPDLIHIELARDLKASNKEREQITKRNQQRERERNAIAERIIKETGLEKISRKDILKVMLADECDFTCPYSGKRFSMTELLNGGLVEVEHIIPFSRSFDDSFANKTLCVRELNAKKNNRTPFEAFGGSPQYSEMLTRVKYFKGHFAEHKLNLFKLAEIESSGFLERNLNDTRYASKLSMRYLAFLYGGIVDKNSIRRIFSVAGGCTALIRRAWGGNYLLGEGEKVRDDHRHHAIDAVTVALTTPELVQKIAKLSQEGRRKLNDSTKNFIDNDFYYQAQGMMDSCAVSHHQTNKMRGALHEETIYSKDYGDGQSIRHKRIALDQLSPKDIENIVDPAVKTIILKALKVSAPGDVTKATLKIFKDEANYPQMLDHNGNAVNTIKKVRIARTVNTRTIGKGDGKREVANGANYILAIFAKLNEKGEETGWEGEVVSLMDAVQRKQRRQEIFSKERPGMKFKFSLQKGDIVKINKNGEEKLCRIRGISLPQFYCCQISDARTQNDLKSAGCWYTPTVSAAFNWKMQKYNMNIFGELQTAND

SEQ ID NO: 661 - protein, 1002 aa, unidentified
  REGION 1..1002: note = Description of Unknown: uncultivated organism with predicted taxonomy: Planctomycetes
  REGION 1..1002: note = MG6-7 effector
MSEITLGLDIGSNSIGWALLNLDENPSIINVGVRVFQEGVNRDTKGAEISKNETRRMARGARRNRFRRNYRKDKLLRLMKRNGLLPKEASTNGEIFLLNPYQLRAKGLDEKLSLHEFGRVLYHLNQRRGFLSNRKSGKAKDDGIVIKSAGELQQKMDAQGARTLGEYFSRIDITQERIRDNYTFRGMYQKEFDLLWEKQSSFYPEILTPELRQTIADETIFYQRPLKPTDELIGDCALEPDHKRCPRGDWHARRFRILQDVNNLMVCEPDGRKRILTEQERSIALKELFGRKEVGFDSLRKKLGLIENQTFNFEEGSLDKKESKLKGDFFASEMSSKKILGKKGWEALDIATQIEINDLLLDDNLADEEVVEMLKQQYGFSDEQAEAAIKISLPRGYMTYSRLAIQKLLPHLERELRTDEAVQAAYGHIHSVQDTGQTVDFLPLPEDLRNPIVNKALIEARKVINAVIQTYGKPGKIVVEMARDVKGNAKEREELRIKMNRNEKENERARHELIHNMGITRPTRDDILKYKLWQECGRECPYTGRPISQQALFGEHPEFQIEHIIPYSRCLDDSFMNKTLCYVDENRRKGDQTPYEFYKNSDQYEHMLQRIRKLPYPKRQKFTQKEVSLDEFIKRQLNDTRYITREILRYLKQLGCTVTGSRGKVTSELRHQWGLNSILESDLPGPKNREDHRHHAIDAVVTALTNQKHLHELAATKYAVAHDGFPVPWEGFRDAVAQAVNKIQVSHRVTRKVSGPLHEETSYGPTGLKDDKGQDIFVYRKKLEALTCPMVEKIVDPVVKEVVKTRLLEFGIDPKKKGSIPKEVWAEPLYMKSTKSAKVPIKKVRIRDVFNNMIPVNDEIGKPYRYVASGNNHHIEIFEYTDAKGNLKRNGKVISMFEAVQRSRQGKPVIYRDYGDGKRFVCSLAKNEMFMLEVEEGRHILHRVQKFGEVGGTIIIVLRPHTFAGKVNDSDKPPYIQRKTPNTLKGYKVTIDPLGRIFPAKD

SEQ ID NO: 662 - protein, 994 aa, unidentified
  REGION 1..994: note = Description of Unknown: uncultivated organism with predicted taxonomy: Planctomycetes bacterium
  REGION 1..994: note = MG6-8 effector
MSDYTLGLDMGSNSIGWALLDTNNRAVVDAGVRVFQEGVDRDTKGAEVSKNETRRTARSARRARKRRNYRKDKLFRMLIRHGLLPKGPDELKEVFELDPYLLRAKGLDEKLDAYEFGRVLYHLNQRRGFWSNRKSGKSKEDGVVVKSATALAEAMDESRSRTIGEYFAGVDSHEKRIRGHYTFRSMYEEEFEALWTKQASFDGELFTDGLKKAIKDETIFFQRPLRWDPETIGDCELEPGEKRCPRADWHARRFRILQTVNNLKLYNPDGREGDLSKYRETIIGELCNRKEVYFDSLRRKLGLIDSQTFNFEEGAAEKKAKLKGDEFVPQLKKAIGAKALKGLEEADIIEINDALIDDNIEDEELVEKLMEQYGFSEEQANGVVNISLPSKYTNFSRLALQKLLPKMEAGLRTDEAIEAVYGKRQAVGEIEKRRRLGSVPDLRNPIVMKALWEVRKVVNGLVREYGIPRKIKIEMARDVKGSVKERDEIRVKQWKNEQENKRAEEELKLMGIRNPSFNDRLKYKLWEECGKECPYTGKPISQHQLFGEHPDIQIEHILPYSRTLDDSYMNKTLCYVNENRLKGNETPYEYYAENRVEQWEEILQRIKVLPYAKRRRFWQKEVVLDNFIQRQLNDTRYISREVVKYLKQLGCIVTGTKGQITSELRHQWGLNNILDYTGAGLKNRDDHRHHAVDAVVTAVTEQKHLGGLAASKYDKSGIEFDPPWEGFREQVAEKINAINVSHRVTRKVSGQLHEETSYGPTGLKDDKGQDIFVYRKPLEALTLPMAAKIVDPVVREIVYERLREFGIDPDGKSKIGKEVWKEPLYMKSKSGKGPQIKKVRIRDVFNNMIYIKDDAGKEYRAVAPGNNHHIEIFEYANKKGRIKRDGKVVTMYEAVRRSVNNKQVIRRDYMDDKKFVCSLSKNEMFMLEVEDGVHVLHRVQKLIQDGRIVLRPHTYAGKVSDSDNPPLVQRKNYNTLRGYKVTVDPIGRIHRAND

SEQ ID NO: 663 - protein, 896 aa, unidentified
  REGION 1..896: note = Description of Unknown: uncultivated organism
  REGION 1..896: note = MG6-9 effector
LNEKLELFEFGRAIYHINQRRGFKSNRKTGKAKEDGKVAKAAGELQKKIEANGCRTLGEYFASINPEEERIREQYTFRTMYEEEFDKLWNRQAEFYKNVLNGDLHKKIRDEIIFYQRPLKPTDDLIGDCELEAGEKRCPRGDWYARRFRLLQDVNNLKVYNPDGTARELEDDESGIILKKLATHKEVKFSSLRKELGLLKTQEFNAEYQIDNKGKKQEKLKGDAFNASMRSKNIFGAKTWDAMDEAEKIKLNEWLVDLDDDELIEKLSSEYGLRDEQIDRVLKISLPQRYMNFSRKAIQKLLSLMEKGKRTDEALAEIYPDRNKRAKGEEKDRLDLPDDLRNPLVNRGLFEVRKLVNAVIREHGKPSGIVIEMARDVKGSLKEREEIQWKMRENEKRNEAARTRLIQDMDILNPSRDDVIKYKLWEECGKRCPYTGKVISLTDLFGSNPVFQVEHILPYSRSLDDSYMNKTLCCVNENRIKGNKTPYEFYSGDEEKYEQVKQQIKVLPWPKRRRFLQKEIKLDECIQREMNDTRYICKEVVKYLKQLGVNVRGSKGRVTAELRHQWGLNSILDLNNSNMKNRDDHRHHAIDAVVTAVTKNEHLRRLAKSKYSKTDSSFSEPWEDFREELAEKVKHINVSHRVRRKVSGKLHEDTSYGLTGAKDDKGQEIFVYRKKIEDLTIPMVSKIADHVVRQIIESRLKKHGIDLDKNQTIPKDVWTKPLYMKNTKSNKKVLIKKVRIRDAFNNMIFLKDKEGKTYRAVAPGSNHHIEIFEYTDKKGKMMRGGEIVTMFEAVKRKREDQPVIKRECGADKKFICSLAMNEMFMLDTNNKEKELHRVQKITQSGNSISIILRPHSYAGKVSDYDKPPIIQRRSPNTLKGHKVTVDMLGRVHLAND

SEQ ID NO: 664 - protein, 996 aa, unidentified
  REGION 1..996: note = Description of Unknown: uncultivated organism with predicted taxonomy: Planctomycetes bacterium
  REGION 1..996: note = MG6-10 effector
MSKYTLGLDIGSNSIGWALLDTGKSPKIIDLGVRVFPEGVDRDTKGAELSKNATRREARGARRNRWRRAYRKDKLVRMLQREGLLPREFDLIQKLMETNPYLLRAKGLDEQLGLHDFGRVLFHINQRRGFKSNRKTGKASDNNKVAKEAGQLQEAIDNTGCRTLGEYYANLNPEKNRIRSQYTFRSMYEKEFALLWAKQSEFYPEILTEQLKEEIKDKTVFYQRPLKPTDDLIGECDLEEGEKRCPRGDWYARKFRLLQDVNNLKIHHSDGSEDPLTDEQRAIVLEQLKKSKAVKFSSLRKKLGLLETDEFNMEYEVNEKGKKKDKIQGDEFNASMQKNIFGLKRWGEMAEGEKIRLNEWLVDLEDDELIEKLASEYGFSDEQTEKVLKISLPSRYMSFSQKAIKKLLPLMEEGKRTDEALDKIYPDRNQKKQVEAERLGLPEDLRNPLVNKALFEVRKVVNAVIREYGKPAKIAIEMARDLKGSLRERKEIHFKQKENERENKRVRERLKNDFNHVSLNRDNIIKYKLWEECNGLCPYTGKKIPQYALFGENPEFQIEHILPYSRSLDDSYMNKTLCEVHENISVKGNQTPYEAYHHDEEKYEQIKQRIKVLPWPKRRKFLQKEIELDEAITRELNDTRYICREAVRYLKQICSNVKGTRGKITSELRHQWGLNSILNLTDPNMKNRDDHRHHAIDAAVVAVTRNKHLRELAESKYAKTGSGVKFEAPWKDFREELAEKIKHINVSHRVTRKVSGQLHEETAYGPTGLKDDKGQDIFVYRKKLEDFTMPMVGRIVDPVVKEIVVDRLKKHGLNPEKKQTIPKEVWREPLYMKSKTGNGPRIKKVRIRDVFNNMIMLKDQNGKPYRAVAPGNNHHIEIFEYKDKDGNIKRDSKVVSMFEAVRRRRKGEPVIQRDHGEGKKFICSLSTNEMVMMPDKEGNNDLFRVQKMSINKQIYFRHHTAATIDNEETLIRKQANLFNGKKVAVDPIGRVFPAND

SEQ ID NO: 665 - protein, 994 aa, unidentified; identical to SEQ ID NO: 662
  REGION 1..994: note = Description of Unknown: uncultivated organism with predicted taxonomy: Planctomycetes bacterium
  REGION 1..994: note = MG6-11 effector

SEQ ID NO: 666 - protein, 896 aa, unidentified; identical to SEQ ID NO: 663
  REGION 1..896: note = Description of Unknown: uncultivated organism
  REGION 1..896: note = MG6-12 effector

SEQ ID NO: 667 - protein, 996 aa, unidentified; identical to SEQ ID NO: 664
  REGION 1..996: note = Description of Unknown: uncultivated organism with predicted taxonomy: Planctomycetes bacterium
  REGION 1..996: note = MG6-13 effector

SEQ ID NO: 668 - protein, 1063 aa, unidentified
  REGION 1..1063: note = Description of Unknown: uncultivated organism
  REGION 1..1063: note = MG6-20 effector
EAFDEANPYTLRKMALYGPLTSEQFGRVLFQQGKRRGLKSNRKAERKADDGDVNRATKRLEAKIADDDCQTLGERLYRIGAGQIADSQNVKPGDLNPHRIRGRYTLRKMYEEEFEKLWNKQEQHIPELRAEGLKSRIRRIIFDQRALRSSKHLIGRCECTGQRRAAKADWYAQEFRLLKDLNHLRIHNSDGSEQDLKKEQRLRLAELLRCTDRLTFDEMRQELGLIDSQIFNLEEGPSATVGQTNEGKKSKVRAGAKRKSLAGNSIESALWKAFGKNWALQTEVRKDEIRQAIVEIEDEEKLMRLAVGLWGLKRTQAEALAKLHLPEGYAKYSLDALKNLVAELRKGLKSERGIAEYEARERCGYNSPVTQSLLDFLPSPVKPDRRPLVNNPIVRQSLFEVRKVVNAIIRQYGRPKRVVVEMIREIKGSLRQRAEIRDQQEASRKDREEIRTMLRDPIEFGKDNPSNDDILAYRLWEQQGHLSPYSGKTICQTDLRRFLNGEGVLEIDHILPYSKSWDNSQSNKCLCFSDENKNKKDFTPRQWLGDGTDAYTSMLQYVAGMKTTGMPFSKRRKFSQLEVDPEDCAKRQLNDTAYIAREVRQYLKCLYSEEELVRDESVVCTRGQVTSDLCWCWELNSILNPDDQRETKNRADLRHHAIDAIVVALTTRQRLFALSQVFAKKHSLAKAKHEPWPHFREDVENAVLAIKVSHRPRKRVSGPLHNDTIYGATDEDGRFVSRKFLTDLTPTMVSRIRDARVREAVVERLRKHGIKAKGADSIRDVGPEETPGDSDKRIPKKIWEEPLILVRKDCTEGPRPTPIMKVRLIGPEKTIRPIRNGAALVKPASTHHLSLFEIRKSNGDPEWIAHFVHLIDAAQIVGERQRRFSMIRKQLGAARLPSSEIKRRLELEQCRLDIELPLIVKTHPDIPSARFLFSLSKGEMLLLSIKGKEQLYRFETAASTTEQMWFLKHNEAAIPKNKRLSKKPDNLRGLKPRKVILDPLGRDVSGTGKVYDRVDSKVGDLAKEIIANGMSNSRGHKLLKQMGLGQLGAQLTAELRRLRSGGL

SEQ ID NO: 669 - protein, 1121 aa, unidentified
  REGION 1..1121: note = Description of Unknown: uncultivated organism with predicted taxonomy: Arcicella aurantiaca
  REGION 1..1121: note = MG7-2 effector
MKKIVGLDIGVSSIGWSYVLESEIETDEETEDIIELGSRIIPLSNDDADQFSKGQSITKNKERTQKRTARKTNNRYKLRKHKLGEVLKNQEIIINPELFDLTAYELYALRVRAIHEPITLAELARLWYQFNQKRGYQSLRGVVDEEADKKSDYLSSINDRSQFLKDNKQTVGQFLFNRLKDYEQNRGVIEPITHIIFNRQDYFNEFNLIWERQKMEYPEVLTDELLANIRDRIIFYQRPLMSQKHLVSDCTFEKNHKAAPKSSPLFQVFKIWQDLNHFEIKTKRGAIVAFTVEMKQKVFEVLDNQFDINKTKFWEILELKASEHRLNFKEIRGNVSKAKLVEAFAELDINRPDLLSFDPHGDPDEQPLFRIWHLLYSINEKNADEILLRTLQNTPYNFSEKEAIGLIQKVSFKNDFGSLSSRAMRKILPHLEQGLNYADACLEVGNRHSHYRTKEENNERVLADKLLPLPKNSLRQPVVEKIVNQVINVMNAILADSNLGRPDEIRIELARELKQNIKQRERTERNNNKRQKARKDVVKEILKTFPDMKEKDVTNRMIQKYELFQETNGICVYTGTEMKLGAVLSGQGFDIEHIIPKSRRFDDSFMNKTLADSSTNRDKNDLTAYDFMRKKGMTSFEKFTEIIHKLHKDKKISDTKLDNLLTTLNPVWIAEQEAKALSTDFINRQLNETQYITKQVKAELDKICRTITVTSGGITDYLRHQWGVDDVLKNINLEKYEAAGKVSDEDYRDRQGHWRTRKKIADWSKRDDHRHHAIDALVIACTKPAYIKRLNDLNQEYDSYKEMKKDGGKMESLTKFPQPKMKGGFIQNVTKATENILISFKAGKKAVSTSKNKKTGQVNIIPRGQLHEETVYGQKFDESGKPYFVIRKKLEFNKQGYFNSLAQIDKIEDEIIKKKVLKRIDEYGGDLQKALSTVIYHNEDQKIPIKKVMIQAQIKKAVPLGNHEGKFVAEGNNHHLALYRNEKGKYLTELVSVWTAVVRKQNDLDIICRNHPEGLKFITCFQQNEMFIYELSPEQVQEAIDRKDRKLLSKYLYRMQKISKKESGGIEVGFRHHLETKIDDSETAKKIKKFFIVQGVETLLKFTKVKINHLGQITKIFAEGE

SEQ ID NO: 670 - protein, 781 aa, unidentified
  REGION 1..781: note = Description of Unknown: uncultivated organism with predicted taxonomy: Flavobacteriales
  REGION 1..781: note = MG7-5 effector
MKKIVGLDIGVSSIGWSYVLESEIETDEETEDVIAMGSRIIPLSQKDTDEFSKGDSITKHKARTQKRTARKTNNRYKLRKHQLGEVLNNQGIIINPELFGLTARELYALRVRAVHEPITLSELARLWYQFNQKRGYQSLRGVVDEEADKKSDYLSSINERSQFLKDNKQTVGQFLFNRLQDYEQNRGVIEPITHIIFNRQDYFNEFNQIWERQKLEYPEILTDELLANIRDRIIFYQRPLMSQKHLVSDCTFEKNHKAAPKSSPLFQVFKIWKDLNHFEIKTKRGAIVEFTVEMKQKVFGVLDNQFDINKTKLWEILGLKASEHRLNFKEIRGNVTKAKLVEAFTELNINRPDLLSFDPHGNPDEQPLFRIWHLLYSINEKNADEILLKTLQNAPYSFTEKEAIGLIQKVSFKNDFGSLSSRAMRKILPHLEQGLPYDKACLEVGIRHSHYRTKEENNERILADKLLPLPKNSLRQPVVEKIVNQVINVMNAILADPNLGRPDEIRIELARELKQNIKQRERTESNNNKRQKARKDVVKEILKTFPDMKEKEVTQRMIQKYELFQETNGICVYTGTEMKLGAVLAGQGYDIEHIIPKSRRFDDSFMNKTLADSSTNRDKNDLTAYDFMRNKGMTAFEKFTEIIHTLHKNKKISDAKLDNLLTTLNPVWIAEKEAKELSTDFISRQLKETQYITKQVKAELDKICRKITVTSGGITDYLRHQWGVDDVLKNINLEKYEAAGKVHDEEYRDRQGHWRTRKKIADWSKREDHRHHAIDALGIAC

SEQ ID NO: 671 - protein, 774 aa, unidentified
  REGION 1..774: note = Description of Unknown: uncultivated organism with predicted taxonomy: Arcicella aurantiaca
  REGION 1..774: note = MG7-6 effector
MKKIVGLDIGVSSIGCSYVLESKIETDEEIEDVIAMGSRIIPLSKEDTDEFSKGQTITKHKARTQKRTARKTNNRYKLRKHQLGEVLNNQGIIINPELFGLTARELYALRVRAIHEPVTLSELARLWYQFNQKRGYQSLRGVVDEEADKKSDYLSSINERSQFLKDNKQTVGQFLFNRLQDYEQNRGVIEPITHIIFNRQDYFNEFNQIWERQKTEYPDILTDELLANIRDRIIFYQRPLMSQKHLVSDCTFEKNHKAAPKSSPLFQVFKIWQDLNHFEIKTKRGAIVDFTVEMKQKVFEILDNQFDINKTKFWEILGLKASEHRLNFKEIRGNVTKAKLVEAFSELNINRPDLLLFDPHGDPDEQPLFRIWHLLYSINEKNADEILLKTLQNAPYSFTEKEAIGLIQKVSFKNDFGSLSSRAMRKILSHLEKSLNYADACLEVGNRHSHYRTKEENDERILADKLLPLPKNSLRQPVVEKIVNQVINVMNAILADPNLGRPNEIRIELARELKQNIKQRERTESNNNKRQKARKDVVKEILKTFPDMKEKEVTQRMIQKYELFQETNGICIYTGTEMKLGAVLSGQGYDIEHIIPKSRRFDDSFMNKTLADSSTNRDKNDLTAYDFMRNKGTTAFEKFTEIIHKLHKDKKISDTKLDNLLTTLNPVWIAEQEAKALSTDFISRQLNETQYITKQVKAELDKICKKITVTSGGITDYLRHQWGVDDVLKNINLEKYEAAEKVHDEEYRDRQGHWRTRKKIADWSKRDDHRHHAI

SEQ ID NO: 672 - protein, 1131 aa, unidentified
  REGION 1..1131: note = Description of Unknown: uncultivated organism
  REGION 1..1131: note = MG7-9 effector
MKKVLGLDLGIASIGWALIAQNSENEEISHIIDCGVRVVPLSTDEHSEFAKGGSVPTNQIRRRARGMRRNLQRYRWRRHRLYCVLGQLGMMPDQRLMTRLSPLELYSLRSRALSEPLSLQEIGRILIHLNNWRGYRSNRREAVKDDEKSRYLKEIKNNEDQLKVEDKTIGQFFAERLHQGDRQRIRGRIFGRNTYIDEFNRIWDAQAQYHPSVLTEEHRRLIRDRIIYYQRPLKSAKGLVGTCALEWYYALYKETRQPKYENGRKKIVRPKCAPKSSPLNQECKVWESIHNLRIYRRDRNGRRESQPIALTLEQKKHLFWYLQESKKNLKAEEALRLLGFSAGAYAVDDHTLENNRTLSRLKEVFKKLGIRRDDLLRFDPAIEEVEWDDLETGERRRRLQVRGDFDREPLYQLWHLIYATEDEGDLIQLLEERYGFTTEQAREIAKIDFTSEGYARKSHRALRRLLPHYREGLDYTKACEAAGYRHADYITKAENEARILSERLELLPKNALRNPVVEKILNQMVHLVNDLMTTYGRPDEVRVELARELKQSAQERKKTHELNQKRRRENERIKKDIADHLAIPPEKVTRAQIEKYRFYKEIDGISLYTGKRFSLADVLNGDTVDVEHIIPRTLRFDDSYHNKTLCERNINQEKGNMTACDYMRSRGAQEYEAYLERVKAFYEKNGREVRLKYKNLTTTQEDLLKDNEFLQRQLRESQYIARKAVEVLREVCRNVYTTTGSITDFLRHRWGWDEVIPYLRLPQFKEAGLTEIIPVQNGQKTKEVIKGWSKRDDHRHHALDALVVACTRQSHIQRINELSPILAGTYGEERRQQLLDIVRDKYIAGKIPFSFRQVCEAMNQVLVSHKQRTRVATRNCPKGSQKVQITLTPRGRLHEETIYGRIRRYKKVSLDGKFSVAMLDDMVHPHQRELVEARLAQYANNPKAAFKDLDKNPIRYGPNGEKHLREVTVWEYIMVSRKALDPKATGKALKGIIDPVVHQVVKQHFEAGNVGGLPFRHVRVENRAEEWIRLPRGYAEPGSNHHIAIYRDADGKKHEHVVTFWEAFQRVHIGLPPIITDVAGALEYLSHLPGELPELHLPENPDWQFVVSLARNDMFVFGLDPADIDLRDLKN

SEQ ID NO: 673 - protein, 1225 aa, unidentified
  REGION 1..1225: note = Description of Unknown: uncultivated organism with predicted taxonomy: Bacteroidetes
  REGION 1..1225: note = MG7-10 effector
MEKVLGLDLGVSSIGWAMTLQDPNNEERSEIIDCGVRIVPLDTDEIKEFGKGGNVPTNVARRQARGMRRNLQRYRWRRQQLFRALKQLGMLPDERLLRQLSPLQLYALRERALSEPLSLPEMGRVLIHLNQWRGYRSNRKEQTESDGKKPSEYLEQIEKNEERLQGQTIGQYFAARLRESGGYRIRQQLFSRETYKQEFDRIWEKQAEYHPQVLTEANRSWIRDRIIYWQRPLKSAKGLVGECALEWCYALDKNQQPIRLPNGQLKIVRPKCAPKSSPLVQVCNVWESIHNLRVYDHFGEERPLSQEEKERLFRILQDRSLTARQIIKDVLLLSPKTHTVDRLIQEKGLEYNRTRARLLEVFKEQKINREDLLEFNPVIEEVEWDNPETGERLRRLQVRGDFTQQPLYQLWHLLYATEDERNLVALLQKRYGFTEAQAKALAKLDFTSAGYARKSHRALRRLLPHYQRGLDYAAAAQAAGYRHANQMTKEENQARPLLDRLEVLPKNSLRNPVVEKVLNQLVHLVNDLIATYGRPDEIRIELARELKQSAQERQQIEKLINKNKKTNEEARKKIAEILGIDPQAVSRTMIEKWKLYEETDGLSLYSGKKIDLPTLLRGNAVDIDHIIPRVSRFDDSFQNKIFCEASLNQAKSNSTAHDFMRDQPVSGLQPYDDYRKMVKDLYEGKKISKAKYDNLMMTAEDLLKDGEFLQRQLRETQYIAKKAVEMLRQVCREVRSTTGSITDFLRHQWGWDEVIKELRLPQFRQAGEDLIEYRPAANGGRDRVVIKDWDKRKDHRHHALDALVVAFTRVSHIQRVTKLNQIMSGKFGEERRKELLRTGRDLYIAGKAPFTFAQVSKAIANILISFKQGLRVATRSRNRPKGSTTVQITLTPRGALHEETVYGRIKRYKKVPLNGKFSPAMVTEIAHPHQRALVEARLAQHNGDPKKAFKDLEKHPITYGPNGSKHLTHVTVWDYVLVARKSVDASLSEKAVEKIADRGVRRAVAERLKAGGGKSKEAFKNVGTDPVQPPRHHPVKRVRVENYAEKAIRLPRGYVEPGSNHHIAIYRDADGNKHEHVVTFWDAFQRVRLGLPAIITDVPAALQYAQDQLPEGVTDLLLPEGWDWQFVVSLAQNDMFVFDLDPSEINFTDPNNRARISKHLFKVRKLSANDYSFLHHLETEIVDDLVSKSINRCKRCSMSALSRSRAVKVKINRLGHVVEVGQPFS

SEQ ID NO: 674 - protein, 1218 aa, unidentified
  REGION 1..1218: note = Description of Unknown: uncultivated organism with predicted taxonomy: Bacteroidetes
  REGION 1..1218: note = MG7-11 effector
MKKVLGLDIGVNSIGWAYIAEPENKNEKYNILGAGSRIIPLNSDETSEFKSGNAISKNSARRIKRGIRRGGHRYKMRKWKLTAKLKELGMFPDKELFSLHSLELYSLRTKAISEKISLQEIGRIFYHLNQKRGYKSNRKANNDENIEVNVSDKPGKKKGYLDLINDRENILTSQKITIGQYFYYKLKEQPFFRIKDNIFTRKSYQQEFKKIWDQQSIYYPNILTEEAFNILFNEIIYFQRPLKSQKHLVTDCRFEFVFAKNNKGELLKDDTGSLRKIKLKAAPKSSPLFQLAKVWQDINNLKIQDTYGNIIEITLEKKKLIADKLQETDKITLKELKKILGLSSKEEYYYNLKKEYIEGNRTFVQLKKILGDNPLLEFNVEINERSISDYNTGETEVRKVINSSIEQSPLYQLWHLLFAAEENENLISTLCKKYSLSPETALALSKLDMTKAGYGALSTKAYRKILPYLMEGSGYSDACQLAGYRHSDYLSKEENESRQLLAKLDLYPINSLRNPVVEKVINQVINLVNAILEDPAYGRPDEIRVELGRELKQNAEERNKTFSRNKKEDAKHKDIIHRLMTECNFKKVSRRDIERYKLWEEFGYVSPYEPSKPISLSELFSGAYEVEHIIPKSRLFDDSFANKTICPRPINAAKDNQTAFDYMSGLGQQKLDEFTDFIQKHKTKKDGISQTKAKYLLCKGSEIPQDFINRQMRETAYISREVKNLLLGICRNVHSTSGTVTNYLRHIWGLDSILQELNIEKYRACGQTVKEIIGSNGSTKENERIVNWSKRDDHRHHAIDAIVIALTKQSHIQKLNNLNQEFQNYRELKQSAYNFPLPWATVHSDVLRTVSNILVSFKSGKKVATKNINRIKKNGKVVKELPTLTPRGFLHKDKFYGKIKRYETVPLTPRFKEWDRIADNNIYNQLKERLSRYKDNTKLAFSENEKDPIPKSLQSITLFQEKFVIRQELNKDFNLARTENIIDERIKRIVKGRLSQNQGNPIKAFGDLENDPIWINKEKAIDIKAVRCFTDLKDLSSLHKNDKGENIHYVSTKNNHHIAIYEDQNGNLAFNAASFWDALNRKLHDLPVIIKDPKSLWNKVLEKGIDNQDVLSNLPPENCSFRTSLQQNEMFIFGMTREEIEDDIRNENYSRISKGLYRVQNISTGKGIDVFFRHHLETKLQDSNNDKEVGKFIRCRTLNSLSLIKVLINYTGSIYLYD

SEQ ID NO: 675 - protein, 1223 aa, unidentified
  REGION 1..1223: note = Description of Unknown: uncultivated organism with predicted taxonomy: Bacteroidetes
  REGION 1..1223: note = MG7-12 effector
MEKVLGLDLGVSSIGWAMTLQDPNNEERNEIIDCGVRIVPLDTDEIKEFGKGGNVPTNVARRQARGMRRNLQRYRWRRQQLFRALKQLGMLPDERLLRQLSPLQLYALRERALSEPLSLPEMGRVLIHLNQWRGYRSNRKEQTESDGKKPSEYLEQIEKNEERLQGQTIGQYFAARLRESGGYRIRQQLFSRETYKQEFDRIWEKQAEYHPQVLTEANRSWIRDRIIYWQRPLKSAKGLVGECALEWCYALDKNQQPIRLPNGQLKIVRPKCAPKSSPLVQVCNVWESIHNLRVYDHFGEERPLSQEEKERLFRILQDRSLTARQIIKDVLLLSPKTHTVDRLIQEKGLEYNRTRARLLEVFKEQKINREDLLEFNPVIEEVEWDNPETGERLRRLQVRGDFTQQPLYQLWHLLYATEDERNLVALLQKRYGFTEAQAKALAKLDFTSAGYARKSHRALRRLLPHYQRGLDYAAAAQAAGYRHANQMTKEENQARPLLDRLEVLPKNSLRNPVVEKVLNQLVHLVNDLIATYGRPDEIRIELARELKQSAQERQQIEKLINKNKKTNEEARKKIAEILGIDPQAVSRTMIEKWKLYEETDGLSLYSGKKIDLPTLLRGNAVDIDHIIPRVSRFDDSFQNKIFCEASLNQAKSNSTAHDFMRDQPVSGLQPYDDYRKMVKDLYEGKKISKAKYDNLMMTAEDLLKDEEFLQRQLRETQYIAKKAVEMLRQVCREVRSTTGSITDFLRHQWGWDEVIKELRLPQFRQAGEDLIEYRPAANGGRDRVVIKDWDKRKDHRHHALDALVVAFTRVSHIQRVTKLNQIMSGKFGEERRKELLRTGRDLYIAGKAPFTFAQVSKAIANILISFKQGLRVATRSRNRPKGSTTVQITLTPRGALHEETVYGRIKRYKKVPLNGKFSPAMVTEIAHPHQRALVEARLAQHNGDPKKAFKDLEKHPITYGPNGSKHLTHVTVWDYVLVARKSVDASLSEKAVEKIADRGVRRAVAERLKAGGGKSKEAFKNVGTDPVQPPRHHPVKRVRVENYAEKAIRLPRGYVEPGSNHHIAIYRDADGNKHEHVVTFWDAFQRVRLGLPAIITDVPAALQYAQDQLPEGVTDLLLPEGWDWQFVVSLARNDMFVFDLDPSEIDFTDPNNRARISRHLFKLRKASKKQYWFLHHLETEVLEDLASKKAYRCKQCSMESLAGAVKVKINRLGHVVEVGQPFS

SEQ ID NO: 676 - protein, 1134 aa, unidentified
  REGION 1..1134: note = Description of Unknown: uncultivated organism with predicted taxonomy: Deltaproteobacteria bacterium
  REGION 1..1134: note = MG7-13 effector
MKKILGLDIGTNSIGWALITEPENGESGEPEILRCGVKVIAMDQKQINAFEGGQALSANQERRLKRQMRRNNWRYKLRREALVARLVELGWFPREWKDDLQARHEALKLHDARYIYGLRDKAARGERITLRELGLIWYHLNQKRGYKSNRKAQDEEESNDSVLLSQIAANDQLLREQGLTVGQYLYQQHKEHPRRPLKGKVFSRKAYLEEFDRIWEAQAAHYPDILTPELREEIRDRIIYYQRPLKSQKHLIAECPFEKRYYKDANGQLQVKGIKVAPRSSPVFQEYKIWQTLANIRITNLALAGQMGFDDRGERPLTEQERELAYQYLIKKKKVKSDTLLKRALRLDPEAGGYSIDNYEEIEGDVTRAAILSAFKKAEQRPPQWLFRFDPTREIEQQPLFQLWHMLYSIEDPAALQRKLQEKFDFDDELAAALTRVTFKEDYGSLSTRAMQRLIPHLKNGLTYDKARVKVYEETGIDSYKTHTLSKDEQLQRALAPAIEQIKVNSLRNPVVERIVQHVINLVNAIIADKSLVSDEERQSGKFEIRMEMARELKQTAKQRQKTSKQIRAREQQREAARNRLIEEGILTRPSRADIDRYLIWLEGNQMCPYTFKPIPISDLFNGRCDVDHIIPRSRLFDDSQLNKVVCYAAANREKGNRTAYEYMEQKGELEKFREHVMNTNYPFPKKKRLLSPEVPEDFIQRQLKETQYITKVVREKLWEVSHEVRTTTGAITGFLRHEWGLSNLLHDLNFPKYEAQGLVEEWVDEETGEVIKRIEDWSKRMDHRHHALDALVVALTRPAHVHYLNNLNKQFGNLARENGWRTPLRSPVTNLYQKARAAMEPILVKHQKKSRVVTSMTHRLKVKGHFSGKTQEVLVPRGPLHKESVYGLIHDNGKEEFVIRYPLDTNFRPEYVPYIVDKKVQQIVAARLRQFGNDPKKAFADLESDPIWFDEERKIPVKRVRCRTGLQAVVPVHHKADGTSVDYVQTRNNHHLAIYQRPDGSRFHRIVTFWEAVERINQGQPLYQPTIEDGQLLLTLSANDMFVFELDPDEIDFTNPANYGLISRHLYRVQKMTGDDRKLDIWFRHHLDPTTEHRKPYGEMGNFRRITSLSKLVGTKVWLDQTGRIVQHLRCIG

SEQ ID NO: 677 - protein, 1134 aa, unidentified
  REGION 1..1134: note = Description of Unknown: uncultivated organism with predicted taxonomy: Deltaproteobacteria bacterium
  REGION 1..1134: note = MG7-14 effector
MKKILGLDIGTNSIGWALITEPENGESGEPEILRCGVKVIAMDQKQINAFEGGQALSANQERRLKRQMRRNNWRYKLRREALVARLVELGWFPREWKDDLQARHEALKLHDARYIYGLRDKAARGERITLRELGLIWYHLNQKRGYKSNRKAQDEEESNDSVLLSQIAANDQLLREQGLTVGQYLYQQYKEHPRRPLKGKVFSRKAYLEEFDRIWEAQAAHYPDILTPELREEIRDRIIYYQRPLKSQKHLIAECPFEKRYYKDANGQLQVKGIKVAPRSSPVFQEYKIWQTLANIRITNLALAGQMGFDDRGERPLTEQERELAYQFLIKKKKVKSDTLLKRALRLDPEAGGYSIDNYEEIEGDVTRAAILSAFKKAEQRPPQWLFRFDPTREIEQQPLFQLWHMLYSIEDPAALQRKLREKFDFDDELAAALTRVTFKEDYGSLSTRAMQRLIPHLKNGLTYDKARVKVYEETGIDSYKTHTLSKDEQLQRALAPAIEQIKVNSLRNPVVERIVQHVINLVNAIIADKSLVSDEERQSGKFEIRMEMARELKQTAKQRQKTSKQIRAREQQREAARNRLIEEGILTRPSRADIDRYLIWLEGNQMCPYTFKPIPISDLFNGRCDVDHIIPRSRLFDDSQLNKVVCYAAANKEKGNRTAYEYMEQKGELEKFREHVMNTNYPFPKKKRLLSPEVPEDFIQRQLKETQYITKVVREKLREVSHEVRTTTGAITGFLRHEWGLSNLLHDLNFPKYEAQGLVEEWVDEETGEVIKRIEDWSKRMDHRHHALDALVVALTRPAHVHYLNNLNKQFGNLARENGWRTPLRSPVTNLYQKARAAMEPILVKHQKKSRVVTSMTHRLKVKGHFSGKTQEVLVPRGPLHKESVYGLIHDNGKEEFVIRYPLDTNFRPEYVPYIVDKKVQQIVAARLRQFGNDPKKAFADLESDPIWFDEERKIPVKRVRCRTGLHAVVPVHHKADGTPLDYVQTRNNHHLAIYQRPDGSRFHRIVTFWEAVERINQGQPLYQPTIEDGQLLLTLSANDMFVFELDPDEIDFTNPANYGLISRHLYRVQKMTGDDRKLDIWFRHHLDPTTEHRKPYGEMGNFRRITSLSKLVGTKVWLDQTGRIVQHLRCIG

SEQ ID NO: 678 - protein, 1003 aa, unidentified
  REGION 1..1003: note = Description of Unknown: uncultivated organism with predicted taxonomy: Collinsella
  REGION 1..1003: note = MG14-1 effector
MEITINREIGKLGLPRHLVLGMDPGIASCGFALIDTANHEILDLGVRLFDSPTHPKTGQSLAVIRRGFRSTRRNIDRTQARLKHCLQVLKAYGLIPQDATKEYFHTTKGDKQPLKLRVDGLDRLLNDREWALVLYSLCKRRGYIPHGEGNQDKSSEGGKVLSALAANKEAIAETSCRTVGEWLAQQPQSRNRGGNYDKYVTHAQLIEETHILFDAQRSFGSKYASPEFEAAYIEVCDWERSRKDFDRRTYDLVGHCSYFPTEKRAARCTLTSELVSAYGALGNITIIHENGTSRALSATERDECIAILFSCEPIRGNKDCAVKFGALRKALDLSSGDYFKGVPAADEKTREVYKPKGWRVLRNTLNAANPILLQRLRDDRDLADAVMEAVAYSSALPVLQEQLQGLPLSEAEIEALCRLPYSSKALNGYGNRSKKALDMLLDCLEEPEVLNLTQAENDCGLLGLRIAGAQLERSDRLMPYETWIERTGRTNNNPVVIRSMSQMRKVVNAICRKWGVPNEIHVELDRELRLPQRAKDEIAKANKKNEKNRERIAGQIAELRGCTADEVTGKQIEKYRLWEEQEYFDLYTGAKIEVDRLISDDTYTQIDHILPFSRTGENSRNNKVLVLAKSNQDKREQTPYEWMSHDGAPSWDAFERRVQENQKLSRRKKNFLLEKDLDTKEGEFLARSFTDTAYMSREVCAYLADCLLFPDDGAKAHVVPTTGRATAWLRRRWGLNFGSNGEKDRSDDRHHATDACVIAACSPSLVIKTARINQETHWSITRGMNETQRRDAIMKALESVMPWETFANEVRAAHDFVVPTRFVPRKGKGELFEQTVYRYAGVNAQGKDIARKASSDKDIVMGNAVVSADEKSVIKVSEMLCLRLWHDPEAKKGQGAWYADPVYKADIPALKDGTYVPRIAKAHTGRKAWKPVPESAMAKPPLEIYFGDLVQIGDFIGRFSGYNINNANWSFTDRLTRLNLSCPTVGQLNNDLSPVVIRESPIK

SEQ ID NO: 679 - protein, 1034 aa, unidentified
  REGION 1..1034: note = Description of Unknown: uncultivated organism
  REGION 1..1034: note = MG14-3 effector
MAKLAPIADPRDFGFDPETVASALMPYEQFSSKPRRLILGIDMGVASIGLALIDVLNGEIVLMASHIFKQPIVDKTKVSLAVSRRGYRSSRRNITREKNRKKAIRKLAADTGIAPAGAAADWFARRKGEPEVLALRVDALTRKLTDRELARILYSFASHRGYIDHGKGDKGDTEDGKVKKALSANLKILDEGGYETYAQYLATQPRSRNKRDDYTFSIDIATVAHEVSRIFAHQREMGNTKATVSLEQSYLAALCWLTDTTKKDKKTYDKVGYCTYLGKPEKRAASSALSYELVRAYQTLANVKIEHRGAAPTCISPKTRNEIVADLFKVTGKPKPLKWSQLRKRLHMAETDTFAGRLKSDEAADCIKLPAWTALCAGLYDKAPKLLEDMHEEPDFADSVCSCLTFASGESSLRSALGNLSADFTPAELAALLDLPYTSKAFSGYGTSGLKALHMLRSAFESEDVVTLYDAEEATGLYEARAALAADRNASLDGLLSPYVEFDPTCTNPVVLRATARLRRMVNSVIKHYGMPDAIRVELARELKHSAHEKRLINASKNKNEKVNAKARQDLIDYYHLPSDAHIKTGDFRKVKLYNEQGGKDPYTGEGIDFARMLAQSDYTEIDHILPISRSCDDSQSNKVLVLTKSNRDKSNRTPYEWMTSGESTAPDFAEFSARMQLWAENCELKRLASSKLKKLLNKDFTDKTQDFIARQLNDTRYMSRAVAKWLDGCLPFPDDGHRHVFAVSGGATAMLRRAWDIAILDEEGKKDRDDDRHHAIDAALIAACTPSIVMKVAKANEMWQSDAERESLFLGSMPFPDFKQKVEAWIPCIVPTLYLPRNATGSLFNDSFYSYRGTDARGKDLLKQNGTVKPKTTVWKDGNGTAKTYDGVYGLHAVFDKDRGKSGRWLFDPIYYVDIPHLSKDRMRVFSKDKAIDYWETTEIDPESPQLMIKMGDVLLQDGRAMRFYNFNVATGGICSYVTGAPHKSLQKTGPLSCESFPTPMKWASDLKIMHEDSLGLCWLRFLVARTESCDGA

SEQ ID NO: 680 - protein, 1005 aa, unidentified
  REGION 1..1005: note = Description of Unknown: uncultivated organism with predicted taxonomy: Coriobacteriales
  REGION 1..1005: note = MG14-4 effector
MQSTVNREIGKLGLPRHLVMGMDPGISSCGFALIDTKNHEILEMGVRLFDSPTHPKTGQSLAVIRRGFRSTRRNIDRTQARLKHCLETLKRYGVVPQDATKDYFHTAKGDKQPLKLRVEGLDRLLTNREWALVLYSLCKRRGYIPHGEGSQDKSSEGGKVLSALAANKEAFDQGSFRTVGEWLASQPQSRNRGGSYDKCVTHAQLVNEAHTLFEKQRAFESKVASTELEAAYIEVCDWERSRKDFDCRTYELVGYCSYFPQEKRAARCTLTSELVSAYGALGNVTIIHEDGSSRSLTAAERDECIAILFSCEPIRGNKDCTVKFGALRKVLDLSSGDYFKGVPTSEEKTREVYKPKAWRVLRNTLNPINPILLHRLRDDRDLADSVMEAVAYSSALPVLEEKLQELPLSEAEVTALCKLPYSSKVLNGYGNRSKKALDILLGCFEEPEVLTLTDAEDASGLLAMRIEGAGLERSDRLMPYEGWIEKTGRTNNNPVVIRAMSQMRKVVNAICRKWGVPNEIHVELDRELRLPQCAKDDIAKANKKNEKNRERIAGQIAELRGCSVEEVTGKQIEKYRLWEEQECFDLYTGDSIDVMRLIQDDSYTQIDHILPFSRTGENSKNNKVLVLAKSNQDKREQTPYEWMHSGKPSAPSWSDFERRVQENQKLSRRKKNFLLEKDLDSKEGEFLARSFTDTAYMSREVCSYLSDCLLFPEDGSKVHVVPTTGRATAWLRRRWGLNFGSTGEKDRTDDRHHATDACVIAACSRSLVIKTAKISQETHWSVTPGLTESQRKDARMKALESVMPWETFANEVRSRHDFVVPTRFVPRKGKGELFEQTTYQYAGVNDKGKDLARRVGSDKDIVMGNAVVSEDGKSVVKVSEMLCLRLWHDPDAKKGKGCWYADPVYKADIPALKDGSYVPRIAKAHSGRKAWKPVPESALKGGTIEIYLGDIVRIGDFIGRFSGYDINSANWSFVDRLTRNPIKCPTVGKLNNLIIPIVTRENIVE

SEQ ID NO: 681 - protein, 1005 aa, unidentified; identical to SEQ ID NO: 680
  REGION 1..1005: note = Description of Unknown: uncultivated organism with predicted taxonomy: Actinobacteria
  REGION 1..1005: note = MG14-5 effector

SEQ ID NO: 682 - protein, 1037 aa, unidentified
  REGION 1..1037: note = Description of Unknown: uncultivated organism with predicted taxonomy: Collinsella
  REGION 1..1037: note = MG14-6 effector
MAKLAPIADPRDFGFDPETVASALMPYEQFSSKPRRLILGIDMGVASIGLALIDVENGEIVLMASHIFKQPIVDKTKVSLAVSRRGYRSSRRNITREKNRKKAIRKLAVKSGIAPAGASADWFARRKGEPEVLALRVDALTRKLTDRELARILYSFASHRGYIDHGKGDKDDIEGGKVKKALSANRKILDEGGYETYAQYLATQPRSRNKKDDYTFSIDIATVAHEVSRIFAHQREMGNTKVTVSLEQSYLAALCWLTDTTKKDKKTYDKVGYCTYLGKPEKRGASSALSYELVRAYQTLANVKIEHRGADATHISPKTRNEIVADLFKVTGKPKPLKWSQLRKRLHMAETDTFAGRLKSDEATDCITLPAWTALCVGLYDKAPKLLEDMHEEPDFADKVCSCLTFASSESSLRGALSQISADFSPVELAALLDLPYTSKVFSGYGTSSLKALHMLRGAFESEDVATLYKAEKATGLYEARAALAANRNASADGLLSPYVEFDPTCTNPVVLRATARLRRMVNSIIKHYGMPDAIRVELARELKHSAHEKRLINASKNKNEKINAKARQDLIDYYHLPSDAHIKTGDFRKVKLYNEQGGKDAYTGEGIDFARMLAQSDYTEIDHILPISRSCDDSQSNKVLVLTKSNRDKSNRTPYEWMTSGESTAPDFAEFSARMQLWAENCELKRLASSKLKKLLNKDFTDKTQDFIARQLNDTRYMSRAVAKWLDGCLPFPDDGHRHVFAVSGGATAMLRRAWDIAILDEEGKKDRDDDRHHAIDAALIAACTPSIVMKVAKANEMWQSDAERESLFLGSMPFPDFKQKVEAWIPCIVPTLYLPRNATGSLFNDSFYSYRGTDARGKDLLKQNGTVKPKTTVWKDGNGTAKTYDGVYGLHAVFDKDSGKSGRWLFDPIYYVDIPHLSKDRMRVFSKDKAIDYWETTEIDSESPQLIIKMGDVLLQDGRAMRFYNFNVATGGICSYVTGAPHKSLQKTGPLSCESFPTPMKWARDLKIMHEDSLGLCWLKFLTDRTDRCALESIQ

SEQ ID NO: 683 - protein, 1003 aa, unidentified
  REGION 1..1003: note = Description of Unknown: uncultivated organism with predicted taxonomy: Collinsella
  REGION 1..1003: note = MG14-7 effector
MEITINREIGKLGIPRHLVLGMDPGIASCGFALIDTANHEILDLGVRLFDSPNHPKTGQSLAVIRRGFRSTRRNIDRTQARLKHCLQTLKAYGVIPQDATKEYFHTTKGDKQPLKLRVQGLDRPLSNREWALVLYSLCKRRGYIPHGEGSQDKSSEGGKVLSALTANQEALAETPCRTVGEWLAQQPQSRNRGGNYDKCVTHAQLIDETHILFEAQRSFGSAYASPEFEAAYIEVCDWERSRKDFDRRTYDLVGHCPYFPTEKRAARCTLTSELVSAYGALGNITIIHENGTSRALSATERDECIAILFSCEPIRGNKDCAVKFGALRKALDLSSGDYFKGVPAADEKTREVYKPKGWRVLRNTLNAANPILLQRLRDDRDLADAVMEVVAYSSALPVLQERLQGLPLSEAEIEALCRLPYSSKALNGYGNRSKKALDMLLDCLEEPEVLNLTQAENDCGLLGLRIAGTQLERSDRLMPYETWIERTGRTNNNPVVIRSMSQMRKVVNAICRKWGVPNEIHVELDRELRLPQRAKDEIAKANKKNEKNRERIARQIAELRGCTADEVTGKQIEKYRLWEEQECFDLYTGAKIEVDRLISDGTYTQIDHILPFSRTGENSRNNKVLVLAKSNQDKREQTPYEWMSHDGAPSWDAFERRVQENQKLSRRKKNFLLEKDLGTKEGEFLARSFTDTAYMSREVCAYLADCLLFPDDGAKAHVVPTTGRTTAWLRRRWGLNFGLTGKKDRSDDRHHATDACVIAACSPSLVIKSAQINQKMHWSMTKGMSKAQRQDAIMKALENVMPWETFANEVRTVHKLIIPTRFVPRKGKGELFEQTVYRYAGVDAKGKTLARRANSTEDIVMGNAVVSDDEKSVIKVSEMLCLRLWHDPKAKKGQGAWYADPVYKADIPALKDGTYVPRIAKAHTGRKAWKPVPESAMKKPPLEIYLGDLVQIGDFVGRFNGYNIDNANWSFVDRLTRIKTSCPTVGKLSNDMSPFVVRESPIK

SEQ ID NO: 684 - protein, 1000 aa, unidentified
  REGION 1..1000: note = Description of Unknown: uncultivated organism with predicted taxonomy: Olsenella
  REGION 1..1000: note = MG14-8 effector
MDVTRPYLVLGLDPGIASCGFCLLDMSNHKILEMGSHLFKAPQEDKTKTSLAVTRRKARSIRRNTARTAARLKHCLELLAGAGLVPADADKTWLQTKKGDKPILKLRAGGLDRLLTDREFAQVLYSLCGRRGYIPHGEGRLGETDEDESRKVLGAIKKNQDAMAAGSYRTVGEMLNTQGRSRNRGGDYSLCVYNSQIQDEAKALFASQRARGNTKATRELEDSYLACLTWEKKSLDHDARIYELVGPCSYFPGEKRAASADVSSELCRAYERLGHIVIVHEDGSEQALTASQIDGYLKILFSTAPIKGNKECKVSYGTIRKDLDISGKSVFKGVAQDKEKDETFAPKAWRCLRRVLPEELLARMFEDRQLGDAICEALTFASSEASLVERLSDLDLSGDERDAILTVPFTGKLFKGYGSRSLKALGLLLGAFEEPEIRILTDAEKVTGLLDLRLSDRGVRGQLLPPYDSYDPTCRNPVVLRAMGRMRHIVNAIIRIHGVPDEIHIELGRELKMSNKEKSLVDKRNRENAANNKKWAATAAGILGCTPEEVPGRIIRKLILREEQGEKDLYTGEPIDLEHLVRDDRYCEIDHILPYSRTCDDGRANKVLVLSKSNQDKRERTPYEWMSSGEAGAPSWDSYRARVMAQVKNPRKRANYLNTDLGPETQAKFLARNLNDDRYMSVAVKNYLEDCLLFPEDGRKRHVTAVAGGATGNLRWVWGLNFGEGNIKDRADDRHHAIDAAIIAACSESTVKKVAEASAKGREAFKQLRKSRLADTQPWPTFATEVAARREFVVPTRMADHGVTGRVFEDTLYHLEGITEDKGKYPLVRAGENTVKKGNVRINPDGSVKLIDGMAFLRLWLDPTARPNGKVKGKWYAEPVYYADIPAIKAGTYVPRAIVQGIARINWEPIPQTALESKPLVLFKNDVLVVDGHIARYSNIGISVCQLLMLNLLTRDRVTDWPSVGSWGKDTQVRILQEDCLGHCYDSIAINPEDSTFQQR

SEQ ID NO: 685 - protein, 1002 aa, unidentified
  REGION 1..1002: note = Description of Unknown: uncultivated organism with predicted taxonomy: Olsenella sp. KH3B4
  REGION 1..1002: note = MG14-9 effector
MDVTRPYLVLGLDPGIASCGFCLLDMTNHKILEMGSHLFKAPQEDKTKTSLAVTRRNARSIRRNTARTAARLKHCMELLVAAGLVPEDADKTWFQTRKGDKPVLKLRAGGLDRLLTDREFAQVLYSLCGRRGYIPHGEGRLGETDDTEGRKVLDAIKKNQAAMAAGSYRTVGEMLNAQGRSRNRGGDYALCVYNSQIQDEVKALFAAQRAHGNAAATEALEDDYLACLTWEKKSLEHDARVYELVGECPYFPGEKRAASADISSELCRAYERLGHIVIVHEDGSEQTLTANQIDGYLKILFSTASIKGNKDCKVTYGAIRKNLDISGKSVFKGIAQDKEKEEVFAPKAWRCLRHALPEELLARMVEDRQLGDAICEALTFASSEASLIERLSDLDLTDDEREAVLGVPFTGKLFKGYGSRSLKALGLLLGAFEEPEVRTLTDAERATGLLDLRQSDRGVRGQYLPPYNSYDETCRNPVVLRAMGRMRHIVNAIIRIHGVPDEIHIELGRELKMSNKEKSLVDKRNRENAAANKKWAEKAAGILGCTPEEVSGRVIRKLILREEQGEKDLYTGQPIDLERLVRDDRYCEIDHILPYSRTCDDSRTNKVLVLSKSNQDKRERTPYEWMTSGETGAPSWDEYHARIMATVKNPRKRANYLNTDLGPETQAKFLARNLNDDRYMSVAVKNYLEDCLLFPEDGRKRHVIAVAGGATGNLRWVWGLNFGDGNVKDRTDDRHHAVDAAIIAACSESTVKKIAEASSKGREAFKKQRESRLADTQPWPTFADEVKARRAFVVPTRMADHGVTGRVFEDTLYHLEGITADKGKYPLVRAGEKTVKKGNVRINSDGSVKLIDGMAFLRLWLDPTARPNGKVKGKWYAEPVYYADIPAIKAGTYVPRACTIHVARVNWEPVPESAMASEPVVVFFGDVLVVDDKIGRYWSMGITNCAMEIRSLLNGSNLASGFPGTLNGWGKDTQVRVLQEDCLGHCYDGISINPEDSTFQQR

SEQ ID NO: 686 - protein, 880 aa, unidentified
  REGION 1..880: note = Description of Unknown: uncultivated organism with predicted taxonomy: Collinsella
  REGION 1..880: note = MG14-10 effector
MLTSREWALVLYSLCKRRGYIPHGEGSQDKSSEGGKVLSALAANKEAIAETSCRTVGEWLAQQPQSRNRGGNYDKCVTHAQLVEETHILFEAQRNFGSQYASAELEEAYVQVCDWERSRKDFDRRSYDLVGYCTYFPTEKRAARCTLTSELVAAYGALGNITIVREDGTTRTLTAAERDKCIAILFSCEPIRGNKDCAVKFGALRRELDLNSGDYFKGVPAADEKTREVYKPKGWRTLRNTLNTISPFLLRRLHDDRDLTDSVMEAVAYSSALPVLEEQLQALPLSPTEIGALCKLPYSSKALNGYGNRSKKALDMLLDCLEDSEVLGLTQAEDDCGLLGLRTQGAQLKRSEHLMPYEMWVELTGRTNNNPVVIRSMSQMRKVVNAICRKWGVPNEIHIELDRELRLPQRAKDDIAKAHKKNEKNRERIAGQIAELRGCSPEDVSGKLIEKYRLWEEQEYFDLYTGTKIEVDRLISDETYTQIDHILPFSRTGENSPSNKVLVLAKSNQDKREQTPFEWMSKEGAPSWDAFKRRVEENQKLGRRKKNFLLEEDLEAKEGEFLTRSFTDTAYMSREVCAYLADCLLFPEDGTKSHVVPTTGRATAWLRRRWGLNFGTNGEKDRSDDRHHATDACVIAACSRSLVIKTAHISEQTHWTVTKNLDKDERNRLRMKALENVMPWETFANEVRASHDFVIPTRFVPRKGKGELFEQTTYRYAGVNDKGKDLARKANSDQDIVMGNAVVSEDGKSIIKVSEMLCLRLWHDPEAKKGQGCWYADPVYKADIPALKDGTYVPKIAKAHTGRKAWKPVPESAMKHAPLEIYLGDLVKIDDFIGRFSGFDINSANWSFSDRLTRQKLNCPTVGRLNNALLPTIIRESTID

SEQ ID NO: 687 - protein, 813 aa, unidentified
  REGION 1..813: note = Description of Unknown: uncultivated organism with predicted taxonomy: Collinsella sp. AF20-14LB
  REGION 1..813: note = MG14-11 effector
MAAFENPRESGFDPELVKTALMSREQFCSKPRKLILGIDMGIADIGICLMDELNYEIVLMATHLFDCPRNPKDQTSLASTRRQARSQRRNIARRAARKKHIRTILMAHGVIPEGTTADWFSVRRGEQDNIQLRVKGLSEVLTDRELARVLYAFASRRGYIDHGKADNDKDAGKVKKALKANAEIMEANGYETFAQYLVTQPRIRNRQNDYTHCIDIDMVVDEVHAIFRHQRELGNELATESLEGEYLATLRWLTDTTRRDRIIYSKVGYCTYLGEPVKRAPKSSISSEMVRAYQTLANVKIEHIGGPATQIAPAVRNQIVHELFKVSKNPKPLKWSQLRKKLDLADTATFAGIRQSDEKNDACVTAPAWNALCSTLHDLNPTLLNRLHDDIDLADAVCAAATFASSSEAFATRIAELTDGLSKEDVEALLELQYGSKLFTGYGSTSLKALQMLRDAFEDAKIERLYDAEVATGLYDAREALAARHNAPDNGFLKPYSSYSPICTNPVVLRSCAQLRRIINSIIRHYGLPDTIRVEVANDLKHTKREKKLITSGNIYNRKVNEKAKDDIVEFLGLANADRVRGRDLEKVRLYNEQGGKDPYTGQGIDFGRMLTEKSYVEVDHVLPFSRSCDNSKTNKVLVLTKSNRDKANRTPYEWMTSGEPTAPNWDEFCIRMDVWASGKEPKHYYSSKLAKLKEDNFTNNIDSFISRNLNDTRYMSKDVAKWLADCLPFPKDGRRHVFCVSGAATGLMRRVWRIGILDENGKKDREDDRHHAVDAAVIAACTPSVVKSIALISEEHATHRDADRLLNRSLPY

SEQ ID NO: 688 - protein, 1005 aa, unidentified
  REGION 1..1005: note = Description of Unknown: uncultivated organism with predicted taxonomy: Collinsella
  REGION 1..1005: note = MG14-12 effector
MEITINREIGKLGLPRHLVLGMDPGIASCGFALIDTANHEILDLGVRLFDSPTHPKTGQSLAVIRRGFRSTRRNIDRTQARLKHCLQVLKAYGLIPQDATKEYFHTTKGDKQPLKLRVDGLERLLNDREWALVLYSLCKRRGYIPHGEGNQDKSSEGGKVLSALAANKEAIAGTSCRTVGEWLAQQPQSRNRGGNYDKCVTHAQLIEETHILFTAQRSFGSKYASPEFEAAYIEVCDWERSRKDFDRRTYDLVGHCSYFPTEKRAARCTLTSELVAAYGALGNITIIHEDGTSRALSATERDECIAILFSCEPIRGNKDCAVKFGALRKALDLSSGDYFKGVPAADEKTREVYKPKGWRTLRNTLDTANPILLQRLRDDRDLADAVMEAVAYSSALPVLQERLQELPLSEAEIEALCKLPYSSKALNGYGNRSKKALDMLLDCLEEPEVLNLTQAENDCGLLGLRIAGAQLERSNRLMPYELWVERTGRTNNNPVVIRSMSQMRKVVNAICRKWGVPNEIHVELDRELRLPQRAKDEIAKANKKNEKNRERIAGQIAELRGCTTEEVTGKQIEKYRLWEEQECFDLYTGAKIEVDRLISDDTYTQIDHILPFSRTGENSRNNKVLVLAKSNQDKRGQTPYEWMSHDGAPSWDAFERRVQENQKLSRRKKNFLLEKDLDAKEGEFLARSFTDTAYMSREVCAYLADCLLFPDDGAKAHVVPTTGRATAWLRRRWGLNFGSNGEKDRSDDRHHATDACVIAACSRSLVIKTARINQETHWSITRGMNETQRHDAIMKALESVMPWETFANEVRAAHDFVVPTRFVPRKGKGELFEQTVYRYAGVNAQGKDIARKASSDKDIVMGNAVVSDDEKSIIKLSEMLCLRLWHDPEAKKGQGAWYADPVYKADIPALKDGTYVPRIARAAIGRKAWKLVPKSAMTKPPLEIYLGDLVQIGNFIGRFSGYNIANGSWSFIDRLTKEALSCPSVAKLNNNLFPTIIRESIIMRK

SEQ ID NO: 689 - protein, 1005 aa, unidentified
  REGION 1..1005: note = Description of Unknown: uncultivated organism with predicted taxonomy: Collinsella
  REGION 1..1005: note = MG14-13 effector
MEITINREIGKLGLPRHLVLGMDPGIASCGFALIDTANHEILDLGVRLFDSPTHPKTGQSLAVIRRGFRSTRRNIDRTQARLKHCLQILKAYGLIPQDATKEYFHTTKGDKQPLKLRVDGLDRLLNDREWALVLYSLCKRRGYIPHGEDNQDKSSEGGKVLSALAANKEAIAETSCRTVGEWLAQQPQSRNRGGNYDKCVTHAQLIEETHILFDAQRSFGSKYASPEFEAAYIEVCDWERSRKDFDRRTYDLVGHCSYFPTEKRAARCTLTSELVSAYGALGNITIIHENGTSRALSATERDECIAILFSCEPIRGNKDCAVKFGALRKAIDLSSGDYFKGVPAADEKTREVYKPKGWRVLRNTLNAANPILLQRLRDDRNLADAVMEAVAYSSALPVLQERLQELPLSEAEIEALCKLPYSSKALNGYGNRSKKALDMLLDCLEEPEVLNLTQAENDCGLLGLRIAGAQLERSNRLMPYELWVERTGRTNNNPVVIRSMSQMRKVVNAICRKWGVPNEIHVELDRELRLPQRAKDEIAKANKKNEKNRERIAGQIAELRGCTTEEVTGKQIEKYRLWEEQECFDLYTGAKIEVDRLISDDTYTQIDHILPFSRTGENSRNNKVLVLAKSNQDKRGQTPYEWMSHDGAPSWDAFERRVQENQKLSRRKKNFLLEKDLDAKEGEFLARSFTDTAYMSREVCAYLADCLLFPDDGAKAHVVPTTGRATAWLRRRWGLNFGSNGEKDRSDDRHHATDACVIAACSRSLVIKTARINQETHWSITRGMNETQRHDAIMKALESVMPWETFANEVRAAHDFVVPTRFVPRKGKGELFEQTVYRYAGVNAQGKDIARKASSDKDIVMGNAVVSDDEKSIIKVSEMLCLRLWHDPEAKKGQGAWYADPVYKADIPALKDGTYVPRIARAAIGRKAWKLVPKSAMTKPPLEIYLGDLVQIGNFIGRFSGYNIANGSWSFIDRLTKEALSCPSVAKLNNNLFPTIIRESIIMRK

SEQ ID NO: 690 - protein, 1000 aa, unidentified
  REGION 1..1000: note = Description of Unknown: uncultivated organism with predicted taxonomy: Olsenella
  REGION 1..1000: note = MG14-14 effector
MDVTRPYLVLGLDPGIASCGFCLLDMSNHKILEMGSHLFKAPQEDKTKTSLAVTRRKARSIRRNTARTAARLKHCLELLAGAGLVPANADKTWLQTKKGDKPILKLRAGGLDRLLTDREFAQVLYSLCGRRGYIPHGEGRLGETDEDESRKVLGAIKKNQDAMAAGSYRTVGEMLNAQGRSRNRGGDYSLCVYNSQIQDEAKALFASQRARGNTKATRELEDSYLACLTWEKKSLDHDTRVYELVGPCSYFPGEKRAASADVSSELCRAYERLGHIVIVHEDGSEQALTASEIDDYLKILFSTAPIKGNKECKVSYGTIRKDLDISGKSVFKGIAQDREKDEPFVPKAWRSLRRVLPKGLLARMLEDRKLGDAVCEALTFASSEASLVERLSDLDLSGDERDAILTVPFTGKLFKGYGSRSLKALGLLLGAFEEPEIRILTDAEKVTGLLDLRLSDRGVRGQLLPPYDSYDPTCRNPVVLRAMGRMRHIVNAIIRIHGVPDEIHIELGRELKMSNKEKSLVDKRNRENAANNKKWAATAAGILGCTPEEVPGRIIRKLILREEQGEKDLYTGEPIDLEHLVRDDRYCEIDHILPYSRTCDDGRANKVLVLSKSNQDKRERTPYEWMTSGEAGAPSWDSYRARVMAQVKNPRKRANYLNTDLGPETQAKFLARNLNDDRYMSVAVKNYLEDCLLFPEDGRKRHVTAVAGGATGNLRWVWGLNFGEGNVKDRADDRHHAIDAAIIAACSESTVKKVAEASAKGREAFKQLRKSRLADTQPWPTFATEVAARREFVVPTRMADHGVTGRVFEDTLYHLEGITDDKGKYPLVRAGEKTAKKGNVHFNPDGSVKLIDGMAFLRLWLDPTARPNGKVKGKWYAEPVYYADIPAIKAGTYVPRAIVQGIARINWEPIPQTALESKPLVLFKNDVLVVDGHIARYSNIGISVCQLLMLNLLTRDRVTDWPSVGSWGKDTQVRILQEDCLGHCYDSIAINPEDSTFQQR

SEQ ID NO: 691 - protein, 1005 aa, unidentified
  REGION 1..1005: note = Description of Unknown: uncultivated organism with predicted taxonomy: Coriobacteriales
  REGION 1..1005: note = MG14-15 effector
MEITINREIGKLGLPRHLVLGMDPGIASCGFALIDTANHEILDLGVRLFDSPTHPKTGQSLAVIRRGFRSTRRNIDRTQARLKHCLQILKAYGLIPQDATKEYFHTTKGDKQPLKLRVDGLDRLLNDREWALVLYSLCKRRGYIPHGEDNQDKSSEGGKVLSALAANKEAIAETSCRTVGEWLAQQPQSRNRGGNYDKCVTHAQLIEETHILFDAQRSFGSKYASPEFEAAYIEVCDWERSRKDFDRRTYDLVGHCSYFPTEKRAARCTLTSELVSAYGALGNITIIHENGTSRALSATERDECIAILFSCEPIRGNKDCAVKFGALRKALDLSSGDYFKGVPAADEKTREVYKPKGWRVLRNTLNAANPILLQRLRDDRNLADAVMEAVAYSSALPVLQERLQELPLSEAEIEALCKLPYSSKALNGYGNRSKKALDMLLDCLEEPEVLNLTQAENDCGLLGLRIAGAQLERSNRLMPYELWVERTGRTNNNPVVIRSMSQMRKVVNAICRKWGVPNEIHVELDRELRLPQRAKDEIAKANKKNEKNRERIAGQIAELRGCTTEEVTGKQIEKYRLWEEQECFDLYTGAKIEVDRLISDDTYTQIDHILPFSRTGENSRNNKVLVLAKSNQDKRGQTPYEWMSHDGAPSWDAFERRVQENQKLSRRKKNFLLEKDLDAKEGEFLARSFTDTAYMSREVCAYLADCLLFPDDGAKAHVVPTTGRATAWLRRRWGLNFGSNGEKDRSDDRHHATDACVIAACSRSLVIKTARINQETHWSITRGMNETQRHDAIMKALESVMPWETFANEVRAAHDFVVPTRFVPRKGKGELFEQTVYRYAGVNAQGKDIARKASSDKDIVMGNAVVSDDEKSIIKVSEMLCLRLWHDPEAKKGQGAWYADPVYKADIPALKDGTYVPRIARAAIGRKAWKLVPKSAMTKPPLEIYLGDLVQIGNFIGRFSGYNIANGSWSFIDRLTKEALSCPSVAKLNNNLFPTIIRESIIMRK

SEQ ID NO: 692 - protein, 1046 aa, unidentified
  REGION 1..1046: note = Description of Unknown: uncultivated organism with predicted taxonomy: Eggerthellales
  REGION 1..1046: note = MG14-16 effector
MDKALGTDIGELGFDPGTFATALMTLEEFRSKDRVIWAGLDIGVASTGLCLVDVLNHEIVLMASHLFKSPVVDKKKATAAPESLASVRRGARSVRRNIMREGRRKKAIRAALSDFGLIPADAGGEWFAARRDERTVVRLRPKALEYLLNSREFARVLYSFASHRGYIDHGKSDKDDDAGKVKKALAANHAALADGGCKTFGQYLAGQPRSRNRPGNYSYTADIDMTVDEVRTIFARQRELGSEIASEALEERYIAELTWLTDTSKRDMSTYLKVSLCTYLGAPYRRGATSTISFEMVRAHQTLCNTVILHADGTSSTIPGNIRIEIVRELFAVKKSVKPLKWSGLRRRLGLAECDSFKGSPAEEEKRDCIALPAWAVLCSGLYEGHRDLLERLHDHIDDADAVCSALTYATSAASLAGRLAPLALTDDEVEAIIDLPYSARLFSGYASASLEALQMLRGTLEDPCVTSLRQAEEDSGLAQARAMLAEERGGAADGLLCAFSDYDPTCKNPVVLRATAQVRRMVNSAIRHYGLPDVIRVEVARELKRSKHEREVVAESNRARRELNEQAKRDIVEFLGLPDDHHVRGRDLDMVKLYREQGGKDPYTGAGIDFRRMLEEHGYAEIDHILPISRTCDDSQANKVLCLTKSNRDKSNRSPYEWMTSGEAAAPDWDEFCGRMDRWAKMCEPRRYVRKKLANLTCENLAEHAEDFIKRNLNDTRYMSAALAKWLRECLPFARDGHEHVFCVAGGATALMRSVWDIGITGPDGKKNRDDDRHHAVDAAVIACCTPGIVKNVALVNEGHARADVRQRLFSDSLPYPEFKEQVNAWIPCIVPTLTLPNTVTGSVLKDTVYPYLGRDEAGKDLYLTVKRDKDGRIVERKVNKATTMWKDGQGGCRAYGSMRALDAVFDASAGKRGRWSFDPVYCIDIPHRDAERRTIRAFSKEKAIDLWDTVEVPEAAPRMTIRRGDVLVCDGKAARFHCFDISVNAIRLFSQRGGKQLQATGPLSAEAFPPPSKWGEGVRVMQEDCLGLCWLSFLAQRAADMQSE

SEQ ID NO: 693 - protein, 1005 aa, unidentified
  REGION 1..1005: note = Description of Unknown: uncultivated organism with predicted taxonomy: Collinsella
  REGION 1..1005: note = MG14-17 effector
MEITINREIGKLGLPRHLVLGMDPGIASCGFALIDTANHEILDLGVRLFDSPTHPKTGQSLAVIRRGFRSTRRNIDRTQARLKHCLQVLKAYGLIPQDATKEYFHTTKGDKQPLKLRVDGLERLLNDREWALVLYSLCKRRGYIPHGEGNQDKSSEGGKVLSALAANKEAIAGTSCRTVGEWLAQQPQSRNRDGNYDKCVTHAQLIEETHILFTAQRSFGSKYASPEFEAAYIEVCDWERSRKDFDRRTYDLVGHCSYFPTEKRAARCTLTSELVAAYGALGNITIIHEDGTSRALSATERDECIAILFSCEPIRGNKDCAVKFGALRKALDLSSGDYFKGVPAADEKTREAYKPKGWRVLRNTLNAANPILLQRLRDDRDLADAVMEAVAYSSALPVLQERLQELPLSEAEIEALCKLPYSSKALNGYGNRSKKALDMLLDCLEEPEVLNLTQAENDCGLLGLRIAGAQLERSNRLMPYELWVERTGRTNNNPVVIRSMSQMRKVVNAICRKWGVPNEIHVELDRELRLPQRAKDEIAKANKKNEKNRERIAGQIAELRGCTTEEVTGKQIEKYRLWEEQECFDLYTGAKIEVDRLISDDTYTQIDHILPFSRTGENSRNNKVLVLAKSNQDKRGQTPYEWMSHDGAPSWDAFERRVQENQKLSRRKKNFLLEKDLDAKEGEFLARSFTDTAYMSREVCAYLADCLLFPDDGAKAHVVPTTGRATAWLRRRWGLNFGSNGEKDRSDDRHHATDACVIAACSRSLVIKTARINQETHWSITRGMNETQRHDAIMKALESVMPWETFANEVRAAHDFVVPTRFVPRKGKGELFEQTVYRYAGVNAQGKDLARKVGSDKDIVMGNAVVSADEKSVVKVSEMLCLRLWHDPEAKKGQGAWYADPVYKADIPALKDGTYVPRIARAAIGRKAWKLVPKSAMTKPPLEIYLGDLVQIGNFIGRFSGYNIANGSWSFIDRLTKEALSCPSVAKLNNNLFPTIIRESIIMRK

SEQ ID NO: 694 - protein, 1000 aa, unidentified
  REGION 1..1000: note = Description of Unknown: uncultivated organism with predicted taxonomy: Olsenella
  REGION 1..1000: note = MG14-18 effector
MDVTRPYLVLGLDPGIASCGFCLLDMSNHKILEMGSHLFKAPQEDKTKTSLAVTRRKARSIRRNTARTAARLKHCLELLAGAGLVPADADKTWLQTKKGDKPILKLRAGGLDRLLTDREFAQVLYSLCGRRGYIPHGEGRLGETDEDESRKVLGAIKKNQDAMAAGSYRTVGEMLNTQGRSRNRGGDYSLCVYNSQIQDEAKALFASQRARGNTKATRELEDSYLACLTWEKKSLDHDARIYELVGPCSYFPGEKRAASADVSSELCRAYERLGHIVIVHEDGSEQALTASQIDGYLKILFSTAPIKGNKECKVSYGTIRKDLDISGKSVFKGVAQDKEKDETFAPKAWRCLRRVLPEELLARMLEDRKLGDAVCEALTFASSEASLIERLSDLGLSDDERDAILAVPFTGKLFKGYGSRSLKALDLLLGAFEEPEIRILTDAEKVTGLLDLRLSDRGVRGQLLPPYDSYDPTCRNPVVLRAMGRMRHIVNAIIRIHGVPDEIHIELGRDLKMSNKEKKQVEKRNRENAANNKKWATTAAGILGCTPEEVPGRIIRKLILREEQGEKDLYTGDSIDLEHLVRDDRYCEIDHILPYSRTCDDSRANKVLVLSKSNQDKRERTPYEWMTSGEAGAPSWDSYRARVMAQVKNPRKRANYLNTDLGPETQAKFLARNLNDDRYMSVAVKNYLEDCLLFPEDGRKRHVTAVAGGATGNLRWVWGLNFGEGNIKDRADDRHHAIDAAIIAACSESTVKKVAEASAKGREAFKQLRKSRLADTQPWPTFATEVAARREFVVPTRMADHGVTGRVFEDTLYHLEGITDDKGKYPLVRAGEKTAKKGNVHFNPDGSVKLIDGMAFLRLWLDPTARPNGKVKGKWYAEPVYYADIPAIKAGTYVPRACAIHIARVNWEPVPEAAMGANPVIVFFGDVLSVDDHVGRFGGFDIFGGRLALLNLLTKQKVSDWPSLGSWGKDTQVRVLQEDCLGHCYDSIAINPEGSTFQQR

SEQ ID NO: 695 - protein, 1005 aa, unidentified
  REGION 1..1005: note = Description of Unknown: uncultivated organism with predicted taxonomy: Coriobacteriales
  REGION 1..1005: note = MG14-19 effector
MEITINREIGKLGLPRHLVLGMDPGIASCGFALIDTANHEILDLGVRLFDSPTHPKTGQSLAVIRRGFRSTRRNIDRTQARLKHCLQVLKAYGLIPQDATKEYFHTTKGDKQPLKLRVDGLERLLNDREWALVLYSLCKRRGYIPHGEGNQDKSSEGGKVLSALAANKEAIAGTSCRTVGEWLAQQPQSRNRGGNYDKCVTHAQLIEETHILFTAQRSFGSKYASPEFEAAYIEVCDWERSRKDFDRRTYDLVGHCSYFPTEKRAAHCTLTSELVAAYGALGNITIVHEDGTSRALSATERDECIAILFSCEPIRGNKDCAVKFGALRKALDLSSGDYFKGVPAADEKTREVYKPKGWRTLRNTLDTANPILLQRLRDDRDLADAVMEAVAYSSALPVLQERLQELPLSEAEIEALCKLPYSSKALNGYGNRSKKALDMLLDCLEEPEVLNLTQAENDCGLLGLRIAGAQLERSNRLMPYELWVERTGRTNNNPVVIRSMSQMRKVVNAICRKWGVPNEIHVELDRELRLPQRAKDEIAKANKKNEKNRERIAGQIAELRGCTTEEVTGKQIEKYRLWEEQECFDLYTGAKIEVDRLISDDTYTQIDHILPFSRTGENSRNNKVLVLAKSNQDKRGQTPYEWMSHDGAPSWDAFERRVQENQKLSRRKKNFLLEKNLDAKEGEFLARSFTDTAYMSREVCAYLADCLLFPDDGAKAHVVPTTGRATAWLRRRWGLNFGSNGEKDRSDDRHHATDACVIAACSRSLVIKTARINQETHWSITRGMNETQRHDAIMKALESVMPWETFANEVRAAHDFVVPTRFVPRKGKGELFEQTVYRYAGVNAQGKDIAHKASSDKDIVMGNAVVSDDEKSIIKVSEMLCLRLWHDPEAKKGQGAWYADPVYKADIPALKDGTYMPRIAKAHTGRKAWKPVPESAMTKPPLEIYLGDLVQIGDFIGRFSGYNIANANWSFVDRLTKEALGCPTVVKLDNKLAPVIIRESIIMRH

SEQ ID NO: 696 - protein, 1005 aa, unidentified; identical to SEQ ID NO: 688
  REGION 1..1005: note = Description of Unknown: uncultivated organism with predicted taxonomy: Coriobacteriales
  REGION 1..1005: note = MG14-20 effector

SEQ ID NO: 697 - protein, 1000 aa, unidentified
  REGION 1..1000: note = Description of Unknown: uncultivated organism with predicted taxonomy: Olsenella sp. KH3B4
  REGION 1..1000: note = MG14-21 effector
MDVTRPYLVLGLDPGIASCGFCLLDMSNHKILEMGSHLFKAPQEDKTKTSLAVTRRKARSIRRNTARTAARLKHCLELLAGAGLVPADADKTWLQTKKGDKPILKLRAGGLDRLLTDREFAQVLYSLCGRRGYIPHGEGRLGETDEDESRKVLGAIKKNQDAMAAGSYRTVGEMLNTQGRSRNRGGDYSLCVYNSQIQDEAKALFASQRARGNTKATRELEDSYLACLTWEKKSLDHDARIYELVGPCSYFPGEKRAASADVSSELCRAYERLGHIVIVHEDGSEQALTASQIDGYLKILFSTAPIKGNKECKVSYGTIRKDLDISGKSVFKGVAQDKEKDETFAPKAWRCLRRVLPEELLARMFEDRQLGDAVCEALTFASSEASLIERLSDLGLSDDERDAILAVPFTGKLFKGYGSRSLKALGLLLGAFEEPEIRILTDAEKVTGLLDLRLSDRGVRGQLLPPYDSYDPTCRNPVVLRAMGRMRHIVNAIIRIHGVPDEIHIELGRELKMSNKEKSLVDKRNRENAANNKKWAATAAGILGCTPEEVPGRIIRKLILREEQGEKDLYTGEPIDLEHLVRDDRYCEIDHILPYSRTCDDGRANKVLVLSKSNQDKRERTPYEWMTSGEAGAPSWDSYRARVMAQVKNPRKRANYLNTDLGPETQAKFLARNLNDDRYMSVAVKNYLEDCLLFPEDGRKRHVTAVAGGATGNLRWVWGLNFGEGNIKDRADDRHHAIDAAIIAACSESTVKKVAEASAKGREAFKQLRKSRLADTQPWPTFATEVAARREFVVPTRMADHGVTGRVFEDTLYHLEGITDDKGKYPLVRAGEKTAKKGNVHFNPDGSVKLIDGMAFLRLWLDPTARPNGKVKGKWHAEPVYYADIPAIKAGTYVPRAIVQGIARINWEPIPQTALESKPLVLFKNDVLVVDGHIARYSNIGISVCQLLMLNLLTRDRVTDWPSVGSWGKDTQVRILQEDCLGHCYDSIAINPEDSTFQQR

SEQ ID NO: 698 - protein, 1005 aa, unidentified; identical to SEQ ID NO: 693
  REGION 1..1005: note = Description of Unknown: uncultivated organism with predicted taxonomy: Collinsella
  REGION 1..1005: note = MG14-22 effector

SEQ ID NO: 699 - protein, 1005 aa, unidentified; identical to SEQ ID NO: 688
  REGION 1..1005: note = Description of Unknown: uncultivated organism with predicted taxonomy: Collinsella
  REGION 1..1005: note = MG14-23 effector

SEQ ID NO: 700 - protein, 1003 aa, unidentified
  REGION 1..1003: note = Description of Unknown: uncultivated organism with predicted taxonomy: Collinsella
  REGION 1..1003: note = MG14-24 effector
MTSTVNREIGKLGLPRHLVLGMDPGIASCGFALIDINNHEILEIGVRLFDSPTHPKTGQSLAVIRRGFRSTRRNIDRTQARLKHCLEVLEKYDVIPQDATKEFFHTTKGDKQPLKLRVEGLDRLLTNREWALVLYSLCKRRGYIPHGEGSQDKSSEGGKVLSALAANKEAFAETSCRTVGEWLAQQPQSRNRGGNYDKCVTHAQLIEETRVLFEAQRNFGSQYASAELEEAYVQVCDWERSRKDFDRRSYDLVGYCTYFPTEKRAARCTLTSELVAAYGALGNITIVHEDGTTRTLTAAERDKCIAILFSCEPIRGNKDCAVKFGALRRELDLNSGDYFKGVPAADEKTREVYKPKGWRALRNTLNTTSPFLLRRLYDDRDLADSVMEAVAYSSALPVLEEQLQALPLSPAEIDALCKLPYSSKALNGYGNRSKKALDMLLDCLEDSEVLGLTQAEDDCGLLGLRIQGSQLERSERLMPYEMWVELTGRTNNNPVVIRSMSQMRKVVNAICRKWGVPNEIHIELDRELRLPQRAKDDIAKAHKKNEKNRERIAGQIAELRGCNPEDVSGRLIEKYRLWEEQECFDLYTGAKIEVDRLISDETYTQIDHILPFSRTGENSPSNKVLVLAKSNQDKREQTPFEWMSKEGAPSWDAFKRRVEENQKLGRRKKNFLLEEDLEAKEGEFLTRSFTDTAYMSREVCAYLADCLLFPEDGTKSHVVPTTGRATAWLRRRWGLNFGTNGEKDRSDDRHHATDACVIAACSRSLVIKTAKISEQTHWTVTKNLDKDERDHLRMKALENVMPWETFANEVRASHDFVIPTRFVPRKGKGELFEQTTYRYAGVNDKGKDLARKANSDQDIVMGNAVVSDDGKSVIKVSEMLCLRLWHDPEAKKGQGCWYADPVYKADIPALKAGTYVPKIAKAHTGRKAWKPVPESAMKHAPLEIYLGDLVKIGDFIGRFSGYNIDNANWSFTDRLTRQKLSCPTVGKLNNALIPVIIRESSIR

SEQ ID NO: 701 - protein, 1002 aa, unidentified
  REGION 1..1002: note = Description of Unknown: uncultivated organism with predicted taxonomy: Olsenella
  REGION 1..1002: note = MG14-25 effector
MDVTRPYLVLGLDPGIASCGFCLLDMSNHKILEMGSHLFKAPQEDKTKTSLAVTRRKARSIRRNTARTAARLKHCLELLAGAGLVPADADKTWLQTKKGDKPILKLRAGGLDRLLTDREFAQVLYSLCGRRGYIPHGEGRLGETDEDESRKVLGAIKKNQDAMAAGSYRTVGEMLNTQGRSRNRGGDYSLCVYNSQIQDEAKALFASQRARGNTKATRELEDSYLACLTWEKKSLDHDARIYELVGPCSYFPGEKRAASADVSSELCRAYERLGHIVIVHEDGSEQALTASQIDGYLKILFSTAPIKGNKECKVSYGTIRKDLDISGKSVFKGVAQDKEKDETFAPKAWRCLRRVLPEELLARMFEDRQLGDAICEALTFASSEASLVERLSDLDLSGDERDAILTVPFTGKLFKGYGSRSLKALGLLLGAFEEPEIRILTDAEKVTGLLDLRLSDRGVRGQLLPPYDSYDPTCRNPVVLRAMGRMRHIVNAIIRIHGVPDEIHIELGRELKMSNKEKSLVDKRNRENAANNKKWAATAAGILGCTPEEVPGRIIRKLILREEQGEKDLYTGEPIDLEHLVRDDRYCEIDHILPYSRTCDDGRANKVLVLSKSNQDKRERTPYEWMTSGETSAPSWDSYRARVMAQVKNPRKRANYLNTDLGPETQAKFLARNLNDDRYMSVAVKNYLEDCLLFPEDGRKRHVTAVAGGATGNLRWVWGLNFGEGNVKDRADDRHHAIDAAIIAACSESTVKKIAEASSKGREAFKKQRESRLADTQPWPTFADEVKARRAFVVPTRMADHGVTGRVFEDTLYHLEGITADKGKYPLVRAGEKTVKKGNVRINSDGSVKLIDGMAFLRLWLDPTARPNGKVKGKWYAEPVYYADIPAIKAGTYVPRACTIHVARVNWEPVPESAMASEPVVVFFGDVLVVDDKIGRYWSMGITNCAMEIRSLLNGSNLASGFPGTLNGWGKDTQVRVLQEDCLGHCYDGISINPEDSTFQQR

SEQ ID NO: 702 - protein, 1005 aa, unidentified
  REGION 1..1005: note = Description of Unknown: uncultivated organism with predicted taxonomy: Coriobacteriia
  REGION 1..1005: note = MG14-26 effector
MEITINREIGKLGLPRHLVLGMDPGIASCGFALIDTANHEILDLGVRLFDSPTHPKTGQSLAVIRRGFRSTRRNIDRTQARLKHCLQVLKAYGLIPQDATKEYFHTTKGDKQPLKLRVDGLERLLNDREWALVLYSLCKRRGYIPHGEGNQDKSSEGGKVLSALAANKEAIAGTSCRTVGEWLAQQPQSRNRGGNYDKCVTHAQLIEETHILFTAQRSFGSKYASPEFEAAYIEVCDWERSRKDFDRRTYDLVGHCSYFPTEKRAARCTLTSELVAAYGALGNITIIHEDGTSRALSATERDECIAILFSCEPIRGNKDCAVKFGALRKALDLSSGDYFKGVPAADEKTREVYKPKGWRTLRNTLDTANPILLQRLRDDRDLADAVMEAVAYSSALPVLQERLQELPLSEAEIEALCKLPYSSKALNGYGNRSKKALDMLLDCLEEPEVLNLTQAENDCGLLGLRIAGAQLERSNRLMPYELWVERTGRTNNNPVVIRSMSQMRKVVNAICRKWGVPNEIHVELDRELRLPQRAKDEIAKANKKNEKNRERIAGQIAELRGCTTEEVTGKQIEKYRLWEEQECFDLYTGAKIEVDRLISDDTYTQIDHILPFSRTGENSRNNKVLVLAKSNQDKRGQTPYEWMSHDGAPSWDAFERRVQENQKLSRRKKNFLLEKDLDAKEGEFLARSFTDTAYMSREVCAYLADCLLFPDDGAKAHVVPTTGRATAWLRRRWGLNFGSNGEKDRSDDRHHATDACVIAACSRSLVIKTARINQETHWSITRGMNETQRHDAIMKALESVMPWETFANEVRAAHDFVVPTRFVPRKGKGELFEQTVYRYAGVNAQGKDIARKASSDKDIVMGNAVVSDDEKSIIKLSEMLCLRLWHDPEAKKGQGAWYADPVYKADIPALKDGTYVPRIARAAIGRKAWKLVPKSAMTKPPLEIYLGDLVQIGNLFGRFSGYNIANGSWSFIDRLTKEALSCPSVAKLNNNLFPTIIRESIIMRK

SEQ ID NO: 703 - protein, 1005 aa, unidentified; identical to SEQ ID NO: 693
  REGION 1..1005: note = Description of Unknown: uncultivated organism with predicted taxonomy: Collinsella
  REGION 1..1005: note = MG14-27 effector

SEQ ID NO: 704 - protein, 1009 aa, unidentified
  REGION 1..1009: note = Description of Unknown: uncultivated organism with predicted taxonomy: Collinsella
  REGION 1..1009: note = MG14-28 effector
MAAFEDPRGHGFDPDLVRTALMSREQFSSKHRKLILGIDMGIADVGVCLMDELNHEIILMAAHLFDCPWNPKTKTSLASARRQARSQRRNIARRAARKKHIREILMAHDVIPEGATAEWFSVRKGDQDNIQLRVKGLSEVLDSRELARVLYGFAGRRGYIDHGKADNDKDAGKVKKALKTNAEIMEANGYETFAQYLITQPKIRNRQDDYTHCVDLDMVVDEVHAIFRHQRELGSNLATESLEGEYLAALRWLTDTTKRDRIIYSKVGYCTYLGEPIKRAPKSSISSEMVRAYQTLANVKIEHIGGPATQIAPAVRNQIVHELFKVSKKPKPLKWSQLRKKLDLDDTATFAGIRQSDEKKDICVKAPGWNTLCSTLHDLNPTLLNRLHDDIDLADAACAAATFASSSESFATRISELTDELSKEDVEALLELPYGSKLFTGYGSTSLKALQMLRDAFEDTSINRLHDAEVATGLYDARKALAAKHNVPDDGLLKPYSSYSPICTNPVVLRSCAQLRRIINSIIRHYGLPDTIRVEVAKELKHTKHEKKLVDDGNKYNKREKEKAADDIVEYLGLSSADQVRGRDIDKVRLYNEQGGKDLYTGQGIDFGRMLTEKGYVEIDHILPYSRSCDNSRTNKVLVLTKSNRDKANRTPYEWMTSGEPTAPNWDEFCIRMDVWASGKEPKHYYSSKLAKLKEDNFTNNIDSFISRNLNDTRYMSKDVAKWLTDCLPFPEDGRKHVFCVSGVATALMRGIWRIGILDDDGKKNREDDRHHAVDAAVIAACTPSIVRGIALISEEHATHRDADRLLNRSLPYPEYRDQVKAWIPCIVPTYSPNRTATGALFEENTYSYRGVNEKGKDLIKKKKGKLGPCTTAWKDGKGSAKAYDKQYSLLAVYDESTLRWLIDPLYYIDVQKRKHEEPFMRKFSKNLSIDYWEKIPLTGTERALFLKPGVVLTQDGLVGRLHSYDISDNKVRMYYARGETSFQKTGPLAGEKFPTFSKWTDNLKVMQE

SEQ ID NO: 705 - protein, 1005 aa, unidentified
  REGION 1..1005: note = Description of Unknown: uncultivated organism with predicted taxonomy: Coriobacteriales
  REGION 1..1005: note = MG14-29 effector
MEITINREIGKLGLPRHLVLGMDPGIASCGFALIDTANHEILDLGVRLFDSPTHPKTGQSLAVIRRGFRSTRRNIDRTQARLKHCLQVLKAYGLIPQDATKEYFHTTKGDKQPLKLRVDGLERLLNDREWALVLYSLCKRRGYIPHGEGNQDKSSEGGKVLSALAANKEAIAGTSCRTVGEWLAQQPQSRNRDGNYDKCVTHAQLIEETHILFTAQRSFGSKYASPEFEAAYIEVCDWERSRKDFDRRTYDLVGHCSYFPTEKRAAHCTLTSELVAAYGALGNITIIHEDGTSRALSATERDECIAILFSCEPIRGNKDCAVKFGALRKALDLSSGDYFKGVPAADEKTREVYKPKGWRTLRNTLDTANPILLQRLRDDRDLADAVMEAVAYSSALPVLQERLQELPLSEAEIEALCKLPYSSKALNGYGNRSKKALDMLLDCLEEPEVLNLTQAENDCGLLGLRIAGAQLERSNRLMPYELWVERTGRTNNNPVVIRSMSQMRKVVNAICRKWGVPNEIHVELDRELRLPQRAKDEIAKANKKNEKNRERIAGQIAELRGCTTEEVTGKQIEKYRLWEEQECFDLYTGAKIEVDRLISDDTYTQIDHILPFSRTGENSRNNKVLVLAKSNQDKRGQTPYEWMSHDGAPSWDAFERRVQENQKLSRRKKNFLLEKDLDAKEGEFLARSFTDTAYMSREVCAYLADCLLFPDDGAKAHVVPTTGRATAWLRRRWGLNFGSNGEKDRSDDRHHATDACVIAACSRSLVIKTARINQETHWSITRGMNETQRHDAIMKALESVMPWETFANEVRAAHDFVVPTRFVPRKGKGELFEQTVYRYAGVNAQGKDIARKASSDKDIVMGNAVVSDDEKSIIKVSEMLCLRLWHDPEAKKGQGAWYADPVYKADIPALKDGTYMPRIAKAHTGRKAWKPVPESAMTKPPLEIYLGDLVQIGDFIGRFSGYNIANANWSFVDRLTKEALGCPTVVKLDNKLAPVIIRESIIMRH

SEQ ID NO: 706 - protein, 1005 aa, unidentified; identical to SEQ ID NO: 695
  REGION 1..1005: note = Description of Unknown: uncultivated organism with predicted taxonomy: Collinsella
  REGION 1..1005: note = MG14-30 effector

SEQ ID NO: 707 - protein, 1001 aa, unidentified
  REGION 1..1001: note = Description of Unknown: uncultivated organism with predicted taxonomy: Coriobacteriia bacterium
  REGION 1..1001: note = MG14-31 effector
MVSPKTTFSERESNYLVLGLDIGIGSCGWCILDKAHNIIVDMGVRLWSPPQENKTKASLASTRRAARSSRRNCKRTKDRKKHCFKLFKAEGIAPSDAEANWVQTKAGEKPTIKLRAAGLNRKLSSREWAQVLYSLCSRRGYIPHGESDDDSEGKAVLAAIKTQQEKLDNNEFRTVGELLANGTHCRNHSGDYSLCVSNNQIRNEVAALFEAQRKLGNKHASETFEQQYLECLTWQKSVTDHDEIIYSKVGPCTYFKQEKRAADSCLSSEMCKAFESICHVTYVDSDGVEGKLPPDIKQRAIDVWFSPTSLPKNKDCKVEYSDLRSWLKAELCIGDDFFFKGVERDDENSKEPFKPSRWRNQRKQLSPSLMLSMRNNRRLADGIDSALAYASSKESLQHQLDELPLSEVDIEELCSLSYSSRLYSGYGTRSLKALDLLIESFESDEVSTLAEAEKASGLLSLRQSSSTEKGFTLPPYIAFDPTCTNPVVLRVMGQVRKVINACIAEYGPFDEVHIELARELKQSAKEKDAILKSNNKTNKSREVLRKKLAEELSCDEDAIPFKLLEKIELWNQQDGRDLYVDEPIQYERLISDDSYCEIDHILPYSRTCDDSRMNKILVLQKSNQNKRESTPFEWMSATGDWDNFKLRILRLAHYPQKKKQRLLNTDLAEKQPEFIARNLNDTRYASLAAKRYIEEYLTFKDNGKSRHVIAVAGGATAALRNAWGIRKDRSEDNLHHAVDASIIAACDESTVIAIAKASERKALTPKDKRKELFSRTEPWQDFANEVLSRKEHIIPSFMTDHKVSGRIFEDTVYRFDGYNEAGTKGILTATKEGMPKSKPSGNYIVRDDGSAVIPDGLAFLRLWWDPTFKVRKGKEPGCYIPEPVFLSDLPKAFDCDYIPLIAPPQKDKKPREKWDSLSEELRNQKPVVLFRNDAIVIGSTVRRFAGFDIDGCSWTLLDPLGKMSQKEATKGLRISSIGPKTRFSVIHEDPLGKCFAPFLED

SEQ ID NO: 708 - protein, 839 aa, unidentified
  REGION 1..839: note = Description of Unknown: uncultivated organism with predicted taxonomy: Olsenella sp. KH3B4
  REGION 1..839: note = MG14-32 effector
MDVTRPYLVLGLDPGIASCGFCLLDMSNHKILEMGSHLFKAPQEDKTKTSLAVTRRKARSIRRNTARTAARLKHCLELLAGAGLVPANADKTWLQTKKGDKPILKLRAGGLDRLLTDREFAQVLYSLCGRRGYIPHGEGRLGETDEDESRKVLGAIKKNQDAMAAGSYRTVGEMLNAQGRSRNRGGDYSLCVYNSQIQDEAKALFASQRARGNTKATRELEDSYLACLTWEKKSLDHDTRVYELVGPCSYFPGEKRAASADVSSELCRAYERLGHIVIVHEDGSEQALTASEIDDYLKILFSTAPIKGNKECKVSYGTIRKDLDISGKSVFKGIAQDREKDEPFVPKAWRSLRRVLPKGLLARMLEDRKLGDAVCEALTFASSEASLIERLSDLGLSDDERDAILAVPFTGKLFKGYGSRSLKALGLLLGAFEEPEIRILTDAEKVTGLLNLRLSDRGVRGQLLPPYDSYDPPCRNPVVLRAMGRMRHIVNAIIRIHGVPDEIHIELGRDLKMSNKEKKQVEKRNRENAANNKKWATTAAGILGCTPEEVPGRIIRKLILREEQGEKDLYTGDSIDLEHLVRDDRYCEIDHILPYSRTCDDSRANKVLVLSKSNQDKRERTPYEWMTSGETSAPSWDSYRARVMAQVKNPRKRANYLNTDLGPETQAKFLARNLNDDRYMSVAVKNYLEDCLLFPEDGRKRHVTAVAGGATGNLRWVWGLNFGEGNVKDRADDRHHAIDAAIIAACSESTVKKVAEASTKGREAFKQLRKSRLADTQPWPTFATEVAARREFVVPTRMADHGVTGRVFEDTLYHLEGITEDKGKYPLVRAGENTVKKGN

SEQ ID NO: 709 - protein, 1005 aa, unidentified; identical to SEQ ID NO: 693
  REGION 1..1005: note = Description of Unknown: uncultivated organism with predicted taxonomy: Collinsella
  REGION 1..1005: note = MG14-33 effector

SEQ ID NO: 710 - protein, 1000 aa, unidentified
  REGION 1..1000: note = Description of Unknown: uncultivated organism with predicted taxonomy: Olsenella
  REGION 1..1000: note = MG14-34 effector
MDVTRPYLVLGLDPGIASCGFCLLDMSNHKILEMGSHLFKAPQEDKTKTSLAVTRRKARSIRRNTARTAARLKHCLELLAGAGLVPANADKTWLQTKKGDKPILKLRAGGLDRLLTDREFAQVLYSLCGRRGYIPHGEGRLGETDEDESRKVLGAIKKNQDAMAAGSYRTVGEMLNAQGRSRNRGGDYSLCVYNSQIQDEAKALFASQRARGNTKATRELEDSYLACLTWEKKSLDHDTRVYELVGPCSYFPGEKRAASADVSSELCRAYERLGHIVIVHEDGSEQALTASEIDDYLKILFSTAPIKGNKECKVSYGTIRKDLDISGKSVFKGIAQDREKDEPFVPKAWRSLRRVLPKGLLARMLEDRKLGDAVCEALTFASSEASLIERLSDLGLSDDERDAILAVPFTGKLFKGYGSRSLKALGLLLGAFEEPEIRILTDAEKVTGLLNLRLSDRGVRGQLLPPYDSYDPTCRNPVVLRAMGRMRHIVNAIIRIHGVPDEIHIELGRDLKMSNKEKKQVEKRNRENAASNKKWATTAAGILGCTPEEVPGRIIRKLILREEQGEKDLYTGDSIDLEHLVRDDRYCEIGHILPYSRTCDDSRANKVLVLSKSNQDKRERTPYEWMTSGETSAPSWDSYRARVMAQVKNPRKRANYLNTDLGPETQAKFLARNLNDDRYMSVAVKNYLEDCLLFPEDGRKRHVTAVAGGATGNLRWVWGLNFGEGNIKDRADDRHHAIDAAIIAACSESTVKKVAEASAKGREAFKQLRKSRLADTQPWPTFATEVAARREFVVPTRMADHGVTGRVFEDTLYHLEGITDDKGKYPLVRAGEKTAKKGNVHFNPDGSVKLIDGMAFLRLWLDPTARPNGKVKGKWYAEPVYYADIPAIKAGTYVPRAIVQGIARINWEPIPQTALESKPLVLFKNDVLVVDGHIARYSNIGISVCQLLMLNLLTRDRVTDWPSVGSWGKDTQVRILQEDCLGHCYDSIAINPEDSTFQQR

SEQ ID NO: 711 - protein, 1002 aa, unidentified
  REGION 1..1002: note = Description of Unknown: uncultivated organism with predicted taxonomy: Olsenella sp. KH3B4
  REGION 1..1002: note = MG14-35 effector
MERNRPYLVLGLDPGIGSCGFCLLDMTNHRILEMGSHLFDVPQEPKTKTSLAVTRRNARSIRRNTLRTRMRLKHCLGLLKDAGLVPQDADKNWLQSTKGDKPILKLRSCGLDRLLTDRELAQVLYSLCTRRGYIPHGEGRFGETDDVEGRKVLAAIKTNNKAMESGNYRTVGEMLHARGKSRNRGGNYDFCVLNSQIQDEVRTIFSAQRTLGNDRASTEFEEKYLDCLTWEKKTLDHDKRTYDLVGKCSYFPEERRAALACLSSELCRAYERLGHLVIVHEDNSEQVLTAQQIDVYLKVLFSPAPLKGNKDCKVTYSAIRRDLDLSGKSVFKGVSQEKEKDEVFAPKSWRRLRKTLPEDLMVRMRNNRELADDICEALTYASSEDSLLTQLEPLDLSENETEAVLGVPFSGKFFKGYGSRSRKALGILLGAFEEPEVRTLTDAEKATGLLDHRLANDTVRSVLLPPYVTYDETCRNPVVLRAMGRMRHVVNAIIRIHGVPDEIHIELGRDLKMSKREKDAVSKRQRQNEATNKKWAKTAAGILGCEPEEVPGKVIRKLAMREEQGEKDAYTNAPIDLERLVREDHYCEIDHILPYSRTSEDSRANKVLVLSKSNQDKRERTPYEWMTQDVGKPGVPNWDEYHARVVATVKHPRKRANLLNTDLGPETEAKFLARNLNDDRYMSVAVKNYLEDCLLFPDSDRKRHVTAIAGGATGNLRWVWGLNSGSNNTKDRSDDRHHAVDAAVIAACSEATVQKVARARSLGRETFKHMRKSRLADTQPWPTFADEVIARKEFVIPTRMADHGVTGRVFEDTLYHLEGFTDDKGKYPLVRAGQKTVKKGNVCISPDGSAKLIDGIAFVRLWLDPTARPNGKVKGKWYVEPVYYADIPAIRRGAYVPKACTIHVARTSWEPVPETALASRPITLYSGDVLRVDDHIGRYSSTDINGCRLVMLNLDSGNRVNDWPSIGSWGTTTQVQVLQEDCLGRCYGNVILHSDGSTFETR

SEQ ID NO: 712 - protein, 1003 aa, unidentified
  REGION 1..1003: note = Description of Unknown: uncultivated organism with predicted taxonomy: Coriobacteriales
  REGION 1..1003: note = MG14-36 effector
MEITINREIGKLGLPRHLVLGMDPGIASCGFALIDTANHEILDLGVRLFDSPTHPKTGQSLAVIRRGFRSTRRNIDRTQARLKHCLQILKAYGLIPQDATKEYFHTTKGDKQPLKLRVDGLDRLLNDREWALVLYSLCKRRGYIPHGEGNQDKSSEGGKVLSALAANKEAIAETSCRTVGEWLAQQPQSRNRGGNYDKCVTHAQLIEETHILFDAQRSFGSKYASPEFEAAYIEVCDWERSRKDFDRRTYDLVGHCSYFPTEKRAARCTLTSELVSAYGALGNITIIHENGTSRALSATERDECIAILFSCEPIRGNKDCAVKFGALRKALDLSSGDYFKGVPAADEKTREVYKPKGWRVLRNTLNAANPILLQRLRDDRNLADAVMEAVAYSSALPVLQEQLQGLPLSEAEIEALCRLPYSSKALNGYGNRSKKALDMLLDCLEEPEVLNLTQAENDCGLLGLRIAGAQLERSDRLMPYETWIERTGRTNNNPVVIRAMSQMRKVVNAICRKWGVPNEIHVELDRELRLPQRAKDEIAKANKKNEKNRERIAGQIAELRGCTADEVTGKQIEKYRLWEEQECFDLYTGAKIEVDRLISDDTYTQIDHILPFSRTGENSRNNKVLVLAKSNQDKREQTPYEWMSHDGAPSWDAFERRVQENQKLSRRKKNFLLEKDLDTKEGEFLARSFTDTAYMSREVCAYLADCLLFPDDGAKAHVVPTTGRATAWLRRRWGLNFGSNGEKDRSDDRHHATDACVIAACSRSLVIKTARINQETHWSITRGMNETQRRDAIMKALESVMPWETFANEVRAAHDFVVPTRFVPRKGKGELFEQTVYRYAGVNAQGKDLARKASSDKNIVMGNAVVSADEKSVIKVSEMLCLRLWHDPEAKKGQGAWYADPVYKADIPALKDGTYVPRIAKAHTGRKAWKPVPESAMKKPPLEIYLGDLVQIGDFVGRFSGYNIDNANWSFVDRLTRIKISCPTVGKLSNDMSPFVVRESPIK

SEQ ID NO: 713 - protein, 1038 aa, unidentified
  REGION 1..1038: note = Description of Unknown: uncultivated organism with predicted taxonomy: Coprococcus comes
  REGION 1..1038: note = MG14-37 effector
MVEYSDPRDFGFRPETVMTALMPYEQYSSKTRRLILGIDMGIASVGVCLIDIRNHEIILMASHIFKAPVEGKQKDISARQSGASIRRDYRSVRRTTKRRKNRKKAVREIEKKYILIPDDADGQWFAIRKGEPDVLHLRGKALLYKLNGRELARILYAFAGRRGYIDHGKGATDNDSGKVKKALSENRKILDENGYETIAQYLLKQPTSRNREGDYRYMVDIEMVTDEVHTIFRHQRDLGSDIATEGLEGEYLSALRWLTDTSARDEKIYSRVGYCTYLGAPEKRAASSLISFEMVRAYEKLSNIKIEHQGREATYISPEKRNEIVESLFAVSKNPKPLKWSQLREKLGMQSSDSFDSRLPTDEKSDCIKIPAWNALCTGLFTSNRALLDRLHDDTDIADAVCSALTYASSGESLRNALENLSLDLSEQDIDSLLDLPYASKLFSGYCSTGVRALQMLRDAFKDPQIEKLYDAEMATGLYEARQALAAERNESKDGLLCPYLEFDPTCTNPVVLRATAQVRRMINSIIRHYGLPDIIRVEVAKDLKRSKHEKAIIAATNKANKDSNEQAKKDLVAFYGLPNDAHVSSADFEKMWLYREQFGQDPYTGKGINLERMLNERDYVEIDHILPFSRSCDDSKSNKVLCLTKSNRDKANRTPYEWMTSGEPSAPDFGDFCRRMDAWAGKGKSAHYTKSKLSKLKNSTFGKEEQKFIDRNLNDTRYMSRQLAMWVRECLPFPDDRRQHVFCVAGAATSLMRRIWGIGIVDEKGKKDRSDDRHHAVDAAVIACCSPEIVKGIARVNSGRSNIKERERLRYESMPYPEFKAQVEAWIPCIVPTRTVSRTATGSLLKDTVYPYVGVDDRGKDLYRRNGKIEPASTLWKDGEGGCKLYDGVYGLAGVFDRTLKKSGSWRFDPIYYIDVPNVRQDFIRDFSKALSIDYWPKVQLKGNEPRIFLKQGDVLLQDGCAMRYYMYDVSYGGVKSYSRIGKESISLQKTGPLAEEPFPKQMKWDSSLTVMQEDCLGLCWLRFLSDRADQFENSPV

SEQ ID NO: 714 - protein, 1003 aa, unidentified
  REGION 1..1003: note = Description of Unknown: uncultivated organism with predicted taxonomy: Coriobacteriia bacterium
  REGION 1..1003: note = MG14-38 effector
MEITINREIGKLGLPRHLVLGMDPGIASCGFALIDTANHEILDLGVRLFDSPTHPKTGQSLAVIRRSFRSTRRNIDRTQARLKHCLQVFKAYGLIPQDATKEYFHTTKGDRQPLKLRVDGLDRPLSAREWALVLYSLCKRRGYIPHGEGNQDKSSEGRKVLSALAANKEAIAETSCRTVGEWLAQQPQSRNRGGNYDKCVTHAQLIEETHILFDAQRSFGSKYASPEFEAAYIEVCDWERSRKDFDRRTYDLVGHCPYFPTEKRAARCTLTSELVSAYGALGNITIIHENGTSRALNATERDECIAILFSCEPIRGNKDCAVKFGALRKALDLSSGDYFKGVPAADEKTREVYKPKGWRVLRNTLNAANPILLQRLRDDRDLADAVMEAVAYSSALPVLQERLQGLPLSEAEIEALCRLPYSSKALNGYGNRSKKALDMLLDCLEEPEVLNLTQAENDCGLLGLRIAGAQLERSDRLMPYETWVELTGRTNNNPVVIRSMSQMRKVVNAICRKWGVPNEIHVELDRELRLPQRAKDEIAKANKKNEKNRERIARQIAELRGCTADEVTGKQIEKYRLWEEQECFDLYTGAKIEVDRLISDDTYTQIDHILPFSRTGENSRSNKVLVLAKSNQDKREQTPYEWMSHDGAPSWDAFERRVQENQKLSRRKKNFLLEKDLDTKEGEFLARSFTDTAYMSREVCAYLADCLLFPDDGAKAHVVPTTGRATAWLRRRWGLNFGSNGEKDRSDDRHHATDACVIAACSRRLVIKTARINQEMHWSMTKGMSKAQRQDAIMKALENVMPWETFANEVRVAHDFVVPTRFVPRKGKGELFEQTVYRYAGVNAQGKDIARKASSDKDIVMGNAVVSADEKSVIKVSEMLCLRLWHDPKAKKGQGAWYADPVYKADIPALKDGTYVPRIAKAHTGRKAWKPVPESAMKKPPLEIYLGDLVQIGDFVGRFSGYNIDNANWSFVDRLTRIKTSCPTVGKLSNDMSPFVVRESPIK

SEQ ID NO: 715 - protein, 1002 aa, unidentified
  REGION 1..1002: note = Description of Unknown: uncultivated organism with predicted taxonomy: Collinsella
  REGION 1..1002: note = MG14-39 effector
MEITINREIGKLGLPRHLVLGMDPGIASCGFALIDTANHEILDLGVRLFDSPTHPKTGQSLAVIRRGFRSTRRNIDRTQARLKHCLQILKAYGLIPQDATKEYFHTTKGDKQPLKLRVDGLDRLLNDREWALVLYSLCKRRGYIPHGEGSQDKSSEGGKVLSALAANKEAIAETSCRTVGEWLAQQPQSRNRGGNYDKCVTHAQLIEETHILFDAQRSFGSKYASPEFEAAYIEVCDWERSRKDFDRRTYDLVGHCSYFPTEKRAARCTLTSELVSAYGALGNITIIHENGTSRALSATERDECIAILFSCEPIRGNKDCAVKFGALRKALDLSSGDYFKGVPAADEKTREVYKPKGWRVLRNTLNAANPILLQRLRDDRNLADAVMEAVAYSSALPVLQEQLQGLPLSEAEIEALCRLPYSSKALNGYGNRSKKALDMLLDCLEEPEVLNLTQAENDCGLLGLRIAGAQLERSDRLMPYETWIERTGRTNNNPVVIRAMSQMRKVVNAICRKWGVPNEIHVELDRELRLPQRAKDEIAKANKKNEKNRERIAGQIAELRGCTADEVTGKQIEKYRLWEEQECFDLYTGAKIEVDRLISDDTYTQIDHILPFSRTGENSRNNKVLVLAKSNQDKREQTPYEWMSHDGAPSWDAFERRVQENQKLSRRKKNFLLEKDLDTKEGEFLARSFTDTAYMSREVCAYLADCLLFPDDGAKAHVVPTTGRATAWLRRRWGLNFGSNGEKDRSDDRHHATDACVIAACSRSLVIKTARINQETHWSITRGMNETQRRDAIMKALESVMPWETFANEVRAAHDFVVPTRFVPRKGKGELFEQTVYRYAGVNAQGKDIARKASSDKDIVMGNAVVSADEKSVIKVSEMLCLRLWHDPEAKKGQGAWYADPVYKADIPALKDGTYVPRIAKAATGRKAWKAIPQNVLNSAPLEIYLGDLVQIGNQKGRFRGINIDTVSWSFVDALSKLPVKMPTIGRLNNETIPTVIRELLI

SEQ ID NO: 716 - protein, 1038 aa, unidentified
  REGION 1..1038: note = Description of Unknown: uncultivated organism
  REGION 1..1038: note = MG14-40 effector
MVEYSDPRDFGFRPETVMTALMPYEQYSSKTRRLILGIDMGIASVGVCLIDIRNHEIILMASHIFKAPVEGKQKDISARQSGASIRRGYRSVRRTTKRRKNRKKAVRDIEKKYVLIPDDADGQWFAIRKGEPDVLHLRGKALLYKLNGRELARILYAFAGRRGYIDHGKGTTDDDSGKVKKALSENRKILDENGYETIAQYLLKQPTSRNREGDYRYMVDIEMVTDEVHTIFRHQRDLGSDIATEELEGEYLSALRWLTDTSARDKKIYSRVGYCTYLGAPEKRAASSLISFEMVRAYEKLSNIKIEHQGREATYISPEKRNEIVESLFAVSKNPKPLKWSQLREKLGMQSSDSFDSRLPTDEKGDCIKIPAWNALCRGLFTSNRALLDWLHDDTDIADAVCSALTYASSGESLRNALENLSLDLSEQDIDSLLDLPYASKLFSGYCNTGVRALQMLRDAFKDPQIEKLYDAEMATGLYEARQALAAERNESKDGLLCPYLEFDPTCTNPVVLRATAQVRRMINSIIRHYGMPDIIRVEVAKDLKRSKHEKAIIAATNKANKDSNEQVKKDLVAFYGLPNDAHVSSTDFEKMWLYREQFGQDPYTGKGINLERMLNDRDYVEIDHILPFSRSCDDSKSNKVLCLTKSNRDKANRTPYEWMTSGEPSAPDFGDFCGRMDAWAGKGKSAHYTKSKLSKLKNSTFGKEEQKFIDRNLNDTRYMSRQLAMWVRECLPFPDDKRQHVFCVAGAATSLMRRIWGIGVVDEKGKTDRSDDRHHAVDGAVIACCSPEIVKGIARVNSGRSNIKERERLRYESMPYPEFKDQVEAWIPCIVPTRTVSRTATGSLLKDTVYPYVGVDDRGKDLYRRNGKIEPASTLWKDGSGGCKLYDGAYGLMAVFDESMKKSGSWRFDPIYYIDVPNVRQDFIREFTKGLSIDYWPKVQLKGDERRIFLKQGDVLLQDGCAMRYYMYNVSNGVVNSYSKIGEKSVPLQKTGPLSDESFPKQAKWDSSLTVMQEDCLGLCWLKFLSDRVGQFENSPV

SEQ ID NO: 717 - protein, 1003 aa, unidentified
  REGION 1..1003: note = Description of Unknown: uncultivated organism with predicted taxonomy: Collinsella
  REGION 1..1003: note = MG14-41 effector
MEITINREIGKLGLPRHLVLGMDPGIASCGFALIDTANHEILDLGVRLFDSPTHPKTGQSLAVIRRGFRSTRRNIDRTQARLKHCLQVFKAHGLIPQDATKEYFHTTKGDKQPLKLRVDGLDRLLSDREWALVLYSLCKRRGYIPHGEGNQDKSSEGGKVLSALAANKEAIAEASCRTVGEWLAQQPQSRNRGGNYDKCVTHAQLIEETHILFDAQRSFGSKYASPELEAAYIEVCDWERSRKDFDRRTYDLVGHCSYFPTEKRAARCTLTSELVSAYGALGNITIIHDDGTSRALSATERDECIAILFSCEPIRGNKDCAVKFGALRKALDLSSGDYFKGVPAADEKTREVYKPKGWRVLRNTLNAANPILLQRLRDDRDLADAVMEAVAYSSALPVLQERLQGLPLSEAEIEALCRLPYSSKALNGYGNRSKKALDMLLDCLEEPEVFNLTQAENDCGLLGLRIAGAQLERSDRLMPYELWAERTGRTNNNPVVIRSMSQMRKVVNAICRKWGVPNEIHVELDRELRLPQRAKDEIAKANKKNEKNRERIAGQIAELRGCTADEVTGKQIEKYRLWEEQECFDLYTGAKIEVDRLISDDTYTQIDHILPFSRTGENSRNNKVLVLAKSNQDKREQTPYEWMSHDGAPSWDAFERRVQENQKLSRRKKNFLLEKDLDAKEGDFLARSFTDTAYMSREVCAYLADCLQFPDDGAKAHVVPTTGRATAWLRRRWGLNFGSNGEKDRSDDRHHATDACVIAACSRSLVIKTARLNQETHWSITRGMNEIQRHDAIMKALESVMPWETFANEVRAAHDFVVPTRFVPRKGKGELFEQTVYRYAGVNAQGKDLARKAGSDKDIVMGNAVVSADEKSVIKVSEMLCLRLWHDPEAKKGQGAWYADPVYKADIPALKDGTYVPRIAKAHTGRKAWKPVPKSAMAKPPLEIYFDDLVQIGDFIGRFSGYNINSANWSFTDRLTRLNLSCPTVGQLNNDLSPVVIRESPIK

SEQ ID NO: 718 - protein, 1003 aa, unidentified
  REGION 1..1003: note = Description of Unknown: uncultivated organism with predicted taxonomy: Collinsella
  REGION 1..1003: note = MG14-42 effector
MEITINREIGKLGLPRHLVLGMDPGIASCGFALIDTANHEILDLGVRLFDSPTHPKTGQSLAVIRRGFRSTRRNIDRTQARLKHCLQVLKAYGLIPQDATKEYFHTTKGDKQPLKLRVDGLDRLLNDREWALVLYSLCKRRGYIPHGEGNQDKSSEGGKVLSALAANKEAIAETSCRTVGEWLAQQPQSRNRGGNYDKCVTHAQLIEETHILFDAQRSFGSKYASPEFEAAYIEVCDWERSRKDFDRRTYDLVGHCSYFPTEKRAARCTLTSELVSAYGALGNITIIHENGTSRALTATERDECIAILFSCEPIRGNKDCAVKFGALRKALDLSSGDYFKGVPAADEKTREVYKPKGWRVLRNTLNAANPILLQRLRDDRNLADAVMEAVAYSSALPVLQEQLQGLPLSEAEIEALCRLPYSSKALNGYGNRSKKALDMLLDCLEEPEVLNLTQAENDCGLLGLRIAGAQLERSDRLMPYETWIERTGRTNNNPVVIRAMSQMRKVVNAICRKWGVPNEIHVELDRELRLPQRAKDEIAKANKKNEKNRERIAGQIAELRGCTADEVTGKQIEKYRLWEEQECFDLYTGTKIEVDRLISDDTYTQIDHILPFSRTGENSRNNKVLVLAKSNQDKREQTPYEWMSHDGAPSWNAFERRVQENQKLSRRKKNFLLEKDLDTKEGEFLARSFTDTAYMSREVCAYLADCLLFPDDGAKAHVVPTTGRATAWLRRRWGLNFGSNGEKDRSDDRHHATDACVIAACSRSLVIKTARINQETHWSITRGMNETQRRDAIMKALESVMPWETFANEVRAAHDFVVPTRFVPRKGKGELFEQTVYRYAGVNAQGKDIARKASSDKDIVMGNAVVSADEKSVIKVSEMLCLRLWHDPEAKKGQGAWYADPVYKADIPALKDGTYVPRIAKAHTGRKAWKPVPKSAMKKPPLEIYLGDLVQIGDFVGRFSGYNIDNANWSFVDRLTRIKISCPTVGKLSNDMSPFVVRESPIK

SEQ ID NO: 719 - protein, 1003 aa, unidentified
  REGION 1..1003: note = Description of Unknown: uncultivated organism with predicted taxonomy: Collinsella
  REGION 1..1003: note = MG14-43 effector
MEITINREIGKLGLPRHLVLGMDPGIASCGFALIDTANHEILDLGVRLFDSPTHPKTGQSLAVIRRGFRSTRRNIDRTQARLKHCLQILKAYGLIPQDATKEYFHTTKGDKQPLKLRVDGLDRLLNDREWALVLYSLCKRRGYIPHGEGSQDKSSEGGKVLSALAANKEAIAETSCRTVGEWLAQQPQSRNRGGNYDKCVTHAQLIEETHILFDAQRSFGSKYASPEFEAAYIEVCDWERSRKDFDRRTYDLVGHCSYFPTEKRAARCTLTSELVSAYGALGNITIIHENGTSRALSATERDECIAILFSCEPIRGNKDCAVKFGALRKALDLSSGDYFKGVPAADEKTREVYKPKGWRVLRNTLNAANPILLQRLRDDRNLADAVMEAVAYSSALPVLQEQLQGLPLSEAEIEALCRLPYSSKALNGYGNRSKKALDMLLDCLEEPEVLNLTQAENDCGLLGLRIAGAQLERSDRLMRYETWIERTGRTNNNPVVIRAMSQMRKVVNAICRKWGVPNEIHVELDRELRLPQRAKDEIAKANKKNEKNSERIAGQIAELRGCTADEVTGKQIEKYRLWEEQECFDLYTGAKIEVDRLISDDTYTQIDHILPFSRTGENSRNNKVLVLAKSNQDKREQTPYEWMSHDGAPSWDAFERRVQENQKLSRRKKNFLLEKDLDTKEGEFLARSFTDTAYMSREVCAYLADCLLFPDDGAKAHVVPTTGRATAWLRRRWGLNFGSNGEKDRSDDRHHATDACVIAACSRSLVIKTARINQETHWSITRGMDETQRRDAIMKALESVMPWETFANEVRAAHDFVVPTRFVPRKGKGELFEQTVYRYAGVNAQGKDIARKASSDKDIVMGNAVVSADEKSVIKVSEMLCLRLWHDPEAKKGQGAWYADPVYKADIPALKDGTYVPRIAKAHTGRKAWKPVPESAMKKPPLEIYLGDLVQIGDFVGRFSGYNIDNANWSFVDRLTRIKISCPTVGKLSNDMSPFVVRESPIK

SEQ ID NO: 720 - protein, 761 aa, unidentified
  REGION 1..761: note = Description of Unknown: uncultivated organism with predicted taxonomy: Olsenella mediterranea
  REGION 1..761: note = MG14-44 effector
DFDRRTYDLVGHCSYFPTGKRAARCTLTSELVSAYGALGNITIIHENGTSRALSATERDECIAILFSCEPIRGNKDCAVKFGALRKALDLSSGDYFKGVPAADEKTREVYKPKGWRVLRNTLNAANPILLQRLRDDRDLADAVMEAVAYSSALPVLQEQLQGLPLSKAEIEALCRLPYSSKALNGYGNRSKKALDMLLDCLEEPEVLNLTQAENDCGLLGLRIAGAQLERSDRLMPYETWIEHTGRTNNNPVVIRSMSQMRKVVNAICRKWGVPNEIHVELDRELRLPQRAKDEIAKANKKNEKNRERIAGQIAELRGCTADEVTGKQIEKYRLWEEQECFDLYTGAKIEVDRLISDDTYTQIDHILPFSRTGENSRNNKVLVLAKSNQDKREQTPYEWMSHDGAPSWDAFERRVQENQKLSRRKKNFLLEKDLDAKEGDFLARSFTDTAYMSREVCAYLADCLQFPDDGAKAHVVPTTGRATAWLRRRWGLNFGSNGEKDRSDDRHHATDACVIAACSRSLVIKTARINQETHWSITRGMNETQRHDAIMKALESVMPWETFANEVRAAHDFVVPTRFVPRKGKGELFEQTVYRYAGVNAQGKDLARKVGSDKDIVMGNAVVSADEKSVVKVSEMLCLRLWHDPEAKKGQGAWYADPVYKADIPALKDGTYVPRIAKQKYGRKVWKAVPNSALTQKPLEIYLGDLIKVGDKLGRYNGYNIATANWSFVDALTKKEIAFPSVGMLSNELQPIIIRESILDN

SEQ ID NO: 721 - protein, 833 aa, unidentified
  REGION 1..833: note = Description of Unknown: uncultivated organism with predicted taxonomy: Collinsella
  REGION 1..833: note = MG14-45 effector
MEITINREIGKLGLPRHLVLGMDPGIASCGFALIDTANHEILDLGVRLFDSPTHPKTGQSLAVIRRGFRSTRRNIDRTQARLKHCLQVFKAHGLIPQDATKEYFHTTKGDKQPLKLRVDGLDRLLSDREWALVLYSLCKRRGYIPHGEGNQDKSSEGGKVLSALAANKEAIAEASCRTVGEWLAQQPQSRNRGGNYDKCVTHAQLIEETHILFDAQRSFGSKYASPELEAAYIEVCDWERSRKDFDRRTYDLVGHCSYFPTEKRAARCTLTSELVSAYGALGNITIIHDDGTSRALSATERDECIAILFSCEPIRGNKDCAVKFGALRKALDLSSGDYFKGVPAADEKTREVYKPKGWRVLRNTLNAANPILLQRLRDDRDLADAVMEAVAYSSALPVLQERLQGLPLSEAEIEALCRLPYSSKALNGYGNRSKKALDMLLDCLEEPEVFNLTQAENDCGLLGLRIAGAQLERSDRLMPYELWAERTGRTNNNPVVIRSMSQMRKVVNAICRKWGVPNEIHVELDRELRLPQRAKDEIAKANKKNEKNRERIAGQIAELRGCTADEVTGKQIEKYRLWEEQECFDLYTGAKIEVDRLISDDTYTQIDHILPFSRTGENSRNNKVLVLAKSNQDKREQTPYEWMSHDGAPSWDAFERRVQENQKLSRRKKNFLLEKDLDAKEGDFLARSFTDTAYMSREVCAYLADCLQFPDDGAKAHVVPTTGRATAWLRRRWGLNFGSNGEKDRSDDRHHATDACVIAACSRSLVIKTARLNQETHWSITRGMNEIQRHDAIMKALESVMPWETFANEVRAAHDFVVPTRFVPRKGKGELFE

SEQ ID NO: 722 - protein, 1003 aa, unidentified; identical to SEQ ID NO: 712
  REGION 1..1003: note = Description of Unknown: uncultivated organism with predicted taxonomy: Collinsella
  REGION 1..1003: note = MG14-46 effector

SEQ ID NO: 723 - protein, 767 aa, unidentified
  REGION 1..767: note = Description of Unknown: uncultivated organism with predicted taxonomy: Collinsella sp. AM13-34
  REGION 1..767: note = MG14-47 effector
YRGAPYRRGATSTTSFEMVRAHQTLANTVILHEDGTSSTIPGNTRIEIVRELFAVKKSVKPLKWSGLRRRLGLSDGDSFKGRPLEEEKRDCIALPAWAVLCSGLYEDHRDLLERLHDHIEDADAVCSALTYASSAASLAGRLSPLALTDDEVEAIIDLPYSARLFSGYASASLEALQMLRGTLEDPCVTSLRQAEEDSGLAQARAMLAEEHGEAADGLLCAFSDYDPTCKNPVVLRATAQVRRMVNSVIRHYGLPDVIRVEVARDLKRSKHEREIVAESNRARHELNEQAKRDIVEFLGLHDDDHVRGRDLDMVKLYREQGGKDPYTGTGIDFGRMLEERGYVEIDHILPISRTCDNSQANKVLCLTKSNRDKSNRSPYEWMTSGEATAPDWDEFCGRMERWAKMCEPRRYARKKLANLTCENLAERAGGFIDRNLNDTRYMSVALAKWLRECLPFARDGHEHVFRVAGGATALMRSVWDIGITGPDGKKNRDDDRHHAVDAAVISCCTPGIVKNVALVNEGHARADVRQRLFRDSLPYPEFKEQVNAWIPCIVPTLTLPNTVTGSVLKDTVYPYLGRDDAGKDLYLTVKRDKDGRIVDRKVNKATTMWKDGQGGWRAYGSMCALDAVFDASVGKRGKWSFDPVYCIDIPHREDEIRTIRAFSKERAIDLWDSIKVPEDAQRMRIRRGDVLVCDGKAARFYCFDISVNAIRLYSQRGGKQLQTTGPLSSEAFPPPSKWGDDIRVMQEDCLGLCWLSFLSNRAIAQMD

SEQ ID NO: 724 - protein, 1003 aa, unidentified
  REGION 1..1003: note = Description of Unknown: uncultivated organism with predicted taxonomy: Collinsella
  REGION 1..1003: note = MG14-48 effector
MEITINREIGKLGLPRHLVLGMDPGIASCGFALIDTANHEILDLGVRLFDSPTHPKTGQSLAVIRRGFRSTRRNIDRTQARLKHCLQILKAYGLIPQDATKEYFHTTKGDKQPLKLRVDGLDRLLNDREWALVLYSLCKRRGYIPHGEGNQDKSSEGGKVLSALAANKEAIAETSCRTVGEWLAQQPQSRNRGGNYDKCVTHAQLIEETHILFDAQRSFGSKYASPEFEAAYIEVCDWERSRKDFDRRTYDLVGHCSYFPTEKRAARCTLTSELVSAYGALGNITIIHENGTSRALSATERDECIAILFSCEPIRGNKDCAVKFGALRKALDLSSGDYFKGVPAADEKTREVYKPKGWRVLRNTLNATNPILLQRLRDDRNLADAVMEAVAYSSALPVLQEQLQGLPLSEAEIEALCRLPYSSKALNGYGNRSKKALDMLLDCLEEPEVLNLTQAENDCGLLGLRIAGAQLERSDRLMPYETWIERTGRTNNNPVVIRAMSQMRKVVNAICRKWGVPNEIHVELDRELRLPQRAKDEIAKANKKNEKNRERIAGQIAELRGCTADEVTGKQIEKYRLWEEQECFDLYTGAKIEVDRLISDDTYTQIDHILPFSRTGENSRNNKVLVLAKSNQDKREQTPYEWMSHDGAPSWDAFERRVQENQKLSRRKKNFLLEKDLDTKEGEFLARSFTDTAYMSREVCAYLADCLLFPDDGAKAHVVPTTGRATAWLRRRWGLNFGSNGEKDRSDDRHHATDACVIAACSRSLVIKTARINQETHRSITRGMNETQRRDAIMKALESVMPWETFANEVRAAHDFVVPTRFVPRKGKGELFEQTVYRYAGVNAQGKDIARKASSDKDIVMGNAVVSADEKSVIKVSGMLCLRLWHDPEAKKGKGAWYADPVYKADIPALKDGTYVPRIAKAHTGRKAWKPVPGSAMKKPPLEIYPGDLVQIGDFVGRFSGYNIDNANWSFVDRLTRIKISCPTVGKLSNDMSPFVVRESPIK

SEQ ID NO: 725 - protein, 755 aa, unidentified
  REGION 1..755: note = Description of Unknown: uncultivated organism with predicted taxonomy: Collinsella sp. AF20-14LB
  REGION 1..755: note = MG14-49 effector
RAASSLISFEMVRAYEKLSNIKIEHQGREATYISPEKRNEIVESLFAVSKNPKPLKWSQLREKLGMQSSDSFDSRLPADEKSDCIKIPAWNTLCTGLFTSNRALLDRFHDDTDVADAVCSALTYASSGESLRNALENLSLDLSEQDIDSLLDLPYASKLFSGYCSTGVRALQMLRDAFKDPQIEKLYDAEKATGLYEARQALAAERNESRDGLLCPYLEFDPTCTNPVVLRATAQVRRMINSIIRHYGLPDVIRVEVAKDLKRSKHEKAIIAATNKANKDSNEQAKKDLVAFYGLPNDAHVSSADFEKMWLYREQFGQDPYTGKGINLERMLNDRDYVEIDHILPFSRSCDDSKSNKVLCLTKSNRDKANRTPYEWMTSGEPSAPDFGDFCRRMDAWAGKGKSAHYTKSKLSKLKNSTFGKEEQKFIDRNLNDTRYMSRQLAMWVRECLPFPDDKRQHVFCVAGAATSLMRRIWGIGIVDEKGKKDRSDDRHHAVDAAVIACCSPEIVKGIARVNSGRSNIKERERLRYESMPYPEFKAQVEAWIPCIVPTRTVSRTATGSLLKDTVYPYVGADDRGKDLYRRNGKNEPASTLWKDGSGGCKLYDGVYGLMAVFDEGMKKFGSWRFDPIYYIDVPNVRQDFIREFTKDLSIDYWTKVQLKGDEPRIFLKQGDVLVQDGCAMRYYKYNVSNGAISSYSKIGEKSVPLQKTGPLSEEKFPKQAKWDSSLTVMQEDCLGLCWLRFLSDRVGKFENFPV

SEQ ID NO: 726 - protein, 1024 aa, unidentified
  REGION 1..1024: note = Description of Unknown: uncultivated organism with predicted taxonomy: Libanicoccus massiliensis
  REGION 1..1024: note = MG14-50 effector
MDSEQPPYTLGHDRDEWQEIKKHLTNRPYLVLGLDPGISSCGFCLIDFNNHLILEMGSHLFKAPQQDKNNVSLAVVRRNARSTRRNNRRTAARLSHCLALLKEAGLVPNDVDKAWLQTRKGDKPVTKLRAVGLDRPLSDREFAQVLYSLCGKRGYIPHGEGRAGETDDAEGKKVLKAIADNTKAMESGGYRTVGEMLYRSDKGRSRNRGGNYDLCVYNSQIQDEVKVVFSAQRELGNNRATQELEKSYFECLTWEKKSADHDAKVYELVGPCTYFPEEKRAANADVSSELCRAYERLGHLVIVHEDGAEQTLTSEQIDKYIGILFSPSPIRGNKDCKVTYNTIRKDLDISAKSMFKGVAKEKEKDEVFAPKAWRKLRIILPTSLLTSMIEDRSFGDDICEAIAYSSTEETLSERLETIDLSEDDRETLLSVPFTSKLFKGYGNRSRKALDLLIGAFEEPEIRTLTEAEVATGLKGKRDEGRFPRSTLLPPYNAYDETCRNPVVLRAMGRMRRIINSIIKIYGVPDEIHVELARELKQSKREKDLATKRRNAREADNKRYAKLAADILGVEPEAVRGNIIRMLALREEQGCKDIYTGDRIDLERLVTDEHYCEIDHVLPYSRTCDDDQSNKTLTFASNNQNKRERTPYEWMTSDEEKAPNWEEYRNRVIAEVKNPRKRAKFLNTILDEDTQEGFINRNLNDTRYMSRAVKSYLEDCLIFPKGKREKHVTAVAGGATGNLRWVWGLNFGAHGEKNRKDDRHHAVDAAVIAACNESAVMKVAKTTSMGREQFRKERKARLSNTQPWPTFADEVAAIRELVIPTRMVSHGVTGRMFEDTLYHIDDYTQDRGKYPLVRAKGKQNKGGNIRFISDDTAQKIDGIAFLRLWLDPDAPATGQTRGKWYAEPVYYADIPSIKHGDYVPRAIEQDVARINWQPIPESAKSSGPITVYPGDVVLVDNRAARFSKIGITKCQLTMLNLLSKERVTDWPSIGSWRQDTEVRVLGEDCLGHCYKHIAITRDSSTYRVE

SEQ ID NO: 727 - protein, 1005 aa, unidentified
  REGION 1..1005: note = Description of Unknown: uncultivated organism with predicted taxonomy: Collinsella
  REGION 1..1005: note = MG14-51 effector
MEITINREIGKLGLPRHLALGMDPGIASCGFALIDTANHEILDLGVRLFDSPTHPKTGQSLAVIRRGFRSTRRNIDRTQARLKHCLQVLKAYGLIPQDATKEYFHTTKGDKQPLKLRVDGLDRLLNDREWALVLYSLCKRRGYIPHGEGNQDKSSEGGKVLSALAANKEAIAETSCRTVGEWLAQQPQSRNRGGNYDKCVTHAQLIEETHILFDAQRSFGSKYASPEFEAAYIEVCDWERSRKDFDRRTYDLVGHCSYFPTEKRAARCTLTSELVSAYGALGNITIIHENGTSRALTATERDECIAILFSCEPIRGNKDCAVKFGALRKALDLSSGDYFKGVPAADEKTREVYKPKGWRVLRNTLNAANPILLQRLRDDRDLADAVMEAVAYSSALPVLQEQLQGLPLSEAEIEALCRLPYSSKALNGYGNRSKKALDMLLDCLEEPEVLNLTQAENDCGLLGLRIAGAQLERSDRLMPYETWIERTGRTNNNPVVIRAMSQMRKVVNAICRKWGVPNEIHVELDRELRLPQRAKDEIAKANKKNEKNRERIAGQIAELRGCTADEVTGKQIEKYRLWEEQKCFDLYTGAKIEVDRLISDDTYTQIDHILPFSRTGENSRNNKVLVLAKSNQDKREQTPYEWMSHDGAPSWDAFERRVQENQKLSRRKKNFLLEKDLDTKEGEFLARSFTDTAYMSREVCAYLADCLLFPDDGAKAHVVPTTGRATAWLRRRWGLNFGSNGEKDRSDDRHHATDACVIAACSRSLVIKTARINQETHWSITRGMNETQRRDAIMKALESVMPWETFANEVRAAHDFVVPTRFVPRKGKGELFEQTVYRYAGVNAQGKDLARKASSDKNIVMGNAVVSADEKSVIKVSEMLCLRLWHDPEAKKGQGAWYADPVYKADIPALKDGTYVPRIAKAHTGRKAWKPVPESAMKKPPLEIYLGDLVQIGDFVGRFSGYNIANANWSFVDRLTKEALGCPTVVKLDNKLAPAIIRESIIMHQ

SEQ ID NO: 728 - protein, 1003 aa, unidentified
  REGION 1..1003: note = Description of Unknown: uncultivated organism with predicted taxonomy: Collinsella
  REGION 1..1003: note = MG14-52 effector
MEITINREIGKLGLPRHLVLGMDPGIASCGFALIDTANHEILDLGVRLFDSPTHPKTGQSLAVIRRSFRSTRRNIDRTQARLKHCLQTLKAYGVIPQDATKEYFHTTKGDKQPLKLRVQGLDRPLSNREWALVLYSLCKRRGYIPHGEGSQDKSSEGGKILSALAANKEALAETPCRTVGEWLAQQPQSRNRGGNYDKCVTHAQLIDETHILFEAQRSFGSAYASPEFEAAYIEVCDWERSRKDFDRRSYDLVGRCSYFPAEKRAARCTLTSELVAAYGALGNITVIHEGGTSRALSATERDECIAILFSCEPIRGNKDCAVKFGALRKALDLSSGDYFKGVPAADEKTREVYKPKGWRVLRNTLNAANPILLQRLRDDRDLADAVMEAVAYSSALPVLQERLQGLPLSEAEIEALCRLPYSSKALNGYGNRSKKALDMLLDCLEEPEVLNLTQAENDCGLLGLRIAGAQLERSDRLMPYETWIEHTGRTNNNPVVIRSMSQMRKVVNAICRKWGVPNEIHIELDRELRLPRRAKDEIAKANKKNEKNRERIARQIAELRGCTADEVTGKQIEKYRLWEEQECFDLYTGAKIEIGRLISDDTYTQIDHILPFSRTGENSRNNKVLVLAKSNQDKREQTPYEWMSHDGAPSWDAFERRVQENQKLSRRKKNFLLEKDLDTKEGEFLARSFTDTAYMSREVCAYLADCLLFPDDGAKAHVVPTTGRATAWLRRRWGLNFGLTGEKDRSDDRHHATDACVIAACSPSLVIKTAQINQKMHWSMTKGMSKAQRQDAIMKALENVMPWETFANEVRAVHKLIIPTRLVPRKGKGELFEQTVYRYAGVDAKGKNLARRANSTEDIVMGNAVVSDDEKSIIKISEMLCLRLWHDPKARKGRGAWYADPVYKAEISALKGGTYVPKIAKAHTGRKAWKPVPESAMVKPPLEIYLDDLVQIGDFVGRFSGFDIDNANWSFSDRLTRKKLRSPTVNKLSNDLPPLVIREPPIR

SEQ ID NO: 729 - protein, 1004 aa, unidentified
  REGION 1..1004: note = Description of Unknown: uncultivated organism with predicted taxonomy: Olsenella sp. KH3B4
  REGION 1..1004: note = MG14-53 effector
MDANRPYLVLGLDPGIASCGFCLLDMTNHKILEMGSHLFKAPQEDKTKVSLAVTRRNARSIRRNTARTAARLKHCLSLLVEADLVPPDADRAWFQTKKGDKPVLKLRATGLDRLLTDREFAQALYSLCGRRGYIPRGEGRLGEADDNDNEGKRVLDAIKKNQEAMEAGAYRTVGEMLNAQGRSRNRGGDYSLCVYNSQVQDEVKTLFKEQRALGNAKATKKLEQAYIDCLTWEKKSLDHDARVYELVGECVYFPEEKRAASADISSELCRAYERLGHLAIVREDGSDQALSAEQIAHYLGILFSTAPIKGNKDCKVTYGTIRKDLDISGKDVFKGVAQDKEKDEVFAPKAWRCLRRTLPQGLLERMFDDRKLGDAVCEALTFASSEASLVERLSGLELSDDEAEAILEVPFTGKLFKGYGSRSLKTLGLLLGAFEEPEIRILTDAEKATGLLDLRLSDRGVRGGLLPPYDEYDRTCRNPVVLRAMGRMRHIVNAIIRIHGVPDEIHIELGRDLKMSNKEKDLVDKRNRENEAAKKKWAKTAADILGIEPEEVPGRIVRKLIMREEQDNWDLYTGDAIDLERLVRDDRYCEIDHILPYSRTCDDSRANKVLVLSKSNQDKRERTPYEWMTSGEAGAPSWDEYRARVMALVKNPHKRANHLNTDLGEEAQAKFLARNLNDDRYMSVAVKNYLEDCLLFPEDGRKRHVTAVAGGATGNLRWVWGLNFGSGNVKDRDDDRHHAVDAAIIAACSEGTVQKVAKASSKGREAFKHLRESRLADTQPWPTFADEVIARREFVVPTRMVDHGVTGRVFEDTLYHLEGITEDKGKYPLVRAGEKVAKQGNVHVNPDGSVKLIDGMAFLRLWLDPTARPNGKVKGKWYAEPVYYADIPAIKAGTYVPRACTIHVARVNWKPVPEAAAQQKPVVLYPGDVLQVGSHVGRYRSFDISNCGLSVNSLVNKDVIAPGFPKTLGGWGKDTQVRVLQEDCLGNCYDHIAINPDDSTFRQR

SEQ ID NO: 730 - protein, 1000 aa, unidentified
  REGION 1..1000: note = Description of Unknown: uncultivated organism with predicted taxonomy: Olsenella sp. KH3B4
  REGION 1..1000: note = MG14-54 effector
MDATRPYLVLGLDPGIASCGFCLLDMTNHKILEMGSHLFKAPQEDKTKTSLAVTRRKARSIRRNTARTSARLKHCLELLAGAGLVPADADKTWLQTKKGDKPILKLRAGGLDRLLTDREFAQVLYSLCGRRGYIPHGEGRLGETDEDESKKVLGAIKKNQDAMAAGSYRTVGEMLNAQGRSRNRGGDYSLCVYNSQIQDEAKALFASQRARGNTKATRELEDSYLACLTWEKKSLDHDTRVYELVGPCSYFPGEKRAASADVSSELCRAYERLGHIVIVHEDGSEQALTAGEIDDYLKILFSTAPIKGNKECKVTYGTIRKDLDISGKSVFKGIAQDKEKDKPFAPKAWRSLRRVLPERLLARMLEDRNLGDAVCEALTFASSEASLIERLSDLDLSDDERDAILAVPFTGKLFKGYGSRSLKALRLLLGAFEEPEIRILTDAEKATGLLDLRLSDRGVRGQLLPPYDSYDPTCRNPVVLRAMGRMRHIVNAIIRIHGVPDEIHIELGRDLKMSNKEKSLVDKRNRENAASNKKWATTAAGILGCTPEEVPGRIIRKLILREEQGEKDLYTGDSIDLEHLVRDDRYCEIDHILPYSRTCDDSRANKTLVLSKSNQDKRERTPYEWMTSGEAGAPSWDSYRARVMAQVKNPRKRANYLNTDLGPETQAKFLARNLNDDRYMSVAVKNFLEDRLLFPEDGRKRHVTAVAGGATGNLRWVWGLNFGEGNIKDRTDDRHHAVDAAIIAACSESTVKKVAKASAKAREAFKQLRKSRLADTQPWPTFAAEVAARREFVVPTRMADHGVMGRVFKDTLYHLEGITEDKGKYPLVRAGEKTVKKGNVRINPDGSVKLIDGMAFLRLWLDPTARPNGKVKGKWYAEPVYYADIPAIKAGAYVPRACTIHVARVNWKPVPEAAMQIEPIMLYAGDVVEINNQLVRYSGFDINGATLYYQSLLNGATTTAIPSLGTWGKDTQVRVLQEDCLGHCYDGIAINPEDSTFQQR

SEQ ID NO: 731 - protein, 1026 aa, unidentified
  REGION 1..1026: note = Description of Unknown: uncultivated organism with predicted taxonomy: Collinsella
  REGION 1..1026: note = MG14-55 effector
MAAFEDPRELGFDTELVKTALMTREQFSSKPRKLVLGIDMGIAGIGICLMDKLNQEIVLMATHLFDCPWNPKNKTSLASARRQARSQRRNTARRAARKKHIREILMARGVIPEGVTAEWFSVRKGEQDNIQLRVKGLSEILSSRELARILYGFASRRGYIDHGKADNDKDAGKVKKALKENAEIMDANGYETFAQYLVTQPRIRNRQNDYSHTIDIDMVVDEVHAIFRHQRELGNELATESLEGEYLAALRWLTDTTKRDRIIYSKVGYCTYLGEPIRRGPKSSISSEMVRAYQTLANVKIEHIGSVATHISPLTRNQIVHDLFKVSKNPKPLKWSQLRKKLDLADTDTFAGVRQSDEAKDVCVKVPAWNVLCSTLHDLNPALLNRLHDDVDLADAVCAAATFASSSESFATRIAERTDGLKQEDMEALLELPYGSKLFTGYGSTSLKALQMLRDAFEDTNINRLYDAEVATGLYDAREALAAKRNASDDGLLMPYSKYSPICTNPVVLRSCAQMRRIINSIIRHYGLPDTIRVEVANDLKRTEHERKLITSGNIYNRRTNEKAKDDIVEYLGLSDADQVRGRDIDKVRLYNEQGGKDPYTGQGIDFGRMLTEKGYVEIDHILPFSRSCDNARTNKVLVLTKSNRNKSNRTPYEWMTSGEPTAPNWDEFCIRMDVWASGKEPKHYYSSKLAKLKEDNFTNNIDSFISRNLNDTRYMSKDVAKWLADCLPFPEDGRKHVFCVSGAATAFMRGIWRIGILDDVGKKNREDDRHYAVDAAVIAACTSSIVKGIALISEEHATNRDADRLLDGSLPYPEYRDQVKAWIPCIVPTYSPTRTATGALFKENTFSYKGIDGKGKDLIKKKKGALGPCTTAWKDGKGTARAYDEQYSLLAVYEESAARWLFDPLYYIDVQKRKTEEPFIRKFSKDLSIDYWEKIPLTGNEPSLLLKRGVVLIQDGIVGRYYGYDIAHNNVKLSPSGKVSFQKTGPLAAEKFPTPTKWTDELRIMQEDCLGLCWLEFLTERANHC

SEQ ID NO: 732 - protein, 1003 aa, unidentified
  REGION 1..1003: note = Description of Unknown: uncultivated organism with predicted taxonomy: Collinsella
  REGION 1..1003: note = MG14-56 effector
MEITINREIGKLGLPRHLVLGMDPGIASCGFALIDTANHEILDLGVRLFDSPNHPKTGQSLAVIRRGFRSTRRNIDRTQARLKHCLQTLKAYGVIPQDATKEYFHTTKGDKQPLKLRVQGLDRPLSNREWALVLYSLCKRRGYIPHGEGSQDKSSEGGKILSALAANKEALAETPCRTVGEWLAQQPQSRNRGGNYDKCVTHAQLIDETHILFEAQRSFGSAYASPEFEAAYIEVCDWERSRKDFDRRSYDLVGRCSYFPAEKRAARCTLTSELVAAYGALGNITVIHEGGTSRALSATERDECIAILFSCEPIRGNKDCAVKFGALRKALDLSSGDYFKGVPAADEKTREVYKPKGWRVLRNTLNAANPILLQRLRDDRDLADAVMEAVAYSSALPVLQERLQGLPLSEAEIEALCRLPYSSKALNGYGNRSKKALDMLLDCLEEPEVLNLTQAENDCGLLGLRIAGAQLERSDRLMPYETWIEHTGRTNNNPVVIRSMSQMRKVVNAICRKWGVPNEIHVELDRELRLPRRAKDEIAKANKKNEKNRERIARQIAELRGCTADEVTGKQIEKYRLWEEQECFDLYTGAKIEVGRLISDDTYTQIDHILPFSRTGENSRNNKVLVLAKSNQDKREQTPYEWMSHDGAPSWDAFERRVQENQKLGRRKKNFLLEKDLDTKEGEFLARSFTDTAYMSREVCAYLADCLLFPNDGAKAHVVPTTGRATAWLRRRWGLNFGLTGEKDRSDDRHHATDACVIAACSPSLVIKTAQINQKMHWSMTKGMSKAQRQDAIMKALENVMPWETFANEVRAVHKLIIPTRFVPRKGKGELFEQTVYRYAGVDAKGKNLARRANSTEDIVMGNAVVSDDEKSIIKISEMLCLRLWHDPKARKGRGAWYADPVYKAEISALKGGTYVPKIAKAHTGRKAWKPVPESAMVKPPLEIYLDDLVQIGDFVGRFSGFDIDNANWSFSDRLTRKKFRSPTVNKLSNDLSPLVIREPPIR

SEQ ID NO: 733 - protein, 1000 aa, unidentified
  REGION 1..1000: note = Description of Unknown: uncultivated organism with predicted taxonomy: Olsenella
  REGION 1..1000: note = MG14-57 effector
MDVTRPYLVLGLDPGIASCGFCLLDMTNHKILEMGSHLFKAPQEDKTKTSLAVTRRKARSIRRNTARTAARLKHCLELLAGAGLVPADADKTWLQTKKGDKPILKLRAGGLDRLLTDREFAQVLYSLCGRRGYIPHGEGRLGETDEDESKKVLGAIKKNQDAMAAGSYRTVGEMLNAQGRSRNRGGDYSLCVYNSQIQDEAKALFASQRARGNTKATRELEDSYLACLTWEKKSLDHDTRVYELVGPCSYFPGEKRAASADVSSELCRAYERLGHTVIVHEDGSEQALTAGEIDGYLKILFSTAPIKGNKECKVTYGTIRKDLDISGKSVFKGIAQDKEKDEPFAPKAWRSLRRVLPERLLARMLEDRNLGDAVCEALTFASSEASLIERLSDLDLSDDERDAILAVPFTGKLFKGYGSRSLKALGLLLGAFEEPEIRILTDAEKVTGLLDLRLSDRDVRGQLLPPYSSYDPTCRNPVVLRAMGRMRHIVNAIIRIHGVPDEIHIELGRDLKMSNKEKSLVDKRNRENAASNKKWATTAAGILGCTPEEVPGRIIRKLILREEQGEKDLYTGDSIDLEHLVRDDRYCEIDHILPYSRTCDDSRANKVLVLSKSNQDKRERTPYEWMTSGEAGAPSWDSYRARVIAQVKNPRKRANYLNTDLGPETQAKFLARNLNDDRYMSVAVKNFLEDRLLFPEDGRKRHVTAVAGGATGSLRWVWGLNFGEGNIKDRTDDRHHAVDAAIIAACSESTVKKVAEASAKGREAFKQLRKSRLADTQPWPSFAAEAAARREFVVPTRMADHGVTGRVFEDTLYHLEGITEDKGKYPLVRAGEKTVKKGNVRINPDGSVKLIDGMAFLRLWLDPTARPNGKVKGKWYAEPVYYADIPAIKAGTYVPRACTIHVARVNWEPVPEAAMEIEPVVLYAGDVVEINNQLVRYSGFNIRGATLYYQSLLNGATTTAIPSLGSWGKDTQVRVLQEDCLGHCYDGIAINPEDSTFQQR

SEQ ID NO: 734 - protein, 1003 aa, unidentified
  REGION 1..1003: note = Description of Unknown: uncultivated organism with predicted taxonomy: Collinsella
  REGION 1..1003: note = MG14-58 effector
MEITINREIGKLGLPRHLVLGMDPGITSCGFALIDTANHEILDLGVRLFDSPTHPKTGQSLAVIRRGFRSTRRNIDRTQARLKHCLQVLKAYGLIPQDATKEYFHTTKGDKQPLKLRVDGLDRLLNDREWALVLYSLCKRRGYIPHGEGNQDKSSEGGKVLSALAANKEAIAETSCRTVGEWLAQQPQSRNRGGNYDKCVTHAQLIEETHILFDAQRSFGSKYASPEFEAAYIEVCDWERSRKDFDRRTYDLVGHCSYFPTEKRAARCTLTSELVSAYGALGNITIIHENGTSRALSATERDECIAILFSCEPIRGNKDCAVKFGALRKALDLSSGDYFKGVPAADEKTREVYKPKGWRVLRNTLNATNPILLQRLRDDRNLADAVMEAVAYSSALPVLQEQLQGLPLSEAEIEALCRLPYSSKALNGYGNRSKKALDMLLDCLEEPEVLNLTQAENDCGLLGLRIAGAQLERSDRLMPYETWIERTGRTNNNPVVIRAMSQMRKVVNAICRKWGVPNEIHVELDRELRLPQRAKDEIAKANKKNEKNRERIAGQIAELRGCTADEVTGKQIEKYRLWEEQECFDLYTGAKIEVDRLISDDTYTQIDHILPFSRTGENSRNNKVLVLAKSNQDKREQTPYEWMSHDGAPSWDAFERRVQENQKLSRRKKNFLLEKDLDTKEGEFLARSFTDTAYMSREVCAYLADCLLFPDDGAKAHVVPTTGRATAWLRRRWGLNFGSNGEKDRSDDRHHATDACVIAACSRSLVIKTARINQETHWSITRGMNETQRRDAIMKALESVMPWETFANEVRAAHDFVVPTRFVPRKGKGELFEQTVYRYAGVNAQGKDIARKASSDKDIVMGNAVVSADEKSVIKVSEMLCLRLWHDPEAKKGQGAWYADPVYKADIPALKDGTYVPRIAKAHTGRKAWKPVPESAMKKPPLEIYLGDLVQIGDFVGRFSGYNIDNANWSFVDRLTRIKISCPTVGKLSNDMSPFVVRESPIK

SEQ ID NO: 735 - protein, 1003 aa, unidentified
  REGION 1..1003: note = Description of Unknown: uncultivated organism with predicted taxonomy: Collinsella
  REGION 1..1003: note = MG14-59 effector
MEITINREIGKLGLPRHLVLGMDPGIASCGFALIDTANHEILDLGVRLFDSPTHPKTGQSLAVIRRSFRSTRRNIDRTQARLKHCLQVFKAYGLIPQDATKEYFHTTKGDRQPLKLRVDGLDRPLSAREWALVLYSLCKRRGYIPHGEGNQDKSSEGRKVLSALAANKEAIAETSCRTVGEWLAQQPQSRNRGGNYAKCVTHAQLIEETHILFDAQRSFGSKYASPEFEAAYIEVCDWERSRKDFDRRTYDLVGHCPYFPTEKRAARCTLTSELVSAYGALGNITIIHENGTSRALNATERDECIAILFSCEPIRGNKDCAVKFGALRKALDLSSGDYFKGVPAADEKTREVYKPKGWRVLRNTLNAANPILLQRLRDDRDLADAVMEAVAYSSALPVLQERLQGLPLSEAEIEALCRLPYSSKALNGYGNRSKKALDMLLDCLEEPEVLNLTQAENDCGLLGLRIAGAQLERSDRLMPYETWVELTGRTNNNPVVIRSMSQMRKVVNAICRKWGVPNEIHVELDRELRLPQRAKDEIAKANKKNEKNRERIARQIAELRGCTADEVTGKQIEKYRLWEEQECFDLYTGAKIEVDRLISDDTYTQIDHILPFSRTGENSRSNKVLVLAKSNQDKREQTPYEWMSHDGAPSWDAFERRVQENQKLSRRKKNFLLEKDLDTKEGEFLARSFTDTAYMSREVCAYLADCLLFPDDGAKAHVVPTTGRATAWLRRRWGLNFGSNGEKDRSDDRHHATDACVIAACSRRLVIKTARINQEMHWSMTKGMSKAQRQDAIMKALENVMPWETFANEVRVAHDFVVPTRFVPRKGKGELFEQTVYRYAGVNAQGKDIARKASSDKDIVMGNAVVSADEKSVIKVSEMLCLRLWHDPKAKKGQGAWYADPVYKADIPALKDGTYVPRIAKAHTGRKAWKPVPESAMKKPPLEIYLGDLVQIGDFVGRFSGYNIDNANWSFVDRLTRIKTSCPTVGKLSNDMSPFVVRESPIK

SEQ ID NO: 736 - protein, 1003 aa, unidentified; identical to SEQ ID NO: 732
  REGION 1..1003: note = Description of Unknown: uncultivated organism with predicted taxonomy: Collinsella
  REGION 1..1003: note = MG14-60 effector

SEQ ID NO: 737 - protein, 1004 aa, unidentified
  REGION 1..1004: note = Description of Unknown: uncultivated organism with predicted taxonomy: Collinsella
  REGION 1..1004: note = MG14-61 effector
MEITINREIGKLGLPRHLVLGMDPGIASCGFALIDTANHEILDLGVRLFDSPTHPKTGQSLAVIRRGFRSTRRNIDRTQARLKHCLQVLKAYGLIPQDATKEYFHTTKGDKQPLKLRVDGLGRLLNDREWALVLYSLCKRRGYIPHGEGNQDKSSEGGKVLSALAANKETIAETSCRTVGEWLAQQPQSRNRGGNYDKCVTHAQLIEETHILFDAQRSFGSKYASPEFEAAYIEVCDWERSRKDFDRRTYDLVGHCSYFPTEKRAARCTLTSELVSAYGALGNITIIHENGTSRALSATERDECIAILFSCEPIRGNKDCAVKFGALRKALDLSSGDYFKGVPAADEKTREVYKPKGWRALRNTLNAANPILLQRLRDDHDLADAVMEAVAYSSALPVLQEQLQGLPLSEAEIEALCRLPYSSKALNGYGNRSKKALDMLLDCLEEPEVLNLTQAENDCGLLGLRIAGSQLERSDRLMPYETWIEHTGRTNNNPVVIRSMSQMRKVVNAICRKWGVPNEIHVELDRELRLPQRAKDEIAKANKKNEKNRERIAGQIAELRGCTADEVTGKQIEKYRLWEEQECFDLYTGAKIEVDRLISDDTYTQIDHILPFSRTGENSRNNKVLVLAKSNQDKREQTPYEWMSHDGAPSWGAFERRVQENQKLSRRKKNFLLEKDLDTKEGEFLARSFTDTAYMSREVCAYLADCLLFPDDGAKAHVVPTTGRATAWLRRRWGLNFGSNGEKDRSDDRHHATDACVIAACSRSLVIKTARINQETHWSITRGMNETQRRDAIMKALESVMPWETFANEVRAAHDFVVPTRFVPRKGKGELFEQTVYRYAGVNAQGKDIARKASSDKDIVMGNAVVSADEKSVIKVSEMLCLRLWHDPEAKKGQGAWYADPVYKADIPALKDGTYVPRIAKQNYGRKVWKAIPDSLLIQKPLEIYLGDLIRVGDKLGRYNGYNIAKANWSFVDALTKKEIAFPSVGMLSNELRPIVIRKSILDN

SEQ ID NO: 738 - protein, 1003 aa, unidentified
  REGION 1..1003: note = Description of Unknown: uncultivated organism with predicted taxonomy: Collinsella
  REGION 1..1003: note = MG14-62 effector
MEITINREIGKLGLPRHLVLGMDPGIASCGFALIDTANHEILDLGVRLFDSPTHPKTGQSLAVIRRGFRSTRRNIDRTQARLKHCLQVFKAHGLIPQDATKEYFHTTKGDKQPLKLRVDGLDRLLSDREWALVLYSLCKRRGYIPHGEGNQDKSSEGGKVLSALAANKEAIAEASCRTVGEWLAQQPQSRNRGGNYDKCVTHAQLIEETHILFDAQRSFGSKFASPELEAAYIEVCDWERSRKDFDRRTYDLVGHCSYFPTEKRAARCTLTSELVSAYGALGNITIIHDDGTSRALSATERDECIAILFSCEPIRGNKDCAVKFGALRKALDLSSGDYFKGVPAADEKTREVYKPKGWRVLRNTLNAANPILLQRLRDDRDLADAVMEAVAYSSALPVLQERLQGLPLSEAEIEALCRLPYSSKALNGYGNRSKKALDMLLDCLEEPEVLNLTQAENDCGLLGLRIAGAQLERSDRLMPYELWAERTGRTNNNPVVIRSMSQMRKVVNAICRKWGVPNEIHVELDRELRLPQRAKDEIAKANKKNEKNRERIAGQIAELRGCTADEVTGKQIEKYRLWEEQECFDLYTGAKIEVDRLISDDTYTQIDHILPFSRTGENSRNNKVLVLAKSNQDKREQTPYEWMSHDGAPSWDAFERRVQENQKLSRRKKNFLLEKDLDAKEGDFLARSFTDTAYMSREVCAYLADCLQFPDDGAKAHVVPTTGRATAWLRRRWGLNFGSNGEKDRSDDRHHATDACVIAACSRSLVIKTARLNQETHWSITRGMNEIQRHDAIMKALENVMPWETFANEVRAAHDFVVPTRFVPRKGKGELFEQTVYRYAGVNAQGKDLARKAGSDKDIVMGNAVVSADEKSVIKVSEMLCLRLWHDPEAKKGQGAWYADPVYKADIPALKDGTYVPRIAKAHTGRKAWKPVPKSAMAKPPLEIYFDDLVQIGDFIGRFSGYNINSANWSFTDRLTRLNLSCPTVGQLNNDLSPVVIRESPIK

SEQ ID NO: 739 - protein, 1046 aa, unidentified
  REGION 1..1046: note = Description of Unknown: uncultivated organism with predicted taxonomy: Collinsella
  REGION 1..1046: note = MG14-63 effector
MDKAPGTDIGELGFDPGAFATALMTPEEFRSKDRVIWAGIDIGVASTGLCLVDILNHEIVLMASHLFKSPVVDKKKATAAPESLASVRRSARSVRRNIMREGRRKKAIRAVLADFGLIPADAGGEWFSARRDERTVVRLRSKALGYLLNPRELARVLYSFASHRGYIDHGKSDKEDDAGKVKKALAANRAELADGGCETFGQYLAAQPRSRNRAGDYSYTADIGMTVDEVRTIFARQRELGSEIASEALENRYIAELTWLTDTSKRDMSTYLKVGFCTYRGAPYRRGATSTISFEMVRAHQTLCNTVIQHADGTSSSIPGDTRIEIVRELFAVKKSVKPLKWSGLRRRLGLSEGDSFKGRPLEEEKRDCIALPAWAVLCSGLYEGHRDLLERLHDHIDDADAVCSALTFASSAASLAGRLAPLALSDDEVEAIIDLPYSARLFSGYANASLEALQMLRGTFEDPRVTSLRQAEEDSGLAQARAILAEERGEADDGLLCAFSDYDPTCKNPVVLRATAQVRRMVNSVIRHYGLPDVIRVEVARDLKRSKHEREIVAESNRARLELNEQAKRDIIEFLGLPDDHHVRGRDLALVKLYREQGGKDPYTGVGIDFRRMLEEHGYAEIDHILPVSRTCDDSQANKVLCLTKSNRDKSNRSPYEWMTSGEASAPDWNGFCGRMERWAKMCEPRRYARKKLANLTCENLAERAGNFIDRNLNDTRYMSVALAKWLMECLPFAKDGHEHVFCVAGGATALMRSVWNIGITGPDGKKNRDDDRHHAVDAAVIACCTPGIVKNVALVNEGHARADVRQRLFRDSLPYPEFKEQVDAWIPCIVPTLTLPSTVTGSVLKDTVYPYLGRDEAGKDLYLTVNRDKDGRIVERKVNKATTMWKDGHGGCRKYDEMCALDAVFDASVGKRGKWAFDPVYCIDIPHRDAERRTMRAFSKEKAIDLWDTVEVPEDALRMTIRRGDVLVCDGKAARFHGFNISDNTIKLFPQRVGKQLQETGPLSDEAFPSPSKWGDGIRVMQEDCLGLCWLSFLAQRAAVTQTE

SEQ ID NO: 740 - protein, 1003 aa, unidentified
  REGION 1..1003: note = Description of Unknown: uncultivated organism with predicted taxonomy: Collinsella
  REGION 1..1003: note = MG14-64 effector
MASTVNREIGKLGLPRHLVLGMDPGIASCGFALIDINNHEILEIGVRLFDSPTHPKTGQSLAVIRRGFRSTRRNIDRTQARLKHCLEVLEKYDVIPQDATKEFFHTTKGDKQPLKLRVEGLDRLLTNREWALVLYSLCKRRGYIPHGEGSQDKSSEGGKVLSALAANKEAFAETSCRTVGEWLAQQPQSRNRGGNYDKCVTHAQLIEETRVLFEAQRSFGSQYASAELEEAYVQVCDWERSRKDFDRRSYDLVGYCTYFPTEKRAARCTLTSELVAAYGALGNITIVHEDGTTRTLTTAERDKCIAILFSCEPIRGNKDCAVKFGALRRELDLNSGDYFKGVPAADEKTREVYKPKGWRALRNTLNTTSPFLLRRLYDDRDLADSVMEAVAYSSALPVLEEQLQALPLSPAEIDALCKLPYSSKALNGYGNRSKKALDMLLDCLEDSEVLGLTQAEDDCGLLGLRIQGSQLERSERLMPYEMWVELTGRTNNNPVVIRSMSQMRKVVNAICRKWGVPNEIHIELDRELRLPQRAKDDIAKAHKRNEKNRERIAGQIAELRGCSPEDVSGRLIEKYRLWEEQECFDLYTGAKIEVDRLISDETYTQIDHILPFSRTGENSPSNKVLVLAKSNQDKREQTPFEWMSKEGAPSWDAFKRRVEENQKLGRRKKNFLLEENLEAKEGEFLARSFTDTAYMSREVCAYLADCLLFPEDGTKSHVVPTTGRATAWLRRRWGLNFGINGEKDRSDDRHHATDACVIAACSRSLVIKTAKISEQTHWAVTKDLDKDERDHLRMKALENVMPWETFANEVRASHDFVIPTRFVPHKGKGELFEQTTYRYAGVNSEGKDLARRANSDQDIVMGNAIVSDDGKSIIKVSEMLCLRLWHDPEAKKGQGCWYADPVYKADIPALKDGTYMPKIAKARTGRKAWKPVPECAMRHAPLEIYLGDLVKIGDFIGRFSGYNIANANWSFTDRLTRQKLSCPTVGKLNNALIPVIIRESSIR

SEQ ID NO: 741 - protein, 1003 aa, unidentified; identical to SEQ ID NO: 732
  REGION 1..1003: note = Description of Unknown: uncultivated organism with predicted taxonomy: Collinsella
  REGION 1..1003: note = MG14-65 effector

SEQ ID NO: 742 - protein, 1004 aa, unidentified
  REGION 1..1004: note = Description of Unknown: uncultivated organism with predicted taxonomy: Collinsella
  REGION 1..1004: note = MG14-66 effector
MEITINREIGKLGLPRHLVLGMDPGIASCGFALIDTANHEILDLGVRLFDSPTHPKTGQSLAVIRRGFRSTRRNIDRTQARLKHCLQVLKAYGLIPQDATKEYLHTTKGDKQPLKLRVDGLDRLLNDREWALVLYSLCKRRGYIPHGEGNQDKSSEGGKVLSALAANKEAIAETSCRTVGEWLAWQPQSRNRGGNYDKCVTHAQLIEETHILFDAQRSFGSKYASPEFEAAYIEVCDWERSRKDFDRRTYDLVGHCSYFPTEKRAARCTLTSELVSAYGALGNITIIHENGTSRALSATERDECIAILFSCEPIRGNKDCAVKFGALRKALDLSSGDYFKGVPAADEKTREVYKPKGWRVLRNTLNAANPILLQRLRDDRNLADAVMEAVAYSSALPVLQEQLQGLPFSEAEIEALCRLPYSSKALNGYGNRSKKALDMLLDCLEEPEVLNLTQAENDCGLLGLRIAGAQLERSDRLMPYETWIELTGRTNNNPVVIRSMSQMRKVVNAVCRKWGVPNEIHVELDRELRLPQRAKDEIAKANKKNEKNRERIAGQIAELRGCTADEVTGKQIEKYRLWEEQECFDLYTGAKIEVDRLISDDTYTQIDHILPFSRTGENSRNNKVLVLAKSNQDKREQTPYEWMSHDGAPSWDAFERRVQENQKLSRRKKNFLLEKDLDTKEGEFLARSFTDTAYMSREACAYLADCLLFPDDGAKAHVVPTTGRATAWLRRRWGLNFGSNGEKDRSDDRHHATDACVIAACSRSLVIKTARINQETHWSITRGMNETQRRDAIMKALESVMPWETFANEVRAAHDFVVPTRFVPRKGKGELFEQTVYRYAGVNAQGKDIARKASSDKDIVMGNAVVSLDEKSVIKVSEMLCLRLWHDPEAKKGQGAWYADPVYKADIPALKDGTYVPRIAKAHTGRKAWKPVPESAMKKPPLEIYLGDLVQIGDFMGRFSGYNIANANWSFVDRLTKEALGCPTVVKLDNKLAPAIIRESIIMH

SEQ ID NO: 743 - protein, 1003 aa, unidentified; identical to SEQ ID NO: 734
  REGION 1..1003: note = Description of Unknown: uncultivated organism with predicted taxonomy: Collinsella
  REGION 1..1003: note = MG14-67 effector

SEQ ID NO: 744 - protein, 1005 aa, unidentified
  REGION 1..1005: note = Description of Unknown: uncultivated organism with predicted taxonomy: Collinsella
  REGION 1..1005: note = MG14-68 effector
MEITINREIGKLGLPRHLVLGMDPGIASCGFALIDTANHEILDLGVRLFDSPTHPKTGQSLAVIRRGFRSTRRNIDRTQARLKHCLQILKAYGLIPQDATKEYFHTTKGDKQPLKLRVDGLDRLLNDREWALVLYSLCKRRGYIPHGEGNQDKSSEGGKVLSALAANKEAIAETSCRTVGEWLAQQPQSRNRGGNYDKCVTHAQLIEETHILFDAQRSFGSKYASPEFETAYIEVCDWERSRKDFDRRTYDLVGHCSYFPTEKRAARCTLTSELVSAYGALGNITIIHENGTSRALSATERDECIAILFSCEPIRGNKDCAVKFGALRKALDLSSGDYFKGVPAADEKTREVYKPKGWRVLRNTLNAANPILLQRLRDDRNLADAVMEAVAYSSALPVLQEQLQGLPLSEAEIEALCRLPYSSKALNGYGNRSKKALDMLLDCLEEPEVLNLTQAENDCGLLGLRIAGAQLERSDRLMPYETWIERTGRTNNNPVVIRSMSQMRKVVNAVCRKWGVPNEIHVELDRELRLPQRAKDEIAKANKKNEKNRERIAGQIAELRGCTADEVTGKQIEKYRLWEEQECFDLYTGAKIEVDRLISDDTYTQIDHILPFSRTGENSRNNKVLVLAKSNQDKREQTPYEWMSHDGAPSWDAFERRVQENQKLSRRKKNFLLEKDLDTKEGEFLARSFTDTAYMSREVCAYLADCLLFPDDGAKAHVVPTTGRATAWLRRRWGLNFGSNGEKDRSDDRHHATDACVIAACSRSLVIKTARINQETHWSITRGMNETQRRDAIMKALESVMPWETFANEVRAAHDFVVPTRFVPRKGKGELFEQTVYRYAGVNAQGKDIARKASSDKDIVMGNAVVSADEKSVIKVSEMLCLRLWHDPEAKKGQGAWYADPVYKADIPALKDGTYVPRIAKAHTGRKAWKPVPESAMKKPPLEIYLGDLVQIGDFVGRFSGYNIANANWSFVDRLTKEALGCPTVVKLDNKLAPAIIRESIIMHQ

SEQ ID NO: 745 - protein, 1000 aa, unidentified
  REGION 1..1000: note = Description of Unknown: uncultivated organism with predicted taxonomy: Olsenella
  REGION 1..1000: note = MG14-69 effector
MAEPYLVLGLDPGISSCGFALLDMNNHKILEMGSHLFDAPQDSQTKVSLAVGRRSARSARRNNLRTKNRQKHCMELLQEAGLVPQGVTKQWFQSTKGDRPLLELRFAALERPLTNREFAQVLYALSARRGYIPHGEGRISKLSDMDTSGSSDAEAGKVLKAIGENNKLMAQGHFRTVGEMLYDQGKSRNKGGSYERCVLNSQIVDEVHIIFQSQRTQQNTAATQELEAQYVQNLTWEKRTLDHDAKVHALVGKCSYFPGEFRAARADLSSELCNAYERIKHLRIVNADGDEVALAPEQVETYIAILFSPEPLKGKKEKVTYARIRKDLDLSAHLFFKGIDPEDEKDHEPYVPKAWRAMRKVLSTELMERLRSDRTLADAVGEALTYASSEDSLVYQLDNLDLSDEERSQILGLPFSGKIFKGYGSRSLKALDMLVDAFEEPEVTTLAEAEESSGLLGLRMSDRGARYPLLPSYSNYDKENRNPVVLRAMGRMRRIVNAIIRIYGVPDEIHVELGRDLKRSKHEKDLINKRNRENERKNKQWRAQIAEEQGIDPDEVRPKLLRKIALWEEQDNFDIYTGHKIEFDRMISDDKYCEIDHVLPYSRTCDDSRNNKVLVLAKSNQDKRERTPYEWMTQDARKGAPNWDEYQARVIANHHISPRKRRYLLDNNLGPDQESDFLSRNLNDDRYMSREVKSYLEDTLIFPEDGRVKHVIAVAGGATGSLRHVWGLNFGANNSKDRSDNRHHAIDACVIAACSESTLQAVAKARKLGAETYKRMRKDRLKDTQPWPTFADEVIARREFVIPTHMVSHGVTGRAFEDTNYRFDGITNDTKKLGILYGNGKTTKKGNFVIGNDGNAHLVDGMAFLRLWLDPTARKGKGKWYAEPVYYADIPAIKNGTYIPRAAKAHVARVAWEPVPENALASAPVVLFSDNVIKVGSAIARYSRFDIGNAALVLENLRTGEECKKFPTLGRWNNELVPIIINEDCLGHCYKELAPNILEG

SEQ ID NO: 746 - protein, 1026 aa, unidentified
  REGION 1..1026: note = Description of Unknown: uncultivated organism with predicted taxonomy: Collinsella tanakaei
  REGION 1..1026: note = MG14-70 effector
MESLVNREVGGLGKPRYLVMGMDPGIKSCGFALLDLNNQEILEMGSRLFDAPTHPKTKQSMAVIRRGYRSTRRNIDRTQDRLKHCLKTLKRFDVVPEDADKEFFHTVKGDKQPILLRTDGLNRLLTSREWALVLYSLCKRRGYIPHGEGSDSGTSEDGKVLAALKANERVFADAGYRTVGEWLASLPQSRNRGGNYDKCVTHAQLTDEVRTLFEAQRGFGSPVASQELEDAYIEVFDWERSREEFDKRAYGLVGTCSYFPNEKRAARCTLTSEMVAAYGALGNITIVKRDGSTHPLSAVERDQCIDILFAVDPMKGNKTCAVKYGFLRKRLDLESGDYFKGVPLDDEKNREVFKPKGWRSLRSVLHETNRELLVKLHDDRDLADAVMEAVAYSSSVDVLKSQLSSLDLSNGEIESICAMPYSSKVLNGYGNRSKKALDILLGCFEDPDVLSLTDAEDASGLGAVRMQGAAIDKGERLIPYETWIALTGRTNNNPVVIRALSQMRKVVNAVCRKWGVPDEIHVELDRELRLPKKAKDEIAKAKKRNEKDRQRVAAQIAELLGCSADDVKGDYIEKYRLWEEQECFDIYSGEKIEVDRLIREETYTQIDHVLPFSRTGDNSRHNKVLVLARSNQLKREQTPYEWMTSNTEGAPSWDAFKRRVEENKKLSRRKKNFLLEEDLVSKEGEFQSRNMTDTAYMSREVCAYLSDCLQFPDDGLKNHIVPIAGRATAWLRRQWGLNFGATGEKDRSDDRHHATDACVIAACSRSLVIKTAKVMKQTHWQVTRDMTREQRRSARMKALEGTMPWSTFANEVRERWKVTVPTRFVPRKGRGELYGQTVYSYLGVDESGKDLGRKKGSNKKIVMGNAVISKDGKSMVKISEMLCLRLWFDPDAKGRGGKKGRWYSDPVYKADLGVIQSNAYIPRVAKAHRGRKAWSPVPQAALRRSPVVIYLGDVVKVGDVVGRFAGFDIDSANWSFVDCLDGKGIAFPTVGSLTSELRPEVIREKVLGNAEVYRSTQDDGTSSGAD

SEQ ID NO: 747 - protein, 862 aa, unidentified
  REGION 1..862: note = Description of Unknown: uncultivated organism with predicted taxonomy: Collinsella
  REGION 1..862: note = MG14-71 effector
MEITINREIGKLGLPRHLVLGMDPGIASCGFALIDTANHEILDLGVRLFDSPTHPKTGQSLAVIRRGFRSTRRNIDRTQARLKHCLQILKAYGLIPQDATKEYFHTTKGDKQPLKLRVDGLDRLLNDREWALVLYSLCKRRGYIPHGEGNQDKSSEGGKVLSALAANKEAIAETSCRTVGEWLAQQPQSRNRGGNYDKCVTHAQLIEETHILFDAQRSFGSKYASPEFEAAYIEVCDWERSRKDFDRRTYDLVGHCSYFPTEKRAARCTLTSELVSAYGAFGNITIIHENGTSRALSATERDECIAILFSCEPIRGNKDCAVKFGALRKALDLSSGDYFKGVPAADEKTREVYKPKGWRVLRNTLNAANPILLQRLRDDRNLADAVMEAVAYSSALPVLQEQLQGLPLSEAEIEALCRLPYSSKALNGYGNRSKKALDMLLDCLEEPEVLNLTQAENDCGLLGLRIAGAQLERSDRLMPYETWIERTGRTNNNPAVIRAMSQMRKVVNAICRKWGVPNEIHVELDRELRLPQRAKDEIAKANKKNEKNRERIAGQIAELRGCTADEVTGKQIEKYRLWEEQECFDLYTGAKIEVDRLISDDTYTQIDHILPFSRTGENSRNNKVLVLAKSNQDKREQTPYEWMSHDGAPSWDAFERRVQENQKLSRRKKNFLLEKDLDTKEGEFLARSFTDTAYMSREVCAYLADCLLFPDDGAKAHVVPTTGRATAWLRRRWGLNFGSNGEKDRSDDRHHATDACVISACSRSLVIKTARINQETHWSITRGMNETQRRDAIMKALESVMPWETFANEVRAAHDFVVPTRFVPRKGKGELFEQTVYRYAGVNAQGKDIARKASSDKSDGAG

SEQ ID NO: 748 - protein, 895 aa, unidentified
  REGION 1..895: note = Description of Unknown: uncultivated organism with predicted taxonomy: Atopobium sp. ICM42b
  REGION 1..895: note = MG14-72 effector
YINRGEETLINGEVSTEVSSESEEAGKVLSAISENKKALKESGYRSFGEYLYKESYVSTRSYRNKAGDYKHCVSHPMVVDEIKELFEQQKKFGNTHTSEEFKYAYLEQLNWLKDTKAFDKLTYQKVGYCVYFDQYSDEPQKRSANADLISEVVKAYEKLGNIRLKFDDKPEQSLTREVRDAVINEMFSVHQGAKVKSVTYKTLRKLIDDDNLIGFKGVKSDLEKNPVFVPKAWNTFCRVLSGSESGIQLLNRMRSDFKFANAIAESLTYASSLDSLERRISMYQEKEDLVISEDELALIESLPYNTKIFKGYGSRSVQALEMLHDQFSDGEAFTLDEAEKQSGLQGFRLREKGIRQSLLPPYSDYDVQCTNPVVLRVLAQARRMINSAIKQYGMPNIIRIELGNDIAKSAKEKSKIAKGQNENRKENERIKDKIAEILHIDQSEVTGKQITKMKLYEEQGGKDIYTGEGLGDIAFAGGRRFLIDDNYCEIDHVLPYSRSADDLKSNKVLVLAKSNQEKGNRTPYEWMNSNDGSHPNWEQFCLRVLSNVRLSDGKKSKLLEENFAEKEVSFIKRNMVDTQYMARAISAWLSDSLNFSTEFNQKQHVYAVNGRMTAKLRRKWGLNFGEDDTKDRSDNRHHAIDAAVIAVCSASMVKEFAISYSRLREVRDSVIAEPWEGFADQVREAREWVIPTMYRPNKKNGLLFEESRYRYVEKKKKHILTSKDGKEKSSGNIRFFENEKDGRHVKIVGNIAYIRLWLDENARKGKGEWLIEPVYFVDLQSIKNGSYVPRYISASHVTSDEWKSIPEEVLSKIPPVVIHIQDVIQVDSSYFRVDGVDIDAKALNLMPVFSDSNNSDPALAKMSKWNKSTEVTRISEDALGLVWFNYLKNQNSSES

SEQ ID NO: 749 - protein, 1003 aa, unidentified
  REGION 1..1003: note = Description of Unknown: uncultivated organism with predicted taxonomy: Collinsella
  REGION 1..1003: note = MG14-73 effector
MEITINREIGKLGLPRHLVLGMDPGIASCGFALIDTANHEILDLGVRLFDSPTHPKTGQSLAVIRRGFRSTRRNIDRTQARLKHCLQILKAYGLIPQDATKEYFHTTKGDKQPLKLRVDGLDRLLNDREWALVLYSLCKRRGYIPHGEGNQDKSSEGGKVLSALAANKEAIAETSCRTVGEWLAQQPQSRNRGGNYDKCVTHAQLIEETHILFDAQRSFGSKYASPEFEAAYIEVCDWERSRKDFDRRTYDLVGHCSYFPTEKRAARCTLTSELVSAYGALGNITIIHENGTSRALSATERDECIAILFSCEPIRGNKDCAVKFGALRKALDLSSGDYFKGVPAADEKTREVYKPKGWRVLRNTLNTANPILLQRLRDDRNLADAVMEAVAYSSALPVLQEQLQGLPLSEAEIEALCRLPYSSKALNGYGNRSKKALDLLLDCLEEPEVLNLTQAENDCGLLGLRIAGAQLERSDRLMPYETWIERTGRTNNNPVVIRAMSQMRKVVNAICRKWGVPNEIHVELDRELRLPQRAKDEIAKANKKNEKNRERIAGQIAELRGCTADEVTGKQIEKYRLWEEQECFDLYTGAKIEVDRLISDDTYTQIDHILPFSRTGENSRNNKVLVLAKSNQDKREQTPYEWMSHDGAPSWDAFERRVQENQKLSRRKKNFLLEKDLDSKEGEFLARSFTDTAYMSREVCAYLADCLLFPDDGAKAHVVPTTGRATAWLRRRWGLNFGSNGEKDRSDDRHHATDACVIAACSRSLVIKTARINQETHWSITRGMNETQRRDAIMKALESVMPWETFANEVRAAHDFVVPTRFVPRKGKGELFEQTVYRYAGVNAQGKDIARKASSDKDIVMGNAVVSADEKSVIKVSEMLCLRLWHDPEAKKGQGAWYADPVYKADIPALKDGTYVPRIAKAHTGRKAWKPVPESAMKKPPLEIYLGDLVQIGDFVGRFSGFDINGANWSFSDRLTKKKLRSPTVNKLGNDPLPLIIRESPVR

SEQ ID NO: 750 - protein, 1026 aa, unidentified
  REGION 1..1026: note = Description of Unknown: uncultivated organism with predicted taxonomy: Collinsella
  REGION 1..1026: note = MG14-74 effector
MAAYEDPRDCGFDPELVKTALMSREQFGSKPRKLVLGIDMGIAGIGICLMDKLNQEIVLMATHLFDCPWNPKNKTSLASARRQARSQRRNIARRTARKKHIREILMARGVIPEGVTAEWFSVRKGEQDNIQLRVKGLSQILSSRELARVLYGFASRRGYIDHGKADNDKDAGKVKKALKENAEIMDANGYETFAQYLVTQPRIRNRQNDYSHTIDIDMVVDEVHAIFRHQRELGNELATESLEGEYLAALRWLTDTTKRDRIIYSKVGYCTYLGEPIRRGPKSSISSEMVRAYQTLANVKIEHIGSVATHISLLTRNQIVHDLFKVSKNPKPLKWSQLRKKLDLADTDTFAGVRQSDEAKDVCVKVPAWNVLCSTLHDLNPTLLNRLHDDVDLADAVCAAATFASSSESFATRIAERTDGLKQEDMEALLELPYGSKLFTGYGSTSLKALQMLRDAFEDTNINRLYDAEVATGLYDAREALAAKRNASDDGLLMPYSKYSPICTNPVVLRSCAQMRRIINSIIRHYGLPDTIRVEVANDLKRTEHEKKLITSGNIYNRRTNEKAKDDIVEYLGLSEADQVRGRDIDKVRLYNEQGGKDPYTGQGIDFGRMLTEKGYVEIDHILPFSRSCDNARTNKVLVLTKSNRDKSNRTPYEWMTSGEPTAPNWDEFCIRMDVWASGKEPKHYYSSKLAKLKEDNFTNNIDSFISRNLNDTRYMSKDVAKWLADCLPFPEDGRKHIFCVSGAATAFMRGIWRIGILDDAGKKNREDDRHYAVDAAVIAACTSSIVKDIALISEEHATNRDADRLLDGSLPYPEYRDQVKAWIPCIVPTYSPTRTATGALFKENTFSYKGIDGKGKDLIKKKKGALGPCTTAWKDGKGTARAYDEQYSLLAVYEESASRWLFDPLYYIDVQKRKTEEPFIRKFSKDLSIDYWEKIPLTGNEPSLLLKRGVVLIQDGIVGRYYGYDIAHNNVKLSPSGKVSFQKTGPLAAEKFPTPTKWTDELRIMQEDCLGLCWLEFLTERANHC

SEQ ID NO: 751 - protein, 1046 aa, unidentified
  REGION 1..1046: note = Description of Unknown: uncultivated organism with predicted taxonomy: Collinsella sp. AM13-34
  REGION 1..1046: note = MG14-75 effector
MDKAKGADIGELGFDPATFATALMTLEEFRSKDRVIWAGLDIGVASTGLCLVDVRNHEIVLMASHLFKSPVVDKKKATAAPESLASVRRGARSIRRNIMREGRRKKAIRAALADFDLIPADADGEWFSARRDERTVVRLRSKALGYLLNSRELARVLYSFASHRGYIDHGKSDKEDDAGKVKKALAANHAALADGGCKTFGQYLAGQPRSRNRAGDYSYTADIGMTVDEVRTIFARQRELGSEIASKALEERYIAELTWLTDTSKRDRSTYLKVGFCTYLGAPYRRGATSTISFEMVRAHQTLCNTVILHADGTSSTIPGDIRIEIVRDLFAVKKSVKPLKWSGLRRRLGLSEGDSFKGRPVEEEKRDCIALPAWAVLCAGLYENHRDLLERLHDHIDDADAVCSALTFASSAASLTGRLAPLALSDDEVEAIIDLPYSARLFSGYANASLEALQMLRGTFEDPRVTSLRQAEEDSGLAQARAILAEERGGSADGLLCAFSDYDPTCRNHVVLRATAQVRRMVNSVIRHYGLPDVIRVEVARDLKRSKHEREIVAESNRARLELNEQAKRDIIEFLGLPDDHHVRGRDLALVKLYREQGGKDPYTGAGIDFRRMLEEHGYAEIDHILPVSRTCDDSQANKVLCLTKSNRDKSNRSPYEWMTSGEASAPDWGEFCGRMERWAKMCEPRRYARKKLANLTCENLTERAGNFIDRNLNDTRYMSVALAKWLRECLPFAKDGHEHVFCVAGGATALMRSVWNIGITGPDGKKNREDDRHHAVDAAVIACCTPGIVRNVALVNEGHARADVRQRLFSDSLPYPEFKEQVDAWIPCIVPTLTLPNAVTGSVLKDTVYPYLGRDEAGKDLYLTVKRDKDGRIVERKVNKATTMWKDGQGGCRAYGSMCALEAVFDASAGKRGRWSFDPVYCIDIPHRDAERRTMRAFSKEKAIDLWDTVAVPEAAPRMTIRRGDVLVCDGKAARFHCFDISVNAIRLFSQRGGKQLQTTGPLSAEAFPPPSKWGEGVRIMQEDCLGLCWLSFLAQRAADVQME

SEQ ID NO: 752 - protein, 1003 aa, unidentified
  REGION 1..1003: note = Description of Unknown: uncultivated organism with predicted taxonomy: Collinsella
  REGION 1..1003: note = MG14-76 effector
MEITINREIGKLGLPRHLVLGMDPGIASCGFALIDTANHEILDLGVRLFDSPTHPKTGQSLAVIRRGFRSTRRNIDRTQARLKHCLQVLKAYGLIPQDATKEYFHTTKGDKQPLKLRVDGLDRLLNDREWALVLYSLCKRRGYIPHGEGNQDKSSEGGKVLSALAANKEAIAETSCRTVGEWLAQQPQSRNRGGNYDKCVTHAQLIEETHILFDAQRSFGSKYASPEFEAAYIEVCDWERSRKDFDRRTYDLVGHCSYFPTEKRAARCTLTSELVSAYGALGNITIIHENGTSRALTATERDECIAILFSCEPIRGNKDCAVKFGALRKALDLSSGDYFKGVPAADEKTREVYKPKGWRVLRNTLNAANPILLQRLRDDRNLADAVMEAVAYSSALPVLQEQLQGLPLSEAEIEALCRLPYSSKALNGYGNRSKKALDMLLDCLEEPEVLNLTQAENDCGLLGLRIAGAQLERSDRLMPYETWIERTGRTNNNPVVIRAMSQMRKVVNAICRKWGVPNEIHVELDRELRLPQRAKDEIAKANKKNEKNRERIAGQIAELRGCTADEVTGKQIEKYRLWEEQECFDLYTGAKIEVDRLISDDTYTQIDHILPFSRTGENSRNNKVLVLAKSNQDKREQTPYEWMSHDGAPSWDAFERRVQENQKLSRRKKNFLLEKDLDTKEGEFLARSFTDTAYMSREVCAYLADCLLFPDDGAKAHVVPTTGRATAWLRRRWGLNFGSNGEKDRSDDRHHATDACVIAACSRSLVIKTARINQETHWSITRGMNETQRRDAIMKALESVMPWETFANEVRAAHDFVVPTRFVPRKGKGELFEQTVYRYAGVNAQGKDIARKASSDKDIVMGNAVVSADEKSVIKVSEMLCLRLWHDPEAKKGQGAWYADPVYKADIPALKDGTYVPRIAKAHTGRKAWKPVPESAMKKPPLEIYLGDLVQIGDFVGRFSGFDINGANWSFSDRLTKKKLRSPTVNKLGNDPLPLIIRESPVR

SEQ ID NO: 753 - protein, 1003 aa, unidentified
  REGION 1..1003: note = Description of Unknown: uncultivated organism with predicted taxonomy: Collinsella
  REGION 1..1003: note = MG14-77 effector
MEITINREIGKLGLPRHLVLGMDPGIASCGFALIDTANHEILDLGVRLFDSPTHPKTGQSLAVIRRGFRSTRRNIDRTQARLKHCLQILKAYGLIPQDATKEYFHTTKGDKQPLKLRVDGLDRLLNDREWALVLYSLCKRRGYIPHGEGNQDKSSEGGKVLSALAANKEAIAETSCRTVGEWLAQQPQSRNRGGNYDKCVTHAQLIEETHILFDAQRSFGSKYASPEFEAAYIEVCDWERSRKDFDRRTYDLVGHCSYFPTEKRAARCTLTSELVSAYGALGNITIIHENGTSRALSATERDECIAILFSCEPIRGNKDCAVKFGALRKALDLSSGDYFKGVPAADEKTREVYKPKGWRVLRNTLNAANPILLQRLRDDRNLADAVMEAVAYSSALPVLQEQLQGLPLSEAEIEALCRLPYSSKALNGYGNRSKKALDMLLDCLEEPEVLNLTQAENDCGLLGLRIAGAQLERSDRLMPYETWIERTGRTNNNPVVIRAMSQMRKVVNAICRKWGVPNEIHVELDRELRLPQRAKDEIAKTNKKNEKNRERIAGQIAELRGCTADEVTGKQIEKYRLWEEQECFDLYTGAKIEVDRLISDDTYTQIDHILPFSRTGENSRNNKVLVLAKSNQDKREQTPYEWMSHDGAPSWDAFERRVQENQKLSRRKKNFLLEKDLDTKEGEFLARSFTDTAYMSREVCAYLADCLLFPDDGAKAHVVPTTGRATAWLRRRWGLNFGSNGEKDRSDDRHHATDACVIAACSPSLVIKTARINQETHWSITRGMNETQRRDAIMKALESVMPWETFANEVRAAHDFVVPTRFVPRKGKGELFEQTVYRYAGVNAQGKDIARKASSDKDIVMGNAVVSADEKSVIKVSEMLCLRLWHDPEAKKGQGAWYADPVYKADIPALKDGTYVPRIAKAHTGRKAWKPVPESAMAKPPLEIYFGDLVQIGDFIGRFSGYNINNANWSFTDRLTRLNLSCPTVGQLNNDLSPVVIRESPIK

SEQ ID NO: 754 - protein, 1004 aa, unidentified
  REGION 1..1004: note = Description of Unknown: uncultivated organism with predicted taxonomy: Collinsella
  REGION 1..1004: note = MG14-78 effector
MEITINREIGKLGLPRHLVLGMDPGIASCGFALIDTANREILDLGVRLFDSPTHPKTGQSLAVIRRGFRSTRRNIDRTQARLKHCLQILKAYGLIPQDATKEYFHTTKGDKQPLKLRVDGLDRLLNDREWALVLYSLCKRRGYIPHGEGNQDKSSEGGKVLSALAANKEAIAETSCRTVGEWLAQQPQSRNRGGNYDKCVTHAQLIEETHILFDAQRSFGSKYASPEFEAAYIEVCDWERSRKDFDRRTYDLVGHCSYFPTEKRAARCTLTSELVSAYGALGNITIIHDDGTSRALSATERDECIAILFSCEPIRGNKDCAVKFGALRKALDLSSGDYFKGVPAADEKTREVYKPKGWRVLRNTLNAANPILLQRLRDDRNLADAVMEAVAYSSALPVLQEQLQGLPLSEAEIEALCRLPYSSKALNGYGNRSKKALDMLLDCLEEPEVLNLTQAENDCGLLGLRIAGTQLERSDRLMPYETWIELTGRTNNNPVVIRSMSQMRKVVNAVCRKWGVPNEIHVELDRELRLPQRAKDEIAKANKKNEKNRERIAGQIAELRGCTADEVTGKQIEKYRLWEEQEYFDLYTGAKIEVDRLISDDTYTQIDHILPFSRTGENSRNNKVLVLAKSNQDKREQTPYEWMSHDGAPSWDAFVRRVQENQKLSRRKKNFLLEKDLDTKEGEFLARSFTDTAYMSREVCAYLADCLLFPDDGAKAHVVPTTGRATAWLRRRWELNFGSNREKDRSDDRHHATDACVIAACSRSLVIKTARINQETHWSITRGMNETQRRDAIMKALESVMPWETFANEVRAAHDFVVPTRFVPRKGKGELFEQTVYRYAGVNAQGKDLARKASSDKDIVMGNAVVSADEKSVIKVSEMLCLRLWHDPEAKKGQGAWYADPVYKADIPALKDGTYIPRIAKQKYGRKVWKAVPNSALTQKPLEIYLGDLIKVGDKLGRYNGYNIATANWSFVDALTKKEIAFPSVGMLSNELQPIIIRESILDN

SEQ ID NO: 755 - protein, 1003 aa, unidentified
  REGION 1..1003: note = Description of Unknown: uncultivated organism with predicted taxonomy: Collinsella
  REGION 1..1003: note = MG14-79 effector
MEITINREIGKLGLPRHLVLGMDPGITSCGFALIDTANHEILDLGVRLFDSPTHPKTGQSLAVIRRGFRSTRRNIDRTQARLKHCLQVLKAYGLIPQDATKEYFHTTKGDKQPLKLRVDGLDRLLNDREWALVLYSLCKRRGYIPHGEGNQDKSSEGGKVLSALAANKEAIAETSCRTVGKWLAQQPQSRNRGGNYDKCVTHAQLIEETHILFDAQRSFGSKYASPEFEAAYIEVCDWERSRKDFDRRTYDLVGHCSYFPTEKRAARCTLTSELVSAYGALGNITIIHENGTSRALSATERDECIAILFSCEPIRGNKDCAVKFGALRKALDLSSGDYFKGVPAADEKTREVYKPKGWRVLRNTLNATNPILLQRLRDDRNLADAVMEAVAYSSALPVLQEQLQGLPLSEAEIEALCRLPYSSKALNGYGNRSKKALDMLLDCLEEPEVLNLTQAENDCGLLGLRIAGAQLERSDRLMPYETWIERTGRTNNNPVVIRAMSQMRKVVNAICRKWGVPNEIHVELDRELRLPQRAKDEIAKANKKNEKNRERIAGQIAELRGCTADEVTGKQIEKYRLWEEQECFDLYTGAKIEVDRLISDDTYTQIDHILPFSRTGENSRNNKVLVLAKSNQDKREQTPYEWMSHDGAPSWDAFERRVQENQKLSRRKKNFLLEKDLDTKEGEFLARSFTDTAYMSREVCAYLADCLLFPDDGAKAHVVPTTGRATAWLRRRWGLNFGSNGEKDRSDDRHHATDACVIAACSRSLVIKTARINQETHWSITRGMNETQRRDAIMKALESVMPWETFANEVRAAHDFVVPTRFVPRKGKGELFEQTVYRYAGVNAQGKDIARKASSDKDIVMGNAVVSADEKSVIKVSEMLCLRLWHDPEAKKGQGAWYADPVYKADIPALKDGTYVPRIAKAHTGRKAWKPVPESAMKKPPLEIYLGDLVQIGDFVGRFSGYNIDNANWSFVDRLTRIKISCPTVGKLSNDMSPFVVRESPIK

SEQ ID NO: 756 - protein, 1003 aa, unidentified
  REGION 1..1003: note = Description of Unknown: uncultivated organism with predicted taxonomy: Coriobacteriales
  REGION 1..1003: note = MG14-80 effector
MEITINREIGKLGLPRHLVLGMDPGIASCGFALIDTANHEILDLGVRLFDSPTHPKTGQSLAVIRRGFRSTRRNIDRTQARLKHCLQVLKAYGLIPQDATKEYFHTTKGDKQPLKLRVDGLDRLLNDREWALVLYSLCKRRGYIPHGEGNQDKSSEGGKVLSALAANKEAIAETSCRTVGEWLAQQPQSRNRGGNYDKYVTHAQLIEETHILFDAQRSFGSKYASPEFEAAYIEVCDWERSRKDFARRTYDLVGHCSYFPTEKRAARCTLTSELVSAYGALGNITIIHENGTSRALSATERDECIAILFSCEPIRGNKDCAVKFGALRKALDLSSGDYFKGVPAADEKTREVYKPKGWRVLRNTLNAANPILLQRLRDDRDLADAVMEAVAYSSALPVLQEQLQGLPLSEAEIEALCRLPYSSKALNGYGNRSKKALDMLLDCLEEPEVLNLTQAENDCGLLGLRIAGAQLERSDRLMPYETWIERTGRTNNNPVVIRSMSQMRKVVNAICRKWGVPNEIHVELDRELRLPQRAKDEIAKANKKNEKNRERIAGQIAELRGCTADEVTGKQIEKYRLWEEQEYFDLYTGAKIEVDRLISDDTYTQIDHILPFSRTGENSRNNKVLVLAKSNQDKREQTPYEWMSHDGAPSWDAFERRVQENQKLSRRKKNFLLEKDLDTKEGEFLARSFTDTAYMSREVCAYLADCLLFPDDGAKAHVVPTTGRATAWLRRRWGLNFGSNGEKDRSDDRHHATDACVIAACSPSLVIKTARINQETHWSITRGMNETQRRDAIMKALESVMPWETFANEVRAAHDFVVPTRFVPRKGKGELFEQTVYRYAGVNAQGKDIARKASSDKDIVMGNAVVSADEKSVIKVSEMLCLRLWHDPEAKKGQGAWYADPVYKADIPALKDGTYVPRIAKAHTGRKAWKPVPESAMAKPPLEIYFGDLVQIGDFIGRFSGYNINNANWSFTDRLTRLNLSCPTVGQLNNDLSPVVIRESPIK

SEQ ID NO: 757 - protein, 1004 aa, unidentified
  REGION 1..1004: note = Description of Unknown: uncultivated organism with predicted taxonomy: Collinsella
  REGION 1..1004: note = MG14-82 effector
MEITINREIGKLGLPRHLVLGMDPGIASCGFALIDTANREILDLGVRLFDSPTHPKTGQSLAVIRRGFRSTRRNIDRTQARLKHCLQILKAYGLIPQDATKEYFHTTKGDKQPLKLRVDGLDRLLNDREWALVLYSLCKRRGYIPHGEGNQDKSSEGGKVLSALAANKEAIAETSCRTVGEWLAQQPQSRNRGGNYDKCVTHAQLIEETHILFDAQRSFGSKYASPEFEAAYIEVCDWERSRKDFDRRTYDLVGHCSYFPTEKRAARCTLTSELVSAYGALGNITIIHDDGTSRALSATERDECIAILFSCEPIRGNKDCAVKFGALRKALDLSSGDYFKGVPAADEKTREVYKPKGWRVLRNTLNAANPILLQRLRDDRNLADAVMEAVAYSSDLPVLQEQLQGLPLSEAEIEALCRLPYSSKALNGYGNRSKKALDMLLDCLEEPEVLNLTQAENDCGLLGLRIAGTQLERSDRLMPYETWIELTGRTNNNPVVIRSMSQMRKVVNAVCRKWGVPNEIHVELDRELRLPQRAKDEIAKANKKNEKNRERIAGQIAELRGCTADEVTGKQIEKYRLWEEQEYFDLYTGAKIEVDRLISDDTYTQIDHILPFSRTGENSRNNKVLVLAKSNQDKREQTPYEWMSHDGAPSWDAFVRRVQENQKLSRRKKNFLLEKDLDTKEGEFLARSFTDTAYMSREVCAYLADCLLFPDDGAKAHVVPTTGRATAWLRRRWGLNFGSNREKDRSDDRHHATDACVIAACSRSLVIKTARINQETHWSITRGMNETQRRNAIMKALESVMPWETFANEVRAAHDFVVPTRFVPRKGKGELFEQTVYRYAGVNAQGKDLARKASSDKDIVMGNAVVSADEKSVIKVSEMLCLRLWHDPEAKKGQGAWYADPVYKADIPALKDGTYIPRIAKQKYGRKVWKAVPNSALTQKPLEIYLGDLIKVGDKLGRYNGYNIATANWSFVDALTKKEIAFPSVGMLSNELQPIIIRESILDN

SEQ ID NO: 758 - protein, 1003 aa, unidentified
  REGION 1..1003: note = Description of Unknown: uncultivated organism with predicted taxonomy: Collinsella
  REGION 1..1003: note = MG14-83 effector
MTSTVNREIGKLGLPRHLVLGMDPGIASCGFALIDINNHEILEIGVRLFDSPTHPKTGQSLAVIRRGFRSTRRNIDRTQARLKHCLEVLKKHGVIPQDATKEFFHTTKGDKQPLKLRVEGLDRMLTSREWALVLYSLCKRRGYIPHGEGSQDKSSEGGKVLSALAANKEAIAETSCRTVGEWLAQQPQSRNRGGNYDKCVTHAQLVEETHILFEAQRNFGSQYASAELEEAYVQVCDWERSRKDFDRRSYDLVGYCTYFPTEKRAARCTLTSELVAAYGALGNITIVREDGTTRTLTAAERDKCIAILFSCEPIRGNKDCAVKFGALRRELDLNSGDYFKGVPAADEKTREVYKPKGWRTLRNTLNTISPFLLRRLHDDRDLTDSVMEAVAYSSALPVLEEQLQALPLSPTEIGALCKLPYSSKALNGYGNRSKKALDMLLDCLEDSEVLGLTQAEDDCGLLGLRTQGAQLKRSEHLMPYEMWVELTGRTNNNPVVIRSMSQMRKVVNAICRKWGVPNEIHIELDRELRLPQRAKDDIAKAHKKNEKNRERIAGQIAELRGCSPEDVSGKLIEKYRLWEEQEYFDLYTGTKIEVDRLISDETYTQIDHILPFSRTGENSPSNKVLVLAKSNQDKREQTPFEWMSKEGAPSWDAFKRRVEENQKLGRRKKNFLLEEDLEAKEGEFLTRSFTDTAYMSREVCAYLADCLLFPEDGTKSHVVPTTGRATAWLRRRWGLNFGTNGEKDRSDDRHHATDACVIAACSRSLVIKTAHISEQTHWTVTKNLDKDERNRLRMKALENVMPWETFANEVRASHDFVIPTRFVPRKGKGELFEQTTYRYAGVNDKGKDLARKANSDQDIVMGNAVVSEDGKSIIKVSEMLCLRLWHDPEAKKGQGCWYADPVYKADIPALKDGTYVPKIAKAHTGRKAWKPVPESAMKHAPLEIYLGDLVKIDDFIGRFSGFDINSANWSFSDRLTRQKLNCPTVGRLNNALLPTIIRESTID

SEQ ID NO: 759 - protein, 1000 aa, unidentified
  REGION 1..1000: note = Description of Unknown: uncultivated organism with predicted taxonomy: Olsenella
  REGION 1..1000: note = MG14-84 effector
MDVTRPYLVLGLDPGIASCGFCLLDMSNHKILEMGSHLFKAPQEDKTKTSLAVTRRKARSIRRNTARTAARLKHCLELLAGAGLVPANADKTWLQTKKGDKPILKLRASGLDRLLTDREFAQVLYSLCGRRGYIPHGEGRLGETDEDESRKVLGAIKKNQDAMAAGSYRTVGEMLNAQGRSRNRGGDYSLCVYNSQIQDEAKALFASQRARGNTKATRELEDSYLACLTWEKKSLDHDTRVYELVGPCSYFPGEKRAASADVSSELCRAYERLGHIVIVHEDGSEQALTASEIDDYLKILFSTAPIKGNKECKVSYGTIRKDLDISGKSVFKGIAQDREKDEPFVPKAWRSLRRVLPKGLLARMLEDRKLGDAVCEALTFASSEASLIERLSDLGLSDDERDAILAVPFTGKLFKGYGSRSLKALGLLLGAFEEPEIRILTDAEKVTGLLDLRLSDRGVRGQLLPPYDSYDPTCRNPVVLRAMGRMRHIVNAIIRIHGVPDEIHIELGRELKMSNKEKSLVDKRNRENAANNKKWAATAAGILGCTPEEVPGRIIRKLILREEQGEKDLYTGEPIDLEHLVRDDRYCEIDHILPYSRTCDDGRANKVLVLSKSNQDKRERTPYEWMTSGEAGAPSWDSYRARVMAQVKNPRKRANYLNTDLGPETQAKFLARNLNDDRYMSVAVKNYLEDCLLFPEDGRKRHVTAVAGGATGNLRWVWGLNFGEGNIKDRADDRHHAIDAAIIAACSESTVKKVAEASAKGREAFKQLRKSRLADTQPWPTFATEVAARREFVVPTRMADHGVTGRVFEDTLYHLEGITDDKGKYPLVRAGEKTAKKGNVHFNPDGSVKLIDGMAFLRLWLDPTARPNGKVKGKWHAEPVYYADIPAIKAGTYVPRAIVQGIARINWEPIPQTALESKPLVLFKNDVLVVDGHIARYSNIGISVCQLLMLNLLTRDRVTDWPSVGSWGKDTQVRILQEDCLGHCYDSIAINPEDSTFQQR

SEQ ID NO: 760 - protein, 1003 aa, unidentified
  REGION 1..1003: note = Description of Unknown: uncultivated organism with predicted taxonomy: Collinsella
  REGION 1..1003: note = MG14-85 effector
MEITINREIGKLGLPRHLVLGMDPGIASCGFALIDTANHEILDLGVRLFDSPTHPKTGQSLAVIRRGFRSTRRNIDRTQARLKHCLQVLKAYGLIPQDATKEYFHTTKGDKQPLKLRVDGLDRLLNDREWALVLYSLCKRRGYIPHGEGNQDKSSEGGKVLSALAANKEAIAETSCRTVGEWLAQQPQSRNRGGNYDKCVTHAQLIEETHILFDAQRSFGSKYASPEFEAAYIEVCDWERSRKDFDRRTYDLVGHCSYFPTEKRAARCTLTSELVSAYGALGNITIIHENGTSRALSATERDECIAILFSCEPIRGNKDCAVKFGALRKALDLSSGDYFKGVPAADEKTREVYKPKGWRVLRNTLNATNPILLQRLRDDRNLADAVMEAVAYSSALPVLQEQLQGLPLSEAEIEALCRLPYSSKALNGYGNRSKKALDMLLDCLEEPEVLNLTQAENDCGLLGLRIAGAQLERSDRLMPYETWIERTGRTNNNPVVIRAMSQMRKVVNAICRKWGVPNEIHVELDRELRLPQRAKDEIAKANKKNEKNRERIAGQIAELRGCTADEVTGKQIEKYRLWEEQECFDLYTGAKIEVDRLISDDTYTQIDHILPFSRTGENSRNNKVLVLAKSNQDKREQTPYEWMSHDGAPSWDAFERRVQENQKLSRRKKNFLLEKDLDTKEGEFLARSFTDTAYMSREVCAYLADCLLFPDDGAKAHVVPTTGRATAWLRRRWGLNFGSNGEKDRSDDRHHATDACVIAACSRSLVIKTARINQETHWSITRGMDETQRRDAIMKALESVMPWETFANEVRAAHDFVVPTRFVPRKGKGELFEQTVYRYAGVNAQGKDIARKASSDKDIVMGNAVVSADEKSVIKVSEMLCLRLWHDPEAKKGQGAWYADPVYKADIPALKDGTYVPRIAKAHTGRKAWKPVPESAMKKPPLEIYLGDLVQIGDFVGRFSGYNIHNANWSFVDRLTRIKISCPTVGKLSNDMSPFVVRESPIK

SEQ ID NO: 761 - protein, 1003 aa, unidentified; identical to SEQ ID NO: 717
  REGION 1..1003: note = Description of Unknown: uncultivated organism with predicted taxonomy: Collinsella
  REGION 1..1003: note = MG14-87 effector

SEQ ID NO: 762 - protein, 1003 aa, unidentified; identical to SEQ ID NO: 717
  REGION 1..1003: note = Description of Unknown: uncultivated organism with predicted taxonomy: Collinsella
  REGION 1..1003: note = MG14-88 effector

SEQ ID NO: 763 - protein, 1002 aa, unidentified
  REGION 1..1002: note = Description of Unknown: uncultivated organism with predicted taxonomy: Collinsella
  REGION 1..1002: note = MG14-89 effector
MEITINREIGKLGLPRHLVLGMDPGIASCGFALIDTANHEILDLGVRLFDSPTHPKTGQSLAVIRRGFRSTRRNIDRTQARLKHCLQILKAYGLIPQDATKEYFHTTKGDKQPLKLRVDGLDRLLNDREWALVLYSLCKRRGYIPHGEGNQDKSSEGGKVLSALAANKEAIAETSCRTVGEWLAQQPQSRNRGGNYDKCVTHAQLIEETHILFDAQRSFGSKYASPELEAAYIEVCDWERSRKDFDRRTYDLVGHCSYFPTEKRAARCTLTSELVSAYGALGNITIIHENGTSRALSATERDECIAILFSCEPIRDNEDCAVKFGALRKALDLSSGDYFKGVPAADEKTREVYKPKGWRVLRNTLNAANPILLQRLRDDRDLADAVMEAVAYSSALPVLQEQLQGLPLSKAEIEALCRLPYSSKALNGYGNRSKKALDMLLDCLEEPEVLNLTQAENDCGLLGLRIAGAQLERSDRLMPYETWIERTGRTNNNPVVIRSMSQMRKVVNAVCRKWGVPNEIHVELDRELRLPQRAKDEIAKANKKNEKNRERIAGQIAELRGCTADEVTGKQIEKYRLWEEQECFDLYTGAKIEVDRLISDDTYTQIDHILPFSRTGENSRNNKVLVLAKSNQDKREQTPYEWMSHDGAPSWDAFERRVQENQKLSRRKKNFLLEKDLDTKEGEFLARSFTDTAYMSREVCAYLADCLLFPDDGAKAHVVPTTGRATAWLRRRWGLNFGSNGEKDRSDDRHHATDACVIAACSRSLVIKTARINQETHWSITRGMNETQRRDAIMKALESVMPWETFANEVRAAHDFVVPTRFVPRKGKGELFEQTVYRYAGVNAQGKDIARKASSDKDIVMGNAVVSADEKSVIKVSEMLCLRLWHDPEAKKGKGAWYADPVYKADIPSLKDGTYVPKIAKAATGRKAWKAIPQNVLNSAPLEIYLGDLVQIGNQKGRFRGINIDTVSWSFVDTLSKLPVKMPTIGRLNNETIPTVIRELLI

SEQ ID NO: 764 - protein, 1003 aa, unidentified
  REGION 1..1003: note = Description of Unknown: uncultivated organism with predicted taxonomy: Coriobacteriia
  REGION 1..1003: note = MG14-90 effector
MEITINREIGKLGLPRHLVLGMDPGIASCGFALIDTANHEILDLGVRLFDSPTHPKTGQSLAVIRRGFRSTRRNIDRTQARLKRCLQVFKAYGLIPQDATKEYFHTTKGDKQPLKLRVDGLDRLLSAREWALVLYSLCKRRGYIPHGEGNQDKSSEGGKVLSALAANKEAIAETSCRTVGEWLAQQPQSRNRGGNYDKCVTHAQLIEETHILFDAQRSFGSKYASPEFEAAYIEVCDWERSRKDFDRRTYDLVGHCPYFPTEKRAARCTLTSELVSAYGALGNITIIHENGTSRALSATEHDECIAILFSCEPIRGNKDCAVKFGALRKALDLSSGDYFKGVPAADEKTREVYKPKGWRVLRNTLNAANPILLQRLRDDRDLADAVMEAVAYSSALPVLQERLQGLPLSEAEIEALCRLPYSSKALNGYGNRSKKALDMLLDCLEEPEVLNLTQAENDCGLLGLRIAGAQLERSDRLMPYETWIERTGRTNNNPVVIRSMSQMRKVVNAICRKWGVPNEIHVELDRELRLPQRAKDEIAKANKKNEENRERIARQIAELRGCTADEVTGKQIEKYRLWEEQECFDLYTGAKIEVDRLISDDTYTQIDHILPFSRTGENSRNNKVLVLAKSNQDKREQTPYEWMSHDGAPSWDAFERRVQENQKLSRRKKNFLLEKDLDTKEGEFLARSFTDTAYMSREVCAYLADCLLFPDDGAKAHVVPTTGRATAWLRRRWGLNFGSNGEKDRSDDRHHATDACVIAACSRRLVIKTARINQEMHWSMTKGMSKAQRQDAIMKALENAMPWETFANEVRVAHDFVVPTRFVPRKGKGELFEQTVYRYAGVNAQGKDIARKASSDKDIVMGNAVVSADEKSVIKVSEMLCLRLWHDPKAKKGQGAWYADPVYKADIPALKDGTYVPRIAKAHTGRKAWKPVPESAMKKPPLEIYLGDLVQIGDFVGRFSGFDIDNANWSFSDRLTRKKLRSPTVNKLSNDLSPLVIRESPIR

SEQ ID NO: 765 - protein, 1026 aa, unidentified; identical to SEQ ID NO: 746
  REGION 1..1026: note = Description of Unknown: uncultivated organism with predicted taxonomy: Collinsella tanakaei
  REGION 1..1026: note = MG14-91 effector

SEQ ID NO: 766 - protein, 1004 aa, unidentified
  REGION 1..1004: note = Description of Unknown: uncultivated organism with predicted taxonomy: Collinsella
  REGION 1..1004: note = MG14-92 effector
MEITINREIGKLGLPRHLVLGMDPGIASCGFALIDTANHEILDLGVRLFDSPTHPKTGQSLAVIRRGFRSTRRNIDRTQARLKHCLQVLKAYGLIPQDATKEYFHTTKGDKQPLKLRVDGLCRLLNDREWALVLYSLCKRRGYIPHGEGNQDKSSEGGKVLSALAANKEAIAETSCRTVGEWLAQQPQSRNRGGNYDKCVTHAQLIEETHILFDAQRSFGSKYASPEFEAAYIEVCDWERSRKDFDRRTYDLVGHCSYFPTGKRAARCTLTSELVSAYGALGNITIIHENGTSRALSATERDECIAILFSCEPIRGNKDCAVKFGALRKALDLSSGDYFKGVPAADEKTREVYKPKGWRVLRNTLNAANPILLQRLRDDRDLADAVMEAVAYSSALPVLQEQLQGLPLSKAEIEALCRLPYSSKALNGYGNRSKKALDMLLDCLEEPEVLNLTQAENDCGLLGLRIAGAQLERSDRLMPYETWIEHTGRTNNNPVVIRSMSQMRKVVNAICRKWGVPNEIHVELDRELRLPQRAKDEIAKANKKNEKNRERIAGQIAELRGCTADEVTGKQIEKYRLWEEQECFDLYTGAKIEVDRLISDDTYTQIDHILPFSRTGENSRNNKVLVLAKSNQDKREQTPYEWMSHDGAPSWDAFERRVQENQKLSRRKKNFLLEKDLDAKEGDFLARSFTDTAYMSREVCAYLADCLQFPDDGAKAHVVPTTGRATAWLRRRWGLNFGSNGEKDRSDDRHHATDACVIAACSRSLVIKTARINQETHWSITRGMNETQRHDAIMKALESVMPWETFANEVRAAHDFVVPTRFVPRKGKGELFEQTVYRYAGVNAQGKDLARKVGSDKDIVMGNAVVSADEKSVVKVSEMLCLRLWHDPEAKKGQGAWYADPVYKADIPALKDGTYVPRIAKQKYGRKVWKAVPNSALTQKPLEIYLGDLIKVGDKLGRYNGYNIATANWSFVDALTKKEIAFPSVGMLSNELQPIIIRESILDN

SEQ ID NO: 767 - protein, 1003 aa, unidentified
  REGION 1..1003: note = Description of Unknown: uncultivated organism with predicted taxonomy: Collinsella
  REGION 1..1003: note = MG14-93 effector
MEITINREIGKLGLPRHLVLGMDPGIASCGFALIDTANHEILDLGVRLFDSPTHPKTGQSLAVIRRGFRSTRRNIDRTQARLKHCLQVFKAHGLIPQDATKEYFHTTKGDKQPLKLRVDGLDRLLSDREWALVLYSLCKRRGYIPHGEGNQDKSSEGGKVLSALAANKEAIAEASCRTVGEWLAQQPQSRNRGGNYDKCVTHAQLIEETHILFDAQRSFGSKYASPELEAAYIEVCDWERSRKDFDRRTYDLVGHCSYFPTEKRAARCTLTSELVSAYGALGNITIIHDDGTSRALSATERDECIAILFSCEPIRGNKDCAVKFGALRKALDLSSGDYFKGVPAADEKTREVYKPKGWRVLRNTLNAANPILLQRLRDDRDLADAVMEAVAYSSALPVLQERLQGLPLSEAEIEALCRLPYSSKALNGYGNRSKKALDMLLDCLEEPEVLNLTQAENDCGLLGLRIAGAQLERSDRLMPYELWAERTGRTNNNPVVIRSMSQMRKVVNAICRKWGVPNEIHVELDRELRLPQRAKDEIAKANKKNEKNRERIAGQIAELRGCTADEVTGKQIEKYRLWEEQECFDLYTGAKIEVDRLISDDTYTQIDHILPFSRTGENSRNNKVLVLAKSNQDKREQTPYEWMSHDGAPSWDAFERRVQENQKLSRRKKNFLLEKDLDAKEGDFLARSFTDTAYMSREVCAYLADCLQFPDDGAKAHVVPTTGRATAWLRRRWGLNFGSNGEKDRSDDRHHATDACVIAACSRSLVIKTARLNQETHWSITRGMNEIQRHDAIMKALESVMPWETFANEVRAAHDFVVPTRFVPRKGKGELFEQTVYRYAGVNAQGKDLARKAGSDKDIVMGNAVVSADEKSVIKVSEMLCLRLWHDPEAKKGQGAWYADPVYKADIPALKDGTYVPRIAKAHTGRKAWKPVPKSAMAKPPLEIYFDDLVQIGDFIGRFSGYNINSANWSFTDRLTRLNLSCPTVGQLNNDLSPVVIRESPIK

SEQ ID NO: 768 - protein, 1003 aa, unidentified
  REGION 1..1003: note = Description of Unknown: uncultivated organism with predicted taxonomy: Collinsella
  REGION 1..1003: note = MG14-94 effector
MEITINREIGKLGLPRHLVLGMDPGIASCGFALIDTANHEILDLGVRLFDSPTHPKTGQSLAVIRRGFRSTRRNIDRTQARLKHCLQILKAYGLIPQDATKEYFHTTKGDKQPLKLRVDGLDRLLNDREWALVLYSLCKRRGYIPHGEGNQDKSSEGGKVLSALAANKEAIAETSCRTVGEWLAQQPQSRNRGGNYDKCVTHAQLIEETHILFDAQRSFGSKYASPEFEAAYIEVCDWERSRKDFDRRTYDIVGHCSYFPTEKRAARCTLTSELVSAYGALGNITIIHENGTSRALTATERDECIAILFSCEPIRGNKDCAVKFGALRKALDLSSGDYFKGVPAADEKTREVYKPKGWRVLRNTLNATNPILLQRLRDDRNLADAVMEAVAYSSALPVLQEQLQGLPLSEAEIEALCRLPYSSKALNGYGNRSKKALDMLLDCLEEPEVLNLTQAENDCGLLGLRIAGAQLERSDRLMPYETWIERTGRTNNNPVVIRAMSQMRKVVNAICRKWGVPNEIHVELDRELRLPQRAKDEIAKANKKNEKNRERIAGQIAELRGCTADEVTGKQIEKYRLWEEQECFDLYTGAKIEVDRLISDDTYTQIDHILPFSRTGENSRNNKVLVLAKSNQDKREQTPYEWMSHDGAPSWDAFERRVQENQKLSRRKKNFLLEKDLDTKEGEFLARSFTDTAYMSREVCAYLADCLLFPDDGAKAHVVPTTGRATAWLRRRWGLNFGSNGEKDRSDDRHHATDACVIAACSRSLVIKTARINQETHWSITRGMNETQRRDAIMKALESVMPWETFANEVRAAHDFVVPTRFVPRKGRGELFEQTVYRYAGVNAQGKDIARKASSDKDIVMGNAVVSADEKSVIKVSEMLCLRLWHDPEAKKGQGAWYADPVYKADIPALKDGTYVPRIAKAHTGRKAWKPVPESAMKKPPLEIYLGDLVQIGDFVGRFSGYNIDNANWSFVDRLTRIKISCPTVGKLSNDMSPFVVRESPIK

SEQ ID NO: 769 - protein, 1046 aa, unidentified
  REGION 1..1046: note = Description of Unknown: uncultivated organism with predicted taxonomy: Collinsella
  REGION 1..1046: note = MG14-95 effector
MDKAKGADIGELGFDPATFATALMTLEEFRSKDRVIWAGLDIGVASTGLCLVDVRNHEIVLMASHLFKSPVVDKKKATAAPESLASVRRGARSVRRNIMREGRRKKAIRAALADFDLIPADTDGEWFSARRDERTVVRLRSKALGYLLNSRELARVLYSFASHRGYIDHGKSDKEDDAGKVKKALAANHAALADGGCKTFGQYLAGQPRSRNRAGDYSYTADIGMTVDEVRTIFARQRELGSEIASKALEERYIAELTWLTDTSKRDRSTYLKVGFCTYLGAPYRRGATSTISFEMVRAHQTLCNTVILHADGTSSTIPGDIRIEIVRELFDVKRSVKPLKWSGLRRRLGLAECDSFKGRPAEEEKRDCIALPAWAVLCSGLYENHRDLLERLHDHIDDADAVCSALTFASSAASLAGRLAPLAITDDEVEAIIDLPYSARLFSGYANASLEALQMLRGTFEDPHVTSLRQAEEDSGLAQARAMLAEERGGSADGLLCAFSDYDPTCRNPVVLRATAQVRRMVNSVIRHYGLPDVIRVEVARDLKRSKHEREIVAESNRARLELNEQAKRDIIEFLGLPDDHHVRGRDLALVKLYREQGGKDPYTGAGIDFRRMLEEHGYAEIDHILPVSRTCDDSQANKALCLTKSNRDKSNRSPYEWMTSGEASAPDWGEFCGRMERWAKMCETRRYARKKLANLTCENLAERAGNFIDRNLNDTRYMSVALAKWLRECLPFTKDGHEHVFCVAGGATALMRSVWDIGITGPDGKKNRDDDRHHAVDAAVIACCTPGIVKNVALVNEGHARADVRQRLFSDSLPYPEFKEQVDAWISCIVPTLTLPNTVTGSVLKDTVYPYLGRDEAGKDLYITVKRDKDGRIVERKVNKATTMWKDGQGGCRAYGSMCALEAVFDASAGKRGRWSFDPVYCIDIPHRDAERRTMRAFSKEKAIDLWDTVAVPEAAPRMTIRRGDVLVCDGKAARFHCFDISVNAIRLFSQRGGKQLQATGPLSAEAFPPPSKWGEGVRIMQEDCLGLCWLSFLAQRAADVQME

SEQ ID NO: 770 - protein, 1002 aa, unidentified
  REGION 1..1002: note = Description of Unknown: uncultivated organism with predicted taxonomy: Collinsella
  REGION 1..1002: note = MG14-96 effector
MEITINREIGKLGLPRYLVLGMDPGIASCGFALIDTANHEILDLGVRLFDSPTHPKTGQSLAVIRRGFRSTRRNIDRTQARLKHCLQVLKAYGLIPQDATKEYFHTTKGDKQPLKLRVDGLDRLLNDREWALVLYSLCKRRGYIPHGEGSQDKSSEGGKVLSALAANKEAIAETSCRTVGEWLAQQPQSRNRGGNYDKCVTHAQLIEETHILFDAQRSFGSKYASPEFEASYIEVCDWERSRKDFDRRTYDLVGHCSYFPTEKRAARCTLTSELVSAYGALGNITIIHENGTSRALSATERDECIAILFSCEPIRGNKDCAVKFGALRKALDLSSGDYFKGVPAADEKTREVYKPKGWRVLRNTLNAANPILLQRLRDDRNLADAVMEAVAYSSALPVLQEQLQGLPLSEAEIEALCRLPYSSKALNGYGNRSKKALDMLLDCLEEPEVLNLTQAENGCGLLGLRIAGAQLERSDRLMPYETWIERTGRTNNNPVVIRAMSQMRKVVNAICRKWGVPNEIHVELDRELRLPQRAKDEIAKANKKNEKNRERIAGQIAELRGCTADEVTGKQIEKYRLWEEQECFDLYTGAKIEVDRLISDDTYTQIDHILPFSRTGENSRNNKVLVLAKSNQDKREQTPYEWMSHDGAPSWDAFERRVQENQKLSRRKKNFLLEKDLDTKEGEFLARSFTDTAYMSREVCAYLADCLLFPDDGAKAHVVPTTGRATAWLRRRWGLNFGSNGEKDRSDNRHHATDACVIAACSRSLVIKTARINQETHWSITRGMNETQRRDAIMKALESVMPWETFANEVRAAHDFVVPTRFVPRKGKGELFEQTVYRYAGVNAQGKDIARKASSDKDIVMGNAVVSADEKSVIKVSEMLCLRLWHDPEAKKGQGAWYADPVYKADIPALKDGTYVPRIAKAATGRKAWKAIPQNVLNSAPLEIYLGDLVQIGNQKGRFRGINIDTVSWSFVDTLSKLPVKMPTIGRLNNETIPTVIRELLI

SEQ ID NO: 771 - protein, 1002 aa, unidentified
  REGION 1..1002: note = Description of Unknown: uncultivated organism with predicted taxonomy: Collinsella
  REGION 1..1002: note = MG14-97 effector
MEITINREIGKLGLPRHLVLGMDPGIASCGFALIDTANHEILDLGVRLFDSPTHPKTGQSLAVIRRGFRSTRRNIDRTQARLKHCLQVLKAYGLIPQDATKEYFHTTKGDKQPLKLRVDGLNRLLNDREWALVLYSLCKRRGYIPHGEGNQDKSSEGGKVLSALAANKEAIAETSCRTVGEWLAQQPQSRNRGGNYDKCVTHAQLIEETHILFDAQRSFGSKYASPEFEAAYIEVCDWERSRKDFDRRTYDLVGHCSYFPTEKRAARCTLTSELVSAYGALGNITIIHENGTSRALSATERDECIAILFSCEPIRGNKDCAVKFGALRKALDLSSGDYFKGVPAADEKTREVYKPKGWRVLRNTLNAANPILLQRLRDDRNLADAVMEAVAYSSALPVLQEQLQGLPLSEAEIEALCRLPYSSKALNGYGNRSKKALDMLLDCLEEPEVLNLTQAENDCGLLGLRIAGAQLERSDRLMPYETWIERTGRTNNNPVVIRSMSQMRKVVNAVCRKWGVPNEIHVELDRELRLPQRAKDEIAKANKKNEKNRERIAGQIAELRGCTADEVTGKQIEKYRLWEEQECFDLYTGAKIEVDRLISDDTYTQIDHILPFSRTGENSRNNKVLVLAKSNQDKREQTPYEWMSHDGAPSWDAFERRVQENQKLSRRKKNFLLEKDLDTKEGEFLARSFTDTAYMSREVCAYLADCLLFPDDGAKAHVVPTTGRATAWLRRRWGLNFGSNGEKDRSDDRHHATDACVIAACSRSLVIKTARINQETHWSITRGMNETQRRDAIMKALESVMPWETFANEVRAAHDFVVPTRFVPRKGKGELFEQTVYRYAGVNAQGKDLARKASSDKNIVMGNAVVSADEKSVIKVSEMLCLRLWHDPEAKKGQGAWYADPVYKADIPALKDGTYVPRIAKAATGRKAWKAIPQNVLNSAPLEIYLGDLVQIGNQKGRFRGINIDTVSWSFVDTLSKLPVKMPTIGRLNNETIPTLIRELLI

SEQ ID NO: 772 - protein, 1003 aa, unidentified
  REGION 1..1003: note = Description of Unknown: uncultivated organism with predicted taxonomy: Collinsella
  REGION 1..1003: note = MG14-98 effector
MEITINREIGKLGLPRHLVLGMDPGIASCGFALIDTANHEILDLGVRLFDSPTHPKTGQSLAVIRRGFRSTRRNIDRTQARLKHCLQVLKAYGLIPQDATKEYFHTTKGDKQPLKLRVDGLDRLLNDREWALVLYSLCKRRGYIPHGEGSQDKSSEGCKVLSALAANKEAIAETSCRTVGEWLAQQPQSRNRGGNYDKCVTHAQLIEETHILFDAQRSFGSKYASPEFEAAYIEVCDWERSRKDFDRRTYDLVGHCSYFPTEKRAARCTLTSELVSAYGALGNITIIHENGTSRALSATERDECIAILFSCEPIRGNKDCAVKFGALRKALDLSSGDYFKGVPAANEKTREVYKPKGWRVLRNTLNAANPILLQRLRDDRDLADAVMEAVAYSSALPVLQEQLQGLPLSEAEIEALCRLPYSSKALNGYGNRSKKALDMLLDCLEEPEVLNLTQAENDCGLLGLRIAGAQLERSDRLMPYETWIELTGRTNNNPVVIRSMSQMRKVVNAICRKWGVPNEIHVELDRELRLPQRAKDEIAKANKKNEKNRERIAGQIAELRGCTADEVTGKQIEKYRLWEEQECFDLYTGAKIEVDRLISDDTYTQIDHILPFSRTGENSRNNKVLVLAKSNQDKREQTPYEWMSHDDAPSWDAFERRVQENQKLSRRKKNFLLEKDLDTKEGEFLARSFTDTAYMSREVCAYLADCLLFPDDGAKAHVVPTTGRATAWLRRRWGLNFGSNGEKDRSDDRHHATDACVIAACSRSLVIKTARINQETHWSITRGMNEAQRRDAIMKALESVMPWETFANEVRAAHDFVVPTRFVPRKGKGELFEQTVYRYAGVNAQGKDIARKASSDKDIVMGNAVVSADEKSVIKVSEMLCLRLWHDPEAKKGQGAWYADPVYKADIPALKDGTYVPRIAKAHTGRKAWKPVPESAMKKQPLEMYLGDLVQIGDFVGRFSGYNIDNANWSFVDRLTRIKISCPTVGKLSNDMSPFVVRESPIK

SEQ ID NO: 773 - protein, 1002 aa, unidentified; identical to SEQ ID NO: 685
  REGION 1..1002: note = Description of Unknown: uncultivated organism with predicted taxonomy: Olsenella
  REGION 1..1002: note = MG14-99 effector

SEQ ID NO: 774 - protein, 1004 aa, unidentified
  REGION 1..1004: note = Description of Unknown: uncultivated organism with predicted taxonomy: Collinsella
  REGION 1..1004: note = MG14-100 effector
MEITINREIGKLGLPRHLVLGMDPGIASCGFALIDTANHEILDLGVRLFDSPTHPKTGQSLAVIRRGFRSTRRNIDRTQARLKHCLQVLKAYGLIPQDATKEYFHTTKGDKQPLKLRVDGLDRLLNDREWALVLYSLCKRRGYIPHGEGNQDKSSEGGKVLSALAANKEAIAETSCRTVGEWLAQQPQSRNRGGNYDKCVTHAQLIEETHILFDAQRSFGSKYASPEFEAAYIEVCDWERSRKDFDRRTYDLVGHCSYFPTEKRAARCTLTSELVSAYGALGNITIIHENGTSRALSATERDECIAILFSCEPIRGNKDCAVKFGALRKALDLSSGDYFKGVPAADEKTREVYKPKGWRVLRNTLNATNPILLQRLCDDRNLADAVMEAVAYSSALPVLQEQLQGLPLSKAEIEALCRLPYSSKALNGYGNRSKKALDMLLDCLEEPEVLNLTQAENDCGLLGLRIAGAQLERSDRLMPYETWIERTGRTNNNPVVIRAMSQMRKVVNAICRKWGVPNEIHVELDRELRLPQRAKDEIAKANKKNEKNRERIAGQIAELRGCTADEVTGKQIEKYRLWEEQECFDLYTGAKIEVDRLISDDTYTQIDHILPFSRTGENSRNNKVLVLAKSNQDKREQTPYEWMSHDGAPSWDAFERRVQENQKLSRRKKNFLLEKDLDTKEGEFLARSFTDTAYMSREVCAYLADCLLFPDDGAKAHVVPTTGRATAWLRRRWGLNFGSNGEKDRSDDRHHATDACVIAACSRSLVIKTARINQETHWSITRGMNETQRRDAIMKALESVMPWETFANEVRAAHDFVVPTRFVPRKGKGELFEQTVYRYAGVNAQGKDIARKASSDKDIVMGNAVVSADEKSVIKVSEMLCLRLWHDPEAKKGQGAWYADPVYKADIPALKDGTYVPRIAKQKYGRKVWKAVPNSALTQKPLEIYLGDLIKVGDKLGRYNGYNIATANWSFVDALTKKEIAFPSVGMLSNELQPIIIRESILDN

SEQ ID NO: 775 - protein, 1045 aa, unidentified
  REGION 1..1045: note = Description of Unknown: uncultivated organism with predicted taxonomy: Eggerthella sp. AM16-19
  REGION 1..1045: note = MG14-101 effector
MDKAQGVDIGELGFDPGTFATALMTLEEFRSKDRVIWAGIDIGVASTGLCLVDVRNHEIVLMTSHLFKSPVVDKKKATAAPESLASVRRGARSVRRNIMREGRRKKAIRAVLADSDLIPADADGEWFAARRDERTVVKLRSKALGHLLNSRELARVLYSFASHRGYIDHGKSDKDDDAGKVKKALAANHAALAGGGCETFGQYLAVQPRSRNRAGDYSFTSDIGMTVDEVRTIFLRQREMGSEIATEALEERYIAELTWLTDTSKRDMSTYLKVGFCTYRGAPYRRGATSTTSFEMVRAHQTLANTVILHEDGTSSTIPGNTRIEIVRELFAVKKSVKPLKWSGLRRRLGLSDGDSFKGRPLEEEKRDCIALPAWAVLCSGLYEDHRDLLERLHDHIEDADAVCSALTYASSAASLAGRLAPLALTDDEVEAIIDLPYSARLFSGYASASLEALQMLRGTLEDPCVTSLRQAEEDSGLAQARAMLAEEHGEAADGLLCAFSDYDPTCKNPVVLRATAQVRRMVNSVIRHYGLPDVIRVEVARDLKRSKHEREIVAESNRARHELNEQAKRDIVEFLGLHDDDHVRGRDLDMVKLYREQGGKDPYTGTGIDFGRMLEERGYVEIDHILPISRTCDNSQANKVLCLTKSNRDKSNRSPYEWMTSGEATAPDWDEFCGRMERWAKMCEPRRYARKKLANLTCENLAERAGGFIDRNLNDTRYMSVALAKWLRECLPFARDGHEHVFCVAGGATALMRSVWNIGITGPDGKKNRDDDRHHAVDAAVIACCTPGIVKNVALVNEGHARADVRQRLFRDSLPYPEFKEQVNAWIPCIVPTLTLPNTVTGSVLKDTVYPYLGRDDAGKDLYLTVKRDKDGRIVDRKVNKATTMWKDGQGGCRAYGSMCALDAVFDASVGKRGKWSFDPVYCIDIPHREDEIRTIRAFSKERAIDLWDSIKVPEDAQRMRIRRGDVLVCDGKAARFYCFDISVNAIRLYSQRGGKQLQTTGPLSSEAFPPPSKWGDDIRVMPEDCLGLCWLSFLSNRAIAQMD

SEQ ID NO: 776 - protein, 1000 aa, unidentified
  REGION 1..1000: note = Description of Unknown: uncultivated organism with predicted taxonomy: Olsenella sp. KH3B4
  REGION 1..1000: note = MG14-102 effector
MDATRPYLVLGLDPGIASCGFCLLDMTNHKILEMGSHLFKAPQEDKTKTSLAVTRRKARSIRRNTARTSARLKHCLELLAGAGLVPADADKTWLQTKKGDKPILKLRAGGLDRLLTDREFAQVLYSLCGRRGYIPHGEGRLGETDEDESKKVLGAIKKNQDAMAAGSYRTVGEMLNAQGRSRNRGGDYSLCVYNSQIQDEAKALFASQRARGNTKATRELEDSYLACLTWEKKSLDHDTRVYELVGPCSYFPGEKRAASADVSSELCRAYERLGHIVIVHEDGSEQALTAGEIDDYLKILFSTAPIKGNKECKVTYGTIRKDLDISGKSVFKGIAQDKEKDEPFAPKAWRSLRRVLPERLLASMLEDRNLGDAVCEALTFASSEASLIERLSDLDLSDDERDAILAVPFTGKLFKGYGSRSLKALRLLLGAFEEPEIRILTDAEKATGLLDLRLSDRGVRGQLLPPYDSYDPTCRNPVVLRAMGRMRHIVNAIIRIHGVPDEIHIELGRDLKMSNKEKSLVDKRNRENAASNKKWATTAAGILGCTPEEVPGRIIRKLILREEQGEKDLYTGDSIDLEHLVRDDRYCEIDHILPYSRTCDDSRANKTLVLSKSNQDKRERTPYEWMTSGEAGAPSWDSYRARVMAQVKNPRKRANYLNTDLGPETQAKFLARNLNDDRYMSVAVKNFLEDRLLFPEDGRKRHVTAVAGGATGNLRWVWGLNFGEGNIKDRTDDRHHAVDAAIIAACSESTVKKVAKASAKGREAFKQLRKSRLADTQPWPTFAAEVAARREFVVPTRMADHGVMGRVFKDTLYHLEGITEDKGKYPLVRAGEKTVKKGNVRINPDGSVKLIDGMAFLRLWLDPTARPNGKVKGKWYAEPVYYVDIPAIKAGAYVPRACTIHVARVNWKPVPEEAMQIEPIMLYAGDVVEINNRLVRYSGFDINGATLYYQSLLNGATTTAIPSLGTWGKDTQVRVLQEDCLGHCYDGIAINPEDSTFQQR

SEQ ID NO: 777 - protein, 1003 aa, unidentified
  REGION 1..1003: note = Description of Unknown: uncultivated organism with predicted taxonomy: Collinsella
  REGION 1..1003: note = MG14-103 effector
MEITINREIGKLGLPRHLVLGMDPGIASCGFALIDTANHEILDLGVRLFDSPTHPKTGQSLAVIRRGFRSTRRNIDRTQARLKHCLQVFKAHGLIPQDATKEYFHTTKGDKQPLKLRVDGLDRLLSDREWALVLYSLCKRRGYIPHGEGNQDKSSEGGKVLSALAANKEAIAEASCRTVGEWLAQQPQSRNRGGNYDKCVTHAQLIEETHILFDAQRSFGSKYASPELEAAYIEVCDWERSRKDFDRRTYDLVGHCSYFPTEKRAARCTLTSELVSAYGALGNITIIHDDGTSRALSATERDECIAILFSCEPIRGNKDCAVKFGALRKALDLSSGDYFKGVPAADEKTREVYKPKGWRVLRNTLNAANPILLQRLRDDRDLADAVMEAVAYSSALPVLQERLQGLPLSEAEIEALCRLPYSSKALNGYGNRSKKALDMLLDCLEEPEVFNLTQAENDCGLLGLRIAGAQLERSDRLMPYELWAERTGRTNNNPVVIRSMSQMRKVVNAICRKWGVPNEIHVELDRELRLPQRAKDEIAKANKKNEKNRERIAGQIAELRGCTADEVTGKQIEKYRLWEEQEYFDLYTGAKIEVDRLISDDTYTQIDHILPFSRTGENSRNNKVLVLAKSNQDKREQTPYEWMSHDGAPSWDAFERRVQENQKLSRRKKNFLLEKDLDAKEGDFLARSFTDTAYMSREVCAYLADCLQFPDDGAKAHVVPTTGRATAWLRRRWGLNFGSNGEKDRSDDRHHATDACVIAACSRSLVIKTARLNQETHWSITRGMNEIQRHDAIMKALESVMPWETFANEVRAAHDFVVPTRFVPRKGKGELFEQTVYRYAGVNAQGKDLARKAGSDKDIVMGNAVVSADEKSVIKVSEMLCLRLWHDPEAKKGQGAWYADPVYKADIPALKDGTYVPRIAKAHTGRKAWKPVPKSAMAKPPLEIYFDDLVQIGDFIGRFSGYNINSANWSFTDRLTRLNLSCPTVGQLNNDLSPVVIRESPIK

SEQ ID NO: 778 - protein, 1003 aa, unidentified
  REGION 1..1003: note = Description of Unknown: uncultivated organism with predicted taxonomy: Collinsella
  REGION 1..1003: note = MG14-104 effector
MEITINREIGKLGLPRHLVLGMDPGIASCGFALIDTANHEILDLGVRLFDSPTHPKTGQSLAVIRRGFRSTRRNIDRTQARLKHCLQVFKAHGLIPQDATKEYFHTTKGDKQPLKLRVDGLDRLLSDREWALVLYSLCKRRGYIPHGEGNQDKSSEGGKVLSALAANKEAIAEASCRTVGEWLAQKPQSRNRGGNYDKCVTHAQLIEETHILFDAQRSFGSKYASPELEAAYIEVCDWERSRKDFDRRTYDLVGHCSYFPTEKRAARCTLTSELVSAYGALGNITIIHDDGTSRALSATERDECIAILFSCEPIRGNKDCAVKFGALRKALDLSSGDYFKGVPAADEKTREVYKPKGWRVLRNTLNAANPILLQRLRDDRDLADAVMEAVAYSSALPVLQERLQGLPLSEAEIEALCRLPYSSKALNGYGNRSKKALDMLLDCLEEPEVLNLTQAENDCGLLGLRIAGAQLERSDRLMPYELWAERTGRTNNNPVVIRSMSQMRKVVNAICHKWGVPNEIHVELDRELRLPQRAKDEIAKANKKNEKNRERIAGQIAELRGCTADEVTGKQIEKYRLWEEQECFDLYTGAKIEVDRLISDDTYTQIDHILPFSRTGENSRNNKVLVLAKSNQDKREQTPYEWMSHDGAPSWDTFERRVQENQKLSRRKKNFLLEKDLDAKEGDFLARSFTDTAYMSREVCAYLADCLQFPDDGAKAHVVPTTGRATAWLRRRWGLNFGSNGEKDRSDDRHHATDACVIAACSRSLVIKTARLNQETHWSITRGMNEIQRHDAIMKALESVMPWETFANEVRAAHDFVVPTRFVPRKGKGELFEQTVYRYAGVNAQGKDLARKAGSDKDIVMGNAVVSADEKSVIKVSEMLCLRLWHVPEAKKGQGAWYADPVYKADIPALKDGTYVPRIAKAHTGRKAWKPVPKSAMAKPPLEIYFDDLVQIGDFIGRFSGYNINSANWSFTDRLTRLNLSCPTVGQLNNDLSPVVIRESPIK

SEQ ID NO: 779 - protein, 1005 aa, unidentified; identical to SEQ ID NO: 695
  REGION 1..1005: note = Description of Unknown: uncultivated organism with predicted taxonomy: Collinsella
  REGION 1..1005: note = MG14-105 effector

SEQ ID NO: 780 - protein, 1003 aa, unidentified; identical to SEQ ID NO: 728
  REGION 1..1003: note = Description of Unknown: uncultivated organism with predicted taxonomy: Collinsella
  REGION 1..1003: note = MG14-106 effector

SEQ ID NO: 781 - protein, 965 aa, unidentified
  REGION 1..965: note = Description of Unknown: uncultivated organism with predicted taxonomy: Collinsella
  REGION 1..965: note = MG14-107 effector
MEITINREIGKLGLPRHLVLGMDPGIASCGFALIDTANHEILDLGVRLFDSPIHPKTKQSLAVIRRGFRSTRRNIDRTQARLKHCLQVLKAYGLIPQDATKEYFHTTKGDKQPLKLRVDGLDRLLNDREWALVLYSLCKRRGYIPHGEGNQDKSSEGGKVLSALAANKEAIAETSCRTVGKWLAQQPQSRNRGGNYDKCVTHAQLIEETHILFDAQRSFGSKYASPEFEAAYIEVCDWERSRKDFDRRTYDIVGHCSYFPTEKRAARCTLTSELVSAYGALGNITIIHENGTSRALTATERDECIAILFSCEPIRGNKDCAVKFGALRKALDLSSGDYFKGVPAADEKTREVYKPKGWRVLRNTLNAANPILLQRLRDDRDLADAVMEAVAYSSALPVLQEQLQGLPLSEAEIEALCRLPYSSKALNGYGNRSKKALDMLLDCLEEPEVLNLTQAENDCGLLGLRIAGAQLERSDRLMPYETWIERTGRTNNNPVVIRSMSQMRKVVNAVCRKWGVPNEIHVELDRELRLPQRAKDEIAKANKKNEKNRERIAGQIAELRGCTADEVTGKQIEKYRLWEEQEYFDLYTGAKIEVDRLISDDTYTQIDHILPFSRTGENSRNNKVLVLAKSNQDKREQTPYEWMSHDGAPSWDAFERRVQENQKLSRRKKNFLLEKDLDTKEGEFLARSFTDTAYMSREVCAYLADCLLFPDDGAKAHVVPTTGRATAWLRRRWGLNFGSNGEKDRSDDRHHATDACVIAACSPSLVIKTARINQETHWSITRGMNETQRRDAIMKALESVMPWETFANEVRAAHDFVVPTRFVPRKGKGELFEQTVYRYAGVNAQGKDIARKASSDKDIVMGNAVVSADEKSVIKVSEMLCLRLWHDPEAKKGQGAWYADPVYKADIPALKDGTYVPRIAKAHTGRKAWKPVPESAMKKPPLEIYLGDLVQIGDFVGRFSGYNID

SEQ ID NO: 782 - protein, 1027 aa, unidentified
  REGION 1..1027: note = Description of Unknown: uncultivated organism with predicted taxonomy: Atopobium sp. ICM42b
  REGION 1..1027: note = MG14-108 effector
MSKSDRGLVFGIDLGKASCGLAIIDYEAKEVKLLSSRIIKAPENRSGKSLAAVRREKRSIRRQIDRRAARKKNVLKVLKQFGITPQDCDCKWFETKKNGNDGIDLPVIVLRSQGLDRQLSNREWARILYWFCSQRGYINRGEETLINGEVSTEVSSESEEAGKVLSAISENKKALKESGYRTFGEYLYKESYVSTRSYRNKAGDYKHCVSHPIVVDEIKELFEQQKKFGNTHTSEEFRDAYLEQLNWLKDTKAFDKLTYQKVGYCVYFDQYSDEPQKRAANADLISEVVKAYEKLGNIRLKFDDKPEQSLTREVRDAVINEMFSVHQGAKVKSVTYKTLRKLIDDDNLVGFKGVKSDLEKNPVFVPKAWNTFCRVLSASESGIQLLNRMKNDFKLANAIAESLTYASSLDSLERRISMYQEKESLEISEDELALIESLPYNIKIFKGYGSRSIQALEMLHDQFLGGKAFTLDEAEKQSGLQGFRLREKGIRQSLLLPYSDYDVQCTNPVVLRVLAQARRMINSAIKQYGMPNIIRIELGNDIAKSAKEKSKIAKGQNENRKENERIKDKIAKLLHIDQSEVTGKQITKMKLYEEQGGKDIYTGESLGDIAFAGGRRFLIDDNYCEIDHVLPYSRSADDLKSNKVLVLAKSNQEKGNRTPYEWMNSNDGNHPNWEQFCLRVTSNVRLSDSKKSKLLEENFAEKETSFIKRNMVDTQYMARAISAWLSDSLNFSSEFDQKQHVYAVNGRMTAKLRRKWGLNFGEDDTKDRSDNRHHAIDAAVIAACSASMVKEFAISYSRLREVRDSVIAEPWEGFADQVREAREWIIPTMYRPNKKNGLIYEETKYKYLGKEVGDKKIVHILKGKKQGVGTVDLFRDPTGGQFARILGDRAYIRLWLDEEGKSGRGEWLIEPVYFADLDKIKRGSYVPRYIPRQKVTTQEWESIPSRITENSIPIVLRNDDIVRIDGIYGRLSGLDINSKRLKFDRILSKDVKTIGSWTKDTSVEVIHEDCLGLMWFNLLKDQNSKES

SEQ ID NO: 783 - protein, 1031 aa, unidentified
  REGION 1..1031: note = Description of Unknown: uncultivated organism with predicted taxonomy: Atopobium sp. ICM42b
  REGION 1..1031: note = MG14-109 effector
MSKSDRGHVFGVDLGKSGNGLASIDYENKDINFLSSRPFKAPENRAGKSLAKVRREARSIRRQLDRKSTRKKQIIKVLKQFSVIAQECDSRWFETKKNGNGGIDLPIIILRSQGLDRKLTNREWARVLYWFCSQRGYINRGEEALSNEEASVEDSSESDEVGKVLSAISDNRKALKKSGYRTFGEYLFKESYEITRSYRNKNGEYRHCVSHPMVVDEINELFKHQQKLGNTYTSEEFREAYLRQLNWLKDTMAFDKLTYQKVGYCVYFDQYSDEPQKRAANADLISEVVKAYEKLGNIRLKFDDKSEQNLTKEVRDAVINEMFSIHQGSRVKSITYKTLRKLIDNENLIEFKGIKSDLEKSSVFAPKAWNFYCRALSISESGLQLLNRMKSDFKFANVISESLTYATSLESLESRILMYQDKESIEISEEELTLIESLPYNSKIFKGYGSRSIEALEMLYDQFTEGEAFTLDEAEKQSGLQSFRLRDKGIKQRLLPPYSDYDPQCTNPVVLRSLSQARKMINSGIKQFGMPDIIRVELAKELTKSPKQREKIAKEQNKNRKENERIRKEIAKYLEIDSSCVTKKQILKKKLYEEQKGLDVYTGESLEPSLHADDLTYLKDDSYCQIDHILPYSRSADDSIANKVLVLAKSNQDKGNRTPYEWMTSGHEHHLSWEEFAIRVSTNLSISDSKKWRLLEEDFNKKEVQFMNRNLSDTQYMSKAIVAWLSDSLDFPSRYGQKQHVYATNGRMTSKLRKEWGLNFGENGIKDRNDKRHHAVDAAVIAACSASMVKEFATSYSRSHETKNSTIAEPWEGFADQVREAREWVIPTMYRPNKKNGLLFEDRRYRYAGKTNKHILIGKEGKEKTSGNIRFFDNEKDGKHVKIVGDVAYIRLWLDVNAREGKGEWLIEPVYFADLQSIKKGTYIPKYIATYNATNDEWKPVPDDVLSKNKPLIVHRQDVIKVDSSFFRVNSVDIAKKTLKLIPVFYDSKNSNPELMITRKWDKSTKIELVYEDVLGMIWFNYLKNQNSSES

SEQ ID NO: 784 - protein, 1003 aa, unidentified; identical to SEQ ID NO: 717
  REGION 1..1003: note = Description of Unknown: uncultivated organism with predicted taxonomy: Collinsella
  REGION 1..1003: note = MG14-110 effector

SEQ ID NO: 785 - protein, 1037 aa, unidentified
  REGION 1..1037: note = Description of Unknown: uncultivated organism
  REGION 1..1037: note = MG14-111 effector
MEYSDPRDFGFRPETVMTALMPYEQFSSKTRRLILGIDMGIASVGVCLIDIRNHEIVLMASHIFKAPVEGKQKDISARQSGASIRRGYRSVRRTTKRRKNRKKAVRDIEKKYILIPDDADGQWFAIRKGEPDVLHLRGKALLYKLNGRELARILYAFADRRGYIDHGKGATDDDSGKVKKALSVNRKILDENGYETIAQYLLKQPTSRNREGDYRYMVDIEMVTDEVHTIFRHQRDLGSDIATEELEGEYLSALRWLTDTSARDKKIYSRVGYCTYLGAPEKRAASSLISFEMVRAYEKLSNIKIEHQGREATYISPEKRNEIVASLFAVSKNPKPLKWSQLREKLDMQSSDSFDSRLPTDEKDDCIKIPAWNALCTGLFMSNRALLDRFHDDTDAADAVCSALTYASSGESLRNALENLSLDLSEQDIDSLLDLPYASKLFSGYCSAGVRALQMLRDAFKDPQIEKLYNAEKATGLYEARQALAAARNESRDGLLCPYLEFDPTCTNPVVLRATAQVRRMINSIIRHYGLPDIIRVEVAKDLKRSKHEKAIIAATNKANKDSNEQAKKDLVAFYGLPNDAHVSSADFEKMWLYREQFGQDPYTGKGINLERMLNDRDYVEIDHILPFSRSCDDSKSNKVLCLTKSNRDKANRTPYEWMTSGEPSAPDFGDFCRRMDAWAGKGKSAHYTKSKLSKLKNSTFGEEEQKFIDRNLNDTRYMSRQLAMWVRECLPFPDDKRQHVFCVAGAATSLMRRIWGIGIVDEKGKKDRSDDRHHAVDAAVIACCDQRIVKGIARVNSGRSNIKERERLRYESMPYPEFKAQVEAWIPCIVPTRTVSRTATGSLLKDTVYPYVGVDDRGKDLYRRNGKIEPASTLWKDGSGGCKLYDGAYGLMAVFDESMKKSGSWRFDPIYYIDVPNVRQDFIREFTKGLSIDYWPKVQLKGDERRIFLKQGDVLLQDGCAMRYYMYNVSNGVVNSYSKIGEKSVPLQKTGPLSDESFPKQAKWDSSLTVMQEDCLGLCWLKFLSDRVGQFENSPV

SEQ ID NO: 786 - protein, 1004 aa, unidentified
  REGION 1..1004: note = Description of Unknown: uncultivated organism with predicted taxonomy: Collinsella
  REGION 1..1004: note = MG14-112 effector
MEITINREIGKLGLPRHLVLGMDPGIASCGFALIDTANHEILDLGVRLFDSPTHPKTGQSLAVIRRGFRSTRRNIDRTQARLKHCLQILKAYGLIPQDATKEYFHTTKGDKQPLKLRVDGLDRLLNDREWALVLYSLCKRRGYIPHGEGNQDKSSEGGKVLSALAANKEAIAETSCRTVGKWLAQQPQSRNRGGNYDKCVTHAQLIEETHILFDAQRSFGSKYASPEFEAAYIEVCDWERSRKDFDRRTYDLVGHCSYFPTEKRAARCTLTSELVSAYGALGNITIIHENGTSRALSATERDECIAILFSCEPIRGNKDCAVKFGALRKALDLSSGDYFKGVPAADEKTREVYKPKGWRVLRNTLNAANPILLQRLRDDRNLADAVMEAVAYSSALPVLQEQLQGLPLSEAEIEALCRLPYSSKALNGYGNRSKKALDMLLDCLEEPEVLNLTQAENDCGLLGLRIAGAQLERSDRLMPYETWIELTGRTNNNPVVIRSMSQMRKVVNAVCRKWGVPNEIHVELDRELRLPQRAKDEIAKANKKNEKNRERIAGQIAELRGCTADEVTGKQIEKYRLWEEQECFDLYTGAKIEVDRLISDDTYTQIDHILPFSRTGENSRNNKVLVLAKSNQDKREQTPYEWMSHDGAPSWDAFVRRVQENQKLSRRKKNFLLEKDLDTKEGEFLARSFTDTAYMSREVCAYLADCLLFPDDGAKAHVVPTTGRATAWLRRRWGLNFGSNGEKDRSDDRHHATDACVIAACSRSLVIKTARINQETHWSITRGMNETQRRGAIMKALESVMPWETFANEVRAAHGFVVPTRFVPRKGKGELFEQTVYRYAGVNAQGKDLARKASSDKDIVMGNAVVSADEKSVIKVSEMLCLRLWHDPEAKKGQGAWYADPVYKADIPALKDGTYIPRIAKQKYGRKVWKAVPNSALTQKPLEIYLGDLIKVGDKLGRYNGYNIATANWSFVDALTKKEIAFPSVGMLSNELQPIIIRESILDN

SEQ ID NO: 787 - protein, 1002 aa, unidentified; identical to SEQ ID NO: 771
  REGION 1..1002: note = Description of Unknown: uncultivated organism with predicted taxonomy: Collinsella
  REGION 1..1002: note = MG14-113 effector

SEQ ID NO: 788 - protein, 1002 aa, unidentified
  REGION 1..1002: note = Description of Unknown: uncultivated organism with predicted taxonomy: Collinsella
  REGION 1..1002: note = MG14-114 effector
MEITINREIGKLGLPRHLVLGMDPGIASCGFALIDTANHEILDLGVRLFDSPTHPKTGQSLAVIRRGFRSTRRNIDRTQARLKHCLQILKAYGLIPQDATKEYFHTTKGDKQPLKLRVDGLDRLLNDREWALVLYSLCKRRGYIPHGEGNQDKSSEGGKVLSALAANKEAIAETSCRTVGEWLAQQPQSRNRGGNYDKCVTHAQLIEETHILFDAQRSFGSKYASPEFEAAYIEVCDWERSRKDFDRRTYDLVGHCSYFPTEKRAARCTLTSELVSAYGALGNITIIHENGTSRALSATERDECIAILFSCEPIRGNKDCAVKFGALRKALDLSSGDYFKGVPAADEKTREVYKPKGWRVLRNTLNATNPILLQRLRDDRNLADAVMEAVAYSSALPVLQEQLQGLPLSEAEIEALCRLPYSSKALNGYGNRSKKALDMLLDCLEEPEVLNLTQAENDCGLLGLRIAGAQLERSDRLMPYETWIERTGRTNNNPVVIRAMSQMRKVVNAICRKWGVPNEIHVELDRELRLPQRAKDEIAKANKKNEKNRERIAGQIAELRGCTADEVTGKQIEKYRLWEEQECFDLYTGAKIEVDRLISDDTYTQIDHILPFSRTGENSRNNKVLVLAKSNQDKREQTPYEWMSHDGAPSWDAFERRVQENQKLSRRKKNFLLEKDLDTKEGEFLARSFTDTAYMSREVCAYLADCLLFPDDGAKAHVVPTTGRATAWLRRRWGLNFGSNGEKDRSDDRHHATDACVIAACSRSLVIKTARINQEAHWSITRGMNETQRRDAIMKALESVMPWETFANEVRAAHDFVVPTRFVPRKGKGELFEQTVYRYAGVNAQGKDIARKASSDKDIVMGNAVVSADEKSVIKVSEMLCLRLWHDPEAKKGQGAWYADPVYKADIPALKDGTYVPRIAKAATGRKAWKAIPQNVLNSAPLEIYLGDLVQIGNQKGRFRGINIDTVSWSFVDTLSKLPVKMPTIGRLNNETIPTVIRELLI

SEQ ID NO: 789 - protein, 1003 aa, unidentified
  REGION 1..1003: note = Description of Unknown: uncultivated organism with predicted taxonomy: Collinsella
  REGION 1..1003: note = MG14-115 effector
MEITINREIGKLGLPRHLVLGMDPGIASCGFALIDTANHEILDLGVRLFDSPTHPKTGQSLAVIRRGFRSTRRNIDRTQARLKHCLQVLKAYGLIPQDATKEYFHTTKGDKQPLKLRVDGLDRLLNDREWALVVYSLCKRRGYIPHGEGNQDKSSEGGKVLSALAANKEAIAETSCRTVGEWLAQQPQSRNRGGNYDKCVTHAQLIEETHILFDAQRSFGSKYASPEFEAAYIEVCDWERSRKDFDRRTYDLVGHCSYFPTEKRAARCTLTSELVSAYGALGNITIIHENGTSRALSATERDECIAILFSCEPIRGNKDCAVKFGALRKALDLSSGDYFKGVPAADEKTREVYKPKGWRVLRNTLNAANPILLQRLRDDRNLADAVMEAVAYSSALPVLQERLQGLPLSEAEIEALCRLPYSSKALNGYGNRSKKALDMLLDCLEEPEVLNLTQAENDCGLLGLRIAGAQLERSDRLMPYETWIERTGRTNNNPVVIRAMSQMRKVVNAICRKWGVPNEIHVELDRELRLPQRAKDEIAKANKKNEKNRERIAGQIAELRGCTADEVTGKQIEKYRLWEEQECFDLYTGAKIEVDRLISDDTYTQIDHILPFSRTGENSRNNKVLVLAKSNQDKREQTPYEWMSHDGAPSWDAFERRVQENQKLSRRKKNFLLEKDLDTKEGEFLARSFTDTAYMSREVCAYLADCLLFPDDGAKAHVVPTTGRATAWLRRRWGLNFGSNGEKDRSDDRHHATDACVIAACSRSLVIKTARINQETHWSITRGMDETQRRDAIMKALESVMPWETFANEVRAAHDFVVPTRFVPRKGKGELFEQTVYRYAGVNAQGKDIARKASSDKDIVMGNAVVSADEKSVIEVSKMLCLRLWHDPEAKKGQGAWYADPVYKADIPALKDGTYVPRIAKAHTGRKAWKPVPESAMKKPPLEIYLGDLVQIGDFVGRFSGYNIDNANWSFVDRLTRIKISCPTVGKLSNDMSPFVVRESPIK

SEQ ID NO: 790 - protein, 1002 aa, unidentified
  REGION 1..1002: note = Description of Unknown: uncultivated organism with predicted taxonomy: Collinsella
  REGION 1..1002: note = MG14-116 effector
MEITINREIGKLGLPRHLVLGMDPGIASCGFALIDTANHEILDLGVRLFDSPTHPKTGQSLAVIRRGFRSTRRNIDRTQARLKHCLQILKAYGLIPQDATKEYFHTTKGDKQPLKLRVDGLDRLLNDREWALVLYSLCKRRGYIPHGEGNQDKSSEGGKVLSALAANKEAIAETSCRTVGEWLAQQPQSRNRGGNYDKCVTHAQLIEETHILFDAQRSFGSKYASPEFETAYIEVCDWERSRKDFDRRTYDLVGHCSYFPTEKRAARCTLTSELVSAYGALGNITIIHENGTSRALSATERDECIAILFSCEPIRGNKDCAVKFGALRKALDLSSGDYFKGVPAADEKTREVYKPKGWRVLRNTLNATNPILLQRLRDDRNLADAVMEAVAYSSALPVLQEQLQGLPLSEAEIEALCRLPYSSKALNGYGNRSKKALDMLLDCLEEPEVLNLTQAENDCGLLGLRIAGAQLERSDRLMPYETWIERTGRTNNNPVVIRSMSQMRKVVNAICRKWGVPNEIHVELDRELRLPQRAKDEIAKANKKNEKNRERIAGQIAELRGCAADEVTGKQIEKYRLWEEQEYFDLYTGAKIEVDRLISDDTYTQIDHILPFSRTGENSRNNKVLVLAKSNQDKREQTPYEWMSHDGAPSWDAFERRVQENQKLSRRKKNFLLEKDLDTKEGEFLARSFTDTAYMSREVCAYLADCLLFPDDGAKAHVVPTTGRATAWLRRRWGLNFGSDGEKDRSDDRHHATDACVIAACSPSLVIKTARINQETHWSITRGMNETQRRDAIMKALESVMPWETFANEVRAAHDFVVPTRFVPRKGKGELFEQTVYRYAGVNAQGKDIARKASSDKDIVMGNAVVSADEKSVIKVSEMLCLRLWHDPEAKKGQGAWYADPVYKADIPSLKDGTYVPKIAKAATGRKAWKAIPQNVLNSAPLEIYLGDLVQIGNQKGRFRGINIATVSWSFVDTLSKLPVKMPTIGRLNNETIPTVIRELLI

SEQ ID NO: 791 - protein, 1003 aa, unidentified
  REGION 1..1003: note = Description of Unknown: uncultivated organism with predicted taxonomy: Collinsella
  REGION 1..1003: note = MG14-117 effector
MEITINREIGKLGLPRHLMLGMDPGIASCGFALIDTANHEILDLGVRLFDSPTHPKTGQSLAVIRRGFRSTRRNIDRTQARLKHCLQILKAYGLIPQDATKEYFHTTKGDKQPLKLRVDGLDHLLNDREWALVLYSLCKRRGYIPHGEGNQDKSSEGGKVLSALAANKEAIAETSCRTVGEWLAQQPQSRNRGGNYDKCVTHAQLIEETHILFDAQRSFGSKYASPEFEAAYIEVCDWERSRKDFDRRTYDLVGHCSYFPTEKRAARCTLTSELVSAYGALGNITIIHENGTSRALSATERDECIAILFSCEPIRGNEDCAVKFGALRKALDLSSGDYFKGVPAADEKTREVYKPKGWRVLRNTLNATNPILLQRLRDDRNLADAVMEAVAYSSALPVLQEQLQGLPLSEAEIEALCRLPYSSKALNGYGNRSKKALDMLLDCLEEPEVLNLTQAENDCGLLGLRIAGAQLERSDRLMPYETWIERTGRTNNNPVVIRAMSQMRKVVNAICRKWGVPNEIHVELDRELRLPQRAKDEIAKANKKNEKNRERIAGQIAELRGCTADEVTGKQIEKYRLWEEQECFDLYTGAKIEVDRLISDDTYTQIDHILPFSRTGENSRNNKVLVLAKSNQDKREQTPYEWMSHDGAPSWDAFERRVQENQKLSRRKKNFLLEKDLDTKEGEFLARSFTDTAYMSREVCAYLADCLLFPDDGAKAHVVPTTGRATAWLRRRWGLNFGSNGEKDRSDDRHHATDACVIAACSRSLVIKTARINQETHRSITRGMNETQRRDAIMKALESVMPWETFANEVRAAHDFVVPTRFVPRKGKGELFEQTVYRYAGVNAQGKDIARKASSDKDIVMGNAVVSADEKSVIKVSEMLCLRLWHDPEAKKGKGAWYADPVYKADIPALKDGTYVPRIAKAHTGRKAWKPVPGSAMKKPPLEIYLGDLVQIGDFVGRFSGYNIDNANWSFVDRLTRIKISCPTVGKLSNDMSPFVVRESPIK

SEQ ID NO: 792 - protein, 1000 aa, unidentified
  REGION 1..1000: note = Description of Unknown: uncultivated organism with predicted taxonomy: Olsenella sp. KCTC 15699
  REGION 1..1000: note = MG14-118 effector
MDVTRPYLVLGLDPGIASCGFCLLDMTNHKILEMGSHLFKAPQEDKTKTSLAVTRRKARSIRRNTARTAARLKHCLELLAGAGLVPADADKTWLQTKKGDKPILKLRAGGLDRLLTDREFAQVLYSLCGRRGYIPHGEGRLGETDEDESRKVLGAIKKNQDAMAAGSYRTVGEMLNAQGRSRNRGGDYSLCVYNSQIQDEAKALFASQRARGNTKATRELEDSYLACLTWEKKSLDHDTRVYELVGPCSYFPGEKRAASADVSSELCRAYERLGHIVIVHEDGSEQALTASQIDDYLKILFSTAPIKGNKECKVTYGTIRKDLDISGKSVFKGIAQDKEKDEPFVPKAWRSLRRVLPERLLARMLEDRNLGDAVCEALTFASSEASLIERLSDLGLSDDERDAILAVPFTGKLFKGYGSRSLKALGLLLGAFEEPEIRILTDAEKATGLLDLRLSDRGVRGQLLPPYDSYDPTCRNPVVLRAMGRMRHIVNAIIRIHGVPDEIHIELGRDLKMSNKEKSLVDKRNRENAASNKKWATTAAGILGCTPEEVPGRIIRKLILREEQGEKDLYTGDSIDLEHLVRDDRYCEIDHILPYSRTCDDSRANKVLVLSKSNQDKRERTPYEWMTSGETSAPSWDSYRARVMAQVKNPRKRANYLNTDLGPETQAKFLARNLNDDRYMSVAVKNYLEDCLLFPEDGHKRHVTAVAGGATGNLRWVWGLNFGEGNVKNRADDRHHAVDAAIIAACSESTVKKVAEASAKGREAFKQLRKSRLADTQPWPTFAAEVAARREFVVPTRMADHGVTGRVFEDTLYHLEGITEDKGKYPLVRAGKNTVKKGNVRINSDGSVKLIDGMAFLRLWLDPTARPNGKVKGKWYAEPVYYADIPAIKAGTYVPRAIVQGIARINWEPIPQMALESKPLVLFKNDVLVVDGHIARYSNIGISVCQLLMLNLLTRDRVTDWPSVGSWGKDTQVRILQEDCLGHCYDSIAINPEDSTFQQR

SEQ ID NO: 793 - protein, 1005 aa, unidentified
  REGION 1..1005: note = Description of Unknown: uncultivated organism with predicted taxonomy: Collinsella
  REGION 1..1005: note = MG14-119 effector
MEITINREIGKLGLPRHLVLGMDPGIASCGFALIDTANHEILDLGVRLFDSPTHPKTGQSLAVIRRGFRSTRRNIDRTQARLKHCLQILKAYGLIPQDATKEYFHTTKGDKQPLKLRVDGLDRQLNDREWALVLYSLCKRRGYIPHGEGNQDKSSEGGKVLSALAANKEAIAETSCRTVGEWLAQQPQSRNRGGNYDKCGTHAQLIEETHILFDAQRSFGSKYASPEFEAAYIEVCDWERSRKDFDHRTYDLVGHCSYFPTEKRAARCTLTSELVSAYGALGNITIIHENGTSRALSATERDECIAILFSCEPIRGNKDCAVKFGALRKALDLSSGDYFKGVPAADEKTREVYKPKGWRVLRNTLNAANPILLQRLRDDRNLADAVMEAVAYSSALPVLQEQLQGLPLSEAEIEALCRLPYSSKALNGYGNRSKKALDMLLDCLEEPEVLNLTQAENDCGLLGLRIAGAQLERSDRLMPYETWIERTGRTNNNPVVIRSMSQMRKVVNAVCRKWGVPNEIHVELDRELRLPQRAKDEIAKANKKNEKNRERIAGQIAELRGCTADEVTGKQIEKYRLWEEQECFDLYTGAKIEVDRLISDDTYTQIDHILPFSRTGENSRNNKVLVLAKSNQDKREQTPYEWMSHDGAPSWDAFERRVQENQKLSRRKKNFLLEKDLDTKEGEFLARSFTDTAYMSREVCTYLADCLLFPDDGAKAHVVPTTGRATAWLRRRWGLNFGSNGEKDRSDDRHHATDACVIAACSRSLVIKTARINQETHWSITRGMNETQRRDAIMKALESVMPWETFANEVRAAHDFVVPTRFVPRKGKGELFEQTVYRYAGVNAQGKDIARKASSDKDIVMGNAVVSADEKSVIKVSEMLCLRLWHDPEAKKGQGAWYADPVYKADIPALKDGTYVPRIARAAIGRKAWKLVPDSAMTKPPLEIYLGDLVQIGNFIGRFSGYNIANGSWSFIDRLTKETLSCPSVAKLNNNLFPTIIRESIIMRK

SEQ ID NO: 794 - protein, 1026 aa, unidentified
  REGION 1..1026: note = Description of Unknown: uncultivated organism with predicted taxonomy: Collinsella tanakaei
  REGION 1..1026: note = MG14-120 effector
MESLVNREVGGLGKPRYLVMGMDPGIKSCGFALLDLNNQEILEMGSRLFDAPTHPKTKQSMAVIRRGYRSTRRNIDRTQDRLKHCLKTLKRFDVVPEDADKEFFHTVKGDKQPILLRTDGLNRLLTSREWALVLYSLCKRRGYIPHGEGSDSGTSEDGKVLAALKANERAFADAGYRTVGEWLASLPQSRNRGGNYDKCVTHAQLTDEVRTLFEAQRGFGSPVASQELEDAYIEVFDWERSREEFDKRTYGLVGTCSYFPNEKRAARCTLTSEMVAAYGALGNITIVKRDGSTHPLSAVERDQCIDILFAVDPMKGNKTCAVKYGFLRKRLDLESGDYFKGVPLDDEKNREVFKPKGWRSLRSVLHETNRELLVKLHDDRDLADAVMEAVAYSSSVDVLKSQLSSLDLSNGEIESICAMPYSSKVLNGYGNRSKKALDILLGCFEDPDVLSLTDAEDASGLGAVRMQGAAIDKGERLIPYETWIALTGRTNNNPVVIRALSQMRKVVNAVCRKWGVPDEIHVELDRELRLPKKAKDEIAKAKKRNEKDRQRVAAQIAELLGCSADDVKGDYIEKYRLWEEQECFDIYSGEKIEVDRLIREETYTQIDHVLPFSRTGDNSRHNKVLVLARSNQLKREQTPYEWMTSNTEGAPSWDAFKRRVEENKKLSRRKKNFLLEEDLVSKEGEFQSRNMTDTAYMSREVCAYLSDCLQFPDDGLKNHIVPIAGRATAWLRRQWGLNFGATGEKDRSDDRHHATDACVIAACSRSLVIKTAKVMKQTHWQVTRDMTREQRRSARMKALEGTMPWSTFANEVRERWKVTVPTRFVPRKGRGELYGQTVYSYLGVDESGKDLGRKKGSNKKIVMGNAVISKDGKSMVKISEMLCLRLWFDPDAKGRGGKKGRWYSDPVYKADLGVIQSNAYIPRVAKAHRGRKAWSPVPQAALRRSPVVIYLGDVVKVGDVVGRFAGFDIDSANWSFVDCLDGKGIAFPTVGSLTSELRPEVIREKVLGNAEVYRSTQDDGTSSGAD

SEQ ID NO: 795 - protein, 1004 aa, unidentified
  REGION 1..1004: note = Description of Unknown: uncultivated organism with predicted taxonomy: Collinsella
  REGION 1..1004: note = MG14-121 effector
MEITINREIGKLGLPRHLVLGMDPGIESCGFALIDTANHEILNLGVRLFDSPTHPKPGQSLAVIRRGFRSTRRNIDRTQARLKHCLQVLKAYDLIPQDATKEYFHTTKGDKQPLKLRVDGLDRLLNDREWALVLYSLCKRRGYIPHGEGNQDKSSEGGKVLSALAANKEAIAETSCHTVGEWLAQQPQSRNRGGNYDKCVTHAQLIEETHILFDAQRSFGSKYASPEFEAAYIEVCDWERSRKDFDRRTYDLVGHCSYFPTEKRAARCTLTSELVSAYGALGNITIIHENGTSRALSAMERDECIAILFSCEPIRGNKDCAVKFGALRKALDLSSGDYFKGIPAADEKTREVYKPKGWRVLRNTLNAANPILLQRLRDDRDLADAVMEAVAYSSALPVLQKQLQGLPLSEAEIEALCRLPYSSKALNGYGNRSKKALDMLLDCLEEPEVLNLTQAENDCGLLGLRIAGAQLERSDRLMPYETWIEHTGRTNNNPVVIRSMSQMRKVVNAICRKWGVPNEIHVELDRELRLPQRAKDEIAKANKKNKKNRERIAGQIAELRGCTIDEVTGKQIEKYRLWEEQECFDLYTGAKIEVDRLISDDTYTQIDHILPFSRTGENSRNNKVLVLAKSNQDKREQTPYEWMSHDGAPSWGAFERRVQENQKLSRRKKNFLLEKDLDTKEGEFLARSFTDTAYMSREVCAYLADCLLFPDDGAKAHVVPTTGRATAWLRRRWGLNFGSNGEKDRLDDRHHATDACVIAACSRSLVIKTARINQETHWSITRGMNEAQRRDAIMKALESVMPWETFANEVRAAHDFVVPTRFVPRKGKGKLFEQTVYRYAGVNAQGKDIARKASSDKDIVMGNAVVSADEKSVIKVSEMLCLRLWHDPEAKKGQGAWYADPVYKADIPALKDGTYVPRIAKQNYGRKVWKAIPHSLLIQKPLEIYLGDLIRVGDKLGRYNGYNIAKANWSFVDALTKKEITFPSVGMLSNELRPIVIRESILDN

SEQ ID NO: 796 - protein, 1002 aa, unidentified
  REGION 1..1002: note = Description of Unknown: uncultivated organism with predicted taxonomy: Olsenella
  REGION 1..1002: note = MG14-122 effector
MDVTRPYLVLGLDPGIASCGFCLLDMTNHKILEMGSHLFKAPQEDKTKTSLAVTRRKARSIRRNTARTAARLKRCLELLAGAGLVPADADKTWLQTKKGDKPILKLRAGGLDRLLTDREFAQVLYSLCGRRGYIPHGEGRLGETDEDESKKVLGAIKKNQDAMAAGSYRTVGEMLNAQGRSRNRGGDYSLCVYNSQIQDEAKVLFASQRAHGNTKATRELEDSYLACLTWEKKSLDHDARVYELVGPCSYFPGEKRAASADISSELCRAYERLGHIVIVHEDGSEQALTASEIDDHLKILFSTAPIKGNKECKVTYGTIRKDLDISGKSVFKGIAQDREKDEPFAPKAWRSLRRVLPEGLLARMFADRKLGDAVCEALTFASSEASLIERLSDLGLSDDERDAILAVPFTGKLFKGYGSRSLKALGLLLGAFEEPEIRILTDAEKVTGLLDLRLSDRGVRGQLLPPYDSYDPTCRNPVVLRAMGRMRHIVNAIIRIHGVPDEIHIELGRDLKMSNKEKSLVDKRNRENAASNKKWATTAAGILGCTPEEVPGRIIRKLILREEQGEKDLYTGDSIDLEHLVRDDRYCEIDHILPYSRTCDDSRANKVLVLSKSNQDKRERTPYEWMTSGEAGAPSWDSYRARVMAQVKNPRKRANHLNTDLGPETQAKFLARNLNDDRYMSVAVKNYLEDCLLFPEDGRKRHVTAVAGGATGNLRWVWGLNFGEGNVKDRADDRHHAVDAAIIAACSESTVKKVAEASAKGREAFKQLRKSRLADTQPWPTFAAEVAARREFVVPTRMADHGVTGRAFQDFSYRLEGLRETGYAEISRQTDPATRERRSDAAGNYALSSNGTVKLLDAIAFVRFWHDPDAGKNGKWYAEPVYCADIPAIQNGSYVPKYQKQKVARNSWLPVPDSAMHNEPLVLFQGDVLIIDSHIGRFWTYAIGGGTLNILSLLDKNEKAECFPPISKWVNSVEVRVLQEDCLGHCYDDISINPEDSTFRQR

SEQ ID NO: 797 - protein, 1003 aa, unidentified
  REGION 1..1003: note = Description of Unknown: uncultivated organism with predicted taxonomy: Olsenella mediterranea
  REGION 1..1003: note = MG14-123 effector
MEITINREIGKLGLPRHLVLGMDPGIASCGFALIDTANHEILDLGVRLFDSPTHPKTGQSLAVIRRGFRSTRRNIDRTQARLKHCLQILKAYGLIPQDATKEYFHTTKGDKQPLKLRVDGLDRLLNDREWALVLYSLCKRRGYIPHGEGNQDKSSEGGKVLSALAANKEAIAETSCRTVGEWLAQQPQSRNRGGNYDKCVTHAQLIEETHILFDAQRSFGSKHASPEFEAAYIEVCDWERSRKDFDRRTYDLVGHCSYFPTEKRAARCTLTSELVSAYGALGNITIIHENGTSRALSATERDECIAILFSCEPIRGNKDCAVKFGALRKALDLSSGDYFKGVPAADEKTREVYKPKGWRVLRNTLNAANPILLQRLRDDRNLADAVMEAVAYSSALPVLQEQLQGLPLSEAEIEALCRLPYSSKALNGYGNRSKKALDMLLDCLEEPEVLNLTQAENDCGLLGLRIAGAQLERSDRLMPYETWIERTGRTNNNPVVIRAMSQMRKVVNAICRKWGVPNEIHVELDRELRLPQRAKDEIAKANKKNEKNRERIAGQIAELRGCTADEVTGKQIEKYRLWEEQECFDLYTGAKIEVDRLISDDTYTQIDHILPFSRTGENSRNNKVLVLAKSNQDKREQTPYEWMSHDGAPSWDAFERRVQENQKLSRRKKNFLLEKDLDTKEGEFLARSFTDTAYMSREVCAYLADCLLFPDDGAKAHVVPTTGRATAWLRRRWGLNFGSNGEKDRSDDRHHATDACVIAACSRSLVIKTARINQETHWSITRGMNETQRRDAIMKALESVMPWETFANEVRAAHDFVVPTRFVPRKGKGELFEQTVYRYAGVNAQGKDIARKTSSDKDIVMGNAVVSADEKSVIKVSEMLCLRLWHDPEAKKGQGAWYADPVYKADIPALKDGTYVPRIAKAHTGRKAWKPVPESAMKKPPLEIYLGDLVQIGDFVGRFSGYNIDNANWSFVDRLTRIKISCPTVGKLSNDMSPFVVRESPIK

SEQ ID NO: 798 - protein, 1005 aa, unidentified
  REGION 1..1005: note = Description of Unknown: uncultivated organism with predicted taxonomy: Collinsella
  REGION 1..1005: note = MG14-124 effector
MEITINREIGKLGLPRHLVLGMDPGIASCGFALIDTANHEILDLGVRLFDSPTHPKTGQSLAVIRRGFRSTRRNIDRTQARLKHCLQVLKAYGLIPQDATKEYFHTTKGDKQPLKLRVDGLDRLLNDREWALVLYSLCKRRGYIPHGEGSQDKSSEGGKVLSALAANKEAIAETSCRTVGEWLAQQPQSRNRGGNYDKCVTHAQLIEETHILFDAQRSFGSKYASPEFEAAYIEVCDWERSRKDFDRRTYDLVGHCSYFPTEKRAARCTLTSELVSAYGALGNITIIHENGTSRALSATERDECIAILFSCEPIRGNKDCAVKFGALRKALDLSSGDYFKGVPAADEKTREVYKPKGWRVLRNTLNAANPILLQRLRDDRDLADAVMEAVTYSSALPVLQEQLQGLPLSEAEIEALCRLPYSSKALNGYGNRSKKALDVLLDCLEEPEVLNLTQAENDCGLLGLRIAGAQLERSDRLMPYETWIERTGRTNNNPVVIRAMSQMRKVVNAICRKWGVPNEIHVELDRELRLPQRAKDEIAKANKKNEKNRERIAGQIAELRGCTADEVTGKQIEKYRLWEEQECFDLYTGAKIEVDRLISDDTYTQIDHILPFSRTGENSRNNKVLVLAKSNQDKREQTPYEWMSHDGAPSWDAFERRVQENQKLSRRKKNFLLEKDLDTKEGEFLARSFTDTAYMSREVCAYLADCLLFPDDGAKAHVVPTTGRATAWLRRRWGLNFGSNGEKDRSDDRHHATDACVIAACSRSLVIKTARINQETHWSITRGMNETQRRDAIMKALESVMPWETFANEVRAAHDFVVPTRFVPRKGKGELFEQTVYRYAGVNAQGKDIARKASSDKDIVMGNAVVSADEKSVIKVSEMLCLRLWHDPEAKKGQGAWYADPVYKADIPALKDGTYVPRIAKAHTGRKAWKPVPESAMKKPPLEIYLGDLVQIGDFVGRFSGYNIANANWSFVDRLTKEALGCPTVVKLDNKLAPAIIRESIIMHQ

SEQ ID NO: 799 - protein, 1003 aa, unidentified
  REGION 1..1003: note = Description of Unknown: uncultivated organism with predicted taxonomy: Collinsella
  REGION 1..1003: note = MG14-125 effector
MEITINREIGKLGLPRHLVLGMDPGIASCGFALIDTANHEILDLGVRLFDSPTHPKTGQSLAVIRRGFRSTRRNIDRTQARLKHCLQVLKAYGLIPQDATKEYFHTTKGDKQPLKLRVDGLDRLLNDREWALVLYSLCKRRGYIPHGEGNQDKSSEGGKVLSALADNKEAIAETSCRTVGKWLAQQPQSRNRGGNYDKCVTHAQLIEETHILFDAQRSFGSKYASPEFEAAYIEVCDWERSRKDFDRRTYDLVGHCSYFPTEKRAARCTLTSELVSAYGALGNITIIHENGTSRALSATERDECIAILFSCEPIRGNKDCAVKFGALRKALDLSSGDYFKGVPAADEKTREVYKPKGWRVLRNTLNATNPILLQRLRDDRNLADAVMEAVAYSSALPVLQEQLQGLPLSEAEIEALCRLPYSSKALNGYGNRSKKALDMLLDCLEEPEVLNLTQAENDCGLLGLRIAGAQLERSDRLMPYETWIERTGRTNNNPVVIRAMSQMRKVVNAICRKWGVPNEIHVELDRELRLPQRAKVEIAKANKKNEKNRERIAGQIAELRGCTADEVTGKQIEKYRLWEEQECFDLYTGAKIEVDRLISDDTYTQIDHILPFSRTGENSRNNKVLVLAKSNQDKREQTPYEWMSHDGAPSWDAFERRVQENQKLSRRKKNFLLEKDLDTKEGEFLARSFTDTAYMSREVCAYLADCLLFPDDGAKAHVVPTTGRATAWLRRRWGLNFGSNGEKDRSDDRHHATDACVIAACSRSLVIKTARINQETHWSITRGMNETQRRDAIMKALESVMPWETFANEVRAAHDFVVPTRFVPRKGKGELFEQTVYRYAGVNAQGKDIARKASSDKDIVMGNAVVSADEKSVITVREMLCLRLWHDPEAKKGQGAWYADPVYKADIPALKDGTYVPRIAKAHTGRKAWKPVPESAMKKPPLEIYLGDLVQIGDFVGRFSGYNIDNANWSFVDRLTRIKISCPTVGKLSNDMSPFVVRESPIK

SEQ ID NO: 800 - protein, 969 aa, unidentified
  REGION 1..969: note = Description of Unknown: uncultivated organism with predicted taxonomy: Libanicoccus massiliensis
  REGION 1..969: note = MG14-126 effector
MDSEQPPYTLGHDRDEWQEIKKHLTNRPYLVLGLDPGISSCGFCLIDFNNHLILEMGSHLFKAPQQDKNNVSLAVVRRNARSTRRNNRRTAARLSHCLALLKEAGLVPNDVDKAWLQTRKGDKPVTKLRAVGLDRPLSDREFAQVLYSLCGKRGYIPHGEGRAGETDDAEGKKVLKAIADNTKAMESGGYRTVGEMLYRSDKGRSRNRGGNYDLCVYNSQIQDEVKVVFSAQRELGNNRATQELEKSYFECLTWEKKSADHDAKVYELVGPCTYFPEEKRAANADVSSELCRAYERLGHLVIVHEDGAEQTLTSEQIDKYIGILFSPSPIRGNKDCKVTYNTIRKDLDISAKSMFKGVAKEKEKDEVFAPKAWRKLRIILPTSLLTSMIEDRSFGDDICEAIAYSSTEETLSERLETIDLSEDDRETLLSVPFTSKLFKGYGNRSRKALDLLIGAFEEPEIRTLTEAEVATGLKGKRDEGRFPRSTLLPPYNAYDETCRNPVVLRAMGRMRRIINSIIKIYGVPDEIHVELARELKQSKREKDLATKRRNAREADNKRYAKLAADILGVEPEAVRGNIIRMLALREEQGCKDIYTGDRIDLERLVTDEHYCEIDHVLPYSRTCDDDQSNKTLTFASNNQNKRERTPYEWMTSDEEKAPNWEEYRNRVIAEVKNPRKRAKFLNTLLDEDTQEGFINRNLNDTRYMSRAVKSYLEDCLIFPKGKREKHVTAVAGGATGNLRWVWGLNFGAHGEKNRKDDRHHAVDAAVIAACNESAVMKVAKTTSMGREQFRKERKARLSNTQPWPTFADEVAAIRELVIPTRMVSHGVTGRMFEDTLYHIDDYTQDRGKYPLVRAKGKQNKGGNIRFISDDTAQKIDGIAFLRLWLDPDAPATGQTRGKWYAEPVYYADIPSIKHGDYVPRAIEQDVARINWQPIPESAKSSGPITVYPGDVVLVDNRAARFSKIGITKC

SEQ ID NO: 801 - protein, 1003 aa, unidentified
  REGION 1..1003: note = Description of Unknown: uncultivated organism with predicted taxonomy: Collinsella
  REGION 1..1003: note = MG14-127 effector
MEITINREIGKLGLPRHLVLGMDPGIASCGFALIDTANHEILDLGVRLFDSPTHPKTGQSLAVIRRGFRSTRRNIDRTQARLKHCLQILKAYGLIPQDATKEYFHTTKGDKQPLKLRVDGLDRLLNDREWALVLYSLCKRRGYIPHGEGNQDKSSEGGKVLSALAANKEAIAETSCRTVGKWLAQQPQSRNRGGNYDKCVTHAQLIEETHILFDAQRSFGSKYASPEFEAAYIEVCDWERSRKDFDRRTYDLVGHCSYFPTEKRAARCTLTSELVSAYGALGNITIIHENGTSRALSATERDECIAILFSCEPIRGNKDCAVKFGALRKALDLSSGDYFKGVPAADEKTREVYKPKGWRVLRNTLNAANPILLQRLRDDRNLADAVMEAVAYSSALPVLQEQLQGLPLSEAEIEALCRLPYSSKALNGYGNRSKKALDMLLDCLEEPEVLNLTQAENDCGLLGLRIAGAQLERSDRLMPYETWIERTGRTNNNPVVIRAMSQMRKVVNAICRKWGVPNEIHVELDRELRLPQRAKDEIAKANKKNEKNRERIAGQIAELRGCTADEVTGKQIEKYRLWEEQECFDLYTGAKIEVDRLISDDTYTQIDHILPFSRTGENSRNNKVLVLAKSNQDKREQTPYEWMSHDGAPSWDAFERRVQENQKLSRRKKNFLLEKDLDTKEGEFLARSFTDTAYMSREVCAYLADCLLFPDDGAKAHVVPTTGRATAWLRRRWGLNFGSNGEKDRSDDRHHATDACVIAACSRSLVIKTARINQETHWSITRGMNETQRRDAIMKALESVMPWETFANEVRAAHDFVVPTRFVPRKGKGELFEQTVYRYAGVNAQGKDLARKASSDKNIVMGNAVVSADEKSVIKVSEMLCLRLWHDPEAKKGQGAWYADPVYKADIPALKDGTYVPRIAKAHTGRKAWKPVPESAMKKPPLEIYLGDLVQIGDFVGRFSGYNIDNANWSFVDRLTRIKISCPTVGKLSNDMSPFVVRESPIK

SEQ ID NO: 802 - protein, 1003 aa, unidentified
  REGION 1..1003: note = Description of Unknown: uncultivated organism with predicted taxonomy: Collinsella
  REGION 1..1003: note = MG14-128 effector
MEITINREIGKLGLPRHLVLGMDPGIASCGFALIDTANHEILDLGVRLFDSPTHPKTGQSLAVIRRGFRSTRRNIDRTQARLKHCLQVFKAHGLIPQDATKEYFHTTKGDKQPLKLRVDGLDRLLSDREWALVLYSLCKRRGYIPHGEGNQDKSSEGGKVLSALVANKEAIAEASCRTVGEWLAQQPQSRNRGGNYDKCVTHAQLIEETHILFDAQRSFGSKYASPELEAAYIEVCDWERSRKDFDRRTYDLVGHCSYFPTEKRAARCTLTSELVSAYGALGNITIIHDDGTSRALSATERDECIAILFSCEPIRGNKDCAVKFGALRKALDLSSGDYFKGVPAADEKTREVYKPKGWRVLRNTLNAANPILLQRLRDDRDLADAVMEAVAYSSALPVLQERLQGLPLSEAEIEALCRLPYSSKALNGYGNRSKKALDMLLDCLEEPEVFNLTQAENDCGLLGLRIAGAQLERSDRLMPYELWAERTGRTNNNPVVIRSMSQMRKVVNAICRKWGVPNEIHVELDRELRLPQRAKDEIAKANKKNEKNRERIAGQIAELRGCTADEVTGKQIEKYRLWEEQECFDLYTGAKIEVDRLISDDTYTQIDHILPFSRTGENSRNNKVLVLAKSNQDKREQTPYEWMSHDGAPSWDAFERRVQENQKLSRRKKNFLLEKDLDAKEGDFLARSFTDTAYMSREVCAYLADCLQFPDDGAKAHVVPTTGRATAWLRRRWGLNFGSNGEKDRSDDRHHATDACVIAACSRSLVIKTARLNQETHWSITRGMNEIQRHDAIMKALESVMPWETFANEVRAAHDFVVPTRFVPRKGKGELFEQTVYRYAGVNAQGKDLARKAGSDKDIVMGNAVVSADEKSVIKVSEMLCLRLWHDPEAKKGQGAWYADPVYKADIPALKDGTYVPRIAKAHTGRKAWKPVPKSAMAKPPLEIYFDDLVQIGDFIGRFSGYNINSANWSFTDRLTRLNLSCPTVGQLNNDLSPVVIRESPIK

SEQ ID NO: 803 - protein, 1003 aa, unidentified; identical to SEQ ID NO: 799
  REGION 1..1003: note = Description of Unknown: uncultivated organism with predicted taxonomy: Collinsella
  REGION 1..1003: note = MG14-129 effector

SEQ ID NO: 804 - protein, 753 aa, unidentified
  REGION 1..753: note = Description of Unknown: uncultivated organism with predicted taxonomy: Olsenella sp. KH3B4
  REGION 1..753: note = MG14-130 effector
MDVTRSYLVLGLDPGIASCGFCLLDMSNHKILEMGSHLFKAPQEDKTKTSLAVTRRKARSIRRNTARTAARLKHCLELLAGAGLVPADADKTWLQTKKGDKPILKLRAGGLDRLLTDREFAQVLYSLCGRRGYIPHGEGRLGETDEDESRKVLGAIKKNQDAMAAGSYRTVGEMLNTQGRSRNRGGDYSLCVYNSQIQDEAKALFASQRARGNTKATRELEDSYLACLTWEKKSLDHDARIYELVGPCSYFPGEKRAASADVSSELCRAYERLGHIVIVHEDGSEQALTASQIDGYLKILFSTAPIKGNKECKVSYGTIRKDLDISGKSVFKGVAQDKEKDETFAPKAWRCLRRVLPEELLARMFEDRQLGDAICEALTFASSEASLVERLSDLDLSGDERDAILTVPFTGKLFKGYGSRSLKALGLLLGAFEEPEIRILTDAEKVTGLLDLRLSDRGVRGQLLPPYDSYDPTCRNPVVLRAMGRMRHIVNAIIRIHGVPDEIHIELGRELKMSNKEKSLVDKRNRENAANNKKWAATAAGILGCTPEEVPGRIIRKLILREEQGEKDLYTGEPIDLEHLVRDDRYCEIDHILPYSRTCDDGRANKVLVLSKSNQDKRERTPYEWMTSGETSAPSWDSYRARVMAQVKNPRKRANYLNTDLGPETQAKFLARNLNDDRYMSVAVKNYLEDCLLFPEDGRKRHVTAVAGGATGNLRWVWGLNFGEGNVKDRADDRHHAIDAAIIAACSESTVKK

SEQ ID NO: 805 - protein, 985 aa, unidentified
  REGION 1..985: note = Description of Unknown: uncultivated organism with predicted taxonomy: Collinsella
  REGION 1..985: note = MG14-131 effector
MEITINREIGKLGLPRHLVLGMDPGIASCGFALIDTANHEILDLGVRLFDSPTHPKTGQSLAVIRRGFRSTRRNIDRTQARLKHCLQVFKAHGLIPQDATKEYFHTTKGDKQPLKLRVDGLDRLLSDREWALVLYSLCKRRGYIPHGEGNQDKSSEGGKVLSALAANKEAIAEASCRTVGEWLAQQPQSRNRGGNYDKCVTHAQLIEETHILFDAQRSFGSKYASPELEAAYIEVCDWERSRKDFDRRTYDLVGHCSYFPTEKRAARCTLTSELVSAYGALGNITIIHDDGTSRALSATERDECIAILFSCEPIRGNKDCAVKFGALRKALDLSSGDYFKGVPAADEKTREVYKPKGWRVLRNTLNAANPILLQRLRDDRDLADAVMEAVAYSSALPVLQERLQGLPLSEAEIEALCRLPYSSKALNGYGNRSKKALDMLLDCLEEPEVFNLTQAENDCGLLGLRIAGAQLERSDRLMPYELWAERTGRTNNNPVVIRSMSQMRKVVNAICRKWGVPNEIHVELDRELRLPQRAKDEIAKANKKNEKNRERIAGQIAELRGCTADEVTGKQIEKYRLWEEQECFDLYTGAKIEVDRLISDDTYTQIDHILPFSRTGENSRNNKVLVLAKSNQDKREQTPYEWMSHDGAPSWDAFERRVQENQKLSRRKKNFLLEKDLDAKEGDFLARSFTDTAYMSREVCAYLADCLQFPDDGAKAHVVPTTGRATAWLRRRWGLNFGSNGEKDRSDDRHHATDACVIAACSRSLVIKTARLNQETHWSITRGMNEIQRHDAIMKALESVMPWETFANEVRAAHDFVVPTRFVPRKGKGELFEQTVYRYAGVNAQGKDLARKAGSDKDIVMGNAVVSADEKSVIKVSEMLCLRLWHDPEAKKGQGAWYADPVYKADIPALKDGTYVPRMAKPPLEIYFDDLVQIGDFIERFSGYNINSANWSFTDRLTRLNLSCPTVGQLNNDLSPVVIRESPIK

SEQ ID NO: 806 - protein, 1003 aa, unidentified
  REGION 1..1003: note = Description of Unknown: uncultivated organism with predicted taxonomy: Collinsella
  REGION 1..1003: note = MG14-132 effector
MEITINREIGKLGLPRHLVLGMDPGIASCGFALIDTANHEILDLGVRLFDSPTHPKTGQSLAVIRRGFRSTRRNIDRTQARLKHCLQILKAYGLIPQDATKEYFHTTKGDKQPLKLRVDGLDRLLNDREWALVLYSLCKRRGYIPHGEGNQDKSSEGGKVLSALAANKEAIAETSCRTVGEWLAQQPQSRNRGGNYDKCVTHAQLIEETHILFDAQRSFGSKYASPEFEAAYIEVCDWERSRKDFDRRTYDLVGHCSYFPTEKRAARCTLTSELVSAYGALGNITIIHENGTSRALSATERDECIAILFSCEPIRGNKDCAVKFGALRKALDLSSGDYFKGVPAADEKTREVYKPKGWRVLRNTLNAANPILLQRLRDDRNLADAVMEAVAYSSALPVLQEQLQGLPLSEAEIEALCKLPYSSKALNGYGNRSKKALDMLLDCLEEPEVLNLTQAENDCGLLGLRIAGAQLERSDRLMPYETWIERTGRTNNNPVVIRAMSQMRKVVNAICRKWGVPNEIHVELDRELRLPQRAKDEIAKANKKNEKNRERIAGQIAELRGCTADEVTGKQIEKYRLWEEQECFDLYTGAKIEVDRLINDDTYTQIDHILPFSRTGENSRNNKVLVLAKSNQDKREQTPYEWMSHDGAPSWDAFERRVQENQKLSRRKKNFLLEKDLDTKEGEFLARSFTDTAYMSREVCAYLADCLLFPDDGAKAHVVPTTGRATAWLRRRWGLNFGSNGEKDRSDDRHHATDACVIAACSRSLVIKTARINQETHWSITRGMNETQRRDAIMKALESVMPWETFANEVRAAHDFVVPTRFVPRKGKGELFEQTVYRYAGVNAQGKDIARKASSDKDIVMGNAVVSADEKSVIKVSEMLCLRLWHDPEAKKGQGAWYADPVYKADIPALKDGTYVPRIAKAHTGRKAWKPVPESAMKKPPLEIYLGDLVQIGDFVGRFSGYNIDNANWSFVDRLTRIKISCPTVGKLSNDMSPFVVRESPIK

SEQ ID NO: 807 - protein, 1004 aa, unidentified
  REGION 1..1004: note = Description of Unknown: uncultivated organism with predicted taxonomy: Collinsella
  REGION 1..1004: note = MG14-133 effector
MEITINREIGKLGLPRHLVLGMDPGIASCGFALIDTANREILDLGVRLFDSPTHPKTGQSLAVIRRGFRSTRRNIDRTQARLKHCLQILKAYGLIPQDATKEYFHTTKGDKQPLKLRVDGLDRLLNDREWALVLYSLCKRRGYIPHGEGNQDKSSEGGKVLSALAANKEAIAETSCRTVGEWLAQQPQSRNRGGNYDKCVTHAQLIEETHILFDAQRSFGSKYASPEFEAAYIEVCDWERSRKDFDRRTYDLVGHCSYFPTEKRAARCTLTSELVSAYGALGNITIIHDDGTSRALSATERDECIAILFSCEPIRGNKDCAVKFGALRKALDLSSGDYFKGVPAADEKTREVYKPKGWRVLRNTLNAANPILLQRLRDDRNLADAVMEAVAYSSALPVLQEQLQGLPLSEAEIEALCRLPYSSKALNGYGNRSKKALDMLLDCLEEPEVLNLTQAENDCGLLGLRIAGTQLERSDRLMPYETWIERTGRTNNNPVVIRAMSQMRKVVNAICRKWGVPNEIHVELDRELRLPQRAKDEIAKANKKNEKNRERIAGQIAELRGCTADEVTGKQIEKYRLWEEQECFDLYTGAKIEVDRLISDDTYTQIDHILPFSRTGENSRNNKVLVLAKSNQDKREQTPYEWMSHDGAPSWDAFERRVQENQKLSRRKKNFLLEKDLDTKEGEFLARSFTDTAYMSREVCAYLADCLLFPDDGAKAHVVPTTGRATAWLRRRWGLNFGSNGEKDRSDDRHHATDACVIAACSRSLVIKTARINQETHWSITRGMNETQRRDAIMKALESVMPWETFANEVRAAHDFVVPTRFVPRKGKGELFEQTVYRYAGVNAQGKDIARKASSDKDIVMGNAVVSADEKSVIKVSEMLCLRLWHDPEAKKGQGAWYADPVYKADIPALKDGTYVPRIAKQKYGRKVWKAVPNSALTQKPLEIYLGDLIKVGDKLGRYNGYNIATANWSFVDALTKKEIAFPSVGMLSNELQPIIIRESILDN

SEQ ID NO: 808 - protein, 1003 aa, unidentified; identical to SEQ ID NO: 712
  REGION 1..1003: note = Description of Unknown: uncultivated organism with predicted taxonomy: Collinsella
  REGION 1..1003: note = MG14-135 effector

SEQ ID NO: 809 - protein, 1004 aa, unidentified
  REGION 1..1004: note = Description of Unknown: uncultivated organism with predicted taxonomy: Collinsella
  REGION 1..1004: note = MG14-136 effector
MEITINREIGKLGLPRHLVLGMDPGIASCGFALIDTANREILDLGVRLFDSPTHPKTGQSLAVIRRGFRSTRRNIDRTQARLKHCLQILKAYGLIPQDATKEYFHTTKGDKQPLKLRVDGLDRLLNDREWALVLYSLCKRRGYIPHGEGNQDKSSEGGKVLSALAANKEAIAETSCRTVGEWLAQQPQSRNRGGNYDKCVTHAQLIEETHILFDAQRSFGSKYASPEFEAAYIEVCDWERSRKDFDRRTYDLVGHCSYFPTEKRAARCTLTSELVSAYGALGNITIIHDDGTSRALSATERDECIAILFSCEPIRGNKDCAVKFGALRKALDLSSGDYFKGVPAADEKTREVYKPKGWRVLRNTLNAANPILLQRLRDDRNLADAVMEAVAYSSALPVLQEQLQGLPLSEAEIEALCRLPYSSKALNGYGNRSKKALDMLLDCLEEPEVLNLTQAENDCGLLGLRIAGTQLERSDRLMPYETWIELTGRTNNNPVVIRSMSQMRKVVNAVCRKWGVPNEIHVELDRELRLPQRAKDEIAKANKKNEKNRERIAGQIAELRGCTADEVTGKQIEKYRLWEEQECFDLYTGAKIEVDRLISDDTYTQIDHILPFSRTGENSRNNKVLVLAKSNQDKREQTPYEWMSHDGAPSWDAFVRRVQENQKLSRRKKNFLLEKDLDTKEGEFLARSFTDTAYMSREVCAYLADCLLFPDDGAKAHVVPTTGRATAWLRRRWGLNFGSNREKDCSDDRHHATDACVIAACSRSLVIKTARINQETHWSITRGMNETQRRNAIMKALESVMPWETFANEVRAAHDFVVPTRFVPRKGKGELFEQTVYRYAGVNAQGKDLARKASSDKDIVMGNAVVSADEKSVIKVSEMLCLRLWHDPEAKKGQGAWYADPVYKADIPALKDGTYIPRIAKQKYGRKVWKAVPNSALTQKPLEIYLGDLIKVGDKLGRYNGYNIATANWSFVDALTKKEIAFPSVGMLSNELQPIIIRESILDN

SEQ ID NO: 810 - protein, 1024 aa, unidentified
  REGION 1..1024: note = Description of Unknown: uncultivated organism with predicted taxonomy: Clostridiales
  REGION 1..1024: note = MG14-137 effector
MMEYSDPRDFGFRPETVMTALMPYEQFSSKTRRLILGIDMGIASVGVCLIDIRNHEIVLMASHIFKAPVEGKQKDISARQSGASIRRGYRSVRRTTKRRKNRKKAVRDIEKKYILIPDDADGQWFAIRKGEPDVLHLRGKALLYKLNGRELARILYAFAGRRGYIDHGKGATDDDSGKVKKALSVNRKILDENGYETIAQYLLKQPTSRNREGDYRYMVDIEMVTDEVHTIFRHQRDLGSDIATEELEGEYLSALRWLTDTSARDKKIYSRVGYCTYLGAPEKRAASSLISFEMVRAYEKLSNIKIEHQGREATYISPEKRNEIVASLFAVSKNPKPLKWSQLREKLDMQSSDSFDSRLPTDEKDDCIKIPAWNALCTGLFMSNRALLDRFHDDTDAADAVCSALTYASSGGSLRNALENLSLDLSEQDIDSLLDLPYASKLFSGYCSAGVRALQMLRDAFKDPQIEKLYNAEKATGLYEARQALAAARNESRDGLLCPYLEFDPTCTNPVVLRATAQVRRMINSIIRHYGLPDIIRVEVAKDLKRSKREKAIIAATNKANKDSNEQAKKDLVAFYGLPNDAHVSSADFEKMWLYREQFGQDPYTGKGINLERMLNDRDYVEIDHILPFSRSCDDSKSNKVLCLTKSNRDKANRTPYEWMTSGEPSAPDFGDFCRRMDAWAGKGKSAHYTKSKLSKLKNSTFGEEEQKFIDRNLNDTRYMSRQLAMWVRECLPFPDDKRQHVFCVAGAATSLMRRIWGIGIVDEKGKKDRSDDRHHAVDAAVIACCDQRIVKGIARVNSGRSNIKERERLRYESMPYPEFKAQVEAWIPCIVPTRTVSRTATGSLLKDTVYPYVGVDDRGKDLYRRNGKIEPASTLWKDGSGGCKLYDGAYGLMAVFDESMKKSGSWRFDPIYYIDVPNVRQDFIREFTKGLSIDYWPKVQLKGDERRIFLKQGDVLLQDGCAMRYYMYNVSNGVVNSYSKIGEKSVPLQKTGPLSDESFPKQAKWDSSLTVMQEDCLGLCWLK

SEQ ID NO: 811 - protein, 1003 aa, unidentified
  REGION 1..1003: note = Description of Unknown: uncultivated organism with predicted taxonomy: Collinsella
  REGION 1..1003: note = MG14-138 effector
MEITINREIGKLGLPRHLVLGMDPGIASCGFALIDTANHEILDLGVRLFDSPIHPKTKQSLAVIRRGFRSTRRNIDRTQARLKHCLQVLKAYGLIPQDATKEYFHTTKGDKQPLKLRVDGLDRLLNDREWALVLYSLCKLRGYVPHGEGNQDKSSEGGKVLSALAANKEAIAETSCRTVGKWLAQQPQSRNRGGNYDKCVTHAQLIEETHILFDAQRSFGSKYASPEFEAAYIEVCDWERSRKDFDRRTYDIVGHCSYFPTEKRAARCTLTSELVSAYGALGNITIIHENGTSRALTATERDECIAILFSCEPIRGNKDCAVKFGALRKALDLSSGDYFKGVPAADEKTREVYKPKGWRVLRNTLNAANPILLQRLRDDRDLADAVMEAVAYSSALPVLQEQLQGLPLSEAEIEALCRLPYSSKALNGYGNRSKKALDMLLDCLEEPEVLNLTQAENDCGLLGLRIAGAQLERSDRLMPYETWIERTGRTNNNPVVIRSMSQMRKVVNAVCRKWGVPNEIHVELDRELRLPQRAKDEIAKANKKNEKNRERIAGQIAELRGCTADEVTGKQIEKYRLWEEQEYFDLYTGAKIEVDRLISDDTYTQIDHILPFSRTGENSRNNKVLVLAKSNQDKREQTPYEWMSHDGAPSWDAFERRVQENQKLSRRKKNFLLEKDLDTKEGEFLARSFTDTAYMSREVCAYLADCLLFPDDGAKAHVVPTTGRATAWLRRRWGLNFGSNGEKDRSDDRHHATDACVIAACSPSLVIKTARINQETHWSITRGMNETQRRDAIMKALESVMPWETFANEVRAAHDFVVPTRFVPRKGKGELFEQTVYRYAGVNAQGKDIARKASSDKDIVMGNAVVSADEKSVIKVSEMLCLRLWHDPEAKKGQGAWYADPVYKADIPALKDGTYVPRIAKAHTGRKAWKPVPESAMKKPPLEIYLGDLVQIGDFVGRFSGYNIDNANWSFVDRLTRIKISCPTVGKLSNDMSPFVVRESPIK

SEQ ID NO: 812 - protein, 1003 aa, unidentified
  REGION 1..1003: note = Description of Unknown: uncultivated organism with predicted taxonomy: Collinsella
  REGION 1..1003: note = MG14-139 effector
MEITINREIGKLGLPRHLVLGMDPGIASCGFALIDTANHEILDLGVRLFDSPTHPKTGQSLAVIRRGFRSARRNIDRTQARLKHCLQVFKAHGLIPQDATKEYFHTTKGDKQPLKLRVDGLDRLLSDREWALVLYSLCKRRGYIPHGEGNQDKSSEGGKVLSALAANKEAIAEASCRTVGEWLAQQPQSRNRGGNYDKCVTHAQLIEETHILFDAQRSFGSKYASPELEAAYIEVCDWERSRKDFDRRTYDLVGHCSYFPTEKRAARCTLTSELVSAYGALGNITIIHDDGTSRALSATERDECIAILFSCEPIRGNKDCAVKFGALRKALDLSSGDYFKGVPAADEKTREVYKPKGWRVLRNTLNAANPILLQRLRDDRDLADAVMEAVAYSSALPVLQERLQGLPLSEAEIEALCRLPYSSKALNGYGNRSKKALDMLLDCLEEPEVFNLTQAENDCGLLGLRIAGAQLERSDRLMPYELWAERTGRTNNNPVVIRSMSQMRKVVNAICRKWGVPNEIHVELDRELRLPQRAKDEIAKANKKNEKNRERIAGQIAELRGCTADEVTGKQIEKYRLWEEQECFDLYTGAKIEVDRLISDDTYTQIDHILPFSRTGENSRNNKVLVLAKSNQDKREQTPYEWMSHDGAPSWDAFERRVQENQKLSRRKKNFLLEKDLDAKEGDFLARSFTDTAYMSREVCAYLADCLQFPDDGAKAHVVPTTGRATAWLRRRWGLNFGSNGEKDRSDDRHHATDACVIAACSRSLVIKTARLNQETHWSITRGMNEIQRHDAIMKALESVMPWETFANEVRAAHDFVVPTRFVPRKGKGELFEQTVYRYAGVNAQGKDLARKAGSDKDIVMGNAVVSADEKSVIKVSEMLCLRLWHDPEAKKGQGAWYADPVYKADIPALKDGTYVPRIAKAHTGRKAWKPVPKSAMAKPPLEIYFDDLVQIGDFIGRFSGYNINSANWSFTDRLTRLNLSCPTVGQLNNDLSPVVIRESPIK

SEQ ID NO: 813 - protein, 1003 aa, unidentified
  REGION 1..1003: note = Description of Unknown: uncultivated organism with predicted taxonomy: Collinsella
  REGION 1..1003: note = MG14-140 effector
MEITINREIGKLELPRHLVLGMDPGIASCGFALIDTANHEILDLGVRLFDSPTHPKTGQSLAVIRRGFRSTRRNIDRTQARLKHCLQVLKAYGLIPQDATKEYFHTTKGDKQPLKLRVDGLDRLLNDREWALVLYSLCKRRGYIPHGEGNQDKSSEGGKVLSALAANKEAIAETSCRTVGEWLAQQPQSRNRGGNYDKCVTHAQLIEETHILFDAQRSFGSKYASPEFEAAYIEVCDWERSRKDFDRRTYDLVGHCSYFPTEKRAARCTLTSELVSAYGALGNITIIHENGTSRALSATERDECIAILFSCEPIRGNKDCAVKFGALRKALDLSSGDYFKGVPAADEKTREVYKPKGWRVLRNTLNAANPILLQRLRDDRNLADAVMEAVAYSSALPVLQERLQGLPLSEAEIEALCRLPYSSKALNGYGNRSKKALDMLLDCLEEPEVLNLTQAENDCGLLGLRIAGAQLERSDRLMPYETWIELTGRTNNNPVVIRSMSQMRKVVNAVCRKWGVPNEIHVELDRELRLPQRAKDEIAKANKKNEKNRERIAGQIAELRGCTADEVTGKQIEKYRLWEEQEYFDLYTGAKIEVDRLISDDTYTQIDHILPFSRTGENSRNNKVLVLAKSNQDKREQTPYEWMSHDGAPSWDAFERRVQENQKLSRRKKNFLLEKDLDTKEGEFLARSFTDTAYMSREVCAYLADCLLFPDDGAKAHVVPTTGRATAWLRRRWGLNFGSNGEKDRSDDRHHATDACVIAACSRSLVIKTARINQETHWSITRGMNETQRRDAIMKALESVMPWETFANEVRAAHDFVVPTRFVPRKGKGELFEQTVYRYAGVNAQGKDIARKASSDKDIVMGNAVVSADEKSVIKVSEMLCLRLWHDPEAKKGQGAWYADPVYKADIPALKDGTYVPRIAKAHTGRKAWKPVPESAMKKPPLEIYLGDLVQIGDFVGRFSGYNIDNANWSFVDRLTRIKISCPTVGKLSNDMSPFVVRESPIK

SEQ ID NO: 814 - protein, 1000 aa, unidentified; identical to SEQ ID NO: 730
  REGION 1..1000: note = Description of Unknown: uncultivated organism with predicted taxonomy: Olsenella sp. KH3B4
  REGION 1..1000: note = MG14-141 effector

SEQ ID NO: 815 - protein, 1004 aa, unidentified
  REGION 1..1004: note = Description of Unknown: uncultivated organism with predicted taxonomy: Collinsella
  REGION 1..1004: note = MG14-142 effector
MEITINREIGKLGLPRHLVLGMDPGIASCGFALIDTANHEILDLGVRLFDSPTHPKTGQSLAVIRRGFRSTRRNIDRTQARLKHCLQVLKAYGLIPQDATKEYFHTTKGDKQPLKLRVDGLDRLLNDREWALVLYSLCKRRGYIPHGEGNQDKSSEGGKVLSALAANKEAIAETSCRTVGEWLAQQPQSRNRGGNYDKCVTHAQLIEETHILFDAQRSFGSKYASPEFEAAYIEVCDWERSRKDFDRRTYDLVGHCSYFPTEKRAARCTLTSELVSAYGALGNITIIHDDGTSRALSATERDECIAILFSCEPIRGNKDCAVKFGALRKALDLSSGDYFKGVPAADEKTREVYKPKGWRVLRNTLNAANPNLLQRLRDDRDLADAVMEAVAYSSALPVLQERLQGLPLSEAEIEALCMLPYSSKVLNGYGNRSKKALDMLLDCLEEPEVLNLTQGENDCGLLGLRIAGAQLERSDRLMPYELWAERTGRTNNNPVVIRSMSQMRKVVNAICRKWGVPNEIHVELDRELRLPQRAKDEIAKANKKNEKNRERIAGQIAELRGCTADEVTGKQIEKYRLWEEQECFDLYTGAKIEVDRLISDDTYTQIDHILPFSRTGENSRNNKVLVLAKSNQDKREQTPYEWMSHDGAPSWDAFERRVQENQKLSRRKKNFLLEKDLDAKEGDFLARSFTDTAYMSREVCAYLADCLQFPDDGAKAHVVPTTGRATAWLRRRWGLNFGSNGEKDRSDDRHHATDACVIAACSRSLVIKTARINQETHWSITRGMNETQRHDAIMKALESVMPWETFANEVRAAHDFVVPTRFVPRKGKGELFEQTVYRYAGVNAQGKDLARKVGSDKDIVMGNAVVSADEKSVVKVSEMLCLRLWHDPEAKKGQGAWYADPVYKADIPALKDGTYVPRIAKQKYGRKVWKAVPNSALTQKPLEIYLGDLIKVGDKLGRYNGYNIATANWSFVDALTKKEIAFPSVGMLSNELQPIIIRESILDN

SEQ ID NO: 816 - protein, 1005 aa, unidentified; identical to SEQ ID NO: 798
  REGION 1..1005: note = Description of Unknown: uncultivated organism with predicted taxonomy: Collinsella
  REGION 1..1005: note = MG14-143 effector

SEQ ID NO: 817 - protein, 1045 aa, unidentified
  REGION 1..1045: note = Description of Unknown: uncultivated organism with predicted taxonomy: Collinsella
  REGION 1..1045: note = MG14-144 effector
MDKAQGVDIGELGFDPGTFATALMTLEEFRSKDRVIWAGIDIGVASTGLCLVDVRNHEIVLMTSHLFKSPVVDKKKATAAPESLASVRRGARSVRRNIMREGRRKKAIRAVLADSDLIPADADGEWFAARRDERTVVKLRSKALGHLLNSRELARVLYSFASHRGYIDHGKSDKDDDAGKVKKALAANHAALAGGGCETFGQYLAGQPRSRNRAGDYSFTSDIGMTVDEVRTIFLRQREMGSEIATEALEERYIAELTWLTDTSKRDMSTYLKVGFCTYRGAPYRRGATSTTSFEMVRAHQTLANTVILHEDGTSSTIPGNTRIEIVRELFAVKKSVKPLKWSGLRRRLGLSDGDSFKGRPLEEEKRDCIALPAWAVLCSGLYEDHRDLLERLHDHIEDADAVCSALTYASSAASLAGRLAPLALTDDEVEAIIDLPYSARLFSGYASASLEALQMLRGTLEDPCVTSLRQAEEDSGLAQARAMLAEEHGEAADGLLCAFSDYDPTCKNPVVLRATAQVRRMVNSVIRHYGLPDVIRVEVARDLKRSKHEREIVAESNRARHELNEQAKRDIVEFLGLHDDDHVRGRDLDMVKLYREQGGKDPYTGTGIDFGRMLEERGYVEIDHILPISRTCDNSQANKVLCLTKSNRDKSNRSPYEWMTSGEATAPDWDEFCGRMERWAKMCEPRRYARKKLANLTCENLAERAGGFIDRNLNDTRYMSVALAKWLRECLPFARDGHEHVFCVAGGATALMRSVWDIGITGPDGKKNRDDDRHHAVDAAVIACCTPGIVKNVALVNEGHARADVRQRLFRDSLPYPEFKEQVNAWIPCIVPTLTLPNTVTGSVLKDTVYPYLGRDDAGKDLYLTVKRDKDGRIVDRKVNKATTMWKDGQGGCRAYGSMCALDAVFDASVGKRGKWSFDPVYCIDIPHREDEIRTIRAFSKERAIDLWDSIKVPEDAQRMRIRRGDVLVCDGKAARFYCFDISVNAIRLYSQRGGKQLQTTGPLSSEAFPPPSKWGDDIRVMQEDCLGLCWLSFLSNRAIAQMD

SEQ ID NO: 818 - protein, 1000 aa, unidentified
  REGION 1..1000: note = Description of Unknown: uncultivated organism with predicted taxonomy: Olsenella sp. KCTC 15699
  REGION 1..1000: note = MG14-145 effector
MDVTRPYLVLGLDPGIASCGFCLLDMTNHKILEMGSHLFKAPQEDKTKTSLAVTRRKARSIRRNTARTAARLKHCLELLAGAGLVPANADKTWLQTKKGDKPILKLRAGGLDRLLTDREFAQVLYSLCGRRGYIPHGEGRLGETDEDESRKVLGAIKKNQDAMAAGSYRTVGEMLNTQGRSRNRGGDYSLCVYNSQIQDEAKALFASQRARGNTKATRELEDSYLACLTWEKKSLDHDARIYELVGPCSYFPGEKRAASADVSSELCRAYERLGHIVIVHEDGSEQALTASQIDGYLKILFSTAPIKGNKECKVSYGTIRKDLDISGKSVFKGVAQDKEKDETFAPKAWRCLRRVLPEELLARMFEDRQLGDAICEALTFASSEASLVERLSDLDLSGDERDAILTVPFTGKLFKGYGSRSLKALGLLLGAFEEPEIRILTDAEKVTGLLDLRLSDRGVRGQLLPPYDSYDPTCRNPVVLRAMGRMRHIVNAIIRIHGVPDEIHIELGRELKMSNKEKSLVDKRNRENAANNKKWAATAAGILGCTPEEVPGRIIRKLILREEQGEKDLYTGEPIDLEHLVRDDRYCEIDHILPYSRTCDDGRANKVLVLSKSNQDKRERTPYEWMTSGEAGAPSWDSYRARVMAQVKNPRKRANYLNTDLGPETQAKFLARNLNDDRYMSVAVKNYLEDCLLFPEDGRKRHVTAVAGGATGNLRWVWGLNFGEGNIKDRADDRHHAIDAAIIAACSESTVKKVAEASAKGREAFKQLRKSRLADTQPWPTFATEVAARREFVVPTRMADHGVTGRVFEDTLYHLEGITDDKGKYPLVRAGEKTAKKGNVHFNPDGSVKLIDGMAFLRLWLDPTARPNGKVKGKWYAEPVYYADIPAIKAGTYVPRAIVQGIARINWEPIPQTALESKPLVLFKNDVLVVDGHIARYSNIGISVCQLLMLNLLTRDRVTDWPSVGSWGKDTQVRILQEDCLGHCYDSIAINPEDSTFQQR

SEQ ID NO: 819 - protein, 1000 aa, unidentified
  REGION 1..1000: note = Description of Unknown: uncultivated organism with predicted taxonomy: Olsenella
  REGION 1..1000: note = MG14-146 effector
MDTTRPYLVLGLDPGIASCGFCLLDMTNHKILEMGSHLFKAPQEDKTKTSLAVTRRKARSIRRNTARTAARLKHCLELLAGAGLVQADADKPWLQTKKGDKPILKLRAGGLDRLLTDREFAQVLYSLCGRRGYIPHGEGRLGETDEDESKKVLGAIKKNQDAMAAGSYRTVGEMLNAQGRSRNRGGDYSLCVYNSQIQDEAKALFASQRARGNTKATRELEDSYLACLTWEKKSLDHDTRVYELVGPCSYFPGEKRAASADVSSELCRAYERLGHIVIVHEDGTEQALTAGEINDYLKILFSTAPIKGNKECKVTYGTIRKDLDISGKSVFKGIAQDKEKDEPFAPKAWRSLRRVLPERLLARMLEDRNLGDAVCEALTFASSEASLIERLSDLGLSDDERDAILAVPFTGKLFKGYGSRSLKALRLLLGAFEEPEIRILTDAEKATGLLDLRLSDRGVRGQLLPPYDSYDPTCRNPVVLRAMGRMRHIVNAIIRIHGVPDEIHIELGRDLKMSNKEKSLVDKRNRENAASNKKWATTAAGILGCTPEEVPGRIIRKLILREEQGEKDLYTGDSIDLEHLVRDDRYCEIDHILPYSCTCDDSRANKVLVLSKSNQDKRERTPYEWMTSGEAGAPSWDSYRARVMAQVKNPRKRANYLNTDLGPETQAKFLARNLNDDRYMSVAVKNYLEDCLLFPEDGRKRHVTAVAGGATGNLRWVWGLNFGEGNIKDRTDDRHHAVDAAIIAACSESTVKKVAEASAKGREAFKQLRKSRLADTQPWPTFAAEVAARREFVVPTHMANHGVTGRVFEDTLYHLEGITEDKGKYPLVRAGEKTVKKGNVRINPDGSVKLIDGMAFLRLWLDPTARPNGKVKGKWYAEPVYYADIPAIKAGTYVPRACTIHVARVNWEPVPEAAMELEPVVLYAGDVVEINNQLVRYSGFNINGATLYYQSLLNGATTTAIPSLGTWGKDTQVRVLQEDCLGHCYDGILINPEDSTFQKR

SEQ ID NO: 820 - protein, 1002 aa, unidentified; identical to SEQ ID NO: 711
  REGION 1..1002: note = Description of Unknown: uncultivated organism with predicted taxonomy: Olsenella sp. KH3B4
  REGION 1..1002: note = MG14-147 effector

SEQ ID NO: 821 - protein, 828 aa, unidentified
  REGION 1..828: note = Description of Unknown: uncultivated organism with predicted taxonomy: Olsenella mediterranea
  REGION 1..828: note = MG14-148 effector
LIDTANHEILDLGVRLFDSPTHPKTGQSLAVIRRGFRSTRRNIDRTQARLKHCLQVLKAYGLIPQDATKEYFHTTKGDKQPLKLRVDGLDRLLNDREWALVLYSLCKRRGYIPHGEGSQDKSSEGGKVLSALAANKEAIAETSCRTVGEWLAQQPQSRNRGGNYDKCVTHAQLIEETHILFDAQRSFGSKYASPEFEAAYIEVCDWERSRKDFDRRTYDLVGHCSYFPTEKRAARCTLTSELVSAYGALGNITIIHENGTSRALSATERDECIAILFSCEPIRGNKDCAVKFGALRKALDLSSGDYFKGVPAADEKTREVYKPKGWRVLRNTLNATNPILLQRLRDDRNLADAVMEAVAYSSALPVLQEQLQGLPLSEAEIEALCRLPYSSKALNGYGNRSKKALDMLLDCLEEPEVLNLTQAENDCGLLGLRIAGAQLERSDRLMPYETWIERTGRTNNNPIVIRAMSQMRKVVNAICRKWGVPNEIHVELDRELRLPQRAKDEIAKANKKNEKNRERIAGQIAELRGCTADEVTGKQIEKYRLWEEQECFDLYTGAKIEVDRLISDDTYTQIDHILPFSRTGENSRNNKVLVLAKSNQDKREQTPYEWMSHDGAPSWDAFERRVQENQKLSRRKKNFLLEKDLDTKEGEFLARSFTDTAYMSREVCAYLADCLLFPDDGAKAHVVPTTGRATAWLRRRWGLNFGSNGEKDRSDDRHHATDACVIAACSRSLVIKTARINQETHWSITRGMNETQRRDAIMKALESVMPWETFANEVRAAHDFVVPTRFVPRKGKGELFEQTVYRYAGVNAQGKDIARKASSDKDIV

SEQ ID NO: 822 - protein, 1003 aa, unidentified
  REGION 1..1003: note = Description of Unknown: uncultivated organism with predicted taxonomy: Collinsella
  REGION 1..1003: note = MG14-149 effector
MEITINREIGKLGLPRHLVLGMDPGIASCGFALIDTANHEILDLGVRLFDSPTHPKTGQSLAVIRRGFRSTRRNIDRTQARLKHCLQVFKAHGLIPQDATKEYFHTTKGDKQPLKLRVDGLDRLLSDCEWALVLYSLCKRRGYIPHGEGNQDKSSEGGKVLSALAANKEAIAEASCRTVGEWLAQQPQSRNRGGNYDKCVTHAQLIEETHILFDAQRSFGSKYASPELEAAYIEVCDWERSRKDFDRRTYDLVGHCSYFPTEKRAARCTLTSELVSAYGALGNITIIHDDGISRALSATERDECIAILFSCEPIRGNKDCAVKFGALRKALDLSSGDYFKGVPAADEKTREVYKPKGWRVLRNTLNAANPILLQRLRDDRDLADAVMEAVAYSSALPVLQERLQGLPLSEAEIEALCRLPYSSKALNGYGNRSKKALDMLLDCLEEPEVLNLTQAENDCGLLGLRIAGAQLERSDRLMPYELWAERTGRTNNNPVVIRSMSQMRKVVNAICRKWGVPNEIHVELDRELRLPQRAKDEIAKANKKNEKNRERIAGQIAELRGCTADEVTGKQIEKYRLWEEQECFDLYTGAKIEVDRLISDDTYTQIDHILPFSRTGENSRNNKVLVLAKSNQDKREQTPYEWMSHDGAPSWDAFERRVQENQKLSRRKKNFLLEKDLDAKEGDFLARSFTDTAYMSREVCAYLADCLQFPDDGAKAHVVPTTGRATAWLRRRWGLNFGSNGEKDRSDDRHHATDACVIAACSRSLVIKTARLNQETHWSITRGMNEIQRHDAIMKALESVMPWETFANEVRAAHDFVVPTRFVPRKGKGELFEQTVYRYAGVNAQGKDLARKAGSDKDIVMGNAVVSADEKSVIKVSEMLCLRLWHDPEAKKGQGAWYADPVYKADIPALKDGTYVPRIAKAHTGRKAWKPVPKSAMAKPPLEIYFDDLVQIGDFIGRFSGYNINSANWSFTDRLTRLNLSCPTVGQLNNDLSPVVIRESPIK

SEQ ID NO: 823 - protein, 863 aa, unidentified
  REGION 1..863: note = Description of Unknown: uncultivated organism with predicted taxonomy: Collinsella
  REGION 1..863: note = MG14-150 effector
MEITINREIGKLGLPRHLVLGMDPGITSCGFALIDTANHEILDLGVRLFDSPTHPKTGQSLAVIRRGFRSTRRNIDRTQARLKHCLQVLKAYGLIPQDATKEYFHTTKGDKQPLKLRVDGLDRLLNDREWALVLYSLCKRRGYIPHGEGNQDKSSEGGKVLSALAANKEAIAETSCRTVGKWLAQQPQSRNRGGNYDKCVTHAQLIEETHILFDAQRSFGSKYASPEFEAAYIEVCDWERSRKDFDRRTYDLVGHCSYFPTEKRAARCTLTSELVSAYGALGNITIIHENGTSRALSATERDECIAILFSCEPIRDNKDCAVKFGALRKALDLSSGDYFKGVPAADEKTREVYKPKGWRVLRNTLNATNPILLQRLRDDRNLADAVMEAVAYSSALPVLQEQLQGLPLSEAEIEALCRLPYSSKALNGYGNRSKKALDMLLDCLEEPEVLNLTQAENDCGLLGLRIAGAQLERSDRLMPYETWIERTGRTNNNPVVIRAMSQMRKVVNAICRKWGVPNEIHVELDRELRLPQRAKDEIAKANKKNEKNRERIAGQIAELRGCTADEVTGKQIEKYRLWEEQECFDLYTGAKIEVDRLISDDTYTQIDHILPFSRTGENSRNNKVLVLAKSNQDKREQTPYEWMSHDGAPSWDAFERRVQENQKLSRRKKNFLLEKDLDTKEGEFLARSFTDTAYMSREVCAYLADCLLFPDDGAKAHVVPTTGRATAWLRRRWGLNFGSNGEKDRSDDRHHATDACVIAACNRSLVIKTARINQETHWSITRGMNETQRRDAIMKALESVMPWETFANEVRAAHDFVVPTRFVPRKGKGELFEQTVYRYAGVNAQGKDIARKASSDKDIVMGN

SEQ ID NO: 824 - protein, 1003 aa, unidentified; identical to SEQ ID NO: 822
  REGION 1..1003: note = Description of Unknown: uncultivated organism with predicted taxonomy: Collinsella
  REGION 1..1003: note = MG14-151 effector

SEQ ID NO: 825 - protein, 1005 aa, unidentified; identical to SEQ ID NO: 688
  REGION 1..1005: note = Description of Unknown: uncultivated organism with predicted taxonomy: Collinsella
  REGION 1..1005: note = MG14-152 effector

SEQ ID NO: 826 - protein, 1005 aa, unidentified; identical to SEQ ID NO: 695
  REGION 1..1005: note = Description of Unknown: uncultivated organism with predicted taxonomy: Coriobacteriales
  REGION 1..1005: note = MG14-153 effector

SEQ ID NO: 827 - protein, 1000 aa, unidentified; identical to SEQ ID NO: 733
  REGION 1..1000: note = Description of Unknown: uncultivated organism with predicted taxonomy: Olsenella
  REGION 1..1000: note = MG14-154 effector

SEQ ID NO: 828 - protein, 1000 aa, unidentified; identical to SEQ ID NO: 710
  REGION 1..1000: note = Description of Unknown: uncultivated organism with predicted taxonomy: Olsenella
  REGION 1..1000: note = MG14-155 effector

SEQ ID NO: 829 - protein, 1024 aa, unidentified
  REGION 1..1024: note = Description of Unknown: uncultivated organism with predicted taxonomy: Libanicoccus massiliensis
  REGION 1..1024: note = MG14-156 effector
MDSEQPPYTLGHDRDEWQEIKKHLTNRPYLVLGLDPGISSCGFCLIDFNNHLILEMGSHLFKAPQQDKNNVSLAVVRRNARSTRRNNRRTAARLSHCLALLKEAGLVPNDVDKAWLQTRKGDKPVTKLRAVGLDRPLSDREFAQVLYSLCGKRGYIPHGEGRAGETDDAEGKKVLKAIADNTKAMESGGYRTVGEMLYRSDKGRSRNRGGNYDLCVYNSQIQDEVKVVFSAQRELGNNRATQELEKSYFECLTWEKKSADHDAKVYELVGPCTYFPEEKRAANADVSSELCRAYERLGHLVIVHEDGAEQTLTSEQIDKYIGILFSPSPIRGNKDCKVTYNTIRKDLDISAKSMFKGVAKEKEKDEVFAPKAWRKLRIILPTSLLTSMIEDRSFGDDICEAIAYSSTEETLSERLETIDLSEDDRETLLSVPFTSKLFKGYGNRSRKALDLLIGAFEEPEIRTLTEAEVATGLKGKRDEGRFPRSTLLPPYNAYDETCRNPVVLRAMGRMRRIINSIIKIYGVPDEIHVELARELKQSKREKDLATKRRNAREADNKRYAKLAADILGVEPEAVRGNIIRMLALREEQGCKDIYTGDRIDLERLVTDEHYCEIDHVLPYSRTCDDDQSNKTLTFASNNQNKRERTPYEWMTSDEEKAPNWEEYRNRVIAEVKNPRKRAKFLNTLLDEDTQEGFINRNLNDTRYMSRAVKSYLEDCLIFPKGKREKHVTAVAGGATGNLRWVWGLNFGAHGEKNRKDDRHHAVDAAVIAACNESAVMKVAKTTSMGREQFRKERKARLSNTQPWPTFADEVAAIRELVIPTRMVSHGVTGRMFEDTLYHIDDYTQDRGKYPLVRAKGKQNKGGNIRFISDDTAQKIDGIAFLRLWLDPDAPATGQTRGKWYAEPVYYADIPSIKHGDYVPRAIEQDVARINWQPIPESAKSSGPITVYPGDVVLVDNRAARFSKIGITKCQLTMLNLLSKERVTDWPSIGSWRQDTEVRVLGEDCLGHCYKHIAITRDSSTYRVE

SEQ ID NO: 830 - protein, 1003 aa, unidentified
  REGION 1..1003: note = Description of Unknown: uncultivated organism with predicted taxonomy: Collinsella
  REGION 1..1003: note = MG14-157 effector
MEITINREIGKLGLPRHLVLGMDPGIASCGFALIDTANHEILDLGVRLFDSPTHPKTGQSLAVIRRGFRSTRRNIDRTQARLKHCLQILKAYGLIPQDATKEYFHTTKGDKQPLKLRVDGLDRLLNDREWALVLYSLCKRRGYIPHGEGSQDKSSEGGKVLSALAANKEAIAETSCRTVGEWLAQQPQSRNRGGNYDKCVTHAQLIEETHILFDAQRSFGSKYASPEFEAAYIEVCDWERSRKDFDRRTYDLVGHCSYFPTEKRAARCTLTSELVSAYGALGNITIIHENGTSRALSATERDECIAILFSCEPIRGNKDCAVKFGALRKALDLSSGDYFKGVPAADEKTREVYKPKGWRVLRNTLNAANPILLQRLRDDRNLADAVMEAVAYSSALPVLQEQLQGLPLSEAEIEALCRLPYSSKALNGYGNRSKKALDMLLDCLEEPEVLNLTQAENDCGLLGLRIAGAQLERSDRLMPYETWIERTGRTNNNPVVIRAMSQMRKVVNAICRKWGVPNEIHVELDRELRLPQRAKDEIAKANKKNEKNRERIAGQIAELRGCTADEVTGKQIEKYRLWEEQECFDLYTGAKIEVDRLISDDTYTQIDHILPFSRTGENSRNNKVLVLAKSNQDKREQTPYEWMSHDGAPSWDAFERRVQENQKLSRRKKNFLLEKDLDTKEGEFLARSFTDTAYMSREVCAYLADCLLFPDDGAKAHVVPTTGRATAWLRRRWGLNFGSNGEKDRSDDRHHATDACVIAACSRSLVIKTARINQETHWSITRGMDETQRRDAIMKALESVMPWETFANEVRAAHDFVVPTRFVPRKGKGELFEQTVYRYAGVNAQGKDIARKASSDKDIVMGNAVVSADEKSVIKVSEMLCLRLWHDPEAKKGQGAWYADPVYKADIPALKDGTYVPRIAKAHTGRKAWKPVPESAMKKPPLEIYLGDLVQIGDFVGRFSGYNIDNANWSFVDRLTRIKISCPTVGKLSNDMSPFVVRESPIK

SEQ ID NO: 831 - protein, 1005 aa, unidentified; identical to SEQ ID NO: 693
  REGION 1..1005: note = Description of Unknown: uncultivated organism with predicted taxonomy: Collinsella
  REGION 1..1005: note = MG14-158 effector

SEQ ID NO: 832 - protein, 1003 aa, unidentified; identical to SEQ ID NO: 768
  REGION 1..1003: note = Description of Unknown: uncultivated organism with predicted taxonomy: Collinsella
  REGION 1..1003: note = MG14-159 effector

SEQ ID NO: 833 - protein, 1003 aa, unidentified; identical to SEQ ID NO: 732
  REGION 1..1003: note = Description of Unknown: uncultivated organism with predicted taxonomy: Collinsella
  REGION 1..1003: note = MG14-160 effector

SEQ ID NO: 834 - protein, 1003 aa, unidentified; identical to SEQ ID NO: 732
  REGION 1..1003: note = Description of Unknown: uncultivated organism with predicted taxonomy: Collinsella
  REGION 1..1003: note = MG14-161 effector

SEQ ID NO: 835 - protein, 1002 aa, unidentified; identical to SEQ ID NO: 701
  REGION 1..1002: note = Description of Unknown: uncultivated organism with predicted taxonomy: Olsenella
  REGION 1..1002: note = MG14-162 effector

SEQ ID NO: 836 - protein, 1003 aa, unidentified; identical to SEQ ID NO: 732
  REGION 1..1003: note = Description of Unknown: uncultivated organism with predicted taxonomy: Collinsella
  REGION 1..1003: note = MG14-163 effector

SEQ ID NO: 837 - protein, 1000 aa, unidentified; identical to SEQ ID NO: 684
  REGION 1..1000: note = Description of Unknown: uncultivated organism with predicted taxonomy: Olsenella
  REGION 1..1000: note = MG14-164 effector

SEQ ID NO: 838 - protein, 1005 aa, unidentified; identical to SEQ ID NO: 688
  REGION 1..1005: note = Description of Unknown: uncultivated organism with predicted taxonomy: Collinsella
  REGION 1..1005: note = MG14-165 effector

SEQ ID NO: 839 - protein, 1003 aa, unidentified; identical to SEQ ID NO: 755
  REGION 1..1003: note = Description of Unknown: uncultivated organism with predicted taxonomy: Collinsella sp. AM17-1
  REGION 1..1003: note = MG14-166 effector

SEQ ID NO: 840 - protein, 1003 aa, unidentified; identical to SEQ ID NO: 717
  REGION 1..1003: note = Description of Unknown: uncultivated organism with predicted taxonomy: Collinsella
  REGION 1..1003: note = MG14-167 effector

SEQ ID NO: 841 - protein, 1000 aa, unidentified; identical to SEQ ID NO: 694
  REGION 1..1000: note = Description of Unknown: uncultivated organism with predicted taxonomy: Olsenella sp. KH3B4
  REGION 1..1000: note = MG14-168 effector

SEQ ID NO: 842 - protein, 1000 aa, unidentified
  REGION 1..1000: note = Description of Unknown: uncultivated organism with predicted taxonomy: Olsenella
  REGION 1..1000: note = MG14-169 effector
MDVTRPYLVLGLDPGIASCGFCLLDMSNHKILEMGSHLFKAPQEDKTKTSLAVTRRKARSIRRNTARTAARLKHCLELLAGAGLVPANADKTWLQTKKGDKPILKLRAGGLDRLLTDREFAQVLYSLCGRRGYIPHGEGRLGETDEDESRKVLGAIKKNQDAMAAGSYRTVGEMLNAQGRSRNRGGDYSLCVYNSQIQDEAKALFASQRARGNTKATRELEDSYLACLTWEKKSLDHDTRVYELVGPCSYFPGEKRAASADVSSELCRAYERLGHIVIVHEDGSEQALTASEIDDYLKILFSTAPIKGNKECKVSYGTIRKDLDISGKSVFKGIAQDREKDEPFVPKAWRSLRRVLPKGLLARMLEDRKLGDAVCEALTFASSEASLVERLSDLDLSGDKQDAILTVPFTAKLFKGYGSRSLKALGLLLGAFEEPEIRILTDAEKVTGLLDLRLSDRGVRGQLLPPYDSYDPTCRNPVVLRAMGRMRHIVNAIIRIHGVPDEIHIELGRELKMSNKEKSLVDKRNRENAANNKKWAATAAGILGCTPEEVPGRIIRKLILREEQGEKDLYTGEPIDLEHLVRDDRYCEIDHILPYSRTCDDGRANKVLVLSKSNQDKRERTPYEWMTSGEAGAPSWDSYRARVMAQVKNPRKRANYLNTDLGPETQAKFLARNLNDDRYMSVAVKNYLEDCLLFPEDGRKRHVTAVAGGATGNLRWVWGLNFGEGNVKDRADDRHHAIDAAIIAACSESTVKKVAEASAKGREAFKQLRKSRLADTQPWPTFATEVAARREFVVPTRMADHGVTGRVFEDTLYHLEGITDDKGKYPLVRAGEKTAKKGNVHFNPDGSVKLIDGMAFLRLWLDPTARPNGKVKGKWYAEPVYYADIPAIKAGTYVPRAIVQGIARINWEPIPQTALESKPLVLFKNDVLVVDGHIARYSNIGISVCQLLMLNLLTRDRVTDWPSVGSWGKDTQVRILQEDCLGHCYDSIAINPEDSTFQQR

SEQ ID NO: 843 - protein, 839 aa, unidentified; identical to SEQ ID NO: 708
  REGION 1..839: note = Description of Unknown: uncultivated organism with predicted taxonomy: Olsenella sp. KH3B4
  REGION 1..839: note = MG14-170 effector

SEQ ID NO: 844 - protein, 1001 aa, unidentified; identical to SEQ ID NO: 707
  REGION 1..1001: note = Description of Unknown: uncultivated organism with predicted taxonomy: Coriobacteriia bacterium
  REGION 1..1001: note = MG14-171 effector

SEQ ID NO: 845 - protein, 1003 aa, unidentified; identical to SEQ ID NO: 740
  REGION 1..1003: note = Description of Unknown: uncultivated organism with predicted taxonomy: Collinsella
  REGION 1..1003: note = MG14-172 effector

SEQ ID NO: 846 - protein, 1003 aa, unidentified; identical to SEQ ID NO: 749
  REGION 1..1003: note = Description of Unknown: uncultivated organism with predicted taxonomy: Collinsella
  REGION 1..1003: note = MG14-173 effector

SEQ ID NO: 847 - protein, 856 aa, unidentified
  REGION 1..856: note = Description of Unknown: uncultivated organism with predicted taxonomy: Collinsella
  REGION 1..856: note = MG14-174 effector
EGSQDKSSEGGKVLSALAANKKALAETPCRTVGEWFAQQPQSRNRGGNYDKCVTHAQLIDETHILFEAQRSFGSAFASPEFEAAYIEVCDWERSRKDFDRRSYDLVGRCSYFPAEKRAARCTLTSELVAAYGALGNITIIHEGGTSRALSATERDECIAILFSCEPIRGNKDCAVKFGALRKALDLSSGDYFKGVPAADEKTREVYKPKGWRTLRNTLNAANPILLQRLRDDRDLADAVMEAVAYSSALPVLQEQLQELPLSEAEIEALCKLPYSSKTLNGYGNRSKKALDMLLDCLEEPEVLNLTQAENDCGLLGLRIAGAQLERSDRLMPYETWVELTGRTNNNPVVIRSMSQMRKVVNAICRKWGVPNEIHVELDRELRLPQRAKDEIAKANKKNEKNRERIARQIAELRGCTADEVTGKQIEKYRLWEEQECFDLYTGAKIEVDRLISDDTYTQIDHILPFSRTGENSRNNKVLVLAKSNQDKREQTPYEWMSHDGAPSWDAFERRVQENQKLSRRKKNFLLEKDLDTKEGEFLARSFTDTAYMSREVCAYLADCLLFPDDGAKAHVVPTTGRATAWLRRRWGLNFGSNGEKDRSDDRHHATDACVIAACSRSLVIKTARINQETHWSIIRGMNETQRRDAIMKALESVMPWETFANEVRVAHDFVVPTRFVPRKGKGELFEQTVYRYAGVNAQGKDIAHKASSDKDIVMGNAVVSADEKSVIKVSEMLCLRLWHDPKAKKGQGAWYADPVYKADIPALKDGTYVPRIAKAHTGRKAWKPVPESATKKPPLEIYLGDLVQIGDFVGRFSGYNIDNANWSFVDRLTRIKTSCPTVGKLSNDMSPFVVRESPIK

SEQ ID NO: 848 - protein, 1003 aa, unidentified; identical to SEQ ID NO: 714
  REGION 1..1003: note = Description of Unknown: uncultivated organism with predicted taxonomy: Collinsella
  REGION 1..1003: note = MG14-175 effector

SEQ ID NO: 849 - protein, 1003 aa, unidentified; identical to SEQ ID NO: 714
  REGION 1..1003: note = Description of Unknown: uncultivated organism with predicted taxonomy: Collinsella aerofaciens
  REGION 1..1003: note = MG14-176 effector

SEQ ID NO: 850 - protein, 1003 aa, unidentified; identical to SEQ ID NO: 734
  REGION 1..1003: note = Description of Unknown: uncultivated organism with predicted taxonomy: Collinsella
  REGION 1..1003: note = MG14-177 effector

SEQ ID NO: 851 - protein, 1000 aa, unidentified
  REGION 1..1000: note = Description of Unknown: uncultivated organism with predicted taxonomy: Olsenella sp. GAM18
  REGION 1..1000: note = MG14-178 effector
MDATRPYLVLGLDPGIASCGFCLLDMTNHKILEMGSHLFKAPQEDKTKTSLAVTRRKARSIRRNTARTSARLKHCLELLAGAGLVPADADKTWLQTKKGDKPILKLRAGGLDRLLTDREFAQVLYSLCGHRGYIPHGEGRLGETDEDESKKVLGAIKKNQDAMAAGSYRTVGEMLNAQGRSRNRGGDYSLCVYNSQIQDEAKALFASQRARGNTKATRELEDSYLACLTWEKKSLDHDTRVYELVGPCSYFPGEKRAASADVSSELCRAYERLGHTVIVHEDGSEQALTAGEIDGYLKILFSTAPIKGNKECKVTYGTIRKDLDISGKSVFKGIAQDKEKDEPFAPKAWRSLRRVLPERLLARMLEDRNLGDAVCEALTFASSEASLIERLSDLDLSDDERDAILTVPFTGKLFKGYGSRSLKALGLLLGAFEEPEIRILTDAEKVTGLLDLRLSDRDVRGQLLPPYSSYDPTCRNPVVLRAMGRMRHIVNAIFRIHGIPDEIHIELGRDLKMSNKEKILVDKRNRENAASNKKWATTAAGILGCTPEEVPGRIIRKLILREEQGEKDLYTGDSIDLEHLVRDDRYCEIDHILPYSRTCDDSRANKVLVLSKSNQDKRERTPYEWMTSGEAGAPSWDSYRARVIAQVKNPRKRANYLNTDLGPETQAKFLARNLNDDRYMSVAVKNYLEDCLLFPEDGRKRHVTAVAGGATGNLRWVWGLNFGEGNIKDRTDDRHHAVDAAIIAACSESTVKKVAEASAKGREAFKQLRKSRLADTQPWPTFATEVAARREFVVPTRMADHGVTGRVFEDTLYHLEGIAEGKGKYPLVRASEKTVKKGNVRINPDGSVKLIDGMAFLRLWLDPTARPNGKVKGKWYAEPVYYADIPAIKAGTYVPRACTIHVARVNWEPVPEAAMGANPVIVFFGDVLSVDNHVGRFGGFDIFGGRLALLNLLTKQEVSDWPSLGSWGKDTQVRVLQEDCLGHCYDSIAINPEGSTFQQR

SEQ ID NO: 852 - protein, 1003 aa, unidentified; identical to SEQ ID NO: 718
  REGION 1..1003: note = Description of Unknown: uncultivated organism with predicted taxonomy: Collinsella
  REGION 1..1003: note = MG14-179 effector

SEQ ID NO: 853 - protein, 1003 aa, unidentified; identical to SEQ ID NO: 791
  REGION 1..1003: note = Description of Unknown: uncultivated organism with predicted taxonomy: Collinsella
  REGION 1..1003: note = MG14-180 effector

SEQ ID NO: 854 - protein, 1000 aa, unidentified; identical to SEQ ID NO: 745
  REGION 1..1000: note = Description of Unknown: uncultivated organism with predicted taxonomy: Olsenella
  REGION 1..1000: note = MG14-181 effector

SEQ ID NO: 855 - protein, 1003 aa, unidentified; identical to SEQ ID NO: 797
  REGION 1..1003: note = Description of Unknown: uncultivated organism with predicted taxonomy: Olsenella mediterranea
  REGION 1..1003: note = MG14-182 effector

SEQ ID NO: 856 - protein, 1002 aa, unidentified; identical to SEQ ID NO: 788
  REGION 1..1002: note = Description of Unknown: uncultivated organism with predicted taxonomy: Collinsella
  REGION 1..1002: note = MG14-183 effector

SEQ ID NO: 857 - protein, 1002 aa, unidentified; identical to SEQ ID NO: 796
  REGION 1..1002: note = Description of Unknown: uncultivated organism with predicted taxonomy: Olsenella
  REGION 1..1002: note = MG14-184 effector

SEQ ID NO: 858 - protein, 1003 aa, unidentified; identical to SEQ ID NO: 752
  REGION 1..1003: note = Description of Unknown: uncultivated organism with predicted taxonomy: Collinsella
  REGION 1..1003: note = MG14-185 effector

SEQ ID NO: 859 - protein, 1002 aa, unidentified; identical to SEQ ID NO: 770
  REGION 1..1002: note = Description of Unknown: uncultivated organism with predicted taxonomy: Collinsella
  REGION 1..1002: note = MG14-186 effector

SEQ ID NO: 860 - protein, 1003 aa, unidentified; identical to SEQ ID NO: 764
  REGION 1..1003: note = Description of Unknown: uncultivated organism with predicted taxonomy: Coriobacteriales
  REGION 1..1003: note = MG14-187 effector

SEQ ID NO: 861 - protein, 1003 aa, unidentified; identical to SEQ ID NO: 806
  REGION 1..1003: note = Description of Unknown: uncultivated organism with predicted taxonomy: Collinsella
  REGION 1..1003: note = MG14-188 effector

SEQ ID NO: 862 - protein, 1003 aa, unidentified; identical to SEQ ID NO: 717
  REGION 1..1003: note = Description of Unknown: uncultivated organism with predicted taxonomy: Collinsella
  REGION 1..1003: note = MG14-189 effector

SEQ ID NO: 863 - protein, 1003 aa, unidentified
  REGION 1..1003: note = Description of Unknown: uncultivated organism with predicted taxonomy: Collinsella
  REGION 1..1003: note = MG14-190 effector
MEITINREIGKLGLPRHLVLGMDPGIASCGFALIDTANHEILDLGVRLFDSPTHPKTGQSLAVIRRGFRSTRRNIDRTQARLKHCLQVLKAYGLIPQDATKEYFHTTKGDKQPLKLRVDGLDRLLNDREWALVLYSLCKRRGYIPHGEGSQDKSSEGGKVLSALAANKEAIAETSCRTVGEWLAQQPQSRNRGGNYDKCVTHAQLIEETHILFDAQRSFGSKYASPEFEAAYIEVCDWERSRKDFDRRTYDLVGHCSYFPTEKRAARCTLTSELVSAYGALGNITIIHENGTSRALSATERDECIAILFSCEPIRGNKDCAVKFGALRKALDLSSGDYFKGVPAADEKTREVYKPKGWRVLRNTLNAANPILLQRLRDDRDLADAVMEAVAYSSALPVLQEQLQGLPLSEAEIEALCRLPYSSKALNGYGNRSKKALDVLLDCLEEPEVLNLTQAENDCGLLGLRIAGAQLERSDRLMPYETWIERTGRTNNNPVVIRAMSQMRKVVNAICRKWGVPNEIHVELDRELRLPQRAKDEIAKANKKNEKNRERIAGQIAELRGCTADEVTGKQIEKYRLWEEQECFDLYTGAKIEVDRLISDDTYTQIDHILPFSRTGENSRNNKVLVLAKSNQDKREQTPYEWMSHDGAPSWDAFERRVQENQKLSRRKKNFLLEKDLDTKEGEFLARSFTDTAYMSREVCAYLADCLLFPDDGAKAHVVPTTGRATAWLRRRWGLNFGSNGEKDRSDDRHHATDACVIAACSRSLVIKTARINQETHWSITRGMNETQRRDAIMKALESVMPWETFANEVRAAHDFVVPTRFVPRKGKGELFEQTVYRYAGVNAQGKDLARKASSDKNIVMGNAVVSADEKSVIKVSEMLCLRLWHDPEAKKGQGAWYADPVYKADIPALKDGTYVPRIAKAHTGRKAWKPVPESAMKKPPLEIYLGDLVQIGDFVGRFSGYNIDNANWSFVDRLTRIKISCPTVGKLSNDMSPFVVRESPIK

SEQ ID NO: 864 - protein, 1003 aa, unidentified; identical to SEQ ID NO: 802
  REGION 1..1003: note = Description of Unknown: uncultivated organism with predicted taxonomy: Collinsella
  REGION 1..1003: note = MG14-191 effector

SEQ ID NO: 865 - protein, 1003 aa, unidentified; identical to SEQ ID NO: 760
  REGION 1..1003: note = Description of Unknown: uncultivated organism with predicted taxonomy: Collinsella
  REGION 1..1003: note = MG14-192 effector

SEQ ID NO: 866 - protein, 1003 aa, unidentified; identical to SEQ ID NO: 777
  REGION 1..1003: note = Description of Unknown: uncultivated organism with predicted taxonomy: Collinsella
  REGION 1..1003: note = MG14-193 effector

SEQ ID NO: 867 - protein, 1004 aa, unidentified; identical to SEQ ID NO: 729
  REGION 1..1004: note = Description of Unknown: uncultivated organism with predicted taxonomy: Olsenella
  REGION 1..1004: note = MG14-194 effector

SEQ ID NO: 868 - protein, 1003 aa, unidentified; identical to SEQ ID NO: 714
  REGION 1..1003: note = Description of Unknown: uncultivated organism with predicted taxonomy: Collinsella
  REGION 1..1003: note = MG14-195 effector

SEQ ID NO: 869 - protein, 1046 aa, unidentified; identical to SEQ ID NO: 739
  REGION 1..1046: note = Description of Unknown: uncultivated organism with predicted taxonomy: Collinsella
  REGION 1..1046: note = MG14-196 effector

SEQ ID NO: 870 - protein, 1003 aa, unidentified; identical to SEQ ID NO: 801
  REGION 1..1003: note = Description of Unknown: uncultivated organism with predicted taxonomy: Collinsella
  REGION 1..1003: note = MG14-197 effector

SEQ ID NO: 871 - protein, 1003 aa, unidentified
  REGION 1..1003: note = Description of Unknown: uncultivated organism with predicted taxonomy: Collinsella
  REGION 1..1003: note = MG14-198 effector
MEITINREIGKLGLPRHLVLGMDPGIASCGFALIDTANHEILDLGVRLFDSPTHPKTGQSLAVIRRGFRSTRRNIDRTQARLKHCLQILKAYGLIPQDATKEYFHTTKGDKQPLKLRVDGLDRLLNDREWALVLYSLCKRRGYIPHGEGNQDKSSEGGKVLSALAANKEAIAETSCRTVGEWLAQQPQSRNRGGNYDKCVTHAQLIEETHILFDAQRSFGSKYASPEFEAAYIEVCDWERSRKDFDRRTYDLVGHCSYFPTEKRAARCTLTSELVSAYGALGNITIIHENGTSRALSATERDECIAILFSCEPIRGNKDCAVKFGALRKALDLSSGDYFKGVPAADEKTREVYKPKGWRVLRNTLNATNPILLQRLRDDRNLADAVMEAVAYSSALPVLQEQLQGLPLSEAEIEALCRLPYSSKALNGYGNRSKKALDMLLDCLEEPEVLNLTQAENDCGLLGLRIAGAQLERSDRLMPYETWIERTGRTNNNPVVIRAMSQMRKVVNAICRKWGVPNEIHVELDRELRLPQRAKDEIAKANKKNEKNRERIAGQIAELRGCTADEVTGKQIEKYRLWEEQECFDLYTGAKIEVDRLISDDTYTQIDHILPFSRTGENSRNNKVLVLAKSNQDKREQTPYEWMSHDGAPSWDAFERRVQENQKLSRRKKNFLLEKDLDTKEGEFLARSFTDTAYMSREVCAYLADCLLFPDDGAKAHVVPTTGRATAWLRRRWGLNFGSNGEKDRSDDRHHATDACVIAACSRSLVIKTARINQETHRSITRGMNETQRRDAIMKALESVMPWETFANEVRAAHDFVVPTRFVPRKGKGELFEQTVYRYAGVNAQGKDIARKASSDKDIVMGNAVVSADEKSVIKVSEMLCLRLWHDPEAKKGKGAWYADPVYKADIPALKDGTYVPRIAKAHTGRKAWKPVPGSAMKKPPLEIYPGDLVQIGDFVGRFSGYNIDNANWSFVDRLTRIKISCPTVGKLSNDMSPFVVRESPIK

SEQ ID NO: 872 - protein, 862 aa, unidentified; identical to SEQ ID NO: 747
  REGION 1..862: note = Description of Unknown: uncultivated organism with predicted taxonomy: Collinsella
  REGION 1..862: note = MG14-199 effector

SEQ ID NO: 873 - protein, 833 aa, unidentified; identical to SEQ ID NO: 721
  REGION 1..833: note = Description of Unknown: uncultivated organism with predicted taxonomy: Collinsella
  REGION 1..833: note = MG14-200 effector

SEQ ID NO: 874 - protein, 1003 aa, unidentified; identical to SEQ ID NO: 813
  REGION 1..1003: note = Description of Unknown: uncultivated organism with predicted taxonomy: Collinsella
  REGION 1..1003: note = MG14-201 effector

SEQ ID NO: 875 - protein, 1003 aa, unidentified; identical to SEQ ID NO: 799
  REGION 1..1003: note = Description of Unknown: uncultivated organism with predicted taxonomy: Collinsella
  REGION 1..1003: note = MG14-202 effector

SEQ ID NO: 876 - protein, 1003 aa, unidentified; identical to SEQ ID NO: 799
  REGION 1..1003: note = Description of Unknown: uncultivated organism with predicted taxonomy: Collinsella
  REGION 1..1003: note = MG14-203 effector

SEQ ID NO: 877 - protein, 1003 aa, unidentified
  REGION 1..1003: note = Description of Unknown: uncultivated organism with predicted taxonomy: Collinsella
  REGION 1..1003: note = MG14-204 effector
MEITINREIGKLGLPRHLVLGMDPGIASCGFALIDTANHEILDLGVRLFDSPTHPKTGQSLAVIRRGFRSTRRNIDRTQARLKHCLQVFKAHGLIPQDATKEYFHTTKGDKQPLKLRVDGLDRLLSDREWALVLYSLCKRRGYIPHGEGNQDKSSEGGKVLSALAANKEAIAEASCRTVGEWLAQQPQSRNRGGNYDKCVTHAQLIEETHILFDAQRSFGSKYASPELEAAYIEVCDWERSRKDFDRRTYDLVGHCSYFPTEKRAARCTLTSELVSAYGALGNITIIHDDGTSRALSATERDECIAILFSCEPIRGNKDCAVKFGALRKALDLSSGDYFKGVPAADEKTREVYKPKGWRVLRNTLNAANPILLQRLRDDRDLADAVMEAVAYSSALPVLQERLQGLPLSEAEIEALCRLPYSSKALNGYGNRSKKALDMLLDCLEEPEVFNLTQAENDCGLLGLRIAGAQLERSDRLMPYELWAERTGRTNNNPVVIRSMSQMRKVVNAICRKWGVPNEIHVELDRELRLPQRAKDEIAKANKKNEKNRERIAGQIAELRGCTADEVTGKQIEKYRLWEEQECFDLYTGAKIEVDRLISDDTYTQIDHILPFSRTGENSRNNKVLVLAKSNQDKREQTPYEWMSHDGAPSWDAFERRVQENQKLSRRKKNFLLEKDLDAKEGDFLARSFTDTAYMSREVCAYLADCLQFPDDGAKAHVVPTTGRATAWLRRRWGLNFGSNGEKDRSDDRHHATDACVIAACSRSLVIKTARLNQETHWSITRGMNEIQRHDAIMKALESVMPWETFANEVRAAHDFVVPTRFVPRKGKGELFEQTVYRYAGVNAQGKDLARKAGSDKDIVMGNAVVSADEKSVIKVSEMLCLRLWHDPEAKKGQGAWYADPVYKADIPALKDGTYVPRIAKAHTGRKAWKPVPKSAMAKPPLEIYFDDLVQIGDFIGRFSGYNINSANWSFTDRLTRLNLSCPIVGQLNNDLSPVVIRESPIK

SEQ ID NO: 878 - protein, 958 aa, unidentified
  REGION 1..958: note = Description of Unknown: uncultivated organism with predicted taxonomy: Olsenella mediterranea
  REGION 1..958: note = MG14-205 effector
MEITINREIGKLGLPRHLVLGMDPGIASCGFALIDTANHEILDLGVRLFDSPTHPKTGQSLAVIRRGFRSTRRNNDRTQARLKHCLQVLKAYGLIPQDATKEYFHTTKGDKQPLKLRVDGLDRLLNDREWALVLYSLCKRRGYIPHGEGNQDKSSEGGKVLSALAANKEAIAETSCRTVGEWLAQQPQSRNRGGNYDKCVTHAQLIEETHILFDAQRSFGSKYASPEFEAAYIEVCDWERSRKDFDRRTYDLVGHCSYFPTEKRAARCTLTNELVSAYGALGNITIIHENGTSRALTATERDECIAILFSCEPIRGNKDCAVKFGALRKALDLSSGDYFKGVPAADEKTREVYKPKGWRVLRNTLNAANPILLQRLRDDRDLADAVMEAVAYSSALPVLQEQLQGLPLSEAEIEALCRLPYSSKALNGYGNRSKKALDMLLDCLEEPEVLNLTQAENDCGLLGLRIAGAQLERSDRLMPYETWIERTGRTNNNPVVIRSMSQMRKVVNAICRKWGVPNEIHVELDRELRLPQRAKDEIAKANKKNEKNRERIAGQIAELRGCTADEVTGKQIEKYRLWEEQECFDLYTGAKIEVDRLISDDTYTQIDHILPFSRTGENSRNNKVLVLAKSNQDKREQTPYEWMSHDGAPSWDTFERRVQENQKLSRRKKNFLLEKDLDTKEGEFLARSFTDTAYMSREVCAYLADCLLFPDDGAKAHVVPTTGRATAWLRRRWGLNFGSNGEKDRSDDRHHATDACVIAACSRSLVIKTARINQETHWSITRGMNETQRRDAIMKALESVMPWETFANEVRAAHDFVVPTRFVPRKGKGELFEQTVYRYAGVNAQGKDIARKASSDKDIVMGNAVVSADEKSVIKVSEMLCLRLWHDPEAKKGKGAWYADPVYKADIPSLKDGTYVPKIAKAATGRKAWKAIPQSVLNSAPLEIYLGDLVQIGNQKGR

SEQ ID NO: 879 - protein, 762 aa, unidentified
  REGION 1..762: note = Description of Unknown: uncultivated organism with predicted taxonomy: Collinsella
  REGION 1..762: note = MG14-206 effector
MEITINREIGKLGLPRHLVLGMDPGIASCGFALIDTANHEILDLGVRLFDSPTHPKTGQSLAVIRRGFRSTRRNNDRTQARLKHCLQVLKAYGLIPQDATKEYFHTTKGDKQPLKLRVDGLDRLLNDREWALVLYSLCKRRGYIPHGEGNQDKSSEGGKVLSALAANKEAIAETSCRTVGEWLAQQPQSRNRGGNYDKCVTHAQLIEETHILFDAQRSFGSKYASPEFEAAYIEVCDWERSRKDFDRRTYDLVGHCSYFPTEKRAARCTLTSELVSAYGALGNITIIHENGTSRALSATERDECIAILFSCEPIRGNKDCAVKFGALRKALDLSSGDYFKGVPAADEKTREVYKPKGWRVLRNTLNAANPILLQRLRDDRNLADAVMEAVAYSSALPVLQEQLQGLPLSEAEIEALCRLPYSSKALNGYGNRSKKALDMLLDCLEEPEVLNLTQAENDCGLLGLRIAGAQLERSDRLMPYETWIERTGRTNNNPVVIRAMSQMRKVVNAICRKWGVPNEIHVELDRELRLPQRAKDEIAKANKKNEKNRERIAGQIAELRGCTADEVTGKQIEKYRLWEEQECFDLYTGAKIEVDRLISDDTYTQIDHILPFSRTGENSRNNKVLVLAKSNQDKREQTPYEWMSHDGAPSWDAFERRVQENQKLSRRKKNFLLEKDLDTKEGEFLARSFTDTAYMSREVCAYLADCLLFPDDGAKAHVVPTTGRATAWLRRRWGLNFGSNGEKDRSDDRHHACHRCLCDCSM

SEQ ID NO: 880 - protein, 1004 aa, unidentified; identical to SEQ ID NO: 809
  REGION 1..1004: note = Description of Unknown: uncultivated organism with predicted taxonomy: Collinsella
  REGION 1..1004: note = MG14-207 effector

SEQ ID NO: 881 - protein, 1000 aa, unidentified; identical to SEQ ID NO: 776
  REGION 1..1000: note = Description of Unknown: uncultivated organism with predicted taxonomy: Olsenella
  REGION 1..1000: note = MG14-208 effector

SEQ ID NO: 882 - protein, 1003 aa, unidentified; identical to SEQ ID NO: 738
  REGION 1..1003: note = Description of Unknown: uncultivated organism with predicted taxonomy: Collinsella
  REGION 1..1003: note = MG14-209 effector

SEQ ID NO: 883 - protein, 1004 aa, unidentified; identical to SEQ ID NO: 754
  REGION 1..1004: note = Description of Unknown: uncultivated organism with predicted taxonomy: Collinsella
  REGION 1..1004: note = MG14-210 effector

SEQ ID NO: 884 - protein, 1002 aa, unidentified; identical to SEQ ID NO: 715
  REGION 1..1002: note = Description of Unknown: uncultivated organism with predicted taxonomy: Collinsella
  REGION 1..1002: note = MG14-211 effector

SEQ ID NO: 885 - protein, 1046 aa, unidentified; identical to SEQ ID NO: 769
  REGION 1..1046: note = Description of Unknown: uncultivated organism with predicted taxonomy: Collinsella
  REGION 1..1046: note = MG14-212 effector

SEQ ID NO: 886 - protein, 1002 aa, unidentified; identical to SEQ ID NO: 771
  REGION 1..1002: note = Description of Unknown: uncultivated organism with predicted taxonomy: Collinsella
  REGION 1..1002: note = MG14-213 effector

SEQ ID NO: 887 - protein, 1002 aa, unidentified; identical to SEQ ID NO: 771
  REGION 1..1002: note = Description of Unknown: uncultivated organism with predicted taxonomy: Coriobacteriales
  REGION 1..1002: note = MG14-214 effector

SEQ ID NO: 888 - protein, 798 aa, unidentified
  REGION 1..798: note = Description of Unknown: uncultivated organism with predicted taxonomy: Olsenella
  REGION 1..798: note = MG14-215 effector
MELVKPYYVLGLDLGPASCGFALIDINNMRILEIGSHLFDAPQENKKQTKVSLAAKRRSARSARRNNQRTKNRQKHCIKLLREAKLIPQDASGVWFQTKKGDRPSLKLRDRGLEERLSDREFAQILYTLSARRGYIPHGEGKLGYSKESSDSDLGKVLKAVSENSNALSNGKSRTVGELLYERGSSRNTAGAYDHCVLNSQIVEEVHALFKAQRDFGNDKASEQLENDYIANLTWEKKTLDIDAASYARVGFCTYFEEEKRAARADYSSELCAAYERLGHLTIVDSDGTETRLDPSRRNRYLSILFSPKALPKNKYCKVRYSDIRRDLDLSSDSAFKGVEADQEKDKEPFEPKAWRCMRENGISENLLERMLSDRDFADAIGEALTYASTKDSLLNQLDTVDLTSAEKESIAGLPFSSKIFKGYGNRSLKALYMLLDAFEDPDILTLADAETATGLKGKRLADNYQRSAFLPLYEIYDNDCNNPVVLRAMSRMRRIVNAIIKIYGVPDEIHIELARELKQSKREKDAISKFQRKKEQANNRYREVAAGILNISPDEVSDRIIEKMAFREQQNDKDAYTGTTINLERLVTDSHYCQVDHVLPYSRTSDNSRNNRVLVLSTTNQNKRERTPFEWMNSGEANAPAWNDYKKHVLANKNYSQRKKQVYLLNENLDSETEAQFISRNLNDTRYMSRATMAFLADTLEYPDDGRKRHVIAVAGSATSALRHVWGLNFGEGNVKDRSDDRHHAVDACVIAACSESTLKKVARARSRGYRSFKKTQESRLSDTQPWPTFADDVIAM

SEQ ID NO: 889 - protein, 1005 aa, unidentified; identical to SEQ ID NO: 744
  REGION 1..1005: note = Description of Unknown: uncultivated organism with predicted taxonomy: Collinsella
  REGION 1..1005: note = MG14-216 effector

SEQ ID NO: 890 - protein, 1004 aa, unidentified; identical to SEQ ID NO: 737
  REGION 1..1004: note = Description of Unknown: uncultivated organism with predicted taxonomy: Collinsella
  REGION 1..1004: note = MG14-217 effector

SEQ ID NO: 891 - protein, 769 aa, unidentified
  REGION 1..769: note = Description of Unknown: uncultivated organism with predicted taxonomy: Olsenella mediterranea
  REGION 1..769: note = MG14-218 effector
AAFGALPPKASARRTYDLVGHCSYFPTEKRAARCTLTSELVSAYGALGNITIIHENGTSRALSATERDECIAILFSCEPIRDNKDCAVKFGALRKALDLSSGDYFKGVPAADEKTREVYKPKGWRVLRNTLNATNPILLQRLRDDRDLADAVMEAVAYSSALPVLQEQLQGLPLSEAEIEALCRLPYSSKALNGYGNRSKKALDVLLDCLEEPEVLNLTQAENDCGLLGLRIAGAQLERSDRLMPYETWIERTGRTNNNPVVIRAMSQMRKVVNAICRKWGVPNEIHVELDRELRLPQRAKDEIAKANKKNEKNRERIAGQIAELRGCTADEVTGKQIEKYRLWEEQECFDLYTGAKIEVDRLISDDTYTQIDHILPFSRTGENSRNNKVLVLAKSNQDKREQTPYEWMSHDGAPSWDAFERRVQENQKLSRRKKNFLLEKDLDTKEGEFLARSFTDTAYMSREVCAYLADCLLFPDDGAKAHVVPTTGRATAWLRRRWGLSFGSNGEKDRSDDRHHATDACVIAACSRSLVIKTARINQETHWSITRGMNETQRRDAIMKALESVMPWETFANEVRAAHDFVVPTRFVPRKGKGELFEQTVYRYAGVNAQGKDLARKASSDKNIVMGNAVVSADEKSVIKVSEMLCLRLWHDPEAKKGQGAWYADPVYKADIPALKDGTYVPRIAKAHTGRKAWKPVPESAMKKPPLEIYLGDLVQIGDFVGRFSGYNIDNANWSFVDRLTRIKISCPTVGKLSNDMSPFVVRESPIK

SEQ ID NO: 892 - protein, 1003 aa, unidentified; identical to SEQ ID NO: 767
  REGION 1..1003: note = Description of Unknown: uncultivated organism with predicted taxonomy: Collinsella
  REGION 1..1003: note = MG14-219 effector

SEQ ID NO: 893 - protein, 985 aa, unidentified; identical to SEQ ID NO: 805
  REGION 1..985: note = Description of Unknown: uncultivated organism with predicted taxonomy: Collinsella
  REGION 1..985: note = MG14-220 effector

SEQ ID NO: 894 - protein, 1003 aa, unidentified; identical to SEQ ID NO: 789
  REGION 1..1003: note = Description of Unknown: uncultivated organism with predicted taxonomy: Collinsella
  REGION 1..1003: note = MG14-221 effector

SEQ ID NO: 895 - protein, 1003 aa, unidentified; identical to SEQ ID NO: 778
  REGION 1..1003: note = Description of Unknown: uncultivated organism with predicted taxonomy: Collinsella
  REGION 1..1003: note = MG14-222 effector

SEQ ID NO: 896 - protein, 1053 aa, unidentified
  REGION 1..1053: note = Description of Unknown: uncultivated organism with predicted taxonomy: Collinsella sp. AM13-34
  REGION 1..1053: note = MG14-223 effector
VIRLESGMDKAKGADIGELGFDPATFATALMTLEEFRSKDRVIWAGLDIGVASTGLCLVDVRNHEIVLMASHLFKSPVVDKKKATAAPESLASVRRGARSVRRNIMREGRRKKAIRAALADFDLIPADADGEWFSARRDERTVVRLRSKALGYLLNSRELARVLYSFASHRGYIDHGKSDKEDDAGKVKKALAANHAALADGGCKTFGQYLAGQPRSRNRAGDYSYTADIGMTVDEVRTIFARQRELGSEIASKALEERYIAELTWLTDTSKRDRSTYLKVGFCTYLGAPYRRGATSTISFEMVRAHQTLCNTVILHADGTSSTIPGDIRIEIVRDLFAVKKSVKPLKWSGLRRRLGLSEGDSFKGRPVEEEKRDCIALPAWAVLCAGLYEGHRDLLERLHDHIDDADAVCSALTFASSAASLAGRLAPLALSDDEVEAIIDLPYSARLFSGYANASLEALQMLRGTFEDPRVTSLRQAEEDSGLAQARAILAEERGGSADGLLCAFSDYDPTCRNPVVLRATAQVRRMVNSVIRHYGLPDVIRVEVARDLKRSKHEREIVAESNRARLELNEQAKRDIIEFLGLPDDHHVRGRDLALVKLYREQGGKDPYTGAAIDFRRMLEEHRYAEIDHILPVSRTCDDSQANKVLCLTKSNRDKSNRSPYEWMTSGEASAPDWGEFCGRMERWAKMCEPRRYARKKLANLTCENLAERAGNFIDRNLNDTRYMSVALAKWLRECLPFTKDGHEHVFCVAGGATALMRSVWDIGITGPDGKKNRDDDRHHAVDAAVIACCTPGIVRNVALVNEGHARADVRQRLFSDSLPYPEFKEQVDAWIPCIVPTLTLPNTVTGSVLKDTVYPYLGRDEAGKDLYLTVKRDKDGRIVERKVNKATTMWKDGQGGCRAYGSMCALEAVFDASAGKRGRWSFDPVYCIDIPHREAVRRTMRAFSKEKAIDLWDTVAVPEAAPRMTIRRGDVLVCDGKAARFHCFDISVNAIRLFSQRGGKQLQATGPLSAEAFPPPSKWGEGVRIMQEDCLGLCWLSFLAQRAAGVQME

SEQ ID NO: 897 - protein, 1004 aa, unidentified; identical to SEQ ID NO: 742
  REGION 1..1004: note = Description of Unknown: uncultivated organism with predicted taxonomy: Collinsella
  REGION 1..1004: note = MG14-224 effector

SEQ ID NO: 898 - protein, 1003 aa, unidentified
  REGION 1..1003: note = Description of Unknown: uncultivated organism with predicted taxonomy: Collinsella
  REGION 1..1003: note = MG14-225 effector
MEITINREIGKLGLPRHLVLGMDPGIASCGFALIDTANHEILDLGVRLFDSPIHPKTKQSLAVIRRGFRSTRRNIDRTQARLKHCLQVLKAYGLIPQDATKEYFHTTKGDKQPLKLRVDGLDRLLNDREWALVLYSLCKRRGYIPHGEGNQDKSSEGGKVLSALAANKEAIAETSCRTVGKWLAQQPQSRNRGGNYDKCVTHAQLIEETHILFDAQRSFGSKYASPEFEAAYIEVCDWERSRKDFDRRTYDIVGHCSYFPTEKRAARCTLTSELVSAYGALGNITIIHENGTSRALTATERDECIAILFSCEPIRGNKDCAVKFGALRKALDLSSGDYFKGVPAADEKTREVYKPKGWRVLRNTLNAANPILLQRLRDDRDLADAVMEAVAYSSALPVLQEQLQGLPLSEAEIEALCRLPYSSKALNGYGNRSKKALDMLLDCLEEPEVLNLTQAENDCGLLGLRIAGAQLERSDRLMPYETWIERTGRTNNNPVVIRSMSQMRKVVNAVCRKWGVPNEIHVELDRELRLPQRAKDEIAKANKKNEKNRERIAGQIAELRGCTADEVTGKQIEKYRLWEEQEYFDLYTGAKIEVDRLISDDTYTQIDHILPFSRTGENSRNNKVLVLAKSNQDKREQTPYEWMSHDGAPSWDAFERRVQENQKLSRRKKNFLLEKDLDTKEGEFLARSFTDTAYMSREVCAYLADCLLFPDDGAKAHVVPTTGRATAWLRRRWGLNFGSNGEKDRSDDRHHATDACVIAACSPSLVIKTARINQETHWSITRGMNETQRRDAIMKALESVMPWETFANEVRAAHDFVVPTRFVPRKGKGELFEQTVYRYAGVNAQGKDIARKASSDKDIVMGNAVVSADEKSVIKVSEMLCLRLWHDPEAKKGQGAWYADPVYKADIPALKDGTYVPRIAKAHTGRKAWKPVPESAMKKPPLEIYLGDLVQIGDFVGRFSGYNIDNANWSFVDRLTRIKISCPTVGKLSNDMSPFVVRESPIK

SEQ ID NO: 899 - protein, 1003 aa, unidentified; identical to SEQ ID NO: 898
  REGION 1..1003: note = Description of Unknown: uncultivated organism with predicted taxonomy: Collinsella
  REGION 1..1003: note = MG14-226 effector

SEQ ID NO: 900 - protein, 1005 aa, unidentified; identical to SEQ ID NO: 727
  REGION 1..1005: note = Description of Unknown: uncultivated organism with predicted taxonomy: Collinsella
  REGION 1..1005: note = MG14-227 effector

SEQ ID NO: 901 - protein, 1026 aa, unidentified; identical to SEQ ID NO: 794
  REGION 1..1026: note = Description of Unknown: uncultivated organism with predicted taxonomy: Olsenella
  REGION 1..1026: note = MG14-228 effector

SEQ ID NO: 902 - protein, 1005 aa, unidentified
  REGION 1..1005: note = Description of Unknown: uncultivated organism with predicted taxonomy: Olsenella
  REGION 1..1005: note = MG14-229 effector
MEITINREIGKLGLPRHLVLGMDPGIASCGFALIDTANHEILDLGVRLFDSPTHPKTGQSLAVIRRGFRSTRRNIDRTQARLKHCLQILKAYGLIPQDATKEYFHTTKGDKQPLKLRVDGLDRQLNDREWALVLYSLCKRRGYIPHGEGNQDKSSEGGKVLSALAANKEAIAETSCRTVGEWLAQQPQSRNRGGNYDKCVTHAQLIEETHILFDAQRSFGSKYASPEFEAAYIEVCDWERSRKDFDHRTYDLVGHCSYFPTEKRAARCTLTSELVSAYGALGNITIIHENGTSRALSATERDECIAILFSCEPIRGNKDCAVKFGALRKALDLSSGDYFKGVPAADEKTREVYKPKGWRVLRNTLNAANPILLQRLRDDRNLADAVMEAVAYSSALPVLQEQLQGLPLSEAEIEALCRLPYSSKALNGYGNRSKKALDMLLDCLEEPEVLNLTQAENDCGLLGLRIAGAQLERSDRLMPYETWIERTGRTNNNPVVIRSMSQMRKVVNAVCRKWGVPNEIHVELDRELRLPQRAKDEIAKANKKNEKNRERIAGQIAELRGCTADEVTGKQIEKYRLWEEQECFDLYTGAKIEVDRLISDDTYTQIDHILPFSRTGENSRNNKVLVLAKSNQDKREQTPYEWMSHDGAPSWDAFERRVQENQKLSRRKKNFLLEKDLDTKEGEFLARSFTDTAYMSREVCTYLADCLLFPDDGAKAHVVPTTGRATAWLRRRWGLNFGSNGEKDRSDDRHHATDACVIAACSRSLVIKTARINQETHWSITRGMNETQRRDAIMKALESVMPWETFANEVRAAHDFVVPTRFVPRKGKGELFEQTVYRYAGVNAQGKDIARKASSDKDIVMGNAVVSADEKSVIKVSEMLCLRLWHDPEAKKGQGAWYADPVYKADIPALKDGTYVPRIARAAIGRKAWKLVPDSAMTKPPLEIYLGDLVQIGNFIGRFSGYNIANGSWSFIDRLTKETLSCPSVAKLNNNLFPTIIRESIIMRK

SEQ ID NO: 903 - protein, 1004 aa, unidentified; identical to SEQ ID NO: 774
  REGION 1..1004: note = Description of Unknown: uncultivated organism with predicted taxonomy: Collinsella
  REGION 1..1004: note = MG14-230 effector

SEQ ID NO: 904 - protein, 1004 aa, unidentified; identical to SEQ ID NO: 786
  REGION 1..1004: note = Description of Unknown: uncultivated organism with predicted taxonomy: Collinsella
  REGION 1..1004: note = MG14-231 effector

SEQ ID NO: 905 - protein, 1003 aa, unidentified; identical to SEQ ID NO: 812
  REGION 1..1003: note = Description of Unknown: uncultivated organism with predicted taxonomy: Collinsella
  REGION 1..1003: note = MG14-232 effector

SEQ ID NO: 906 - protein, 1003 aa, unidentified; identical to SEQ ID NO: 734
  REGION 1..1003: note = Description of Unknown: uncultivated organism with predicted taxonomy: Collinsella
  REGION 1..1003: note = MG14-233 effector

SEQ ID NO: 907 - protein, 1004 aa, unidentified; identical to SEQ ID NO: 815
  REGION 1..1004: note = Description of Unknown: uncultivated organism with predicted taxonomy: Collinsella
  REGION 1..1004: note = MG14-234 effector

SEQ ID NO: 908 - protein, 1002 aa, unidentified; identical to SEQ ID NO: 790
  REGION 1..1002: note = Description of Unknown: uncultivated organism with predicted taxonomy: Collinsella
  REGION 1..1002: note = MG14-235 effector

SEQ ID NO: 909 - protein, 1004 aa, unidentified; identical to SEQ ID NO: 807
  REGION 1..1004: note = Description of Unknown: uncultivated organism with predicted taxonomy: Collinsella
  REGION 1..1004: note = MG14-236 effector

SEQ ID NO: 910 - protein, 1002 aa, unidentified
  REGION 1..1002: note = Description of Unknown: uncultivated organism with predicted taxonomy: Collinsella
  REGION 1..1002: note = MG14-237 effector
MEITINREIGKLGLPRHLVLGMDPGIASCGFALIDTANHEILDLGVRLFDSPTHPKTGQSLAVIRRGFRSTRRNIDRTQARLKHCLQILKAYGLIPQDATKEYFHTTKGDKQPLKLRVDGLDRLLNDREWALVLYSLCKRRGYIPHGEGNQDKSSEGGKVLSALAANKEAIAETSCRTVGEWLAQQPQSRNRGGNYDKCVTHAQLIEETHILFDAQRSFGSKYASPELEAAYIEVCDWERSRKDFDRRTYDLVGHCSYFPTEKRAARCTLTSELVSAYGALGNITIIHENGTSRALSATERDECIAILFSCEPIRDNEDCAVKFGALRKALDLSSGDYFKGVPAADEKTREVYKPKGWRVLRNTLNAANPILLQRLRDDRDLADAVMEAVAYSSALPVLQEQLQGLPLSEAEIEALCRLPYSSKALNGYGNRSKKALDMLLDCLEEPEVLNLTQAENDCGLLGLRIAGAQLERSDRLMPYETWIERTGRTNNNPVVIRSMSQMRKVVNAVCRKWGVPNEIHVELDRELRLPQRAKDEIAKANKKNEKNRERIAGQIAELRGCTADEVTGKQIEKYRLWEEQECFDLYTGAKIEVDRLISDDTYTQIDHILPFSRTGENSRNNKVLVLAKSNQDKREQTPYEWMSHDGAPSWDAFERRVQENQKLSRRKKNFLLEKDLDTKEGEFLARSFTDTAYMSREVCAYLADCLLFPDDGAKAHVVPTTGRATAWLRRRWGLNFGSNGEKDRSDDRHHATDACVIAACSRSLVIKTARINQETHWSITRGMNETQRRDAIMKALESVMPWETFANEVRAAHDFVVPTRFVPRKGKGELFEQTVYRYAGVNAQGKDIARKASSDKDIVMGNAVVSADEKSVIKVSEMLCLRLWHDPEAKKGKGAWYADPVYKADIPSLKDGTYVPKIAKAATGRKAWKAIPQNVLNSAPLEIYLGDLVQIGNQKGRFRGINIDTVSWSFVDTLSKLPVKMPTIGRLNNETIPTVIRELLI

SEQ ID NO: 911 - protein, 1027 aa, unidentified; identical to SEQ ID NO: 782
  REGION 1..1027: note = Description of Unknown: uncultivated organism with predicted taxonomy: Atopobium sp. ICM42b
  REGION 1..1027: note = MG14-238 effector

SEQ ID NO: 912 - protein, 1004 aa, unidentified
  REGION 1..1004: note = Description of Unknown: uncultivated organism with predicted taxonomy: Collinsella
  REGION 1..1004: note = MG14-239 effector
MEITINREIGKLGLPRHLVLGMDPGIASCGFALIDTANREILDLGVRLFDSPTHPKTGQSLAVIRRGFRSTRRNIDRTQARLKHCLQILKAYGLIPQDATKEYFHTTKGDKQPLKLRVDGLDRLLNDREWALVLYSLCKRRGYIPHGEGNQDKSSEGGKVLSALAANKEAIAETSCRTVGEWLAQQPQSRNRGGNYDKCVTHAQLIEETHILFDAQRSFGSKYASPEFEAAYIEVCDWERSRKDFDRRTYDLVGHCSYFPTEKRAARCTLTSELVSAYGALGNITIIHDDGTSRALSATERDECIAILFSCEPIRGNKDCAVKFGALRKALDLSSGDYFKGVPAADEKTREVYKPKGWRVLRNTLNAANPILLQRLRDDRNLADAVMEAVAYSSALPVLQEQLQGLPLSEAEIEALCRLPYSSKALNGYGNRSKKALDMLLDCLEEPEVLNLTQAENDCGLLGLRIAGTQLERSDRLMPYETWIELTGRTNNNPVVIRSMSQMRKVVNAVCRKWGVPNEIHVELDRELRLPQRAKDEIAKANKKNEKNRERIAGQIAELRGCTADEVTGKQIEKYRLWEEQEYFDLYTGAKIEVDRLISDDTYTQIDHILPFSRTGENSRNNKVLVLAKSNQDKREQTPYEWMSHDGAPSWDAFVRRVQENQKLSRRKKNFLLEKDLDTKEGEFLARSFTDTAYMSREVCAYLADCLLFPDDGAKAHVVPTTGRATAWLRRRWGLNFGSNREKDRSDDRHHATDACVIAACSRSLVIKTARINQETHWSITRGMNETQRRNAIMKALESVMPWETFANEVRAAHDFVVPTRFVPRKGKGELFEQTVYRYAGVNAQGKDLARKASSDKDIVMGNAVVSADEKSVIKVSEMLCLRLWHDPEAKKGQGAWYADPVYKADIPALKDGTYIPRIAKQKYGRKVWKAVPNSALTQKPLEIYLGDLIKVGDKLGRYNGYNIATANWSFVDALTKKEIAFPSVGMLSNELQPIIIRESILDN

SEQ ID NO: 913 - protein, 1003 aa, unidentified; identical to SEQ ID NO: 772
  REGION 1..1003: note = Description of Unknown: uncultivated organism with predicted taxonomy: Collinsella
  REGION 1..1003: note = MG14-240 effector

SEQ ID NO: 914 - protein, 1004 aa, unidentified; identical to SEQ ID NO: 795
  REGION 1..1004: note = Description of Unknown: uncultivated organism with predicted taxonomy: Collinsella
  REGION 1..1004: note = MG14-241 effector

SEQ ID NO: 915 - protein, 1003 aa, unidentified; identical to SEQ ID NO: 753
  REGION 1..1003: note = Description of Unknown: uncultivated organism with predicted taxonomy: Collinsella
  REGION 1..1003: note = MG14-242 effector

SEQ ID NO: 916 - protein, 1004 aa, unidentified; identical to SEQ ID NO: 766
  REGION 1..1004: note = Description of Unknown: uncultivated organism with predicted taxonomy: Collinsella
  REGION 1..1004: note = MG14-243 effector

SEQ ID NO: 917 - protein, 1006 aa, unidentified
  REGION 1..1006: note = Description of Unknown: uncultivated organism
  REGION 1..1006: note = MG14-244 effector
MAMRRPYLVLGLDPGIASCGFCLLDLTNHKILLMGVRLFSVPKNRSGVSLAAERRAARSTRRNNHRTKSRLKRCLSILKAAGLVPEDADRGWLQARKKDKPVIKLRAVGLVRILSDRELAQALYSLCEHRGYIPHGEGKEGAADDADGKKVLSAIKKNMEDMDKGGYRTVGEMLYTQGRSRNRGGNYDRCVYNSQIQEEVSSIFAAQRSFGNPKATAELEQEYMECLTSEKSSSGHDRRSYEAVGSCVYFPELKRAAKADISSELCRAYERFGHLVIVHKDGTEQTLTSEQISRYISALFTPSAIQKKVQRITCATIRKDLDISGASVFKGVSHEQEKKEVFDPKAWRCLSKCLAGDHGELLERMWQDRSLGDAVCEALTYSSTEESLEGQLETLDLSEDECRALKAVPFNSKIFKGYGTRSIKALSLLVGAFEDPDVRTLADAEKATGLDMKRAEDRMPRSTKLPPYSVYDPTCKNPVVLRAMGQMRKIVNAIIKEHGVPDEIHIELSRDLKMSKREKDAVAKRQRTNEAANKKRATLAAGILGCEPSEVSHLVIRKLALREEQSDKDIYTGAAIDLQRLVEDDHYCEIGHILPYSRTGMGGWNNEVLVLAASNQKKRERTPYEWMQQDAGKAGVPAWDEYSSRVTATIDNPRKRRNLLCKDTGDEAMNGFLLRDLNDTRYMSVAVKNYLEDCLLFPEDGRKLHVTAVSGGATASLRRVWGLNSNGSDDEKTNSNTMRNSIDAAVIAACSVKTVQAVAKTRSLGRETFRHMRRSRLADTQPWETFADDVIVKCKTVIPTRMAEHGVTGCALNEFVYRIDGFNEKGYAILSRQVDRATRKRGIQVAGNYMPFGESSAKLVGQIAFIRLWHDPDFGKDGRWYVEPVYYNDIPALGNGVYQPKYILSKHPRMEWLPVPEAALSGTPLTLFPGDIIVAGNHIARFKKLDIACQGLGMLNILNEQLAVKNFPTINRWKNDMNIFILQEDCLGKCFNSLDIDSGSSTFTLR

SEQ ID NO: 918 - protein, 1006 aa, unidentified
  REGION 1..1006: note = Description of Unknown: uncultivated organism with predicted taxonomy: Olsenella
  REGION 1..1006: note = MG14-245 effector
MEANRPYLVLGLDPGIASCGFCLLDMTDHKILEMGSHLFDAPQEAKTKTSLAVTRRNARSARRNTLRTATRMKHCLALLKGADLVPEDADKAWLQSKKGDKPILKLRANGLDRKLADREFAQVLYSLCGRRGYIPHGEGRLGETDDGEGRKVLSAIKANEATMKRGNYRTVGEMLYANDGKSRNRGGDYSLCVYNSQIKDEVRALFAAQRALGNSKASEGFEKDYIDCLEWEKKTVDHDKRVYELVGACPYFPEEKRAADADISSELCRAYERLGHIAIVHEDGSEQNLTPNQIDGYLDVLFSPLPLKGNKECKVTYGTIRKDLDLSGKDVFKGVAQDGEKGEPFSPKSWRCLRTALYENHEDLLVRMLKDRELGDDICEALTFASTEASLGERLGLLDLTDDEQAALCSSVPFTGKLFKGYGNRSLKALGILLGAFEEPEIRTLTDAERATGLLDLRLADRGLRDNLLPSYSKYDPTCRNPVVLRSMGRMRRIVNAIIRIHGVPDEIHIELGRDLKMSNKEKATVSKNQRANEAANKKWAAKAANILGCSPEEVPGRIVRKLAMREEQGDKDAYTGAAIDLEHLVRDDRYCEIDHILPYSRTCDDSRANKVLVLSKSNQDKRERTPYEWMTSGEPGAPDWDEYRNRVMATVKYARKRANLLNTDLGPNVQAQFLARNLNDDRYMSVAVKNYLEDCLLFPNDGRKKHVTAVAGGATGNLRWVWGLNFGQGNTKDRDDDRHHAVDAAIIAACSESTVKKVAEASSKGRETFKHLRKSRLSDTQPWPTFAEEVAARRAFVVPTRMVNHGVTGRVFEDTLYHLEGFTNDKGKYPLVRAGEKTAKKGNVRIGPDGSVKLIDGMAFLRLWLDPNARPNGKVKGKWYAEPVYYADIPAIKAGTYVPRACTIHVARNAWEPVPESAMQREPVVLFAGDVVEVDGHIGRYSGFNIFGGRITILNLLTKAEVGDWPSLGSWGRDTQVRVLQEDCLGHCYDDIVINPDNSTFRQRE

SEQ ID NO: 919 - protein, 1027 aa, unidentified
  REGION 1..1027: note = Description of Unknown: uncultivated organism with predicted taxonomy: Coriobacteriales
  REGION 1..1027: note = MG14-246 effector
MGQQNQEMANARHYLVLGLDPGIASCGFCLLDMTDHKILEMGSHLFDAPQNPKSKQNLSVERRNARSARRNLKRTRDRQKKCLELLKQCGLSPSDADKQWLQSRKGDKPVIKLRASALDRTLTDRELAQVLYSLTGRRGYIPHGEGHLDDVDDAEAGKVLAAVRENQNQMAKKGYRTVGQMLYKEGRSRNRGGDYTLCVLNSQIIDEAKIILDEQRSHGNAILTKMSNGEFEQFTNSYIDCLTWEKKSTKHDERVYSLVGACTYFPEEKRAAEADLSSELCRAYERFGHLVMVDADGTEHRLSAKDRARYLQILFSPVPIRGNKDCKVTYATIRKDLDLSAHVSFKGIEAERENKEEPFSPRRWRKLRACGVPEGLLARMLEDRDLADSIGEALAYASTEESLRDKLSSLDLSDDEINQLAVNVPFAGKLFSGYGSRSLKALHMLLDMFEDESILTLDDAERESGLQALRLADKGHRSLNLLPYDIYDPTCNNPTVLRALGRMRRIVNAIIRIYGVPDEIHIELGKELKQSSKEKKSIAKSNLQNKKDNERIAKTIAELLGCSPDDVRGKQIRRFALREEQGCKDAYTGDSIDLMRMLTEDRYTEIDHILPYSRTCDDSRANKVLVLQKSNQDKKERTPWEWMSDDASKGAPDWEEFKARTLTNHRLSYKKRDHLLNQNLNGQEQSFIDRNLNDTRYMSVAVKDYLEKSLLFPDDGRKSHVIAVAGGATSALRHVWGLNFGADNTKDRSDDRHHAVDAAVIAACSQATVKKVADTSKLGHSEFKRKRESRLADTQPWPTFADEVIARREFVIPTRMANHGVTGSAFEDTIYRYEGIREGKDSLAVLSKSQGKDKPRAVKPSGNYRLDADGGAHLYDGIAFLRFWLDAEARPKGKVKGKWLIEPVYYADIPLIQCGRYIPKYIPAAHLARDQWVEIPESVLATDPVTVFFGDVLYVDGHIGRYSGFNINGLKLTMHSVISGESIAFPPVSSTWSKDSEVRIIEEDVLGRCWTPNIAKLVRLQEAASSS

SEQ ID NO: 920 - protein, 1027 aa, unidentified
  REGION 1..1027: note = Description of Unknown: uncultivated organism with predicted taxonomy: Coriobacteriales
  REGION 1..1027: note = MG14-247 effector
MGQQNQEMANARHYLVLGLDPGIASCGFCLLDMTDHKILEMGSHLFDAPQNPKSKQNLSVERRNARSARRNLKRTRDRQKKCLELLKQCGLSPSDADKQWLQSRKGDKPVIKLRASALDRTLTDRELAQVLYSLTGRRGYIPHGEGHLDDVDDAEAGKVLAAVRENQNQMAKKGYRTVGQMLYKEGRSRNRGGDYTLCVLNSQIIDEAKIILDEQRSHGNAILTKMSNGEFEQFTNSYIDCLTWEKKSTKHDERVYSLVGACTYFPEEKRAAEADLSSELCRAYERFGHLVMVDADGTEHRLSAKDRARYLQILFSPVPIRGNKDCKVTYATIRKDLDLSAHVSFKGIEAERENKEEPFSPRRWRKLRACGVPEGLLARMLEDRDLADSIGEALAYASTEESLRDKLSSLDLSDDEINQLAVNVPFAGKLFSGYGSRSLKALHMLLDMFEDESILTLDDAERESGLQALRLADKGHRSLNLPPYDIYDPTCNNPTVLRALGRMRRIVNAIIRIYGVPDEIHIELGKELKQSSKEKKSIAKSNLQNKKDNERIAKTIAELLGCSPDDVRGKQIRRFALREEQGCKDAYTGDSIDLMRMLTEDRYTEIDHILPYSRTCDDSRANKVLVLQKSNQDKKERTPWEWMSDDASKGAPDWEEFKARTLTNHRLSYKKRDHLLNQNLNGQEQSFIDRNLNDTRYMSVAVKDYLEKSLLFPDDGRKSHVIAVAGGATSALRHVWGLNFGADNTKDRSDDRHHAVDAAVIAACSQATVKKVADTSKLGHSEFKRKRESRLADTQPWPTFADEVIARREFVIPTRMANHGVTGSAFEDTIYRYEGIREGKDSLAVLSKSQGKDKPRAVKPSGNYRLDADGGAHLYDGIAFLRFWLDAEARPKGKVKGKWLIEPVYYADIPLIQCGRYIPKYIPAAHLARDQWVEIPESVLATDPVTVFFGDVLYVDGHIGRYSGFNINGLKLTMHSVISGESIAFPPVSSTWSKDSEVRIIEEDVLGRCWTPNIAKLVRLQEAASSS

SEQ ID NO: 921 - protein, 858 aa, unidentified
  REGION 1..858: note = Description of Unknown: uncultivated organism
  REGION 1..858: note = MG14-248 effector
MAKKGYRTVGQMLYKEGRSRNRGGDYTLCVLNSQIIDEAKIILDEQRSHGNAILTKMSNGEFEQFTNSYIDCLTWEKKSTKHDERVYSLVGACTYFPEEKRAAEADLSSELCRAYERFGHLVMVDADGTEHRLSAKDRARYLQILFSPVPIRGNKDCKVTYATIRKDLDLSAHVSFKGIEAERENKEEPFSPRRWRKLRACGVPEGLLARMLEDRDLADSIGEALAYASTEESLRDKLSSLDLSDDEINQLAVNVPFAGKLFSGYGSRSLKALHMLLDMFEDESILTLDDAERESGLQALRLADKGHRSLNLPPYDIYDPTCNNPTVLRALGRMRRIVNAIIRIYGVPDEIHIELGKELKQSSKEKKSIAKSNLQNKKDNERIAKTIAELLGCSPDDVRGKQIRRFALREEQGCKDAYTGDSIDLMRMLTEDRYTEIDHILPYSRTCDDSRANKVLVLQKSNQDKKERTPWEWMSDDASKGAPDWEEFKARTLTNHRLSYKKRDHLLNQNLNGQEQSFIDRNLNDTRYMSVAVKDYLEKSLLFPDDGRKSHVIAVAGGATSALRHVWGLNFGADNTKDRSDDRHHAVDAAVIAACSQATVKKVADTSKLGHSEFKRKRESRLADTQPWPTFADEVIARREFVIPTRMANHGVTGSAFEDTIYRYEGIREGKDSLAVLSKSQGKDKPRAVKPSGNYRLDADGGAHLYDGIAFLRFWLDAEARPKGKVKGKWLIEPVYYADIPLIQCGRYIPKYIPAAHLARDQWVEIPESVLATDPVTVFFGDVLYVDGHIGRYSGFNINGLKLTMHSVISGESIAFPPVSSTWSKDSEVRIIEEDVLGRCWTPNIAKLVRLQEAASSS

SEQ ID NO: 922 - protein, 1027 aa, unidentified; identical to SEQ ID NO: 920
  REGION 1..1027: note = Description of Unknown: uncultivated organism with predicted taxonomy: Olsenella
  REGION 1..1027: note = MG14-249 effector

SEQ ID NO: 923 - protein, 1007 aa, unidentified
  REGION 1..1007: note = Description of Unknown: uncultivated organism with predicted taxonomy: Olsenella
  REGION 1..1007: note = MG14-250 effector
MESERAYLVLGLDPGIASCGFCLLDMTNHKILEMGSRLFKTPQEDKTKVSLAVTRRNARSARRNNERTKSRMKHCMDILADEGLIPEDADKTWFQSKKGDKPILKLRSCGLNRALTDREFAQVLYSLCGHRGYIPHGEGKDAETDDAEGKKVLNAIKRNTEEMAAGGYRTVGEMLHSRGKSRNRGGNYDFCVYNSQIQSEVHAIFEAQRALGNLKANEKFEDRYLECLTWEKKSSDHDKKVYDQVGTCIYFPELKRAADADVSSELCRAYEKLGHLVIVHVDGAEQRLTGEQISHYIGILFSPTPLNNNKYCKVTYSTIRSDLDLSGKSVFKGVPQEKEKDEVFVPKAWRCLRKVLANDHEDLLDRMLNDRELGDAICEALTFSSSETSLQEQLEPLGLAEDECVALSSIPFNGKLFKGYGSRSIKALSILLGAFEEPGVQTLADAEKATGLDRKRLEDRVARSELLPPYNTYDETCRNPVVLRAMGQMRHIVNAIIRIYGVPDEIHIELGRELKMSAREKEMVSKRQRANETANKNWAAIAAKILCCEPEEVPGQTIRKLAFREEQGEKDIYTNAPIDLEKLVTDNRYCEIDHVLPYSRTCDDSRANKVLVLSASNQNKRERTPYEWMSQDAGKAGTPKWSEYSARVIATVKNPRKRANLLNMDLDKDAESEFLQRNLNDTRYMSVAVKNYLEDCLQFPDDGRKTHVIAVAGGATASLRHVWGLNFGKNNEKDRTDNRHHAVDAAVIAACSTKTVQAVARASSVGRESFKHIRQSRLADTQPWKTFAEDVITERSFVIPTYMADHGVTGCVFEDFSYSLEGIDEKGYAHISRQTDRTTGECRSLKASNFEIVNETTVKLLDSMAFLRLWHDPHAGKTGRWYIEPVYCADIPNLDGKTYHPRYQKQKVARSGWPLVPAEALKNKPLLLFRGDVLIVGNHIARYWKFDIGGGKVTMLSIVDINSEAKGFPSISKWKNDMPVRILSEDCLASCYKHMTIDSENSTFEER

SEQ ID NO: 924 - protein, 1006 aa, unidentified
  REGION 1..1006: note = Description of Unknown: uncultivated organism
  REGION 1..1006: note = MG14-251 effector
MAMQRPYLVLGLDPGIASCGFCLIDLANHKILLMGVRLFSVPKNRAGVSLAAERRAARSARRNNQRTKSRLKRCLTILKAAGLVPEDADRGWLQARKKDKPVIKLRAAGLDRVLSDRELAQVLYSLCEHRGYIPHGEGKEGATDDADGKKVLSAIKKNMEDMAKGGYRTVGEMLCAQGRSRNRGGNYDRCVYNSQIQEEARAIFAAQRSFGNLNVTAELEQEYMECLTSEKSSSDHDRRSYEVVGSCVYFPELKRAAKADISSELCRAYERFGHLVIVHKNGNEQTLTHEQINRYISALFMPSALQKKAQRITYATIRKDLDISGTSVFKGISHEQEKNEVFEPKAWRCLSKCLAENHGELLDRMWLDRALADSVCEALTYASTEVSLKGQLEALDLSEDECRAIKAIPFNSKIFKGYGTRSIKALSLLVGAFEDPDVRTLADAERATGLDMKRAEDRMPRSIMLPPYSAYDPTCRNPVVLRAMGQMRKIVNAIIKDHGVPDEIHIELSRNLKMSKREKDAIAKRQRSNEAANKKWAALAAGILDCEPSEVPHLVIRKLALREEQGDKDVYTGAAIDLERLVADDHYCEIDHILPYSRTGMSGWNNEVLVLAASNQKKRERTPYEWMQQDAGKSGVPAWDAYSSRVAATIGNPRKRRNLLCMDTGQEAMNGFLLRDLNDTRYMSVAIKNYLEDCLLFPEDGRKLHVTAVSGGATASLRRVWGLNTKGSDDEKTNSDTMRNAIDAAVIAACSVKTVQAVAKTRSLGRETFRHMRRSRLADTQPWETFADDVLAKCETVIPTRMAEHGVTGCALNEFVYRIDGFNEKGYAILSRQIDRATGERGVQVAGNYAPFGAGSAKLVGQTAFIRLWHDPDFGKGGRWYVEPVYYKDIPTLHDISYQPRYILSGRPRTEWPPVPEAALSRPPLILFSGDILVVGNHIARFKRLDINSQKLVMLNIFDERSLVKDFPTISRWKGDTNISIFSEDVLGKCFESVDIDSESSTFTLH

SEQ ID NO: 925 - protein, 1000 aa, unidentified
  REGION 1..1000: note = Description of Unknown: uncultivated organism with predicted taxonomy: Olsenella umbonata
  REGION 1..1000: note = MG14-252 effector
MAEQYLVLGLDPGISSCGFALLDMNNHKILEMGSHLFDAPQESKTKVSLAVGRRNARSARRNNLRTKNRQKHCMKLLKEAGLVPDDATKQWFQSAKGDRPLLELRFAALERILTNREFAQILYALSARRGYIPHGEGRISKLSDMDTSGSSDAETGKVLKAIGENNKLMVQGQFRTVGEMLYHQGKSRNKGGSYEHCVLNSQIVDEVHAIFQRQRAQQNPAATQELEDKYIENLTWEKRTLDHDARVYALVKKCKYFPSEYHAARADLSSELCSAYERLKHLRIVNADGHETALAPEQVEAYIAILFSPEPLSGRKEKVTYARIRKDLDLSAHLFFKGIDPEDEKDHEPYAPRAWRAMRKVLPTELMNRFRNDRALADAVGEALTYASSEDSLIYQLDSLDLSEAEREYILGLPFSGKIFKGYGSRSLKALGMLIDAFEEPEVTTLTEAEESSGLLGLRMSDNGMRYPLLPPYSTYDSENRNPVVLRAMGRMRRIVNAIIRIYGVPDEIHIELGRDLKRSKHEKDLISKRNRENERKNKQWRAQAAEIQGIDPDEVRPKLLKKMALWEEQGGLDAYTGHKIEFDRMISDDKYCEIDHVLPYSRTCDDSRSNKVLVLAKSNQDKRERTPYEWMTQDAQKGAPSWDEYQARVIANRHISPRKRRYLLNNNLGPDQESDFLNRNLNDDRYMSRAVKSYLEDTLIFPEDGRKKHVTAVSGGATGSLRHVWGLNFGDGNTKDRSDNRHHAVDACVIAACSEATVQAVAKARKLGAEAYKHIREDRLKDTQPWPTFADEVVARREFVIPTRMVSHGVTGQAFEDTNYRFDGLTNDTKKLGILYGNGKFTKKGNYVIGGDGNAHLVDGMAFLRLWIDPTAKKGKGKWYAEPVYYADIPAIKNGTYVPRAGKATVARNAWEAIPEAAHRTKPLVLFCGDVISMDGHTARYWSFSINTLTLKTKDLITGDDYKDFPTLGKWSKDSYPKIIQEDCLGHCYKGLVPKSSEG

SEQ ID NO: 926 - protein, 1022 aa, unidentified
  REGION 1..1022: note = Description of Unknown: uncultivated organism with predicted taxonomy: Atopobium sp. ICM42b
  REGION 1..1022: note = MG14-253 effector
MSGQSNGKTILGIDAGIASVGFCLLDIDNHQILELGSRLFDQPTEPKTDQNLSVARRQARSQRRLIARRKVRKGRCLGILKSCGLVPDDVDSGWLQSRKGDKNPLILRAEGLDRRLTDRELAQVLYLLCTHRDYIPHNADKAKTGDAAKDNERGKVLSAVGANRDKLAQLGYRTVGEMFAKEVKDDGNTAHRQGSYRNRRYKDSSGKEQSDYSHTVYMVELVDEVRQIVEAQRAFGNDRLTDSFLDTYLANMTAERGSKEKDAKVYQEQVAYCTYFPQEKRAASATLSNELANAYERLSNLRVINPDGTESCLDGVQIEQFINVLFSVKAPTLNYGKIRKTLDLSSEHYFKGIDRDRESKLEPCAPKAWRALCKSLSEKTLGHKSSLLVKMAVDRGFADTVLEAFAYASDEESFTDRVAELLANKGYDQLTDAELEDALSVPFTSRVFKGYCSRSLKALGLLLGCWEESEVSSLTEAEEASGLLQRRLADSYQRAELLPPYDSYDPTCTNPVVLRALSQMRRVINSIIKIHGIPDEIHVELSRDLKNSKAARDMIAKRQRDREKEKNALRKVIAELLSCELEDVTSNQLFRYELRQEQGDVDVYTGEQIDLMRMLLDQSYTQIDHILPYSRTAIDSRSNKVLVLSGSNAAKGERTPLEWMEEDVGAPDKDQYQSRIHSMSLPAAKKEKLLRRELTDADSRGFLDRNLNDNRYLSRAVMNWLAETLAFGDMDRRHVYAVTGAGTAILRKSWALNFGPNGLKDRNYDRHHAIDAAVIAACSVSTIQAIATAHAHERRLSESRMVSTQPWPSFAIELTQRIERVVPTHQVQHKGTGTVLQATIYGLRGMTKTNKYQIVTSGKTSTSGNLHIHPDGKSAQSIGDMAFLRLWHDSKNGKWYPEPVYYYDLPRLDSDAYVSRYITRNRSRDKWHEVPSEAMNERPLVVHRNDVLVVDGHVGRYITVDIAGGTIDVRSLLSKAKDGNLALATGFPSLSRWKDAWVVNEDCLGHCYDGFIVNSDCLAVIG

SEQ ID NO: 927 - protein, 1007 aa, unidentified; identical to SEQ ID NO: 923
  REGION 1..1007: note = Description of Unknown: uncultivated organism with predicted taxonomy: Olsenella sp. KH3B4
  REGION 1..1007: note = MG14-254 effector

SEQ ID NO: 928 - protein, 1000 aa, unidentified; identical to SEQ ID NO: 925
  REGION 1..1000: note = Description of Unknown: uncultivated organism with predicted taxonomy: Olsenella
  REGION 1..1000: note = MG14-255 effector

SEQ ID NO: 929 - protein, 800 aa, unidentified
  REGION 1..800: note = Description of Unknown: uncultivated organism with predicted taxonomy: Olsenella
  REGION 1..800: note = MG14-256 effector
MPEQLHGRTVLGIDAGIASVGFCLLDLDNHQILELGSHLFDQPTEPKTKQNLSVARRQARGQRRLIARRKVRKGRCLGILKDCGLVPADIDASWLQSRKGDKNPLILRAEGLDRRLTDRELAQVLYLLCTHRGYIPHNADKSATGDAARDNELGKVLSAVGSNREKLATSGYRTVGEMFAKEVKDDGVAAHRQGSYRNRRYKDSSGKEQGDYSHTVYMVELVDEVKQLVNAQRTFGNDKLTDAFLEAYLANMTAERGCKEKDAKVYEEQVGYCTYFPQEKRAATASLSNELANAYERFSNLRIINPDGSESRLDGMQIEQFVSALFSVKAPKVTYSKVWKALGLSSQHYFKGIDNDDKSRLEPYTPKAWRALCKSLSEKTLGHKSVLLAKMAYDRDYADAVLEAFAYASDDDSFSDRVNELLANKGYDQLTDAELEEAISVPFTSRVFKGYCSRSLKALGMLLECWEEKEITSLTEAEEASGLDRLRLSDRHERTLLLQPYDVYDPTCRNPVVLRSLSQMRRVINAIIKIHGVPDEIHVELSRDLKNSKAVKDKISNQQRRREAEKATLRRTIAELLQCEPDDVTGGQLLRYELRQEQNDQDVYTGDSIDLMRMLRDQSYTQIDHILPYSRTAIDSRSNKVLVLASSNAAKGERTPLEWMEQDANGPSIDAYQSRVHALNLPSAKKEKLLRRELTEDDAKHFLDRNLNDNRYLSRSVMNWLADTLAFDNLGHRHVYAVTGAGTAILRRHWALNFGSNGLKDRNDDRHHAIDAAVIAACSVSTIQSIATAHARGYRSSESR

SEQ ID NO: 930 - protein, 1082 aa, unidentified
  REGION 1..1082: note = Description of Unknown: uncultivated organism with predicted taxonomy: Megasphaera
  REGION 1..1082: note = MG15-1 effector
MNYVLGLDVGIASVGWAVLELNEEDNPIRIEGLGARIFDKAEVPKTGASLAAPRRMSRGIRRVIRRRRFRLQRVRSYLKKHNILPAEKVDHLYDVPSAIDIYELRKRALTEKVTAEEWARLLIFFAKHRGFKSNRKKASGDADEGEMLKAIAANAEILKNYRTVGEMLCDNEKFRKRKRNRDGAYNFTVSRAMLMEEIHTLFEIQRNLGQKFADEKLEEEYVILFAAQRKFDEGPGENSPYAGNQIEKMIGSCTLEGKKEKRAPKASYAFMAFNLWQKINHLKVNRRGSERFLTEEERRRIADLAWKKEKLTYGSLRKVLSLDPEDRFVGLRYDLKKGKAENLEEPVSEAEKRSFSWVKDYHSIRKALDKVEKNRILKLSHEQLDTIATAFSVYKNEETIEKYLEEGGIGKADGEALLERLSGFSKFGHLSLKACYKLLPFLEKGEVYSRACELAGYDFSKSSLENIDDIPNPVVKRSISQTLKVINAIILRYGNPVEVHIELARELARSFRDRKKMEKGMQENQAKNEKIRQRLISEFGVLRPKGMDIVKFKLCEEQNGECAYSQKHFDMEKLLKDPSYAEVDHIIPYSRSFDDSYNNKVLVLTKENREKRNRIPMEYLADAPERKNRFIHWVKSTIRNSRKRENLLRTDYTATTENEWKRRNLQDTQYISKYLYNYLRHHLVLAKGYTERKRRIIPVNGAVTAYFRKRLGINKIRENGDLHHAVDAVIIACATQGIVNKVSRYSKSRELWDYEVDMETGEVLQKKNKNTKDVFPEPWLNFRYELEQKVRVRPLDIPETADITEMEEPFVSHMPNRKIHGPAHKETIRSGRLKEEGYTISKTALIDLKLTEDKEEIKGYYNKESDRLLYEALKKQLQRYGGKAKEAFKEPFHKPKADGTPGPIVNKVKIMEKSTMLIPVNGGKGLASNGNMVRIDVFRAEEKGKKKYYFIPVYVADTVKEELPNRAVLAHKPYEAWKIMKEENFIFSLYPNDLIFVDAGKEIPFKAALKGSTLDPEKKASRFLMYYKGADIATGSISGVNHDETYKARGVGIQSLREIKKCCIDVLGNISFASKEKRQTFR

SEQ ID NO: 931 - protein, 1113 aa, unidentified
  REGION 1..1113: note = Description of Unknown: uncultivated organism with predicted taxonomy: Selenomonas sp. AE3005
  REGION 1..1113: note = MG15-3 effector
MNYILGLDIGIASVGWAAVALDANDEPYKILDLNSRIFEKAEDPQNGDSLAAPRRKARGSRRRTRRRRHRMERLRHLFAREGLLSADKIEEIFHVPDDVYRLRAEGLTRCLKDEEWARVLYHIAKHRGFKSNRKSAASDADEGKVIEAVRQNAVLLKNYKTVGEMLFRDEKFQAAKRNKGGSYNFCVSRDMLSDEIGALFEAQRKAGNQHASEKFEADYHKIFADQRNFDDGPDINSHSPYAGNQIENMIGNCSLEPSEKRAPKASYSFMRFALLQKINHLRLKKAKGEERFLNDEERAAVEELAWKTASLTYGAVRKALSLSDEWRFTDLYYRWGKTQEEIEKKKLQFTVPYHEIRKALDKREKGRIQKLTPDALDAIGYIFTVFKNDAKIAEALKSAGIGEEDAAALMAAGLTFSGFGHISVKACRKLIPNFEKGMTYDKACKEEGYEFQGKSGEKTKFLSGNLEEIREIPNPVVRRAIAQTVKVINAVIRRYGSPVGVNVELAREMGRTFQARRDMMKSMEDNSAKNEKLKEELKGYGVMHPSGLDIVKLKLYKDQGGVCAYSLAAMPIEKVFKEHDYAEVDHILPYSRSFDDSYSNKVLVLTKENRDKGNRTPMEYMANMPGRKHDFITWVNSSIRDFRKRDNLLLENFDEEREDAWKERHLTDTQYISRFVKNLLDEHLEFAPWLSGKKQHVIAVNGAVTDYTRKRLGIRKIREDGDLHHAVDAAVIATVTQGNIQKLTNYSKRIECACIKNSDGSYTNPDTGEILKKDELIVQMSKHFPEPWPKFRHELEARVSDHPKELIESLKLPSYSMEEIDALKPPFVSRMPTRKVRGAAHLETVVSPRLQNEGMILKKVPLESLKLTKEKDAIENYYAPESDRLLYEALLHRLQAFEGNGKKAFAEEFHKPKADGMPGPVVKKVKVAEKSTLSVPVHQGKGLAANGGMVRIDVFFIPEGRELGYYLVPVYTSDVVRGELPMRAVVAHKSYAEWKIMREEDFLFSLYPNDLIWIENKKGIKVNLPNKLAKNSSLTASRVQKEGFFYYKGMNIANAQFDVVVHDGTYRQESLGVKTLTKMEKWTIDVLGGEVNQVSREQRQGFNDMKRDPHAIK

SEQ ID NO: 932 - protein, 1113 aa, unidentified
  REGION 1..1113: note = Description of Unknown: uncultivated organism with predicted taxonomy: Selenomonas sp. AE3005
  REGION 1..1113: note = MG15-4 effector
MNYILGLDIGIASVGWAAVALDANDEPYKILDLNSRIFEKAEDPQNGDSLAAPRRKARGSRRRTRRRRHRMERLRHLFAREGLLSADKIEEIFHVPDDVYRLRAEGLTRCLKDEEWARVLYHIAKHRGFKSNRKSAASDADEGKVIEAVRQNAVLLKNYKTVGEMLFRDEKFQAAKRNKGGSYNFCVSRDMLSDEIGALFEAQRKAGNQHASEKFEADYHKIFADQRNFDDGPDINSHSPYAGNQIENMIGNCSLEPSEKRAPKASYSFMRFALLQKINHLRLKKAKGEERFLNDEERAAVEELAWKTASLTYGAVRKALSLSDEWRFTDLYYRWGKTQEEIEKKKLQFTVPYHEIRKALDKREKGRIQKLTPDALDAIGYIFTVFKNDAKIAEALKSAGIGEEDAAALMAAGLTFSGFGHISVKACRKLIPNFEKGMTYDKACKEEGYEFQGKSGEKTKFLSGNLEEIREIPNPVVRRAIAQTVKVINAVIRRYGSPVGVNVELAREMGRTFQARRDMMKSMEDNSAKNEKLKEELKGYGVMHPSGLDIVKLKLYKDQGGVCAYSLAAMPIEKVFKEHDYAEVDHILPYSRSFDDSYSNKVLVLTKENRDKGNRTPMEYMANMPGRKHDFITWVNSSIRDFRKRDNLLLENFDEEREDAWKERHLTDTQYISRFVKNLLDEHLEFAPWLSGKKQHVIAVNGAVTDYTRKRLGIRKIREDGDLHHAVDAAVIATVTQGNIQKLTNYSKRIECACIKNSDGSYTNPDTGEILKKDELIVQMSKHFPEPWPKFRHELEARVSDHPKELIESLKLPSYSMEEIDALKPPFVSRMPTRKVRGAAHLETVVSPRLQNEGMILKKVPLESLKLTKEKDAIENYYAPESDRLLYEALLHRLQAFEGNGKKAFAEEFHKPKADGMPGPVVKKVKVAEKSTLSVPVHQGKGLAANGGMVRIDVFFIPEGREHGYYLVPVYTSDVVRGELPMRAVVAHKSYAEWKIMREEDFLFSLYPNDLIWIENKKGIKVNLPNKLAKNSSLTASRVQKEGFFYYKGMNIANAQFDVVVHDGTYRQESLGVKTLTKMEKWTIDVLGGEVNQVSREQRQGFNDMKRDPHAIK

SEQ ID NO: 933 - protein, 1078 aa, unidentified
  REGION 1..1078: note = Description of Unknown: uncultivated organism with predicted taxonomy: Veillonellales
  REGION 1..1078: note = MG15-6 effector
MNYVLGLDVGITSCGWAVLELNHEDEPVRIVDLNSRIFDKAEAGNGDSLAAPRRMARGIRRLTRRRKFRLHRVRGFLVRHHILTKEEIENLYTNPHKTDIYELRYRVLTEKVSPSDWARLLIFFAKHRGFQSNRKNEKSGEDGLMLAAIGENKKILENYRSVGDMLYSDEKFKDCKRNKGGTYRFTVSRSMLKEEVQILFKKQRELGQTFAGEDLEDEYLSIFSAQRNFDEGPGANSPYAGDQIEKMIGDCTFEDGENGRPLQKRAPKASYAFMAFNLWQKINHIRVNSKGIQRSLETEEKNKIADLAWTKENITYHDLRQITGLDEETRFSEVTYPLDSTTEEAEKKVKFSWVKPYHAMRRALDKVEKNYIRKLSREEIDAIAYAFTVYKNDKKIRTALTEKGIKENVADVLITHLDGFSKFGHLSEYACYKLLPFLEKGEEYYKACDSAGLIESPARKIKDITNPVVKRAVTQTMKVIKAVQRKYGNPVEVHIELARELARSFKDRAAMDHRMKENYAKNEKIKERLSKEFHIMNPTGQDIVKWKLYEQQQGCCAYSQKPFDVDRLLHDGNYAEVDHILPYSRSFDDTYRNKVLVLEKENRDKGNRTPMEYLADKPERKEKFIAWVKTVIKDSKKREHLLRVKYGRDEEAEWKQRHLQDTQYISRFLYNYLRNTLKLAPGYTDRKRRIIPVNGAVTGYIRKRLDIRKIRENGDLHHAVDAVVIAVTTQGMIQKVTRYSQIRENPKLIDKKTGEVLTAKEFHNKDNFPEPWPRFRQELEVRVSEDPEEAIRRLRLPAYENVGEIKKPFVSRMPRRKVRGAAHEETVRSGKLREDGYTILKTDLSKLKLENGEIKGYYRPESDRLLYEALKKRLEAFGGKGEEAFKEPFYKPKADGTPGPLVKKVKIIEKSSLNVPVHKGKGVAYNDMMVRIDIFGVNEKGKNAYYFVPVYVSDTVKKELPCRGVVKRKSYENWKIMDDKDFLFSLYHNDMIHVVSKKPLSFTAAKGSSLLPKMETKDTYVYYKGADIKGVSITVINHDNSYGIKGMGIKTLLQLEKCEVDVLGNISFVKQEKRQGFR

SEQ ID NO: 934 - protein, 861 aa, unidentified
  REGION 1..861: note = Description of Unknown: uncultivated organism with predicted taxonomy: Megasphaera stantonii
  REGION 1..861: note = MG15-7 effector
ADEKLEEEYVILFAAQRKFDEGPGENSPYAGNQIEKMIGSCTLEGKKEKRAPKASYAFMAFNLWQKINHLKVNRRGSERFLTEEERRRIADLAWKKEKLTYGSLREVLFLDPEDRFVGLRYDLKKEKEEDLEEPVSEAEKMSFSWVKDYHSIRKALDKVEKNRILKLSHEQLDTIATAFSVYKNEETIEKYLKEGGIEKADREALLERLSGFSKFGHLSLKACYKILPFLEKGEVYSRACERAGYDFSKSSLENINDIPNPVVKRSISQTLKVINAIILQYGNPVEVHIELARELAKNFRDRKKMEKGMQENQAKNEKIRQRLMSEFGVLRPKGMDIVKFKLCEEQNGECAYSQKHFDMEKLLRDPSYAEVDHIIPYSRSFDDSYNNKVLVLTKENREKRNRIPMEYLADATERKNRFIHWVKSTIRNSRKRENLLRTDYTATTENEWKRRNLQDTQYISKYLYNYLRHHLVLAKGYTERKRRIIPVNGAVTAYIRKRLGINKIRENGDLHHAVDAVIIACATQGIVNKVSRYSKSRELWDYEVDMETGEVLQKKNENRKDIFPEPWLNFRYELEQKVRVRPLDIPETADITEMEEPFVSHMPNRKIHGPAHKETIRSGRLKEEGYTISKTALTDLKLTEDKEEIKGYYNKESDRLLYEALKKQLQRYSGKAKEAFKEPFHKPKADGTPGPIVNKVKIMEKSTMPVPVNGGKGLASNGNMVRIDVFRVEEKGKKKYYFIPVYVADTVKEELPNRAVLAHKPYEAWKIMKEEDLIFVDAGKEIPFKAALKGSTLDPEKKASRFLMYYKGADIATGSISGVNHDETYKARGVGIQSLREIKKCCIDVLGNISFASKEKRQTFR

SEQ ID NO: 935 - protein, 1084 aa, unidentified
  REGION 1..1084: note = Description of Unknown: uncultivated organism with predicted taxonomy: Dialister
  REGION 1..1084: note = MG15-8 effector
MNYVLGLDVGITSCGWAVLELNPEDEPVRIVDLNSRIFDKAEAGNGDSLAAPRRMARGIRRLTRRRKFRLHRVRGFLVRHHILTKEEIENLYTTPHKTDIYELRYRALTEKVSPSDWARLLIFFAKHRGFQSNRKNEKSGEDGLMLAAIGENKKILENYRSVGDMLYSDEKFKDCKRNKGGTYRFTVSRSMLKEEVQTLFKKQRELGQTFAGEDLEDEYISIFSAQRNFDEGPGANSPYAGDQIEKMIGNCTFEDGKNDRPPQKRAPKASYAFMAFNLWQKINHIRVNCKGIERSLETEEKNKIAGLAWTKENITYHDLRQITGLDEETRFSGVTYPLDSTTEEAEKKVKFSWVKPYHAMRRALDKVEKNYIRKLSREEIDAIAYAFTVYKNDKKIRTALAEKGIEDNVADVLITHLDGFSKFGHLSEYACYKLLPFLEKGEEYYKACDSAGLTESPAKKIKDITNPVVKRAVTQTMKVIKAVQRKYGNPVEVHIELARELARSFKDRAAMDHRMKENYAKNEKIKERLSKEFHIMNPRGQDIVKWKLYEQQQGCCAYSQKPFDVDRLLHDGNYAEVDHILPYSRSFDDTYRNKVLVLEKENRDKGNRTPMEYLADKPERKERFIAWVKTTIKDSKKREHLLRVKYGRDEEAEWKQRHLQDTQYISRFLYNYLRNTLELAPGYTDRKRRIIPVNGAVTGYIRKRLDIRKIRENGDLHHAVDAVVIAATTQGMIQKVTRYSQIKENETWIDDHTKVDERTGEIFFVKKAHEKDAFPEPWPRFRQELEARVSEDPEEAIRRLGLPSYENAGEIKKPFVSRMPRRKVRGAAHKETVRSGKLREDGYTILKTDLSALKLKNGEIEGYYRPESDRLLYEALKKRLEAFGGKGKEAFKEPFYKPKADGTPGPLVKKVKIIEKSSLNVPVHKGKGIAYNDTMVRIDIFGVNEKGKNAYYFVPVYVSDTVKKELPCRAVVSKKPYEEWKVMDDKDFLFSLYPNDMIHVVAKTPLSFTVAEGADLAPTMETKDTYVYYKKAAISVGTITVITHDNSYGIKSMGIKTLLQLEKCEVDVLGNISFVKQEKRQGFR

SEQ ID NO: 936 - protein, 1081 aa, unidentified
  REGION 1..1081: note = Description of Unknown: uncultivated organism with predicted taxonomy: Dialister invisus
  REGION 1..1081: note = MG15-9 effector
MNYVLGLDVGIASVGWAVLELNEEDNPIRIEGLGARIFDKAEVPKTGASLAAPRRMSRGIRRVIRRRRFRLQRVRSYLKRHNILPAEKVDHLYDVPSAIDIYELRKRALTEKVTAEEWARLLIFFAKHRGFKSNRKKASGDADEGEMLKAIAANAEILKNYRTVGEMLCDNEKFRKRKRNRDGAYNFTVSRAMLMEEIHTLFEIQRNLGQKFADEKIEEEYVILFAAQRKFDEGPGENSPYAGNQIEKMIGSCTLEGKKEKRAPKASYAFMAFNLWQKINHLKINRRGSERFLTEEERRRIADLAWKKEKLTYGSLREVLFLDPEDRFVGLRYDLKKEKEEDLEEPVSEAEKMSFSWVKDYHSIRKALDKVEKNRILKLSHEQLDTIATAFSVYKNEETIEKYLEEGGIEKADREALLERLSGFSKFGHLSLKACYKILPFLEKGEVYSRACERAGYDFSKSSLENIDDIPNPVVKRSISQTLKVINAIILRYGNPVEVHIELARELARNFRDRKKMEKGMQENQAKNEKIRQRLISEFGVLRPKGMDIVKFKLCEEQNGECAYSQKHFDMEKLLRDPSYAEVDHIIPYSRSFDDSYNNKVLVLTKENREKRNRIPMEYLADATERKNRFIHWVKSTIRNSRKRENLLRTDYTETTENEWKRRNLQDTQYISKYLYNYLRHHLVLAKGYTERKRRIIPVNGAVTAYIRKRLGINKIRENGDLHHAVDAVIIACATQGIVNKVSRYSKSRELWDYEVDMETGEVLQKKNENRKDIFPEPWLNFRYELEQKVRVRPLDIPETADITEMEEPFVSHMPNRKIHGPAHKETIRSGRLKEEGYTISKTALTDLKLTEDKEEIKGYYNKESDRLLYEALKKQLQRYSGKAKEAFKEPFHKPKADGTPGPIVNKVKIMEKSTMPVPVNGGKGLASNGNMVRIDVFRVEEKGKKKYYFIPVYVADTVKEELPNRAVLAHKPYEAWKIMKEEDFIFSLYPNDLIFVDAGKEIPFKAALKGSTLDPEKKASRFLMYYKGADIAGGTINGVNHDSTYGIRIGLQRLKGIRKCRIDVLGNISLVGKEKRKTFR

SEQ ID NO: 937 - protein, 1082 aa, unidentified
  REGION 1..1082: note = Description of Unknown: uncultivated organism with predicted taxonomy: Dialister
  REGION 1..1082: note = MG15-10 effector
MNYVLGLDVGIASVGWAVLELNEEDNPIRIEGLGARIFDKAEVPKTGASLAAPRRMSRGIRRVIRRRRFRLQRVRSYLKRHNILPAEKVDHLYDVPSAIDIYELRKRALTEKVTAEEWARLLIFFAKHRGFKSNRKKASGDADEGEMLKAIAANAEILKNYRTVGEMLCDNEKFRKRKRNRDGAYNFTVSRAMLMEEIHTLFEIQRNLGQKFADEKIEEEYVILFAAQRKFDEGPGENSPYAGNQIEKMIGSCTLEGKKEKRAPKASYAFMAFNLWQKINHLKINRRGSERFLTEEERRRIADLAWKKEKLTYGSLREVLFLDPEDRFVGLRYDLKKEKEEDLEEPVSEAEKMSFSWVKDYHSIRKALDKVEKNRILKLSHEQLDTIATAFSVYKNEETIEKYLEEGGIEKADREALLERLSGFSKFGHLSLKACYKILPFLEKGEVYSRACERAGYDFSKSSLENIDDIPNPVVKRSISQTLKVINAIILRYGNPVEVHIELARELARNFRDRKKMEKGMQENQAKNEKIRQCLISEFGVLRPKGMDIVKFKLCEEQNGECAYSQKHFDMEKLLRDPSYAEVDHIIPYSRSFDDSYNNKVLVLTKENREKRNRIPMEYLADAPERKNRFIHWVKSTIRNSRKRENLLRIDYTETTENEWKRRNLQDTQYISKYLYNYLRHHLVLAKGYTERKRRIIPVNGAVTAYFRKRLGINKIRENGDLHHAVDAVIIACATQGIVNKVSRYSKSRELWDYEVDMETGEVLQKKNKNTKDVFPEPWLNFRYELEQKVRIRPLDIPKTADITEMEEPFVSHMPNRKIHGPAHKETIRSGRLKEEGYTISKTALIDLKLTEDKEEIKGYYNKESDRLLYEALKKQLQRYGGKAKEAFKEPFHKPKADGTPGPIVNKVKIMEKSTMLIPVNGGKGLASNGNMVRIDVFRVEEKGKKKYYFIPVYVADTVKEELPNRAVLAHKPYEAWKIMKEEDFIFSLYPNDLIFVDAGKGIPFKAALKGSTLDPEKKASRFLMYYKGADIATGSISGVNHDETYKARGIGIQSLREIKKCCIDVLGNISFASKEKRQTFR

SEQ ID NO: 938 - protein, 1082 aa, unidentified
  REGION 1..1082: note = Description of Unknown: uncultivated organism with predicted taxonomy: Dialister
  REGION 1..1082: note = MG15-11 effector
MNYVLGLDVGIASVGWAVLELNEEDNPIRIEGLGARIFDKAEVPKTGASLAAPRRMSRGIRRVIRRRRFRLQRVRSYLKRHNILPAEKVDHLYDVPSAIDIYELRKRALTEKVTAEEWARLLIFFAKHRGFKSNRKKASGDADEGEMLKAIAANAEILKNYRTVGEMLCDNEKFRKRKRNRDGAYNFTVSRAMLMEEIHTLFEIQRNLGQKFADEKIEEEYVILFAAQRKFDEGPGENSPYAGNQIEKMIGSCTLEGKKEKRAPKASYAFMAFNLWQKINHLKINRRGSERFLTEEERRRIADLAWKKEKLTYGSLREVLFLDPEDRFVGLRYDLKKEKEEDLEEPVSEAEKMSFSWVKDYHSIRKALDKVEKNRILKLSHEQLDTIATAFSVYKNEETIEKYLEEGGIEKADREALLERLSGFSKFGHLSLKACYKILPFLEKGEVYSRACERAGYDFSKSSLENIDDIPNPVVKRSISQTLKVINAIILRYGNPVEVHIELARELARNFRDRKKMEKGMQENQAKNEKIRQRLISEFGVLRPKGMDIVKFKLCEEQNGECAYSQKHFDMEKLLRDPSYAEVDHIIPYSRSFDDSYNNKVLVLTKENREKRNRIPMEYLADAPERKNRFIHWVKSTIRNSRKRENLLRIDYTETTENEWKRRNLQDTQYISKYLYNYLRHHLVLAKGYTERKRRIIPVNGAVTAYFRKRLGINKIRENGDLHHAVDAVIIACATQGIVNKVSRYSKSRELWDYEVDMETGEVLQKKNKNTKDVFPEPWLNFRYELEQKVRIRPLDIPKTADITEMEEPFVSHMPNRKIHGPAHKETIRSGRLKEEGYTISKTALIDLKLTEDKEEIKGYYNKESDRLLYEALKKQLQRYGGKAKEAFKEPFHKPKADGTPGPIVNKVKIMEKSTMLIPVNGGKGLASNGNMVRIDVFRVEEKGKKKYYFIPVYVADTVKEELPNRAVLAHKLYEAWKIMKEEDFIFSLYPNDLIFVDAGKGIPFKAALKGSTLDPEKKASRFLMYYKGADIATGSISGVNHDETYKARGIGIQSLREIKKCCIDVLGNISFASKEKRQTFR

SEQ ID NO: 939 - protein, 1103 aa, unidentified
  REGION 1..1103: note = Description of Unknown: uncultivated organism with predicted taxonomy: Megasphaera micronuciformis
  REGION 1..1103: note = MG15-12 effector
MDTKELKYVVGLDIGITSVGWATLLLDSQDEPVRILDLNSRIFDKAEVPKTGASLAAPRRMARGVRRRLRRRKFRLHRVRQYILRHHILDKVGLECLYKPKTDIDIFALRTAGLDRQLKPEEWARILLYMAKHRGFKSNRKSTADETADGDMLKAIQQNKEILSKYRSVGEMFDKDEKFSDHKRNKGGSYEFTVARSMLEDEIKLLFEKQRDFGSAFAEKDAEEEYIDLFSAQRNFDEGPGGDSPYGGNQIGKMIGLCTFEGKNGEKRAPKASYAFMATNLWQKINQIRIIKKGTELHLTAEEAGKKYEKAWNKEAMTYKDIRSEISLGDEASFKGLAYKWTETDKEETESKTKFSWVKEYHTLRKVLDKVEKNRILQLSHDEIDNIAYVFSVYKNDDKIREALEETDLDSKDIDVLIENLGTFSKFGHLSLKACYKILPYLEQGMVYSDACTAAGYDFRKSAQGSIADIPNPVVKRAISQTMKVLKAIKQKYGCPPVEIHIEMARELAKSFDERQKMTKSIEENQSHNERIKERLQKEFNVPYPSGQDIVKLKLYEEQNETCAYSQKHMDAHRLFHENNYAEVDHIIPYSRSFDDTYNNKVLVLTAENRQKGNRTPMEYLSGDEARKKQFVAWVKSDVKKPRKRENLLREKFTDDAENDWKARHLQDTQYISRFMLNYLQNNYELTPGNTDRKRRIIPVNGAVTAYVRKRLGISKIRENGDLHHAVDAAVIAAVTQGVVNSVSKYSKRHELQYHVDEHGNCVDLVTGELMGDAFKENHKIKGFPEPWPQFRAELEARVSENATEAIRILNLPTYSPDEEIKTPFVSRMVRHKTTGQAHEDTVRGKSNVADNVYVKKVALTELKLKDGEIEGYYNPSSDRLLYEALKKRLEQFGGKGKDAFKEPFHKPKADGSSGPIVKKCKVLDKINLSVPVHGGKGAAANANGGMIRVDIFKAKGKNGKSSYYAVPIYVADTVKVELPNRAVVTKKTYAEWPEMKTEDFAFSLYPNDVVYIGGKEIKMNVMPGCTLATENHVKDDFFYYKGLDIATGAMIVINHDGTYKQRGVGIKQLPLIEKYEVSVLGDLVKAIYRPREIFKHKAQRSK

SEQ ID NO: 940 - protein, 1081 aa, unidentified
  REGION 1..1081: note = Description of Unknown: uncultivated organism with predicted taxonomy: Megasphaera sp. AM44-1BH
  REGION 1..1081: note = MG15-13 effector
MNYVLGLDVGIASVGWAVLELNEEDNPIRIEGLGARIFDKAEVPKTGASLAAPRRMSRGIRRVIRRRRFRLQRVRSYLKRHNILPAEKVDHLYDVPSAIDIYELRKRALTEKVTAQEWARLLIFFAKHRGFKSNRKKASGDADEGEMLKAIAANAEILKNYRTVGEMLCDNEKFRKRKRNRDGAYNFTVSRAMLMEEIHTLFEIQRNLGQKFADEKLGEEYVILFAAQRKFDEGPGENSPYAGNQIEKMIGSCTLEGKKEKRAPKASYAFMAFNLWQKINHLKVNRRGSERFLTEEERRRIADLAWKKEKLTYGSLREVLFLDPEDRFVGLRYDLKKEKEEDLEEPVSEAEKMSFSWVKDYHSIRKALDKVEKNRILKLSHEQLDTIATAFSVYKNEETIEKYLEEGGIEKADREALLERLSGFSKFGHLSLKACYKILPFLEKGEVYSRACERAGYDFSKSSLENINDIPNPVVKRSISQTLKVINAIILRYGNPVEVHIELARELAKNFRDRKKMEKGMQENQAKNEKIRQRLMSEFGVLRPKGMDIVKFKLCEEQNGECAYSQKHFDMEKLLRDPSYAEVDHIIPYSRSFDDSYNNKVLVLTKENREKRNRIPMEYLADATERKNRFIHWVKSTIRNSRKRENLLRTDYTETIENEWKRRNLQDTQYISKYLYNYLRHHLVLAKGYTERKRRIIPVNGAVTAYIRKRLGINKIRENGDLHHAVDAVIIACATQGIVNKVSRYSKSRELWDYEVDMETGEVLQKKNENRKDIFPEPWLNFRYELEQKVRVRPLDIPETADITEMEEPFVSHMPNRKIHGPAHKETIRSGRLKEEGYTISKTALTDLKLTEDKEEIKGYYNKESDRLLYEALKKQLQRYSGKAKEAFKEPFHKPKADGTPGPIVNKVKIMEKSTMPVPVNGGKGLASNGNMVRIDVFRVEEKGKKKYYFIPVYVADTVKEELPNRAVLAHKPYEAWKIMKEEDFIFSLYPNDLIFVDAGKEIPFKAALKGSTLDPEKKASRFLMYYKGADIAGGTINGVNHDSTYGIRIGLQRLKGIRKCRIDVLGNISLVGKEKRKTFR

SEQ ID NO: 941 - protein, 1081 aa, unidentified
  REGION 1..1081: note = Description of Unknown: uncultivated organism with predicted taxonomy: Dialister
  REGION 1..1081: note = MG15-14 effector
MNYVLGLDVGIASVGWAVLELNEEDNPIRIEGLGARIFDKAEVPKTGASLAAPRRMSRGIRRVIRRRRFRLQRVRSYLKRHNILPAEKVDHLYDVPSAIDIYELRKRALTEKVTAEEWARLLIFFAKHRGFKSNRKKASGDADEGEMLKAIAANAEILKNYRTVGEMLCDNEKFRKRKRNRDGAYNFTVSRAMLMEEIHTLFEIQRNLGQKFADEKIEEEYVILFAAQRKFDEGPGENSPYAGNQIEKMIGSCTLEGKKEKRAPKASYAFMAFNLWQKINHLKINRRGSERFLTEEERRRIADLAWKKEKLTYGSLREVLFLDPEDRFVGLRYDLKKEKEEDLEEPVSEAEKMSFSWVKDYHSIRKALDKVEKNRILKLSHEQLDTIATAFSVYKNEETIEKYLEEGGIEKADREALLERLSGFSKFGHLSLKACYKILPFLEKGEVYSRACERAGYDFSKSSLENIDDIPNPVVKRSISQTLKVINAIILRYGNPVEVHIELARELAKNFRDRKKMEKGMQENQAKNEKIRQRLMSEFGVLRPKGMDIVKFKLCEEQNGECAYSQKHFDMEKLLRDPSYAEVDHIIPYSRSFDDSYNNKVLVLTKENREKRNRIPMEYLADAPERKNRFIHWVKSTIRNSRKRENLLRIDYTETTENEWKRRNLQDTQYISKYLYNYLRHHLVLAKGYTERKRRIIPVNGAVTAYFRKRLGINKIRENGDLHHAVDAVIIACATQGIVNKVSRYSKSRELWDYEVDMETGEVLQKKNENRKDIFPEPWLNFRYELEQKVRVRPLDIPETADITEMEEPFVSHMPNRKIHGPAHKETIRSGRLKEEGYTISKTALTDLKLTEDKEEIKGYYNKESDRLLYEALKKQLQRYSGKAKEAFKEPFHKPKADGTPGPIVNKVKIMEKSTMPVPVNGGKGLASNGNMVRIDVFRVEEKGKKKYYFIPVYVADTVKEELPNRAVLAHKPYEAWKIMKEEDFIFSLYPNDLIFVDAGKEIPFKAALKGSTLDPEKKASRFLMYYKGADIAGGTINGVNHDSTYGIRIGLQRLKGIRKCRIDVLGNISLVGKEKRKTFR

SEQ ID NO: 942 - protein, 1104 aa, unidentified
  REGION 1..1104: note = Description of Unknown: uncultivated organism with predicted taxonomy: Megasphaera micronuciformis
  REGION 1..1104: note = MG15-15 effector
MDTKELKYVVGLDIGITSVGWATLLLDSQDEPVRILDLNSRIFDKAEVPKTGASLAAPRRMARGVRRRLRRRKFRLYRVRQYILRHHILDKAGLECLYKPKTDIDIFALRTAGLDRLLEPEEWARILLYMAKHRGFKSNRKSTAVAGGDDGVMLKAIQQNKEVLSKYRSVGEMFDKDEKFSDHKRNKGGSYEFTVARSMLVDEIKLLFEKQRDFGLAFTEKDAEEEYIELFSAQRNFDEGPGGDSPYGGNQIEKMIGLCTFEGKNGEKRAPKASYAFMATNLWQKINQIRIIEKGTERPLTAEEAGKIDEKAWKKEAMTYKDIRSEISLGDEASFKGLPYKWTETDKEETESKAKFSWVKEYHTLRKVLDKVEKNRILQLSHDDIDNIAYIFSVYKNDDKIREALEGTDLDSKDIDVLIENLGTFSKFGHLSLKACYKILPYLEQGMVYSDACTAAGYDFRKSAQGSIADIPNPVVKRAISQTMKVLKAIKQKYGCPPVEIHIEMARELAKSFDERQKMTKSIEENQSHNERIKERLQKEFNVPYPSGQDIVKLKLYEEQNETCAYSQKHIDAAKLFHDPNYAEVDHIIPYSRSFDDTYNNKVLVLTAENRQKGNRTPMEYLSGDEARKKQFVAWVKSDIKKPRKRENLLREKFTADAENDWKARHLQDTQYISRFMLNYLQNNYELTPGNTDRRRRIIPVNGAVTAYVRKRLGISKIRENGDLHHAVDAAVIAAVTQGVVNSVSRYSKRHELQYHVDEHGNCVDLVTGELMGDAFKENHKIKGFPEPWPQFRAELEARVSENAAEAIRILNLPTYSPDEEIKTPFVSRMVRHKTTGQAHEDTVRGKSNVADNVYVKKVALTELKLKDGEIEGYYNPSSDRLLYEALKKRLEQFDGKGKDAFKEPFHKPKSDGSPGPIVKKCKVLDKINLAVPVHDGKGITKNAGGSMIRVDIFKVKKSNGGHQYYSVPIYVADTVKEALPNRAVVAYKEYDEWKIVDDKDFVFSLYPNDLLFIGGKEIKLNGTGGDTLHQGIMVQDVFLYYRGLNIAVGSIGVENSDGRYAQDSLGIKQLPIIEKYEVSVLGDLVKAMYRTRETFKHKAQRAK

SEQ ID NO: 943 - protein, 840 aa, unidentified
  REGION 1..840: note = Description of Unknown: uncultivated organism with predicted taxonomy: Megasphaera stantonii
  REGION 1..840: note = MG15-16 effector
MNYVLGLDIGITSVGWAVLELDTHDEPIRIVDLNSRIFEKAEVPKTGESLAAPRRMARSARRLTRRRRFRLHRMRRYLIRNRILDARQVEELYVDSIGKTDIYELRYQALSQPVSNSDWARLLIFFAKHRGFKSNRKHISDSGDKGQMLNAITENQEILNNYHTVGEMLYKNEKFKACKRNKGGSYAFTVSRDMLADEIHALFDVQRSLGQAYASEELEEEYMELFSAQRNFDEGPGMNSPYSGNQIEKMIGCCTFEDDEKRAPKASYAFMAFNVWQKINHLRVTCEGTDRSLSQAEKETLAALAWKKENITFKDIRNKLGLDDTVRFLDVNYNLDKYKTAEEAEKKVKFSWVKEYHAIRKALDKVKKDRISELSHEQIDTIAYAFTVYKNDEAIKRYLLEHAIELADAEALLENISGFSKFGHLSVKACYKLLKPLKQGNVYTKACEIAGYDPQKSSQGNISDIPNPVVKRALSQALKVIKAIIRQYGCPPVEIHIELARELAKSAKERTELEKAMKDNQSRNEKIKTKLHELNVMQPTGLDIVKYKLYEQQQGDCAYSQKKFDVNRLLHDPTYAEVDHIIPYSRSFDDTYRNKVLVLTKENRDKGNRTPMEYFQDKPERKEAFINWVKRTISDGKKRNNLLRVNYSADAEKEWKDRHLQDTQYISRYLYNYLKRHIELKEGYTDRKRRIIPVNGAVTAYVRKRLGISKIRENGDLHHAVDAVIIACVTQGVVNKISRYSKIKELRQFMTADGTIVDQETGEVLQTANPRKTDPFPEPWPKFRQELEARVSDNPAEAIAALRLPTYEGIVTISAPFVSRMPNRKVHGPAHMETIRSAKM

SEQ ID NO: 944 - protein, 1082 aa, unidentified
  REGION 1..1082: note = Description of Unknown: uncultivated organism with predicted taxonomy: Dialister
  REGION 1..1082: note = MG15-17 effector
MNYVLGLDVGIASVGWAVLELNEEDNPIRIEGLGARIFDKAEVPKTGASLAAPRRMSRGIRRVIRRRRFRLQRVRSYLKRHNILPAEKVDHLYDVPSAIDIYELRKRALTEKVTAEEWARLLIFFAKHRGFKSNRKKASGDADEGEMLKAIAANAEILKNYRTVGEMLCDNEKFRKRKRNRDGAYNFTVSRAMLMEEIHTLFEIQRNLGQKFADEKIEEEYVILFAAQRKFDEGPGENSPYAGNQIEKMIGSCTLEGKKEKRAPKASYAFMAFNLWQKINHLKINRRGSERFLTEEERRRIADLAWKKEKLTYGSLREVLFLDPEDRFVGLRYDLKKEKEEDLEEPVSEAEKMSFSWVKDYHSIRKALDKVEKNRILKLSHEQLDTIATAFSVYKNEETIEKYLEEGGIEKADREALLERLSGFSKFGHLSLKACYKILPFLEKGEVYSRACERAGYDFSKSSLENIDDIPNPVVKRSISQTLKVINAIILRYGNPVEVHIELARELARNFRDRKKMEKGMQENQAKNEKIRQRLISEFGVLRPKGMDIVKFKLCEEQNGECAYSQKHFDMEKLLRDPSYAEVDHIIPYSRSFDDSYNNKVLVLTKENREKRNRIPMEYLADAPERKNRFIHWVKSTIRNSRKRENLLRIDYTETTENEWKRRNLQDTQYISKYLYNYLRHHLVLAKGYTERKRRIIPVNGAVTAYIRKRLGINKIRENGDLHHAVDAVIIACATQGIVNKVSRYSKSRELWDYEVDMETGEVLQKKNENRKDIFPEPWLNFRYELEQKVRVRPLDIPETADITEMEEPFVSHMPNRKIHGPAHKETIRSGRLKEEGYTISKTALIDLKLTEDKEEIKGYYNKESDRLLYEALKKQLQRYGGKAKEAFKEPFHKPKADGTPGPIVNKVKIMEKSTMLIPVNGGKGLASNGNMVRIDVFRVEEKGKKKYYFIPVYVADTVKEELPNRAVLAHKPYEAWKIMKEEDFIFSLYPNDLIFVDAGKGIPFKAALKGSTLDPEKKASRFLMYYKGADIATGSISGVNHDETYKARGIGIQSLREIKKCCIDVLGNISFASKEKRQTFR

SEQ ID NO: 945 - protein, 1103 aa, unidentified
  REGION 1..1103: note = Description of Unknown: uncultivated organism with predicted taxonomy: Megasphaera micronuciformis
  REGION 1..1103: note = MG15-18 effector
MDTKELKYVVGLDIGITSVGWATLLLDSQDEPVRILDLNSRIFDKAEVPKTGASLAAPRRMARGVRRRLRRRKFRLHRVRQYILRHHILDKAGLECLYKPKTDIDIFALRTAGLDRLLEPEEWARILLYMAKHRGFKSNRKSASDASDDGDMLDAIRKNKEVLSKYRSVGEMFDKDEKFSDHKRNKGGSYEFTVARSMLEDEIKLLFEKQRDFGLAFAEKDAEEEYIELFSAQRNFDEGPGGDSPYGGNQIEKMIGLCTFEGKNGEKRAPKASYAFMATNLWQKINQIRIIEKGTERPLTAEEAGKIDEKAWKKEAMTYKDIRSEIGLGDEASFKGLPYKWTETDKEETESKAKFSWVKEYHTLRKVLDKVEKNRILQLSHDDIDNIAYIFSVYKNDDKIREALEGTDLDSKDIDVLIENLGTFSKFGHLSLKACYKILPYLEQGMVYSDACTAAGYDFRKSAQGSIADIPNPVVKRAISQAMKVLKAIKQKYGCPPVEIHIEMARELAKSFDERQKMTKSIEENQSHNERIKERLQKEFNVPYPSGQDIVKLKLYEEQNETCAYSQKHIDAAKLFHDPNYAEVDHIIPYSRSFDDTYNNKVLVLTAENRQKGNRTPMEYLSGDEARKKQFVAWVKSDIKKPRKRENLLREKFTADAENDWKVRHLQDTQYISRFMLNYLQNNYELTPGNTDRKRRIIPVNGAVTAYVRKRLGISKIRENGDLHHAVDAAVIAAVTQGVVNSVSKYSKRHELQYHVDEHGNCVDLVTGELMGDAFKENHKIKGFPEPWPQFRAELEARVSENAAEAIRILKLPTYSPDEEIKTPFVSRMVRHKTTGQAHEDTVRGKSNVADNVYVKKVALTELKLKDGEIEGYYNPSSDRLLYEALKKRLEQFGGKGKDAFKEPFYKPKSDGSLGPIVKKCKVIDKISLAVPVHGGKGATANANGSMIRVDIFRVKEKNNKHSYYAVPIYVADTVKDKLPNKAIVAKKNYDEWLEMKKEDFVFSLYPNSAVYIGGKDIKMNVISGCTLELEKTMRDTILYYKGLDISPGALKIINHDGTYQQRGLGIKSLPFIEKYEVSVLGDLVKATYRPRETFNHKAQRSK

SEQ ID NO: 946 - protein, 1104 aa, unidentified
  REGION 1..1104: note = Description of Unknown: uncultivated organism with predicted taxonomy: Megasphaera micronuciformis
  REGION 1..1104: note = MG15-19 effector
MDTKELKYVVGLDIGITSVGWATLLLDSQDEPVRILDLNSRIFDKAEVPKTGASLAAPRRMARGVRRRLRRRKFRLHRVRQYILRHHILDKAGLECLYKPKTDIDIFALRTAGLDRLLEPEEWARILLYMAKHRGFKSNRKSAAVAGGDDGDMLDAIRKNKEVLSKYRSVGEMFDKDEKFSDHKRNKGGSYEFTVARSMLVDEIKLLFERQRDFGSAFAEKDAEEEYIELFSAQRNFDEGPGGDSPYGGNQIEKMIGLCTFEGKNGEKRAPKASYAFMATNLWQKINQIRIIEKGTERPLTAEEAGKIDEKAWKKEAMTYKDIRSEISLGDEAYFKGLSYKWTETDKEETESKVKFSLVKEYHTLRKVLDKVEKNRILQLSHDDIDNIAYIFSVYKNDDKIREALEETDLDSKDIDVLIEHLGTFRKFGHLSLKACYKILPYLEQGMVYSDACTAAGYDFRKSAQGSIADIPNPVVKRAISQTMKVLKAIKQKYGCPPVEIHIEMARELAKSFDERQKMTKSIEENQSHNERIKERLQKEFNVPYPSGQDIVKLKLYEEQNETCAYSQKHIDAAKLFHDPNYAEVDHIIPYSRSFDDTYNNKVLVLTAENRQKGNRTPMEYFSGDEARKKQFVAWVKSDIKKPRKRENLLREKFTADAENDWKIRHLQDTQYISRFMLNYLQNNYELTPGNTDRRRRIIPVNGAVTAYVRKRLGISKIRENGDLHHAVDAAVIAAVTQGVVNSVSKYSKRHELQYHVDEHGNCVDLVTGELMGDAFKENHKIKGFPEPWPQFRAELEARVSENAAEAIRILKLPTYSPDEEIKTPFVSRMVRHKTTGQAHEDTVRGKSNVADNVYVKKVALTELKLKDGEIEGYYNPSSDRLLYEALKKRLEQFGGKGKDAFKEPFHKPKSDGSPGPIVKKCKVIDKISLAVPVHGGKGATANANGSMIRVDIFRVKEKNNKHSYYAVPIYVADTVKDKLPNKAIVAKKNYDEWLEMKKEDFVFSLYPNSAVYIGGKDIKMNVMSGCTLELEKTMRDTILYYKGLDISPGALKIINHDGTYQQRGLGIKSLPFIEKYEVSVLGDLVKATYRPRETFNHKAQRSK

SEQ ID NO: 947 - protein, 1082 aa, unidentified
  REGION 1..1082: note = Description of Unknown: uncultivated organism with predicted taxonomy: Dialister
  REGION 1..1082: note = MG15-20 effector
MNYVLGLDVGIASVGWAVLELNEEDNPIRIEGLGARIFDKAEVPKTGASLAAPRRMSRGIRRVIRRRRFRLQRVRSYLKRHNILPAEKVDHLYDVPSAIDIYELRKRALTEKVTAEEWARLLIFFAKHRGFKSNRKKASGDADEGEMLKAIAANAEILKNYRTVGEMLCDNEKFRKRKRNRNGAYNFTVSRAMLMEEIHTLFEIQRNLGQKFADEKLEEEYVILFAAQRKFDEGPGENSPYAGNQIEKMIGSCTFEGKKEKRAPKASYAFMAFNLWQKINHLKVNRRGSERFLTEEERRRIADLAWKKEKLTYGSLRKVLSLDPEDRFVGLRYDLKKGKAENLEEPVSEAEKRSFSWVKDYHSIRKALDKVEKNHILKLSHEQLDTIATAFSVYKNEETIEQYLEEGGIGKADREALLERLSGFSKFGHLSLKACYKLLPFLEKGEVYSRACELAGYDFSKSSLENIDDIPNPVVKRSISQTLKVINAIILRYGNPVEVHIELARELARSFRDRKKMEKGMQENQAKNEKIRQRLISEFGVLRPKGMDIVKFKLCEEQNGECAYSQKHFDMEKLLKDPSYAEVDHIIPYSRSFDDSYNNKVLVLTKENREKRNRIPMEYLADAPERKNRFIHWVKSTIRNSRKRENLLRTDYTATTENEWKRRNLQDTQYISKYLYNYLRHHLVLAKGYTERKRRIIPVNGAVTAYFRKRLGINKIRENGDLHHAVDAVIIACATQGIVNKVSRYSKSRELWDYEVDMETGEVLQKKNKNTKDVFPEPWLNFRYELEQKVRVRPLDIPETADITEMEEPFVSHMPNRKIHGPAHKETIRSGRLKEEGYTISKTALIDLKLTEDKEEIKGYYNKESDRLLYEALKKQLQRYGGKAKEAFKEPFHKPKADGTPGPIVNKVKIMEKSTMLIPVNGGKGLASNGNMVRIDVFRAEEKGKKKYYFIPVYVADTVKEELPNRAVLAHKPYEAWKIMKEEDFIFSLYPNDLILVDAGKEIPFKAALKGSTLDPEKKASRFLMYYKGADIATGSISGVNHDETYKARGVGIQSLREIKKCCIDVLGNISFASKEKRQTFR

SEQ ID NO: 948 - protein, 1081 aa, unidentified; identical to SEQ ID NO: 940
  REGION 1..1081: note = Description of Unknown: uncultivated organism with predicted taxonomy: Dialister
  REGION 1..1081: note = MG15-21 effector

SEQ ID NO: 949 - protein, 1082 aa, unidentified
  REGION 1..1082: note = Description of Unknown: uncultivated organism with predicted taxonomy: Dialister
  REGION 1..1082: note = MG15-22 effector
MNYVLGLDVGIASVGWAVLELNEEDNPIRIEGLGARIFDKAEVPKTGASLAAPRRMSRGIRRVIRRRRFRLQRVRSYLKKHNILPAEKVDHLYDVPSAIDIYELRKRALTEKVTAEEWARLLIFFAKHRGFKSNRKKASGDADEGEMLKAIAANAEILKNYRTVGEMLCDNEKFRKRKRNRDGAYNFTVSRAMLMEEIHTLFEIQRNLGQKFADEKLEEEYVILFAAQRKFDEGPGENSPYAGNQIEKMIGSCTLEGKKEKRAPKASYAFMAFNLWQKINHLKVNRRGSERFLTEEERRRIADLAWKKEKLTYGSLRKVLSLDPEDRFVGLRYDLKKGKAENLEEPVSEAEKRSFSWVKDYHSIRKALDKVEKNRILKLSHEQLDTIATAFSVYKNEETIEKYLEEGGIGKADREALLERLSGFSKFGHLSLKACYKLLPFLEKGEVYSRACELAGYDFSKSSLENIDDIPNPVVKRSISQTLKVINAIILRYGNPVEVHIELARELARSFRDRKKMEKGMQENQAKNEKIRQRLISEFGVLRPKGMDIVKSKLCEEQNGECAYSQKHFDMEKLLKDPSYAEVDHIIPYSRSFDDSYNNKVLVLTKENREKRNRIPMEYLADAPERKNRFIHWVKSTIRNSRKRENLLRTDYTATTENEWKRRNLQDTQYISKYLYNYLRHHLVLAKGYTERKRRIIPVNGAVTAYFRKRLGINKIRENGDLHHAVDAVIIACATQGIVNKVSRYSKSRELWDYEVDMETGEVLQKKNKNTKDVFPEPWLNFRYELEQKVRVRPLDIPETADITEMEEPFVSHMPNRKIHGPAHKETIRSGRLKEEGYTISKTALIDLKLTEDKEEIKGYYNKESDRLLYEALKKQLQRYGGKAKEAFKEPFHKPKADGTPGPIVNKVKIMEKSTMLIPVNGGKGLASNGNMVRIDVFRAEEKGKKKYYFIPVYVADTVKEELPNRAVLAHKPYEAWKIMKEEDFIFSLYPNDLIFVDAGKEIPFKAALKGSTLDPEKKASRFLMYYKGADIATGSISGVNHDETYKARGVGIQSLREIKKCCIDVLGNISFASKEKRQTFR

SEQ ID NO: 950 - protein, 1082 aa, unidentified
  REGION 1..1082: note = Description of Unknown: uncultivated organism with predicted taxonomy: Dialister
  REGION 1..1082: note = MG15-23 effector
MNYVLGLDVGIASVGWAVLELNEEDNPIRIEGLGARIFDKAEVPKTGASLAAPRRMSRGIRRVIRRRRFRLQRVRSYLKRHNILPAEKVDHLYDVPSAIDIYELRKRALTEKVTAEEWARLLIFFAKHRGFKSNRKKASGDADEGEMLKAIAANAEILKNYRTVGEMLCDNEKFRKRKRNRDGAYNFTVSRAMLMEEIHTLFEIQRNLGQKFADEKIEEEYVILFAAQRKFDEGPGENSPYAGNQIEKMIGSCTLEGKKEKRAPKASYAFMAFNLWQKINHLKINRRGSERFLTEEERRRIADLAWKKEKLTYGSLREVLFLDPEDRFVGLRYDLKKEKEEDLEEPVSEAEKMSFSWVKDYHSIRKALDKVEKNRILKLSHEQLDTIATAFSVYKNEETIEKYLEEGGIEKADREALLERLSGFSKFGHLSLKACYKILPFLEKGEVYSRACERAGYDFSKSSLENIDDIPNPVVKRSISQTLKVINAIILRYGNPVEVHIELARELARNFRDRKKIEKGMQENQAKNEKIRQRLISEFGVLRPKGMDIVKFKLCEEQNGECAYSQKHFDMEKLLRDPSYAEVDHIIPYSRSFDDSYNNKVLVLTKENREKRNRIPMEYLADAPERKNRFIHWVKSTIRNSRKRENLLRIDYTETTENEWKRRNLQDTQYISKYLYNYLRHHLVLAKGYTERKRRIIPVNGAVTAYFRKRLGINKIRENGDLHHAVDAVIIACATQGIVNKVSRYSKSRELWDYEVDMETGEVLQKKNKNTKDVFPEPWLNFRYELEQKVRIRPLDIPKTADITEMEEPFVSHMPNRKIHGPAHKETIRSGRLKEEGYTISKTALIDLKLTEDKEEIKGYYNKESDRLLYEALKKQLQRYGGKAKEAFKEPFHKPKADGTPGPIVNKVKIMEKSTMLIPVNGGKGLASNGNMVRIDVFRVEEKGKKKYYFIPVYVADTVKEELPNRAVLAHKPYEAWKIMKEEDFIFSLYPNDLIFVDAGKGIPFKAALKGSTLDPEKKASRFLMYYKGADIATGSISGVNHDETYKARGIGIQSLREIKKCCIDVLGNISFASKEKRQTFR

SEQ ID NO: 951 - protein, 1081 aa, unidentified
  REGION 1..1081: note = Description of Unknown: uncultivated organism with predicted taxonomy: Dialister invisus
  REGION 1..1081: note = MG15-24 effector
MNYVLGLDVGIASVGWAVLELNEEDNPIRIEGLGARIFDKAEVPKTGASLAAPRRMSRGIRRVIRRRRFRLQRVRSYLKRHNILPAEKVDHLYDVPSAIDIYELRKRALTEKVTAEEWARLLIFFAKHRGFKSNRKKASGDADEGEMLKAIAANAELLKNYRTVGEMLCDNEKFRKRKRNRDGAYNFTVSRAMLIEEIHTLFEIQRNLGQKFADERLEEEYVILFVAQRKFDEGPGENSPYAGNQIEKMIGSCTLEGKKEKRAPKASYAFMAFNLWQKINHLKINRRGSERFLTEEERRRIADSAWKKEKLTYGSLREVLFLDPEDRFVGLRYDLKKEKEEDLEEPVSEAEKMSFSWVKDYHSIRKALDKVEKNRILKLSHEQLDTIATAFSVYKNEETIEKYLEEGGIEKADREALLERLSSFSKFGHLSLKACYKILPFLEKGEVYSRACERAGYDFRKSSLENINDIPNPVVKRSISQTLKVINAIILRYGNPVEVHIELARELAKNFRDRKKMEKGMQENQAKNEKIRQRLMSEFGVLCPKGMDIVKFKLCEEQNGECAYSQKHFDMEKLLKDPSYAEVDHIIPYSRSFDDSYNNKVLVLTKENREKRNRIPMEYLADAPEQKNRFIHWVKSTIRNSRKRENLLRTDYTAATENEWKRRNLQDTQYISKYLYNYLLENLELAKGYTERKRRIIPVNGAVTAYIRKRLGINKIRENGDLHHAVDAVIIACATQGIVNKVSRYSKSRELWDYEVDKETGEILQKKNKNTKDVFPEPWLNFRYELEQKVRIRPLDIPETADITKMEEPFVSHMPNRKIHGPAHKETIRSGRLKEEGYTISKTALTDLKLTEDKEEIKGYYNKESDRLLYEALKKQLRRYGGKAKEAFKEPFHKPKADGTPGPIVNKVKIMEKSTMPVPVNGGKGIASNGNMVRIDVFRVEEKGKKKYYFIPVYVADTVKEELPNRAVLAHKPYEAWKIMKEEDFIFSLYPNDLIFVDAGKEIPFKAALKGSTLDPEKKASRFLMYYKGADIAGGTINGVNHDSTYGIRIGLQRLKGIRKCRIDVLGNISLVGKEKRKTFR

SEQ ID NO: 952 - protein, 1081 aa, unidentified
  REGION 1..1081: note = Description of Unknown: uncultivated organism with predicted taxonomy: Dialister
  REGION 1..1081: note = MG15-25 effector
MNYVLGLDVGIASVGWAVLELNEEDNPIRIEGLGARIFDKAEVPKTGASLAAPRRMSRGIRRVIRRRRFRLQRVRSYLKRHNILPAEKVDHLYDVPSAIDIYELRKRALTEKVTAEEWARLLIFFAKHRGFKSNRKKASGDADEGEMLKAIAANAELLKNYRTVGEMLCDNEKFRKRKRNRDGAYNFTVSRAMLIEEIHTLFEIQRNLGQKFADERLEEEYVILFVAQRKFDEGPGENSPYAGNQIEKMIGSCTLEGKKEKRAPKASYAFMAFNLWQKINHLKINRRGSERFLTEEERRRIADLAWKKEKLTYGSLREVLFLDPEDRFVGLRYDLKKEKEEDLEEPVSEAEKMSFSWVKDYHSIRKALDKVEKNRILKLSHEQLDTIATAFSVYKNEETIEKYLEEGGIEKADREALLERLSSFSKFGHLSLKACYKILPFLEKGEVYSRACERAGYDFRKSSLENINDIPNPVVKRSISQTLKVINAIILRYGNPVEVHIELARELAKNFRDRKKMEKGMQENQAKNEKIRQRLMSEFGVLCPKGMDIVKFKLCEEQNGECAYSQKHFDMEKLLKDPSYAEVDHIIPYSRSFDDSYNNKVLVLTKENREKRNRIPMEYLADAPEQKNRFIHWVKSTIRNSRKRENLLRTDYTAATENEWKRRNLQDTQYISKYLYNYLLENLELAKGYTERKRRIIPVNGAVTAYIRKRLGINKIRENGDLHHAVDAVIIACATQGIVNKVSRYSKSRELWDYEVDKETGEILQKKNKNTKDVFPEPWLNFRYELEQKVRIRPLDIPETADITKMEEPFVSHMPNRKIHGPAHKETIRSGRLKEEGYTISKTALTDLKLTEDKEEIKGYYNKESDRLLYEALKKQLRRYGGKAKEAFKEPFHKPKADGTPGPIVNKVKIMEKSTMPVPVNGGKGIASNGNMVRIDVFRVEEKGKKKYYFIPVYVADTVKEELPNRAVLAHKPYEAWKIMKEEDFIFSLYPNDLIFVDAGKEIPFKAALKGSTLDPEKKASRFLMYYKGADIAGGTINGVNHDSTYGIRIGLQRLKGIRKCRIDVLGNISLVGKEKRKTFR

SEQ ID NO: 953 - protein, 1082 aa, unidentified
  REGION 1..1082: note = Description of Unknown: uncultivated organism with predicted taxonomy: Dialister
  REGION 1..1082: note = MG15-26 effector
MNYVLGLDVGIASVGWAVLELNEEDNPIRIEGLGARIFDKAEVPKTGASLAAPRRMSRGIRRVIRRRRFRLQRVRSYLKKHNILPAEKVDHLYDVPSAIDIYELRKRALTEKVTAEEWARLLIFFAKHRGFKSNRKKASGDADEGEMLKAIAANAEILKNYRTVGEMLCDNEKFRKRKRNRDGAYNFTVSRAMLMEEIHTLFEIQRNLGQKFADEKLEEEYVILFAAQRKFDEGPGENSPYAGNQIEKMIGSCTLEGKKEKRAPKASYAFMAFNLWQKINHLKVNRRGSERFLTEEERRRIADLAWKKEKLTYGSLRKVLSLDPEDRFVGLRYDLKKGKAENLEEPVSEAEKRSFSWVKDYHSIRKALDKVEKNRILKLSHEQLDTIATAFSVYKNEETIEKYLEEGGIGKADGEALLERLSGFSKFGHLSLKACYKLLPFLEKGEVYSRACELAGYDFSKSSLENIDDIPNPVVKRSISQTLKVINAIILRYGNPVEVHIELARELARSFRDRKKMEKGMQENQAKNEKIRQRLISEFGVLRPKGMDIVKFKLCEEQNGECAYSQKHFDMEKLLKDPSYAEVDHIIPYSRSFDDSYNNKVLVLTKENREKRNRIPMEYLADAPERKNRFIHWVKSTIRNSRKRENLLRTDYTATTENEWKRRNLQDTQYISKYLYNYLRHHLVLAKGYTERKRRIIPVNGAVTAYFRKRLGINKIRENGDLHHAVDAVIIACATQGIVNKVSRYSKSRELWDYEVDMETGEVLQKKNKNTKDVFPEPWLNFRYELEQKVRVRPLDIPETADITEMEEPFVSHMPNRKIHGPAHKETIRSGRLKEEGYTISKTALIDLKLTEDKEEIKGYYNKESDRLLYEALKKQLQRYGGKAKEAFKEPFHKPKADGTPGPIVNKVKIMEKSTMLIPVNGGKGLASNGNMVRIDVFRAEEKGKKKYYFIPVYVADTVKEELPNRAVLAHKPYEAWKIMKEEDFIFSLYPNDLIFVDAGKEIPFKAALKGSTLDPEKKASRFLMYYKGADIATGSISGVNHDETYKARGVGIQSLREIKKCCIDVLGNISFASKEKRQTFR

SEQ ID NO: 954 - protein, 1082 aa, unidentified
  REGION 1..1082: note = Description of Unknown: uncultivated organism with predicted taxonomy: Dialister
  REGION 1..1082: note = MG15-27 effector
MNYVLGLDVGIASVGWAVLELNEEDNPIRIEGLGARIFDKAEVPKTGASLAAPRRMSRGIRRVIRRRRFRLQRVRSYLKRHNILPAEKVDHLYDVPSAIDIYELRKRALTEKVTAEEWARLLIFFAKHRGFKSNRKKASGDADEGEMLKAIAANAEILKNYRTVGEMLCDNEKFRKRKRNRGGAYNFTVSRAMLMEEIHTLFEIQRNLGQKFADEKIEEEYVILFAAQRKFDEGPGENSPYAGNQIEKMIGSCTLEGKKEKRAPKASYAFMAFNLWQKINHLKINRRGSERFLTEEERRRIADLAWKKEKLTYGSLREVLFLDPEDRFVGLRYDLKKEKEEDLEEPVSEAEKMSFSWVKDYHSIRKALDKVEKNRILKLSHEQLDTIATAFSVYKNEETIEKYLEEGGIEKADREALLERLSGFSKFGHLSLKACYKILPFLEKGEVYSRACERAGYDFSKSSLENIDDIPNPVVKRSISQTLKVINAIILRYGNPVEVHIELARELARNFRDRKKMEKGMQENQAKNEKIRQRLISEFGVLRPKGMDIVKFKLCEEQNGECAYSQKHFDMEKLLRDPSYAEVDHIIPYSRSFDDSYNNKVLVLTKENREKRNRIPMEYLADAPERKNRFIHWVKSTIRNSRKRENLLRIDYTETTENEWKRRNLQDTQYISKYLYNYLRHHLVLAKGYTERKRRIIPVNGAVTAYFRKRLGINKIRGNGDLHHAVDAVIIACATQGIVNKVSRYSKSRELWDYEVDMETGEVLQKKNKNTKDVFPEPWLNFRYELEQKVRVRPLDIPKTADITEMEEPFVSHMPNRKIHGPAHKETIRSGRLKEEGYTISKTALIDLKLTEDKEEIKGYYNKESDRLLYEALKKQLQRYGGKAKEAFKEPFHKPKADGTPGPIVNKVKIMEKSTMLIPVNGGKGLASNGNMVRIDVFRVEEKGKKKYYFIPVYVADTVKEELPNRAVLAHKPYEAWKIMKEEDFIFSLYPNDLIFVDAGKGIPFKAALKGSTLDPEKKASRFLMYYKGADIATGSISGVNHDETYKARGIGIQSLREIKKCCIDVLGNISFASKEKRQTFR

SEQ ID NO: 955 - protein, 1082 aa, unidentified
  REGION 1..1082: note = Description of Unknown: uncultivated organism with predicted taxonomy: Dialister
  REGION 1..1082: note = MG15-28 effector
MNYVLGLDVGIASVGWAVLELNEEDNPIRIEGLGARIFDKAEVPKTGASLAAPRRMSRGIRRVIRRRRFRLQRVRSYLKRHNILPAEKVDHLYDVPSAIDIYELRKRALTEKVTAEEWARLLIFFAKHRGFKSNRKKASGDADEGEMLKAIAANAEILKNYRTVGEMLCDNEKFRKRKRNRDGAYNFTVSRAMLMEEINTLFEIQRNLGQKFADEKLEEEYVILFASQRKFDEGPGENSPYAGNQIEKMIGSCTLEGKKEKRAPKASYVFMAFNLWQKINHLKVNRRGSERFLTEEERRRIADLAWKKEKLTYGSLRKVLSLDPEDRFVGLRYDLKKGKAENLEEPVSEAEKRSFSWVKDYHSIRKALDKVEKNRILKLSHEQLDTIATAFSVYKNEETIERYLEEGGIGKADREALLERLSGFSKFGHLSLKACYKLLPFLEKGEVYSRACELAGYDFSKSSLENIDDIPNPVVKRSISQTLKVINAIILRYGNPVEVHIELARELARSFRDRKKMEKGMQENQAKNEKIRQRLISEFGVLRPKGMDIVKFKLCEEQNGECAYSQKHFDMEKLLKDPSYAEVDHIIPYSRSFDDSYNNKVLVLTKENREKRNRIPMEYLADAPERKNRFIHWVKSTIRNSRKRENLLRTDYTATTENEWKRRNLQDTQYISKYLYNYLRHHLVLAKGYTERKRRIIPVNGAVTAYFRKRLGINKIRENGDLHHAVDAVIIACATQGIVNKVSRYSKSRELWDYEVDMETGEVLQKKNKNTKDVFPEPWLNFRYELEQKVRVRPLDIPETADITEMEEPFVSHMPNRKIHGPAHKESIRSGRLKEEGYTISKTALIDLKLTGDKEEIKGYYNKESDRLLYEALKKQLQRYGGKAKEAFKEPFHKPKADGTPGPIVNKVKIMEKSTMLIPVNDGKGLASNGNMVRIDVFRVEEKGKKKYYFIPVYVADTVKEELPNRAVLAHKPYEAWKIMKEEDFIFSLYPNDLIFVDAGKEIPFKAALKGSTLDPEKKVSRFLMYYKGADIATGSISGVNHDETYKARGVGIQSLREIKKCCIDVLGNISFASKEKRQTFR

SEQ ID NO: 956 - protein, 784 aa, unidentified
  REGION 1..784: note = Description of Unknown: uncultivated organism with predicted taxonomy: Dialister invisus
  REGION 1..784: note = MG15-29 effector
MNYVLGLDVGIASVGWAVLELNEEDNPIRIEGLGARIFDKAEVPKTGASLAAPRRMSRGIRRVIRRRRFRLQRVRSYLKKHNILPAEKVDHLYDVPSAIDIYELRKRALTEKVTAEEWARLLIFFAKHRGFKSNRKKASGDADEGEMLKAIAANAEILKNYRTVGEMLCDNEKFRKRKRNRDGAYNFTVSRAMLMEEIHTLFEIQRNLGQKFADEKLEEEYVILFAAQRKFDEGPGENSPYAGNQIEKMIGSCTLEGKKEKRAPKASYAFMAFNLWQKINHLKVNRRGSERFLTEEERRRIADLAWKKEKLTYGSLRKVLSLDPEDRFVGLRYDLKKGKAENLEEPVSEAEKRSFSWVKDYHSIRKALDKVEKNRILKLSHEQLDTIATAFSVYKNEETIEKYLEEGGIGKADGEALLERLSGFSKFGHLSLKACYKLLPFLEKGEVYSRACELAGYDFSKSSLENIDDIPNPVVKRSISQTLKVINAIILRYGNPVEVHIELARELARSFRDRKKMEKGMQENQAKNEKIRQRLISEFGVLRPKGMDIVKFKLCEEQNGECAYSQKHFDMEKLLKDPSYAEVDHIIPYSRSFDDSYNNKVLVLTKENREKRNRIPMEYLADAPERKNRFIHWVKSTIRNSRKRENLLRTDYTATTENEWKRRNLQDTQYISKYLYNYLRHHLVLAKGYTERKRRIIPVNGAVTAYFRKRLGINKIRENGDLHHAVDAVIIACATQGIVNKVSRYSKSRELWDYEVDMETGEVLQKKNKNTKDVFPEPWLNFRY

SEQ ID NO: 957 - protein, 1081 aa, unidentified; identical to SEQ ID NO: 940
  REGION 1..1081: note = Description of Unknown: uncultivated organism with predicted taxonomy: Megasphaera sp. AM44-1BH
  REGION 1..1081: note = MG15-30 effector

SEQ ID NO: 958 - protein, 1082 aa, unidentified
  REGION 1..1082: note = Description of Unknown: uncultivated organism with predicted taxonomy: Dialister
  REGION 1..1082: note = MG15-31 effector
MNYVLGLDVGIASVGWAVLELNEEDNPIRIEGLGARIFDKAEVPKTGASLAAPRRMSRGIRRVIRRRRFRLQRVRSYLKRHNILPAEKVDHLYDVPSAIDIYELRKRALTEKVTAEEWARLLIFFAKHRGFKSNRKKASGDADEGEMLKAIAANAEILKNYRTVGEMLCDNEKFRKRKRNRDGAYNFTVSRAMLMEEIHTLFEIQRNLGQKFADEKLEEEYVILFAAQRKFDEGPGEKSPYAGNQIEKMIGSCTLEGKKEKRAPKASYAFMAFNLWQKINHLKVNRRGSERFLTEEERRRIADLAWKKEKLTYGSLRKVLSLDPEDRFVGLRYDLKKGKAENLEEPVSEAEKRSFSWVKDYHSIRKALDKVEKNRILKLSHEQLDTIATAFSVYKNEETIEQYLEEGGIGKADREALLERLSGFSKFGHLSLKACYKLLPFLEKGEVYSRACELAGYDFSKSSLENIDDIPNPVVKRSISQTLKVINAIILRYGNPVEVHIELARELARSFRDRKKMEKGMQENQAKNEKIRQRLISEFGVLRPKGMDIVKFKLCEEQNGECAYSQKHFDMEKLLKDPSYAEVDHIIPYSRSFDDSYNNKVLVLTKENREKRNRIPMEYLADAPERKNRFIHWVKRTIRNSRKRENLLRTDYTATTENEWKRRNLQDTQYISKYLYNYLRHHLVLAKGYTERKRRIIPVNGAVTAYFRKRLGINKIRENGDLHHAVDAVIIACATQGIINKVSRYSKSRELWDYEVDMETGEVLQKKNKNTKDVFPEPWLNFRYELEQKVRVRPLNIPETADITEMEEPFVSHMPNRKIHGPAHKETIRSGRLKEEGYTISKTALIDLKLTEDKEEIKGYYNKESDRLLYEALKKQLQRYGGKAKEAFKEPFHKPKADGTPGPIVNKVKIMEKSTMLIPVNGGKGLASNGNMVRIDVFRAEEKGKKKYYFIPVYVADTVKEELPNRAVLAHKPYEAWKIMKEEDFIFSLYPNDLIFVDAGKEIPFKAALKGSTLDPEKKASRFLMYYKGADIATGSISGVNHDETYKARGVGIQSLREIKKCCIDVLGNISFASKEKRQTFR

SEQ ID NO: 959 - protein, 1082 aa, unidentified; identical to SEQ ID NO: 953
  REGION 1..1082: note = Description of Unknown: uncultivated organism with predicted taxonomy: Veillonellales
  REGION 1..1082: note = MG15-32 effector

SEQ ID NO: 960 - protein, 1081 aa, unidentified
  REGION 1..1081: note = Description of Unknown: uncultivated organism with predicted taxonomy: Dialister
  REGION 1..1081: note = MG15-33 effector
MNYVLGLDVGIASVGWAVLELNEEDNPIRIEGLGARIFDKAEVPKTGASLAAPRRMSRGIRRVIRRRRFRLQRVRSYFKRHNILPAEKVDHLYDVPSAIDIYELRKRALTEKVTAEEWARLLIFFAKHRGFKSNRKKASGDADEGEMLKAIAANAEILKNYRTVGEMLCDNEKFRKRKRNRDGAYNFTVSRAMLMEEIHTLFEIQRNLGQKFADEKIEEEYVILFAAQRKFDEGPGENSPYAGNQIEKMIGSCTLEGKKEKRAPKASYAFMAFNLWQKINHLKINRRGSERFLTEEERRRIADLAWKKEKLTYGSLREVLFLDPEDRFVGLRYDLKKEKEEDLEEPVSEAEKMSFSWVKDYHSIRKALNKVEKNRILKLSHEQLDTIATAFSVYKNEETIEKYLEEGGIEKADREALLERLSGFSKFGHLSLKACYKILPFLEKGEVYSRACERAGYDFSKSSLENIDDIPNPVVKRSISQTLKVINAIILRYGNPVEVHIELARELARNFRDRKKMEKGMQENQAKNEKIRQRLISEFGVLRPKGMDIVKFKLCEEQNGECAYSQKHFDMEKLLRDPSYAEVDHIIPYSRSFDDSYNNKVLVLTKENREKRNRIPMEYLADAPERKNRFIHWVKSTIRNSRKRENLLRIDYTETTENEWKRRNLQDTQYISKYLYNYLRHHLVLAKGYTERKRRIIPVNGAVTAYFRKRLGINKIRENGDLHHAVDAVIIACATQGIVNKVSRYSKSRELWDYEVDMETGEVLQKKNKNTKDVFPEPWLNFRYELEQKVRVRPLDIPKTADITEMEEPFVSHMPNRKIHGPAHKETIRSGRLKEEGYTISKTALIDLKLTEDKEEIKGYYNKESDRLLYEALKKQLQRYGGKAKEAFKEPFHKPKADGTPGPIVNKVKIMEKSTMLIPVNGGKGLASNGNMVRIDVFRVEEKGKKKYYFIPVYVADTVKEELPNRAVLAHKPYEAWKIMKEEDFIFSLYPNDLIFVDAGKGIPFKAALKGSTLDPEKKASRFLMYYKGADIAGGTINGVNHDSTYGIRIGLQRLKGIRKCRIDVLGNISLVGKEKRKTFR

SEQ ID NO: 961 - protein, 1081 aa, unidentified; identical to SEQ ID NO: 951
  REGION 1..1081: note = Description of Unknown: uncultivated organism with predicted taxonomy: Megasphaera
  REGION 1..1081: note = MG15-34 effector

SEQ ID NO: 962 - protein, 1084 aa, unidentified
  REGION 1..1084: note = Description of Unknown: uncultivated organism with predicted taxonomy: Megasphaera
  REGION 1..1084: note = MG15-35 effector
MNYVLGLDIGITSVGWAVLELDTHDEPIRIVDLNSRIFEKAEVPKTGESLAAPRRMARSARRLTRRRRFRLHRVRRYLIRNRILDARQVEELYVDSIGKTDIYELRYQALSQPVSNSDWARLLIFFAKHRGFKSNRKHISGSGDEGQMLNAITENQEILKNYRTVGEMLYKNEKFKACKRNKGGSYTFTVSRAMLADEIHTLFDVQRNLGQAYASEKLKEEYMELFSAQRNFDKGPGINSPYSGNQIEKMIGSCTFEDGEKRAPKASYAFMAFNVWQKINHLRVTCEGTYRFLSQTEKETLAALAWKKENITFKDIRRELKLDDTVRFLDVNYNLDKYKEEAEKKVKFSWVKEYHAIRKALDKVKKDRISELSHEQIDTIAYAFTVYKNDEAIKRYLLEHAIELADAEALLENISGFSKFGHLSVKACYKLLEPLQQGHVYTKACEIAGYDPQKSNQENINDIPNPVVKRALSQALKVIKAIIRQYGCPPVEIHIELARELAKSAKERTELEKAMKDNQSRNEKIKTKLHELNVMQPTGLDIVKYKLYKQQQGDCAYSQKKFDVNRLLHDPTYAEVDHIIPYSRSFDDTYRNKVLVLTKENRDKGNRTPMEYFQDKPERKEAFINWVKRTISDGKKRNNLLRVNYSADAEKEWKDRHLQDTQYISRYLYNYLKRHIELKEGYTDRKRRIIPVNGAVTAYVRKRLGISKIRENGDLHHAVDAVIIACVTQGVVNKISRYSKIKELRQFMTADGTIVDQETGEVLQTANPRKTDPFPEPWPKFRQELEARVSDNPAEAIAALRLPTYEGIVTISAPFVSRMPNRKVHGPAHMETIRSAKMQQDGYTMVKTELTNLKLKDGEIEGYYNPSSDKILYDALKRRLEQFGGDGNKAFKDPFYKPKSDGTPGPEVKKVKIMTKSSLNVAVNQGKGVADNGSMVRIDVFGVEERGKNAYYFVPIYVADTVRETLPNKAVVPNKSYNDWKFMRDEDFLFSLYPNDLIYIESLSPVSFHTVKGCTLVPKIERKEMLLYYRKAGISTASITVLNHDNTYVKESLGIKTIGKLQKCTVDILGNVHYVQKEKRLGFK

SEQ ID NO: 963 - protein, 1081 aa, unidentified; identical to SEQ ID NO: 952
  REGION 1..1081: note = Description of Unknown: uncultivated organism with predicted taxonomy: Dialister
  REGION 1..1081: note = MG15-36 effector

SEQ ID NO: 964 - protein, 1081 aa, unidentified; identical to SEQ ID NO: 952
  REGION 1..1081: note = Description of Unknown: uncultivated organism with predicted taxonomy: Dialister
  REGION 1..1081: note = MG15-37 effector

SEQ ID NO: 965 - protein, 1112 aa, unidentified
  REGION 1..1112: note = Description of Unknown: uncultivated organism with predicted taxonomy: Selenomonas bovis
  REGION 1..1112: note = MG15-38 effector
MDRRYALGLDIGIASVGWAVLAFDDADNPYRIINMGTRIFDAAEHPKDGASLAAPRREARSARRRLRRRHHRIERTRKLLIREGLLTKDALQHLFDAPPEKDVYTLRFEGLECCLDGEEWARVLLFFSKHRGFRSNRIVDDEAGDEGKVLSAIRQNEERLQGYRTVGEMLARDPKFADRKRNKAEDYQLTVSRTMLEKEICTLFDAQRQWKNPHASEDFEQEYLEIFSSQRHFDEGPGGRSPYGGDQIEKMIGRCTLEPKEKRAPKASYSFQRFSLLQNINHLRIKSQNTERSLSDEERKAVEALCWKSPSVTYYKIRQEVNLPDDVRFAGLYYDKAPEEVEKKTKFSYTVPYHEIRKVLDKWKKGGIQELDVHQLDTIGYAFTVYKNDDRIHRYLCGHGISDAIAEVLVQNLKSFQKFGHISLKACQKLIPFLEQGMVYSDACKAAGYAAPDAEPKKFLSGGMEEIREIPNPVVRRSLSQTVKIINAVIREYGSPVEVHIELAREMARSRQDRDKMEKDIKNNRARNEAIKKELQELGLRNPKGQDIIKWRLYKEQDGFCAYSQKQFDVERLLHDGSYAEIDHILPYSRSFDDSYHNKVLVMAAENRQKGNRTPLEYMAGEEERIHAFRIWVNSRIHDFRKRQNLLREHFDKESTEKDWKERNLNDTKYISRFIYNLIRQHLQFAPFRTDRKQHIISVNGAVTSYIRKRLGIPKIREDGDLHHAVDAVVIASITQGTIQKVTRYSREKETLYHCDSKGRLIDTSTGEILSPEEHQRRLAEKFPEPWPCFRKEIEARISHHPAENLRLLHLPTYTEEELAELEKPIFVSRMPNHKVRGAAHEKSLRSPRLQEDGIIVYSTPLTKLKLGKDNNSILNYYNPDSDRLLYTALLQRLQKFQGDAEKAFKEPFHKPKADGTLGPVVRKVKVTDKSNLNVSLNHGHSIAKNDSDGGMVRVDVYYIPDGKKHGYYLVPVYVSDVVRKTLPNKAIVADTPYAEWPEMREEDFLFSLYKNDLIHLRKKKPAKMKVIQKESTLQKEIAVSEGNAYYISTDSATASIKIINHDNTYYTKGLGVKTLLSLEKMQVDVLGNITPAPREPRQDFSAMKRDRFARK

SEQ ID NO: 966 - protein, 1082 aa, unidentified; identical to SEQ ID NO: 953
  REGION 1..1082: note = Description of Unknown: uncultivated organism with predicted taxonomy: Dialister
  REGION 1..1082: note = MG15-39 effector

SEQ ID NO: 967 - protein, 1082 aa, unidentified; identical to SEQ ID NO: 953
  REGION 1..1082: note = Description of Unknown: uncultivated organism with predicted taxonomy: Dialister
  REGION 1..1082: note = MG15-40 effector

SEQ ID NO: 968 - protein, 1089 aa, unidentified
  REGION 1..1089: note = Description of Unknown: uncultivated organism with predicted taxonomy: Megasphaera sp. AM44-1BH
  REGION 1..1089: note = MG15-41 effector
MHYVLGLDIGITSVGWAVLELNIQDEPIRIVDLNSRIFERAEIPKTGESLAAPRRVARSSRRRTRRRRFRLYRIRRYLLRNQIITPSDMKILYDNCGDMKDIYTLRHEALDRAVTSKEWARLLIFFGKHRGFKSNRKSIIASGDEGVMLQAVKENQELLKAYRTVGDMLYSDTKFANAKRNKGESYTFTVSRRMLTDEIQTLFCIQRDLGQSFATPSLEDEYLSIFLAQRNFDEGPGGNSPYSGNQIEKMIGNCAFEKNEKRAPKASYAFMAFNLLQKINHLRIERKGKQRFLTQEERNNIAGLAWKKENLTFKDIRTAISLSGDELFQDVHYASEVSLEECEKKTKFNLVRSYHAMRKALDAVEKNRIQKLSHEQLDTIAYAFTVYKNDDKISSYLLAHSIEQQDVEALLAQLRTFNKFGHLSIKACYRILPYLKEGKTYAAACTSAGYDFRNSSLEEIKDIPNPVVKRAVSQTLKVIRAIIKKYGCEPVEIHIELARELARSFQNRVKMQKSMEENQSRNEKIKERLVQEYNILSPTGMDIVKFKLYEQQQGACAYSQKMFNIYQLFHDPSYAEVDHIIPYSRSFDDSYRNKVLVFTAENRNKGNRTPMEYLKNQSERKEQFITWVKNTIRDYKKRNNLLRETYTSEDEADWKRRHLQDTQYLSTYLYNYLCHVMKLTPGCTERKRRIIAVNGAVTAYVRKRLGINKIRSNGDLHHAVDAVIIACVTQGVINRISRYSKIKELQNFQTNDGQVVDSVTGEILTLKHVHKKDPFPEPWPHFRQELEARVGKQPQEAIAALHLPTYKNVESIYTPFVSRMPNRKVHGPAHLETIRSSKLLYKGITIVKTSLTNLKLKDGEIQGYYNPDSDRILYQALKRRLIQFDGEGRAAFKEPFYKPRSDGSPGPMVKKVKIMTNSSLNVLLNHGRGVADNGAMVRIDVFYVSEKGKKAYYFVPIYVADTVKKELPHKAVVAYKPCEEWKNVDDDDFIFSLYPNDLVYVRHKKSILLKASKRSTLSPQIKIKEGLFYYKGANISVGSISIINNDDTYGQHSLGIKTLECMKKANVDILGNVTFVGRENRQPFQLSKK

SEQ ID NO: 969 - protein, 898 aa, unidentified
  REGION 1..898: note = Description of Unknown: uncultivated organism with predicted taxonomy: Veillonellales
  REGION 1..898: note = MG15-42 effector
GEEKRALFEGQPQWGQAYAAEELEKEYIEIFGAQRNFDEGPGAGSPYGGDQIEKMIGTCTFEPMEKRAPKVSYGFMAFNLWQKINHLGLIANGVAPSFTAEEKQQIADLAWSKNNLHLQHIRKELRIPEDTIFSGVNYGIRKQDTEWAKQLEEVEKKQKFNWLTPYHEMRVALDAVKKHRITELSPDQIDTIAYAFTVFKNDEKITSYLRENGIEEDDIRALLSKVKGFSKFGHLSLKACYKILPYLEEGNIYSKACELAGYDFRSSSQEQLEDIPNPVVKRAISQTLKVIKAIVRRYGNPVEVHIELARELARNFEDRRTMQKSMEDNQKRNEEIKERLVKEYNVLQPTGMDIVKFKLYEEQQGACAYSQKMFDVNRVLHDPSYSEVDHIIPYSRSFDDSYNNKVLVLTKENRDKGNRTPMEYLKDNPVRIDAFTTWVNAIVRNSRKRANLLKSSFTEDAEQEWKRRHLQDTQYISRFLYNYLRQNLPLKEGFTNRKRRIIPVNGAVTSYVRKRLGIAKIRENGDLHHAVDAVIIACVTQGVIKRVSEYSKSRELWLYQLDDGTVIDGETGEVMTGQRGHKQEPFPEPWPEFRHELEDRVSENPPELLRHLQLPAYEGIDIETIKTPFVSRMPNRKVKGQAHEETIRSGRLKYEGYTVTKVDLKNLKLKNGEIEGYYNPDSDRLLYNALKQQLEVYDGKGDKAFAEPFHKPKADGTPGPIVKKVKIMTKSNLNVPVNGGKGVADNGSMVRIDVFGVEERGKMAYRFIPIYVSDTVKRILPNKAVTRDRGYKDWDIMDDKDFLFSLYPNDLIYVESKRDISLKAAKGSTLAKERKQKEALVYYRGADIATASIGVVNDDNTYSMRGLGIKTLQSIRKCIVDVLGNVAFVTKEKRQGFR

SEQ ID NO: 970 - protein, 1082 aa, unidentified
  REGION 1..1082: note = Description of Unknown: uncultivated organism with predicted taxonomy: Veillonellales
  REGION 1..1082: note = MG15-43 effector
MNYVLGLDVGIASVGWAVLELNEEDNPIRIEGLGARIFDKAEVPKTGASLAAPRRMSRGIRRVIRRRRFRLQRVRSYLKRHNILPAEKVDHLYDVPSAIDIYELRKRALTEKVTAEEWARLLIFFAKHRGFKSNRKKASGDADEGEMLKAIAANAEILKNYRTVGEMLCDNEKFRKRKRNRDGAYNFTVSRAMLMEEIHTLFEIQRNLGQKFADEKIEEEYVILFAAQRKFDEGPGENSPYAGNQIEKMIGSCTLEGKKEKRAPKASYAFMAFNLWQKINHLKINRRGSERFLTEEERRRIADLAWKKEKLTYGSLREVLFLDPEDRFVGLRYDLKKEKEEDLEEPVSEAEKMSFSWVKDYHSIRKALDKVEKNRILKLSHEQLDTIATAFSVYKNEETIEKYLEEGGIEKADREALLERLSGFSKFGHLSLKACYKILPFLEKGEVYSRACERAGYDFSKSSLENIDDIPNPVVKRSISQTLKVINAIILRYGNPVEVHIELARELARNFRDRKKMEKGMQENQAKNEKIRQRLISEFGVLRPKGMDIVKFKLCEEQNGECAYSQKHFDMEKLLRDPSYAEVDHIIPYSRSFDDSYNNKVLVLTKENREKRNRIPMEYLADAPERKNRFIHWVKSTIRNSRKRENLLRIDYTETTENEWKRRNLQDTQYISKYLYNYLRHHLVLAKGYTERKRRIIPVNGAVTAYFRKRLGINKIRENGDLHHAVDAVIIACATQGIVNKVSRYSKSRELWDYEVDMETGEVLQKKNKNTKDVFPEPWLNFRYELEQKVRIRPLDIPKTADITEMEEPFVSHMPNRKIHGPAHKETIRSGRLKEEGYTISKTALIDLKLTEDKEEIKGYYNKESDRLLYEALKKQLQRYGGKAKEAFKEPFHKPKADGTPGPIVNKVKIMEKSTMLIPVNGGKGLASNGNMVRIDVFRVEEKGKKKYYFIPVYVADTVKEELPNRAVLAHKPYEAWKIMKEEDFIFSLYPNDLIFVDAGKGIPFKAALKGSTLDPEKKASRFLMYYKGADIATGSISGVNHDETYKARGIGIQSLREIKKCCIDVLGNISFASKEKRQTFR

SEQ ID NO: 971 - protein, 898 aa, unidentified; identical to SEQ ID NO: 969
  REGION 1..898: note = Description of Unknown: uncultivated organism with predicted taxonomy: Veillonellales
  REGION 1..898: note = MG15-44 effector

SEQ ID NO: 972 - protein, 1112 aa, unidentified; identical to SEQ ID NO: 965
  REGION 1..1112: note = Description of Unknown: uncultivated organism with predicted taxonomy: Selenomonas bovis
  REGION 1..1112: note = MG15-45 effector

SEQ ID NO: 973 - protein, 1081 aa, unidentified
  REGION 1..1081: note = Description of Unknown: uncultivated organism with predicted taxonomy: Dialister
  REGION 1..1081: note = MG15-46 effector
MNYVLGLDVGIASVGWAVLELNEEDNPIRIEGLGARIFDKAEVPKTGASLAAPRRMSRGIRRVIRRRRFRLQRVRSYLKRHNILPAEKVDHLYDVPSAIDIYELRKRALTEKVTAEEWARLLIFFAKHRGFKSNRKKASGDADEGEMLKAIAANAELLKNYRTVGEMLCDNEKFRKRKRNRDGAYNFTVSRAMLIEEIHTLFEIQRNLGQKFADEKLEEEYVILFAAQRKFDEGPGENSPYAGNQIEKMIGSCTLEGKKEKRAPKASYAFMAFNLWQKINHLKINRRGSERFLTEEERRRIADLAWKKEKLTYGSLREVLFLDPEDRFVGLRYDLKKEKEENLEEPVSEAEKMSFSWVKDYHSIRKALDKVEKNRILKLSHEQLDTIATAFSVYKNEETIEKYLEEGGIEKADREALLERLSGFSKFGHLSLKACYKILPFLEKGEVYSRACERAGYDFRKSSLENINDIPNPVVKRSISQTLKVINAIILRYGNPVEVHIELARELAKNFRDRKKMEKGMQENQAKNEKIRQRLMSEFGVLRPKGMDIVKFKLCEEQNGECAYSQKHFDMEKLLRDPSYAEVDHIIPYSRSFDDSYNNKVLVLTKENREKRNRIPMEYLADATERKNRFIHWVKSTIRNSRKRENLLRTDYTETTENEWKRRNLQDTQYISKYLYNYLRHHLVPAKGYTERKRRIIPVNGAVTAYIRKRLGINKIRENGDLHHAVDAVIIACATQGIVNKVSRYSKSRELWDYEVDMETGEVLQKKNENRKDIFPEPWLNFRYELEQKVRVRPLDIPETADITEMEEPFVSHMPNRKIHGPAHKETIRSGRLKEEGYTISKTALTDLKLTEDKEEIKGYYNKESDRLLYEALKKQLQRYSGKAKEAFKEPFHKPKADGTPGPIVNKVKIMEKSTMPVPVNGGKGLASNGNMVRIDVFRVEEKGKKKYYFIPVYVADTVKEELPNRAVLAHKPYEAWKIMKEEDFIFSLYPNDLIFVDAGKEIPFKAALKGSTLDPEKKASRFLMYYKGADIAGGTINGVNHDSTYGIRIGLQRLKGIRKCRIDVLGNISLVGKEKRKTFR

SEQ ID NO: 974 - protein, 1078 aa, unidentified
  REGION 1..1078: note = Description of Unknown: uncultivated organism with predicted taxonomy: Dialister
  REGION 1..1078: note = MG15-47 effector
MNYVLGLDVGITSCGWAVLELNHEDEPVRIVDLNSRIFDKAEAGNGDSLAAPRRMARGIRRLTRRRKFRLHRVRGFLVRHHILTKEEIENLYTNPHKTDIYELRYRALTEKVSPSDWARLLIFFAKHRGFQSNRKNEKSGEDGLMLAAIGENKKVLENYRSVGDMLYSDEKFRDCKRNKGGTYRFTVSRSMLKEEVQTLFKTQRELGQTFAGEDLEDEYISIFSAQRNFDEGPGANSPYAGDQIEKMIGDCTFEDGKNGRPPQKRAPKASYAFMAFNLWQKINHIRVNSKGIERSLETEEKNKIAGLAWTKENITYYDLRQITGLDEETRFSGVTYPLDSTTEEAEKKVKFSWVKPYHAMRRALDKVEKNYIQKLSREEIDAIAYAFTVYKNDKKIRTALAEKGIEDNVADVLITHLDGFSKFGHLSEYACYKLLPFLEKGEEYYKACDSAGLTESPAKKIKDITNPVVKRAVTQTMKVIKAVQRKYGNPVEVHIELARELARSFKDRAAMDHRMKENYAKNEKIKERLSKEFHIMNPRGQDIVKWKLYEQQQGCCAYSQKPFDVDRLLHDGNYAEVDHILPYSRSFDDTYRNKVLVLEKENRDKGNRTPMEYLADKPERKEKFIAWVKTTIKDSKKREHLLRVKYGRDEEAEWKQRHLQDTQYISRFLYNYLRNTLELTPGYTDRKRRIIPVNGAVTGYIRKRLGIRKIRENGDLHHAVDAVVIAVTTQGMIQKVTRYSQIRENPKLIDKKTGEVLTAKEFHNKDNFPEPWPRFRQELEARVSEDPEEAIRRLRLPAYENVGEIKKPFISRMPRRKVRGAAHEETVRSGKLREDGYTILKTDLSKLKLENGEIKGYYRPESDRLLYEALKKRLEAFGGKGEEAFKEPFYKPKADGTPGPLVKKVKIIEKSSLNVPVHKGEGAAYNKIRIRIDIFGVNEKGKMAYYFVPVYVSDTVKRELPCRAVVQDKSYENWKMMDDKDFLFSLYPNDMIHVVAKRDLSFTAAEGSSLAPKMKTKDAYVYYKGADINGGTITVINHDNSYGIKSMGIKTLLQMEKCEVDILGNISVVKQEKRQGFR

SEQ ID NO: 975 - protein, 1112 aa, unidentified; identical to SEQ ID NO: 965
  REGION 1..1112: note = Description of Unknown: uncultivated organism with predicted taxonomy: Selenomonas bovis
  REGION 1..1112: note = MG15-48 effector

SEQ ID NO: 976 - protein, 1081 aa, unidentified
  REGION 1..1081: note = Description of Unknown: uncultivated organism with predicted taxonomy: Dialister
  REGION 1..1081: note = MG15-49 effector
MNYVLGLDVGIASVGWAVLELNEEDNPIRIEGLGARIFDKAEVPKTGASLAAPRRMSRGIRRVIRRRRFRLQRVRSYLKRHNILPAEKVDHLYDVPSAIDIYELRKRALTEKVTAEEWARLLIFFAKHRGFKSNRKKASGDADEGEMLKAIAANAELLKNYRTVGEMLCDNEKFRKRKRNRDGAYNFTVSRAMLIEEIHTLFEIQRNLGQKFADERLEEEYVILFVAQRKFDEGPGENSPYAGNQIEKMIGSCTLEGKKEKRAPKASYAFMAFNLWQKINHLKINRRGSERFLTEEERRRIADLAWKKEKLTYGSLREVLFLDPEDRFVGLRYDLKKEKEEDLEEPVSEAEKMSFSWVKDYHSIRKALDKVEKNRILKLSHEQLDTIATAFSVYKNEETIEKYLEEGGIEKADREALLERLSSFSKFGHLSLKACYKILPFLEKGEVYSRACERAGYDFRKSSLENINDIPNPVVKRSISQTLKVINAIILRYGNPVEVHIELARELAKNFRDRKKMEKGMQENQAKNEKIRQRLMSEFGVLCPKGMDIVKFKLCEEQNGECAYSQKHFDMEKLLKDPSYAEVDHIIPYSRSFDDSYNNKVLVLTKENREKRNRIPMEYLADAPEQKNRFIHWVKSTIRNSRKRENLLRTDYTAATENEWKRRNLQDTQYISKYLYNYLLENLELAKGYTERKRRIIPVNGAVTAYFRKRLGINKIRENGDLHHAVDAVIIACATQGIVNKVSRYSKSRELWDYEVDMETGEVLQKKNENRKDIFPEPWLNFRYELEQKVRVRPLDIPETADITEMEEPFVSHMPNRKIHGPAHKETIRSGRLKEEGYTISKTALTDLKLTEDKEEIKGYYNKESDRLLYEALKKQLRRYGGKAKEAFKEPFHKPKADGTPGPIVNKVKIMEKSTMPVPVNGGKGLASNGNMVRIDVFRVEEKGKKKYYFIPVYVADTVKEELPNRAVLAHKPYEAWKIMKEEDFIFSLYPNDLIFVDAGKEIPFKAALKGSTLDPEKKASRFLMYYKGADIAGGTINGVNHDSTYGIRIGLQRLKGIRKCRIDVLGNISLVGKEKRKTFR

SEQ ID NO: 977 - protein, 1082 aa, unidentified
  REGION 1..1082: note = Description of Unknown: uncultivated organism with predicted taxonomy: Dialister
  REGION 1..1082: note = MG15-50 effector
MNYVLGLDVGIASVGWAVLELNEEDNPIRIEGLGARIFDKAEVPKTGASLAAPRRMSRGIRRVIRRRRFRLQRVRSYLKRHNILPAEKVDHLYDVPSAIDIYELRKRALTEKVTAEEWARLLIFFAKHRGFKSNRKKASGDADEGEMLKAIAANAEILKNYRTVGEMLCDNEKFRKRKRNRNGAYNFTVSRAMLMEEIHTLFEIQRNLGQKFADEKLEEEYVILFAAQRKFDEGPGENSPYAGNQIEKMIGSCTFEGKKEKRAPKESYAFMAFNLWQKINHLKVNRRGSERFLTEEERRRIADLAWKKEKLTYGSLRKVLSLDPEDRFVGLRYDLKKGKAENLEEPVSEAEKRSFSWVKDYHSIRKALDKVEKNHILKLSHEQLDTIATAFSVYKNEETIEQYLEEGGIGKADREALLERLSGFSKFGHLSLKACYKLLPFLEKGEVYSRACELAGYDFSKSSLENIDDIPNPVVKRSISQTLKVINAIILRYGNPVEVHIELARELARSFRDRKKMEKGMQENQAKNEKIRQRLISEFGVLRPKGMDIVKFKLCEEQNGECAYSQKHFDMEKLLKDPSYAEVDHIIPYSRSFDDSYNNKVLVLTKENREKRNRIPMEYLADAPERKNRFIHWVKSTIRNSRKRENLLRTDYTATTENEWKRRNLQDTQYISKYLYNYLRHHLVLAKGYTERKRRIIPVNGAVTAYFRKRLGINKIRENGDLHHAVDAVIIACATQGIVNKVSRYSKSRELWDYEVDMETGEVLQKKNKNTKDVFPEPWLNFRYELEQKVRVRPLDIPETADITEMEEPFVSHMPNRKIHGPAHKETIRSGRLKEEGYTISKTALIDLKLTEDKEEIKGYYNKESDRLLYEALKKQLQRYGGKAKEAFKEPFHKPKADGTPGPIVNKVKIMEKSTMLIPVNGGKGLASNGNMVRIDVFRAEEKGKKKYYFIPVYVADTVKEELPNRAVLAHKPYEAWKIMKEEDFIFSLYPNDLIFVDAGKEIPFKAALKGSTLDPEKKASRFLMYYKGADIATGSISGVNHDETYKARGVGIQSLREIKKCCIDVLGNISFASKEKRQTFR

SEQ ID NO: 978 - protein, 1082 aa, unidentified; identical to SEQ ID NO: 938
  REGION 1..1082: note = Description of Unknown: uncultivated organism with predicted taxonomy: Dialister
  REGION 1..1082: note = MG15-51 effector

SEQ ID NO: 979 - protein, 1081 aa, unidentified
  REGION 1..1081: note = Description of Unknown: uncultivated organism with predicted taxonomy: Veillonellales
  REGION 1..1081: note = MG15-52 effector
MNYVLGLDVGIASVGWAVLELNEEDNPIRIEGLGARIFDKAEVPKTGASLAAPRRMSRGIRRVIRRRRFRLQRVRSYLKRHNILPAEKVDHLYDVPSAIDIYELRKRALTEKVTAEEWARLLIFFAKHRGFKSNRKKASGDADEGEMLKAIAANAELLKNYRTVGEMLCDNEKFRKRKRNRDGAYNFTVSRAMLIEEIHTLFEIQRNLGQKFADERLEEEYVILFVAQRKFDEGPGENSPYAGNQIEKMIGSCTLEGKKEKRVPKASYAFMAFNLWQKINHLKINRRGSERFLTEEERRRIADLAWKKEKLTYGSLREVLFLDPEDRFVGLRYDLKKEKEEDLEEPVSEAEKMSFSWVKDYHSIRKALDKVEKNRILKLSHEQLDTIATAFSVYKNEETIEKYLEEGGIEKADREALLERLSSFSKFGHLSLKACYKILPFLEKGEVYSRACERAGYDFRKSSLENINDIPNPVVKRSISQTLKVINAIILRYGNPVEVHIELARELAKNFRDRKKMEKGMQENQAKNEKIRQRLMSEFGVLCPKGMDIVKFKLCEEQNGECAYSQKHFDMEKLLKDPSYAEVDHIIPYSRSFDDSYNNKVLVLTKENREKRNRIPMEYLADAPEQKNRFIHWVKSTIRNSRKRENLLRTDYTAATENEWKRRNLQDTQYISKYLYNYLLENLELAKGYTERKRRIIPVNGAVTAYFRKRLGINKIRENGDLHHAVDAVIIACATQGIVNKVSRYSKSRELWDYEVDMETGEVLQKKNENRKDIFPEPWLNFRYELEQKVRVRPLDIPETADITEMEEPFVSHMPNRKIHGPAHKETIRSGRLKEEGYTISKTALTDLKLTEDKEEIKGYYNKESDRLLYEALKKQLRRYGGKAKEAFKEPFHKPKADGTPGPIVNKVKIMEKSTMPVPVNGGKGLASNGNMVRIDVFRVEEKGKKKYYFIPVYVADTVKEELPNRAVLAHKPYEAWKIMKEEDFIFSLYPNDLIFVDAGKEIPFKAALKGSTLDPEKKASRFLMYYKGADIAGGTINGVNHDSTYGIRIGLQRLKGIRKCRIDVLGNISLVGKEKRKTFR

SEQ ID NO: 980 - protein, 1081 aa, unidentified; identical to SEQ ID NO: 952
  REGION 1..1081: note = Description of Unknown: uncultivated organism with predicted taxonomy: Dialister invisus
  REGION 1..1081: note = MG15-53 effector

SEQ ID NO: 981 - protein, 1081 aa, unidentified
  REGION 1..1081: note = Description of Unknown: uncultivated organism with predicted taxonomy: Dialister
  REGION 1..1081: note = MG15-54 effector
MNYVLGLDVGIASVGWAVLELNEEDNPIRIEGLGARIFDKAEVPKTGASLAAPRRMSRGIRRVIRRRRFRLQRVRSYFKRHNILPAEKVDHLYDVPSAIDIYELRKRALTEKVTAEEWARLLIFFAKHRGFKSNRKKASGDADEGEMLKAIAANAEILKNYRTVGEMLCDNEKFRKRKRNRDGAYNFTVSRAMLMEEIHTLFEIQRNLGQKFADEKIEEEYVILFAAQRKFDEGPGENSPYAGNQIEKMIGSCTLEGKKEKRAPKASYAFMAFNLWQKINHLKINRRGSERFLTEEERRRIADLAWKKEKLTYGSLREVLFLDPEDRFVGLRYDLKKEKEEDLEEPVSEAEKMSFSWVKDYHSIRKALDKVEKNRILKLSHEQLDTIATAFSVYKNEETIEKYLEEGGIEKADREALLERLSGFSKFGHLSLKACYKILPFLEKGEVYSRACERAGYDFSKSSLENIDDIPNPVVKRSISQTLKVINAIILRYGNPVEVHIELARELARNFRDRKKMEKGMQENQAKNEKIRQRLISEFGVLRPKGMDIVKFKLCEEQNGECAYSQKHFDMEKLLRDPSYAEVDHIIPYSRSFDDSYNNKVLVLTKENREKRNRIPMEYLADAPERKNRFIHWVKSTIRNSRKRENLLRIDYTETTENEWKRRNLQDTQYISKYLYNYLRHHLVLAKGYTERKRRIIPVNGAVTAYFRKRLGINKIRENGDLHHAVDAVIIACATQGIVNKVSRYSKSRELWDYEVDMETGEVLQKKNKNTKDVFPEPWLNFRYELEQKVRVRPLDIPKTADITEMEEPFVSHMPNRKIHGPAHKETIRSGRLKEEGYTISKTALIDLKLTEDKEEIKGYYNKESDRLLYEALKKQLQRYGGKAKEAFKEPFHKPKADGTPGPIVNKVKIMEKSTMLIPVNGGKGLASNGNMVRIDVFRVEEKGKKKYYFIPVYVADTVKEELPNRAVLAHKPYEAWKIMKEEDFIFSLYPNDLIFVDAGKGIPFKAALKGSTLDPEKKASRFLMYYKGADIAGGTINGVNHDSTYGIRIGLQRLKGIRKCRIDVLGNISLVGKEKRKTFR

SEQ ID NO: 982 - protein, 768 aa, unidentified
  REGION 1..768: note = Description of Unknown: uncultivated organism with predicted taxonomy: Megasphaera stantonii
  REGION 1..768: note = MG15-55 effector
AGGDDGVMLKAIQQNKEVLSKYRSVGEMFDKDEKFSDHKRNKGGSYEFTVARSMLIDEIKLLFEKQRDFGSAFAEKDAEEGYIDLFSAQRNFDEGPGGDSPYGGNQIEKMIGLCTFEGKNGEKRAPKASYAFMATNLWQKINQIRIIEKGTERPLTAEEAGKIYEKAWNKEAMTYKDIRSEIGLGDEASFKGLPYKWTETDKEETEGKTKFSWVKEYHTLRKVLDKVEKNRILQLSHDDIDNIAYIFSVYKNDDKIREALEETDLDSKDIDVLIEKLGTFSKFGHLSLKACYKILPYLEQGMVYSDACTAAGYDFKKSAQGSIADIPNPVVKRAISQTMKVLKAIKQKYGCPPVEIHIEMARELAKSFDERQKMTKSIEENQSHNERIKERLQKEFNVPYPSGQDIVKLKLYEEQNETCAYSQKHIDAAKLFHDPNYAEVDHIIPYSRSFDDTYNNKVLVLTAENRQKGNRTPMEYLSGDEARKKQFVAWVKSDVKKPRKRENLLREKFTADAENDWKVRHLQDTQYISRFMLNYLQNNYELTPGNTNRKRRIIPVNGAVTAYVRKRLGISKIRENGDLHHAVDATVIAAVTQGVVNSVSKYSKRHELQYHVDEHGNCVDLVTGELMGDAFKENHKIKGFPEPWPQFRAELEARVSENAAEAIRILKLPTYSPDEEIKTPFVSRMVRHKTTGQAHEDTVRGKSNVADNVYVKKVALTELKLKDGEIEGYYNPSSDRLLYEALKKRLEQFGGKGKDAFKEPFHKPKADG

SEQ ID NO: 983 - protein, 1112 aa, unidentified; identical to SEQ ID NO: 965
  REGION 1..1112: note = Description of Unknown: uncultivated organism with predicted taxonomy: Selenomonas bovis
  REGION 1..1112: note = MG15-56 effector

SEQ ID NO: 984 - protein, 1081 aa, unidentified; identical to SEQ ID NO: 981
  REGION 1..1081: note = Description of Unknown: uncultivated organism with predicted taxonomy: Dialister
  REGION 1..1081: note = MG15-57 effector

SEQ ID NO: 985 - protein, 1094 aa, unidentified
  REGION 1..1094: note = Description of Unknown: uncultivated organism with predicted taxonomy: Dialister
  REGION 1..1094: note = MG15-58 effector
VDIFSKYFVQRREAIYVLGLDVGIASVGWAVLELNEEDNPIRIEGLGARIFDKAEVPKTGASLAAPRRMSRGIRRVIRRRRFRLQRVRSYLKRHNILPAEKVDHLYDVPSAIDIYELRKRALTEKVTAEEWARLLIFFAKHRGFKSNRKKASGDADEGEMLKAIAANAEILKNYRTVGEMLCDNEKFRKRKRNRDGAYNFTVSRAMLMEEIHTLFEIQRNLGQKFADEKIEEEYVILFAAQRKFDEGPGENSPYAGNQIEKMIGSCTLEGKKEKRAPKASYAFMAFNLWQKINHLKINRRGSERFLTEEERRRIADLAWKKEKLTYGSLREVLFLDPEDRFVGLRYDLKKEKEEDLEEPVSEAEKMSFSWVKDYHSIRKALDKVEKNRILKLSHEQLDTIATAFSVYKNEETIEKYLEEGGIEKADREALLERLSGFSKFGHLSLKACYKILPFLEKGEVYSRACERAGYDFRKSSLENIDDIPNPVVKRSISQTLKVINAIILRYGNPVEVHIELARELAKNFRDRKKMEKGMQENQAKNEKIRQRLMSEFGVLRPKGMDIVKFKLCEEQNGECAYSQKHFDMEKLLRDPSYAEVDHIIPYSRSFDDSYNNKVLVLTKENREKRNRIPMEYLADATERKNRFIHWVKSTIRNSRKRENLLRTDYTETTENEWKRRNLQDTQYISKYLYNYLRHHLVPAKGYTERKRRIIPVNGAVTAYIRKRLGINKIRENGDLHHAVDAVIIACATQGIVNKVSRYSKSRELWDYEVDMETGEVLQKKNENRKDIFPEPWLNFRYELEQKVRVRPLDIPETADITEMEEPFVSHMPNRKIHGPAHKETIRSGRLKEEGYTISKTALTDLKLTEDKEEIKGYYNKESDRLLYEALKKQLQRYSGKAKEAFKEPFHKPKADGTPGPIVNKVKIMEKSTMPVPVNGGKGLASNGNMVRIDVFQAEEKGKKKYYFIPVYVADTVKEELPNRAVLAHKPYEAWKIMKEEDFIFSLYPNDLIFVDAGKEIPFKAALKGSTLDPEKKASRFLMYYKGADIAGGTINGVNHDSTYGIRIGLQRLKGIRKCRIDVLGNISLVGKEKRKTFR

SEQ ID NO: 986 - protein, 1081 aa, unidentified; identical to SEQ ID NO: 973
  REGION 1..1081: note = Description of Unknown: uncultivated organism with predicted taxonomy: Dialister
  REGION 1..1081: note = MG15-59 effector

SEQ ID NO: 987 - protein, 1081 aa, unidentified; identical to SEQ ID NO: 952
  REGION 1..1081: note = Description of Unknown: uncultivated organism with predicted taxonomy: Megasphaera
  REGION 1..1081: note = MG15-60 effector

SEQ ID NO: 988 - protein, 1081 aa, unidentified; identical to SEQ ID NO: 952
  REGION 1..1081: note = Description of Unknown: uncultivated organism with predicted taxonomy: Dialister
  REGION 1..1081: note = MG15-61 effector

SEQ ID NO: 989 - protein, 1103 aa, unidentified; identical to SEQ ID NO: 945
  REGION 1..1103: note = Description of Unknown: uncultivated organism with predicted taxonomy: Megasphaera stantonii
  REGION 1..1103: note = MG15-62 effector

SEQ ID NO: 990 - protein, 1081 aa, unidentified
  REGION 1..1081: note = Description of Unknown: uncultivated organism with predicted taxonomy: Dialister
  REGION 1..1081: note = MG15-63 effector
MNYVLGLDVGIASVGWAVLELNEEDNPIRIEGLGARIFDKAEVPKTGASLAAPRRMSRGIRRVIRRRRFRLQRVRSYLKRHNILPAEKVDHLYDVPSAIDIYELRKRALTEKVTAEEWARLLIFFAKHRGFKSNRKKASGDADEGEMLKAIAANAEILKNYRTVGEMLCDNEKFRKRKRNRDGAYNFTVSRAMLMEEIHTLFEIQRNLGQKFADEKIEEEYVILFAAQRKFDEGPGENSPYAGNQIEKMIGSCTLEGKKEKRAPKASYAFMAFNLWQKINHLKINRRGSERFLTEEERRRIADLAWKKEKLTYGSLREVLFLDPEDRFVGLRYDLKKEKEEDLEEPVSEAEKMSFSWVKDYHSIRKALDKVEKNRILKLSHEQLDTIATAFSVYKNEETIEKYLEEGGIEKADREALLERLSGFSKFGHLSLKACYKILPFLEKGEVYSRACERAGYDFSKSSLENIDDIPNPVVKRSISQTLKVINAIILRYGNPVEVHIELARELARNFRDRKKMEKGMQENQAKNEKIRQRLISEFGVLRPKGMDIVKFKLCEEQNGECAYSQKHFDMEKLLRDPSYAEVDHIIPYSRSFDDSYNNKVLVLTKENREKRNRIPMEYLADAPERKNRLIHWVKSTIRNSRKRENLLRIDYTETTENEWKRRNLQDTQYISKYLYNYLRHHLVLAKGYTERKRRIIPVNGAVTAYFRKRLGINKIRENGDLHHAVDAVIIACATQGIVNKVSRYSKSRELWDYEVDMETGEVLQKKNENRKDIFPEPWLNFRYELEQKVRVRPLDIPETADITEMEEPFVSHMPNRKIHGPAHKETIRSGRLKEEGYTISKTALTDLKLTEDKEEIKGYYNKESDRLLYEALKKQLQRYSGKAKEAFKEPFHKPKADGTPGPIVNKVKIMEKSTMPVPVNGGKGLASNGNMVRIDVFRVEEKGKKKYYFIPVYVADTVKEELPNRAVLAHKPYEAWKIMKEEDFIFSLYPNDLIFVDAGKEIPFKAALKGSTLDPEKKASRFLMYYKGADIAGGTINGVNHDSTYGIRIGLQRLKGIRKCRIDVLGNISLVGKEKRKTFR

SEQ ID NO: 991 - protein, 1081 aa, unidentified
  REGION 1..1081: note = Description of Unknown: uncultivated organism with predicted taxonomy: Megasphaera
  REGION 1..1081: note = MG15-64 effector
MNYVLGLDVGIASVGWAVLELNEEDNPIRIEGLGARIFEKAEVPKTGASLAAPRRMSRGIRRVIRRRRFRLQRVRSYLKRHNILPAEKVDHLYDVPSAIDIYELRKRALTEKVTAEEWARLLIFFAKHRGFKSNRKKASGDADEGEMLKAIAANAEILKNYRTVGEMLCDNEKFRKRKRNRDGAYNFTVSRAMLMEEIHTLFEIQRNLGQKFADEKIEEEYVILFAAQRKFDEGPGENSPYAGNQIEKMIGSCTLEGKKEKRAPKASYAFMAFNLWQKINHLKINRRGSERFLTEEERRRIADLAWKKEKLTYGSLREVLFLDPEDRFVGLRYDLKKEKEENLEEPVSEAEKMSFSWVKDYHSIRKALDKVEKNRILKLSHEQLDTIATAFSVYKNEETIEKYLEEGGIEKADREALLERLSGFSKFGHLSLKACYKILPFLEKGEVYSRACERAGYDFRKSSLENINDIPNPVVKRSISQTLKVINAIILRYGNPVEVHIELARELAKNFRDRKKMEKGMQENQAKNEKIRQRLMSEFGVLRPKGMDIVKFKLCEEQNGECAYSQKHFDMEKLLRDPSYAEVDHIIPYSRSFDDSYNNKVLVLTKENREKRNRIPMEYLADATERKNRFIHWVKSTIRNSRKRENLLRTDYTETTENEWKRRNLQDTQYISKYLYNYLRHHLVPAKGYTERKRRIIPVNGAVTAYIRKRLGINKIRENGDLHHAVDAVIIACATQGIVNKVSRYSKSRELWDYEVDMETGEVLQKKNENRKDIFPEPWLNFRYELEQKVRVRPLDIPETADITEMEEPFVSHMPNRKIHGPAHKETIRSGRLKEEGYTISKTALTDLKLTEDKEEIKGYYNKESDRLLYEALKKQLQRYSGKAKEAFKEPFHKPKADGTPGPIVNKVKIMEKSTMPVPVNGGKGLASNGNMVRIDVFRVEEKGKKKYYFIPVYVADTVKEELPNRAVLAHKPYEAWKIMKEEDFIFSLYPNDLIFVDAGKEIPFKAALKGSTLDPEKKASRFLMYYKGADIAGGTINGVNHDSTYGIRIGLQRLKGIRKCRIDVLGNISLVGKEKRKTFR

SEQ ID NO: 992 - protein, 1082 aa, unidentified; identical to SEQ ID NO: 955
  REGION 1..1082: note = Description of Unknown: uncultivated organism with predicted taxonomy: Dialister
  REGION 1..1082: note = MG15-65 effector

SEQ ID NO: 993 - protein, 1103 aa, unidentified
  REGION 1..1103: note = Description of Unknown: uncultivated organism with predicted taxonomy: Megasphaera micronuciformis
  REGION 1..1103: note = MG15-66 effector
MDTKELKYVVGLDIGITSVGWATLLLDSQDEPVRILDLNSRIFDKAEVPKTGASLAAPRRMARGVRRRLRRRKFRLHRVRQYILRHHILDKAGLECLYKPKTDIDIFALRTAGLDRLLEPEEWARILLYMAKHRGFKSNRKSAAVAGGDDGVMLDAIRKNKEVLSKYRSVGEMFDKDEKFSAHKRNKGGSYEFTVARSMLEDEIKLLFEKQRDFGSAFAEKDAEEEYIELFSAQRNFDEGPGGDSPYGGNQIEKMIGLCTFEGKNGEKRAPKASYAFMATNLWQKINQIRIIEKGTERPLTAEEAGKIDEKAWKKEAMTYKDIRSEISLGDEAYFKGLSYKWTEADKEETESKVKFSLVKEYHTLRKVLDRVEKNRILQLSHDDIDNIAYIFSVYKNDDKIREALEETDLDSKDIDVLIEHLGTFSKFGHLSLKACYKILPYLEQGMVYSDACTAAGYDFRKSAQGSIADIPNPVVKRAISQTMKVLKAIKQKYGCPPVEIHIEMARELAKSFDERQKMTKSIEENQSHNERIKERLQKEFNVPYPSGQDIVKLKLYEEQNETCAYSQKHIDAAKLFHDPNYAEVDHIIPYSRSFDDTYNNKVLVLTAENRQKGNRTPMEYLSGDEARKKQFVAWVKSDIKKPRKRENLLREKFTADAENDWKARHLQDTQYISRFMLNYLQNNYELTPGNTDRKRRIIPVNGAVTAYVRKRLGISKIRENGDLHHAVDAAVIAAVTQGVVNSVSKYSKRHELQYHVDEHGNCVDLVTGELMGDAFKENHKIKGFPEPWPQFRAELEARVSENAAEAIRILKLPTYSPDEEIKTPFVSRMVRHKTTGQAHEDTVRGKSNVADNVYVKKVALTELKLKDGEIEGYYNPSSDRILYEALKKRLEQFGGKGKDAFKEPFHKPKSDGSPGPIVKKCKVLDKINLAVQVHGGNGATSNANGSMIRVDIFKVKEKNDKSSYYAVPIYVADTVKSELPKKAVCQKPYDEWPEMKEADFAFSLYPNDVIYIGGKELKMNAVLGCTLETTRSMQDVNLYFKGMDISTGAIQVVNHDGTYKQRSLGIKQLPLIEKCEVSVLGDLVKAQYRPRETFKHKAQRSK

SEQ ID NO: 994 - protein, 1053 aa, unidentified
  REGION 1..1053: note = Description of Unknown: uncultivated organism with predicted taxonomy: Megasphaera stantonii
  REGION 1..1053: note = MG15-67 effector
APRRMARGVRRRLRRRKFRLHRVRQYILRHHILDKAGLECLYKPKMDIDIFALRTAGLDRLLEPEEWARILLYMAKHRGFKSNRKSTAVAGGDDGIMLKAIQQNKEVLSKYRSVGEMFDKDEKFSDHKRNKGGSYEFTVARSMLVDEIKLLFEKQRDFGLAFAEKDAEEEYIELFSAQRNFDEGPGGDSPYGGNQIEKMIGLCTFEGKNGEKRAPKASYAFMATNLWQKINQIRIIEKGTERPLTAEEAGKIDEKAWKKEAMTYKDIRSEISLGDEASFKGLPYKWTETDKEETESKAKFSWVKEYHTLRKVLDKVEKNRILQLSHDDIDNIAYIFSVYKNDDKIREALEGTHLDSKDIDVLIENLGTFSKFGHLSLKACYNILPYLEQGMVYSDACTAAGYDFRKSAQGSIADIPNPVVKRAISQTMKVLKAIKQKYGCPPVEIHIEMARELAKSFDERQKMAKSIEENQSHNERIKERLQKEFNVPYPSGQDIVKLKLYEEQNETCAYSQKHMDAHRLFHEDNYAEVDHIIPYSRSFDDTYNNKVLVLTAENRQKGNRTPMEYLSGDEARKKQFVAWVKSDIKKPRKRENLLREKFTTDAENDWKIRHLQDTQYISRFMLNYLQNNYELTPGNTDRKRRIIPVNGAVTAYVRKRLGISKIRENGDLHHAVDAAVIAAVTQGVVNSVSKYSKRHELQYHVDEHGNCVDLVTGELMGDAFKENHKIKGFPEPWPQFRAELEARVSENAAEAIRILKLPTYSPDEEIKTPFVSRMVRHKTTGQAHEDTVRGKSNVADNVYVKKVALTELKLKDGEIEGYYNPSSDRLLYEALKKRLEQFGGKGKDAFKEPFHKPKSDGSPGPIVKKCKVLDKINLAVQVHGGKGITKNAGGSMVRVDVFKVKKSNGGHQYYLVPIYVADTVKERLPNRAVMAHKEYDEWKIVDDKDFVFSLYPNDLLFIGGKEIKLNGTGGDTLHQGIMVQNVYLYYRGLNIAVGTISVEDHDSKYIQESLGVGRVPVLEKYEVSVLGDLIKAQYRPRETFKHKAQRTKDQVNV

SEQ ID NO: 995 - protein, 1081 aa, unidentified
  REGION 1..1081: note = Description of Unknown: uncultivated organism with predicted taxonomy: Veillonellaceae bacterium DNF00626
  REGION 1..1081: note = MG15-68 effector
MNYVLGLDVGIASVGWAVLELDEKDEPIRIIDLSSRIFDKAEVPRTGASLAQARRIARGVRRRLRRRRFRLHRVRSYLIRQSILTKEELQNIYHCSHEESIYELRYKGLSEKLSATNWGRLLLFFAKHRGFRSNRKNDQSKEDGLMLKAISENEELLKKYRTVGEMIYSDEKFKEYKRNKGGNYQFTVSRSMLIDEIKMLFETQRKLGQFFAEQELEEKYLDIFSAQRNFDEGPGGNGFYSGNQIEKKIGVCTFEKGENGENPPKRAPKASYAFMAFTLWGKINHLRINSKGTRRALTQEEKEKVAKLSWEKASINFSTIRKELQLSPEDHFIDVRYTYGKTDEECEKGTKWNYCASYHTMRKALDKVYKNRIKELMSEQDEQKQLDDIAYAFTVYKSDEKIKNYLLQCQLEEKDAEALLAGVNNFSGFGHLSNKACYKILLHLKQGYEYAKACEMAGYDFKNISLEDIKDIPNPVVKRAIIQTLKVVRAVVREYGNPVEVHIELARDLGRNFKDRDLIKSNMEKNQKKNDEIKERIVNEFGIMQPKSQDIVKLKLCEQQDNVCVYSQKSFDLHRLFEKNYVEVDHIIPYSRSFDDTYANKVLVFNKENRDKGNKLPLEYLANQPERKEKFIAWVKSHIKDRKKRDNLLRESYSAEDKNGWKQRNLQDTQYISSYLYRYLMQNITLAPGYTDRKERIISLNGVVTGYVRKRWRIPKIRANGDLHHAVDAVVIACINDRLIKRVTEYSKAKELEYTPSDSGAVKTSMKDGFPEPWYCFRQELKARLSETPDEAIRNLHLATYCNVGNIKTPFVSRMLKCKVTGQANKETIGSGRLKDEEYVIEKTLLTELKLDKNNEIEGYYRPEDDKLLYEALKKQLMNHGGKGDKAFQAPFYKPKSDGTPGPLVKKVKLKVKLNSQVHVYQGKGIAQNGDMIRIDVFCVNKKGKKAYYFVPIYVADTVKKELPGKAVVSGKPYSAWKPMDDKDFIFSLYKNNLIYIEFNKPKSFVAEEGCTLSQTVDVKKAFLYYIKADRFAGTITVVNHDNTYKTRTGIKNTLLRFKKCVVDPLGRISFVEKEKRQRFQ

SEQ ID NO: 996 - protein, 1087 aa, unidentified
  REGION 1..1087: note = Description of Unknown: uncultivated organism with predicted taxonomy: Dialister
  REGION 1..1087: note = MG15-69 effector
MNYVLGLDVGITSCGWAVLELNHEDEPVRIVDLNSRIFDKAEAPKTGESLAAPRRMARGIRRLTRRRKFRLHRVRGFLVRHHILTKEEIENLYTTPHKTDIYELRYRALTEKVSPSDWARLLIFFAKHRGFQSNRKNEKSGEDGLMLAAIGENKKILENYRSVGDMLYSDEKFKDCKRNKGGTYRFTVSRSMLKEEVQTLFKKQRELGQTFAGEDLEDEYISIFSAQRNFDEGPGANSPYAGDQIEKMIGDCTFEDGKNGRPPQKRAPKASYAFMAFNLWQKINHIRVNCKGIERSLETEEKNKIVGLAWTKENITYHDLRQITGLDEETRFSGVTYPLDSTTEEAEKKVKFSWVKPYHAMRRALDKVEKNYIQKLSREEIDAIAYAFTVYKNDRKIRTALTEKGIEDNVADVLITHLDGFSKFGHLSKYACYKLLPFLKKGEEYYKACESAGYDFRKSSMEKLEDIPNPVVKRAVTQTMKVIKAVQRKYGNPVEVHIELARELARSFKDRAAMDDRMKENHAKNEEIKEYLSKELHVMSPTGQDIVKWKLYKQQQGYCAYSQKLFDVDKLLHDRTYAEVDHILPYSRSFDDTYRNKVLVLTKENRDKGNRTPMEYLADKPERKEKFIAWVKTTIKDSKKREHLLRVKYGRDEEAEWKQRHLQDTQYISRFLYNYLRNTLELTPGYTDRKRRIIPVNGAVTGYIRKRLGIHKIRENGDLHHAVDAVVIAATTQGMIQKVTRYSQIKENETWIDDHTKVDERTGEIFFVKKAHEKDAFPEPWPRFRQELEARVSEDPEETIRRLRLPSYENAGEIKKPFVSRMPRRKVRGAAHKETVRSGKLREDGCTILKTDLSALKLKNGEIEGYYRPESDRLLYEALKKRLEAFGGKGKEAFKEPFYKPKADGTPGPLVKKVKIIEKSSLNVPVHKGQGVAYNDTMVRIDIFGVNEKGKNAYYFVPVYVSDTVKKELPCRAVVAHKPYEEWKVMDDKDFLFSLYPNDMIHVVAKREIPFTAAKGSDLEPKIQIKDTFVYYVGANIATGNIAVISHDHSYEQGSMGIKTLSQLEKCEIDVLGNVSFVKQEKRQGFR

SEQ ID NO: 997 - protein, 1082 aa, unidentified; identical to SEQ ID NO: 938
  REGION 1..1082: note = Description of Unknown: uncultivated organism with predicted taxonomy: Dialister
  REGION 1..1082: note = MG15-70 effector

SEQ ID NO: 998 - protein, 1081 aa, unidentified; identical to SEQ ID NO: 973
  REGION 1..1081: note = Description of Unknown: uncultivated organism with predicted taxonomy: Dialister
  REGION 1..1081: note = MG15-71 effector

SEQ ID NO: 999 - protein, 1082 aa, unidentified; identical to SEQ ID NO: 950
  REGION 1..1082: note = Description of Unknown: uncultivated organism with predicted taxonomy: Dialister
  REGION 1..1082: note = MG15-72 effector

SEQ ID NO: 1000 - protein, 1081 aa, unidentified; identical to SEQ ID NO: 951
  REGION 1..1081: note = Description of Unknown: uncultivated organism with predicted taxonomy: Dialister invisus
  REGION 1..1081: note = MG15-73 effector

SEQ ID NO: 1001 - protein, 1081 aa, unidentified; identical to SEQ ID NO: 951
  REGION 1..1081: note = Description of Unknown: uncultivated organism with predicted taxonomy: Dialister
  REGION 1..1081: note = MG15-74 effector

SEQ ID NO: 1002 - protein, 1081 aa, unidentified; identical to SEQ ID NO: 951
  REGION 1..1081: note = Description of Unknown: uncultivated organism with predicted taxonomy: Dialister invisus
  REGION 1..1081: note = MG15-75 effector

SEQ ID NO: 1003 - protein, 1082 aa, unidentified; identical to SEQ ID NO: 953
  REGION 1..1082: note = Description of Unknown: uncultivated organism with predicted taxonomy: Dialister
  REGION 1..1082: note = MG15-76 effector

SEQ ID NO: 1004 - protein, 1081 aa, unidentified; identical to SEQ ID NO: 981
  REGION 1..1081: note = Description of Unknown: uncultivated organism with predicted taxonomy: Dialister invisus
  REGION 1..1081: note = MG15-77 effector

SEQ ID NO: 1005 - protein, 1081 aa, unidentified; identical to SEQ ID NO: 951
  REGION 1..1081: note = Description of Unknown: uncultivated organism with predicted taxonomy: Dialister
  REGION 1..1081: note = MG15-78 effector

SEQ ID NO: 1006 - protein, 1003 aa, unidentified
  REGION 1..1003: note = Description of Unknown: uncultivated organism with predicted taxonomy: Megasphaera stantonii
  REGION 1..1003: note = MG15-79 effector
MNYVLGLDVGIASVGWAVLELNEEDNPIRIEGLGARIFDKAEVPKTGASLAAPRRMSRGIRRVIRRRRFRLQRVRSYLKKHNILPAEKVDHLYDVPSAIDIYELRKRALTEKVTAEEWARLLIFFAKHRGFKSNRKKASGDADEGEMLKAIAANAEILKNYRTVGEMLCDNEKFRKRKRNRDGAYNFTVSRAMLMEEIHTLFEIQRNLGQKFADEKLEEEYVILFAAQRKFDEGPGENSPYAGNQIEKMIGSCTLEGKKEKRAPKASYAFMAFNLWQKINHLKVNRRGSERFLTEEERRRIADLAWKKEKLTYGSLRKVLSLDPEDRFVGLRYDLKKGKAENLEEPVSEAEKRSFSWVKDYHSIRKALDKVEKNRILKLSHEQLDTIATAFSVYKNEETIEKYLEEGGIGKADGEALLERLSGFSKFGHLSLKACYKLLPFLEKGEVYSRACELAGYDFSKSSLENIDDIPNPVVKRSISQTLKVINAIILRYGNPVEVHIELARELARSFRDRKKMEKGMQENQAKNEKIRQRLISEFGVLRPKGMDIVKFKLCEEQNGECAYSQKHFDMEKLLKDPSYAEVDHIIPYSRSFDDSYNNKVLVLTKENREKRNRIPMEYLADAPERKNRFIHWVKSTIRNSRKRENLLRTDYTATTENEWKRRNLQDTQYISKYLYNYLRHHLVLAKGYTERKRRIIPVNGAVTAYFRKRLGINKIRENGDLHHAVDAVIIACATQGIVNKVSRYSKSRELWDYEVDMETGEVLQKKNKNTKDVFPEPWLNFRYELEQKVRVRPLDIPETADITEMEEPFVSHMPNRKIHGPAHKETIRSGRLKEEGYTISKTALIDLKLTEDKEEIKGYYNKESDRLLYEALKKQLQRYGGKAKEAFKEPFHKPKADGTPGPIVNKVKIMEKSTMLIPVNGGKGLASNGNMVRIDVFRAEEKGKKKYYFLPVYVADTVKEELPNRAVLAHKPYEAWKIMKEEDFIFSLFAIDLIFVDAGKEI

SEQ ID NO: 1007 - protein, 1081 aa, unidentified; identical to SEQ ID NO: 940
  REGION 1..1081: note = Description of Unknown: uncultivated organism with predicted taxonomy: Megasphaera sp. AM44-1BH
  REGION 1..1081: note = MG15-80 effector

SEQ ID NO: 1008 - protein, 1082 aa, unidentified; identical to SEQ ID NO: 947
  REGION 1..1082: note = Description of Unknown: uncultivated organism with predicted taxonomy: Megasphaera
  REGION 1..1082: note = MG15-81 effector

SEQ ID NO: 1009 - protein, 1081 aa, unidentified; identical to SEQ ID NO: 940
  REGION 1..1081: note = Description of Unknown: uncultivated organism with predicted taxonomy: Megasphaera sp. AM44-1BH
  REGION 1..1081: note = MG15-82 effector

SEQ ID NO: 1010 - protein, 1081 aa, unidentified; identical to SEQ ID NO: 995
  REGION 1..1081: note = Description of Unknown: uncultivated organism with predicted taxonomy: Veillonellaceae bacterium DNF00626
  REGION 1..1081: note = MG15-83 effector

SEQ ID NO: 1011 - protein, 1081 aa, unidentified; identical to SEQ ID NO: 940
  REGION 1..1081: note = Description of Unknown: uncultivated organism with predicted taxonomy: Dialister
  REGION 1..1081: note = MG15-84 effector

SEQ ID NO: 1012 - protein, 1081 aa, unidentified; identical to SEQ ID NO: 940
  REGION 1..1081: note = Description of Unknown: uncultivated organism with predicted taxonomy: Dialister
  REGION 1..1081: note = MG15-85 effector

SEQ ID NO: 1013 - protein, 1082 aa, unidentified; identical to SEQ ID NO: 954
  REGION 1..1082: note = Description of Unknown: uncultivated organism with predicted taxonomy: Dialister
  REGION 1..1082: note = MG15-86 effector

SEQ ID NO: 1014 - protein, 1082 aa, unidentified; identical to SEQ ID NO: 958
  REGION 1..1082: note = Description of Unknown: uncultivated organism with predicted taxonomy: Dialister
  REGION 1..1082: note = MG15-87 effector

SEQ ID NO: 1015 - protein, 1081 aa, unidentified
  REGION 1..1081: note = Description of Unknown: uncultivated organism with predicted taxonomy: Megasphaera sp. AM44-1BH
  REGION 1..1081: note = MG15-88 effector
MNYVLGLDVGIASVGWAVLELNEEDNPIRIEGLGARIFDKAEVPKTGASLAAPRRMSRGIRRVIRRRRFRLQRVRSYLKRHNILPAEKVDHLYDVPSAIDIYELRKRALTEKVTAEEWARLLIFFAKHRGFKSNRKKASGDADEGEMLKAIAANAELLKNYRTVGEMLCDNEKFRKRKRNRDGAYNFTVSRAMLIEEIHTLFEIQRNLGQKFADEKLEEEYVILFVAQRKFDEGPGENSPYAGNQIEKMIGSCTLEGKKEKRAPKASYAFMAFNLWQKINHLKINRRGSERFLTEEERRRIADLAWKKEKLTYGSLREVLFLDPEDRFVGLRYDLKKEKEEDLEEPVSEAEKMSFSWVKDYHSIRKALDKVEKNRILKLSHEQLDTIATAFSVYKNEETIEKYLEEGGIEKADREALLERLSSFSKFGHLSLKACYKILPFLEKGEVYSRACERAGYDFRKSSLENINDIPNPVVKRSISQTLKVINAIILRYGNPVEVHIELARELAKNFRDRKKMEKGMQENQAKNEKIRQRLMSEFGVLRPKGMDIVKFKLCEEQNGECAYSQKHFDMEKLLRDPSYAEVDHIIPYSRSFDDSYNNKVLVLTKENRKKRNRIPMEYLADATERKNRFIHWVKSTIRNSRKRENLLRTDYTETTENEWKRRNLQDTQYISKYLYNYLRHHLVLAKGYTERKRRIIPVNGAVTAYIRKRLGINKIRENGDLHHAVDAVIIACATQGIVNKVSRYSKSRELWDYEVDMETGEVLQKKNENRKDIFPEPWLNFRYELEQKVRVRPLDIPETADITEMEEPFVSHMPNRKIHGPAHKETIRSGRLKEEGYTISKTALTDLKLTEDKEEIKGYYNKESDRLLYEALKKQLQRYSGKAKEAFKEPFHKPKADGTPGPIVNKVKIMEKSTMPVPVNGGKGLASNGNMVRIDVFRVEEKGKKKYYFIPVYVADTVKEELPNRAVLAHKPYEAWKIMKEEDFIFSLYPNDLIFVDAGKEIPFKAALKGSTLDPEKKASRFLMYYKGADIAGGTINGVNHDSTYGIRIGLQRLKGIRKCRIDVLGNISLVGKEKRKTFR

SEQ ID NO: 1016 - protein, 1082 aa, unidentified; identical to SEQ ID NO: 944
  REGION 1..1082: note = Description of Unknown: uncultivated organism with predicted taxonomy: Dialister
  REGION 1..1082: note = MG15-89 effector

SEQ ID NO: 1017 - protein, 1081 aa, unidentified; identical to SEQ ID NO: 941
  REGION 1..1081: note = Description of Unknown: uncultivated organism with predicted taxonomy: Dialister
  REGION 1..1081: note = MG15-90 effector

SEQ ID NO: 1018 - protein, 1094 aa, unidentified; identical to SEQ ID NO: 985
  REGION 1..1094: note = Description of Unknown: uncultivated organism with predicted taxonomy: Dialister
  REGION 1..1094: note = MG15-91 effector

SEQ ID NO: 1019 - protein, 840 aa, unidentified; identical to SEQ ID NO: 943
  REGION 1..840: note = Description of Unknown: uncultivated organism with predicted taxonomy: Firmicutes
  REGION 1..840: note = MG15-92 effector

SEQ ID NO: 1020 - protein, 1103 aa, unidentified
  REGION 1..1103: note = Description of Unknown: uncultivated organism with predicted taxonomy: Megasphaera micronuciformis
  REGION 1..1103: note = MG15-93 effector
MDPKELKYVVGLDIGITSVGWATLLLDSQDEPVRILDLNSRIFDKAEVPKTGASLAAPRRMARGVRRRLRRRKFRLHRVRQYILRHHILAKAGLDCLYKPKTDIDIFALRTAGLDRLLEPEEWARILLYMAKHRGFKSNRKSTAVAGGDDGVMLKAIQQNKEVLSKYRSVGEMFDKDEKFSDHKRNKGGSYEFTVARSMLVDEIKLLFEKQRDFGLAFAEKDAEEEYIELFSAQRNFDEGPGGDSPYGGNQIEKMIGLCTFEGKNGEKRAPKASYAFMATNLWQKINQIRIIEKGTERPLTAEEAGKIDEKAWKKEAMTYKDIRFEISLGDEASFKGLPYKWTETDKEETESKAKFSWVKEYHTLRKVLDKVEKNRILQLSHDDIDNIAYIFSVYKNDDKIREALEGTDLDSKDIDVLIENLGTFSKFGHLSLKACYMILPYLEQGLVYSDACTAAGYDFRKSAQGSIADIPNPVVKRAISQTMKVLKAIKQKYGCPPVEVHIEMARELAKSFDERQKMTKSIEENQSHNERIKERLQKEFNVPYPSGQDIVKLKLYEEQNETCAYSQKHIDAAKLFHDRNYAEVDHIIPYSRSFDDTYNNKVLVLTAENRQKGNRTPMEYLSGDEARKKQFVAWVKSDIKKPRKRENLLREKFTADAENDWKARHLQDTQYISRFMLNYLQNNYELTPGNTDRRRRIIPVNGAVTAYVRKRLGISKIRENGDLHHAVDAAVIAAVTQGVVNSVSRYSKRHELQYHVDEHGNCVDLVTGELMGDAFKENHKIKGFPEPWPQFRAELEARVSENAAEAIRILNLPTYSPDEEIKTPFVSRMVRHKTTGQAHEDTVRGKSNVADNVYVKKVALTELKLKDGEIEGYYNPSSDRLLYEALKKRLEQFGGKGKDAFKEPFHKPKSDGSPGPIVKKCKVLDKINLAVQVHGGNGATSNANGSMIRVDIFKVQEKNGKHSYYSVPIYVADTVKAELPKKAVYRRPYDEWPEMKEADFAFSLYPNDAIYIGGKEIKMNAMPGCTLETTRSMQDVNLYFRGMDISTGAIRVVNHDGTYEQRSLGIKQLPIIEKYEVSVLGDLVKAMYSPRETFKHKAQRAK

SEQ ID NO: 1021 - protein, 1081 aa, unidentified; identical to SEQ ID NO: 979
  REGION 1..1081: note = Description of Unknown: uncultivated organism with predicted taxonomy: Dialister
  REGION 1..1081: note = MG15-94 effector

SEQ ID NO: 1022 - protein, 1081 aa, unidentified; identical to SEQ ID NO: 952
  REGION 1..1081: note = Description of Unknown: uncultivated organism with predicted taxonomy: Dialister
  REGION 1..1081: note = MG15-95 effector

SEQ ID NO: 1023 - protein, 1103 aa, unidentified
  REGION 1..1103: note = Description of Unknown: uncultivated organism with predicted taxonomy: Megasphaera micronuciformis
  REGION 1..1103: note = MG15-96 effector
MDPKELKYVVGLDIGITSVGWATLLLDSQDEPVRILDLNSRIFDKAEVPKTGASLAAPRRMARGVRRRLRRRKFRLHRVRQYILRHHILDKAGLECLYKPKTDIDIFALRTAGLDRLLEPEEWARILLYMAKHRGFKSNRKSTAVAGGEDGVMLKAIQQNKEVLSKYRSVGEMFDKDEKFSDHKRNKGGSYEFTVARSMLEDEIKLLFEKQRDFGSAFAEKDAEEEYIDLFSAQRNFDEGPGGDSPYGGNQIEKMIGLCTFEGKNGEKRAPKASYAFMATNLWQKINQIRIIEKGTERPLIAEEAGKIYEKAWNKEAMTYKDIRSEISLGDEASFKGLPYKWTETDKEETEGKAKFSWVKEYHTLRKVLDKVEKNRILQLSHDNIDNIAYIFSVYKNDDKIREALEETDLDSKDIDVLIEKLGTFSKFGHLSLKACYKILPYLEQGMVYSDACTAAGYDFKKSAQGSIADIPNPVVKRAISQTMKVLKAIKQKYGCPPVEIHIEMARELAKSFDERQKMTKSIEENQSHNERIKERLQKEFNVPYPSGQDIVKLKLYEEQNEICAYSQKHIDAAKLFHDPNYAEVDHIIPYSRSFDDTYNNKVLVLTAENRQKGNRTPMEYLSGDEARKKQFVAWVKSDIKKPRKRENLLREKFTTDAENDWKARHLQDTQYISRFMLNYLQNNYELTPGNTDRKRRIIPVNGAVTAYVRKRLGISKIRENGDLHHAVDAAVIAAVTQGVVNSVSKYSKRHELQYHVDEHGNCVDLVTGELMGDAFKENHKIKGFPEPWPQFRAELEARVSENAAEAIRILKLPTYSPDEEIKTPFVSRMVRHKTTGQAHEDTVRGKSNVADNVYVKKVALTELKLKDGEIEGYYNPSSDRLLYEALKKRLEQFGGKGKDAFKEPFHKPKADGSPGPIVKKCKVIDKINLAVQVHGGKGATANANGSMIRVDIFKVQEKNGKSYYYAVPIYVADTVKSELPKKAVYRRPYDEWPEMKEADFAFSLYPNDVVYIGGKEIKMNVMPGCTLESEKSMRDEVLYFKGLDIATGTIRVVNHDGTYKQKSLGIKQLSIIEKYEVSVLGDLVKAMYSPRETFKHKAQRAK

SEQ ID NO: 1024 - protein, 1104 aa, unidentified; identical to SEQ ID NO: 946
  REGION 1..1104: note = Description of Unknown: uncultivated organism with predicted taxonomy: Megasphaera micronuciformis
  REGION 1..1104: note = MG15-97 effector

SEQ ID NO: 1025 - protein, 1082 aa, unidentified; identical to SEQ ID NO: 953
  REGION 1..1082: note = Description of Unknown: uncultivated organism with predicted taxonomy: Dialister
  REGION 1..1082: note = MG15-98 effector

SEQ ID NO: 1026 - protein, 1104 aa, unidentified
  REGION 1..1104: note = Description of Unknown: uncultivated organism with predicted taxonomy: Megasphaera micronuciformis
  REGION 1..1104: note = MG15-99 effector
MDTKELKYVVGLDIGITSVGWATLLLDSQDEPVRILDLNSRIFDKAEVPKTGASLAAPRRMARGVRRRLRRRKFRLHRVRQYILRHHILDKAGLECLYKPKTDIDIFALRTAGLDRQLKPEEWARILLYMAKHRGFKSNRKSAAVAGGDDGVMLKAIQQNKEVLSKYRSVGEMFDKDEKFSDHKRNKDGSYEFTVARSMLEDEIKLLFEKQRDFGSVFAKKDAEEEYIDLFSAQRNFDEGPGGDSPYGGNQIEKMIGLCTFEGKNGEKRAPKASYAFMATNLWQKINQIRIIEKGTERPLTAEEAGKIYEKAWNKEAMTYKDIRSEISLGDEASFKGLPYKWTETDKEETEGKAKFSWVKEYHTLRKVLDKVEKNRILQLSHDNIDNIAYIFSVYKNDDKIREALEGTDLDSKDIDVLIENLGTFSKFGHLSLKACYKILPYLEQGMVYSDACTAAGYDFRKSAQGSIADIPNPVVKRAISQTMKVLKAIKQKYGCPPVEIHIEMARELAKSFDERQKMTKSIEENQSHNERIKERLQKEFNVPYPSGQDIVKLKLYEEQNETCAYSQKHIDAAKLFHDPNYAEVDHIIPYSRSFDDTYNNKVLVLTAENRQKGNRTPMEYLSGDEARKKQFVAWVKSDIKKPRKRENLLREKFTADAENDWKARHLQDTQYISRFMLNYLQNNYELTPGNTDRKRRIIPVNGAVTAYVRKRLGISKIRENGDLHHAVDAAVIAAVTQGVVNSVSKYSKRHELQYHVDEHGNCVDLVTGELMGDAFKENHKIKGFPEPWPQFRAELEARVSENAAEAIRILKLPTYSPDEEIKTPFVSRMVRHKTTGQAHEDTVRGKSNVADNVYVKKVALTELKLKDGEIEGYYNPSSDRLLYEALKKRLEQFGGKGKDAFKEPFHKPKSDGSPGPIVKKCKVLDKINLAVPVHDGKGITKNAGGSMVRVDVFKVKKSNGGHQYYLVPIYVSDTVKERLPNRAVMAHKEYDEWKIVDDKDFVFSLYSNDLLFIGGKEIKLNGTGGDTLHQGIMVQNVYLYYRGLNIAAGTISVEDHDSKYIQESLGVGRVPVLEKYEVSVLGDLIKAPYRPRETFKHKAQRSK

SEQ ID NO: 1027 - protein, 1103 aa, unidentified; identical to SEQ ID NO: 945
  REGION 1..1103: note = Description of Unknown: uncultivated organism with predicted taxonomy: Megasphaera stantonii
  REGION 1..1103: note = MG15-100 effector

SEQ ID NO: 1028 - protein, 1081 aa, unidentified; identical to SEQ ID NO: 952
  REGION 1..1081: note = Description of Unknown: uncultivated organism with predicted taxonomy: Dialister
  REGION 1..1081: note = MG15-101 effector

SEQ ID NO: 1029 - protein, 1082 aa, unidentified; identical to SEQ ID NO: 953
  REGION 1..1082: note = Description of Unknown: uncultivated organism with predicted taxonomy: Megasphaera
  REGION 1..1082: note = MG15-102 effector

SEQ ID NO: 1030 - protein, 1089 aa, unidentified; identical to SEQ ID NO: 968
  REGION 1..1089: note = Description of Unknown: uncultivated organism with predicted taxonomy: Megasphaera sp. AM44-1BH
  REGION 1..1089: note = MG15-103 effector

SEQ ID NO: 1031 - protein, 1082 aa, unidentified
  REGION 1..1082: note = Description of Unknown: uncultivated organism with predicted taxonomy: Dialister
  REGION 1..1082: note = MG15-104 effector
MNYVLGLDVGIASVGWAVLELNEEDNPIRIEGLGARIFDKAEVPKTGASLAAPRRMSRGIRRVIRRRRFRLQRVRSYLKRHNILPAEKVDHLYDVPSAIDIYELRKRALTEKVTAEEWARLLIFFAKHRGFKSNRKKASGDADEGEMLKAIAANAEILKNYRTVGEMLCDNEKFRKRKRNRDGAYNFTVSRAMLMEEINTLFEIQRNLGQKFADEKLEEEYVILFASQRKFDEGPGENSPYAGNQIEKMIGSCTLEGKKEKRAPKASYVFMAFNLWQKINHLKVNRRGSERFLTEEERRRIADLAWKKEKLTYGSLRKVLSLDPEDRFVGLRYDLKKGKAENLEEPVSEAEKRSFSWVKDYHSIRKALDKVEKNRILKLSHEQLDTIATAFSVYKNEETIERYLEEGGIGKADREALLERLSGFSKFGHLSLKACYKLLPFLEKGEVYSRACELAGYDFSKSSLENIDDIPNPVVKRSISQTLKVINAIILRYGNPVEVHIELARELARNFRDRKKMEKGMQENQAKNEKIRQRLISEFGVLRPKGMDIVKFKLCEEQNGECAYSQKHFDMEKLLKDPSYAEVDHIIPYSRSFDDSYNNKVLVLTKENREKRNRIPMEYLADAPERKNRFIHWVKSTIRNSRKRENLLRTDYTATTENEWKRRNLQDTQYISKYLYNYLRHHLVLAKGYTERKRRIIPVNGAVTAYFRKRLGINKIRENGDLHHAVDAVIIACATQGIVNKVSRYSKSRELWDYEVDMETGEVLQKKNKNTKDVFPEPWLNFRYELEQKVRVRPLDIPETADITEMEEPFVSHMPNRKIHGPAHKESIRSGRLKEEGYTISKTALIDLKLTGDKEEIKGYYNKESDRLLYEALKKQLQRYGGKAKEAFKEPFHKPKADGTPGPIVNKVKIMEKSTMLIPVNDGKGLASNGNMVRIDVFRVEEKGKKKYYFIPVYVADTVKEELPNRAVLAHKPYEAWKIMKEEDFIFSLYPNDLIFVDAGKEIPFKAALKGSTLDPEKKVSRFLMYYKGADIATGSISGVNHDETYKARGVGIQSLREIKKCCIDVLGNISFASKEKRQTFR

SEQ ID NO: 1032 - protein, 1075 aa, unidentified
  REGION 1..1075: note = Description of Unknown: uncultivated organism with predicted taxonomy: Megasphaera micronuciformis
  REGION 1..1075: note = MG15-105 effector
MDTKEMKYVVGLDIGITSVGWATLLLDSQDEPVRILDLNSRIFDKAEVPKTGASLAAPRRMARGVRRRLRRRKFRLHRVRQYILRHHILDKAGLECLYKPKTDIDIFALRTAGLDRLLEPEEWARILLYMAKHRGFKSNRKSAAVAGGDDGDMLDAIRKNKEVLSKYRSVGEMFDKDEKFSDHKRNKGGSYEFTVARSMLVDEIKLLFERQRDFGSAFAEKDAEEEYIELFSAQRNFDEGPGGDSPYGGNQIEKMIGLCTFEGKNGEKRAPKASYAFMATNLWQKINQIRIIEKGTERPLTAEEAGKIDEKAWKKEAMTYKDIRSEISLGDEAYFKGLSYKWTETDKEETESKVKFSLVKEYHTLRKVLDKVEKNRILQLSHDDIDNIAYIFSVYKNDDKIREALEETDLDSKDIDVLIEHLGTFRKFGHLSLKACYKILPYLEQGMVYSDACTAAGYDFRKSAQGSIADIPNPVVKRAISQTMKVLKAIKQKYGCPPVEIHIEMARELAKSFDERQKMTKSIEENQSHNERIKERLQKEFNVPYPSGQDIVKLKLYEEQNETCAYSQKHIDAAKLFHDPNYAEVDHIIPYSRSFDDTYNNKVLVLTAENRQKGNRTPMEYLSGDEARKKQFVAWVKSDIKKPRKRENLLREKFTADAENDWKARHLQDTQYISRFMLNYLQNNYELTPGNTDRRRRIIPVNGAVTAYVRKRLGISKIRENGDLHHAVDAAVIAAVTQGVVNSVSKYSKRHELQYHVDEHGNCVDLVTGELMGDAFKENHKIKGFPEPWPQFRAELEARVSENAAEAIRILKLPTYSPDEEIKTPFVSRMVRHKTTGQAHEDTVRGKSNVADNVYVKKVALTELKLKDGEIEGYYNPSSDRLLYEALKKRLEQFGGKGKDAFKEPFHKPKADGSPGPIVKKCKVIDKISLAVPVHGGKGATANANGSMIRVDIFRVKEKNNKHSYYAVPIYVADTVKDKLPNKAIVAKKNYDEWLEMKKEDFVFSLYPNSAVYIGGKDIKMNVMSGCTLELEKTMRDTILYYKGLDISPGALKIINHDGTYQQRGLGIKSLPFIE

SEQ ID NO: 1033 - protein, 1082 aa, unidentified; identical to SEQ ID NO: 949
  REGION 1..1082: note = Description of Unknown: uncultivated organism with predicted taxonomy: Dialister
  REGION 1..1082: note = MG15-106 effector

SEQ ID NO: 1034 - protein, 1082 aa, unidentified; identical to SEQ ID NO: 953
  REGION 1..1082: note = Description of Unknown: uncultivated organism with predicted taxonomy: Dialister
  REGION 1..1082: note = MG15-107 effector

SEQ ID NO: 1035 - protein, 1082 aa, unidentified; identical to SEQ ID NO: 977
  REGION 1..1082: note = Description of Unknown: uncultivated organism with predicted taxonomy: Dialister
  REGION 1..1082: note = MG15-108 effector

SEQ ID NO: 1036 - protein, 1109 aa, unidentified
  REGION 1..1109: note = Description of Unknown: uncultivated organism with predicted taxonomy: Megasphaera stantonii
  REGION 1..1109: note = MG15-109 effector
MDPKELKYVVGLDIGITSVGWATLLLDSQDEPVRILDLNSRIFDKAEVPKTGASLAAPRRMARGVRRRLRRRKFRLHRVRQYILRHHILDKAGLECLYKPKMDIDIFALRTAGLDRLLEPEEWARILLYMAKHRGFKSNRKSTAVAGGDDGIMLKAIQQNKEVLSKYRSVGEMFDKDEKFSDHKRNKGGSYEFTVARSMLVDEIKLLFEKQRDFGLAFAEKDAEEEYIELFSAQRNFDEGPGGDSPYGGNQIEKMIGLCTFEGKNGEKRAPKASYAFMATNLWQKINQIRIIEKGTERPLTAEEAGKIDEKAWKKEAMTYKDIRSEISLGDEASFKGLPYKWTETDKEETESKAKFSWVKEYHTLRKVLDKVEKNRILQLSHDDIDNIAYIFSVYKNDDKIREALEGTHLDSKDIDVLIENLGTFSKFGHLSLKACYNILPYLEQGMVYSDACTAAGYDFRKSAQGSIADIPNPVVKRAISQTMKVLKAIKQKYGCPPVEIHIEMARELAKSFDERQKMAKSIEENQSHNERIKERLQKEFNVPYPSGQDIVKLKLYEEQNETCAYSQKHMDAHRLFHEDNYAEVDHIIPYSRSFDDTYNNKVLVLTAENRQKGNRTPMEYLSGDEARKKQFVAWVKSDIKKPRKRENLLREKFTTDAENDWKIRHLQDTQYISRFMLNYLQNNYELTPGNTDRKRRIIPVNGAVTAYVRKRLGISKIRENGDLHHAVDAAVIAAVTQGVVNSVSKYSKRHELQYHVDEHGNCVDLVTGELMGDAFKENHKIKGFPEPWPQFRAELEARVSENAAEAIRILKLPTYSPDEEIKTPFVSRMVRHKTTGQAHEDTVRGKSNVADNVYVKKVALTELKLKDGEIEGYYNPSSDRLLYEALKKRLEQFGGKGKDAFKEPFHKPKSDGSPGPIVTKCKVLDKINLAVQVHGGKGITKNAGGSMVRVDVFKVKKSNGGHQYYLVPIYVADTVKERLPNRAVMAHKEYDEWKIVDDKDFVFSLYPNDLLFIGGKEIKLNGTGGDTLHQGIMVQNVYLYYRGLNIAVGTISVEDHDSKYIQESLGVGRVPVLEKYEVSVLGDLIKAQYRPRETFKHKAQRTKDQVNV

SEQ ID NO: 1037 - protein, 1081 aa, unidentified; identical to SEQ ID NO: 990
  REGION 1..1081: note = Description of Unknown: uncultivated organism with predicted taxonomy: Dialister
  REGION 1..1081: note = MG15-110 effector

SEQ ID NO: 1038 - protein, 1082 aa, unidentified; identical to SEQ ID NO: 953
  REGION 1..1082: note = Description of Unknown: uncultivated organism with predicted taxonomy: Veillonellales
  REGION 1..1082: note = MG15-111 effector

SEQ ID NO: 1039 - protein, 1081 aa, unidentified; identical to SEQ ID NO: 952
  REGION 1..1081: note = Description of Unknown: uncultivated organism with predicted taxonomy: Dialister
  REGION 1..1081: note = MG15-112 effector

SEQ ID NO: 1040 - protein, 1082 aa, unidentified; identical to SEQ ID NO: 953
  REGION 1..1082: note = Description of Unknown: uncultivated organism with predicted taxonomy: Dialister
  REGION 1..1082: note = MG15-113 effector

SEQ ID NO: 1041 - protein, 1087 aa, unidentified
  REGION 1..1087: note = Description of Unknown: uncultivated organism with predicted taxonomy: Veillonellales
  REGION 1..1087: note = MG15-114 effector
MNYVLGLDVGITSCGWAVLELNHEDEPVRIVDLNSRIFDKAEAPKTGESLAAPRRMARGIRRLTRRRKFRLHRVRGFLVRHHILTKEEIENLYITPHKTDIYELRYRALTEKVSPSDWARLLIFFAKHRGFQSNRKNEKSGEDGLMLAAIGENKKILENYRSVGDMLYSDEKFKDCKRNKGGTYRFTVSRSMLKEEVQTLFKKQRELGQTFAGEDLEDEYISIFSAQRNFDEGPGANSPYAGDQIEKMIGDCTFEDGKNGRPPQKRAPKASYAFMAFNLWQKINHIRVNSKGIERSLETEEKNKIAGLAWTKENITYHDLRQIAGLDEETRFSGVTYPLDSTTEEAEKKVKFSWVKPYHAMRRALDKVEKNYIQKLSREEIDAIAYAFTVYKNDKKIRTALAEKGIEDNVADVLITHLDGFSKFGHLSEYACYKLLLFLEKGEEYYKACESAGYDFRKSSMEKLEDIPNPVVKRAVTQTMKVIKAVQRKYGNPVEVHIELARELARSFKDRAAMDDRMKENHAKNEEIKEYLSKELHVMSPTGQDIVKWKLYKQQQGYCAYSQKPFDVNKLLHDRTYAEVDHILPYSRSFDDTYRNKVLVLTKENRDKGNRTPMEYLADKPERKGKFIAWVKTTIKDSKKREHLLRVKYGRDEEAEWKQRHLQDTQYISRFLYNYLKNTLELTPGYTDRKRRIIPVNGAVTGYIRKRLGIHKIRENGDLHHAVDAVVIAATTQGMIQKVTRYSQIKENETWIDDHTKVDERTGEIFFVKKAHEKDAFPEPWPRFRQELEARVSEDPEEAIRRLGLPSYENVGEIKKPFVSRMPRRKVRGAAHKETVRSGKLRKDGYTILKTDLSALKLKNGEIEGYYRPESDRLLYEALKKRLEAFGGKGKEAFKEPFYKPKADGTPGPLVKKVKIIEKSSLNVPVHKGKGVAYNDTMVRIDIFGVNEKGKTAYYFVPVYVSDTVKKELPCRAVVAHKPYEEWKVMDDKDFLFFLYPNDMIHVVAKRDLSFTAAEGADLAPTMETKDTCVYYKAADISAGNIKVITHDNSYEKRGFGIKTLLQLEKCEVDVLGNISVVKKEKRQGFC

SEQ ID NO: 1042 - protein, 1082 aa, unidentified; identical to SEQ ID NO: 953
  REGION 1..1082: note = Description of Unknown: uncultivated organism with predicted taxonomy: Dialister
  REGION 1..1082: note = MG15-115 effector

SEQ ID NO: 1043 - protein, 1081 aa, unidentified; identical to SEQ ID NO: 940
  REGION 1..1081: note = Description of Unknown: uncultivated organism with predicted taxonomy: Megasphaera sp. AM44-1BH
  REGION 1..1081: note = MG15-116 effector

SEQ ID NO: 1044 - protein, 1084 aa, unidentified; identical to SEQ ID NO: 962
  REGION 1..1084: note = Description of Unknown: uncultivated organism with predicted taxonomy: Megasphaera
  REGION 1..1084: note = MG15-117 effector

SEQ ID NO: 1045 - protein, 1081 aa, unidentified; identical to SEQ ID NO: 981
  REGION 1..1081: note = Description of Unknown: uncultivated organism with predicted taxonomy: Dialister
  REGION 1..1081: note = MG15-118 effector

SEQ ID NO: 1046 - protein, 1078 aa, unidentified; identical to SEQ ID NO: 974
  REGION 1..1078: note = Description of Unknown: uncultivated organism with predicted taxonomy: Dialister
  REGION 1..1078: note = MG15-119 effector

SEQ ID NO: 1047 - protein, 1104 aa, unidentified
  REGION 1..1104: note = Description of Unknown: uncultivated organism with predicted taxonomy: Megasphaera micronuciformis
  REGION 1..1104: note = MG15-120 effector
MDPKELKYVVGLDIGITSVGWATLLLDSQDEPVRILDLNSRIFDKAEVPKTGASLAAPRRMARGVRRRLRRRKFRLHRVRQYILRHHILDKAGLECLYKPKTDIDIFALRTAGLDRLLEPEEWARILLYMAKHRGFKSNRKSTAVAGGDDGVMLKAIQQNKEVLSKYRSVGEMFDKDEKFSDHKRNKGGSYEFTVARSMLVDEIKLLFEKQRDFGLVFAEKDAEEEYIELFSAQRNFDEGPGGDSPYGGNQIEKMIGLCTFEGKNGEKRAPKASYAFMATNLWQKINQIRIIEKGTERPLTAEEAGKIDEKAWKKEAMTYKDIRSEISLGDEASFKGLPYKWTETDKEETESKAKFSWVKEYHTLRKVLDKVEKNRILQLSHDDIDNIAYIFSVYKNDDKIREALEGTDLDSKDIDVLIENLGTFSKFGHLSLKACYKILPYLEQGMVYSDACTAAGYDFRESAKGSIADIPNPVVKRAISQTMKVLKAIKQKYGCPPVEIHIEMARELAKSFDERQKMTKSIEENQSHNERIKERLQKEFNVPYPSGQDIVKLKLYEEQNETCAYSQKHIDAAKLFHDPNYAEVDHIIPYSRSFDDTYNNKVLVLTAENRQKGNRTPMEYLNGDEARKKQFVAWVKSDIKKPRKRENLLREKFTDDVENDWKERHLQDTQYISRFMLNYLQNNYELTPGNTDRKRRIIPVNGAVTAYVRKRLGISKIRENGDLHHAVDAAVIAAVTQGVVNSVSKYSKRHELQYHVDEHGNCVDLVTGELMGDAFKENHKIKGFPEPWPQFRAELEARVSENAAEAIRILNLPTYSPDEEIKTPFVSRMVRHKTTGQAHEDTVRGKSNVADNVYVKKVALTELKLKDGEIEGYYNPSSDRLLYEALKKRLEQFGGKGKDAFKEPFHKPKSDGSPGSIVKKCKVLDKINLAVQVHGGKGITKNTGGSMVRVDVFKVKKGNGGHQYYLVPIYVADTVKEKLPNRAVVGSTSYDGWKILHDDSFVFSLYPNELVHISGKKIKLKGTGGNTKGQEINIEDAYLYYKALNISNGMITVVTHDNTYIQESLGIGRVPTLEKYEVSVLGDLVKATYRPRETFKHKAQRFK

SEQ ID NO: 1048 - protein, 1104 aa, unidentified; identical to SEQ ID NO: 942
  REGION 1..1104: note = Description of Unknown: uncultivated organism with predicted taxonomy: Megasphaera micronuciformis
  REGION 1..1104: note = MG15-121 effector

SEQ ID NO: 1049 - protein, 1081 aa, unidentified; identical to SEQ ID NO: 952
  REGION 1..1081: note = Description of Unknown: uncultivated organism with predicted taxonomy: Dialister invisus
  REGION 1..1081: note = MG15-122 effector

SEQ ID NO: 1050 - protein, 1082 aa, unidentified; identical to SEQ ID NO: 970
  REGION 1..1082: note = Description of Unknown: uncultivated organism with predicted taxonomy: Megasphaera
  REGION 1..1082: note = MG15-123 effector

SEQ ID NO: 1051 - protein, 1081 aa, unidentified
  REGION 1..1081: note = Description of Unknown: uncultivated organism with predicted taxonomy: Dialister
  REGION 1..1081: note = MG15-124 effector
MNYVLGLDVGIASVGWAVLELNEEDNPIRIEGLGARIFDKAEVPKTGASLAAPRRMSRGIRRVIRRRRFRLQRVRSYLKRHNILPAEKVDHLYDVPSAIDIYELRKRALTEKVTAEEWARLLIFFAKHRGFKSNRKKASGDADEGEMLKAIAANAELLKNYRTVGEMLCDNEKFRKRKRNRDGAYNFTVSRAMLIEEIHTLFEIQRNLGQKFADEKLEEEYVILFVAQRKFDEGPGENSPYAGNQIEKMIGSCTLEGKKEKRAPKASYAFMAFNLWQKINHLKINRRGSERFLTEEERRRIADLEWKKEKLTYGSLREVLFLDPEDRFVGLRYDLKKEKEEDLEEPVSEAEKMSFSWVKDYHSIRKALDKVEKNRILKLSHEQLDTIATAFSVYKNEETIEKYLEEGGIEKADREALLERLSSFSKFGHLSLKACYKILPFLEKGEVYSRACERAGYDFSKSSLENIDDIPNPVVKRSISQTLKVINAIILRYGNPVEVHIELARELARNFRDRKKMEKGMQENQAKNEKIRQRLISEFGVLRPKGMDIVKFRLCEEQNGECAYSQKHFDMEKLLKDPSYAEVDHIIPYSRSFDDSYNNKVLVLTKENREKRNRIPMEYLADAPERKNRFIHWVKSTIRNSRKRENLLRTDYTATTENEWKRRNLQDTQYISKYLYNYLRHHLVLAKGYTERKRRIIPVNGAVTAYFRKRLGINKIRENGDLHHAVDAVIIACATQGIVNKVSRYSKSRELWDYEVDMETGEVLQKKNKNTKDVFPEPWLNFRYELEQKVRVRPLDIPETADITEMEEPFVSHMPNRKIHGPAHKETIRSGRLKEEGYTISKTALIDLKLTEDKEEIKGYYNKESDRLLYEALKKQLQRYGGKAKEAFKEPFHKPKADGTPGPIVNKVKIMEKSTMPVPVNGGKGLASNGNMVRIDVFRSEEKGKKKYYFIPIYVADTVKEELPNRAALAHKPYEAWKIMKEEDFIFSLYPNDLIFVDAGKEIPFKAALKGSTLDPEKKASRFLMYYKGADIAGGTINGVNHDNTYGIRIGLQQLKGIRKCRIDVLGNISFASKEKRQTFR

SEQ ID NO: 1052 - protein, 1081 aa, unidentified; identical to SEQ ID NO: 960
  REGION 1..1081: note = Description of Unknown: uncultivated organism with predicted taxonomy: Dialister
  REGION 1..1081: note = MG15-125 effector

SEQ ID NO: 1053 - protein, 1103 aa, unidentified
  REGION 1..1103: note = Description of Unknown: uncultivated organism with predicted taxonomy: Megasphaera stantonii
  REGION 1..1103: note = MG15-126 effector
MDTKELKYVVGLDIGIASVGWATLLLDSQDEPVRILDLNSRIFDKAEVPKTGASLAAPRRMARGVRRRLRRRKFRLHRVRQYILRHHILDKVGLECLYKPKTDIDIFALRTAGLDRLLEPEEWARILLYMAKHRGFKSNRKSAAVAGGDDGVMLDAIRKNKEVLSKYRSVGEMFDKDEKFSAHKRNKGGSYEFTVARSMLEDEIKLLFEKQRDFGLAFAEKDAEEEYIELFSAQRNFDEGPGGDSPYGGNQIEKMIGLCTFEGKNGEKRAPKASYAFMATNLWQKINQIRIIEKGTERPLTAEEAGKIDEKAWKKGAMTYKDIRSEISLGDEAYFKGLSYKWTETDKEETESKVKFSLVKEYHTLRKVLDKVEKNRILQLSHDDIDNIAYIFSVYKNDDKIREALEETDLDSKDIDVLIEHLGTFSKFGHLSLKACYKILPYLEQGMVYSDACTAAGYDFRKSAQGSIADIPNPVVKRAISQTMKVLKAIKQKYGCPPVEIHIEMARELAKSFDERQKMTKSIEENQSHNERIKERLQKEFNVPYPSGQDIVKLKLYEEQNETCAYSQKHIDAAKLFHDPNYAEVDHIIPYSRSFDDTYNNKVLVLTAENRQKGNRTPMEYLSGDEARKKQFVAWVKSDIKKQRKRENLLREKFTADAENDWKARHLQDTQYISRFMLNYLQNNYELTPGNTDRKRRIIPVNGAVTAYVRKRLGISKIRENGDLHHAVDATVIAAVTQGVVNSVSKYSKRHELQYHVDEHGNCVDLVTGKLMGDAFKENHKIKGFPEPWPQFRAELEARVSENAAEAIRTLNLPTYSSDEEIKTPFVSRMVRHKTTGQAHEDTVRGKSNVADNEYVKKVALTELKLKDGEIEGYYNRPSDRLLYEALKKRLEQFGGKGKDAFKEPFYKPKSDGSPGPIVKKCKILDKINLAVQVHGGKGATANANGSMIRVDIFKAKEKNGKYSYYAVPIYVADTVKEELPNKAVCNKEYNRWPKMKEEDFAFSLYPNDVVYIGGKEIKMNAAPGCTLETTRSIQDVNLYFRGMDISTGAIRVVNHDGTYKQKSLGIKQLPLIEKYEVSVLGDLVKAIYKPRETFKHKVRRSK

SEQ ID NO: 1054 - protein, 1081 aa, unidentified; identical to SEQ ID NO: 973
  REGION 1..1081: note = Description of Unknown: uncultivated organism with predicted taxonomy: Dialister
  REGION 1..1081: note = MG15-127 effector

SEQ ID NO: 1055 - protein, 1081 aa, unidentified; identical to SEQ ID NO: 991
  REGION 1..1081: note = Description of Unknown: uncultivated organism with predicted taxonomy: Dialister invisus
  REGION 1..1081: note = MG15-128 effector

SEQ ID NO: 1056 - protein, 1081 aa, unidentified; identical to SEQ ID NO: 991
  REGION 1..1081: note = Description of Unknown: uncultivated organism with predicted taxonomy: Dialister
  REGION 1..1081: note = MG15-129 effector

SEQ ID NO: 1057 - protein, 1081 aa, unidentified; identical to SEQ ID NO: 940
  REGION 1..1081: note = Description of Unknown: uncultivated organism with predicted taxonomy: Dialister
  REGION 1..1081: note = MG15-130 effector

SEQ ID NO: 1058 - protein, 1081 aa, unidentified; identical to SEQ ID NO: 976
  REGION 1..1081: note = Description of Unknown: uncultivated organism with predicted taxonomy: Dialister
  REGION 1..1081: note = MG15-131 effector

SEQ ID NO: 1059 - protein, 1092 aa, unidentified
  REGION 1..1092: note = Description of Unknown: uncultivated organism with predicted taxonomy: Veillonella magna
  REGION 1..1092: note = MG15-132 effector
MNYVLGLDVGITSVGWAVLELNSQDDPIRIVDLNSRIFEKAENPKNGESLALPRRQARSIRRLTRRRRFRLQRVRRYIVRSGILNKETLHRLYNTMEGLPDIYELRYRGLTQPLSAEEWSRLLIFFAKHRGFKSNRKNASDGDDGEMLSAVKANQELLKSYRTVGEMLYKNEKFKECKHNKGGSYAFTVSRAMLEDEIRALFEVQRQLGQAYAAEELEKEYIEIFGAQRNFDEGPGAGSPYGGDQIEKMIGTCTFEPMEKRAPKVSYGFMAFNLWQKINHLGLIANGVARSFTAEEKQQIADLAWSKNNLHLQHIRKELRIPEDTIFSGVNYGIRKQDTEWAKQLEEVEKKQKFNWLTPYHEMRVALDAVKKHRITELSPDQIDTIAYAFTVFKNDEKITSYLRENGIEEDDIRALLSKVKGFSKFGHLSLKACYKILPYLEEGNIYSKACELAGYDFRSSSQEQLEDIPNPVVKRAISQTLKVIKAIVRRYGNPVEVHIELARELARNFEDRRTMQKSMEDNQKRNEEIKERLVKEYNVLQPTGMDIVKFKLYEEQQGACAYSQKMFDVNRVLHDPSYSEVDHIIPYSRSFDDSYNNKVLVLTKENRDKGNRTPMEYLKDNPVRIDAFTTWVNAIVRNSRKRANLLKSSFTEDAEQEWKRRHLQDTQYISRFLYNYLRQNLPLKEGFTNRKRRIIPVNGAVTSYVRKRLGIAKIRENGDLHHAVDAVIIACVTQGVIKRVSEYSKSRELWLYQLDDGTVIDGETGEVMTGQRGHKQEPFPEPWPEFRHELEDRVSENPPELLRHLQLPAYEGIDIETIKTPFVSRMPNRKVKGQAHEETIRSGRLKYEGYTVTKVDLKNLKLKNGEIEGYYNPDSDRLLYNALKQQLEVYDGKGDKAFAEPFHKPKADGTPGPIVKKVKIMTKSNLNVPVNGGKGVADNGSMVRIDVFGVEERGKMAYRFIPIYVSDTVKRILPNKAVTRDRGYKDWDIMDDKDFLFSLYPNDLIYVESKRDISLKAAKGSTLAKERKQKEALVYYRGADIATASIGVVNDDNTYSMRGLGIKTLQSIRKCIVDVLGNVAFVTKEKRQGFR

SEQ ID NO: 1060 - protein, 1082 aa, unidentified; identical to SEQ ID NO: 953
  REGION 1..1082: note = Description of Unknown: uncultivated organism with predicted taxonomy: Dialister
  REGION 1..1082: note = MG15-133 effector

SEQ ID NO: 1061 - protein, 1103 aa, unidentified; identical to SEQ ID NO: 993
  REGION 1..1103: note = Description of Unknown: uncultivated organism with predicted taxonomy: Megasphaera micronuciformis
  REGION 1..1103: note = MG15-134 effector

SEQ ID NO: 1062 - protein, 1103 aa, unidentified; identical to SEQ ID NO: 945
  REGION 1..1103: note = Description of Unknown: uncultivated organism with predicted taxonomy: Megasphaera micronuciformis
  REGION 1..1103: note = MG15-135 effector

SEQ ID NO: 1063 - protein, 796 aa, unidentified
  REGION 1..796: note = Description of Unknown: uncultivated organism with predicted taxonomy: Megasphaera stantonii
  REGION 1..796: note = MG15-136 effector
VAVLELNEEDNPIRIEGLGARIFDKAEVPKTGASLAAPRRMSRGIRRVIRRRRFRLQRVRSYLKRHNILPAEKVDHLYDVPSAIDIYELRKRALTEKVTAEEWARLLIFFAKHRGFKSNRKKASGDADEGEMLKAIAANAELLKNYRTVGEMLCDNEKFRKRKRNRDGAYNFTVSRAMLIEEIHTLFEIQRNLGQKFADERLEEEYVILFVAQRKFDEGPGENSPYAGNQIEKMIGSCTLEGKKEKRAPKASYAFMAFNLWQKINHLKINRRGSERFLTEEERRRIADLAWKKEKLTYGSLREVLFLDPEDRFVGLRYDLKKEKEEDLEEPVSEAEKMSFSWVKDYHSIRKALDKVEKNRILKLSHEQLDTIATAFSVYKNEETIEKYLEEGGIEKADREALLERLSSFSKFGHLSLKACYKILPFLEKGEVYSRACERAGYDFRKSSLENINDIPNPVVKRSISQTLKVINAIILRYGNPVEVHIELARELAKNFRDRKKMEKGMQENQAKNEKIRQRLMSEFGVLCPKGMDIVKFKLCEEQNGECAYSQKHFDMEKLLKDPSYAEVDHIIPYSRSFDDSYNNKVLVLTKENREKRNRIPMEYLADAPEQKNRFIHWVKSTIRNSRKRENLLRTDYTAATENEWKRRNLQDTQYISKYLYNYLLENLELAKGYTERKRRITPVNGAVTAYIRKRLGINKIRENGDLHHAVDAVIIACATQGIVNKVSRYSKSRELWDYEVDKETGEILQKKNKNTKDVFPEPWLNFRYELEQKVRIRPLDIPETADITKMEEPFV

SEQ ID NO: 1064 - protein, 1089 aa, unidentified; identical to SEQ ID NO: 968
  REGION 1..1089: note = Description of Unknown: uncultivated organism with predicted taxonomy: Megasphaera sp. AM44-1BH
  REGION 1..1089: note = MG15-137 effector

SEQ ID NO: 1065 - protein, 1086 aa, unidentified
  REGION 1..1086: note = Description of Unknown: uncultivated organism with predicted taxonomy: Megasphaera
  REGION 1..1086: note = MG15-138 effector
MNYVLGLDIGITSVGWAVLELDTHDEPIRIVDLNSRIFEKAEVPKTGEALAAPRRMARSARRLTRRRRFRLHRVRRYLIRNDILDEQQVAVLYDDSAGKTDIYELRYQALSQPVSNSDWARLLIFFAKHRGFKSNRKHISDSGDEGQMLNAITENQELLKNYRTVGEMLYKNEKFKACKRNKGGSYTFTVSRAMLTDEIHTLFDVQRNLGQAYASEKLKEEYMELFSAQRNFDEGPGMNSPYSGNQIEKMIGCCTFEDGEKRAPKASYAFMAFNIWQKINHLRVTCEGTYRFLSQAEKETLAAFAWKKENITFKDIRNKLGLDDTVRFLDVNYNLDQYKTAEEAEKKAKFSWVKEYHAIRKALDKVKKDRISELSHEQIDAIAYAFTVYKNDEAIKSYLLEHAIELADAEALLENISGFSKFGHLSVKACYKLLEPLKQGHVYTKACEIAGYDPQKSSQGNISDIPNPVVKRALSQALKVIKAIIRQYGCPPVEIHIELARELAKNAKERTELEKAMKDNQSRNEEIKTKLHELNVMQPTGLDIVKYKLYEQQQGDCAYSQKKFDVDRLLHDSTYAEVDHIIPYSRSFDDTYRNKVLVLTKENRDKGNRTPMEYFQDKPERKEAFVRWVKRTISDGKKRNNLLRVNYSADAEKEWKDRHLQDTQYISRYLYNYLRQHIPLKEGYTDRKRRIIPVNGAVTAYVRKRLGISKIRENGDLHHAVDAVIIACVTQGVVNKISCYSKIKELRQFMTADGTIVDKETGEVLQTANPRKTDPFPEPWPKFRQELEARVSDNPAEAIAALGLPTYEGIVSISAPFVSRMPNRKVHGPAHMETIRSAKMQQDGYTMVKTDLTNLKLKDGEIEGYYNPSSDKILYDALKRRLEQFGGDSNKAFKDPFYKPKSDGTPGPEVKKVKIMTKSSLNVTVNQGKGIADNGSMIRIDVFGVEERGKNAYYFVPIYVADTVKETLPNKAVVPNKSYNDWKVMRDEDFLFSLYPNDLIYIESPTPISFHTVKGCPLVPKIERKEMFLYYRKAGISTASITVLNHDNTYVKESLGIKTIAKLQKCTVDVLGNIHYVQKEKRLGFK

SEQ ID NO: 1066 - protein, 1086 aa, unidentified
  REGION 1..1086: note = Description of Unknown: uncultivated organism with predicted taxonomy: Megasphaera
  REGION 1..1086: note = MG15-139 effector
MNYVLGLDIGITSVGWAVLELDTHDEPIRIVDLNSRIFEKAEVPKTGESLAAPRRMARSARRLTRRRRFRLHRVRRYLIRNRILDARQVEELYVDSIGKTDIYELRYQALSQQVSNSDWARLLIFFAKHRGFKSNRKHISDSGDEGQMLNAITENQEILNNYRTVGEMLYKNEKFKACKRNKGGSYAFTVSRDMLADEIHALFDVQRSLGQAYASEKLEEEYMELFSAQRNFDEGPGMNSPYSGNQIEKMIGCCTFEDGEKRAPKASYAFMAFNVWQKINHLRVTCEGTYRSLSQAEKETLAALAWKKENITFKDIRNKLGLDDTVRFLDVNYNLDKYKTAEEAEKKVKFSWVKEYHAIRKALDKVKKDRISELSHEQIDTIAYAFTVYKNDEAIKRYLLEHAIEPADAEALLENISGFSKFGHLSVKACYRLLEPLQQGHVYTKACEIAGYDPQKSNQENINDIPNPVVKRALSQALKVIKAIIRQYGCPPVEIHIELARELAKSAKERTELEKAMKDNQSRNEEIKTKLHELNVMQPTGLDIVKYKLYEQQQGDCAYSQKKFDVNRLLHDPTYAEVDHIIPYSRSFDDTYRNKVLVLTKENRDKGNRTPMEYFQDKPERKEAFINWVKRTISDGKKRNNLLRVNYSADAEKEWKDRHLQDTQYISRYLYNYLKRHIELKEGYTDRKRRIIPVNGAVTAYVRKRLGISKIRENGDLHHAVDAVIIACVTQGVVNKISRYSKIKELRQFMTADGMIVDKETGEVLQTANPRKTDPFPEPWPKFRQELEARVSDNPAEAIAALGLPTYEGIVNISAPFVSRMPNRKVHGPAHMETIRSSKMQQDGYTMVKTELTNLKLKDGEIEGYYNPSSDKILYDALKRRLEQFGGDGNKAFKDPFYKPKSDGTPGPEVKKIKIMTKSSLNVTVNQGKGVADNGSMVRIDVFGVEEKGKNAYYFVPIYVADTVKETLPNRAVTRGEPYNNWKIMKDEDFLFSLYPNDLIYIESLSPVSFHTVKGCTLVSKIERKEMLLYYRKAGISTASITVLNHDNTYVKESLGIKTIGKLQKCTVDILGNVHYVQKEKRVGFK

SEQ ID NO: 1067 - protein, 1089 aa, unidentified
  REGION 1..1089: note = Description of Unknown: uncultivated organism with predicted taxonomy: Megasphaera sp. AM44-1BH
  REGION 1..1089: note = MG15-140 effector
MHYVLGLDIGITSVGWAVLELNIQDEPIRIVDLNSRIFERAEIPKTGESLAAPRRVARSSRRRTRRRRFRLYRIRRYLLRNQIITPSDMKILYDNCGDMKDIYTLRHEALDRAVTSKEWARLLIFFGKHRGFKSNRKSIIASGDEGVMLQAVKENQELLKAYRTVGDMLYSDTKFANAKRNKGESYTFTVSRRMLTDEIRTLFCIQRDLGQSFATPSLEDEYLSIFLAQRNFDEGPGGNSPYSGNQIEKMIGNCAFEKNEKRAPKASYAFMAFNLLQKINHLRIERKGKQRFLTQEERNNIAGLAWKKENLTFKDIRTAISLSGDELFQDVHYASEVSLEECEKKTKFNLVRSYHAMRKALDAVEKNRIQKLSHEQLDTIAYAFTVYKNDDKISSYLLAHSIEQQDVEALLAQLRTFNKFGHLSIKACYRILPYLKEGKTYAAACTSAGYDFRNSSLEEIKDIPNPVVKRAVSQTLKVIRAIIKKYGCEPVEIHIELARELARSFQNRVKMQKSMEENQSRNEKIKERLVQEYNILSPTGMDIVKFKLYEQQQGACAYSQKMFNIYQLFHDPSYAEVDHIIPYSRSFDDSYRNKVLVFTAENRNKGNRTPMEYLKNQSERKEQFITWVKNTIRDYKKRNNLLRETYTSEDEADWKRRHLQDTQYLSTYLYNYLCHVMKLTPGCTERKRRIIAVNGAVTAYVRKRLGINKIRSNGDLHHAVDAVIIACVTQGVINRISRYSKIKELQNFQTNDGQVVDSVTGEMLTLKHVHKKDPFPEPWPHFRQELEARVGKQPQEAIAALHLPTYENVESIYTPFVSRMPNRKVHGPAHLETIRSSKLLYKGITIVKTSLTNLKLKDGEIQGYYNPDSDRILYQALKRRLIQFDGEGRAAFKEPFYKPRSDGSPGPMVKKVKIMTNSSLNVLLNHGRGVADNGAMVRIDVFYVSEKGKKAYYFVPIYVADTVKKELPHKAVVAYKPCEEWKNVDDDDFIFSLYPNDLVYVRHKKSILLKASKRSTLSPQIKIKEGLFYYKGANISVGSISIINNDDTYGQHSLGIKTLECMKKANVDILGNVTFVGRENRQPFQLSKK

SEQ ID NO: 1068 - protein, 1081 aa, unidentified
  REGION 1..1081: note = Description of Unknown: uncultivated organism with predicted taxonomy: Dialister
  REGION 1..1081: note = MG15-141 effector
MNYVLGLDVGIASVGWAVLELNEEDNPIRIEGLGARIFEKAEVPKTGASLAAPRRMSRGIRRVIRRRRFRLQRVRSYLKRHNILPAEKVDHLYDVPSAIDIYELRKRALTEKVTAEEWARLLIFFAKHRGFKSNRKKASGDADEGEMLKAIAANAEILKNYRTVGEMLCDNEKFRKRKRNRDGAYNFTVSRAMLMEEIHTLFEIQRNLGQKFADEKIEEEYVILFAAQRKFDEGPGENSPYAGNQIEKMIGSCTLEGKKEKRAPKASYAFMAFNLWQKINHLKINRRGSERFLTEEERRRIADLAWKKEKLTYGSLREVLFLDPEDRFVGLRYDLKKEKEENLEEPVSEAEKMSFSWVKDYHSIRKALDKVEKNRILKLSHEQLDTIATAFSVYKNEETIEKYLEEGGIEKADREALLERLSGFSKFGHLSLKACYKILPFLEKGEVYSRACERAGYDFRKSSLENINDIPNPVVKRSISQTLKVINAIILRYGNPVEVHIELARELAKNFRDRKKMEKGMQENQAKNEKIRQRLMSEFGVLRPKGMDIVKFKLCEEQNGECAYSQKHFDMEKLLRDPSYAEVDHIIPYSRSFDDSYNNKVLVLTKENREKRNRIPMEYLADATERKNRFIHWVKSTIRNSRKRENLLRTDYTETTENEWKRRNLQDTQYISKYLYNYLRHHLVPAKGYTERKRRIISVNGAVTAYIRKRLGINKIRENGDLHHAVDAVIIACATQGIVNKVSRYSKSRELWDYEVDMETGEVLQKKNENRKDIFPEPWLNFRYELEQKVRVRPLDIPETADITEMEEPFVSHMPNRKIHGPAHKETIRSGRLKEEGYTISKTALTDLKLTEDKEEIKGYYNKESDRLLYEALKKQLQRYSGKAKEAFKEPFHKPKADGTPGPIVNKVKIMEKSTMPVPVNGGKGLASNGNMVRIDVFRVEEKGKKKYYFIPVYVADTVKEELPNRAVLAHKPYEAWKIMKEEDFIFSLYPNDLIFVDAGKEIPFKAALKGSTLDPEKKASRFLMYYKGADIAGGTINGVNHDSTYGIRIGLRRLKGIRKCRIDVLGNISLVGKEKRKTFR

SEQ ID NO: 1069 - protein, 1089 aa, unidentified
  REGION 1..1089: note = Description of Unknown: uncultivated organism with predicted taxonomy: Megasphaera sp. AM44-1BH
  REGION 1..1089: note = MG15-142 effector
MHYVLGLDIGITSVGWAVLELNIQDEPIRIVDLNSRIFERAEIPKTGESLAAPRRVARSSRRRTRRRRFRLYRIRRYLLRNQIITPSDMKILYDNCGDMKDIYTLRHEALDRAVTSKEWARLLIFFGKHRGFKSNRKSIIASGDEGAMLQAVKENQELLKAYRTVGDMLYSDTKFANAKRNKGESYTFTVSRRMLTDEIRTLFCIQRDLGQSFATPSLEDEYLSIFLAQRNFDEGPGGNSPYSGNQIEKMIGNCAFEKNEKRAPKASYAFMAFNLLQKINHLRIERKGKQRFLTQEERNNIAGLAWKKENLTFKDIRTAISLSGDELFQDVHYASEVSLEECEKKTKFNLVRSYHAMRKALDAVEKNRIQKLSHEQLDTIAYAFTVYKNDDKISSYLLAHSIEQQDVEALLAQLRTFNKFGHLSIKACYRILPYLKEGKTYAAACTSAGYDFRNSSLEEIKDIPNPVVKRAVSQTLKVIRAIIKKYGCEPVEIHIELARELARSFQNRVKMQKSMEENQSRNEKIKERLVQEYNILSPTGMDIVKFKLYEQQQGACAYSQKMFNIYQLFHDPSYAEVDHIIPYSRSFDDSYRNKVLVFTAENRNKGNRTPMEYLKNQSERKEQFITWVKNTIRDYKKRNNLLRETYTSEDEADWKRRHLQDTQYLSTYLYNYLCHVMKLTPGCTERKRRIIAVNGAVTAYVRKRLGINKIRSNGDLHHAVDAVIIACVTQGVINRISRYSKIKELQNFQTNDGQVVDSVTGEILTLKHVHKKDLFPEPWPHFRQELVARVGKQPQEAIAALHLPTYENVESIYTPFVSRMPNRKVHGPAHLETIRSSKLLYKGITIVKTSLTNLKLKDGEIQGYYNPDSDRILYQALKRRLIQFDGEGRAAFKEPFYKPRSDGSPGPMVKKVKIMTNSSLNVLLNHGRGVADNGAMVRIDVFYVSEKGKKAYYFVPIYVADTVKKELPHKAVVAYKPCEEWKNVDDDDFIFSLYPNDLVYVRHKKSILLKASKRSTLSPQIKIKEGLFYYKGANISVGSISIINNDDTYGQHSLGIKTLECMKKANVDILGHVTFVGRENRQSFQLSKK

SEQ ID NO: 1070 - protein, 1103 aa, unidentified
  REGION 1..1103: note = Description of Unknown: uncultivated organism with predicted taxonomy: Megasphaera micronuciformis
  REGION 1..1103: note = MG15-143 effector
MDTKELKYVVGLDIGITSVGWATLLLDSQDEPVRILDLNSRIFDKAEVPKTGASLAAPRRMARGVRRRLRRRKFRLHRVRQYILRHHILDKVGLECLYKPKTDIDIFALRTAGLDRQLKPEEWARILLYMAKHRGFKSNRKSTADETADGDMLKAIQQNKEILSKYRSVGEMFDKDEKFSDHKRNKGGSYEFTVARSMLEDEIKLLFEKQRDFGSAFAEKDAEEEYIDLFSAQRNFDEGPGGDSPYGGNQIGKMIGLCTFEGKNGEKRAPKASYAFMATNLWQKINQIRIIKKGTELHLTAEEAGKIYEKAWNKEAMTYKDIRSEISLGDEASFKGLAYKWTETDKEETESKTKFSWVKEYHTLRKVLDKVEKNRILQLSHDEIDNIAYVFSVYKNDDKIREALEETDLDSKDIDVLIENLGTFSKFGHLSLKACYKILPYLEQGMVYSDACTAAGYDFRKSAQGSIADIPNPVVKRAISQTMKVLKAIKQKYGCPPVEIHIEMARELAKSFDERQKMTKSIEENQSHNERIKERLQKEFNVPYPSGQDIVKLKLYEEQNETCAYSQKHMDAHRLFHENNYAEVDHIIPYSRSFDDTYNNKVLVLTAENRQKGNRTPMEYLSGDEARKKQFVAWVKSDVKKPRKRENLLREKFTDDAENDWKARHLQDTQYISRFMLNYLQNNYELTPGNTDRKRRIIPVNGAVTAYVRKRLGISKIRENGDLHHAVDAAVIAAVTQGVVNSVSKYSKRHELQYHVDEHGNCVDLVTGELMGDAFKENHKIKGFPEPWPQFRAELEARVSENATEAIRILNLPTYSPDEEIKTPFVSRMVRHKTTGQAHEDTVRGKSNVADNVYVKKVALTELKLKDGEIEGYYNPSSDRLLYEALKKRLEQFGGKGKDAFKEPFHKPKADGSSGPIVKKCKVLDKINLSVPVHGGKGAAANANGGMIRVDIFKAKGKNGKSSYYAVPIYVADTVKVELPNRAVVTKKTYAEWPEMKTEDFAFSLYPNDVVYIGGKEIKMNVMPGCTLATENHVKDDFFYYKGLDIATGAMIVINHDGTYKQRGVGIKQLPLIEKYEVSVLGDLVKAIYRPREIFKHKAQRSK

SEQ ID NO: 1071 - protein, 831 aa, unidentified
  REGION 1..831: note = Description of Unknown: uncultivated organism with predicted taxonomy: Megasphaera stantonii
  REGION 1..831: note = MG15-144 effector
LAKAGLDCLYKPKTDIDIFALRTAGLDRLLEPEEWARILLYMAKHRGFKSNRKSTAVAGGDDGVMLKAIQQNKEVLSKYRSVGEMFDKDEKFSDHKRNKGGSYEFTVARSMLVDEIKLLFEKQRDFGLAFAEKDAEEEYIELFSAQRNFDEGPGGDSPYGGNQIEKMIGLCTFEGKNGEKRAPKASYAFMATNLWQKINQIRIIEKGTERPLTAEEAGKIDEKAWKKEAMTYKDIRSEISLGDEASFKGLPYKWTETDKEETESKAKFSWVKEYHTLRKVLDKVEKNRILQLSHDDIDNIAYIFSVYKNDDKIREALEGTDLDSKDIDVLIENLGTFSKFGHLSLKACYKILPYLEQGLVYSDACTAAGYDFRKSAQGSIADIPNPVVKRAISQTMKVLKAIKQKYGCPPVEIHIEMARELAKSFDERQKMTKSIEENQSHNERIKERLQKEFNVPYPSGQDIVKLKLYEEQNETCAYSQKHIDAAKLFHDRNYAEVDHIIPYSRSFDDTYNNKVLVLTAENRQKGNRTPMEYLSGDEARKKQFVAWVKSDIKKPRKRENLLREKFTADAENDWKARHLQDTQYISRFMLNYLQNNYELTPGNTDRRRRIIPVNGAVTAYVRKRLGISKIRENGDLHHAVDAAVIAAVTQGVVNSVSRYSKRHELQYHVDEHGNCVDLVTGELMGDAFKENHKIKGFPEPWPQFRAELEARVSENAAEAIRILNLPTYSPDEEIKTPFVSRMVRHKTTGQAHEDTVRGKSNVADNVYVKKVALTELKLKDGEIEGYYNPSSDRLLYEALKKRLEQFGGKGKDAFKEPFHKPKSDGSPGPIV

SEQ ID NO: 1072 - protein, 1056 aa, unidentified
  REGION 1..1056: note = Description of Unknown: uncultivated organism with predicted taxonomy: Megasphaera stantonii
  REGION 1..1056: note = MG15-145 effector
EVPKTGASLAAPRRMARGVRRRLRRRKFRLHRVRQYILRHHILDKAGLECLYKPKTDIDIFALRTAGLDRLLEPEEWARILLYMAKHRGFKSNRKSASDASDDGDMLDAIRKNKEVLSKYRSVGEMFDKDEKFSDHKRNKGGSYEFTVARSMLVDEIKLLFEKQRDFGLAFAEKDAEEEYIELFSAQRNFDEGPGGDSPYGGNQIEKMIGLCTFEGKNGEKRAPKASYAFMATNLWQKINQIRIIEKGTERPLTAEEAGKIDEKAWKKEAMTYKDIRSEISLGDEASFKGLPYKWTETDKEETESKVKFSLVKEYHTLRKVLDKVEKNRILQLSHDDIDNIAYIFSVYKNDDKIREALEETDLDSKDIDVLIEHLGTFSKFGHLSLKACYKILPYLEQGMVYSDACTAAGYDFRKSAQGSIADIPNPVVKRAISQTMKVLKAIKQKYGCPPVEIHIEMARELAKSFDERQKMTKSIEENQSHNERIKERLQKEFNVPYPSGQDIVKLKLYEEQNETCAYSQKHIDAAKLFHDPNYAEVDHIIPYSRSFDDTYNNKVLVLTAENRQKGNRTPMEYLSGDEARKKQFVAWVKSDIKKPRKRENLLREKFTADAENDWKARHLQDTQYISRFMLNYLQNNYELTPGNTDRRRRIIPVNGAVTAYVRKRLGISKIRENGDLHHAVDAAVIAAVTQGVVNSVSRYSKRHELQYHVDEHGNCVDLVTGELMGDAFKENHKIKGFPEPWAQFRAELEARVSENAAEAIRILNLPTYSPDEEIKTPFVSRMVRHKTTGQAHEDTVRGKSNVADNVYVKKVALTELKLKDGEIEGYYNPSSDRLLYEALKKRLEQFGGKGKDAFKEPFHKPKADGSTGPIVKKCKVLDKINLAVQVHGGKGATANANGSMIRVDIFKVQEKNGKHSYYSVPIYVADTVKAELPKKAVYRRPYDEWPEMKEADFAFSFYPNDVVYIGGKEIKMNIMPGCTLATENHVKNDFFYYKGLDIATGAMIVINHDGTYKQRGVGIKQLPLIEKYEVSVLGDLVKAPYRQRETFKRKVHGSK

SEQ ID NO: 1073 - protein, 757 aa, unidentified
  REGION 1..757: note = Description of Unknown: uncultivated organism with predicted taxonomy: Megasphaera stantonii
  REGION 1..757: note = MG15-146 effector
AEGLSRRLDDGEWVRVLYHIAKHRGFKSNRKSAASDADEGKVLDAVKENAELLKNYKTVGEMLFRDEKFRDAKRNKGGSYSFCVGRDMLADEIAALFDAQRRNGNKHASEEFEKACLKIFADQRSFDDGPDINSPSPYAGNQIEKMIGNCSLEPKEKRAPKASYSFMRFSLLQKINHLRLKDAKGEERPLDDEERAAVEALAWKSASLTYGAIRKALSLSDDLRFTDLYYRWDKKPEEIEKKKLPFAAPYHEIRKALDKLEKGRIQKLTPDALDAIGYIFTVFKNDTKIAAALKTAGVEEEDAAALMDYGLTFRGFGHISVKACRKLIPHLEKGMTYDKACKEAGYDLQKTGGEKTKLLSGNLEEIREIPNPVVRRAIAQTVKVVNAVIRRYGSPVAVNVELAREMGRSFQERRDMMKSMEDNNAANEKLKEEIKKDYGIAHPNGLDIVKYKLFKEQGERCAYSLKPMDARQVLKDPSYAEVDHILPYSRSFDDSYANKVLVLAKENRDKGNRTPMEYMANLPERKHAFITWVKSNVRNPKKRDNLLLEKFDGDKEDAWKERHLNDTKYISSFVKNLLDDHLEFAPWLTGKNRHVMAVNGAVTDYTRKRLGIRKIREDGDLHHAVDAAVIAIVTQGNIQKLTNYSKQIERSRAFAKNPDGSYSDRETGEILKKDELIVRMSKHFPEPWPGFRRELEARVSDHPKELLESLRLPTYTPEELDALKPPFVSRMPTRKVRGAAHLETVVSPRLQKEGLIV

SEQ ID NO: 1074 - protein, 913 aa, unidentified
  REGION 1..913: note = Description of Unknown: uncultivated organism with predicted taxonomy: Selenomonas ruminantium
  REGION 1..913: note = MG15-147 effector
SDDYKMTISREMLLQEIRSLFASQRNYGNPYASKDFEEAYTSIFLSQRNFDEGPGEGSPYAGNQIEKMIGKCTLEGGELRAPKASYSFMQFNLLQKLCHIRIRGKAGERALTADEIKRLESLAWSNASLNYGHFRKELCLADTERFTDVYYKTEDFVQEEKKNKIKITAAYHEIAKALKDKGKDYIATLSIDQLDAIAYAFSAYKSDSKIRDYMQAKGVLSEDVDLLLANLSGFSKFGHISIKACRKLIPYLKKGMGYIKACEAAGYKDKLVQKKKTLSGNIEEVQEIPNPVVKRAVSQTIKVINAIVRKYGSPVEIHIELAREMARSKKDRDAMTTSMEKNRAENETIKRELMEKGLLSPKGLDIVKWKLYKEQQGVCAYSQKVIDVERLLHEGTYAEVDHILPYSRSFDDSYRNKVLVLTEENRKKGNRTPMEYFADMPERKHAFVTWCKGNIRDFKKREHLLKENYDREDAGWKDRHLNDTRYITKLVKDLIEKYLEMAPFNTNRKRHVVAVNGAVTAYVRKRLGIAKIREDGDLHHAVDAAVIACVTEGMINRISRYSKRREILYNNKLVDEETGEIIKGKEDFPEPWPWFRKELDARTSKNPALLLREMKLPTYTEAELENLREPYVSRMPCHKVRGAGHESKIRSPRLLKDGKTAIKTPLVELKLTNDKTKIAGYVNPESDKLLYDALYERLCKFGGKAEKAFAEPFYKPKADGGQGPLVKSVKISKLSTMNVELNKGNGIADNERRVRVDVFYVSEGKKKGYYLVPIYVADTIKPVLPKKAVKAHKAYDEWEEMKAEDFSFSLYPNDLIYIEHKTGIKFSLISKNSTLSKEINVKKGYFYYRGMDIAAGAINIENFDGVYQARGLGVKTLNCLRKGEIDILGNIRLINREYRHCFTKMKRDRYKKE

SEQ ID NO: 1075 - protein, 1098 aa, unidentified
  REGION 1..1098: note = Description of Unknown: uncultivated organism with predicted taxonomy: Selenomonas sp. AE3005
  REGION 1..1098: note = MG15-148 effector
MEQRYILGLDIGIASVGWAALALNDKDEPYRILDMNSRIFPEAEQPETGESLAAPRRQARGMRRRLRRRRHRLARLRSLLVREGVLSKAALAALYEKPVTDIYAVRCEGLERRLTPEEWTRVLLYFAKHRGFKSNRLAEAGNAEEGQVKEALKANAELLADYRTVGEMLYKDAKFQAHKRNKAAAYQMTVSRNMLLSEIKQLFAAQREQNNEHASEQFEEKYVEVFSSQRNFDEGPGGESPYGGNLIERMIGTCTLERAAGEKRAPKASYSFMRFSLLEKLSHIRITANGATRSLTDEERQQLEQLAWQSPSLTYAHLRKALGLHETERFNDLYYSKDIAETEKKKKFGFTAAYHEVRKALDKLEKDYIKKLSPDELDVIGYAFSVFKNEGNLRSYLLNNGIADEVCSTLLVNLKPFRKFGHISVKACRKLIPYLEQGMTYDAACRAAGYEPSGDNGLKHKFLSGAMEEVREIPNPVVRRAISQTIKVLNALIRRYGSPVEIHVELAREMARNFQDRRDMQHKMEDNRKANERIIQELRENGLLQPNGLDIVKWKLYKEQQGICAYSQKPFDVERLLHDGKYAEVDHILPYSRSLDDSYANKVLVMAGENQLKRNRTPLEYMADDEEKLNAFVCWANTSIRDLRKRQNLLRKNFHSEEKEWKDRHLNDTKYISRFVYNLLRQHLEFSPFIGGRKRHVLAVNGSVTAYVRKRLGINKIRANGDLHHAVDAVIIACVTQGMVNIIEQYSKARELWEISAKEPFPEPWQGFRKELEARTSDNPAEELRRVQVKNYTEEELQAVKPIFVSRMPRRKIRAAAHEATIHSAKHLNEGITVVKKKLSELKLTNDKMAIAGYFNPSSDKLLYQALLTRLQAFAGNAKKAFAEPFYKPRADGSPGPLVRSVKIAAKSVLQVDVNKGKGVAANDSMVRVDVFYRAEGKGKGYYLVPVYVADTVKDELPVKAVTRRKAYKDWDEMKSDEFLFSLYKDDLLLVRSAKDIELSFLGRKGESGNLLTTYKTREFLCYYQGTNRAACSITICNQDNTYAKESMGIKTLALLKKMQVDVLGQVSEAPAEKRQGFKQMKKDPHRRCGKNVSAPDD

SEQ ID NO: 1076 - protein, 1039 aa, unidentified
  REGION 1..1039: note = Description of Unknown: uncultivated organism with predicted taxonomy: Selenomonas ruminantium
  REGION 1..1039: note = MG15-149 effector
MDLRYVLGLDIGIASVGWAVLALDDNDEPYKIEALNSRIFEKAENPKDGSSLAAPRREARSMRRRLRRRRHRSERVRHLLVREGVLSAEEAESLCSSAIPKNAVRGKGLHALRYEGLDRKLSPVEWSRVLLYFAKHRGFKSNRKNGTADKDEGRVLQAIAVNMELLSKYRSAGEMLYLDERFKARKRNASDDYKMTISRDMLLQEIRILFASQRNYGNPYASEGLEEAYATIFLSQRNFDEGPGEGSPYAGNQIEKMIGKCTLEGEELRAPKASYSFMRFNLLQKLSHIRIRGKVGERALTEEEIKRLESLAWSNASLNYGHFRKELGLADTDRFADVYYKTEDFVQEEKKNKIKITASYHEIAKALKDKGKEYITTLSIDQLDAIAYAFSAYKSDSKIRAYMQAKGVSSEDAALLLANLSGFSKFGHISIKACRKLMPYFEKGMGYIKACEAAGYKDKLVQKRKTLSGNIKEVQEIPNPVVKRAVSQTIKVINAIVRQYGSPVEIHIELAREMARSKTDRDAMTSSMEKNRAANEKVKKELMEKGLLSPKGLDIVKWKLYKEQQGVCAYSQKVIDVERLLHEGTYAEVDHILPYSRSFDDSYRNKVLVLTEENRKKGNRTPMEYFADMPERKHAFVTWCKGNIRDFKKREHLLKENYDREDAGWKDRHLNDTRYITKLVKDIIEKYLEMAPFKTSRKRNVVAVNGAVTAYVRKRLGIAKIRENGDLHHAVDAAVIACVTEGMINRISRYSKRREILYNSKLVDEETGEIIKGKEDFPEPWPWFRKELDARTSKNPALLIRGLKLPTYAEEELENLHEPYVSRMPCHKVRGAGHKDTIRSPRLREEGRSVTKKALTELKLTKDKIRIEGYVNPESDRLLYEALYEKLCQFDGDAKKAFSAPFYKPKADGGQGPLVKKVKISEVSTLNVSVHKGKGIADSDRMLRVDVYYVSEGKKKGYYLVPIYVADTLKPVLPNKAVKAHKVYDEWEEMNVEDFVFSLYPNDLVYIEHKSGFKLKVVSKKSTLQNEMYGKTGVFYYCS

SEQ ID NO: 1077 - protein, 786 aa, unidentified
  REGION 1..786: note = Description of Unknown: uncultivated organism with predicted taxonomy: Selenomonas ruminantium
  REGION 1..786: note = MG15-150 effector
WDKKPEEIEKKKLPFAAPYHEIRKALDKREKGRIQKLTPGALDAIGYIFTVFKNDTKIAAALKEAGIDEADAAALMDYGLTFQGFGHISVKACRKLIPHLETGMTYDKACKEAGYDFHGKSGEKAKLLSGNLEEIREIPNPVVRRAIAQTVKVVNAVIRRYGSPVAVNVELAREMGRTFQERREMMKSMEDNNTKNEKLKEELKDYGVAHPSGLDIVKLKLYKEQGGVCAYSLAAMPIEKVLNDYDYAEVDHILPYSRSFDDSYANKVLVLAKENRDKGNRTPMEYMEKTPGKKHDFVTWVKASVRNPKKRDNLLLEKFDEDKEAAWKERHLTDTKYIGSFVANLLRDHLDFAPWLNGRKQHVLVVNGAVTDYTRKRLGIRKIREDGDLHHAVDAAVIATVTQGNIQKLTNYSKQIERSRAFDKTANGSYADRETGEVLKKDELMVRMSKHFPEPWPGFRHELEARVSDHPKELLESLRLPTYTPEELDALKPPFVSRMPTRKVRGAAHLETVVSPRLQKEGLIVKKVSLEALKLTKEKDAIENYYAPESDRLLYEALLQRLKACDGDGKKAFAEPFHKPKADGTPGPVVKKVKIAEKSTLSVPVHHGRGLAANGGMVRVDVFFIPEGKEKGYYLVPVYTSDVVCGALPMRAVIGAKPYDEWKNMKEEQFLFSLYPNDLVYIESKRGIKGKLPDKMAKKSSLLQTRTQTEGLFYYKGTDIFTASIKVVATDGTYEFRGLGVRTLQKLEKWTVDVLGGALHPLHQEVRQGFSVMKRDPHSPKTMDDC

SEQ ID NO: 1078 - protein, 1098 aa, unidentified
  REGION 1..1098: note = Description of Unknown: uncultivated organism with predicted taxonomy: Selenomonas sp. AE3005
  REGION 1..1098: note = MG15-151 effector
MEQRYILGLDIGIASVGWAALALNDKDEPYRILDMNSRIFPEAEQPKTGESLAAPRRQARGMRRRLRRRRHRLARLRSLLVREGVLSKAALAALYEKPVTDIYAVRCEGLERRLTPEEWTRVLLYFAKHRGFKSNRLAEAGNAEEGQVKEALKANAELLADYRTVGEMLYKDAKFQAHKRNKAAAYQMTVSRNMLLSEIKQLFAAQREQNNEHASEQFEEKYVEVFSSQRNFDEGPGGESPYGGNLIERMIGTCTLERAAGEKRAPKASYSFMRFSLLEKLSHIRITANGATRSLTDEERQQLEQLAWQSPSLTYAHLRKALGLHETERFNDLYYSKDIAETEKKKKFGFTAAYHEVRKALDKLEKDYIKKLSPDELDVIGYAFSVFKNEGNLRSYLLNNGIADEVCSTLLVNLKPFRKFGHISVKACRKLIPYLEQGMTYDAACRAAGYEPSGDNGLKHKFLSGAMEEVREIPNPVVRRAISQTIKVLNALIRRYGSPVEIHVELAREMARNFQDRRDMRHKMEDNRKANERIIQELRENGLLQPNGLDIVKWKLYKEQQGICAYSQKPFDVERLLHDGKYAEVDHILPYSRSLDDSYANKVLVMAGENQLKRNRTPLEYMADDEEKLNAFVCWANTSIRDLRKRQNLLRKNFHSEEKEWKDRHLNDTKYISRFVYNLLRQHLEFSPFIGGRKRHVLAVNGSVTAYVRKRLGINKIRANGDLHHAVDAVIIACVTQGMVNIIEQYSKARELWEISAKEPFPEPWPGFRKELEARTSDNPAEELRRVQVKNYTEEELQAVKPIFVSRMPRRKIRAAAHEATIHSAKHLNEGITVVKKKLSELKLTNDKMAIAGYFNPSSDKLLYQALLTRLQAFAGNAKKAFAEPFYKPRADGAPGPLVRSVKIAAKSVLQVDVNKGKGVAANDSMVRVDVFYRAEGKGKGYYLVPVYVADTVKDELPLKAVTQRKDYADWEIMRSKDFLFSLYKDDLLLVRSTKDIEMKFNEKKKEKSTLPAIFRTREVFAYYQGTDSSTASITVCNHDNTYGKRGMGVKTIALLKKMQVDVLGQISEAPAEKRQGFKQMKKDPHRRCGKNVSAPDD

SEQ ID NO: 1079 - protein, 1100 aa, unidentified
  REGION 1..1100: note = Description of Unknown: uncultivated organism with predicted taxonomy: Selenomonas sp. AE3005
  REGION 1..1100: note = MG15-152 effector
MEQRYVLGLDIGIASVGWAALALNDKDEPYRILDMNSRIFPVAEQSDGASLAAPRRQARGIRRRLRRRRHRLDRVRRLLVREGVLNKAGLTALYEKPVTDIYVIRYEGLERRLTPEEWARVLLFFVKHRGFKSNRLAETANDEDGQVKAALKANEELLVGYRTVGEMLYKDAKFQGHKRNKTADYQMTVSRNMLLEEIKQLFVAQREQNNGHATESFEEKYVEIFSSQRNFDEGPGGDSPYGGNLIEKMIGACTLERANGEKRAPKASYSFMRFNLLEKLSHIRITANGTMRSLTDEERRQLEQLAWRSPSLTYAHLRKALGLQETERFNDLYYSKDTAETEKKAKFSFTAAYHEIRKALDKVEKDYIKKLSPNELDVIGYAFSVFKNERNLRSYLLNNGITENICSTLLDNLKPFRKFGHISVKACRKLIPYLEKGMTYYDACKAAGYDILGKNSRKQKFLSGGMEEVREIPNPVVRRAISQTIKVLNALIRRYGSPVEIHVELAREMARSFQDRKDMHNKMENNRKANEQIIKELRENGLLQPNGLDIVKWKLYKEQQGVCAYSQKTFDVERLLHDGKYDGKYAEVDHILPYSRSFDDSYTNKVLVMAGENQHKGNRTPWEYMRDNEEKWTSFACWTNTAIRDFRKRQNLLRKNFCSEEKEWKERHLNDTKYISRFVYNLLRNHLEFNPFMGGRNRHVLAVSGGVTAYVRKRLGINKIRANGDLHHAVDAVIIACVTQGMVNIIEQYSKAKELWEISAKEPFPEPWIGFRKELEARTSDNPAEALRRMRCKNYSEEELQALKPIFVSRMPRRKVRAAAHEETIRSAKHLDEGFTVVKKKLSDLKLTKDKMAIEGYFNPSSDTLLYQALLERLQKFDGKAAKAFAEPFYKPKADGTPGPLVRTVKIAAKSVLQVDVNKGKGVTDNESMVRVDIFYRAEGKRKGYYLVPVYVADTIKDELPIKAVTRGKPHKDWEEMNPDEFQFSLYKDDLLLVRSTKDIDMKFNEKNGEGALPPIFRTREVLVYYQATDRATASITVCNHDNTYGKRGMGVKTIALLKKMQVDVLGQVSEFPPMKRQGFKQMKKDPHRRCDRNVSASND

SEQ ID NO: 1080 - protein, 999 aa, unidentified
  REGION 1..999: note = Description of Unknown: uncultivated organism with predicted taxonomy: Selenomonas sp. AE3005
  REGION 1..999: note = MG15-153 effector
VTDIYAIRYEGLERRLTTEEWARVLLFFVKHRGFKSNRLAETANDEDGQVKDAIKANAELLVGYRTVGEMLYKDAKFQGHKRNKTADYQMTVSRNMLLEEIKQLFVAQREQNNGHATESFEEKYLEIFSSQRNFDEGPGGNSPYGGNLIEKMIGVCTLERANGEKRAPKASYSFMRFSLLEKLSHIRLTANGTTRSLTDEERSRLEQLAWQSPSLTYAHLRKALGLQETERFNDLYYSKDTAETEKKAKFSFTAAYHEIRKALDKLEKDYIKKLSPNELDVIGYAFSVFKNERNLRSYLLNNGITENVCSTLLDNLKPFRKFGHISVKACRKLIPYLETGMTYYDACKAAGYDVLGKNGCKEKFLSGGMEEVREIPNPVVRRAISQTIKVLNALIRRYGSPVEIHVELAREMARSFQDRRDMHNKMENNRKANEQIIKELRENGLLQPNGLDIVKWKLYKEQQGICAYSQKTFDVERLLHDGKYAEVDHILPYSRSFDDSYTNKVLVMAGENQHKGNRTPWEYMRDNEEKWTSFACWTNTAIRDFRKRQNLLRKNFCSEEKEWKERHLNDTKYISRFVYNLLRNHLEFSPFMGGRNRHVLAVSGGVTAYVRKRLGINKIRANGDLHHAVDAVIIACVTQGMVNIIEQYSKAKELWEISAKEPFPEPWIGFRKELEARTSDNPAEALRRMRCKNYSEEELQALNPIFVSRMPRRKVRAAAHEETIRSAKHLDEGFTVVKKKLSDLKLTKDKMAIEGYFNPSSDTLLYQALLERLQKFDGKAAKAFAEPFYKPKADGTPGPLVRTVKIAAKSVLQVDVNKGKGVTDNESMVRVDVFYRSEGKGKGYYLVPIYVADTVKDELPLKAVTPRKCYMDWETMKPEEFLFSLYKDDLLLVCSSKDIDMKLNEKNGEGVLPPIFRTREVLVYYQATDRATASITVCNHDNTYGKRGMGVKTIALLKKMHVDVLGQVSEFPPMKRQGFKQMKKDPHRRCDRNVSASND

SEQ ID NO: 1081 - protein, 963 aa, unidentified
  REGION 1..963: note = Description of Unknown: uncultivated organism with predicted taxonomy: Selenomonas ruminantium
  REGION 1..963: note = MG15-154 effector
KDGSSLAAPRREARSMRRRLRRRRHRSERVRHLLVREGVLSAEGAESLCSSAIPKNAMLGKGLHALRYEGLDRKLSPVEWSRVLLYFAKHRGFKSNRKNGTADKDEGRVLQAIAVNMELLSKYRSAGEMLYLDERFKARKRNASDDYKMTISRDMLLQEIRILFASQRNYGNPYASEGVEEAYTTIFLSQRNFDEGPGEGSPYAGNQIEKMIGKCTLEGEELRAPKASYSFMRFNLLQKLSHIRIRGKVGERALTEEEIKRLESLAWSNASLNYGHFRKELGLADTDRFADVYYKTEDFVQEEKKNKIKITAAYHEIAKALKDKGKEYITTLSIDQLDAIAYAFSAYKSDSKIRAYMQAKGVSSEDAALLLANLSGFSKFGHISIKACRKLMPYLEKGMGYIKACEAAGYKDKLVQKRKTLSGNIEEVQEIPNPVVKRAVSQTIKVINAIVRQYGSPVEIHIELAREMARSKTDRDAMTSSMEKNRAANEKVKKELMEKGLLSPKGLDIVKWKLYKEQQGVCAYSQKVIDVERLLHEGTYAEVDHILPYSRSFDDSYRNKVLVLTEENRKKGNRTPMEYFADMPERKHAFVTWCKGNIRDFKKREHLLKENYDREDAGWKDRHLNDTRYITKLVKDIIEKYLEMAPFKTSRKRNVVAVNGAVTAYVRKRLGIAKIRENGDLHHAVDAAVIACVTEGMINRISRYSKRREILYNSKLVDEETGEIIKEKEDFPEPWPWFRKELDARTSKNPALLIRELKLPTYAEEELENLHEPYVSRMPCHKVRGAGHKDTIRSPRLRKEGRSVTKKPLTELKLTKDKTKIEGYVNPESDRLLYEALYEKLCQFDGDAKKAFSAPFYKPKADGGQGPLVKKVRISEVSTLNVAVHKGKGIADSDRMLRVDVYYVSEGKKKGYYLVPIYVADTLKPVLPNKAVKAHKACDEWEEMKAEDFSFSLYPNDLIYIEH

SEQ ID NO: 1082 - protein, 910 aa, unidentified
  REGION 1..910: note = Description of Unknown: uncultivated organism with predicted taxonomy: Selenomonas sp. AE3005
  REGION 1..910: note = MG15-155 effector
KANEELLTGYRTVGEMLYKDAKFQGHKRNKTADYQMTVSRNMLLEEIKQLFVAQREQNNGHATESFEEKYLEIFSAQRNFDEGPGGNSPYGGNLIERMIGTCTLERASGEKRAPKASYSFMRFSLLEKLSHIKIKTNGTTRSLTSEERRQLEQLAWQSPSLTYAHLRKALGLQDTERFNDLYYTKDIAGTEKKTKFGFTVAYHEIRKALDKMEKAYIKKLSPEDLDVIGYAFSVFKNEGNLSAYLLNHGITKDVCSILLANLKPFRKFGHISVKACRKLIPYLEQGMTYYDACIAAGYDVAGKNSRKQKFLSGGMEEVREIPNPVVRRAISQTIKVLNALIRRYGSPVEIHVELAREMARSFQDRKDMHNKMENNRKANEQIIKELRENGLLQPNGLDIVKWKLYKEQQGVCAYSQKTFDVERLLHDGKYAEVDHILPYSRSFDDSYTNKVLVMAGENQHKGNRTPWEYMSNNEEKWTAFACWTNTAIRDFRKRQNLLRKKFCSEEKEWKERHLNDTKYISRFVYNLLRNHLEFSPFMGGRNRHVLAVSGGVTAYVRKRLGINKIRANGDLHHAVDAVIIACVTQGMVNIIEQYSKAKELWEISAKEPFPEPWIGFRKELEARTSDNPAEALRRMRCKNYSEEELQALKPIFVSRMPRRKVRASAHEDTIRSAKYLDEGFTIVKKKLSDLKLTKDKMAIEGYFNPSSDTLLYQALLKRLQEFDGKAAKAFADPFYKPRADGTPGPLVRTVKIKTKSVLQVDVNKGKGVTDNKSMVRVDIFYRAEGKRKGYYLVPVYVADTIKDELPIKAVTKGKAYKDWDEMKPDEFLFSLYKDDLLLVRSVKDIELSFLGKKGELGNFLPTYKTREFLCYYQGTNRGACSITICNQDNTYAKESMGIKTLALLKKMQVD

SEQ ID NO: 1083 - protein, 1111 aa, unidentified
  REGION 1..1111: note = Description of Unknown: uncultivated organism with predicted taxonomy: Selenomonas sp. AE3005
  REGION 1..1111: note = MG15-156 effector
YLFINEIEMGRKVMEQRYILGLDIGIASVGWAALALNDKDEPYRILDMNSRIFPEAEQPKTGESLAAPRRQARGMRRRLRRRRHRLARLRSLLVREGVLSKAALAALYEKPVTDIYAVRCEGLERRLTPEEWTRVLLYFAKHRGFKSNRLAEAGNAEEGQVKEALKANAELLADYRTVGEMLYKDAKFQAHKRNKAAAYQMTVSRNMLLSEIKQLFAAQREQNNEHASEQFEEKYVEVFSSQRNFDEGPGGESPYGGNLIERMIGTCTLERAAGEKRAPKASYSFMRFSLLEKLSHIRITANGATRSLTDEERQQLEQLAWQSPSLTYAHLRKALGLHETERFNDLYYSKDIAETEKKKKIGFTAAYHEVRKALDKLEKDYIKKLSPDELDVIGYAFSVFKNEGNLRSYLLNNGIADEVCSTLLVNLKPFRKFGHISVKACRKLIPYLEQGMTYDAACRAAGYEPSGDNGLKHKFLSGAMEEVREIPNPVVRRAISQTIKVLNALIRRYGSPVEIHVELAREMARNFQDRRDMQHKMEDNRKANERIIQELRENGLLQPNGLDIVKWKLYKEQQGICAYSQKPFDVERLLHDGKYAEVDHILPYSRSLDDSYANKVLVMAGENQLKRNRTPLEYMADDEEKQNAFVCWANTSIRDLRKRQNLLRKNFHSEEKEWKDRHLNDTKYISRFVYNLLRQHLEFSPFIGGRKRHVLAVNGSVTAYVRKRLGINKIRANGDLHHAVDAVIIACVTQGMVNIIEQYSKARELWEISAKEPFPEPWPGFRKELEARTSDNPAEELRRVQVKNYTEEELQAVKPIFVSRMPRRKIRAAAHEATIHSAKHLNEGITVVKKKLSELKLTNDKMAIAGYFNPSSDKLLYQALLTRLQAFAGNAKKAFAEPFYKPRADGSPGPLVRSVKIAAKSVLQVDVNKGKGVAANDSMVRVDVFYRAEGKGKGYYLVPVYVADTVKDELPLKAVTQRKDYADWEIMRSKDFLFSLYKDDLLLVRSTKDIEMKFNEKKKEKSTLPAIFRTREVFAYYQGTDSSTASITVCNHDNTYGKRGMGVKTIALLKKMKVDVLGQVSEAPAEKRQGFKQMKKDPHRGCGKNVSAPDD

SEQ ID NO: 1084 - protein, 861 aa, unidentified
  REGION 1..861: note = Description of Unknown: uncultivated organism with predicted taxonomy: Megasphaera stantonii
  REGION 1..861: note = MG15-157 effector
EQPKTGASLAAPRREARGSRRRTRRRRHRMERLRHLFVREGLMTADTLAALFEAPADVYQLRAEGLSRRLDAGEWARVLYHIAKHRGFKSNRKSAASDADEGKVLDAVKENAELLKNYKTVGEMLFRDEKFRDAKRNKGGSYSFCVGRDMLADEIAALFDAQRRNGNQHASEEFEKACLKIFADQRSFDDGPDINSPSPYAGNQIEKMIGSCSLEPKEKRAPKASYSFMRFSLLQKINHLRLKDAKGEERPLDDEERAAVEALAWKSASLTYGAIRKALSLSDDLRFTDLYYRWDKKPEEIEKKKLPFAAPYHEIRKALDKREKGRIQKLTPDALDAIGYIFTVFKNDTKIAAALKTAGVEEEDAAALMDYGLTFRGFGHISVKACRKLIPYLEKGMTYDKACKEAGYDLQKTGGEKTKLLSGNLEEIREIPNPVVRRAIAQTVKVVNAVIRRYGSPVAINVELAREMGRSFQERRDMMKSMEDNNAENEKRKEELKGYGVAHPNGLDIVKLKLYKEQGGVCAYSLAAMPIEKVLKDPSYAEVDHILPYSRSFDDSYANKVLVLAKENRDKGNRTPMEYMANLPERKHAFITWVKSNVRNPKKRDNLLLEKFDGDKEDAWKERHLNDTKYISSFVKNLLEDHLEFAPWLTGRKRHVMAVNGAVTDYTRKRLGIRKIREDGDLHHAVDAAVIAIVTQGNIQKLTNYSKRIEHAFIKNRDGSYTHPDTGEILKKDELMAQMSRHFPEPWPGFRRELEARVSDHPKELLESLRLPTYTPEEIDALKPPFVSRMPTRKVRGAAHLETVVSPRLQKEGLIVKKVSLDALKLTKEKDAIENYYAPESDRLFYEALLQRLQACDGNGK

SEQ ID NO: 1085 - protein, 764 aa, unidentified
  REGION 1..764: note = Description of Unknown: uncultivated organism with predicted taxonomy: Selenomonas ruminantium
  REGION 1..764: note = MG15-158 effector
YYKTEDFVQEEKKNKIKITAAYHEIAKALKDKGKEYITTLSIDQLDAIAYAFSAYKSDSKIRAYMQAKGVSSEDAAILLANLSGFSKFGHISIKACRKLMPYLEKGMGYIKACEAAGYKDKLVQKRKTLSGNIEEVQEIPNPVVKRAVSQTIKVINAIVRQYGSPVEIHIELAREMARSKTDRDAMTSSMEKNRAANEKVKKELMEKGLLSPKGLDIVKWKLYKEQQGVCAYSQKVIDVERLLHEGTYAEVDHILPYSRSFDDSYRNKVLVLTEENRKKGNRTPMEYFADMPERKHAFVTWCKGNIRDFKKREHLLKENYDREDAGWKDRHLNDTRYITKLVKDIIEKYLEMAPFKTTRKRNVVAVNGAVTAYVRKRLGIAKIRENGDLHHAVDAAVIACVTEGMINRISRYSKRREILYNNKLVDEETGEIIKGKEDFPEPWPWFRKELDARTGKNPALLIRDLKLPTYTEAELENLHEPYVSRMPCHKVRGAGHEAKIRSPRLLKDGKTAIKTPLVKLNLTNDKTKIAGYVNPESDKLLYDALYERLCKFGGKAEKAFAEPFYKPKADGGQGPLVKSVKISKSSTMNVELNKGNGIADNERRVRVDVFYVSEGKKKGYYLVPIYVADTIKPVLPNKAVKAHKACDEWEEMKAEDFSFSLYPNDLIYIEHKTGIKFSLISKNSTLSKEINIKKGYFYYRGMDIAAGAINIENVDGVYQARGLGVKTLNCLRKGEIDILGNIRLINREYRHCFTKMKRDRYKKE

SEQ ID NO: 1086 - protein, 1102 aa, unidentified
  REGION 1..1102: note = Description of Unknown: uncultivated organism with predicted taxonomy: Selenomonas ruminantium
  REGION 1..1102: note = MG15-159 effector
MDLRYVLGLDIGIASVGWAVLALDDNDEPYKIEALNSRIFEKAENPKDGSSLAAPRREARSMRRRLRRRRHRSERVRHLLVREGVLSAEGAESLCSSAIPKNAMLGKGLHALRYEGLDRKLSPVEWSRVLLYFAKHRGFKSNRKNGTADKDEGRVLQAIAVNMELLSKYRSAGEMLYLDERFKARKRNASDDYKMTISRDMLLQEIRILFASQRNYGNPYASEGLEEAYATIFLSQRNFDEGPGEGSPYAGNQIEKMIGKCTLEEEELRAPKASYSFMRFNLLQKLSHIRIRGKVGERALTEEEIKRLESLAWSNASLNYGHFRKELGLADMDRFADVYYKTEDFVQEEKKNKIKITAAYHEIAKALKDKGKEYITTLSIDQLDAIAYAFSAYKSDSKIRAYMQAKGVSSEDAALLLANLSGFSKFGHISIKACRKLMPYLEKGMGYIKACEAAGYKDKLVQKRKTLSGNIEEVQEIPNPVVKRAVSQTIKVINAIVRQYGSPVEIHIELAREMARSKTDRDAMTSSMEKNRAANEKVKKELMEKGLLSPKGLDIVKWKLYKEQQGVCAYSQKVIDVERLLHEGTYAEVDHILPYSRSFDDSYRNKVLVLTEENRKKGNRTPMEYFADMPERKHAFVTWCKGNIRDFKKREHLLKENYDREDAGWKDRHLNDTRYITKLVKDIIEKYLEMAPFKTSRKRNVVAVNGAVTAYVRKRLGIAKIRENGDLHHAVDAAVIACVTEGMINRISRYSKRREILYNSKLVDEETGEIIKEKEDFPEPWPWFRKELDARTSKNPALLTRELKLPTYAEEELENLHEPYVSRMPCHKVRGAGHKDTIRSPRLRKEGRSVTKKPLTELKLTKDKTKIEGYVNPESDRLIYEALYEKLCQFDGDAKKAFSAPFYKPKADGGQGPLVKKVKISEVSTLNVSVHKGKGIADSDRMLRVDVYYVSEGKKKGYYLVPIYVADTLKPVLPNKAVKAHKVYDEWEEMNVEDFVFSLYPNDLVYIEHKSGFKLKVVSKKSTLQNETYGKTGVFYYCSMNISTGALNLENLDGTYQVESLGVKTLICLRKGEIDTLGNIRLLENEVRKGFSYMKKDRYRKV

SEQ ID NO: 1087 - protein, 911 aa, unidentified
  REGION 1..911: note = Description of Unknown: uncultivated organism with predicted taxonomy: Megasphaera stantonii
  REGION 1..911: note = MG15-160 effector
RRRTRRRRHRMERLRHLFVREGLMTADALAALFEAPADVYQLRAEGLSRRLDEGEWARVLYHIAKHRGFKSNRKSAASDADEGKVLDAVKENAELLKNYKTVGEMLFRDEKFRDAKRNKGGSYSFCVGRDMLADEIAALFDAQRRNGNKHASEEFEKACLKIFADQRSFDDGPDINSPSPYAGNQIEKMIGSCSLEPKEKRAPKAGYSFMRFSLLQKINHLRLKDAKGEERPLDDEECAAVEALAWKSASLTYGAIRKALSLSDDLRFTDLYYRWDKKPEEIEKKKLPFAAPYHEIRKALDKREKGRIQKLTPDALDAIGYIFTVFKNDTKIAAALKTAGVEEEDAAALMDYGLTFRGFGHISVKACRKLIPHLEKGMTYDKACKEAGYDLQKTGGEKTKLLSGNLEEIREIPNPVVRRAIAQTVKVVNAVIRRYGSPVAINMELAREMGRSFQERRDMMKSMEDNNAENEKRKEELKGYGVAHPNGLDIVKLKLYKEQGGVCAYSLAAMPIEKVLKDPSYAEVDHILPYSRSFDDSYANKVLVLAKENRDKGNRTPMEYMANLPERKHAFITWVKSNVRNPKKRDNLLLEKFDGDKEDAWKERHLNDTKYISSFVKNLLEDHLEFAPWLTGKKRHVMAVNGAVTDYTRKRLGIRKIREDGDLHHAVDAAVIAIVTQGNIQKLTNYSKRIEHAFIKNRDGSYTHPDTGEILKKGELMAQMSRHFPEPWPGFRRELEARVSDHPKALLESLRLPTYTPEELDALKPPFVSRMPTRKVRGAAHLETVVSPRLQKEGLIVKKVSLDALKLTKEKDAIENYYAPESDRLLYEALLRRLKEFDGDGKKAFAEPFHKPKADGTPGPVVKKVKIAEKSTLSVPVHHGRGLAANGGMVRVDLFFIPEGKERGYYLVPVY

SEQ ID NO: 1088 - protein, 1112 aa, unidentified
  REGION 1..1112: note = Description of Unknown: uncultivated organism with predicted taxonomy: Selenomonas sp. AE3005
  REGION 1..1112: note = MG15-161 effector
MDRRYALGLDIGIASVGWAVLALDDADNPYRIINMGTRIFDAAEHPKDGASLAAPRREARSARRRLRRRHHRIERTRKLLIREGLLTKDALQHLFDAPPEKDVYTLRFEGLECCLDGEEWARVLLFFSKHRGFRSNRIVDDEAGDEGKVLSAIRQNEERLQGYRTVGEMLARDPKFADRKRNKAEDYQLTVSRTMLEKEICTLFDAQRQWKNPHASEDFEQEYLEIFSSQRHFDEGPGGRSPYGGDQIEKMIGRCTLEPKEKRAPKASYSFQRFSLLQNINHLRIKSQNTERSLSDEERKAVEALCWKSPSVTYYKIRQEVNLPDDARFAGLYYDKAPEEVEKKTKFSYTVPYHEIRKVLDKWKKGGIQELDVHQLDTIGYAFTVYKNDDRIHRYLCGHGISDAIAEVLVQNLKSFQKFGHISLKACQKLIPFLEQGMVYSDACKAAGYAAPDAEPKKFLSGGMEEIREIPNPVVRRSLSQTVKIINAVIREYGSPVEVHIELAREMARSRQDRDKMEKDIKNNRARNEAIKKELQELGLRNPKGQDIIKWRLYKEQDGFCAYSQKQFDVERLLHDGSYAEIDHILPYSRSFDDSYHNKVLVMAAENRQKGNRTPLEYMAGEEERIHAFRIWVNSRIHDFRKRQNLLREHFDKESTEKDWKERNLNDTKYISRFIYNLIRQHLQFAPFRTDRKQHIISVNGAVTSYIRKRLGIPKIREDGDLHHAVDAVVIASITQGTIQKVTRYSREKETLYHCDSKGRLIDTSTGEILSPEEHQRRLAEKFPEPWPCFRKEIEARISHHPAENLRLLHLPTYTEEELAELEKPIFVSRMPNHKVRGAAHEKSLRSPRLQEDGIIVYSTPLTKLKLGKDNNSILNYYNPDSDRLLYTALLQRLQKFQGDAEKAFKEPFHKPKADGTLGPVVRKVKVTDKSNLNVSLNHGHSIAKNDSDGGMVRVDVYYIPDGKKHGYYLVPVYVSDVVRKTLPNKAIVADTPYAEWPEMREEDFLFSLYKNDLIHLRKKKPAKMKVIQKESTLQKEIAVSEGNAYYISTDSATASIKIINHDNTYYTKGLGVKTLLSLEKMQVDVLGNITPAPREPRQDFSAMKRDRFARK

SEQ ID NO: 1089 - protein, 1082 aa, unidentified
  REGION 1..1082: note = Description of Unknown: uncultivated organism with predicted taxonomy: Megasphaera
  REGION 1..1082: note = MG15-162 effector
MNYVLGLDVGIASVGWAVLELNEEDNPIRIEGLGARIFDKAEVPKTGASLAAPRRMSRGIRRVIRRRRFRLQRVRSYLKRHNILPAEKVDHLYDVPSAIDIYELRKRALTEKVTAEEWARLLIFFAKHRGFKSNRKKASGDADEGEMLKAIAANAEILKNYRTVGEMLCDNEKFRKRKRNRDGAYNFTVSRAMLMEEIHTLFEIQRNLGQKFADEKIEEEYVILFAAQRKFDEGPGENSPYAGNQIEKMIGSCTLEGKKEKRAPKASYAFMAFNLWQKINHLKVNRRGSERFLTEEERRRIADLAWKKEKLTYGSLREVLFLDPEDRFVGLRYDLKKEKEEDLEEPVSEAEKMSFSWVKDYHSIRKALDKVEKNRILKLSHEQLDTIATAFSVYKNEETIEKYLEEGGIEKADREALLERLSGFSKFGHLSLKACYKILPFLEKGEVYSRACERAGYDFSKSSLENIDDIPNPVVKRSISQTLKVINAIILRYGNPVEVHIELARELAKNFRDRKKMEKGMQENQAKNEKIRQRLMSEFGVLRPKGMDIVKFKLCEEQNGECAYSQKHFDMEKLLRDPSYAEVDHIIPYSRSFDDSYNNKVLVLTKENREKRNRIPMEYLADATERKNRFIHWVKSTIRNSRKRENLLRIDYTETTENEWKRRNLQDTQYISKYLYNYLRHHLVLAKGYTERKRRIIPVNGAVTAYFRKRLGINKIRENGDLHHAVDAVIIACATQGIVNKVSRYSKSRELWDYEVDMETGEVLQKKNKNTKDVFPEPWLNFRYELEQKVRVRPLDIPETADITEMEEPFVSHMPNRKIHGPAHKETIRSGRLKEEGYTISKTALTDLKLTEDKEEIKGYYNKESDRLLYEALKKQLQRYGGKAKEAFKEPFHKPKADGTPGPIVNKVKIMEKSTMLIPVNGGKGLASNGNMVRIDVFRVEEKGKKKYYFIPVYVADTVKEELPNRAVLAHKPYEAWKIMKEEDFIFSLYPNDLIFVDAGKGIPFKAALKGSTLDPEKKASRFLMYYKGADIATGSISGVNHDETYKARGIGIQSLREIKKCCIDVLGNISFASKEKRQTFR

SEQ ID NO: 1090 - protein, 767 aa, unidentified
  REGION 1..767: note = Description of Unknown: uncultivated organism with predicted taxonomy: Megasphaera stantonii
  REGION 1..767: note = MG15-163 effector
LREVLFLDPEDRFVGLRYDLKKEKEEDLEEPVSEAEKMSFSWVKDYHSIRKALDKVEKNRILKLSHEQLDTIATAFSVYKNEETIEKYLEEGGIEKADREALLERLSGFSKFGHLSLKACYKILPFLEKGEVYSRACERAGYDFSKSSLENIDDIPNPVVKRSISQTLKVINAMILRYGNPVEVHIELARELARNFRDRKKMEKGMQENQAKNEKIRQRLISEFGVLRPKGMDIVKFKLCEEQNGECAYSQKHFDMEKLLKDPSYAEVDHIIPYSRSFDDSYNNKVLVLTKENREKRNRIPMEYLADAPERKNRFIHWVKSTIWNSRKRENLLRIDYTETTENEWKRRNLQDTQYISKYLYNYLRHHLVLAKGYTERKRRIIPVNGAVTAYIRKRLGINKIRENGDLHHAVDAVIIACATQGIVNKVSRYSKSRELWDYEVDMETGEVLQKKNKNTKDVFPEPWLNFRYELEQKVRVRPLDIPETADITEMEEPFVSHMPNRKIHGPAHKETIRSGRLKEEGYTISKTALIDLKLTEDKEEIKGYYNKESDRLLYEALKKQLQRYGGKAKEAFKEPFHKPKADGTPGPIVNKVKIMEKSTMLIPVNGGKGLASNGNMVRIDVFRVEEKGKKKYYFIPVYVADTVKEELPNRAVLAHKPYEAWKIMKEEDFIFSLYPNDLIFVDAGKEIPFKAALKGSTLDPEKKASRFLMYYKGADIATGSISGVKHDETYKARGIGIQSLRKNKKCCIDVLGNISFASKEKRQTFR

SEQ ID NO: 1091 - protein, 1038 aa, unidentified
  REGION 1..1038: note = Description of Unknown: uncultivated organism with predicted taxonomy: Megasphaera
  REGION 1..1038: note = MG15-164 effector
MNYVLGLDVGIASVGWAVLELNEEDNPIRIEGLGARIFDKAEVPKTGASLAAPRRMSRGIRRVIRRRRFRLQRVRSYLKRHNILPAEKVDHLYDVPSAIDIYELRKRALTEKVTAEEWARLLIFFAKHRGFKSNRKKASGDADEGEMLKAIAANAEILKNYRTVGEMLCDNEKFRKRKRNRDGAYNFTVSRAMLMEEIHTLFEIQRNLGQKFADEKLEEEYVILFAAQRKFDEGPGENSPYAGNQIEKMIGSCTLEGKKEKRAPKASYAFMAFNLWQKINHLKVNRRGSERFLTEEERRRIADLAWKKEKLTYGSLRKVLSLDPEDRFVGFRYDLKKGKAENLEEPVSEAEKMSFSWVKDYHSIRKALDKVEKNRILKLSHEQLDTIATAFSVYKNEETIEKYLEEGGIGKADREALLERLSGFSKFGHLSLKACYKLLPFLEKGEVYSRACELAGYDFSKSSLENIDDIPNPVVKRSISQTLKVINAIILRYGNPVEVHIELARELARNFRDRKKMEKGMQENQAKNEKIRQRLISEFGVLRPKGMDIVKFKLCEEQNGECAYSQKHFDMEKLLRDPSYAEVDHIIPYSRSFDDSYNNKVLVLTKENREKRNRIPMEYLADAPERKNRFIHWVKSTIRNSRKRENLLRTDYTATTENEWKRRNLQDTQYISKYLYNYLRHHLVLAKGYTERKRRIIPVNGAVTAYFRKRLGINKIRENGDLHHAVDAVIIACATQGIVNKVSRYSKSRELWDYEVDMETGEVLQKKNENRKDIFPEPWLNFRYELEQKVRVRPLDIPETADITEMEEPFVSHMPNRKIHGPAHKETIRSGRLKEEGYTISKTALTDLKLTEDKEEIKGYYNKESDRLLYEALKKQLQRYGGKAKEAFKEPFHKPKADGTPGPIVNKVKIMEKSTMPVPVNGGKGLASNGNMVRIDVFRSEEKGKKKYYFIPIYVADTVKEELPNRAALAHKPYEAWKIMKEEDFIFSLYPNDLIFVDAGKEIPFKAALKGSTLDPEKKASRFLMYYKGADIAGGTIN

SEQ ID NO: 1092 - protein, 846 aa, unidentified
  REGION 1..846: note = Description of Unknown: uncultivated organism with predicted taxonomy: Megasphaera stantonii
  REGION 1..846: note = MG15-165 effector
ENSPYAGNQIEKMIGSCTLEGKKEKRAPKASYAFMAFNLWQKINHLKINRRGSERFLTEEERRRIADLAWKKEKLTYGSLREVLFLDPEDRFVGLRYDLKKEKEEDLEEPVSEAEKMSFSWVKDYHSIRKALDKVEKNRILKLSHEQLDTIATAFSVYKNEETIEKYLEEGGIGKADGEALLERLSGFSKFGHLSLKACYKLLPFLEKGEVYSRACELAGYDFSKSSLENIDDIPNPVVKRSISQTLKVINAIILRYGNPVEVHIELARELARSFRDRKKMEKGMQENQAKNEKIRQRLISEFGVLRPKGMDIVKFKLCEEQNGECAYSQKHFDMEKLLKDPSYAEVDHIIPYSRSFDDSYNNKVLVLTKENREKRNRIPMEYLADAPERKNRFIHWVKSTIRNSRKRENLLRTDYTATTENEWKRRNLQDTQYISKYLYNYLRHHLVLAKGYTERKRRIIPVNGAVTAYFRKRLGINKIRENGDLHHAVDAVIIACATQGIVNKVSRYSKSRELWDYEVDMETGEVLQKKNKNTKDVFPEPWLNFRYELEQKVRVRPLDIPETADITEMEEPFVSHMPNRKIHGPAHKETIRSGRLKEEGYTISKTALIDLKLTEDKEEIKGYYNKESDRLLYEALKKQLQRYGGKAKEAFKEPFHKPKADGTPGPIVNKVKIMEKSTMPVPVNGGKGLASNGNMVRIDVFRVEEKGKKKYYFIPVYVADTVKEELPNRAVLAHKPYEAWKIMKEEDFIFSLYPNDLIFVDAGKEIPFKAALKGSTLDPEKKASRFLMYYKGADIATGSISGVNHDETYKARGVGIQSLREIKKCCIDVLGNISFASKEKRQTFR

SEQ ID NO: 1093 - protein, 1227 aa, unidentified
  REGION 1..1227: note = Description of Unknown: uncultivated organism with predicted taxonomy: Bacteroidales
  REGION 1..1227: note = MG16-2 effector
MKRILGLDLGTNSIGWALVEVDEDGKIIKILGIGSRIIPLSPDDANEFTTGKSITKNRKRTEQRTTRKCFDRYQLRRLLLTIELRKFNMLPDERLIKLPVLDLWQLRAKAATKGNRLTLPELGRVLYHLNQKRGYKHAKSDESNDKNQREYVANVNTRYANIKQLGKTIGQFFAEKLEENQVITEKGKFYTYRIKDQVFPRKAYEEEFDQIMECQREFYPEILTDKFIDKVRNEIIYYQRKLKSCKHLVSLCEFEKRAYVNKDGKVVYDGPKVAPRTSPLFQVCKIWESVNNLKIKNRKNDELYITQEQRIAMFNFLNNNEKMTLSDMYKILKIDKSDGWWGGKAIGNGLQGNTTKMQLKKALSNCQNVDELLQFNLDIVDSDKIDEETGEVLKVVSPNCEQEPLYKLWHTIYSIQDKNELKNVLQKKWGITDETTLNSLFALDFVRPGYGNKSSKFIRKILPYLQDGLMYNEACAYIGVNHSNSLTKAENDARELLEKLPQIKKNELRQPVVEKILNQMINVVNAIFDKYGNNNGIDEIRVELARELKQSREERELTDKNNRNRQKENDSNAKLIEEYGIRASRNRIQKYRMWKESRQTCFYCGQVVDVKDFLRGYDVEVEHIIPKALFFDDSFSNKVCSCRKCNSEKGERTAYDYMSSKGEDELNRYIRTVEDRCKKGEISKTKRERLLTPADKIPTDFINRQLRETQYIAKKSVEILKQICRNVWTTSGSVTDFLRHNWGYDEILHTLDFDRYKSGGLTEVIEIEHKGQKHRIERIKDWSKRLDHRHHAVDALVVACTKQSYIQRLNNLNTERDAMYQDIEAQSVEWKEKHSLLEKWIKLQPHPTVSEVTDKVDEILVSFKAGKRVATLGKRSVYKNGKKTVVQNNIIVPRGALCEESVYGQINLIEKNKPIKYLFENPSLIFKPYIKALVEERLKEYNGDTSKAISSLKNNPIYLRKDKSVVLEYGTCYKKEYVKKYSLNSIKAKDVDSIIDKHIREVVRQRLEDNNNNEKAAFASPLYADKQKQIPIKSVRCTTGINIAAPVNYNESNDPISFVKPGNNHHIAIYKDKDGKRQEHIVTFWHAVERKKYGMPVVITNPKEIWDLIIEKSLDLPESFLNCLPNSDWNYEISMQQNEMFVMGMSEDEFQDAIRNNDYKTLNKYLYRVQSVSESDYWLRLHIETMNDKTPEGNIIKKYYRIKSINTFFNFNPHKVKITLLGEIQSS

SEQ ID NO: 1094 - protein, 1165 aa, unidentified
  REGION 1..1165: note = Description of Unknown: uncultivated organism with predicted taxonomy: Bacteroidales
  REGION 1..1165: note = MG16-5 effector
MATKKILGLDLGTNSIGWALIETEDSNPKSILAMGSRIVPLSTDDSTQFAKGQAITKNADRTQKRTARKGLNRYQMRRAMLTEELRRHGMLPERTDENIMDLWRLRSDAATDGKQLSLPQIGRVLYHINQKRGYKHSKADNSANTKQTKYVEAVNQRYRDIQACHQTIGQYFYEQLLSSAVQTPSGSYYTYRIKDKVLPREAYIAEFDQIMKVQRVFYPDVLTDELVDTLRNHIIFYQRPLKSCKHLVSLCEFEKRPFKREDGQIVYSGPKCAPRTSPLAQFCTVWEAVNNITLTNRQNETFEITQEQRVAMADFLNQHDKMGVKDLQKILGISPKDGWWAGKAIGKGLKGNTTFTQLREALGNLPNAEHLLKMKLSMVDAAVDTTTGELIRQVSPQVEEEPLFRLWHLVYSLQNEDELRKALRKQFGIDDEEVLDKLCKIDFVKPGYANKSHKFIRKLLPYLMEGYQYHEACAHIGVNHSDSLTAEQNAARPLLDKIPLLEKNELRQPVIEKILNQMINVVNALKAEYGDIDDVRIELARELKSSKDEREAAFKRNNENERQNKIYENRIREYGIQPSRSRIQKYKMWEESNHLCFYCGKPVNVTDFLAGAEVEIEHIIPQSVLFDDSYSNKVCACRACNQAKGNLTAREFMEKHSKEEYDSYLRRVDDAFNAHRISKTKRDHLLWRKEDIPQDFIDRQLLQSQYIAKKAAEILRQGYRNVYATSGSVTDFLRHQWGYDEILHRLNLPRYQQVEGLTEDVTYDHCGQEHQQERIKGWTKRLDHRHHAIDALTIALTQQSVIQRLNTLNNSREQMFDELGKRTDTPEYTEKRSLLEKWVDAQPHFSVQEVTDKVDGILVSFRAGKRAATPAKRAVYQNGKRHIVQTGLQVPRGALSEETVYGKLGNKYVVKYPLGHQSMKMDDIVDPTIREIVRTRLNAFGGKAKDAFAEPLYSDAAHQMQIKTVRCYTGLQDKAVVPVRFNAQGEPVGFVKMGNNHHIAIYRDAKGQYQESVVSFWQAVERKRYGIPVVIEQPHEVWDKLINSDNIPQDFLETLPHDDWQFVVSLQQNEMFILGMDDADFEAAMEQKDYRTLNKYLYRVQKISSKEYCFRYHTETSVDDKYDGVINKSISMELQKLKRLTSISAFFSQHPHKVRVNLLGEVSAL

SEQ ID NO: 1095 - protein, 1165 aa, unidentified; identical to SEQ ID NO: 1094
  REGION 1..1165: note = Description of Unknown: uncultivated organism with predicted taxonomy: Bacteroidetes
  REGION 1..1165: note = MG16-6 effector

SEQ ID NO: 1096 - protein, 1224 aa, unidentified
  REGION 1..1224: note = Description of Unknown: uncultivated organism with predicted taxonomy: Bacteroides
  REGION 1..1224: note = MG16-7 effector
MKKVLGLDLGVGSIGWALVNVDETHAPVNLLGMGSRIVPLTTDDAKEFTQGNAASKNQKRTQKRTARKGYDRYQLRRQQLTDKLRSLGMLPDERLIKLPVLELWELRANAATPSYKLSLPEIGRVLYHINQKRGYRHSRDEDSDKQQRDYVAAVNNRWKEIREEGKTIGQHFANKLKETEIISEKGKFYTYRIKEQVFPRGAYMEELDRIVEAQKVFWPDIFTDENVDELRNRIIFFQRPLKSCKHLVSLCDFEVRDFVKKNHSGNVITDRNGNQCHILAGPKVAPKSSPLSQESKLWEEINNIRITNSKNDEFFISQEKKVEIYRFLSENEVMKANDLKKILGISANDKEWTIDKAVSKGLTGNTTRTRLRKALSHFKREDLLRFDMQLTDSSFVNPETGEILHEIDPKCEQEPLYRLWHCIYSIDNKEDLAKALENQFGITNKEAIDNLNKIDFVKQGYGSKSAKFIRRILPYLQNGAMYSEACEIIGTNHSGSLTKAENAARQLLQRIPQLNKNELRQPVVEKILNQMINVVNAIAEKFGSIDEIRIEMARELKLSQEARATTAKSIRDREKINLEYAGKIREFGIVPSKNKILKYRLWEEAGQRCFYCGQTISAQEFLSGFDSDIEHIIPKSRLFDDSYSNKACSCRKCNSTKNNMTAYDFMKAQGEDKFKDYCDRVANAYKEGKISRTKRDRFMTPAEKIPKDFISRQLVQTQYISRKAMEILMQICHDVYASSGDVTAYLRRIWGYDEILQRLNIPRYREGGLTEMVTYEHNNQQHTEERIKGWSKRLDHRHHAIDALTIACTRQNIIQRLNNLNAQESSGEDKLNLDKWTMAQAHFSVREVSDAASRILISFKSGKKVATPGKRYIYRNGKRILAQENIIVPRGALSEESVYGKIRTIEKGIAINKLFDRHEDIFQPLIKKIIEERISEFDGNIKAAKASLKKRPLYLDKEKTIELKYGSCFKYEYVIKYPLNTLRAKDVEYIVDENIRETVSDRLSQFNGNVKEAFKEPLYTDGTSPVLIKTVRMFTGLDAVVPVRKDSDGKNIGFVKTGNNHHVAIYKDKEGKYQEHTVTFWHAVERKKYGIPIIIEHPDEVWQKVLDLDAPQSFIDQLPSPDWTYVMSMQQNEMFILGMGDDEFNDAMSAKDYRTLAQHLYRVQKVCSKDYYFRYQYETQLDDKEAALSMKKFYRVTSLSSLQSLNPKKVSINLLGDISLHNII

SEQ ID NO: 1097 - protein, 1224 aa, unidentified
  REGION 1..1224: note = Description of Unknown: uncultivated organism with predicted taxonomy: Bacteroides
  REGION 1..1224: note = MG16-8 effector
MKKVLGLDLGVGSIGWALVNVDETHAPVNLLGMGSRIVPLTTDDAKEFTQGNAASKNQKRTQKRTARKGYDRYQLRRQQLTDKLRSLGMLPDERLIKLPVLELWELRANAATPSYKLSLPEIGRVLYHINQKRGYRHSRDEDSDKQQRDYVAAVNNRWKEIREEGKTIGQHFANKLKETEIISEKGKFYTYRIKEQVFPRGAYMEEFDRIVEAQKVFWPDIFTDENVDELRNRIIFFQRPLKSCKHLVSLCDFEVRDFVKKDHSGNVITDRNGNQCHILAGPKVAPKSSPLSQESKLWEEINNIRITNSKNDEFFISQEKKVEIYRFLSENEVMKANDLKKILGISANDKEWTIDKAVSKGLTGNTTRTRLRKALSHFKREDLLRFDMQLTDSSFVNPETGEILHEIDPKCEQEPLYRLWHCIYSIDNKEDLAKALENQFGITNKEAIDNLNKIDFVKQGYGSKSAKFIRRILPYLQNGAMYSEACEIIGTNHSGSLTKAENAARQLLQRIPQLNKNELRQPVVEKILNQMINVVNAIAEKFGSIDEIRIEMARELKLSQEARATTAKSIRDREKINLEYAGKIREFGIVPSKNKILKYRLWEEAGQRCFYCGQTISAQEFLSGFDSDIEHIIPKSRLFDDSYSNKACSCRKCNSTKNNMTAYDFMKAQGEDKFKDYCDRVANAYKEGKISRTKRDRFMTPAEKIPKDFISRQLVQTQYISRKAMEILMQICHDVYASSGDVTAYLRRIWGYDEILQRLNIPRYREGGLTEMVTYEHNNQQHTEERIKGWSKRLDHRHHAIDALTIACTRQNIIQRLNNLNAQESSGEDKLNLDKWTMAQAHFSVREVSDAASRILISFKSGKKVATPGKRYIYRNGKRILAQENIIVPRGALSEESVYGKIRTIEKGIAINKLFDRHEDIFQPLIKKIIEERISEFDGNIKAAKASLKKRPLYLDKEKTIELKYGSCFKYEYVIKYPLNTLRAKDVEYIVDENIRETVSDRLSQFNGNVKEAFKEPLYTDGTSPVLIKTVRMFTGLDAVVPVRKDSDGKNIGFVKTGNNHHVAIYKDKEGKYQKHTVTFWHAVERKKYGIPIIIEHPDEVWQKVLDLDAPQSFIDQLPSPDWTYVMSMQQNEMFILGMGDDEFNDAMSAKDYRTLAQHLYRVQKVCSKDYYFRYQYETQLDDKEAALSMKKFYRVTSLSSLQSLNPKKVSINLLGDISLHNII

SEQ ID NO: 1098 - protein, 1224 aa, unidentified; identical to SEQ ID NO: 1096
  REGION 1..1224: note = Description of Unknown: uncultivated organism with predicted taxonomy: Bacteroides sp. CAG:770
  REGION 1..1224: note = MG16-9 effector

SEQ ID NO: 1099 - protein, 1224 aa, unidentified
  REGION 1..1224: note = Description of Unknown: uncultivated organism with predicted taxonomy: Bacteroides
  REGION 1..1224: note = MG16-10 effector
MKKVLGLDLGVGSIGWALVNVDETHAPVNLLGMGSRIVPLTTDDAKEFTQGNAASKNQKRTQKRTARKGYDRYQLRRQQLTDKLRSLGMLPDERLIKLPVLELWELRANAATPSYKLSLPEIGRVLYHINQKRGYRHSRDEDSDKQQRDYVAAVNNRWKEIREEGKTIGQHFANKLKETEIISEKGKFYTYRIKEQVFPRGAYMEEFDRIVEAQKVFWPDIFTDENVDELRNRIIFFQRPLKSCKHLVSLCDFEVRDFVKKNHSGNVITDRNGNQCHILAGPKVAPKSSPLSQESKLWEEINNIRITNSKNDEFFISQEKKVEIYRFLSENEVMKANDLKKILGISANDKEWTIDKAVSKGLTGNTTRTRLRKALSHFKREDLLRFDMQLTDSSFVNPETGEILHEIDPKCEQEPLYRLWHCIYSIDNKEDLAKALENQFGITNKEAIDNLNKIDFVKQGYGSKSAKFIRRILPYLQNGAMYSEACEIIGTNHSGSLTKAENAARQLLQRIPQLNKNELRQPVVEKILNQMINVVNAIAEKFGSIDEIRIEMARELKLSQEARATTAKSIRDREKINLEYAGKIREFGIVPSKNKILKYRLWEEAGQRCFYCGQTISAQEFLSGFDSDIEHIIPKSRLFDDSYSNKACSCRKCNSTKNNMTAYDFMKAQGEDKFKDYCDRVANAYKEGKISRTKRDRFMTPAEKIPKDFISRQLVQTQYISRKAMEILMQICHDVYASSGDVTAYLRRIWGYDEILQRLNIPRYREGGLTEMVTYEHNNQQHTEERIKGWSKRLDHRHHAIDALTIACTRQNIIQRLNNLNAQESSGEDKLNLDKWTMAQAHFSVREVSDAASRILISFKSGKKVATPGKRYIYRNGKRILAQENIIVPRGALSEESVYGKIRTIEKGIAINKLFDRHEDIFQPLIKKIIEERISEFDGNIKAAKASLKKRPLYLDKEKTIELKYGSCFKYEYVIKYPLNTLRAKDVEYIVDENIRETVSDRLSQFNGNVKEAFKEPLYTDGTSPVLIKTVRMFTGLDAVVPVRKDSDGKNIGFVKTGNNHHVAIYKDKEGKYQKHTVTFWHAVERKKYGIPIIIEHPDEVWQKVLDLDAPQSFIDQLPSPDWTYVMSMQQNEMFILGMGDDEFNDAMSAKDYRTLAQHLYRVQKVCSKDYYFRYQYETQLDDKEAALSMKKFYRVTSLSSLQSLNPKKVSINLLGDISLHNII

SEQ ID NO: 1100 - protein, 1224 aa, unidentified; identical to SEQ ID NO: 1099
  REGION 1..1224: note = Description of Unknown: uncultivated organism with predicted taxonomy: Bacteroides
  REGION 1..1224: note = MG16-11 effector

SEQ ID NO: 1101 - protein, 1165 aa, unidentified; identical to SEQ ID NO: 1094
  REGION 1..1165: note = Description of Unknown: uncultivated organism with predicted taxonomy: Bacteroidetes
  REGION 1..1165: note = MG16-12 effector

SEQ ID NO: 1102 - protein, 1224 aa, unidentified; identical to SEQ ID NO: 1096
  REGION 1..1224: note = Description of Unknown: uncultivated organism with predicted taxonomy: Bacteroides
  REGION 1..1224: note = MG16-13 effector

SEQ ID NO: 1103 - protein, 1224 aa, unidentified
  REGION 1..1224: note = Description of Unknown: uncultivated organism with predicted taxonomy: Bacteroides sp. CAG:770
  REGION 1..1224: note = MG16-14 effector
MKKVLGLDLGVGSIGWALVNVDETHAPVNLLGMGSRIVPLTTDDAKEFTQGNAASKNQKRTQKRTARKGYDRYQLRRQQLTDKLRSLGMLPDERLIKLPVLELWELRANAATPSYKLSLPEIGRVLYHINQKRGYRHSRDEDSDKQQRDYVAAVNNRWKEIREEGKTIGQHFANKLKETEIISEKGKFYTYRIKEQVFPRGAYMEEFDRIVEAQKVFWPDIFTDENVDELRNRIIFFQRPLKSCKHLVSLCDFEVRDFVKKNHSGNVITDRNGNQCHILAGPKVAPKSSPLSQESKLWEEINNIRITNSKNDEFFISQEKKVEIYRFLSENEVMKANDLKKILGISANDKEWTIDKAVSKGLTGNTTRTRLRKALSHFKREDLLRFDMQLTDSSFVNPETGEILHEIDPKCEQEPLYRLWHCIYSIDNKEDLAKALENQFGITNKEAIDNLNKIDFVKQGYGSKSAKFIRRILPYLQNGAMYSEACEIIGTNHSGSLTKAENAARQLLQRIPQLNKNELRQPVVEKILNQMINVVNAIAEKFGSIDEIRIEMARELKLSQEARATTAKSIRDREKINLEYAGKIREFGIVPSKNKILKYRLWEEAGQRCFYCGQTISAQEFLSGFDSDIEHIIPKSRLFDDSYSNKACSCRKCNSTKNNMTAYDFMKAQGEDKFKDYCDRVANAYKEGKISRTKRDRFMTPAEKIPKDFISRQLVQTQYISRKAMEILMQICHDVYASSGDVTAYLRRIWGYDEILQRLNIPRYREGGLTEMVTYEHNNQQHTEERIKGWSKRLDHRHHAIDALTIACTRQNIIQRLNNLNAQESSGEDKLNLDKWTMAQAHFSVREVSDAASRILISFKSGKKVATPGKRYIYRNGKRILAQENIIVPRGALSEESVYGKIRTIEKGIAINKLFDRHEDIFQPLIKKIIEERISEFDGNIKAAKASLKKRPLYLDKEKTIELKYGSCFKYEYVIKYPLNTLRAKDVEYIVDENIRETVSDRLSQFNGNVKEAFKEPLYTDGTSPVLIKTVRMFTGLDAVVPVRKDSDGKNIGFVKTGNNHHVAIYKDKEGKYQEHTVTFWHAVERKKYGIPIIIEHPDEVWQKVLDLDAPQSFIDQLPSPDWTYVMSMQQNEMFILGMGDDEFNDAMSAKDYRTLAQHLYRVQKVCSKNYYFRYQYETQLDDKEAALSMKKFYRVTSLSSLQSLNPKKVSINLLGDISLHNII

SEQ ID NO: 1104 - protein, 1221 aa, unidentified
  REGION 1..1221: note = Description of Unknown: uncultivated organism with predicted taxonomy: Bacteroides sp. CAG:770
  REGION 1..1221: note = MG16-15 effector
MKKVLGLDLGVGSVGWSLVNVDDNYKPTEILGIGSRIISLSPDESSEFTSGNAASKNQKRTQKRTARKGYDRYQMRRQALTEKLRELKMLPDERLIKLPVLELWTLRAKAATPGEKLTLPEIGRVLYHINQKRGYRHAKSDDSADKEQRDYVQTVNKRYQEIKDEGTTIGQHFAIKLKESEIVTDKGPFYNYRIKEQVFPRDAYIEEFDRIMDCQKTFYPEELSEDNIDEIRNKIIFHQRDLKSCKHLVSQCEFMTRSFLDADHKPILNSSGELVMSGPKVAPKSSPIFQACKIWEEINNLSIRNKENDELHISPEQKKDIFEYLDNNEKINATTLYKILGIGKGDGWSVDKALSKGFTGNTTKVAIAKALGKEHNTKKSDLLRFDLRLKENGVNKDTGEIIYEIDPTCENEPLYRLWHVIYSINDKDALRHALTNQFGINDGESLRELTKIDFVKQGYGSRSAKFMRKLLPALMDGARYSEACDMIGINHSGSLTKSENEARELLHKIPQLQKNELRQPVVEKILNQMINVVNAVIDQFGSIDEIRVEMARELKLSKEGRAATAKNIRDREKMNNEMAEKIKELGITPSKNKILKYRLWQESGQKCFYCGQPVGAAEFLSGLDVEIEHIVPKALLFDDSFSNKVCACRKCNAEKSNTTAYDYMKSKGENEFNDYLRRVDAAFNEHKISFTKRSRLLTPTDKLPKDFISRQLVQTQYISRKAMEILKQVCHNVYGSSGEVTSYLRRIWGYDEILHSLDLPRYREGGMTAEVSYDHRGQTHTEERIKDWSKRLDHRHHAIDALTIACTRQSIIQRLNNLSAMTAVAGESMSLDKWTLAQPHFSVQEVSDNVSRILVSFKAGKKVTTPGKRYVYRGGKRILAQEGLLIPRGALCEESVYGRIHSLEKEVPVKKLFERVDDIVKPGIRAAVEERLRACDNDVKVACASLKKEPLYLDVEKTIPLEYGTCYKAEYVMRYALSALKPKDVEFIVDEHIRKVVSERLSEYGNDPKKAFAEPLYADKSKTIPIRAVRCYTGLAQVVPVKKDSKGNDIGFVKPGNNHHIAIYRDAEGTYHESIVTFWDSVERKKYGLPVIIRKPGEIWDILIDKNIPEELAAGLPAPDWQFVMSMQQNEMCVLGMEDDEFRDAMEVKDYKTLGAHLYRVQKLASIYYVFRHQYETQLDDSKGAQIMKKFYRAQSFKALFALHPRKVSVSLLGEMALKDD

SEQ ID NO: 1105 - protein, 1221 aa, unidentified
  REGION 1..1221: note = Description of Unknown: uncultivated organism with predicted taxonomy: Bacteroides sp. CAG:709
  REGION 1..1221: note = MG16-16 effector
MKKILGLDLGVGSIGWSLINADKDNKPIAILGLGSRIISLSPDESSEFTSGNAASKNQKRTQKRTARKGYDRYQMRRQALTDKLRELKMLPDEHLIKLPVLDLWTLRARAATPGERLTLPEIGRVLYHINQKRGYRHSRSDDSADKEQREYVQAINKRFQEIREEGVTIGQHFVKKLKESEVVTDKGAFYNYRIKEQVFPRDAYVAEFDKVMDCQKVFYPEELSEANINELRNEIIFYQRNLKSCKHLVSRCEFMTRSFLDEEHRPVLDASGKLVISGPKVAPKSSPIFQVCKIWEEINNLSIRNKENDELHISPEQKKDIFEYLDNNEKITSAALYKILGIGKGDGWSVDKALSKGFTGNTTKVAISKALGKANDAKKRDLLRFDLRLKENGVNKDTGEIVCEIDPECENEPLYKLWHVIYSINDKDAQRHALTNQFGINDEASLAELSKIDFVKQGYGSRSVKFMRKLLPSLMDGAKYSEACDVIGVNHSGSLTKSENEARELLQRIPQLQKNELRQPVVEKILNQMINVVNAVIEKFGGVDEIRVEMARELKLSKEGRAATAKNIRDREKENKEIADKIIELGVTPSKNKILKYRLWQEAGQKCFYCGQPVGATEFLNGLDVEIEHVVPKALLFDDSFSNKVCACRKCNAEKRNSTAYDYMKSKGENAFNDYLRRVDTAFSEHKISFTKRSRLLTPADKIPKDFISRQLVQTQYISRKAMEILKQVCHNVYGSSGEVTSYLRRIWGYDEILHSLDLPRYREGGMTAEVSYEHRGQTHTEERIKDWSKRLDHRHHAIDALTIACTRQSVIQRLNNLSSMTAVAGEAMSLDKWTLAQPHFSVQEVSDNVSQILVSFKAGKKVTTPGKRYVYRGGKRILAQEGLLIPRGALCEESVYGRIHSLEKGVPVKKLFERVDDIVKPGIRAAVEERLRACDNDVKVACASLKKEPLYLDAEKTIPLEYGTCYKAEYVMKYALSALKPKDVEYIVDEHIRKVVSERLSEYGNDPKKAFAESLYADDAKTIPVRTVRCYTGLDQVVPVKKDVAGNDIGFVKPGNNHHIAIYRDADGKFHECVVTFWDAVERKKYGIPVIVRNPDEVWDVVIDKNVPEELAAGLPALGWSFVTSLQQNEMFVLGMEDDEFRDAMAEADYKALGAHLYRVQKLAGSDYYFRSHYETLLDDSAGARIMKKFYRVRSFNALFNLHPRKVAVSLLGEMSLKND

SEQ ID NO: 1106 - protein, 1221 aa, unidentified
  REGION 1..1221: note = Description of Unknown: uncultivated organism with predicted taxonomy: Bacteroides sp. CAG:770
  REGION 1..1221: note = MG16-17 effector
MKKVLGLDLGVGSVGWSLVNVDDNYKPTEILGIGSRIISLSPDESSEFTSGNAASKNQKRTQKRTARKGYDRYQMRRQALTEKLRELKMLPDERLIKLPVLELWTLRAKAATPGEKLTLPEIGRVLYHINQKRGYRHAKSDDSADKEQRDYVQTVNKRYQEIKDEGTTIGQHFAIKLKESEIVTDKGPFYNYRIKEQVFPRDAYIEEFDRIMDCQKTFYPEELSEDNIDEIRNKIIFYQRNLKSCKHLVSQCEFMTRSFLDAEHKPILNSSGELVMSGPKVAPKSSPIFQACKIWEEINNLSIRNKENDELHISPEQKKDIFEYLDNNEKINATALYKILGIGKGDGWSVDKALSKGFTGNTTKGAIAKVLGKDHNTKKSDLLRFDLRLKENGVNKDTGEIIYEIDPTCENEPLYRLWHVIYSINGKDALRHALTNQFGINDEESLRELTKIDFVKQGYGSRSAKFMRKLLPALMDGARYSEACDMIGINHSGSLTKSENEARELLHKIPQLQKNELRQPVVEKILNQMINVVNAVIEQFGSIDEIRVEMARELKLSKEGRAATAKNIRDREKMNNEMAEKIKELGITPSKNKILKYRLWQESGQKCFYCGQPVGAAEFLSGLDVEIEHIVPKALLFDDSFSNKVCACRKCNAEKSNTTAYDYMKSKGENEFNDYLRRVDAAFNEHKISFTKRSRLLTPADKLPKDFISRQLVQTQYISRKAMEILKQVCHNVYGSSGEVTSYLRRIWGYDEILHSLDLPRYREGGMTAEVSYDHRGQTHTEERIKDWSKRLDHRHHAIDALTIACTQQSIIQRLNNLSAMTAVAGESMSLDKWTLAQPHFSVQKVSDNVSRILVSFKAGKKVTTPGKRYVYRGGKRVLVQEGLLIPRGALCEESVYGRIHSLEKEVPVKKLFERVDDIVKPGIRTAVEERLRACDNDVKVACASLKKEPLYLDVEKTIPLEYGTCYKAKYVMRYALSALKPKDIEFIVDEHIRKVVSERLSEYGNDPKKAFAEPLYADKSKTIPIRAVRCYTGLAQVVPVKKDSKGNDIGFVKPGNNHHIAIYRDAEGTYHESIVTFWDSVERKKYGLPVIIRKPGEIWDILIDKNIPEELAAGLPAPDWQFVMSMQQNEMFVLGMEDDEFRDAMEVKDYKTLGAHLYRVQKLASIDYYFRSQYETALDNSAGARMMKKFYRINSIKSLFALHPRKVSVSLLGEMALKDD

SEQ ID NO: 1107 - protein, 1220 aa, unidentified
  REGION 1..1220: note = Description of Unknown: uncultivated organism with predicted taxonomy: Bacteroides sp. CAG:770
  REGION 1..1220: note = MG16-18 effector
MKKILGLDLGVGSVGWSVISCDDEHRPLEILGMGSRIVPLTPDESNEFSSGNAASKNQSRTQKRTARKGYDRYQLRRQALTVKLRELGMLPDEALIKLPVLDLWTLRARAATPGDKLSLPEIGRVLYHLNQKRGYRHSKQDDSADKTQRDYVQAVNKRFQEIKDEGLTIGQHFAEKLKESEIITDKGAFYNYRIKEQVFPRAAYVEEFDRIIQCQREFYPEVFTEAIVNEIRNEIIYYQRPLKSCKHLVSVCEFMQRELFDAEHNPIRNGKGEIVVAGPKCAPKSSPLAQVCKIWEEVNNIRITNKENDEYFISIDNKHEIFDFLNTHEKMKADDLFKILGLAKNSGWSADRAMSKGMVGNTTRVALMKALKGRRDIEEVLRFDLSAVESNQVNADTGEVLMEISAECEREPLYRLWHIIYSISDKNEQKSALKSQFGILDESMLESLCKIDFVKQGYSSRSFKFMRKILPSLMDGAKYSEACDAVGINHSDSITKAENQARELLVKLPQLQKNELRQPVVEKILNQMINVVNAVIDKYGAIDEIRVEMARELKLSKEGRESAAKNIRAREKANEEIARRIEELGLVPSKNKILKYRLWEESGKRCFYCGQPVSAAEFLNGLDVEIEHVIPKSLLFDDSFSNKVCACRKCNAEKDNATAFDFMKGRGENAFEDYLKRVETAFKENRISQTKKNRLLTPADKIPKDFISRQLVQTQYISRKAMEILNQVCRNVYGSSGDVTAYLRRIWGYDEILHSLDLPRYREGNLTGDVTYVHRGQTHTEERIKDWSKRLDHRHHAIDALTIASTRQSIIQRLNTLNAKTAIGEEQISLDKWTLAQAHFSVADVADHVADILVSFKSGKKVATPGKRYVYKAGRRRVVQENILVPRGALSEESVYGRIKSIEEKIPVKKLFERADDIVKPRIRHLIGERLEACGGDCSKAVSSLRKSPLYLDEEKTIMLEYGSCFKPEYVIKYSLNSIKAKDAVSIVDKHVREVVTERLAAFGDDPKKAFAEPLYADEAGKIQIKTVRCYTGLSQVVPVKKDADGNDIGFVKPGNNHHIAIYKDADGKYQECIVTFRDAVERKKYGIPVVVRKPAAVLDTVIDKNVPEDLAGGLPSPEWTFVMSMQQNEMFVLGMGDDEFNDAMAGRDYKSLGEHLYRVQSISHADYYFRSQYETMLDNSKNAMAMKKYYRIRSFKALFALNPRKVSISLLGEISLKDD

SEQ ID NO: 1108 - protein, 1220 aa, unidentified
  REGION 1..1220: note = Description of Unknown: uncultivated organism with predicted taxonomy: Bacteroides sp. CAG:770
  REGION 1..1220: note = MG16-19 effector
MKKILGLDLGVGSVGWSVISCDDEHRPLEILGMGSRIVPLTPEESNEFSSGNAASKNQSRTQKRTARKGYDRYQSRRKALTDKLRELDMLPDETLIKLPVLDLWTLRARAATPGDKLSLPEIGRVLYHLNQKRGYRHSKQDDSADKTQRDYVQAVNKRFQEIKDEGLTIGQHFAVKLKESEVITDKGAFYNYRIKEQVFPRAAYVEEFDRIIQCQREFYPEVLTEANVNEIRNEIIYYQRPLKSCKHLVSVCEFMQRELFDAEHNPIRNGKGEIVVAGPKCAPKSSPLAQVCKIWEEVNNIRITNKENDEYFISIDNKHEIFDFLNTHEKMKADDLFKILGIAKNSGWSADKAMSKGMVGNTTRVALMKALKGRRDIDDILRFDLREVESNQVNADTGEVLMEISAECESEPLYRLWHIIYSISDKNEQKSALEKQFGITDESMLESLCRIDFVKQGYSGRSFKFMRKILPSLMDGAKYSEACDVIGINHSDSITKAENQTRKLLTKLPQLQKNELRQPVVEKILNQMINVVNAVIDKYGAIDEIRVEMARELKLSKAGRESAANNIRTRKKVNEEIAKRIEELGLVPSKNKILKYRLWEESGKRCFYCGQPVSATEFLNGLDVEIEHVVPKSLLFDDSFSNKVCACRKCNAEKGNATAFDFMKGRGENAFEDYLKRVETAFKENTISQTKRNRLLTPADKIPKDFIARQLVQTQYISRKAMEILNQVCRNVYGSSGDVTAYLRRIWGYDEILHSLDLPRYRDGNLTEDVTYVHRGQTHTEERIKDWSKRLDHRHHAIDALTIACTRQSIIQRLNTLNAKTAIGEEQMSLDKWTLAQAHFSVADVADHVADILVSFKSGKRVTTPGKRYVYKAGRRIVAQENILVPRGALSEESVYGRIKSIEEKVPVKKLFERADDIVKPRIRRLIRERLETFGGDCSKAVSSLKKSPLYLDEENTIMLEYGSCFKPEYVIKYSLNSIKAKDAVSIVDKHIREVVTARLAAFGDDPKKAFAEPLYSYASGKIQIKTVRCYTGLSQVVPVKRDADGNDIGFVKPGNNHHIAIYKDADGKYQESIVTFCDAVERKKYGIPVDVRNPAAVLDTVIDKNVPEDLAGGLPSPEWTFVMSMQQNEMFVLGMGDDEFNDAMTGRDYKSLGEHLYRVQKLASLYYVFRSQYETKLDDSKGALTMKKFYRTASFKALFALNPRKVSISLLGEISLKDD

SEQ ID NO: 1109 - protein, 1221 aa, unidentified
  REGION 1..1221: note = Description of Unknown: uncultivated organism with predicted taxonomy: Bacteroides sp. CAG:770
  REGION 1..1221: note = MG16-20 effector
MKKVLGLDLGVGSVGWSLVNVDDNYKPTEILGIGSRIISLSPDESSEFTSGNAASKNQKRTQKRTARKGYDRYQMRRQALTEKLRELKMLPDEHLIKLPVLELWTLRAKAATPGEKLTLQEIGRVLYHINQKRGYRHAKSDDSADKEQHDYVQTVNKRYQEIKDEGTTIGQHFAIKLKESEIVTDKGPFYNYRIKEQVFPRDAYIEEFDRIMDCQKTFYPEELSEDNIEEIRNKIIFYQRDLKSCKHLVSQCEFMTRSFLDADHKPILNSSGELVMSGPKVAPKSSPIFQACKIWEEINNLSIRNKENDELHISPEQKKDIFEYLDNNEKINATALYKILDIGKGDGWSVDKALSKGFTGNTTKVAIAKVLGKEHNTKKSDLLRFDLRLKENGVNKDTGEIIYEIDPTCENEPLYRLWHVIYSINDKDALRQALTNQFGINDGESLRELTKIDFVKQGYGSRSAKFMRKLLPALMDGARYSEACDMIGINHSGSLTKSENEARELLHTIPQLQKNELRQPVVEKILNQMINVVNAVIDQFGSIDEIRVEMARELKLSKEGRAATAKNIRDREKMNNEMAEKIKELGITPSKNKILKYRLWQESGQKCFYCGQPVGAAEFLSGLDVEIEHIVPKALLFDDSFSNKVCACRKCNAEKSNTTAYDYMKSKGENEFNDYLRRVDAAFNEHKISFTKRSRLLTPANKLPKDFISRQLVQTQYISRKAMEILKQVCHNVYGSSGEVTSYLRRIWGYDEILHSLDLPRYREGGMTAEVSYDHRGQTHTEERIKDWSKRLDHRHHAIDALTIACTRQSIIQRLNNLSAMSAVAGESMSLDKWTLAQPHFSVQEVSDNVSRILVSFKAGKKVATPGKRYVYRGSKRILAQEGLLIPRGALCEESVYGRINSLEKGVPVKKLFERVDDIVKPGIRTAVEERLRACDNDVKVACASLKKEPLYLDVEKTIPLEYGTCYKAEYVMRYALSALKPKDVEYIVDEHIRKVVSERLSEYGNDPKKAFAEPLYADKSKTIPIRAVRCYTGLAQVVPVKKDSKGNDIGFVKPGNNHHIAIYRDAEGTYHESIVTFLDSVERKKYGLPVIIRKPGEIWDILIDKNIPEELAAGLPAPDWQFVMSMQQNEMFVLGMEDDEFMDAMEVKDYKTLGAHLYRVQNISSLYYVLRLQYETQVDNSNEALNMKKFHRIRSFNALFALHPRKVSVSLLGEMALKDD

SEQ ID NO: 1110 - protein, 1218 aa, unidentified
  REGION 1..1218: note = Description of Unknown: uncultivated organism with predicted taxonomy: Bacteroides sp. CAG:770
  REGION 1..1218: note = MG16-21 effector
MKKILGLDLGVGSVGWSVVSCDDEHKPVEILGMGSRIVPLTPDESSEFSSGNAASKNQSRTQKRTARKGYDRYQLRRQALTVKLRELGMLPDEALIKLPVLDLWKLRARAATPGEKLSLAEIGRVLYHLNQKRGYRHSKEDDSADKTQRDYVQAVNKRFQEIKDEGLTIGQHFAVKLKESEVITDKGAFYNYRIKEQVFPRAAYVEEFDRIIQCQREFYPEVLTAADVNEIRNEIIYYQRPLKSCKHLVSSCEFMQRELFDAEHNPIRNGKGEIVVAGPKCAPKSSPLAQVCKIWEEINNIRVTNKENDEYFISIDNKHEIFDFLNTHEKMKADDLFKILGIAKNSGWSADRAMSKGMVGNTTRVALMKALKGRRDIDDILRFDLRDVESNQVNADTGEVLMEISAECESEPLYRLWHIIYSISDKNEQKSALKNQFGISDESMLESLCKIDFVKQGYSSRSFKFMRKILPSLMDGAKYSEACDVIGVNHSDSITKAENQARELLARLPQLQKNELRQPVVEKILNQMINVVNAVIDKYGAIDEIRVEMARELKLSKAGRESAAKNVRTREKANEEIAKRIEELGLVPSKNKILKYRLWEESGKRCFYCGQPVSATEFLNGLDVEIEHVVPKSLLFDDSFSNKVCACRKCNAEKGNATAFDFMKGRGENAFEDYLKRVETAFKENKISQTKRNRLLTPADKIPKDFISRQLVQTQYVSRKAMEILNQVCRNVYGSSGDVTAYLRRIWGYDEILHSLDLPRYREGNLTGNVTYVHRGQTHTEERIRDWSKRLDHRHHAIDALTIACTRQSIIQRLNTLNAKTAIGEEQMSLDKWTLAQAHFSVADVADHVADILVSFKSGKKVTTPGKRYVYKSGKRRIAQENILVPRGALSEESVYGRIKSIEEKVPVKKLFERVDDIVKPRIRHLIRERLEACGGDCSKAVSSLKKSPLYLDEENTIMLEYGSCFKPEYVIKYSLDSIKAKDAASIVDKHVREVVTARLAAFGDDPKKAFAEPLYADEAGKIQIKTVRCHTGLSQVVPVKKDADGNDIGFVKPGNNHHIAIYKDADGKYCWNVVTLWNAVDRKRYGLPIIVRNPYEISDIIIDSNVPDELASGLPDPNWSFVMSLQQNEMFVLGMSEEEFRCAIENKDYKTLGMHLYRVQKLSHLRFRSQYETRLDDSNEAKSMKKFYEIRSLKSFWFLNPHKVSISLLGEISLKDD

SEQ ID NO: 1111 - protein, 1220 aa, unidentified
  REGION 1..1220: note = Description of Unknown: uncultivated organism with predicted taxonomy: Bacteroides sp. CAG:770
  REGION 1..1220: note = MG16-22 effector
MKKILGLDLGVGSVGWSVISCDDEHRPLEILGMGSRIVPLTPEESNEFSSGNAASKNQSRTQKRTARKGYDRYQSRRKALTDKLRELDMLPDETLIKLPVLDLWTLRARAATPGDKLSLPEIGRVLYHLNQKRGYRHSKQDDSADKTQRDYVQAVNKRFQEIKDEGLTIGQHFAEKLKESEIITDKGAFYNYRIKEQVFPRAAYVEEFDRIIQCQREFYPEVLTEANVNEIRNEIIYYQRPLKSCKHLVSVCEFMQRELFDAEHNPIRNGKGEIVVAGPKCAPKSSPLAQVCKIWEEINNIRVTNKENDEYFISIDNKHEIFDFLNTHEKMKADDLFKILGLAKNSGWSADRAMSKGMVGNTTRVALMKALKGRRDIDEILRFELKEVESNQVNADTGEVLMEISAECEREPLYRLWHIIYSISDKNEQKSALEKQFGITDESMLESLCRIDFVKQGYSSRSFKFMRKILPSLMDGAKYSEACDVIGINHSDSITKAENQTRKLLTKLPQLQKNELRQPVVEKILNQMINVVNAVIDKYGSIDEIRVEMARELKLSKSGRESAAKNIRTREKANEEIAKRIEELGLVPSKNKILKYRLWEESGKRCFYCGQPVSATEFLNGLDVEIEHVVPKSLLFDDSFSNKVCACRKCNAEKGNATAFDFMKGRGENAFEDYLKRVETAFKENKISQTKRNRLLTPADKIPKDFIARQLVQTQYISRKAMEILNQVCRNVYGSSGDVTAYLRRIWGYDEILHSLDLPRYRKGNLTGDVTYVHKGQTHTEERIKDWSKRLDHRHHAIDALTIACTRQSIIQRLNTLNAKTAIGEEQMSLDKWTLAQAHFSVADVADHVADILVSFKSGKRVTTLGKRYVYKAGRRIVAQENILVPRGALSAESVYGRIKSIEEKVPVKKLFERVDDIVKPRIRHLIRERLEACGGDCSKAVSSLKKSPLYLDEENTIMLEYGSCFKPEYVIKYSLNSIKAKDVASIVDKYIREVVTARLAAFGDDPKKAFAEPLYADEAGKIQIKTVRCYTGLSQVVPVKKDADGNDIGFVKPGNNHHIAIYKDADGKYQESIVTFRDAVERKKYGIPVVVRNPVEVLDTVIDKNVPEDLAGGLPSPEWTFVMSMQQNEMFVLGMGDDEFNDAFAGRDYKSLGEHLYRVQKLASLYYVFRSQYETKLDDSNNALAMRKFYRVRSFNALFSLNPRKVSISLLGEISLKDD

SEQ ID NO: 1112 - protein, 1221 aa, unidentified
  REGION 1..1221: note = Description of Unknown: uncultivated organism with predicted taxonomy: Bacteroidales
  REGION 1..1221: note = MG16-23 effector
MKKVLGLDLGVGSVGWSLVNVDDNYKPTEILGIGSRIISLSPDESSEFTSGNAASKNQKRTQKRTARKGYDRYQMRRQALTEKLRELKMLPDERLIKLPVLELWTLRAKAATPGEKLTLPEIGRVLYHINQKRGYRHAKSDDSADKEQRDYVQTVNKRYQEIKDEGTTIGQHFAIKLKESEIVTDKGPFYNYRIKEQVFPRDAYIEEFDRIMDCQKTFYPEELSEDNIDEIRNKIIFYQRDLKSCKHLVSQCEFMTRSFLDAEHKPILNSSGELVMSGPKVAPKSSPIFQACKIWEEINNLSIRNKENDELHISPEQKKDIFEYLDNNEKINATTLYKILGIGKGDGWSVDKALSKGFTGNTTKVAIAKVLGKEHNTKKSDLLRFDLRLKENGVNKDTGEIIYEIDPTCENEPLYRLWHVIYSINDKDALRHALTNQFGINDEESLRELTKIDFVKQGYGSRSAKFMRKLLPALMDGARYSEACDMIGINHSGSLTKSENEARELLHKIPQLQKNELRQPVVEKILNQMINVVNAVIEQFGSIDEIRVEMARELKLSKEGRAATAKNIRDREKMNNEMAEKIKELGITPSKNKILKYRLWQESGQKCFYCGQPVGAAEFLSGLDVEIEHIVPKALLFDDSFSNKVCACRKCNAEKSNTTAYDYMKSKGENEFNDYLRRVDAAFNEHKISFTKRSRLLSPADKLPKDFISRQLVQTQYISRKAMEILKQVCHNVYGSSGEVTSYLRRIWGYDEILHSLDLPRYREGGMTAEVSYDHRGQTHTEERIKDWSKRLDHRHHAIDALTIACTRQSIIQRLNNRSAMTAVAGESMSLDKWTLAQPHFSVQEVSDNVSRILVSFKAGKKVTTPGKRYVYRGGKRVLAQEGLLIPRGALCEESVYGRIHSLEKEVPVKKLFERVDDIVKPGIRTAVEERLRACDNDVKVACASLKKEPLYLDVEKTIPLEYGTCYKAKYVMRYVLSALKPKDVEFIVDEHIRKVVSERLSEYGNDPKKAFAEPLYSDKSKTIPIRAVRCYTGLAQVVPVKKDSKGNAIGFVKPGNNHHIAIYRDADGAYHENVVTFWDTVERKKYGLPVIIRKPGEIWDILIDKNIPEELAAGLPAPDWQFVMSMQQNEMFVLGMEDDEFRDAMEVKDYKTLGAHLYRVQSLSRSDYYYRCQYETQLDNSNGAMLMKKYYRVRSFNALFTLHPRKVSVSLLGEMALKDD

SEQ ID NO: 1113 - protein, 1221 aa, unidentified
  REGION 1..1221: note = Description of Unknown: uncultivated organism with predicted taxonomy: Bacteroides sp. CAG:770
  REGION 1..1221: note = MG16-24 effector
MKKVLGLDLGVSSVGWSLVNVDDNYKPTEILGIGSRIISLSPDESSEFTSGNAASKNQKRTQKRTARKGYDRYQMRRQALTEKLRELKMLPDERLIKLPVLELWTLRAKAATPGEKLTLPEIGRVLYHINQKRGYRHAKSDDSADKEQRDYVQTVNKRYQEIKDEGTTIGQHFAIKLKESEIVTDKGPFYNYRIKEQVFPRDAYIEEFDRIMDYQKTFYPEELSEDNIDEIRNKIIFYQRDLKSCKHLVSQCEFMTRSFLDAEHKPILNSSGELVMSGPKVAPKSSPIFQACKIWEEINNLSIRNKENDELHISPEQKKDIFEYLDNNEKINATALYKILGIGKGDGWSVDKALSKGFTGNTTKVAIAKALGKEHNTKKSDLLRFDLRLKENGVNKDTGEIIYEIDPTCENEPLYRLWHVIYSINDKDALRHALTNQFGINDGESLRELTKIDFVKQGYGSRSAKFMRKLLPALMDGARYSEACDTIGINHSGSLTKSENEARELLHKIPQLQKNELRQPVVEKILNQMINVVNAVIDQFGSIDEIRVEMARELKLSKEGRAATAKNIRDREKMNNEMAEKIKELGITPSKNKILKYRLWQESGQKCFYCGQPVGAAEFLSGLDVEIEHIVPKALLFDDSFSNKVCACRKCNAEKSNTTAYDYMKSKGENEFNDYLRRVDAAFNEHKISFTKRSRLLTPADKLPKDFISRQLVQTQYISRKAMEILKQVCHNVYGSSGEVTSYLRRIWGYDEILHALDLPRYREGGMTAEVSYDHRGQTHTEERIKDWSKRLDHRHHAIDALTIACTRQSIIQRLNNLSAMTAVAGESMSLDKWTLAQPHFSVQEVSDNVSRILVSFKAGKKVTTPGKRYVYRGGKRVLAQEGLLIPRGALCEESVYGRIHSLEKEVPVKKLFERVDDIVKPGIRTAVEERLRACDNDVKVACASLKKEPLYLDAEKTIPLEYGTCYKAEYVMRYALSALKPKDVEFIVDEHIRKVVSERLSEYGNDPKKAFAEPLYADKSKTIPIRAVRCYTGLAQVVPVKKDSKGNDIGFVKPGNNHHIAIYRDAEGTYHENIVTFWDSVERKKYGLPVIIRKPGEIWDILIDKNIPEELAAGLPAPDWQFVMSMQQNEMFVLGMEDDEFRDAMEVKDYKTLGAHLYRVQKLTSIDYYFRSQYETTLDDSAGARMMKKFYRIKSIKSLFALHPRKVSVSLLGEMALKDD

SEQ ID NO: 1114 - protein, 895 aa, unidentified
  REGION 1..895: note = Description of Unknown: uncultivated organism with predicted taxonomy: Bacteroides sp. CAG:770
  REGION 1..895: note = MG16-25 effector
MKKILGLDLGVGSVGWSVVSCDDEHKPVEILGMGSRIVPLTPDESNEFSSGNAASKNQSRTQKRTARKGYDRYQLRRQALTGKLRELGMLPDEALIKLPVMDLWTLRARAATPGEKLSLAEIGRVLYHLNQKRGYRHSKEDDSADKTQRDYVQAVNKRFQEIMNEGLTIGQHFAVKLKESEVITDKGAFYNYRIKEQVFPRAAYVEEFDRIIQCQREFYPEVLTEANVNEIRNEIIYYQRPLKSCKHLVSVCEFMQRELFDAEHNPIRNRKGEIVVAGPKCAPKSSPLAQVCKIWEEVNNIRITNKENDEYFISIDNKHEIFDFLNTHEKMKADDLFKILGLAKNSGWSADRAMSKGMVGNTTRVALMKALKGRRDIEEVLRFDLSAVESNQVNADTGEVLMEISAECEREPLYRLWHIIYSISDKNEQKSALKNQFGISDESMLESLCRIDFVKQGYSSRSFKFMRKILPSLMDGAKYSEACDAVGINHSDSITKAENQARELLVKLPQLQKNELRQPVVEKILNQMINVVNAVIDKYGAIDEIRVEMARELKLSKEGRESAAKNIRAREKANEEIARRIEELGLVPSKNKILKYRLWEESVKRCFYCGQPVSAAEFLNGLDVEIEHVIPKSLLFDDSFSNKVCACRKCNAEKDNATAFDFMKGRGENAFEDYLKRVETAFKENRISQTKKNRLLTPADKIPKDFISRQLVQTQYISRKAMEILNQVCRNVYGSSGDVTAYLRRIWGYDEILHSLDLPRYREGNLTGDVTYVHRGQTHTEERIKDWSKRLDHRHHAIDALTIACTRQSIIQRLNTLNAKTAIGEEQISLDKWTLAQAHFSVADVADHVADILVSFKSGKKVATPGKRYVYKAGRRRVVQENILVPRGALSEESV

SEQ ID NO: 1115 - protein, 1071 aa, unidentified
  REGION 1..1071: note = Description of Unknown: uncultivated organism with predicted taxonomy: Bacteroides
  REGION 1..1071: note = MG16-26 effector
MKKVLGLDLGVGSVGWSLVNVDDNYKPTEILGIGSRIISLSPDESSEFTSGNAASKNQKRTQKRTARKGYDRYQMRRQALTEKLRELKMLPDERLIKLPVLELWTLRAKAATPGEKLTLPEIGRVLYHINQKRGYRHAKSDDSADKEQRDYVQTVNKRYQEIKDEGTTIGQHFAIKLKESEIVTEKGPFYNYRIKEQVFPRDAYIEEFDRIMDCQKTFYPEELSEDNIDEIRNKIIFYQRDLKSCKHLVSQCEFMTRSFLDAEHKPILNSSGELVMSGPKVAPKSSPIFQACKIWEEINNLSIRNKENDELHISPEQKKDIFEYLDNNEKINATALYKILGIGKGDGWSVDKALSKGFTGNTTKVAIAKALGKEHNTKKSDLLRFDLRLKENGVNKDTGEIIYEIDPTCENEPLYRLWHVIYSINDKDALRHALTNQFGINDEESLRELTKIDFVKQGYGSRSAKFMRKLLPALMDGARYSEACDMIGINHSGSLTKSENEARELLHKIPQLQKNELRQPVVEKILNQMINVVNAVIEQFGSIDEIRVEMARELKLSKEGRAATAKNIRDREKMNNEMAEKIKELGITPSKNKILKYRLWQESGQKCFYCGQPVGAAEFLSGLDVEIEHIVPKALLFDDSFSNKVCACRKCNAEKSNTTAYDYMKSKGENEFNDYLRRVDAAFNEHKISFTKRSRLLTPADKLPKDFISRQLVQTQYISRKAMEILKQVCHNVYGSSGEVTSYLRRIWGYDEILHSLDLPRYREGGMTAEVSYDHRGQTHTEERIKDWSKRLDHRHHAIDALTIACTRQSIIQRLNNLSAMTAVAGESMSLDKWTLAQPHFSVQEVSDNVSRILVSFKAGKKVTTPGKRYVYRGGKRVLAQEGLLIPRGALCEESVYGRIHSLEKEVPVKKLFERVDDIVKPGIRTAVEERLRACDNDVKVACASLKKEPLYLDVEKTIPLEYGTCYKAEYVMRYALSALKPKDVEFIVDEHIRKVVSERLSEYGNDPKKAFAEPLYADKSKTIPIRAVRCYTGLAQVVPVKKDSKGNDIGFVKPGNNHHIAIYRDAEGTY

SEQ ID NO: 1116 - protein, 1220 aa, unidentified
  REGION 1..1220: note = Description of Unknown: uncultivated organism with predicted taxonomy: Bacteroides sp. CAG:770
  REGION 1..1220: note = MG16-27 effector
MKKILGLDLGVGSVGWSVVSCDDEHKPVEILGMGSRIVPLTPAESNEFSSGNAASKNQSRTQKRTARKGYDRYQLRRQALTVKLRELGMLPDEALIKLPVLDLWTLRARAATPGEKLSLAEIGRVLYHLNQKRGYRHSKEDDSADKTQRDYVQAVNKRFQEIKNEGLTIGQHFAVKLKGSEVITDKGAFYNYRIKEQVFPRAAYVEEFDRIIQCQREFYPEVLTAADVNEIRNEIIYYQRPLKSCKHLVSSCEFMQRELFDAEHNPIRNRKGEIVVAGPKCAPKSSPLAQVCKIWEEINNIRVTNKENDEYFVGIDNKHEIFDFLNTHEKMKADDLFKILGLAKNSGWSADRAMSKGMVGNTTRVALMKALKGRRDIDDILRFDLREVESNQVNADTGEVLMEIGAECESEPLYRLWHIIYSISDKNEQKAALEKQFGITDESMLESLCRIDFVKQGYSSRSFKFMRKILPSLMDGAKYSEACDVIGINHSDSITKAENQTRKLLPKLPQLQKNELRQPVVEKILNQMINVVNAVIDKYGAIDEIRVEMARELKLSKAGRESAAKNIRTREKANEEIAKRIEELGLVPSKNKILKYRLWEESGKRCFYCGQPVSATEFLNGLDVEIEHIVPKSLLFDDSFSNKVCACRKCNAEKGNATAFDYMKGRGENAFEDYLKRVEAAFKENKISQTKRNRLLTPADKIPKDFISRQLVQTQYISRKAMEILDQVCRNVYGSSGDVTAYLRRIWGYDEILHSLDLPRYREGNLTGDVTYVHRGQTHTEERIKDWSKRLDHRHHAIDALTIACTRQSIIQRLNTLNAKTAIGEEQMSLDKWTLAQAHFSVADVADHVADILVSFKSGKKVTTPGKRYVYKAGSRRVAQENILVPRGALSEESVYGRIKSIEEKVPVKKLFERVDDIVKPRIRHLIRERLEACGGDCSKAVSSLKKSPLYLDEENTIMLEYGSCFKPEYVIKYSLDSIKAKDAASIVDKHIRDVVTARLAAFGDDPKKAFAEPLYADEAGKIQIKTVRCYTGLSQVVPVKKDADGNDIGFVKPGNNHHIAIYKDADGKYQESIVTFRDAVERKKYGIPVVVRNPVEVLDTIIDKNVPEDLTGGLPSPEWTFVMSMQQNEMFVLGMGDDEFNDALAGRDYKSLGEHLYRVQKLASSYYVFRSQYETKLDDSKNALMMKKYYRTQSFNALFAINPRKVSISLLGEISLKDD

SEQ ID NO: 1117 - protein, 1219 aa, unidentified
  REGION 1..1219: note = Description of Unknown: uncultivated organism with predicted taxonomy: Bacteroides sp. CAG:545
  REGION 1..1219: note = MG16-28 effector
MKKVLGLDLGVGSVGWSLVNVDDNYKPTEILGIGSRIISLSPDESSEFTSGNAASKNQKRTQKRTARKGYDRYQMRRQALTEKLRELKMLPDERLIKLPVLELWTLRAKAATPGEKLTLPEIGRVLYHINQKRGYRHAKSDDSADKEQRDYVQTVNKRYQEIKDEGTTIGQHFAIKLKESEIVTDKGPFYNYRIKEQVFPRDAYIEEFDKIMDCQKTFYPEELSEDNIDEIRNKIIFYQRDLKSCKHLVSQCEFMTRSFLDADHKPILNSSGELVMSGPKVAPKSSPIFQACKIWEEINNLSIRNKENDELHISPEQKKDIFEYLDNNEKINATALYKILGIGKGDGWSVDKALSKGFTGNTTKVAIAKALGKEHNTKKSDLPRFDLRLKENGVNKDTGEIIYEIDPTCENEPLYRLWHVIYSINDKDALRHALTNQFGINDGESLRELTKIDFVKQGYGSRSAKFMRKLLPALMDGARYSEACDMIGINHSGSLTKSENEARELLHKIPQLQKNELRQPVVEKILNQMINVVNAVIDQFGSIDEIRVEMARELKLSKEGRAATAKNIRDREKMNNEMAEKIKELGITPSKNKILKYRLWQESGQKCFYCGQPVGAAEFLSGLDVEIEHIVPKALLFDDSFSNKVCACRKCNAEKSNTTAYDYMKSKGENEFNDYLRRVDAAFNEHKISFTKRSRLLTPADKLPKDFISRQLVQTQYISRKAMEILKQVCHNVYGSSGEVTSYLRRIWGYDEILHTLDLPRYREGGMTAEVSYDHRGQTHTEERIKDWSKRLDHRHHAIDALTIACTRQSIIQRLNNLSAMTAVAGESMSLDKWTLAQPHFSVQEVSDNVSRILVSFKAGKKVTTPGKRYVYRGGKRVLAQEGLLIPRGALCEESVYGRIHSLEKEVPVKKLFERVDDIVKPGIRTAVEERLRACDNDVKVACASLKKEPLYLDAEKTIPFEYGTCYKAEYVMRYALSALKPKDVEFIVDEHIRKVVSERLSEYGNDPKKAFAEPLYADKSKTIPIRAVRCYTGLAQVVPVKKDSKGNDIGFVKPGNNHHIAIYIDSDGMYHKSTLTFWKAVERKKYGLPVIIRKPWEIWDIIIDKNIPEELAAGLPAPDWKFVMSMQQNEMFILGMEDDEFRDAMEVKDYKTLGAHLYRVQKLEHLNFRIQYDTILDDSKAAKDMKKFYEIRSFKAFWALHPRKVSVSLLGEMALKDD

SEQ ID NO: 1118 - protein, 1221 aa, unidentified
  REGION 1..1221: note = Description of Unknown: uncultivated organism with predicted taxonomy: Bacteroides sp. CAG:709
  REGION 1..1221: note = MG16-29 effector
MKKILGLDLGVGSIGWSLINADKDNKPIAILGLGSRIISLSPDESSEFTSGNAASKNQKRTQKRTARKGYDRYQMRRQALTDKLRKLKMLPDEHLIKLPVLDLWTLRARAATPGEKLTLPEIGRVLYHINQKRGYRHSRSDDSADKEQREYVQAINKRFQEIREEGVTIGQHFVKKLKESEVVTDKGAFYNYRIKEQVFPRDAYVAEFDRVMDCQKVFYPEELSEANINEFRNEIIFYQRNLKSCKHLVSRCEFMTRSFLDEEHRPVLDASGKLVISGPKVAPKSSPIFQVCKIWEEINNLSIRNKENDELHISPEQKKEIFEYLDNNEKITSAALYKILGISKGDGWSVDKALSKGFTGNTTKVAISKALGKANDAKKRDLLRFDLRLKENGVNKDTGEIICEIDPECENEPLYKLWHVIYSINDKDAQRHALTSQFGINDEASLAELSKIDFVKQGYGSRSVKFMRKLLPSLMDGAKYSEACDVIGVNHSGSLTKSENEARELLQRIPQLQKNELRQPVVEKILNQMINVVNAVIEKFGGVDEIRVEMARELKLSKEGRAATAKNIRDREKENKEIAEKIIELGVTPSKNKILKYRLWQEAGQKCFYCGQPVGATEFLNGLDVEIEHVVPKALLFDDSFSNKVCACRKCNAEKRKSTAYDYMKSKGENAFNDYLRRVDTAFSEHKISFTKRSRLLTPADKIPKDFISRQLVQTQYISRKAMEILKQVCHNVYGSSGEVTSYLRRIWGYDEILHSLDLPRYREGGMTAEVSYEHRGQTHTEERIKDWSKRLDHRHHAIDALTIACTRQSVIQRLNNLSSMTAVAGEAMSLDKWTLAQPHFSVQEVSDKVGGILVSFKAGKKVTTPGKRYTYRGGKRILAQDGLLIPRGALSEESVYGRISALEKNVLVKKLFERVEDIVKPGIRAVVEDRLMACDNDVNAACASLKKEPLYLDAEKTIPLEYGTCYKRKYVIKYPISSLKAKDVESIIDGHIRQIVSERLSEYGNDPKKAFAEPLYADDAKTIPVRTVRCYTGLDQVVPVKKDVAGNDIGFVKPGNNHHIAICRDADGKFHECVETFWDAVERKKYGIPVIVRNPDEVWDVVIDKNVPEELAAGLPALGWSFVMSLQQNEMFILGMEDDEFRDAMAEADYKALGAHLYRVQKLAGSDYYFRSHYETLLDDSAGARIMKKFYRVRSFNALFYLHPRKVAVSLLGEMSLKND

SEQ ID NO: 1119 - protein, 1221 aa, unidentified
  REGION 1..1221: note = Description of Unknown: uncultivated organism with predicted taxonomy: Bacteroides sp. CAG:709
  REGION 1..1221: note = MG16-30 effector
MKKILGLDLGVGSIGWSLINADKDNKPIAILGLGSRIISLSPDESSEFTSGNAASKNQKRTQKRTARKGYDRYQMRRQALTDKLRKLKMLPDEHLIKLPVLDLWTLRARAATPGEKLTLPEIGRVLYHINQKRGYRHSRSDDSADKEQREYVQAINKRFQEIREEGVTIGQHFVKKLKESEVVTDKGAFYNYRIKEQVFPRDAYVAEFDRVMDCQKVFYPEELSEANINEFRNEIIFYQRNLKSCKHLVSRCEFMTRSFLDEGHRPVLDASGKLVISGPKVAPKSSPIFQVCKIWEEINNLSIRNKENDELHISPEQKKEIFEYLDNNEKITSAALYKILGIGKGDGWSVDKALSKGFTGNTTKVAISKALGKANDAKKRDLLRFDLRLKENGVNKDTGEIICEIDPECENEPLYKLWHVIYSINDKDAQRHALTSQFGINDEASLAELSKIDFVKQGYGSRSVKFMRKLLPSLMDGAKYSEACDVIGVNHSGSLTKSENEARELLQRIPQLQKNELRQPVVEKILNQMINVVNAVIEKFGGVDEIRVEMARELKLSKEGRAATAKNIRDREKENKEIAEKIIELGVTPSKNKILKYRLWQEAGQKCFYCGQPVGATEFLNGLDVEIEHVVPKALLFDDSFSNKVCACRKCNAEKRNSTAYDYMKSKGENAFNDYLRRVDTAFSEHKISFTKRSRLLTPADKIPKDFISRQLVQTQYISRKAMEILKQVCHNVYGSSGEVTSYLRRIWGYDEILHSLDLPRYREGGMTAEVSYEHRGQTHTEERIKDWSKRLDHRHHAIDALTIACTRQSVIQRLNNLSSMTAVAGEAMSLDKWTLAQPHFSVQEVSDKVGGILVSFKAGKKVTTPGKRYTYRGGKRILAQDGLLIPRGALSEESVYGRISALEKNVPVKKLFERVEDIVKPGIRAVVEDRLMACDNDVNAACASLKKEPLYLDAEKTIPLEYGTCYKAKYVMKYALSALKPKDVEYIVDEHIRKVVSERLSEYGNDPKKAFAEPLYADDAKTIAVRTVRCYTGLDQVVPVKKDVAGNDIGFVKPGNNHHIAIYRDADGKFHECVVTFWDAVERKKYGIPVIVRNPDEVWDVVIDKNVPEELAAGLPALGWSFVMSLQQNEMFILGMEDDEFRDAMAEADYKALGAHLYRVQKLAGSDYYFRSHYETLLDDSAGARIMKKFYRISSSKALFALHPRKVAVSLLGEMSLKND

SEQ ID NO: 1120 - protein, 1221 aa, unidentified
  REGION 1..1221: note = Description of Unknown: uncultivated organism with predicted taxonomy: Bacteroides sp. CAG:709
  REGION 1..1221: note = MG16-31 effector
MKKILGLDLGVGSIGWSLINADKDNKPIAILGLGSRIISLSPDESSEFTSGNAASKNQKRTQKRTARKGYDRYQMRRQALTDKLRKLKMLPDEHLIKLPVLDLWTLRARAATPGEKLTLPEIGRVLYHINQKRGYRHSRSDDSADKEQREYVQAINKRFQEIREEGVTIGQHFVKKLKESEVVTDKGAFYNYRIKEQVFPRDAYVAEFDRVMDCQKVFYPEELSEANINEFRNEIIFYQRNLKSCKHLVSRCEFMTRSFLDEGHRPVLDASGKLVISGPKVAPKSSPIFQVCKIWEEINNLSIRNKENDELHISPEQKKEIFEYLDNNEKITSAALYKILGIGKGDGWSVDKALSKGFTGNTTKVALSKALGKANDAKKRDLLRFDLRLKENGVNKDTGEIICEIDPECENEPLYKLWHVIYSINDKDAQRHALTSQFGINDEASLAELSKIDFVKQGYGSRSVKFMRKLLPSLMDGAKYSEACDVIGVNHSASLTKSENEARELLQRIPQLQKNELRQPVVEKILNQMINVVNAVIEKFGGVDEIRVEMARELKLSKEGRAATAKNIRDREKENKEIAEKIIELGVTPSKNKILKYRLWQEAGQKCFYCGQPVGATEFLNGLDVEIEHVVPKALLFDDSFSNKVCACRKCNAEKRNSTAYDYMKSKGENAFNDYLRRVDTAFSEHKISFTKRSRLLTPADKIPKDFISRQLVQTQYISRKAMEILKQVCHNVYGSSGEVTSYLRRIWGYDEILHSLDLPRYREGGMTAEVSYEHRGQTHTEERIKDWSKRLDHRHHAIDALTIACTRQSVIQRLNNLSSMTAVAGEAMSLDKWTLAQPHFSVQEVSDKVGGILVSFKAGKKVTTPGKRYTYRGGKRILAQDGLLIPRGALSEESVYGRISALEKNVPVKKLFERVEDIVKPGIRAVVEDRLMACYNDVNAACASLKKEPLYLDAEKTIPLEYGTCYKAKYVMKYALSALKPKDVEYIVDEHIRKVVSERLSEYGNDPKKAFAEPLYADDAKTIDVRTVRCYTGLDQVVPVKKDVAGNDIGFVKPGNNHHIAIYRDADGKFHECVVTFWDAVERKKYGIPVIVRNPDEVWDVVIDKNVPEELAAGLPALGWSFVMSLQQNEMFILGMEDDEFRDAMAEADYKALGAHLYRVQKLAGSDYYFRSHYETLLDDSAGARIMKKFYRISSSKALFALHPRKVAVSLLGEMSLKND

SEQ ID NO: 1121 - protein, 1219 aa, unidentified
  REGION 1..1219: note = Description of Unknown: uncultivated organism with predicted taxonomy: Alistipes sp. CAG:514
  REGION 1..1219: note = MG16-32 effector
MKKVLGLDLGVGSVGWSLVNVDDNYKPAEILGLGSRIISLSPDESSEFTSGNAASKNQKRTQKRTARKGYDRYQMRRQALTEKLRELKMLPDERLIKLPVLDLWTLRARAATPGEKLTLPEIGRVLYHINQKRGYRHSKSDDSADKEQRDYVQTVNKRFQEIKDEGTTIGQHFAIILKESEVFTEKGPFYNYRIKEQVFPRDAYIEEFDRIMACQKAFYPEELSDININEIRNEIIFYQRNLRSCKHLVSRCEFMTRRFFDAEHKPILNNSGEIVISGPKVAPKSSPIFQACKIWEEINNLSLRNKENDELHISREQKKEIFEYLDNNEKITATALYKILGIGKGDGWSMDKALSKGVTGNTTKTAIARALGKMNNPAKESLLRFDLRLKENGVNKDSGEVIYEIDPECENEPLYRLWHIIYSINDKEALRQALTNQFGINDEESLKELSNIDFVKQGYGSRSAKFMRKLLPALIGGAKYSEACDMIGINHSGSLTKSENEARELLHKIPQLQKNELRQPVVEKILNQMINVVNAVIDQFGDIDEIRVEMARELKLSKEGRAATAKNIRDREKQNNEIAEKIKELGITPSKNKILKYRLWQESGQKCFYCGQPVGAAEFLNGLDVEIEHIVPKALLFDDSFSNKVCACRRCNAEKSNLTAYDYMKSKGENEFNDYLRRVDAAFNDHKISFTKRSRLLTPADKLPKDFILRQLVQTQYISRKAMEILKQVCHNVYGSSGEVTSYLRRIWGYDEILHSLDLPRYREGGMTTEVSYEHRGQTHTEERIKDWSKRLDHRHHAIDALTIACTRQSIIQRLNNLSSMTATAGESMSLDKWTSAQPHFSVQEVSDNVSRILVSFKAGKKVTTPGKRYIHRGGKRILTQEGLLIPRGALCEESVYGRILSLEKAVPVKKLFERVEDIVKPGIRAMVEERLQACNNDVKVACASLKKEPLYLDAEKTIPLEYGTCYKAEYVMKYTLSALKPKDVEYIVDEHIRKVVSERLSEYGNDPKKAFAEPLYADEAKTIPIRTVRCYTDLRQAAPVKKDANGNDIGFVKPGNNHHIAIYIDSDGVYHKSTITFWKAVERKKYGLPVIIRKPREIWMIIIDKNIPEELAAGLPDPDWKFVMSMQQNEMFVLGMEDDEFRDAMEGKDYKTLGAHLYRVQKLEHLNFRIQYDTILDDSKAAKDMKKFYEIRGFKAFWALHPRKVSVSLLGELSLKDD

SEQ ID NO: 1122 - protein, 1219 aa, unidentified; identical to SEQ ID NO: 1121
  REGION 1..1219: note = Description of Unknown: uncultivated organism with predicted taxonomy: Alistipes sp. CAG:514
  REGION 1..1219: note = MG16-33 effector

SEQ ID NO: 1123 - protein, 1221 aa, unidentified
  REGION 1..1221: note = Description of Unknown: uncultivated organism with predicted taxonomy: Bacteroides sp. CAG:545
  REGION 1..1221: note = MG16-34 effector
MKKVLGLDLGVGSVGWSLVNVDDNYKPMEILGIGSRIISLSPDESSEFTSGNAASKNQKRTQKRTARKGYDRYQMRRQALTEKLRELKMLPDERLIKLPVLELWTLRAKAATPGEKLTLPEIGRVLYHINQKRGYRHAKSDDSADKEQRDYVQSVNKRYQEIKDEGATIGQHFAIKLKESEIVTDKGPFYNYRIKEQVFPRDAYIEEFDRIMACQKTFYPEELSDGNIDEIRNKIIFYQRDLKSCKHLVSQCEFMTRSFLDAEHKPILNSSGELVMSGPKVAPKSSPIFQACKIWEEINNLSIRNKENDELHISPEQKKDIFEYLDNNEKINATALYKILGIGKGDGWSVDKALSKGFTGNTTKVAIAKALGKEHNTKKSDLLRFDLRLKENGVNKDTGEIIYEIDPTCENEPLYRLWHVIYSINDKDALRHALTNQFGINDGESLRELSKIDFVKQGYGSRSAKFMRKLLPALMDGARYSEACDMIGINHSGSLTKSENEARELLHKIPQLQKNELRQPVVEKILNQMINVVNAVIDQFGSIDEIRVEMARELKLSKEGRAATAKNIRDREKMNNEMAEKIKELGITPSKNKILKYRLWQESGQKCFYCGQPVGAAEFLSGLDVEIEHIVPKALLFDDSFSNKVCACRKCNAEKSNTTAYDYMKSKGENEFNDYLRRVDAAFNEHKISFTKRSRLLTPADKLPKDFISRQLVQTQYISRKAMEILKQVCHNVYGSSGEVTSYLRRIWGYDEILHSLDLPRYREGGMTAEVSYDHRGQTHTEERIKDWSKRLDHRHHAIDALTIACTRQSIIQRLNNLSAMTAVAGESMSLDKWTLAQPHFSVQEVSDNVSRILVSFKAGKKVTTPGKRYVYRGGKRVLAQEGLMIPRGALCEESVYGRIHSLEKEVPVKKLFERVDDIVKPGIRTAVEERLRACDNDVKVACASLKKEPLYLDAEKTIPLEYGTCYKAEYAMRYALSALKPKDVEFIVDEHIRKVVSERLSEYGNDPKKAFAEPLYADKSKMIPIRTVRCYTGLAQVVPIKKDSNGNDIGFVKPGNNHHIAIYRDADGTYHESVVTFWDTVERKKYGLPVIIRKPEEIWDIIIDKNIPEELAAGLPAPDWKFVMSMQQNEMYVLGMEDDEFRDAMEGKDYKTLGAHLYRVQKLTSLYYVFRHQYETQLDDSKGAQIMKKFYRVRSFNAMFALHPRKVSVSLLGEMALKDD

SEQ ID NO: 1124 - protein, 1186 aa, unidentified
  REGION 1..1186: note = Description of Unknown: uncultivated organism with predicted taxonomy: Bacteroides sp. CAG:770
  REGION 1..1186: note = MG16-35 effector
MGSRIVPLTPDESNEFSSGNAASKNQSRTQKRTARKGYDRYQLRRQALTGKLRELGMLPDEALIKLPVMDLWTLRARAATPGEKLSLAEIGRVLYHLNQKRGYRHSKEDDSADKTQRDYVQAVNKRYQEIKNEGLTIGQHFAVKLKESEVITDKGAFYNYRIKEQVFPRAAYVEEFDRIIQCQREFYPEVLTEANVNEIRNEIIYYQRLLKSCKHLVSVCEFMQRELFDAEHNPIRNRKGEIVIAGPKCAPKSSPLAQVCKIWEEVNNIRITNKENDEYFISVDDRHKIFDFLNTHEKMKADDLFKILGLAKNSGWSADRAMSKGMVGNTTRVALMKALKGRRDIEEVLRFDLSAVESNQVNADTGEVLMEISAECEREPLYRLWHIIYSISDKNEQKSALKNQFGISDESMLESLCRIDFVKQGYSSRSFKFMRKILPSLMDGAKYSEACDAVGINHSDSITKAENQARELLVKLPQLQKNELRQPVVEKILNQMINVVNAVIDKYGAIDEIRVEMARELKLSKEGRESAAKNIRAREKANEEIARRIEELGLVPSKNKILKYRLWEESGKRCFYCGQPVSAAEFLNGLDVEIEHVIPKSLLFDDSFSNKVCACRKCNAEKDNATAFDFMKGRGENAFEDYLKRVETAFKENRISQTKKNRLLTPADKIPKDFISRQLVQTQYISRKAMEILNQVCRNVYGSSGDVTAYLRRIWGYDEILHSLDLPRYREGNLTGDVTYVHKGQTHTEERIKDWSKRLDHRHHAIDALTIACTRQSIIQKLNTLNAKTAIGEEQISLDKWTLAQAHFSVADVADHVADILVSFKSGKKVATPGKRYVYKAGRRSVAQENILVPRGALSEESVYGRIKSIEEKVPVKKLFERADDIVKPRIRHLIGERLEACGGDCSKAVSSLRKSPLYLDEEKTIMLEYGSCFKPEYVIKYSLNSIKAKDAVSIVDKHVREVVTERLAAFGDDPKKAFAEPLYADEAGKIQIKTVRCYTGLSQVVPVKKDADGNDIGFVKPGNNHHIAIYKDADGTYYWKLVTLWNAVDRKRYGLPIIVRNPYEISDIIIDSNIPDALASGLPEPNWSFVMSLQQNEMFVLGMSEEEFRCAIENKDYKTLGMHLYRVQKLSHLRFRSQYETRLDDSSEAKNMKKFYEIRSLKSFWSLNPRKVSISLLGEISLKDD

SEQ ID NO: 1125 - protein, 1221 aa, unidentified
  REGION 1..1221: note = Description of Unknown: uncultivated organism with predicted taxonomy: Bacteroides
  REGION 1..1221: note = MG16-36 effector
MKKVLGLDLGVGSVGWSLVNVDDNYKPTEILGIGSRIISLSPDESSEFTSGNAASKNQKRTQKRTARKGYDRYQMRRQALTEKLRELKMLPDERLIKLPVLELWTLRAKAATPGEKLTLPEIGRVLYHINQKRGYRHAKSDDSADKEQRDYVQTVNKRYQEIKDEGTTIGQHFAIKLKESEIVTDKGPFYNYRIKEQVFPRDAYIEEFDRIMDCQKTFYPEELSEDNIDEIRNKIIFYQRDLKSCKHLVSQCEFMTRSFLDADHKPILNSSGELVMSGPKVAPKSSPIFQACKIWEEINNLSIRNKENDELHISPEQKKDIFEYLDNNEKINATALYKILGIGKGDGWSVDKALSKGFTGNTTKGAIAKALGKDHNTKKSDLLRFDLRLKENGVNKDTGEIIYEIDPTCENEPLYRLWHVIYSINDKDALRHALTNQFGINDEESLRELTKIDFVKQGYGSRSAKFMRKLLPALMDGARYSEACDMIGSNHSGSLTKSENEARELLHKIPQLQKNELRQPVVEKILNQMINVVNAVIDQFGSIDEIRVEMARELKLSKEGRAATAKNIRDREKMNNEMAEKIKELGITPSKNKILKYRLWQESGQKCFYCGQPVGAAEFLSGLDVEIEHIVPKALLFDDSFSNKVCACRKCNAEKSNTTAYDYMKSKGENEFNDYLRRVDAAFNEHKISFTKRSRLLTPADKLPKDFISRQLVQTQYISRKAMEILKQVCHNVYGSSGEVTSYLRRIWGYDKILHSLDLPRYREGGMTAEVSYDHRGQTHTEERIKDWSKRLDHRHHAIDALTIACTRQSIIQRLNNLSAMTAVAGESMSLDKWTLAQPHFSVQEVSDNVSRILVSFKAGKKVTTPGKRYVYRGGKRVLAQKGLLIPRGALCEESVYGRIHSLEKEVPVKKLFERVDDIVKPGIRAAVEERLRACDNDVKVACASLKKEPLYLDVEKTIPLEYGTCYKVEYVMRYALSALKPKDVEYFVDEHIRKVVSERLSEYGNDPKKAFAEPLYADKSKTIPIRAVRCYTGLAQVVPVKKDSKGNAIGFVKPGNNHHIAIYRDADGTYHESVVTFWDTVERKKYGLPVIIRKPEEIWDIIIDKNIPEELAAGLPAPDWKFVMSMQQNEMYVLGMEDDEFRDAMEVKDYKTLGAHLYRVQKLTSIDYYFRSQYETTLDDSAGARMMKKFYRIKSIKSLFALHPRKVSVSLLGEMALKDD

SEQ ID NO: 1126 - protein, 1221 aa, unidentified
  REGION 1..1221: note = Description of Unknown: uncultivated organism with predicted taxonomy: Bacteroides sp. CAG:545
  REGION 1..1221: note = MG16-37 effector
MKKVLGLDLGVGSVGWSLVNVDDNYKPTEILGIGSRIISLSPDESSEFTSGNAASKNQKRTQKRTARKGYDRYQMRRQALTEKLRELKMLPDERLIKLPVLELWTLRAKAATPGEKLTLPEIGRVLYHINQKRGYRHAKSDDSADKEQRDYVQTVNKRYQEIKDEGTTIGQHFAIKLKESEIVTDKGPFYNYRIKEQVFPRDAYIEEFDRIMDCQKTFYPEELSEDNIDEIRNKIIFYQRDLKSCKHLVSQCEFMTRSFLDADHKPILNSSGELVMSGPKVAPKSSPIFQACKIWEEINNLSIRNKENDELHISPEQKKDIFEYLDNNEKINATALYKILGIGKGDGWSVDKALSKGFTGNTTKVAIAKALGKEHNTKKSDLLRFDLRLKENGVNKDTGEIIYEIDPTCENEPLYRLWHVIYSINDKDALRHALTNQFGINDEESLRELTKIDFVKQGYGSRSAKFMRKLLPALMDGARYSEACDMIGINHSGSLTKSENEARELLHKIPQLQKNELRQPVVEKILNQMINVVNAVIDQFGSIDEIRVEMARELKLSKEGRAATAKNIRDREKMNNEMAEKIKELGITPSKNKILKYRLWQESGQKCFYCGQPVGAAEFLSGLDVEIEHIVPKALLFDDSFSNKVCACRKCNAEKSNTTAYDYMKSKGENEFNDYLRRVDAAFNEHKISFTKRSRLLTPADKLPKDFISRQLVQTQYISRKAMEILKQVCHNVYGSSGEVTSYLRRIWGYDEILHSLDLPRYREGGMTAEVSYDHRGQTHTEERIKDWSKRLDHRHHAIDALTIACTRQSIIQRLNNLSAMTAVAGESMSLDKWTLAQPHFSVQEVSDNVSRILVSFKAGKKVTTPGKRYVYRGGKRVLAQEGLLIPRGALCEESVYGRIHSLEKEVPVKKLFERVDDIVKPGIRAAVEERLRACDNDVKVACASLKKEPLYLDAEKTIPLEYGTCYKAEYVMRYALSALKPKDVEFIVDEHIRKVVSERLSEYGNDPKKAFAEPLYADKSKTIPIRAVRCYTGLAQVVPVKKDSKGNDIGFVKPGNNHHIAIYRDAEGTYHENVVTFWDTVERKKYGLPVIIRKPGEIWDILIDKNIPEELAAGLPAPDWKFVMSMQQNEMFVLGMEDDEFRDAMAVKDYKTLGAHLYRVQKLASIYYVFRHQYETQLDDSKGALVMKKFYRTASFKALFALHPRKVSVSLLGEMALKDD

SEQ ID NO: 1127 - protein, 1221 aa, unidentified; identical to SEQ ID NO: 1125
  REGION 1..1221: note = Description of Unknown: uncultivated organism with predicted taxonomy: Bacteroides
  REGION 1..1221: note = MG16-38 effector

SEQ ID NO: 1128 - protein, 1220 aa, unidentified
  REGION 1..1220: note = Description of Unknown: uncultivated organism with predicted taxonomy: Bacteroides sp. CAG:770
  REGION 1..1220: note = MG16-39 effector
MKKILGLDLGVGSVGWSVISCDDEHRPLEILGMGSRIVPLTPEESNEFSSGNAASKNQSRTQKRTARKGYDRYQSRRKALTDKLRELDMLPDETLIKLPVLDLWTLRARAATPGDKLSLPEIGRVLYHLNQKRGYRHSKQDDSADKTQRDYVQAVNKRFQEIKDEGLTIGQHFAEKLKESEIITDKGAFYNYRIKEQVFPRAAYVEEFDRIIQCQREFYPEVLTEANVNEIRNEIIYYQRPLKSCKHLVSVCEFMQRELFDAEHNPIRNGKGEIVVAGPKCAPKSSPLAQVCKIWEEVNNIRITNKENDEYFISIDNKHEIFDFLNTHEKMKADDLFKILGIAKNSGWSADKAMSKGMVGNTTRVALMKALKGRRDIDDILRFDLREVESNQVNADTGEVLMEIGAECESEPLYRLWHIIYSISDKNEQKAALEKQFGITDKSMLESLCRIDFVKQGYSSRSFKFMRKILPSLMDGAKYSEACDVIGINHSDSITKAENQTRKLLTKLPQLQKNELRQPVVEKILNQMINVVNAVIDKYGAIYEIRVEMARELKLSKAGRESAAKNVRTREKANEEIAKRIEELGLVPSKNKILKYRLWEESGKRCFYCGQPVSATEFLNGLDVEIEHVVPKSLLFDDSFSNKVCACRKCNAEKGNATAFDFMKGRGENAFEDYLKRVETAFKENKISQTKRNRLLTPADKIPKDFIARQLVQTQYISRKAMEILNQVCRNVYGSSGDVTAYLRRIWGYDEILHSLDLPRYRDGNLTEDVTYVHRGQTHTEERIKDWSKRLDHRHHAIDALTIACTRQSIIQRLNTLNAKTAIGEEQMSLDKWTLAQAHFSVADVADHVADILVSFKSGKRVTTPGKRYVYKAGRRIVAQENILVPRGALSEESVYGRIKSIEEKVPVKKLFERADDIVKPRIRRLIRERLETFGGDCSKAVSSLKKSPLYLDEENTIMLEYGSCFKPEYVIKYSLNSIKAKDAVSIVDKHIREVVTARLAAFGDDPKKAFAEPLYSYASGKIQIKTVRCYTGLSQVVPVKRDADGNDIGFVKPGNNHHIAIYKDADGKYQESIVTFCDAVERKKYGIPVVVRNPAAVLDTVIDKNVPEDLAGGLPSPEWTFVMSMQQNEMFVLGMGDDEFNDAMTGRDYKSLGEHLYRVQKLASLYYVFRSQYETKLDDSKGALTMKKFYRTASFKALFALNPRKVSISLLGEISLKDD

SEQ ID NO: 1129 - protein, 1221 aa, unidentified
  REGION 1..1221: note = Description of Unknown: uncultivated organism with predicted taxonomy: Bacteroides sp. CAG:770
  REGION 1..1221: note = MG16-40 effector
MKKILGLDLGVGSIGWSLINADKDNKPIAILGLGSRIISLSPDESSEFTSGNAASKNQKRTQKRTARKGYDRYQMRRQALTDKLRKLKMLPDEHLIKLPVLDLWTLRARAATPGEKLTLPEIGRVLYHINQKRGYRHSRSDDSADKEQREYVQAINKRFQEIREEGVTIGRHFVKKLKESEVVTDKGAFYNYRIKEQVFPRDAYVAEFDRVMDCQKVFYPEELSEANINEFRNEIIFYQRNLKSCKHLVSRCEFMTRSFLDEGHRPVLDASGKVVISGPKVAPKSSPIFQVCKIWEEINNLSIRNKENDELHISPEQKKEIFEYLDNNEKITSAALYKILGIGKGDGWSVDKALSKGFTGNTTKVAISKALGKANDAKKRDLLRFDLRLKENGVNKDTGEIICEIDPECENEPLYKLWHVIYSINDKDAQRHALTSQFGINDEASLAELSKIDFVKQGYGSRSVKFMRKLLPSLMDGAKYSEACDVIGVNHSGSLTKSENEARELLQRIPQLQKNELRQPVVEKILNQMINVVNAVIEKFGGVDEIRVEMARELKLSKEGRAATAKNIRDREKENKEIAEKIIELGVTPSKNKILKYRLWQEAGQKCFYCGQPVGATEFLNGLDVEIEHVVPKALLFDDSFSNKVCACRKCNAEKRNSTAYDYMKSKGENAFNDYLRRVDTAFSEHKISFTKRSRLLTPADKIPKDFISRQLVQTQYISRKAMEILKQVCHNVYGSSGEVTSYLRRIWGYDEILHSLDLPRYREGGMTAEVSYEHRGQTHTEERIKDWSKRLDHRHHAIDALTIACTRQSIIQRLNNLSSMTAVAGEAMSLDKWTLAQPHFSVQEVSDKVGGILVSFKAGKKVTTPGKRYTYRGGKRILAQDGLLIPRGALSEESVYGRISALEKNVPVKKLFERVEDIVKPGIRAVVEDRLKACDNDVNAACASLKKEPLYLDAEKTIPLEYGTCYKAKYVMKYALSALKPKDVEYIVDEHIRKVVSERLSEYGNDPKKAFAEPLYADDAKTIAVRTVRCYTGLDQVVPVKRDVAGNDIGFVKPGNNHHIAIYRDADGKFHECVVTFWDAVERKKYGIPVIVRNPDEVWDVVIDKNVPEELAAGLPALGWSFVMSLQQNEMFILGMEDDEFMDAMAEADYKALGAHLYRVQKLASSYYVFRHQYETQLDDSKCAQIMKKFYRAQSFKALFALHPRKVSVSLLGEMALKDD

SEQ ID NO: 1130 - protein, 1220 aa, unidentified
  REGION 1..1220: note = Description of Unknown: uncultivated organism with predicted taxonomy: Bacteroides sp. CAG:770
  REGION 1..1220: note = MG16-42 effector
MKKILGLDLGVGSVGWSVVSCDDEHKPVEILGMGSRIVPLTPDESNEFSSGNAASKNQSRTQKRTARKGYDRYQLRRQALTVKLRELGMLPDEALIKLPVQDLWTLRARAATLGNKLSLPEIGRVLYHLNQKRGYRHSKQDDSADKTQRDYVQAVNKRFQEIKDEGLTIGQHFAVKLKESEVITDKGAFYNYRIKEQVFPRAAYVEEFDRIIQCQREFYPEVLTEANVNEIRNEIIYYQRPLKSCKHLVSSCEFMQRELFDAEHNPIRNRKGEIVVAGPKCAPKSSPLAQVCKIWEEINNIRVTNKENDEYFISIDNKHEIFDFLNTHEKMKADDLFKILGIAKNSGWSADKAMSKGMVGNTTRVALMKALKGRRDIDEILRFDLREVESNQVNADTGEVLMEIGAECESEPLYRLWHIIYSISDKNEQKAALEKQFGITDESMLESLCRIDFVKQGYSGRSFKFMRKILPSLMDGAKYSEACDVIGINHSDSITKAENQTRKLLTKLPQLQKNELRQPVVEKILNQMINVVNAVIGKYGAIDEIRVEMARELKLSKEGRESAAKNIRAREKANEEIAKRIEELGLLPSKNKILKYRLWEESGKRCFYCGQPVSATEFLNGLDVEIEHVVPKSLLFDDSFSNKVCACRKCNAEKGNATAFDFMNGRGENAFEDYLKRVETAFKENKISQTKRNRLLTPADKIPKDFISRQLVQTQYISRKAMEILNQVCRNVYGSSGDVTAYLRRIWGYDEILHSLDLPRYREGNLTGDVTYVHMGQTHTEERIKDWSKRLDHRHHAIDALTIACTRQSIIQRLNTLNAKTAIGEEQMSLDKWTLAQAHFSVADVSDHVADILVSFKSGKKVTTPGKRCVYKAGRRIVAQENILVPRGALSEESVYGRIKSIEEKVPVKKLFERVDDIVKPRIRHLIRERLEACGGDCSKAVSSLKKSPLYLDEENTIMLEYGSCFKPEYVIKYSLNSIKAKDAASIVDKHIRDVVIARFAAFGDDPKKAFAEPLYADEAGKIQIKTVRCYTGLSQVVPVKKDAAGNDIGFVKPGNNHHIAIYKDADGKYQESIVTFRDAVERKKYGIPVVVRNPVEVLDTVIDKNVPEDLAGGLPSPEWTFVMSMQQNEMFVLGMGDDEFNDALAGRDYKSLGEHLYRVQKLATSDYFFRSQYETKLDDSKGASAMRKFYRTASLKALFALNPRKVSISLLGEISLKDD

SEQ ID NO: 1131 - protein, 1220 aa, unidentified; identical to SEQ ID NO: 1130
  REGION 1..1220: note = Description of Unknown: uncultivated organism with predicted taxonomy: Bacteroides sp. CAG:770
  REGION 1..1220: note = MG16-43 effector

SEQ ID NO: 1132 - protein, 1232 aa, unidentified
  REGION 1..1232: note = Description of Unknown: uncultivated organism with predicted taxonomy: Bacteroides sp. CAG:770
  REGION 1..1232: note = MG16-44 effector
CGSYRSGLSDRAYISRVHLDLGVGSVGWSVISCDDEHRPLEILGMGSRIVPLTPEESNEFSSGNAASKNQSRTQKRTARKGYDRYQSRRKALTDKLRELDMLPDETLIKLPVLDLWTLRARAATPGDKLSLPEIGRVLYHLNQKRGYRHSKQDDSADKTQRDYVQAVNKRFQEIKDEGLTIGQHFAEKLKESEIITDKGAFYNYRIKEQVFPRAAYVEEFDRIIQCQREFYPEVLTEANVNEIRNEIIYYQRPLKSCKHLVSVCEFMQRELFDAEHNPIRNGKGEIIVAGPKCAPKSSPLAQVCKIWEEVNNIRITNKENDEYFISIDNKHEIFDFLNTHEKMKADDLFKILGIAKNSGWSADKAMSKGMVGNTTRVALMKALKGRRDIDDILRFDLREVESNQVNADTGEVLMEISAECESEPLYRLWHIIYSISDKNEQKSALEKQFGITDESMLESLCRIDFVKQGYSSRSFKFMRKILPSLMDGAKYSEACDVIGINHSDSITKAENQTRKLLTKLPQLQKNELRQPVVEKILNQMINVVNAVIDKYGSIDEIRVEMARELKLSKSGRESAAKNIRTREKANEEIAKRIEELGLVPSKNKILKYRLWEESGKRCFYCGQPVSATEFLNGLDVEIEHVVPKSLLFDNSFSNKVCACRKCNAEKGNATAFDFMKGRGENAFEDYLKRVETAFKENKISQTKRNRLLTPADKIPKDFISRQLVQTQYISRKAMEILNQVCRNVYGSSGDVTAYLRRIWGYDEILHYLDLPRYREGNLTGDVTYVHRGQTHTEERIRDWSKRLDHRHHAIDALTIACTRQSIIQRLNTLNAKTAIGEEQMSLDKWTLAQAHFSVADVADHVADILVSFKSGKKVTTPGKRYVYKAGRRNVAQKNILVPRGALSEESVYGRIKSIEEKVPVKKLFERVDDIVKPRIRHLIRERLEACGGDCSKAVSSLKKSPLYLDEENTIMLEYGSCFKPEYVIKYSLNSIKAKDAVSIVDNHIREVVTARLAAFGDDPKKSFAEPLYADEAGKIQIKTVRCYTGLSQVVPVKKDADGNDIGFVKPGNNHHIAIYKDADGKYQESIVTFRDAVERKKYGIPVVVRNPVEVLDTIIDKNVPEDLAGGLPSPEWTFVMSMQQNEMFVLGMGDDEFNDAMVGMDYKSLGEHLYRVQKLASLYYVFRSQYETKLDDSNNALAMRKFYRVRSFNALFSLNPRKVSISLLGEISLKDD

SEQ ID NO: 1133 - protein, 1186 aa, unidentified; identical to SEQ ID NO: 1124
  REGION 1..1186: note = Description of Unknown: uncultivated organism with predicted taxonomy: Bacteroides sp. CAG:770
  REGION 1..1186: note = MG16-45 effector

SEQ ID NO: 1134 - protein, 1221 aa, unidentified
  REGION 1..1221: note = Description of Unknown: uncultivated organism with predicted taxonomy: Bacteroides sp. CAG:770
  REGION 1..1221: note = MG16-46 effector
MKKVLGLDLGVGSVGWSLVNVDDNYKPTEILGIGSRIISLSPDESSEFTSGNAASKNQKRTQKRTARKGYDRYQMRRQALTEKLRELKMLPDERLIKLPVLELWTLRAKAATPGEKLTLPEIGRVLYHINQKRGYRHAKSDDSADKEQRDYVQTVNKRYQEIKDEGTTIGQHFAIKLKESEIVTDKGPFYNYRIKEQVFPRDAYIEEFDRIMDCQKTFYPEELSEDNIDEIRNKIIFYQRNLKSCKHLVSQCEFMTRSFLDAEHKPILNSSGELVMSGPKVAPKSSPIFQACKIWEEINNLSIRNKENDELHISPEQKKDIFEYLDNNEKINATALYKILGIGKGDGWSVDKALSKGFTGNTTKVAIAKALGKEHNTKKSDLLRFDLRLKENGVNKDTGEIIYEIDPTCENEPLYRLWHVIYSINDKDALRHALTNQFGINDGDSLRELTKIDFVKQGYGSRSAKFMRKLLPALMDGARYSEACDMIGINHSGSLTKSENEARELLHKIPQLQKNELRQPVVEKILNQMINVVNAVIDQFGSIDEIRVEMARELKLSKEGRAATAKNLRDREKMNNEMAEKIKELGITPSKNKILKYRLWQESGQKCFYCGQPVGAAEFLSGLDVEIEHIVPKALLFDDSFSNKVCACRKCNAEKSNTTAYDYMKSKGENEFNDYLRRVDAAFNEHKISFTKRSRLLTPADKLPKDFISRQLVQTQYISRKAMEILKQVCHNVYGSSGEVTSYLRRIWGYDEILHSLDLPRYREGGMTAEVSYDHRGQTHTEERIKDWSKRLDHRHHAIDALTIACTRQSIIQRLNNLSAMTAVAGESMSLDKWTLAQPHFSVQEVSDNVSRILVSFKAGKKVTTPGKRYVYRGGKRVLAQEGLLIPRGALCEESVYGRIHSLEKEVPVKKLFERVDDIVKPGIRTTVEERLRACDNDVKVACASLKKEPLYLDVEKTIPLEYGTCYKAEYVMRYALSALKPKDVEFIVDEHIRKVVSERLSEYGNDPKKAFAEPLYADKSKTIPIRAVRCYTGLAQVVPVKKDSKGNDIGFVKPGNNHHIAIYRDAEGTYHESIVTFWDSVERKKYGLPVIIRKPGEIWDILIDKNIPEELAAGLPAPDWQFVMSMQQNEMFVLGMEDDEFRDAMEVKDYKTLGAHLYRVQKLTSLYYVFRHQYETQLDDSKGAQIMKKFYRVRSFNAMFALHPRKVSVSLLGEMALKDD

SEQ ID NO: 1135 - protein, 1221 aa, unidentified
  REGION 1..1221: note = Description of Unknown: uncultivated organism with predicted taxonomy: Bacteroides sp. CAG:709
  REGION 1..1221: note = MG16-47 effector
MKKILGLDLGVGSIGWSLINADKDNKPIAILGLGSRIISLSPDESSEFTSGNAASKNQKRTQKRTTRKGYDRYQMRRQALTDKLSKLKMLPDEHLIKLPVLDLWTLRARAATPGEKLTLQEIGRVLYHINQKRGYRHSRSDDSADKEQREYVQAINKRFQEIREEGVTIGQHFVKKLKESEVVTDKGAFYNYRIKEQVFPRDAYVAEFDRVMDCQKVFYPEELSEANINEFRNEIIFYQRTLKSCKHLVSRCEFMTRSFLDEEHRPVLDASGKLVISGPKVAPKSSPIFQVCKIWEEINNLSIRNKENDELHISPEQKKEIFEYLDNNEKITSAALYKILGIGKSDGWSVDKALSKGFTGNTTKVAISKALGKANDAKKRDLLRFDLRLKENGVNKDTGEIICEIDPECENEPLYKLWHVIYSINDKDAQRHALTSQFGINDEASLAELSKIDFVKQGYGSRSVKFMRKLLPSLMDGAKYSEACDVIGVNHSGSLTKSENEARELLQRIPQLQKNELRQPVVEKILNQMINVVNAVIEKFGGVDEIRVEMARELKLSKEGRAATAKNIRDREKENKEIAEKIIELGVTPSKNKILKYRLWQEAGQKCFYCGQPVGATEFLNGLDVEIEHVVPKALLFDDSFSNKVCACRKCNAEKRNSTAYDYMKSKGENAFNDYLRRVDTAFSEHRISFTKRSRLLTPADKIPKDFISRQLVQTQYISRKAMEILKQVCHNVYGSSGEVTSYLRRIWGYDEILHSLDLPRYREGGMTAEVSYEHRGQTHTEERIKDWSKRLDHRHHAIDALTIACTRQSVIQRLNNLSSMTAVAGEAMSLDKWTLAQPHFSVQEVSDKVGGILVSFKAGKKVTTPGKRYTYRGGKRILAQDGLLIPRGALSEESVYGRISALEKNVPVKKLFERVEDIVKPGIRAVVEDRLMACDNDVNAACASLKKEPLYLDAEKTIPLEYGTCYKAEYVMKYALSALKPKDVEYIVDEHIRKVVSERLSEYGNDPKKAFAEPLYADDAETIPVRTVRCYTGLDQVVPVKRDVAGNDIGFVKPGNNHHIAIYRDADGKFHECVVTFWDAVERKKCGIPVIVRNPDEVWDVVIDKNVPEELAAGLPALGWSFVMSLQQNEMFILGMEDDEFRDAMAEADYKALGAHLYRVQKLTGSDYYFRSHYETLLDDSAGARIMKKFYRIQSFKALFALHPRKVAVSLLGEMSLKND

SEQ ID NO: 1136 - protein, 1220 aa, unidentified
  REGION 1..1220: note = Description of Unknown: uncultivated organism with predicted taxonomy: Bacteroides sp. CAG:770
  REGION 1..1220: note = MG16-48 effector
MKKILGLDLGVGSVGWSVISCDDEHRPLEILGMGSRIVPLTPEESNEFSSGNAASKNQSRTQKRTARKGYDRYQSRRKALTDKLRELDMLPDETLIKLPVLDLWTLRARAATPGDKLSLPEIGRVLYHLNQKRGYRHSKQDDSADKTQRDYVQAVNKCFQEIKDEGLTIGQHFAVKLKESEVITDKGAFYNYRIKEQVFPRAAYVEEFDRIIQCQREFYPDVFTEAIVNEIRNEIIYYQRPLKSCKHLVSVCEFMQRELFDAGHNPIRHRKGEIVVAGPKCAPKSSPLAQVCKIWEEVNNIRITNKENDEYFISIDNKHEIFDFLNTHEKMKADDLFKILGIAKNSGWSADRAMSKGMVGNTTRVALMKALKGRRDIDDILRFDLREVESNQVNADTGEVLMEISAECESEPLYRLWHIIYSISDKNEQKSALKNQFGISDDSMLESLCKIDFVKQGYSSRSFKFMRKILPSLMDGAKYSEACDVIGINHSDSITKAENQTRKLLTKLPQLQKNELRQPVVEKILNQMINVVNAVIDKYGAIDEIRVEMARELKLSKAGRESAAKNIRTREKANEEIAKRIEELGLVPSKNKILKYRLWEESGKRCFYCGQPVSATEFLNGLDVEIEHVVPKSLLFDDSFSNKVCACRKCNAEKGNATAFDFMKGRGENAFEDYLKRVETAFKENKISQTKRNRLLTPADKIPKDFISRQLVQTQYISRKAMEILNQVCRNVYGSSGDVTAYLRRIWGYDEILHSLDLPRYREGNLTGDVTYVHRGQTHTEERIRDWSKRLDHRHHAIDALTIASTRQSIIQRLNTLNAKTAIGEEQISLDKWTLAQAHFSVADVADHVADILVSFKSGKKVTTPGKRYVYRAGRRNVAQKNILVPRGALSEESVYGRIKSIEEKVPVKKLFERVDDIVKPRIRHLIRERLEACGGDCSKAVSSLKKSPLYLDEENTIMLEYGSCFKPEYVIKYSLNSIKAKDVASIVDKHVREVVTARLAAFGDEPKKAFAEPLYADVAGKIQIKTVRCYTGLSQVVPVKKDADGNDIGFVKPGNNHHIAIYKDADGKYQESIVTFCDAVERKKYGIPVVVRNPAAVLDTVIDKNVPEDLARGLPSPEWTFVMSMQQNEMFVLGMGDDEFNDAMAEMDYKSLGEHLYRVQKLTSSYYVFRSQYETKLDDSKNALRMKKYYRTQSFNALFSLNPRKVSISLLGEISLKDD

SEQ ID NO: 1137 - protein, 1191 aa, unidentified
  REGION 1..1191: note = Description of Unknown: uncultivated organism with predicted taxonomy: Bacteroides sp. CAG:770
  REGION 1..1191: note = MG16-50 effector
ILGMGSRIVPLTPEESNEFSSGNAASKNQSRTQKRTARKGYDRYQSRRKALTDKLRELDMLPDETLIKLPVLDLWTLRARAATPGDKLSLPEIGRVLYHLNQKRGYRHSKQDDSADKTQRDYVQAVNKCFQEIKDEGLTIGQHFAVKLKESEVITDKGAFYNYRIKEQVFPRAAYVEEFDRIIQCQREFYPDVFTEAIVNEIRNEIIYYQRPLKSCKHLVSVCEFMQRELFDAGHNPIRHRKGEIVVAGPKCAPKSSPLAQVCKIWEEVNNIRITNKENDEYFISIDNKHEIFDFLNTHEKMKADDLFKILGIAKNSGWSADRAMSKGMVGNTTRVALMKALKGRRDIDDILRFDLREVESNQVNADTGEVLMEISAECESEPLYRLWHIIYSISDKNEQKSALKNQFGISDDSMLESLCKIDFVKQGYSSRSFKFMRKILPSLMDGAKYSEACDVIGINHSDSITKAENQTRKLLTKLPQLQKNELRQPVVEKILNQMINVVNAVIDKYGAIDEIRVEMARELKLSKAGRESAAKNIRTREKANEEIAKRIEELGLVPSKNKILKYRLWEESGKRCFYCGQPVSATEFLNGLDVEIEHVVPKSLLFDDSFSNKVCACRKCNAEKGNATAFDFMKGRGENAFEDYLKRVETAFKENKISQTKRNRLLTPADKIPKDFISRQLVQTQYISRKAMEILNQVCRNVYGSSGDVTAYLRRIWGYDEILHSLDLPRYREGNLTGDVTYVHRGQTHTEERIRDWSKRLDHRHHAIDALTIASTRQSIIQRLNTLNAKTAIGEEQISLDKWTLAQAHFSVADVADHVADILVSFKSGKKVTTPGKRYVYRAGRRNVAQKNILVPRGALSEESVYGRIKSIEEKVPVKKLFERVDDIVKPRIRHLIRERLEACGGDCSKAVSSLKKSPLYLDEENTIMLEYGSCFKPEYVIKYSLNSIKAKDVASIVDKHVREVVTARLAAFGDEPKKAFAEPLYADVAGKIQIKTVRCYTGLSQVVPVKKDADGNDIGFVKPGNNHHIAIYKDADGKYQESIVTFCDAVERKKYGIPVVVRNPAAVLDTVIDKNVPEDLARGLPSPEWTFVMSMQQNEMFVLGMGDDEFNDAMAEMDYKSLGEHLYRVQKLTSSYYVFRSQYETKLDDSKNALRMKKYYRTQSFNALFSLNPRKVSISLLGEISLKDD

SEQ ID NO: 1138 - protein, 1220 aa, unidentified; identical to SEQ ID NO: 1136
  REGION 1..1220: note = Description of Unknown: uncultivated organism with predicted taxonomy: Bacteroides sp. CAG:770
  REGION 1..1220: note = MG16-51 effector

SEQ ID NO: 1139 - protein, 1217 aa, unidentified
  REGION 1..1217: note = Description of Unknown: uncultivated organism with predicted taxonomy: Bacteroides sp. CAG:770
  REGION 1..1217: note = MG16-52 effector
MKKILGLDLGVGSVGWSVVSCDDEHKPVEILGMGSRIVPLTPDESNEFSSGNAASKNQSRTQKRTARKGYDRYQLRRQALTVKLRELGMLPDETLIKLPVLDLWTLRARAATPGDKLSLPEIGRVLYHLNQKRGYRHSKQDDSADKTQRDYVQAVNKRFQEIKDEGLTIGQHFAVKLKESELITDKGAFYNYRIKEQVFPRAAYVEEFDRIIQCQREFYPEVFTEAIVNEIRNEIIYYQRPLKSCKHLVSVCEFMQRELFDAGHNPIRNRKGEIVVAGPKCAPKSSPLAQVCKIWEEINNIRVTNKENDEYFISIDNKHEIFDFLNTHEKMKADDLFKILGIAKNSGWSADRAMSKGMVGNTTRVALMKALKGRRDIDDILRFDLREVESNQVNADTGEVLMEIGAECESEPLYRLWHIIYSISDKNEQKAALEKQFGITDKSMLESLCRIDFVKQGYSSRSFKFMRKILPSLMDGAKYSEACDVIGINHSDSITKAENQTRKLLTKLPQLQKNELRQPVVEKILNQMINVVNAVIDKYGAIDEIRVEMARELKLSKAGRESAAKNVRTREKANEEIAKRIEELGLVPSKNKILKYRLWEESGKRCFYCGQPVSATEFLNGLDVEIEHVVPKSLLFDDSFSNKVCACRKCNAEKGNATAFDFMKGRGENAFEDYLKRVETAFKENKISQTKRNRLLTPADKIPKDFIARQLVQTQYISRKAMEILNQVCRNVYGSSGDVTAYLRRIWGYDEILHSLDLPRYREGNLTGDVTYVHRGQTHTEERIRDWSKRLDHRHHAIDALTIACTRQSIIQRLNTLNAKTAIGEEQMSLDKWTLAQAHFSVADVADHVADILVSFKSGKKVTTPGKRYVYKAGRRIVAQENILVPRGALSEESVYGRIKSIEEKVPVKKLFERVDDIVKPRIRRLIRDRLKACGGDCSKAVSSLKKSPLYLDEENTIMLEYGSCFKPEYVIKYSLNSIKAKDAVSIVDNHVREVVTERLAAFGDDPKKAFAEPLYADAAGKIQIRTVRCYTNSTVVPVKKDADGNDIGFVKPGNNHHIAIYKDADGTYYWKLVTLWNAVDRKRYGLPIIVRNPYEISDIIIDSNIPDALASGLPEPNWSFVMSLQQNEMFVLGMSEEEFRCAIENKDYKTLGMHLYRVQKLSHLRFRSQYETRLDDSSEAKNMKKFYEIRSLKSFWSLNPRKVSISLLGEISLKDD

SEQ ID NO: 1140 - protein, 1221 aa, unidentified
  REGION 1..1221: note = Description of Unknown: uncultivated organism with predicted taxonomy: Bacteroides sp. CAG:709
  REGION 1..1221: note = MG16-53 effector
MKKILGLDLGVGSIGWSLINADKDNKPIAILGLGSRIISLSPDESSEFTSGNAASKNQKRTQKRTARKGYDRYQMRRQALTDKLRKLKMLPDEHLIKLPVLDLWTLRARAATPGEKLTLPEIGRVLYHINQKRGYRHSRSDDSADKEQREYVQAINKRFQEIREEGVTIGQHFVKKLKESEVVTDKGAFYNYRIKEQVFPRDAYVAEFDRVMDCQKVFYPEELSEANINEFRNEIIFYQRNLKSCKHLVSRCEFMTRSFLDEGHRPVLDASGKLVISGPKVAPKSSPIFQVCKIWEEINNLSIRNKENDELHISPEQKKEIFEYLDNNEKITSAALYKILGIGKGDGWSVDKALSKGFTGNTTKVAISKALGKANDAKKRDLLRFDLRLKENGVNKDTGEIICEIDPECENEPLYKLWHVIYSINDKDAQRHALTSQFGINDEASLAELSKIDFVKQGYGSRSVKFMRKLLPSLMDGAKYSEACDVIGVNHSGSLTKSENEARELLQRIPQLQKNELRQPVVEKILNQMINVVNAVIEKFGGVDEIRVEMARELKLSKEGRAATAKNIRDREKENKEIAEKIIELGVTPSKNKILKYRLWQEAGQKCFYCGQPVGATEFLNGLDVEIEHVVPKALLFDDSFSNKVCACRKCNAEKRNSTAYDYMKSKGENAFNDYLRRVDTAFSEHKISFTKRSRLLTPADKIPKDFISRQLVQTQYISRKAMEILKQVCHNVYGSSGEVTSYLRRIWGYDEILHSLDLPRYREGGMTAEVSYEHRGQTHTEERIKDWSKRLDHRHHAIDALTIACTRQSVIQRLNNLSSMTAVAGEAMSLDKWTLAQPHFSVQEVSDKVGGILVSFKAGKKVTTPGKRYVYRGGKRILAQEGLLIPRGALCEESVYGRISALEKNVPVKKLFERVEDIVKPGIRAVVEDRLMACDNDVNAACASLKKEPLYLDAEKTIPLEYGTCYKAKYVMKYALSALKPKDVEYIVDEHIRKVVSERLSEYGNDPKKAFAEPLYADDAKTIPVRTVRCYTGLDQVVPVKKDVAGNDIGFVKPGNNHHIAIYRDADGKFHECVVTFWDAVERKKYGMPVIVRNPDEVWDDVIDKNVPEELAAGLPALGWSFVMSLQQNEMFILGMEDDEFRDAMAEADYKALGAHLYRVQKLAGSDYYFRSHYETLLDDSAGARIMKKFYRIQSFKALFALHPRKVAVSLLGEMSLKND

SEQ ID NO: 1141 - protein, 1221 aa, unidentified
  REGION 1..1221: note = Description of Unknown: uncultivated organism with predicted taxonomy: Bacteroides sp. CAG:709
  REGION 1..1221: note = MG16-54 effector
MKKILGLDLGVGSIGWSLINADKDNKPIAILGLGSRIISLSPDESSEFTSGNAASKNQKRTQKRTARKGYDRYQMRRSALTDKLRKLKMLPDEHLIKLPVLDLWTLRARAATPGEKLTLPEIGRVLYHINQKRGYRHSRSDDSADKEQREYVQAINKRFQEIREEGVTIGQHFVKKLKESEVVTDKGAFYNYRIKEQVFPRDAYVAEFDRIMDCQKVFYPEELSEANINEFRNEIIFYQRNLKSCKHLVSRCEFMTRSFLDEEHRPVLDASGKLVISGPKVAPKSSPIFQVCKIWEEINNLSIRNKENDELHISPEQKKEIFEYLDNNEKITSAALYKILGISKGDGWSVDKALSKGFTGNTTKVAISKALGKANDAKKRDLLRFDLRLKENGVNKDTGEIICEIDPECENEPLYKLWHVIYSINDKDAQRHALTSQFGINDEASLAELSKIDFVKQGYGSRSVKFMRKLLPSLMDGAKYSEACDVIGVNHSGSLTKSENEARELLQRIPQLQKNELRQPVVEKILNQMINVVNAVIEKFGGVDEIRVEMARELKLSKEGRAATAKNIRDREKENKEIAEKIIELGVTPSKNKILKYRLWQEAGQKCFYCGQPVGATEFLNGLDVEIEHVVPKALLFDDSFSNKVCACRKCNAEKRNSTAYDYMKSKGENAFNDYLRRVDTAFSEHKISFTKRSRLLTPADKIPKDFISRQLVQTQYISRKAMEILKQVCHNVYGSSGEVTSYLRRIWGYDEILHSLDLPRYREGGMTAEVSYEHRGQTHTEERIKDWSKRLDHRHHAIDALTIACTRQSVIQRLNNLSSMTAVAGEAMSLDKWTLAQPHFSVQEVSDKVGGILVSFKAGKKVTTPGKRYTYRGGKRILAQDGLLIPRGALSEESVYGRISALEKNVLVKKLFERVEDIVKPGIRAVVEDRLMACDNDVNAACASLKKEPLYLDAEKTIPLEYGTCYKRKYVIKYPISSLKAKDVESIIDGHIRQIVSERLSEYGNDPKKAFAEPLYADDAKTIPVRTVRCYTGLDQVVPVKKDVAGNDIGFVKPGNNHHIAIYRDADGKFHECVETFWDAVERKKYGIPVIVRNPDEVWDVVIDKNVPEELAAGLPALGWSFVMSLQQNEMFILGMEDDEFRDAMAEADYKALGAHLYRVQKLAGSDYYFRSHYETLLDDSAGARIMKKFYRISSSKALFALHPRKVAVSLLGEMSLKND

SEQ ID NO: 1142 - protein, 1220 aa, unidentified
  REGION 1..1220: note = Description of Unknown: uncultivated organism with predicted taxonomy: Bacteroides sp. CAG:770
  REGION 1..1220: note = MG16-55 effector
MKKILGLDLGVGSVGWSVISCDDEHRPLEILGMGSRIVPLTPDESNEFSSGNAASKNQSRTQKRTARKGYDRYQSRRKALTDKLRDLDMLPDETLIKLPVLDLWTLRARAATPGDKLSLPEIGRVLYHLNQKRGYRHSKQDDSADKTQRDYVQAVNKRFQDIKDEGLTIGQHFAEKLKESEIITDKGAFYNYRIKEQVFPRAAYVEEFDRIIQCQRGFYPEVLTEANVNEIRNEIIYYQRPLKSCKHLVSVCEFMQRELFDADHNPIRNGKGEIVVAGPKCAPKSSPLAQVCKIWEEINNIRVTNKENDEYFISIDNKHEIFDFLNTHEKMKADDLFKILGLAKNSGWSADRAMSKGMVGNTTRVALMKALKGRRDIEEVLRFDLRAVESNQVNADTGEVLMEISAECEREPLYRLWHIIYSISDKNEQKSALKNQFGISDESMLESLYKIDFVKQGYSSRSFKFMRKILPSLMDGAKYSEACDAVGINHSDSITKAENQARELLVKLPQLQKNELRQPVVEKILNQMINVVNAVIDKYGAIDEIRVEMARELKLSKEGRESAAKNISDRKKANEEIARRIEELGLVPSKNKILKYRLWEESGKRCFYCGQPVSATEFLNGLDVEIEHVIPKSLLFDDSFSNKVCACRKCNAEKGNATAFDFMKGRGENAFEDYLKRVETAFKENRISQTKRSRLLTPADKIPKDFISRQLVQTQYISRKAMDILNQVCRNVYGSSGDVTAYLRRIWGYDEILHSLDLPRYREGNLTGDVTYVHRGQTHTEERIKDWSKRLDHRHHAIDALTIASTRQSIIQRLNTLNAKAAIGEEQMSLDKWTLAQAHFSVADVADHVADILVSFKSGKKVATPGKRYVYRAGSRNVAQENILVPRGALSEESVYGRIKSIEEKVPVKKLFERVDDIVKPRISHLICERLEACGGDCSKAVSSLKKSPLYLDEENTIMLEYGSCFKPEYVIKYSLNSIKAKDAVSIVDNHVREVVTARLAAFGDDPKKAFAEPLYADEAGKIQIKTVRCYTGLSQVVPVKKDADGNDIGFVKPGNNHHIAIYKDADGKYQESIVTFRDAVERKKYGIPVVVRNPVEVLDTIIDKNVPEELARGLPSPEWTFVMSMQQNEMFVLGMGDDEFNDAMAGRDYKSLGEHLYRVQKLATSDYFFRSQYETKLDDTKNALSMKKYYRTRSFKALFALNPHKVSISLLGEISLKDD

SEQ ID NO: 1143 - protein, 1219 aa, unidentified
  REGION 1..1219: note = Description of Unknown: uncultivated organism with predicted taxonomy: Bacteroides sp. CAG:545
  REGION 1..1219: note = MG16-56 effector
MKKVLGLDLGVGSVGWSLVNVDDNYKPTEILGIGSRIISLSPDESSEFTSGNAASKNQKRTQKRTARKGYDRYQMRRQALTEKLRELKMLPDERLIKLPVLELWTLRAKAATPGEKLTLPEIGRVLYHINQKRGYRHAKSDDSADKEQRDYVQTVNKRYQEIKDEGTTIGQHFAIKLKESEIVTDKGPFYNYRIKEQVFPRDAYIEEFDRIMDCQKTFYPEELSEDNIDEIRNKIIFYQRDLKSCKHLVSQCEFMTRSFLDADHKPILNSSGELVMSGPKVAPKSSPIFQACKIWEEINNLSIRNKENDELHISPEQKKDIFEYLDNNEKINATALYKILGIGKGDGWSVDKALSKGFTGNTTKVAMGKALGKEHNTKKSDLLRFDLRLKENGVNKDTGEIIYEIDPACENEPLYRLWHVIYSINDKDALRHALTNQFGINDGESLRKLTKIDFVKQGYGSRSAKFMRKLLPALMDGARYSEACDMIGINHSDSLTKSENEARELLHKIPQLQKNELRQPVVEKILNQMINVVNAVIEQFGSIDEIRVEMARKLKLSKEGRAATAKNIRDREKMNNEMAEKIKELGITPSKNKILKYRLWQESGQKCFYCGQPVGAAEFLSGLDVEIEHIVPKALLFDDSFSNKVCACRKCNAEKSNTTAYDYMKSKGENEFNDYLRRVDAAFNEHKISFTKRSRLLTPADKLPKDFISRQLVQTQYISRKAMEILKQVCHNVYGSSGEVTSYLRRIWGYDEILHSLDLPRYREGGMTAEVSYDHRGQTHTEERIKDWSKRLDHRHHAIDALTIACTRQSIIQRLNNLSAMTAVAGESMSLDKWTLAQPHFSVQEVSDNVSRILVSFKAGKKVTTPGKRYVYRGGKRVLAQEGLLIPRGALCEESVYGRIHSLEKEVPVKKLFERVDDIVKPGIRTAVEERLRACDNDVKVACASLKKEPLYLDAEKTIPFEYGTCYKAEYVMRYALSALKPKDVEFIVDEHIRKVVSERLSEYGNDPKKAFAEPLYADKSKTIPIRALRCYTGLAQVVPVKKDSKGNDIGFVKPGNNHHIAIYIDSDGMYHKSTLTFWKAVERKKYGLPVIIRKPWEIWDIIIDKNIPEELAAGLPAPDWKFVMSMQQNEMFILGMEDDEFRDAMEVKDYKTLGAHLYRVQKLEHLNFRIQYDTILDDSKAAKDMKKFYEIRSFKAFWALHPRKVSVSLLGEMALKDD

SEQ ID NO: 1144 - protein, 1220 aa, unidentified; identical to SEQ ID NO: 1108
  REGION 1..1220: note = Description of Unknown: uncultivated organism with predicted taxonomy: Bacteroides sp. CAG:770
  REGION 1..1220: note = MG16-57 effector

SEQ ID NO: 1145 - protein, 1223 aa, unidentified
  REGION 1..1223: note = Description of Unknown: uncultivated organism with predicted taxonomy: Bacteroides sp. CAG:770
  REGION 1..1223: note = MG16-58 effector
MKKILGLDLGVGSVGWSVISCDDEHRPREILGMGSRIVPLTPDESNEFSSGNAASKNQSRTQKRTARKGYDRYQSRRKALTDKLRELDMLPDEALIKLPVLDLWTLRARAATPGDKLSLPEIGRVLYHLNQKRGYRHSKQDDSADKTQRDYVQAVNKRFQEIKDEGLTIGQHFAEKLKDSEIITDKGAFYNYRIKEQVFPRAAYVEEFDRIIQCQREFYPEVLTEANVNEIRNEIIYYQRPLKSCKHLVSVCDFMQRELFDADHNPIRNGKGKIVVAGPKCAPKSSPLAQVCKIWEEVNNIRITNKENDEYFISIDNKHEIFDFLNTHEKMKADDLFKILGLAKNSGWSADRAMSKGMVGNTTRVALMKALKGRRDIDEILRFDLREVGSNQVNADTGEVLMEISAECEREPLYRLWHIIYSISDKNEQKSALKNQFGISDDSMLESLCKIDFVKQGYSSRSFKFMRKILPSLMDGAKYSEACDVIGINHSDSITKAENQARELLTRLPQLQKNELRQPVVEKILNQMINVVNAVIDKYGAIDEIRVEMARELKLSKAGRESAAKNIRTREKANEEIAKRIEELDLVPSKNKILKYRLWEESGKRCFYCGQPVSATEFLNGLDVEIEHIVPKSLLFDDSFSNKVCACRKCNAEKGNATAFDFMKGRGENAFEDYLKRVETAFKENKISQTKRNRLLTPADKIPKDFIARQLVQTQYISRKAMEILNQVCRNVYGSSGDVTAYLRRIWGYDEILHSLDLPRYREGNLTGDVTYVHRGQTHTEERIRDWSKRLDHRHHAIDALTIACTRQSIIQRLNTLNAKTAIGEEQMSLDKWTLAQAHFSVADVADHVAGILVSFKSGKRVTTPGKRYVYKTGRRIVAQENILVPRGALSEESVYGRIKSIEEKVPVKKLFERVDDIVKPRIRYLIRERLETFGGDCSKAVSSLKKSPLYLDEENTIMLEYGSCFKYSYVKKSKLIQLDKKDDFINVSLIVDKHIREVVTARLAAFGGDTKKAFAEPLYADEAGKIQIRTVRCYTNSTVVTVKKDADGNDIGFVKPGNNHHIAIYKDADGKYQESIVTFCDAVERKKYGIPVVVRKPAAVLDTVIDKNVPEDLARGLPSPEWTFVMSMQQNEMFVLGMGDDEFNDALAGRDYKSLGEHLYRVQKLASLYYVFRSQYETKLDDSNNALAMRKFYRVRSFNALFSLNPRKVSISLLGEISLKDD

SEQ ID NO: 1146 - protein, 1221 aa, unidentified
  REGION 1..1221: note = Description of Unknown: uncultivated organism with predicted taxonomy: Bacteroides sp. CAG:770
  REGION 1..1221: note = MG16-59 effector
MKKVLGLDLGVGSVGWSLVNVDDNYKPTEILGIGSRIISLSPDESSEFTSGNAASKNQKRTQKRTARKGYDRYQMRRQALTEKLRELKMLPDERLIKLPVLELWTLRAKAATPGEKLTLPEIGRVLYHINQKRGYRHAKSDDSADKEQRDYVQTVNKRYQEIKDEGTTIGQHFAIKLKESEIVTDKGPFYNYRIKEQVFPRDAYIEEFDRIMDCQKTFYPEELSEDNIDEIRNKIIFYQRDLKSCKHLVSQCEFMTRSFLDAEHKPILNSSGELVMSGPKVAPKSSPIFQACKIWEEINNLSIRNKENDELHISLEQKKDIFEYLDNNEKINATALYKILGIGKGDGWSVDKALSKGFTGNTTKVAIAKALGKEHNTKKSDLLRFDLRLKENGVNKDTGEIIYEIDPTCENEPLYRLWHVIYSINDKDALRHALTNQFGINDGESLRELTKIDFVKQGYGSRSAKFMRKLLPALMDGARYSEACDMIGINHSGSLTKSENEARELLHKIPQLQKNELRQPVVEKILNQMINVVNAVIEQFGSIDEIRVEMARELKLSKEGRAATAKNIRDREKMNNEMAEKIKELGITPSKNKILKYRLWQESGQKCFYCGQPVGAAEFLSGLDVEIEHIVPKALLFDDSFSNKVCACRKCNAEKSNNTAYDYMKSKGENEFNDYLRRVDAAFNEHKISFTKRSRLLTPADKLPKDFISRQLVQTQYISRKAMEILKQVCHNVYGSSGEVTSYLRRIWGYDEILHSLDLPRYREGGMTAEVSYDHRGQTHTEERIKDWSKRLEHRHHAIDALTIACTRQSIIQRLNNLSAMTAVAGESMSLDKWTLAQPHFSVQEVSDNVSRILVSFKAGKKVTTPGKRYVYRGGKRVLAQESLLIPRGALCEESVYGRIHSLEKEVPVKKLFERVDDIVRPGIRAAVEERLRACDNDVKVACASLKKEPLYLDAEKTIPLEYGTCYKAEYVMRYALSALKPKDVEFIVDEHIRKVVSERLSEYGNDPKKAFAEPLYADKSKTIPIRAVMCYTGLAQVVPVKKDSKGNDIGFVKPGNNHHIAIYRDAEGTYHESIVTFWDSVERKKYGLPVIIRKPGEIWDILIDKNIPEELAAGLPAPDWQFVMSMQQNEMFVLGMEDDEFRDAMEGKDYKTLGAHLYRVQKLASIYYVFRHQYETQLDDSKGAQIMKKFYRAQSFKALFALHQRKVSVSLLGEMALKDD

SEQ ID NO: 1147 - protein, 1221 aa, unidentified
  REGION 1..1221: note = Description of Unknown: uncultivated organism with predicted taxonomy: Bacteroides sp. CAG:770
  REGION 1..1221: note = MG16-60 effector
MKKVLGLDLGVGSVGWSLVNVDDNYKPTEILGIGSRIISLSPDESSEFTSGNAASKNQKRTQKRTARKGYDRYQMRRQALTEKLRELKMLPDERLIKLPVLELWTLRAKAATPGEKLTLPEIGRVLYHINQKRGYRHAKSDDSADKEQRDYVQTVNKRYQEIKDEGTTIGQHFAIKLKESEIVTDKGPFYNYRIKEQVFPRDAYIEEFDRIMDCQKTFYPEELSEDNIDEIRNKIIFYQRDLKSCKHLVSQCEFMTRSFLDADHKPILNSSGELVMSGPKVAPKSSPIFQACKIWEEINNLSIRNKENDELHISPEQKKDIFEYLDNNEKINATALYKILGIGKGDGWSVDKALSKGFTGNTTKGAIAKALGKDHNTKKSDLLRFDLRLKENGVNKDTGEIIYEIDPTCENEPLYRLWHVIYSINDKDALRHALTNQFGINDEESLRELTKIDFVKQGYGSRSAKFMRKLLPALMDGARYSEACDMIGSNHSGSLTKSENEARELLHKIPQLQKNELRQPVVEKILNQMINVVNAVIDQFGSIDEIRVEMARELKLSKEGRAATAKNIRDREKMNNEMAEKIKELGITPSKNKILKYRLWQESGQKCFYCGQPVGAAEFLSGLDVEIEHIVPKALLFDDSFSNKVCACRKCNAEKSNTTAYDYMKSKGENEFNDYLRRVDAAFNEHKISFTKRSRLLTPADKLPKDFISRQLVQTQYISRKAMEILKQVCHNVYGSSGEVTSYLRRIWGYDEILHSLDLPRYREGGMTAEVSYDHRGQTHTEERIKDWSKRLDHRHHAIDALTIACTRQSIIQRLNNLSAMTAVAGESMSLDKWTLAQPHFSVQEVSDNVSRILVSFKAGKKVTTPGKRYVYRGGKRVLAQKGLLIPRGALCEESVYGRIHSLEKEVPVKKLFERVDDIVKPGIRAAVEERLRACDNDVKVACASLKKEPLYLDVEKTIPLEYGTCYKVEYVMRYALSALKPKDVEYFVDEHIRKVVSERLSEYGNDPKKAFAEPLYADKSKTIPIRAVRCYTGLAQVVPVKKDSKGNAIGFVKPGNNHHIAIYRDADGTYHESVVTFWDTVERKKYGLPVIIRKPEEIWDIIIDKNISEELAAGLPAPDWKFVMSMQQNEMYVLGMEDDEFRDAMEVKDYKTLGAHLYRVQKLTSIDYYFRSQYETTLDDSAGARMMKKFYRIKSIKSLFALHPRKVSVSLLGEMALKDD

SEQ ID NO: 1148 - protein, 1221 aa, unidentified
  REGION 1..1221: note = Description of Unknown: uncultivated organism with predicted taxonomy: Bacteroides sp. CAG:709
  REGION 1..1221: note = MG16-61 effector
MKKILGLDLGVGSIGWSLINADKDNKPIAILGLGSRIISLSPDESSEFTSGNAASKNQKRTQKRTTRKGYDRYQMRRQALTDKLSKLKMLPDEHLIKLPVLDLWTLRARAATPGEKLTLQEIGRVLYHINQKRGYRHSRSDDSADKEQREYVQAINKRFQEIREEGVTIGQHFVKKLKESEVVTDKGAFYNYRIKEQVFPRDAYVAEFDRVMDCQKVFYPEELSEANINEFRNEIIFYQRDLKSCKHLVSRCEFMTRSFLDEGHRPVLDASGKLVISGPKVAPKSSPIFQVCKIWEEINNLSIRNKENDELHISPEQKKEIFEYLDNNEKITSAALYKILGIGKGDGWSVDKALSKGFTGNTTKVAISKALGKANDAKKRDLLRFDLRLKENGVNKDTGEIICEIDPECENEPLYKLWHVIYSINDKDAQRHALTSQFGINDEASLAELSKIDFVKQGYGSRSVKFMRKLLPSLMDGAKYSEACDVIGVNHSASLTKSENEARELLQRIPQLQKNELRQPVVEKILNQMINVVNAVIEKFGGVDEIRVEMARELKLSKEGRAATAKNIRDREKENKEIAEKIIELGVTPSKNKILKYRLWQEAGQKCFYCGQPVGATEFLNGLEVEIEHVVPKALLFDDSFSNKVCACRKCNAEKRNSTAYDYMKSKGENAFNDYLRRVDTAFSEHKISFTKRSRLLTPADKIPKDFISRQLVQTQYISRKAMEILKQVCHNVYGSSGEVTSYLRRIWGYDEILHSLDLPRYREGGMTAEVSYEHRGQTHTEERIKDWSKRLDHRHHAIDALTIACTRQSVIQRLNNLSSMTAVAGEAMSLDKWTLAQPHFSVQEVSDKVGGILVSFKAGKKVTTPGKRYTYRGGKRILAQDGLLIPRGALSEESVYGRISALEKNVPVKKLFERVEDIVKPGIRAVVEDRLMACDNDVNAACASLKEEPLYLDAEKTIPLEYGTCYKAKYVMKYALSALKPKDVEYIVDEHIRKVVSERLSEYGNDPKKAFAEPLYADDAKTIAVRTVRCYTGLDQVVPVKRDVAGNDIGFVKPGNNHHIAIYRDADGKFHECVVTFWDAVERKKCGIPVIVRNPDEVWDVVIDKNVPEELAAGLPALGWSFVMSLQQNEMFIFGMEDDEFMDAMAEADYKALGAHLYRVQKLAGSDYYFRSHYETLLDDSAGARIMKKFYRISSSKALFALHPRKVAVSLLGEMSLKND

SEQ ID NO: 1149 - protein, 1221 aa, unidentified
  REGION 1..1221: note = Description of Unknown: uncultivated organism with predicted taxonomy: Bacteroides sp. CAG:770
  REGION 1..1221: note = MG16-62 effector
MKKVLGLDLGVGSVGWSLVNVDDNYKPTEILGIGSRIISLSPDESSEFTSGNAASKNQKRTQKRTARKGYDRYQMRRQALTEKLRELKMLPDERLIKLPVLELWTLRAKAATPGEKLTLPEIGRVLYHINQKRGYRHAKSDDSADKEQRDYVQTVNKRYQEIKDEGTTIGQHFAIKLKESEIVTDKGPFYNYRIKEQVFPRDAYIEEFDRIMDCQKTFYPEELSEDNIDEIRNKIIFYQRNLKSCKHLVSQCEFMTRSFLDADHKPILNSSGELVMSGPKVAPKSSPIFQACKIWEEINNLSIRNKENDELHISPEQKKDIFEYLDNNEKINATALYKILGIGKGDGWSVDKALSKGFTGNTTKVAIAKALGKEHNTKKSDLLRFDLRLKENGVNKDTGEIIYEIDPTCENEPLYRLWHVIYSINDKDALRHALTNQFGINDGDSLRELTKIDFVKQGYGSRSAKFMRKLLPALMDGARYSEACDMIGINHSGSLTKSENEARELLHKIPQLQKNELRQPVVEKILNQMINVVNAVIDQFGSIDEIRVEMARELKLSKEGRAATAKNIRDREKMNNEMAEKIKELGITPSKNKILKYRLWQESGQKCFYCGQPVGAAEFLSGLDVEIEHIVPKALLFDDSFSNKVCACRKCNAEKSNTTAYDYMKSKGENEFNDYLRRVDAAFNEHKISFTKRSRLLTPADKLPKDFISRQLVQTQYISRKAMEILKQVCHNVYGSSGEVTSYLRRIWGYDEILHSLDLPRYREGGMTAEVSYDHRGQTHTEERIKDWSKRLDHRHHAIDALTIACTRQSIIQRLNNLSAMTAVAGESMSLDKWTLAQPHFSVQEVSDNVSRILVSFKAGKKVTTPGKRYVYRGGKRVLAQEGLLIPRGALCEESVYGRIHSLEKEVPVKKLFERVDDIVKPGIRAAVEERLRACDNDVKVACASLKKEPLYLDAEKTIPLEYGTCYKAEYVMRYALSALKPKDVEFIVDEHIRKVVSERLSEYGNDPKKAFAEPLYADKSKTIPIRAVRCYTGLAQVVPVKKDSKGNDIGFVKLGNNHHIAIYRDAEGTYHENVVTFWDTVERKKYGLPVIIRKPGEIWDILIDKNIPEELAAGLPAPDWKFVMSMQQNEMFVLGMEDDEFRDAMAVKDYKTLGAHLYRVQKLASIYYVFRHQYETQLDDSKGALVMKKFYRTASFKALFALHPRKVSVSLLGEMALKDD

SEQ ID NO: 1150 - protein, 1221 aa, unidentified
  REGION 1..1221: note = Description of Unknown: uncultivated organism with predicted taxonomy: Bacteroides sp. CAG:770
  REGION 1..1221: note = MG16-63 effector
MKKVLGLDLGVGSVGWSLVNVDDNYKPTEILGIGSRIISLSPDESSEFTSGNAASKNQKRRQKRTARKGYDRYQMRRQALTEKLRELKMLPDERLIKLPVLELWTLRAKAATPGEKLTLPEIGRVLYHINQKRGYRHAKSDDSADKEQRDYVQTVNKRYQEIKDEGTTIGQHFAIKLKESEIVTDKGPFYNYRIKEQVFPRDAYIEEFDRIMDCQKTFYPEELSEDNIDEIRNKIIFYQRDLKSCKHLVSQCEFMTRSFLDADHKPILNSSGELVMSGPKVAPKSSPIFQACKIWEEINNLSIRNKENDELHISPEQKKDIFEYLDNNEKINATALYKILGIGKGDGWSVDKALSKGFTGNTTKVAIAKALGKEHNTKKSDLLRFDLRLKENGVNKDTGEIIYEIDPTCENEPLYRLWHVIYSINDKGALRHALTNQFGINDGESLRELTKIDFVKQGYGSRSAKFMRKLLPALMDGARYSEACDMIGINHSGSLTKSENEARELLHKIPQLQKNELRQPVVEKILNQMINVVNAVIDQFGSIDEIRVEMARELKLSKEGRAATAKNIRDREKMNNEMAEKIKELGITPSKNKILKYRLWQESGQKCFYCGQPVGAAEFLSGLDVEIEHIVPKALLFDDSFSNKVCACRKCNAEKSNTTAYDYMKSKGENEFNDYLRRVDAAFNEHKISFTKRSRLLTPADKLPKDFISRQLVQTQYISRKAMEILKQVCHNVYGSSGEVTSYLRRIWGYDEILHSLDLPRYREGGMTAEVSYDHRGQTHTEERIKDWSKRLDHRHHAIDALTIACTRQSIIQRLNNLSAMTAVAGESMSLDKWTLAQPHFSVQEVSDNVSRILVSFKAGKKVTTPGKRYVYRGGKRVLAQEGLLIPRGALCEESVYGRIHSLEKEVPVKKLFERVDDIVKPGIRTAVEERLRACDNDVKVACASLKKEPLYLDVEKTIPLEYGTCYKAKYVMRYVLSALKPKDVEFIVDEHIRKVVSERLSEYGNDPKKAFAEPLYSDKSKTIPIRAVRCYTGLAQVVPVKKDSKGNAIGFVKPGNNHHIAIYRDADGAYHENVVTFWDTVERKKYGLPVIIRKPGEIWDILIDKNIPEELAAGLPAPDWQFVMSMQQNEMFVLGMEDDEFRDAMEVKDYKTLGAHLYRVQSLSRSDYYYRCQYETQLDNSNGAMLMKKYYRVRSFNALFTLHPRKVSVSLLGEMALKDD

SEQ ID NO: 1151 - protein, 1219 aa, unidentified
  REGION 1..1219: note = Description of Unknown: uncultivated organism with predicted taxonomy: Alistipes sp. CAG:514
  REGION 1..1219: note = MG16-64 effector
MKKVLGLDLGVGSVGWSLVNVDDNYKPAEILGLGSRIISLSPDESSEFTSGNAASKNQKRTQKRTARKGYDRYQMRRQALTEKLRELKMLPDERLIKLPVLDLWTLRARAATPGEKLTLPEIGRVLYHINQKRGYRHSKSDDSADKEQRDYVQTVNKRFQEIKDEGTTIGQHFAIILKESEVFTEKGPFYNYRIKEQVFPRDAYIEEFDRIMACQKAFYPEELSDININEIRNEIIFYQRNLRSCKHLVSRCEFMTRRFFDAEHKPILNNSGEIVISGPKVAPKSSPIFQACKIWEEINNLSLRNKENDELHISREQKKEIFEYLDNNEKITATALYKILGIGKGDGWSMDKALSKGVTGNTTKTAIARALGKMNNPAKESLLRFDLRLKENGVNKDSGEVIYEIDPKCENEPLYRLWHIIYSINDKEALRQALTNQFGINDEESLKELSNIDFVKQGYGSRSAKFMRKLLPALIGGAKYSEACDMIGINHSGSLTKSENEARELLHKIPQLQKNELRQPVVEKILNQMINVVNAVIDQFGDIDEIRVEMARELKLSKEGRAATAKNIRDREKQNNEIAEKIKELGITPSKNKILKYRLWQESGQKCFYCGQPVGAAEFLNGLDVEIEHIVPKALLFDDSFSNKVCACRRCNAEKSNLTAYDYMKSKGENEFNDYLRRVDAAFNDHKISFTKRSRLLTPADKLPKDFILRQLVQTQYISRKAMEILKQVCHNVYGSSGEVTSYLRRIWGYDEILHSLDLPRYREGGMTTEVSYEHRGQTHTEERIKDWSKRLDHRHHAIDALTIACTRQSIIQRLNNLSSMTATAGESMSLDKWTSAQPHFSVQEVSDNVSRILVSFKAGKKVTTPGKRYIHRGGKRILTQEGLLIPRGALCEESVYGRILSLEKAVPVKKLFERVEDIVKPGIRAMVEERLQACNNDVKVACASLKKEPLYLDAEKTIPLEYGTCYKAEYVMKYTLSALKPKDVEYIVDEHIRKVVSERLSEYGNDPKKAFAEPLYADEAKTIPIRTVRCYTDLRQVAPVKKDANGNDIGFVKPGNNHHIAIYIDSDGVYHKSTITFWKAVERKKYGLPVIIRKPREIWMIIIDKNIPEELAAGLPDPDWKFVMSMQQNEMFVLGMEDDEFRDAMEGKDYKTLGAHLYRVQKLEHLNFRIQYDTILDDSKAAKDMKKFYEIRGFKAFWALHPRKVSVSLLGELSLKDD

SEQ ID NO: 1152 - protein, 1220 aa, unidentified
  REGION 1..1220: note = Description of Unknown: uncultivated organism with predicted taxonomy: Bacteroides sp. CAG:770
  REGION 1..1220: note = MG16-65 effector
MKKILGLDLGVGSVGWSVISCDDEHRPLEILGMGSRIVPLTPDESNEFSSGNAASKNQSRTQKRTARKGYDRYQLRRQALTVKLRELGMLPDEALIKLPVLDLWTLRARAATPGDKLSLPEIGRVLYHLNQKRGYRHSKQDDSADKTQRDYVQAVNKRFQEIKDEGLTIGQHFAEKLKESEIITDKGAFYNYRIKEQVFPRAAYVEEFDRIIQCQREFYPEVFTEAIVNEIRNEIIYYQRPLKSCKHLVSVCEFMQRELFDAEHNPIRNGKGEIVVAGPKCAPKSSPLAQVCKIWEEVNNIRITNKENDEYFISIDNKHEIFDFLNTHEKMKADDLFKILGLAKNSGWSADRAMSKGMVGNTTRVALMKALKGRRDIDEILRFDLREVESNQVNADTGEVLMEIGAECESEPLYRLWHIIYSISDKNEQKATLEKQFGITDESMLESLCRIDFVKQGYSSRSFKFMRKILPYLMDGAKYSEACDAVGINHSDSITKAKNQARELLVKLPQLQKNELRQPVVEKILNQMINVVNAVIDKYGAIDEIRVEMARELKLSKEGRESAAKNISDRKKANEEIARRIEELGLVPSKNKILKYRLWEESGKRCFYCGQPVSAAEFLNGLDVEIEHVIPKSLLFDDSFSNKVCACRKCNAEKDNATAFDFMKGRGENAFEDYLKRVETAFKENKISQTKRNRLLTPADKIPKDFISRQLVQTQYISRKAMEILNQVCRNVYGSSGDVTAYLRRIWGYDEILHSLDLPRYREGNLTGDVTYVHKGQTHTEERIKDWSKRLDHRHHAIDALTIASTRQSIIQRLNTLNAKTAIGEEQISLDKWTLAQAHFSVADVADHVADILVSFKSGKKVTTPGKRYVYKAGRRRVAQENILVPRGALSEESVYGRIKSIEEKVPVKKLFERVDDIVKPRIRHLVRERLEACGGDCSKAVSSLKKSPLYLDEENTIMLEYGSCFKPEYVIKYSLNSIKAKDAVSIVDKHVREVVTARLAAFGDDPKKAFAEPLYADEAGKIQIKTVRCYTGLSQVVPVKKDADGNDIGFVKPGNNHHIAIYKDAGGKYQECIVTFRDAVERKKYGIPVVVRKPAAVLDTVIDKNVPEDLAGGLPSPEWTFVMSMQQNEMFVLGMGDDEFNDAMAGRDYKSLGEHLYRVQSISHADYYFRSQYETMLDNSKNAMAMKKYYRIRSFKALFALNPRKVSISLLGEISLKDD

SEQ ID NO: 1153 - protein, 1221 aa, unidentified
  REGION 1..1221: note = Description of Unknown: uncultivated organism with predicted taxonomy: Bacteroides sp. CAG:770
  REGION 1..1221: note = MG16-66 effector
MKKVLGLDLGVGSVGWSLVNVDDNYKPTEILGIGSRIISLSPDESSEFTSGNAASKNQKRTQKRTARKGYDRYQMRRQALTEKLRELKMLPDERLIKLPVLELWTLRAKAATPGEKLTLPEIGRVLYHINQKRGYRHAKSDDSADKEQRDYVQTVNKRYQEIKDEGTTIGQHFAIKLKESEIVTDKGPFYNYRIKEQVFPRDAYIEEFDRIMDCQKTFYPEELSEDNIDEIRNKIIFYQRDLKSCKHLVSQCEFMTRSFLDADHKPILNSSGELVMSGPKVAPKSSPIFQACKIWEEINNLSIRNKENDELHISPEQKKDIFEYLDNNEKINATALYKILGIGKGDGWSVDKALSKGFTGNTTKVAIAKALGKEHNTKKSDLLRFDLRLKENGVNKDTGEIIYEIDPTCENEPLYRLWHVIYSINDKDALRHALTNQFGINDGESLRELTKIDFVKQGYGSRSAKFMRKLLPALMDGARYSEACDMIGINHSGSLTKSENEARELLHKIPQLQKNELRQPVVEKILNQMINVVNAVIEQFGSIDEIRVEMARELKLSKEGRAATAKNIRDREKMNNEMAEKIKELGITPSKNKILKYRLWQESGQKCFYCGQPVGAAEFLSGLDVEIEHIVPKALLFDDSFSNKVCACRKCNAEKSNTTAYDYMKSKGENEFNDYLRRVDAAFNAHKISFTKRSRLLTPADKLPKDFISRQLVQTQYISRKAMEILKQVCHNVYGSSGEVTSYLRRIWGYDEILHSLDLPRYREGGMTAEVSYDHRGQTHTEERIKDWSKRLDHRHHAIDALTIACTRQSIIQRLNNLSAMTAVAGEYMSLDKWTLAQPHFSVQEVSDNVSRILVSFKAGKKVTTPGKRYVYRGGKRILAQEGLLIPRGALCEESVYGRIHSLEKEVPVKKLFERVDDIVRPGIRAAVEERLRACDNDVKVACASLKKEPLYLDVEKTIPLEYGTCYKAEYVMRYALSALKPKDVEFIVDEHIRKVVSERLSEYGNDPKKAFAEPLYADKSKTIPIRAVRCYTGLAQVVPVKKDSKGNDIGFVKPGNNHHIAIYRNVEGTYHESIVTFWDSVERKKYGLPVIIRKPGEIWDILIDKNIPEELAAGLPAPDWQFVMSMQQNEMFVLGMEDDEFRDAMEVKNYKTLGAHLYRVQKLASIDYYFRSQYETALDNSAGARMMKKFYRINSIKSLFALHPRKVSVSLLGEMALKDD

SEQ ID NO: 1154 - protein, 1221 aa, unidentified
  REGION 1..1221: note = Description of Unknown: uncultivated organism with predicted taxonomy: Bacteroides sp. CAG:545
  REGION 1..1221: note = MG16-67 effector
MKKVLGLDLGVGSVGWSLVNVDDNYKPTEILGIGSRIISLSPDESSEFTSGNAASKNQKRTQKRTARKGYDRYQMRRQALTEKLRELKMLPDERLIKLPVLELWTLRAKAATPGEKLTLPEIGRVLYHINQKRGYRHAKSDDSADKEQRDYVQTVNKRYQEIKDEGTTIGQHFAIKLKESEIVTDKGPFYNYRIKEQVFPRDAYIEEFDRIMDCQKTFYPEELSEGNIDEIRNKIIFYQRDLKSCKHLVSQCEFMTRSFLDADHKPILNSSGELVMSGPKVAPKSSPIFQACKIWEEINNLSIRNKENDELHISPEQKKDIFEYLDNNEKINATALYKILGIGKGDGWSVDKALSKGFTGNTTKVAMAKALGKEHNTKKSDLLRFDLRLKENGVNKDTGEIIYEIDPACENEPLYRLWHVIYSINDKDALRHALTNQFGINDGESLRELTKIDFVKQGYGSRSAKFMRKLLPALMDGARYSEACDMIGINHSGSLTKSENEARELLHKIPQLQKNELRQPVVEKILNQMINVVNAVIEQFGSIDEIRVEMARELKLSKEGRAATAKNIRDREKMNNEMAEKIKELGITPSKNKILKYRLWQESGQKCFYCGQPVGAAEFLSGLDVEIEHIVPKALLFDDSFSNKVCACRKCNAEKSNTTAYDYMKSKGENEFNDYLRRVDAAFNEHKISFTKRSRLLTPADKLPKDFISRQLVQTQYISRKAMEILKQVCHNVYGSSGEVTSYLRRIWGYDEILHSLDLPRYREGGMTAEVSYDHRGQTHTEERIKDWSKRLDHRHHAIDALTIACTRQSIIQRLNNLSAMTAVAGESMSLDKWTLAQPHFSVQEVSDNVSRILVSFKAGKKVTTPGKRYVYRGGKRVLAQEGLLIPRGALCEESVYGRIHSLEKEVPVKKLFERVDDIVKPGIRTAVEERLRACDNDVKVACASLKKEPLYLDAEKTIPLEYGTCYKAEYVMRYALSALKPKDVEFIVDEHIRKVVSERLSEYGNDPKKAFAEPLYADKSKTIPIRAVRCYTGLAQVVPVKKDSKGNDIGFVKPGNNHHIAIYRDAERTYHENIVTFWDSVERKKYGLPVIIRKPGEIWDILIDKNIPEELAAGLPAPDWQFVMSMQQNEMFVLGMEDDEFRDAMEVKDYKTLGAHLYRVQKLTSIDYYFRSQYETTLDDSAGARMMKKFYRIKSIKSLFALHPRKVSVSLLGEMALKDD

SEQ ID NO: 1155 - protein, 1221 aa, unidentified; identical to SEQ ID NO: 1109
  REGION 1..1221: note = Description of Unknown: uncultivated organism with predicted taxonomy: Bacteroides sp. CAG:770
  REGION 1..1221: note = MG16-68 effector

SEQ ID NO: 1156 - protein, 1221 aa, unidentified; identical to SEQ ID NO: 1120
  REGION 1..1221: note = Description of Unknown: uncultivated organism with predicted taxonomy: Bacteroides sp. CAG:709
  REGION 1..1221: note = MG16-69 effector

SEQ ID NO: 1157 - protein, 1221 aa, unidentified
  REGION 1..1221: note = Description of Unknown: uncultivated organism with predicted taxonomy: Bacteroides sp. CAG:770
  REGION 1..1221: note = MG16-70 effector
MKKVLGLDLGVGSVGWSLVNVDDNYKPTEILGIGSRIISLSPDESSEFTSGNAASKNQKRTQKRTARKGYDRYQMRRQALTEKLRELKMLPDERLIKLPVLELWTLRAKAATPGEKLTLPEIGRVLYHINQKRGYRHAKSDDSADKEQRDYVQTVNKRYQEIKDEGTTIGQHFAIKLKESEIVTDKGPFYNYRIKEQVFPRDAYIEEFDRIMDCQKTFYPEELSEDNIDEIRNKIIFYQRDLKSCKHLVSQCEFMTRSFLDAEHKPILNSSGELVMSGPKVAPKSSPIFQACKIWEEINNLSIRNKENDELHISPEQKKDIFEYLDNNEKINATALYKILGIGKGDGWSVDKVLSKGFTGNTTKGAIAKALGKDHNTKKSDLLRFDLRLKENGVNKDTGEIIYEIDPTCENEPLYRLWHVIYSINDKDALRHALTNQFGINDGESLRELTKIDFVKQGYGSRSAKFMRKLLPALMDGARYSEACDMIGVNHSGSLTKSENEARELLHKIPQLQKNELRQPVVEKILNQMINVVNAVIEQFGSIDEIRVEMARELKLSKEGRAATAKNIRDREKMNNEMAEKIKELGITPSKNKILKYRLWQESGQKCFYCGQPVGAAEFLSGLDVEIEHIVPKALLFDDSFSNKVCACRKCNAEKSNTTAYDYMKSKGENEFNDYLRRVDAAFNEHKISFTKRSRLLTPADKLPKDFISRQLVQTQYISRKAMEILKQVCHNVYGSSGEVTSYLRRIWGYDEILHSLDLPRYREGGMTAEVSYDHRGQTHTEERIKDWSKRLDHRHHAIDALTIACTRQSIIQRLNNLSAMTAVAGESMSLDKWTLAQPHFSVQEVSDNVSRILVSFKAGKKVTTPGKRYVYRGGKRVLAQEGLLIPRGALCEESVYGRIHSLEKEVPVKKLFERVDDIVKPGIRTAVEERLRACDNDVKVACASLKKEPLYLDVEKTIPLEYDTCYKAKYVMRYALSALKPKDVEFIVDEHIRKVVSERLSEYGNDPKKAFAEPLYADKSKTIPIRAVRCYTGLAQVVPVKKDSKGNDIGFVKPGNNHHIAIYRDAEGTYHESIVTFWDSVERKKYGLPVIIRKPGEIWDILIDKNIPEELAAGLPAPDWQFVMSMQQNEMFVLGMEDDEFRDAMEVKDYKTLGAHLYRVQKLTSIDYYFRSQYETTLDDSAGARMMKKFYRIKSIKSLFALHPRKVSVSLLGEMALNDD

SEQ ID NO: 1158 - protein, 1219 aa, unidentified; identical to SEQ ID NO: 1117
  REGION 1..1219: note = Description of Unknown: uncultivated organism with predicted taxonomy: Bacteroides sp. CAG:545
  REGION 1..1219: note = MG16-72 effector

SEQ ID NO: 1159 - protein, 1221 aa, unidentified
  REGION 1..1221: note = Description of Unknown: uncultivated organism with predicted taxonomy: Bacteroides sp. CAG:545
  REGION 1..1221: note = MG16-73 effector
MKKVLCLDLGVGSVGWSLVNVDDNYKPTEILGIGSRIISLSPDESSEFTSGNAASKNQKRTQKRTARKGYDRYQMRRQALTEKLRELKMLPDERLIKLPVLELWTLRAKAATPGEKLTLPEVGRVLYHINQKRGYRHAKSDDSADKEQRDYVQTVNKRYQEIKDEGTTIGQHFAIKLKESEIVTDKGPFYNYRIKEQVFPRDAYIEEFDRIMDCQKTFYPEELSEDNIDEIRNKIIFYQRDLKSCKHLVSQCEFMTRSFLDADHKPILNSSGELVMSGPKVAPKSSPIFQACKIWEEINNLSIRNKENDELHISPEQKKDIFEYLDNNEKINATALYKILGIGKGDGWSVDKALSKGFTGNTTKVAIAKALGKEHNTKKSDLLRFDLSLKENGVNKDTGEIIYEIDPACENEPLYRLWHVIYSINDKDALRHALTNQFGINDEESLRELTKIDFVKQGYGSRSAKFMRKLLPALMDGARYSEACDMIGINHSGSLTKSENEARELLHKIPQLQKNELRQPVVEKILNQMINVVNAVIEQFGSIDEIRVEMARELKLSKEGRAATAKNIRDREKMNNEMAEKIKELGITPSKNKILKYRLWQESGQKCFYCGQPVGAAEFLSGLDVEIEHIVPKALLFDDSFSNKVCACRKCNAEKSNTTAYDYMKSKGENEFNDYLRRVDAAFNEHKISFTKRSRLLTPADKLPKDFISRQLVQTQYISRKAMEILKQVCHNVYGSSGEVTSYLRRIWGYDEILHSLDLPRYREGGMTAEVSYDHRGQTHTEERIKDWSKRLDHRHHAIDALTIACTRQSIIQRLNNLSAMTAVAGESMSLDKWTLAQPHFSVQEVSDNVSRILVSFKAGKKVTTPGKRYVYRGGKRVLAQEGLLIPRGALCEESVYGRIHSLEKEVPVKKLFERVDDIVKPGIRAAVEERLRACDNDVKVACASLKKEPLYLDVEKTIPLEYGTCYKVEYVMRYALSALKPKDVEYIVDEHIRKVVSERLSEYGNDPKKAFAEPLYADKSKTIPIRAVRCYTGLAQVVPVKKDSKGNAIGFVKPGNNHHIAIYRDADGTYHESVVTFWDTVERKKYGLPVIIRKPEEIWDIIIDKNIPEELAAGLPAPDWQFVMSMQQNEMFVLGMKDDEFRDAMEVKDYKTLGAHLYRVQKLTSIYYVFRHQYETQLDDSKGAQIMKKFYRAQSFKALFALHPRKVSVSLLGEMALKDD

SEQ ID NO: 1160 - protein, 1220 aa, unidentified
  REGION 1..1220: note = Description of Unknown: uncultivated organism with predicted taxonomy: Bacteroides sp. CAG:770
  REGION 1..1220: note = MG16-74 effector
MKKILGLDLGVGSVGWSVISCDDEHRPLEILGMGSRIVPLTPDESNEFSSGNAASKNQSRTQKRTARKGYDRYQSRRKALTDKLRDLDMLPDETLIKLPVLDLWTLRARAATPGDKLSLPEIGRGLYHLNQKRGYRHSKEDDSADKTQRDYVQAVNKRFQEIKDEGLTIGQHFAVKLKESEVITDKGAFYNYRIKEQVFPRAAYVEEFDRIIQCQREFYPEVLTEANVNEIRNEIIYYQRPLKSCKHLVSVCEFMQRELFDAEHNPIRNGKGEIVVAGPKCAPKSSPLAQVCKIWEKVNNIRITNKENDEYFISIDNKHEIFDFLNTHEKMKADDLFKILGIAKNSSWSADRAMSKGMVGNTTRVALMKALKGRRDIDEILRFDLREVESSQVNADTGEVLMEISAECEREPLYRLWHIIYSISDKNEQKSALKNQFGISDDSMLESLCKIDFVKQGYSSRSFKFMRRILPSLMDGAKYSEACDVIGINHSDSITKAENQARELLTRLPQLQKNELRQPVVEKILNQMINVVNAVIDKYGSIDEIRVEMARELKLSKAGRESAAKNIRTREKANEEIAKRIEELGLVPSKNKILKYRLWEESGKRCFYCGQPVSATEFLNGLDVEIEHIVPKSLLFDDSFSNKVCACRKCNAEKDNATAFDFMKGRGENAFEDYLKRVETAFKENKISQTKRNRLLTPADKIPKDFISRQLVQTQYISRKAMEILNQVCRNVYGSSGDVTAYLRRIWGYDEILHSLDLPRYREGNLTGDVTYVHRGQTHTEERIRDWSKRLDHRHHAIDALTIASTRQSIIQRLNTLNANTAIGEEQISLDKWTLAQAHFSVADVADHVADILVSFKSGKKVATPGKRYVYRAGRRIVAQENILVPRGALSEESVYGRIKSIEEKVPVKKLFERADDIVKPRIRHLIGARLEACGGDCSKAVSSLRKSPLYLDEEKTIMLEYGSCFKPEYVIKYSLNSIKAKDAVSIVDNHVREVVTARLAAFGDDPKKAFAEPLYADEAGKIQIKTVRCYTGLSQVVPVKKDADGNDIGFVKPGNNHHIAIYKNADGKYQESIVTFCDAVERKKYGIPVVVRNPAAVLDTVIDKNVPEDLAGGLPSPEWTFVMSMQQNEMFVLGMGDDEFNDAMTGRDYKSLGEHLYRVQKLASLYYVFRSQYETKLDDSKGALTMKKFYRTASFKALFALNPRKVSISLLGEISLKDD

SEQ ID NO: 1161 - protein, 1221 aa, unidentified; identical to SEQ ID NO: 1119
  REGION 1..1221: note = Description of Unknown: uncultivated organism with predicted taxonomy: Bacteroides sp. CAG:709
  REGION 1..1221: note = MG16-75 effector

SEQ ID NO: 1162 - protein, 1219 aa, unidentified
  REGION 1..1219: note = Description of Unknown: uncultivated organism with predicted taxonomy: Bacteroides
  REGION 1..1219: note = MG16-76 effector
MKKILGLDLGVGSIGWSLINADKDNKPIAILGLGSRIISLSPDESSEFTSGNAASKNQKRTQKRTARKGYDRYQMRRQALTDKLRKLKMLPDEHLIKLPDLWTLRARAATPGEKLTLPEIGRVLYHINQKRGYRHSRSDDSADKEQREYVQAINKRFQEIREEGVTIGQHFVKKLKESEVVTDKGAFYNYRIKEQVFPRDAYVAEFDRVMDCQKVFYPEELSEANINEFRNEIIFYQRNLKSCKHLVSRCEFMTRSFLDEGHRPVLDASGKLVISGPKVAPKSSPIFQVCKIWEEINNLSIRNKENDELHISPEQKKEIFEYLDNNEKITSAALYKILGIGKGDGWSVDKALSKGFTGNTTKVAISKALGKANDAKKRDLLRFDLRLKENGVNKDTGEIICEIDPECENEPLYKLWHVIYSINDKDAQRHALTSQFGINDEASLAELSKIDFVKQGYGSRSVKFMRKLLPSLMDGAKYSEACDVIGVNHSGSLTKSENEARELLQRIPQLQKNELRQPVVEKILNQMINVVNAVIEKFGGVDEIRVEMARELKLSKEGRAATAKNIRDREKENKEIAEKIIELGVTPSKNKILKYRLWQEAGQKCFYCGQPVGATEFLNGLDVEIEHVVPKALLFDDSFSNKVCACRKCNAEKRNSTAYDYMKSKGENAFNDYLRRVDTAFSEHKISFTKRSRLLTPADKIPKDFISRQLVQTQYISRKAMEILKQVCHNVYGSSGEVTSYLRRIWGYDEILHSLDLPRYREGGMTAEVSYEHRGQTHTEERIKDWSKRLDHRHHAIDALTIACTRQSVIQRLNNLSSMTAVAGEAMSLDKWTLAQPHFSVQEVSDKVGGILVSFKAGKKVTTPGKRYTYRGGKRILAQDGLLIPRGALSEESVYGRISALEKNVPVKKLFERVEDIVKPGIRAVVEDRLMACDNDVNAACASLKKEPLYLDAEKTIPLEYGTCYKAKYVMKYALSALKPKDVEYIVDEHIRKVVSERLSEYGNDPKKAFAEPLYADDAKTIAVRTVRCYTGLDQVVPVKKDVAGNDIGFVKPGNNHHIAIYRDADGKFHECVVTFWDAVERKKYGIPVIVRNPDEVWDVVIDKNVPEELAAGLPALGWSFVMSLQQNEMFILGMEDDEFRDAMAEADYKALGAHLYRVQKLAGSDYYFRSHYETLLDDSAGARIMKKFYRISSSKALFALHPRKVAVSLLGEMSLKND

SEQ ID NO: 1163 - protein, 1220 aa, unidentified
  REGION 1..1220: note = Description of Unknown: uncultivated organism with predicted taxonomy: Bacteroides sp. CAG:770
  REGION 1..1220: note = MG16-77 effector
MKKILGLDLGVGSVGWSVVSCDDEHKPVEILGMGSRIVPLTPDESNEFSSGNAASKNQSRTQKRTARKGYDRYQLRRQALTVKLRELGMLPDEALIKLPVMDLWTLRARAATPGEKLSLAEIGRVLYHLNQKRGYRHSKEDDFADKTQRDYVQAVNKRFQEIKNEGLTIGQHFAVKLKESEVITDNGAFYNYRIKEQVFPRAAYVEEFDRIIQCQREFYPEVLTEANVNEIRNEIIYYQRPLKSCKHLVSVCEFMQRELFDAEHNPIRNGKGEIVVAGPKCAPKSSPLAQVCKIWEEVNNIRITNKENDEYFISIDNKHEIFDFLNTHEKMKADDLFKILGLAKNSGWSADRAMSKGMVGNTTRVALMKALKGRRDIDEILRFDLREVESNQVNADTGEVLMEIGAECESEPLYRLWHIIYSISDKNEQKATLEKQFGITDESMLESLCRIDFVKQGYSSRSFKFMRKILPSLMDSAKYSEACDVIGINHSDSITKAENQTRKLLTKLPQLQKNELRQPVVEKILNQMINVVNAVIDKYGSIDEIRVEMARELKLSKAGRESAAKNIRTREKANEEIAKRIEELGLVPSKNKILKYRLWEESGKRCFYCGQPVSAAEFLNGLDVEIEHVVPKSLLFDDSFSNKVCACRKCNAEKGNATAFDFMKGRGENAFEDYLKRVETAFKENKISQTKRNRLLTPADKIPKDFIARQLVQTQYISRKAMEILNQVCRNVYGSSGDVTAYLRRIWGYDEILHSLDLPRYREGNLTGDVTYVHRGQTHTEERIRDWSKRLDHRHHAIDALTIACTRQSIIQRLNTLNAKTAIGEEQMSLDKWTLAQAHFSVADVADHVADILVSFKSGKRVTTPGKRYVYKAGRRIVVQENILVPRGALSEESVYGRIKSIEEKVPVKKLFERVDDIVKPRIRRLIRERLEACGGDCSKAVSSLKKSPLYLDEEKTIMLEYGSCFKPEYVIKYSLNSIKAKDAVSIVDKHVREVVTERLAAFGDDPKKAFAEPLYADEAGKIQIKTVRCYTGLSQVVPVKKDADGNDIGFVKPGNNHHIAIYKDADGKYQESIVTFRDAVERKKYGIPVVVRNPVEVLDTIIDKNVPEDLAGGLPSPEWTFVMSMQQNEMFVLGMGDDEFNDALAGRDYKSLGEHLYRVQKLASLYYVFRSQYETKLDDSKGALTMKKFYRTASFKALFSLNPRKVSISLLGEISLKDD

SEQ ID NO: 1164 - protein, 1221 aa, unidentified
  REGION 1..1221: note = Description of Unknown: uncultivated organism with predicted taxonomy: Bacteroides
  REGION 1..1221: note = MG16-78 effector
MKKVLGLDLGVGSVGWSLVNVDDNYKPTEILGIGSRIISLSPDESSEFTSGNAASKNQKRTQKRTARKGYDRYQMRRQALTEKLRELKMLPDERLIKLPVLELWTLRAKAATPGEKLTLPEIGRVLYHINQKRGYRHAKSDDSADKEQRDYVQTVNKRYQEIKDEGTTIGQHFAIKLKESEIVTDKGPFYNYRIKEQVFPRDAYIEEFDRIMDCQKTFYPEELSEDNIDEIRNKIIFYQRDLKSCKHLVSQCEFMTRSLLDAEHKPILNSSGELVMSGPKVAPKSSPIFQACKIWEEINNLSIRNKENDELHISPEQKKDIFEYLDNNEKINATTLYKILGIGKGDGWSVDKALSKGFTGNTTKVAIAKVLGKEHNTKKSDLLRFDLRLKENGVNKDTGEIIYEIDPTCENEPLYRLWHVIYSINDKDALRHALTNQFGINDEESLRELTKIDFVKQGYGSRSAKFMRKLLPALMDGARYSEACDMIGINHSGSLTKSENEARELLHKIPQLQKNELRQPVVEKILNQMINVVNAVIEQFGSIDEIRVEMARELKLSKEGRAATAKNIRDREKMNNEMAEKIKELGITPSKNKILKYRLWQESGQKCFYCGQPVGAAEFLSGLDVEIEHIVPKALLFDDSFSNKVCACRKCNAEKSNTTAYDYMKSKGENEFNDYLRRVDAAFNEHKISFTKRSRLLSPADKLPKDFISRQLVQTQYISRKAMEILKQVCHNVYGSSGEVTSYLRRIWGYDEILHSLDLPRYREGGMTAEVSYDHRGQTHTEERIKDWSKRLDHRHHAIDALTIACTRQSIIQRLNNLSAMTAVAGESMSLDKWTLAQPHFSVQEVSDNVSRILVSFKAGKKVTTPGKRYVYRGGKRVLAQEGLLIPRGALCEESVYGRIHSLEKEVPVKKLFERVDDIVKPGIRTAVEERLRACDNDVKVACASLKKEPLYLDVEKTIPLEYGTCYKAKYVMRSVLSALKPKDVEFIVDEHIRKVVSERLSEYGNDPKKAFAEPLYSDKSKTIPIRAVRCYTGLAQVVPVKKDSKGNAIGFVKPGNNHHIAIYRDADGAYHENVVTFWDTVERKKYGLPVIIRKPGEIWDILIDKNIPEELAAGLPAPDWQFVMSMQQNEMFVLGMEDDEFRDAMEVKDYKTLGAHLYRVQSLSRSDYYYRCQYETQLDNSNGAMLMKKYYRVRSFNALFTLHPRKVSVSLLGEMALKDD

SEQ ID NO: 1165 - protein, 1221 aa, unidentified
  REGION 1..1221: note = Description of Unknown: uncultivated organism with predicted taxonomy: Bacteroides sp. CAG:770
  REGION 1..1221: note = MG16-79 effector
MKKVLGLDLGVGSVGWSLVNVDDNYKPTEILGIGSRIISLSPDESSEFTSGNAASKNQKRTQKRTARKGYDRYQMRRQALTEKLRELKMLPDERLIKLPVLELWTLRAKAATPGEKLTLPEIGRVLYHINQKRGYRHAKSDDSADKEQRDYVQTVNKRYQEIKDEGTTIGQHFAIKLKESEIVTDKGPFYNYRIKEQVFPRDAYIEEFDRIMDCQKTFYPEELSEDNIDEIRNKIIFYQRDLKSCKHLVSQCEFMTRSFLDADHKPILNSSGELVMSGPKVAPKSSPIFQACKIWEEINNLSIRNKENDELHISPEQKKDIFEYLDNNEKINATALYKILGIGKGDGWSVDKALSKGFTGNTTKVAIAKALGKEHNTKKSDLLRFDLRLKENGVNKDTGEIIYEIDPTCENEPLYRLWHVIYSINDKDALRHALTNQFGINDGESLRELTKIDFVKQGYGSRSAKFMRKLLPALMDGARYSEACDMIGINHSGSLTKSENEARELLHKIPQLQKNELRQPVVEKILNQMINVVNAVIDQFGSIDEIRVEMARELKLSKEGRAATAKNIRDREKMNNEMAEKIKELGITPSKNKILKYRLWQESGQKCFYCGQPVGAAEFLSGLDVEIEHIVPKALLFDDSFSNKVCACRKCNAEKSNTTAYDYMKSKGENEFNDYLRRVDAAFNEHRISFIKRSRLLTPADKLPKDFISRQLIQTQYISRKAMEILKQVCHNVYGSSGEVTSYLRRIWGYDEILHSLDLPRYREGGMTAEVSYDHRGQTHTEERIKDWSKRLDHRHHAIDALTIACTRQSIIQRLNNLSAMTAVAGESMSLDKWTLAQPHFSVQEVSDNVSRILVSFKAGKKVTTPGKRYVYRGGKRVLAQEGLLIPRGALCEESVYGRIHSLEKEVPVKKLFERVDDIVKPGIRAAVEERLRACDNDVKVACASLKKEPLYLDVEKTIPLEYGTCYKVEYVMRYALSALKPKDVEYIVDEHIRKVVSERLSEYGNDPKKAFAEPLYADKSKTIPIRAVRCYTGLAQVVPVKKDSKGNAIGFVKPGNNHHIAIYRDAEGTYHESIVTFWDSVERKKYGLPVIIRKPGEIWDILIDKNIPEELAAGLPAPDWQFVMSMQQNEMFVLGMEDDEFRDAMEVKDYKTLGAHLYRVQKLTSIYYVFRHQYETQLDDSKGAQIMKKFYRAQSFKALFALHPRKVSVSLLGEMALKDD

SEQ ID NO: 1166 - protein, 1221 aa, unidentified; identical to SEQ ID NO: 1134
  REGION 1..1221: note = Description of Unknown: uncultivated organism with predicted taxonomy: Bacteroides sp. CAG:545
  REGION 1..1221: note = MG16-80 effector

SEQ ID NO: 1167 - protein, 1221 aa, unidentified
  REGION 1..1221: note = Description of Unknown: uncultivated organism with predicted taxonomy: Bacteroides
  REGION 1..1221: note = MG16-81 effector
MKKILGLDLGVGSIGWSLINADKDNKPIAILGLGSRIISLSPDESSEFTSGNAASKNQKRTQKRTARKGYDRYQMRRQALTDKLRKLKMLPDEHLIKLPVLDLWTLRARAATPGEKLTLPEIGRVLYHINQKRGYRHSRSDDSADKEQREYVQAINKRFQEIREEGVTIGQHFVKKLKESEVVTDKGAFYNYRIKEQVFPRDAYVAEFDRVMDCQKVFYPEELSEANINEFRNEIIFYQRNLKSCKHLVSRCEFMTRSFLDEGHRPVLDASGKLVISGPKVAPKSSPIFQVCKIWEEINNLSIRNKENDELHISPEQKKEIFEYLDNNEKITSAALYKILGIGKGDGWSVDKALSKGFTGNTTKVAISKALGKANDAKKRDLLRFDLRLKENGVNKDTGEIICEIDPECENEPLYKLWHVIYSINDKDAQRHALTSQFGINDEASLAELSKIDFVKQGYGSRSVKFMRKLLPSLMDGAKYSEACDVIGVNHSGSLTKSENEARELLQRIPQLQKNELRQPVVEKILNQMINVVNAVIEKFGGVDEIRVEMARELKLSKEGRAATAKNIRDREKENKEIAEKIIELGVTPSKNKILKYRLWQEAGQKCFYCGQPVGATEFLNGLDVEIEHVVPKALLFDDSFSNKVCACRKCNAEKRNSTAYDYMKSKGENAFNDYLRRVDTAFSEHKISFTKRSRLLTPADKIPKDFISRQLVQTQYISRKAMEILKQVCHNVYGSSGEVTSYLRRIWGYDVILHSLDLPRYREGGMTAEVSYEHRGQTHTEERIKDWSKRLDHRHHAIDALTIACTRQSVIQRLNNLSSMTAVAGEAMSLDKWTLAQPHFSVQEVSDKVGGILVSFKAGKKVTTPGKRYVYRGGKRILAQEGLLIPRGALCEESVYGRISALEKNVPVKKLFERVEDIVKPGIRAVVEDRLMACDNDVNAACASLKKEPLYLDAEKTIPLEYGTCYKAKYVMKYALSALKPKDVEYIVDEHIRKVVSERLSEYGNDPKKAFAEPLYADKSKTIPVRTVRCYTGLDQVVPVKKDVAGNDIGFVKPGNNHHIAIYRDADGKFHECVVTFWDAVERKKYGIPVIVRNPDEVWDVVIDKNVPEELAAGLPALGWSFVMSLQQNEMFILGMEDDEFRDAMAEADYKALGAHLYRVQKLTGSDYYFRSHYETLLDDSAGARIMKKFYRVRSFNALFNLHPRKVAVSLLGEMSLKND

SEQ ID NO: 1168 - protein, 1221 aa, unidentified
  REGION 1..1221: note = Description of Unknown: uncultivated organism with predicted taxonomy: Bacteroides sp. CAG:770
  REGION 1..1221: note = MG16-82 effector
MKKVLGLDLGVGSVGWSLVNVDDNYKPTEILGIGSRIISLSPDESSEFTSGNAASKNQKRTQKRTARKGYDRYQMRRQALTEKLRELKMLPDEHLIKLPVLELWTLRAKAATPGEKLTLPEIGRVLYHINQKRGYRHAKSDDSADKEQRDYVQTVNKRYQEIKDEGTTIGQHFAIKLKESEIVTDKGPFYNYRIKEQVFPRDAYIEEFDRIMDCQKTFYPEELSEDNIDEIRNKIIFYQRDLKSCKHLVSQCEFMTRSFLDADHKPILNSSGELVMSGPKVAPKSSPIFQACKIWEEINNLSIRNKENDELHISPEQKRDIFEYLDNNEKINATALYKILDIGKCDGWSVDKALSKGFTGNTTKVAIAKVLGKEHNTKKSDLLRFDLRLKENGVNKDTGEIIYEIDPTCENEPLYRLWHVIYSINDKDALRQALTNQFGINDGESLRELTKIDFVKQGYGSRSAKFMRKLLPALMDGARYSEACDMIGINHSGSLTKSENEARELLHTIPQLQKNELRQPVVEKILNQMINVVNAVIDQFGSIDEIRVEMARELKLSKEGRAATAKNIRDREKMNNEMAEKIKELGITPSKNKLLKYRLWQESGQKCFYCGQPVGAAEFLSGLDVEIEHIVPKALLFDDSFSNKVCACRKCNAEKSNTTAYDYMKSKGENEFNDYLRRVDAAFNEHKISFTKRSRLLTPANKLPKDFISRQLVQTQYISRKAMEILKQVCHNVYGSSGEVTSYLRRIWGYDEILHSLDLPRYREGGMTAEVSYDHRGQTHTEERIKDWSKRLDHRHHAIDALTIACTRQSIIQRLNNLSAMSAVAGESMSLDKWTLAQPHFSVQEVSDNVSRILVSFKAGKKVATPGKRYVYRGSKRILAQEGLLIPRGALCEESVYGRINSLEKGVPVKKLFERVDDIVKPGIRTAVEERLRACDNDVKVACASLKKEPLYLDVEKTIPLEYGTCYKAEYVMRYALSALKPKDVEYIVDEHIRKVVSERLSEYGNDPKKAFAEPLYADKSKTIPIRAVRCYTGLAQVVPVKKDSKGNDIGFVKPGNNHHIAIYRDAEGTYHESIVTFLDSVERKKYGLPVIIRKPGEIWDILIDKNIPEELAAGLPAPDWQFVMSMQQNEMFVLGMEDDEFMDAMEVKDYKTLGAHLYRVQKLTSIYYVFRHQYETQLDDSKGAQIMKKFYRAQSFKALFALHPRKVSVSLLGEMALKDD

SEQ ID NO: 1169 - protein, 1221 aa, unidentified
  REGION 1..1221: note = Description of Unknown: uncultivated organism with predicted taxonomy: Bacteroides sp. CAG:545
  REGION 1..1221: note = MG16-83 effector
MKKVLGLDLGVGSVGWSLVNVDDNYKPTEILGIGSRIISLSPDESSEFTSGNAASKNQKRTQKRTARKGYDRYQMRRQALTEKLRELKMLPDERLIKLPVLELWTLRAKAATPGEKLTLPEIGRVLYHINQKRGYRHAKSDDSADKEQRDYVQTVNKRYQEIKDEGTTIGQHFAIKLKESEIVTDKGPFYNYRIKEQVFPRDAYIEEFDRIMDCQKTFYPEELSEDNIDEIRNKIIFYQRNLKSCKHLVSQCEFMTRSFLDAEHKPILNSSGELVMSGPKVAPKSSPIFQACKIWEEINNLSIRNKENDELHISPEQKKDIFEYLDNNEKINATALYKILGIGKGDGWSVDKALSKGFTGNTTKVAIAKALGKEHNTKKSDLLRFDLRLKENGVNKDTGEIIYEIDPTCENEPLYRLWHVIYSINDKDALRHALTNQFGINDGDSLRELTKIDFVKQGYGSRSAKFMRKLLPALMDGARYSEACDMIGINHSGSLTKSENEARELLHKIPQLQKNELRQPVVEKILNQMINVVNAVIDQFGSIDEIRVEMARELKLSKEGRAATAKNIRDREKMNNEMAEKIKELGITPSKNKILKYRLWQESGQKCFYCGQPVGAAEFLSGLDVEIEHIVPKALLFDDSFSNKVCACRKCNAEKSNTTAYDYMKSKGENEFNDYLRRVDAAFNEHKISFTKRSRLLTPADKLPKDFISRQLVQTQYISRKAMEILKQVCHNVYGSSGEVTSYLRRIWGYDEILHSLDLPRYREGGMTAEVSYDHRGQTHTEERIKDWSKRLDHRHHAIDALTIACTRQSIIQRLNNLSAMTAVAGESMSLDKWTLAQPHFSVQEVSDNVSRILVSFKAGKKVTTPGKRYVYRGGKRVLAQEGLLIPRGALCEESVYGRIHSLEKEVPVKKLFERIDDIVKPGIRAAVEERLRACDNDVKVACASLKKEPLYLDVEKTIPLEYGTCYKAKYVMRYALSALKPKDVEFIVDEHIRKVVSERLSEYGNDPKKAFAEPLYADKSKTIPIRAVRCYTGLAQVVPVKKDSKGNDIGFVKPGNNHHIAIYRDAEGTYHENVVTFWDTVERKKYGLPVIIRKPGEIWDILIDKNIPEELAAGLPAPDWKFVMSMQQNEMFVLGMEDDEFRDAMAVKDYKTLGAHLYRVQKLASIDYYFRSQYETALDNSAGARMMKKFYRINSIKSLFTLHPRKVSVSLLGEMALKDD

SEQ ID NO: 1170 - protein, 1165 aa, unidentified
  REGION 1..1165: note = Description of Unknown: uncultivated organism with predicted taxonomy: Bacteroidetes
  REGION 1..1165: note = MG16-84 effector
MQTRKILGLDLGVGSVGWALIETEDDQPKSILAMGSRIVPLSSDDSTKFQKGQAITKNAERTQKRTMRKGLNRYQIRRALLTDLLRRNGMLPEYMNENVIDLWQLRSDAATEGKQLSLPQIGRVLYHINQKRGYKHSKADISADAKQTKYVEAVNQRYRNIQALHQTIGQYFCQQLKETAVQTEKGVYYTFRIKEKVLPRASYVAEFDQIMKVQQSYYPNVLTDELIDTLRNHIIFYQRPLKSCKHLVGLCEFEMRPYKRNDGQIVYGGPKCAPRTSPLAQLCAVWEAVNNITLTNRSNETLEITPKQRKAMADFLYEHEKMGVKDLQKILGISPKDGWWAGKAIGKGIKGNTTYTQLRDALGPISNAADLLSMKIELTDSMVDTTTAELIRQVSPNVEEQPLYRLWHIVYSAQNEDDLRKALHKQFDIEDEKVVANLGKIDFVKPGYANKSNKFMRKLLPYLMQGYKYNEACAHIGVNHSNSLTAEQNTVRPLLDKIPLLEKNALRQPVIEKILNQMINVVNALKAEFGDIDDVRIELARELKESKDERESAFKRNNENERKNKEYEARIREYGIRPSRSRIQKYKMWEESQKKCFYCGKTIDVVEFLNGVDAEIEHIIPQSVLFDDSFSNKVCSCRDCNHTKGNLTAREFMEQHSAADYEAYLRRVDEAFDEHRISKTKRDHLLWRKEDIPQDFIDRQLRQSQYIAKKAAEILRQGVRNVYATSGSVTDFLRHQWGYDNILHYLNLPRYQQVDGLTESVTYDHCGQKHQEERIKDWTKRLDHRHHAIDALTIALTQQSVIQRLNTLNASREEMKNDLGQRIDTPEYTEKRSLLEKWVDIQPHFSVQEVTDKVDGILISFRAGKRVATPAKRAIYQQRKRCIVQTGLQVPRGALSEETVYGKLGNKYVVKYALTHPSMKVDDIVDPTIREIVRNRLNAFGGNVKDAFAESLYSDVAHKMQIKSVRCYTNLQDKAVSAVRFNAQGEPVGFVKMGNNHHIAIYCDKKGQYQESVVSFWHAVERKRYGIPVVIEKPQEVWDKLIDIDAIPQDFLENLPKDDWQFVVSLQQNEMFILGMDEADYEAAMEQKDYRTLNKYLYRVQKISSKEYYFRYHTETSVDDKYEGKNNPNISIELQKLKRIKSFGALFSQHPHKVRINLLGEISAL

SEQ ID NO: 1171 - protein, 1221 aa, unidentified
  REGION 1..1221: note = Description of Unknown: uncultivated organism with predicted taxonomy: Bacteroides
  REGION 1..1221: note = MG16-85 effector
MKKVLGLDLGVGSVGWSLVNVDDNYKPTEILGIGSRIISLSPDESSEFTSGNAASKNQKRTQKRTARKGYDRYQMRRQALTEKLRELKMLPDERLIKLPVLELWTLRAKAATPGEKLTLPEIGRVLYHINQKRGYRHAKSDDSADKEQRDYVQTVNKRYQEIKDEGTTIGQHFAIKLKESEIVTEKGPFYNYRIKEQVFPRDAYIEEFDRIMDCQKTFYPEELSEDNIDEIRNKIIFYQRDLKSCKHLVSQCEFMTRSFLDAEHKPILNSSGELVMSGPKVAPKSSPIFQACKIWEEINNLSIRNKENDELHISPEQKKDIFEYLDNNEKINATALYKILGIGKGDGWSVDKALSKGFTGNTTKVAIAKALGKEHNTKKSDLLRFDLRLKENGVNKDTGEIIYEIDPTCENEPLYRLWHVIYSINDKDALRHALTNQFGINDEESLRELTKIDFVKQGYGSRSAKFMRKLLPALMDGARYSEACDMIGINHSGSLTKSENEARELLHKIPQLQKNELRQPVVEKILNQMINVVNAVIEQFGSIDEIRVEMARELKLSKEGRAATAKNIRDREKMNNEMAEKIKELGITPSKNKILKYRLWQESGQKCFYCGQPVGAAEFLSGLDVEIEHIVPKALLFDDSFSNKVCACRKCNAEKSNTTAYDYMKSKGENEFNDYLRRVDAAFNEHKISFTKRSRLLTPADKLPKDFISRQLVQTQYISRKAMEILKQVCHNVYGSSGEVTSYLRRIWGYDEILHSLDLPRYREGGMTAEVSYDHRGQTHTEERIKDWSKRLDHRHHAIDALTIACTRQSIIQRLNNLSAMTAVAGESMSLDKWTLAQPHFSVQEVSDNVSRILVSFKAGKKVTTPGKRYVYRGGKRVLAQEGLLIPRGALCEESVYGRIHSLEKEVPVKKLFERVDDIVKPGIRTAVEERLRACDNDVKVACASLKKEPLYLDVEKTIPLEYGTCYKAEYVMRYALSALKPKDVEFIVDEHIRKVVSERLSEYGNDPKKAFAEPLYADKSKTIPIRAVRCYTGLAQVVPVKKDSKGNDIGFVKPGNNHHIAIYRDAEGTYHESIVTFWDSVERKKYGLPVIIRKPGEIWDILIDKNIPEELAAGLPAPDWQFVMSMQQNEMFVLGMEDDEFRDAMEVKGYKTLGAHLYRVQNISSLYYVLRLQYETQVDNSNEALNMKKFHRIRSFNALFALRPRKVSVSLLGEMALKDD

SEQ ID NO: 1172 - protein, 1221 aa, unidentified
  REGION 1..1221: note = Description of Unknown: uncultivated organism with predicted taxonomy: Bacteroides sp. CAG:545
  REGION 1..1221: note = MG16-86 effector
MKKVLGLDLGVGSVGWSLVNVDDNYKPTEILGIGSRIISLSPDESSEFTSGNAASKNQKRTQKRTARKGYDRYQMRRQALTEKLRELKMLPDEHLIKLPVLELWTLRAKAATPGEKLTLPEIGRVLYHINQKRGYRHAKSDDSADKEQRDYVQTVNKRYQEIKDEGTTIGQHFAIKLKESEIVTDKGPFYNYRIKEQVFPRDAYIEEFDRIMDCQKTFYPEELSEDNIDEIRNKIIFYQRDLKSCKHLVSQCEFMTRSFLDADHKPILNSSGELVMSGPKVAPKSSPIFQACKIWEEINNLSIRNKENDELHIRPEQKKDIFEYLDNNEKINATTLYKILDIGKGDGWSVDKALSKGFTGNTTKVAIAKVLGKEHNTKKSDLLRFDLRLKENGVNKDTGEIIYEIDPTCENEPLYRLWHVIYSINDKDALRQALTNQFGINDGESLRELTKIDFVKQGYGSRSAKFMRKLLPALMDGARYSEACDMIGINHSGSLTKSENEARELLHTIPQLQKNELRQPVVEKILNQMINVVNAVIDQFGSIDEIRVEMARELKLSKEGRAATAKNIRDREKMNNEMAEKIKELGITPSKNKILKYRLWQESGQKCFYCGQPVGAAEFLSGLDVEIEHIVPKALLFDDSFSNKVCACRKCNAEKSNTTAYDYMKSKGENEFNDYLRRVDAAFNEHKISFTKRSRLLTPANKLPKDFISRQLVQTQYISRKAMEILKQVCHNVYGSSGEVTSYLRRIWGYDEILHSLDLPRYREGGMTAEVSYDHLGQTHTEERIKDWSKRLDHRHHAIDALTIACTRQSIIQRLNNLSAMSAVAGESMSLDKWTLAQPHFSVQEVSDNVSRILVSFKAGKKVATPGKRYVYRGGKRILAQEGLLIPRGALCEESVYGRINSLEKGVPVKKLFERVDDIVKPGIRTAVEERLRACDNDVKVACVSLKKEPLYLDVEKTIPLEYGTCYKAEYVMRYALSALKPKDVEYIVDEHIRKVVSERLSEYGNDPKKAFAEPLYADKSKTIPIRAVRCYTGLAQVVPVKKDSKGNDIGFVKPGNNHHIAIYRDAEGTYHESIVTFWDSVERKKYGLPVIIRKPGEIWDILIDKNIPEELAAGLPAPDWQFVMSMQQNEMFVLGMEDDEFRDAMEVKDYKTLGAHLYRVQKLTSIDYYLRSQYETTLDDSAGARMMKKFYRIKSIKSLFALHPRKVSVSLLGEMALKDD

SEQ ID NO: 1173 - protein, 1221 aa, unidentified; identical to SEQ ID NO: 1172
  REGION 1..1221: note = Description of Unknown: uncultivated organism with predicted taxonomy: Bacteroides
  REGION 1..1221: note = MG16-87 effector

SEQ ID NO: 1174 - protein, 1219 aa, unidentified
  REGION 1..1219: note = Description of Unknown: uncultivated organism with predicted taxonomy: Bacteroides
  REGION 1..1219: note = MG16-88 effector
MKKILGLDLGVGSIGWSLINADKDNKPIAILGLGSRIISLSPDESSEFTSGNAASKNQKRTQKRTARKGYDRYQMRRQALTDKLRKLKMLPDEHLIKLPVLDLWTLRARAATPGEKLTLPEIGRVLYHINQKRGYRHSRSDDSADKEQREYVQAINKRFQEIREEGVTIGQHFVKKLKESEVVTDKGAFYNYRIKEQVFPRDAYVAEFDKVMDCQKVFYPEELSEANINEFRNEIIFYQRNLKSCKHLVSRCEFMTRSFLDEGHRPVLDASGKLVISGPKVAPKSSPIFQVCKIWEEINNLSIRNKENDELHISPEQKKEIFEYLDNNEKITSAALYKILGIGKGDGWSVDKALSKGFTGNTTKVAISKALGKANDAKKRDLLRFDLRLKENGVNKDTGEIICEIDPECENEPLYKLWHVIYSINDKDAQRHALTSQFGINDEASLAELSKIDFVKQGYGSRSVKFMRKLLPSLMDGAKYSEACDVIGVNHSGSLTKSENEARELLQRIPQLQKNELRQPVVEKILNQMINVVNAVIEKFGGVDEIRVEMARELKLSKEGRAATAKNIRDREKENKEIADKIIELGVTPSKNKILKYRLWQEAGQKCFYCGQPVGATEFLNGLDVEIEHVVPKALLFDDSFSNKVCACRKCNAEKRNSTAYDYMKSKGENAFNDYLRRVDTAFSEHKISFTKRSRLLTPADKIPKDFISRQLVQTQYISRKAMEILKQVCHNVYGSSGEVTSYLRRIWGYDEILHSLDLPRYREGGMTAEVSYEHRGQTHTEERIKDWSKRLDHRHHAIDALTIACTRQSVIQRLNNLSSMTAVAGEAMSLDKWTLAQPHFSVQEVSDNVSQILVSFKAGKKVTTPGKRYVYRGGKRILAQKGLLIPRGALCEESVYGRIHSLEKGVPVKKLFERVDDIVKPGIRAAVEERLRACDNDVKVACASLKKEPLYLDAEKTIPLEYGTCYKAEYVMKYALSALKPKDVEYIVDEHIRKVVSERLSEYGNDPKKAFAEPLYADKSKTIPIRAARCYTDLRQVAPVKKDANGNNIGFVKPGNNHHIAIYIDSDGMYHKSTLTFWKAVERKKYGLPVIIRKPGELWDTIIDKNIPEELAAGLPAPDWKFVMSMQQNEMFVLGMEDDEFRDAMEGKDYKTLGAHLYRVQKLEHLNFRIQYDTILDDSKAAKDMKKFYEIRSFKAFWALHPRKVSVSLLGEMALKDD

SEQ ID NO: 1175 - protein, 1221 aa, unidentified; identical to SEQ ID NO: 1118
  REGION 1..1221: note = Description of Unknown: uncultivated organism with predicted taxonomy: Bacteroides sp. CAG:709
  REGION 1..1221: note = MG16-89 effector

SEQ ID NO: 1176 - protein, 1223 aa, unidentified
  REGION 1..1223: note = Description of Unknown: uncultivated organism with predicted taxonomy: Bacteroides sp. CAG:770
  REGION 1..1223: note = MG16-90 effector
MKKILGLDLGVGSVGWSVISCDDEHRPLEILGMGSRIVPLTPDESNEFSSGNAASKNQSRTQKRTARKGYDRYQLRRQALTVKLRELGMLPDEALIKLPVLDLWTLRARAATPGDKLSLPEIGRVLYHLNQKRGYRHSKQDDSADKTQRDYVQAVNKRFQEIKDEGLTIGQHFAEKLKESEIITDKGAFYNYRIKEQVFPRAAYVEEFDRIIQCQREFYPEVFTEAIVNEIRNEIIYYQRPLKSCKHLVSVCEFMQRELFDADHNPIRNGKGKIVVAGPKCAPKSSPLAQVCKIWEEVNNIRITNKENDEYFISIDNKHEIFDFLNTHEKMKADDLFKILGLAKNSGWSADRAMSKGMVGNTTRVALMKALKGRRDIDEILRFDLREVGSNQVNADTGEVLMEISAECEREPLYRLWHIIYSISDKNEQKSALKNQFGISDDSMLESLCKIDFVKQGYSSRSFKFMRKILPSLMDGAKYSEACDVIGINHSDSITKAENQARELLTRLPQLQKNELRQPVVEKILNQMINVVNAVIDKYGAIDEIRVEMARELKLSKAGRESAAKNIRTREKANEEIAKRIEELDLVPSKNKILKYRLWEESGKRCFYCGQPVSATEFLNGLDVEIEHIVPKSLLFDDSFSNKVCACRKCNAEKGNATAFDFMKGRGENAFEDYLKRVETAFKENKISQTKRNRLLTPADKIPKDFIARQLVQTQYISRKAMEILNQVCRNVYGSSGDVTAYLRRIWGYDEILHSLDLPRYREGNLTGDVTYVHRGQTHTEERIRDWSKRLDHRHHAIDALTIACTRQSIIQRLNTLNAKTAIGEEQMSLDKWTLAQAHFSVADVADHVAGILVSFKSGKRVTTPGKRYVYKAGRRIVAQENILVPRGALSEESVYGRIKSIEEKVPVKKLFERVDDIVKPRIRYLIRERLETFGGDCSKAVSSLKKSPLYLDEENTIMLEYGSCFKYSYVKKSKLIQLDKKDDFINVSLIVDKHIREVVTARLAAFGGDTKKAFAEPLYADEAGKIQIRTVRCYTNSTVVPVKKDADGNDIGFVKPGNNHHIAIYKDADGKYQESIVTFCDAVERKKYGIPVVVRKPAAVLDTVIDKNVPEDLARGLPSPEWTFVMSMQQNEMFVLGMGDDEFNDALAGRDYKSLGEHLYRVQKLASLYYVFRSQYETKLDDSNNALAMRKFYRVRSFNALFSLNPRKVSISLLGEISLKDD

SEQ ID NO: 1177 - protein, 1223 aa, unidentified; identical to SEQ ID NO: 1176
  REGION 1..1223: note = Description of Unknown: uncultivated organism with predicted taxonomy: Bacteroides sp. CAG:770
  REGION 1..1223: note = MG16-91 effector

SEQ ID NO: 1178 - protein, 1219 aa, unidentified; identical to SEQ ID NO: 1151
  REGION 1..1219: note = Description of Unknown: uncultivated organism with predicted taxonomy: Alistipes sp. CAG:514
  REGION 1..1219: note = MG16-92 effector

SEQ ID NO: 1179 - protein, 1219 aa, unidentified; identical to SEQ ID NO: 1151
  REGION 1..1219: note = Description of Unknown: uncultivated organism with predicted taxonomy: Alistipes sp. CAG:514
  REGION 1..1219: note = MG16-93 effector

SEQ ID NO: 1180 - protein, 1221 aa, unidentified
  REGION 1..1221: note = Description of Unknown: uncultivated organism with predicted taxonomy: Bacteroides sp. CAG:545
  REGION 1..1221: note = MG16-94 effector
MKKVLGLDLGVGSVGWSLVNVDDNYKPTEILGIGSRIISLSPDESSEFTSGNAASKNQKRTQKRTARKGYDRYQMRRQALTEKLRELKMLPDERLIKLPVLELWTLRAKAATPGEKLTLPEIGRVLYHINQKRGYRHAKSDDSADKEQRDYVQTVNKRYQEIKDEGTTIGQHFAIKLKESEIVTDKGPFYNYRIKEQVFPRDAYIEEFDRIMDCQKTFYPEELSEDNIDEIRNKIIFYQRDLKSCKHLVSQCEFMTRSFLDADHKPILNSSGELVMSGPKVAPKSSPIFQACKIWEEINNLSIRNKENDELHISPEQKKDIFEYLDNNEKINATALYKILGIGKGDGWSVDKALSKGFTGNTTKVAIAKALGKEHNTKKSDLLRFDLRLKENGVNKDTGEIIYEIDPTCENEPLYRLWHVIYSINDKDALRHALTNQFGINDGESLRELTKIDFVKQGYGSRSAKFMRKLLPALMDGARYSEACDMIGINHSGSLTKSENEARELLHKIPQLQKNELRQPVVEKILNQMINVVNAVIDQFGSIDEIRVEMARELKLSKEGRAATAKNIRDREKMNNEMAEKIKELGITPSKNKILKYRLWQESGQKCFYCGQPVGAAEFLSGLDVEIEHIVPKALLFDDSFSNKVCACRKCNAEKSNTTAYDYMKSKGENEFNDYLRRVDAAFNEHKISFTKRSRLLTPADKLPKDFISRQLVQTQYISRKAMEILKQVCHNVYGSSGEVTSYLRRIWGYDEILHSLDLPRYREGGMTAEVSYDHRGQTHTEERIKDWSKRLDHRHHAIDALTIACTRQSIIQRLNNLSAMTAVAGESMSLDKWTLAQPHFSVQEVSYNVSRILVSFKAGKKVTTPGKRYVYRGGKRILAQEGLLIPRGALCEESVYGRIHSLEKEVPVKKLFERVDDIVKPGIRAAVEERLRACDNDVKVACASLKKEPLYLDAEKTIPLEYGTCYKAEYVMRYALSALKPKDVEFIVDEHIRKVVSERLSEYGNDPKKAFAEPLYADKSKTIPIRAVRCYTGLAQVVPVKKDPKGNDIGFVKPGNNHHIAIYRDAEGTYHENVVTFWDTVERKKYGLPVIIRKPGEIWDILIDKNIPEELAAGLPAPDWQFVMSMQQNEMFVLGMEDDEFRDAMEVKDYKTLGAHLYRVQKLTSIDYYFRSQYETALDNSAGARMMKKFYRINSIKSLFALHPRKVSVSLLGEMALKDD

SEQ ID NO: 1181 - protein, 1221 aa, unidentified
  REGION 1..1221: note = Description of Unknown: uncultivated organism with predicted taxonomy: Bacteroides sp. CAG:709
  REGION 1..1221: note = MG16-95 effector
MKKILGLDLGVGSIGWSLINADKDNKPIAILGLGSRIISLSPDESSEFTSGNAASKNQKRTQKRTARKGYDRYQMRRQALTDKLRKLKMLPDEHLIKLPILDLWTLRARAATPGEKLTLPEIGRVLYHINQKRGYRHSRSDDSADKEQREYVQAINKRFQEIREEGVTIGQHFVKKLKESEVVTDKGAFYNYRIKEQVFPRDAYVAEFDRVMDCQKVFYPEELSEANINEFRNEIIFYQRNLKSCKHLVSRCEFMTRSFLDEEHRPVLDASGKLVISGPKVAPKSSPIFQVCKIWEEINNLSIRNKENDELHISPEQKKEIFEYLDNNEKITSAALYKILGIGKGDGWSVDKALSKGFTGNTTKVAISKALGKANDAKKRDLLRFDLRLKENCVNKDTGEIICEIDPECENEPLYKLWHVIYSINDKDAQRHALTSQFGINDEASLAELSKIDFVKQGYGSRSVKFMRKLLPSLMDGAKYSEACDVIGVNHSASLTKSENEARELLQRIPQLQKNELRQPVVEKILNQMINVVNAVIEKFGGVDEIRVEMARELKLSKEGRAATAKNIRDREKENKEIAEKIIELGVTPSKNKILKYRLWQEAGQKCFYCGQPVGATEFLNGLDVEIEHVVPKALLFDDSFSNKVCACRKCNAEKRNSTAYDYMKSKGENAFNDYLRRVDTAFSEHKISFTKRSRLLTPADKIPKDFISRQLVQTQYISRKAMEILKQVCHNVYGSSGEVTSYLRRIWGYDEILHSLDLPRYREGGMTAEVSYEHRGQIHTEERIKDWSKRLDHRHHAIDALTIACTRQSVIQRLNNLSSMTAVAGEAMSLDKWTLAQPHFSVQEVSDKVGGILVSFKAGKKVTTPGKRYTYRGGKRILAQDGLLIPRGALSEESVYGRISALEKNVPVKKLFERVEDIVKPGIRAVVEDRLMACDNDVNAACASLKKEPLYLDAEKTIPLEYGTCYKAKYVMKYALSALKPKDVEYIVDEHIRKVVSERLSEYGNDPKKAFAEPLYADDAKTIPVRTVRCYTGLDQVVPVKKDVAGNDIGFVKPGNNHHIAIYRDADGKFHECVVTFWDAVERKKYGIPVIVRNPDEVWDVVIDKNVPEELAAGLPALGWSFVMSLQQNEMFILGMEDDEFRDAMAEADYKALGAHLYRVQKLTGSDYYFRSHYETLLDDSAGARIMKKFYRVRSFNALFNLHPRKVAVSLLGEMSLKND

SEQ ID NO: 1182 - protein, 1189 aa, unidentified
  REGION 1..1189: note = Description of Unknown: uncultivated organism with predicted taxonomy: Bacteroides
  REGION 1..1189: note = MG16-96 effector
MKKVLGLDLGVGSVGWSLVNVDDNYKPTEILGIGSRIISLSPDESSEFTSGNAASKNQKRTQKRTARKGYDRYQMRRQALTEKLRELKMLPDERLIKLPVLELWTLRAKAATPGEKLTLPEIGRVLYHINQKRGYRHAKSDDSADKEQRDYVQTVNKRYQEIKDEGTTIGQHFAIKLKESEIVTDKGPFYNYRIKEQVFPRDAYIEEFDRIMDCQKTFYPEELSEDNIDEIRNKIIFYQRDLKSCKHLVSQCEFMTRSFLDADHKPILNSSGELVMSGPKVAPKSSPIFQACKIWEEINNLSIRNKENDELHISPEQKKDIFEYLDNNEKINATALYKILGIGKGDGWSVDKALSKGFTGNTTKVAIAKALGKEHNTKKSDLLRFDLRLKENGVNKDTGEIIYEIDPTCENEPLYRLWHVIYSINDKDALRHALTNQFGINDEESLRELTKIDFVKQGYGSRSAKFMRKLLPALMDGARYSEACDMIGINHSGSLTKSENEARELLHKISQLQKNELRQPVVEKILNQMINVVNAVIDQFGSIDEIRVEMARELKLSKEGRAATAKNIRDREKMNNEMAEKIKELGITPSKNKILKYRLWQESGQKCFYCGQPVGAAEFLSGLDVEIEHIVPKALLFDDSFSNKVCACRKCNAEKSNTTAYDYMKSKGENEFNDYLRRVDAAFNEHKISFTKRSRLLTPADKLPKDFISRQLVQTQYISRKAMEILKQVCHNVYGSSGEVTSYLRRIWGYDEILHSLDLPRYREGGMTAEVSYDHRGQTHTEERIKDWSKRLDHRHHAIDALTIACTRQSIIQRLNNLSAMTAVAGESMSLDKWTLAQPHFSVQEVSDNVSRILVSFKAGKKVTTPGKRYVYRGGKRVLAQEGLLIPRGALCEESVYGRIHSLEKEVPVKKLFERVDDIVKPGIRTAVEERLRACDNDVKVACASLKKEPLYLDVEKTIPLEYGTCYKAEYVMRYALSALKPKDVEFIVDEHIRKVVSERLSEYGNDPKKAFAEPLYADKSKMIPIRAVRCYTSLAQVAPVKKDSKGNDIGFVKPGNNHHIAIYRDAEGTYHESIVTFWDSVERKKYGLPVIIRKPGEIWDILIDKNIPEELAAGLPAPDWQFVMSMQQNEMFVLGMEDDEFRDAMEGKDYKTLGAHLYRVQKLTSIDYYFRSQYETTLDDSAGARMMK

SEQ ID NO: 1183 - protein, 1221 aa, unidentified
  REGION 1..1221: note = Description of Unknown: uncultivated organism with predicted taxonomy: Bacteroides
  REGION 1..1221: note = MG16-97 effector
MKKVLGLDLGVGSVGWSLVNVDDNYKPTEILGIGSRIISLSPDESSEFTSGNAASKNQKRTQKRTARKGYDRYQMRRQALTEKLRELKMLPDERLIKLPVLELWTLRAKAATPGEKLTLPEIGRVLYHINQKRGYRHAKSDDSADKEQRDYVQTVNKRYQEIKDEGTTIGQHFAIKLKESEIVTDKGPFYNYRIKEQVFPRDAYIEEFDRIMDCQKTFYPKELSEDNIDEIRNKIIFYQRDLKSCKHLVSQCEFMTRSFLDANHKPILNSSGELVMSGPKVAPKSSPIFQACKIWEEINNLSIRNKENDELHISPEQKKDIFEYLDNNEKINATALYKILGIGKGDGWSVDKALSKGFTGNTTKVAIAKALGKEHNTKKSDLLRFDLRLKENGVNKDTGEIIYEIDPTCENEPLYRLWHVIYSINDKDALRHALTNQFGINDGESLRELTKIDFVKQGYGSRSAKFMRKLLPALMDGARYSEACDMIGINHSGSLTKSENEARELLHKIPQLQKNELRQPVVEKILNQMINVVNAVIEQFSSIDEIRVEMARELKLSKEGRAATAKNIRNREKMNNEMAEKIKELGITPSKNKILKYRLWQESGQKCFYCGQPVGAAEFLSGLDVEIEHIVPKALLFDDSFSNKVCACRKCNAEKSNTTAYDYMKSKGENEFNDYLRRVDAAFNEHKISFTKRSRLLTPADKLPKDFISRQLVQTQYISRKAMEILKQVCHNVYGSSGEVTSYLRRIWGYDEILHSLDLPRYREGGMTAEVSYDHRGQTHTEERIKDWSKRLDHRHHAIDALTIACTRQSIIQRLNNLSAMTAVAGESMSLDKWTLAQPHFSVQEVSDNVSRILVSFKAGKKVTTPGKRYVYRGGKRVLAQEGLLIPRGVLCEESVYGRIHSLEKEVPVKKLFERVDDIVKPGIRAAVEERLRAYDNDVKVACASLKKEPLYLDVEKTIPLEYGTCYKAEYVMRYALSALKPKDVEFIVDEHIRKVVSERLSEYGNDPKKAFAEPLYADKSKTIPIRAVRCYTGLAQVVPVKKDSKGNDIGFVKPGNNHHIAIYRDAEGTYHESIVTFWDSVERKKYGLPVIIRKSGEIWDILIDKNIPEELAAGLPAPDWKFVMSMQQNEMFVLGMEDDEFRDAMEVKDYKTLGAHLYRVQSLSRSDYYYRCQYETQLDNSNGAMLMKKYYRVRSFNALFTLHPRKVSVSLLGEMALKDD

SEQ ID NO: 1184 - protein, 1220 aa, unidentified
  REGION 1..1220: note = Description of Unknown: uncultivated organism with predicted taxonomy: Bacteroides sp. CAG:770
  REGION 1..1220: note = MG16-98 effector
MKKILGLDLGVGSVGWSVVSCDDEHKPVEILGMGSRIVPLTPDESNEFSSGNAASKNQSRTQKRTARKGYDRYQLRRQALTVKLRELGMLPDEALIKLPVLDLWTLRARAATPGEKLSLAEIGRVLYHLNQKRGYRHSKEDDSADKTQRDYVQAVNKRFQEIKDEGLTIGQHFAVKLKESEVITDKGAFYNYRIKEQVFPRAAYVEEFDRIIQCQREFYPEVFTEAIVNEIRNEIIYYQRPLKSCKHLVSVCEFMQRELFDAEQNPIRNRKGEIVVAGPKCAPKSSPLAQVCKIWEEINNIRVTNKENDEYFISIDNKHEIFDFLNTHEKMKADDLFKILGIAKNSGWSADKAMSKGMVGNTTRVALMKALKGRRDIDEILRFDLREVESNQVNADTGEVLMEIGAECESEPLYRLWHIIYSISDKNEQKAALEKLFGITDESMLESLCRIDFVKQGYSGRSFKFMRKILPSLMDGAKYSEACDVIGINHSDSITKAENQTRKLLTKLPQLQKNELRQPVVEKILNQMINVVNAVIGKYGAIDEIRVEMARELKLSKEGRESAAKNIRAREKANEEIAKRIEELGLVPSKNKILKYRLWEESGKRCFYCGQPVSATEFLNGLDVEIEHVVPKSLLFDDSFSNKVCACRKCNAEKGNATAFDFMKGRGENAFEDYLKRVETAFKENKISQTKRNRLLTPADKIPKDFIARQLVQTQYISRKAMEILNQVCRNVYGSSGDVTAYLRRIWGYDEILHSLDLPRYREGNLTGDVTYVHRGQTHTEERIKDWSKRLDHRHHAIDALTIACTRQSIIQRLNTLNAKTAIGEEQMSLDKWTLAQAHFSVADVADHVADILVSFKSGKKVTTPGKRYVYKSGRRIVAQENILVPRGALSEESVYGRIKSIEEKVPVKKLFERVDDIVKPRIRHLVRERLEACGGDCSKAVSSLKKSPLYLDEENTIMLEYGSCFKPEYVIKYSLNSIKTKDAASIVDKHIREVVTARLAAFGDDPKKAFAEPLYADEAGKIQIKTVRCYTGLCQVVPVKKDAAGNDIGFVKPGNNHHIAIYKDADGKYQESIVTFCDAVERKKYGIPVVVRNPAAVLDTIIDKNVPEDLAGGLPSPEWTFVMSMQQNEMFVLGMGDDEFNDAMAGMDYKSLGEHLYRVQKLATSDYFFRSQYETKLDDTKNALSMKKYYRTRSFKALFALNPHKVSISLLGEISLKDD

SEQ ID NO: 1185 - protein, 1219 aa, unidentified
  REGION 1..1219: note = Description of Unknown: uncultivated organism with predicted taxonomy: Bacteroides sp. CAG:709
  REGION 1..1219: note = MG16-99 effector
MKKILGLDLGVGSIGWSLINADKDNKPIAILGLGSRIISLSPDESSEFTSGNAASKNQKRTQKRTARKGYDRYQMRRQALTDKLRKLKMLPDEHLIKLPVLDLWTLRARAATPGEKLTLPEIGRVLYHINQKRGYRHSRSDDSADKEQREYVQAINKRFQEIREEGVTIGQHFVKKLKESEVVTDKGAFYNYRIKEQVFPRDAYVAEFDRVMDCQKVFYPEELSEANINEFRNEIIFYQRNLKSCKHLVSRCEFMTRSFLDEGHRPVLDASGKLVISGPKVAPKSSPIFQVCKIWEEINNLSIRNKENDELHISPEQKKEIFEYLDNNEKITSAALYKILGIGKGDGWSVDKALSKGFTGNTTKVAISKALGKANDAKKRDLLRFDLRLKENGVNKDTGEIICEIDPECENEPLYKLWHVIYSINDKDAQSHALTSQFGINDEASLAELSKIDFVKQGYGSRSVKFMRKLLPSLMDGAKYSEACDVIGVNHSGSLTKSENEARELLQRIPQLQKNELRQPVVEKILNQMINVVNAVIEKFGGVDEIRVEMARELKLSKEGRAATAKNIRDREKENKEIAEKIIELGVTPSKNKILKYRLWQEAGQKCFYCGQPVGATEFLNGLDVEIEHVVPKALLFDDSFSNKVCACRKCNAEKRDSTAYDYMKSKGENAFNDYLRRVDTAFSEHKISFTKRSRLLTPADKIPKDFISRQLVQTQYISRKAMEILKQVCHNVYGSSGEVTSYLRRIWGYDEILHSLDLPRYREGGMTAEVSYEHRGQTHTEERIKDWSKRLDHRHHAIDALTIACTRQSVIQRLNNLSSMTAVAGEAMSLDKWTLAQPHFSVQEVSDKVGGILVSFKAGKKVTTPGKRYTYRGGKRILAQDGLLIPRGALSEESVYGRISALEKNVPVKKLFERVEDIVKPGIRAVVEDRLKACDNDVNAACASLKKEPLYLDAEKTIPLEYGTCYKAEYVMKYALSALKPKDVEYIVDEHIRKVVSERLSEYGNDPKKAFAEPLYADKSKTIPIRAARCYTDLRQVAPVKKDANGNNIGFVKPGNNHHIAFYIDSDGMYHKSTLTFWKAVERKKYGLPVIIRKPGELWDTIIDKNIPEELAAGLPAPDWKFVMSMQQNEMFVLGMEDDEFRDAMEGKDYKTLGAHLYRVQKLEHLNFRIQYDTILDDSKAAKDMKKFYEIRSFKAFWALHPRKVSVSLLGEMALKDD

SEQ ID NO: 1186 - protein, 1221 aa, unidentified
  REGION 1..1221: note = Description of Unknown: uncultivated organism with predicted taxonomy: Bacteroides sp. CAG:709
  REGION 1..1221: note = MG16-100 effector
MKKILGLDLGVGSIGWSLINADKDNKPIAILGLGSRIISLSPDESSEFTSGNAASKNQKRTQKRTARKGYDRYQMRRQALTDKLRKLKMLPDEHLIKLPVLDLWTLRARAATPGEKLTLPEIGRVLYHINQKRGYRHSRSDDSADKEQREYVQAINKRFQEIREEGVTIGQHFVKKLKESEVVTDKGAFYNYRIKEQVFPRDAYVAEFDRVMDCQKVFYPEELSEANINEFRNEIIFYQRNLKSCKHLVSRCEFMTRSFLDEEHRPVLDASGKVVISGPKVAPKSSPIFQVCKIWEEINNLSIRNKENDELHISPEQKKEIFEYLDNNEKITSAALYKILGIGKGDGWSVDKALSKGFTGNTTKVAISKSLGKANDAKKRDLMRFDLRLKENGVNKDTGEIICEIDPECENEPLYKLWHVIYSINDKDAQRHALTSQFGINDEASLAELSKIDFVKQGYGSRSVKFMRKLLPSLMDGAKYSEACNVIGVNHSGSLTKSENEARELLQRIPQLQKNELRQPVVEKILNQMINVVNAVIEKFGGVDEIRVEMARELKLSKEGRAATAKNIRDREKENKEIAEKIIELDVTPSKNKILKYRLWQEAGQKCFYCGQPVGATEFLNGLDVEIEHVVPKALLFDDSFSNKVCACRKCNAEKRNSTAYDYMKSKGENAFNDYLRRVDTAFSEHKISFTKRSRLLTPADKIPKDFISRQLVQTQYISRKAMEILKQVCHNVYGSSGEVTSYLRRIWGYDEILHSLDLPRYREGGMTAEVSYEHRGQTHTEERIKDWSKRLDHRHHAIDALTIACTRQSVIQRLNNLSSMTAVAGEAMSLDKWTLAQPHFSVQEVSDKVGGILVSFKAGKKVTTPGKRYTYRGGKRILAQDGLLIPRGALSEESVYGRISALEKNVLVKKLFERVEDIVKPGIRAVVEDRLKACDNDVKAACTSLKEEPLYLDAEKTIPLEYGTCYKAKYVMKYALSALKPKDVEYIVDEHIRKVVSERLSEYGNDPKKAFAEPLYADDAKTIPVRTVRCYTGLDQVVPVKRDVAGNDIGFVKPGNNHHIAIYRDADGKFHECVVTFWDAVERKKYGIPVIVRNPDEVWDVVIDKNVPEELAAGLPALGWSFVMSLQQNEMFILSMEDDEFRDAMAEADYKALGAHLYRVQKLTGSDYYFRSHYETLLDDSAGARIMKKFYRVRSFNALFNLHPRKVSVSLLGEMALKDD

SEQ ID NO: 1187 - protein, 1221 aa, unidentified
  REGION 1..1221: note = Description of Unknown: uncultivated organism with predicted taxonomy: Bacteroides sp. CAG:545
  REGION 1..1221: note = MG16-101 effector
MKKVLGLDLGVGSVGWSLVNVDDNYKPTEILGIGSRIISLSPDESSEFTSGNAASKNQKRTQKRTARKGYDRYQMRRQALTEKLRELKMLPDERLIKLPVLELWTLRAKAATPGEKLTLSEIGRVLYHINQKRGYRHAKSDDSADKEQRDYVQTVNKRYQEIKDEGTTIGQHFAIKLKESEIVTEKGPFYNYRIKEQVFPRDAYIEEFDRIMDCQKTFYPEELSEDNIDEIRNKIIFYQRDLKSCKHLVSQCEFMTRSFLDAEHKPILNSSGELVMSGPKVAPKSSPIFQACKIWEETNNLSIRNKENDELHISPEQKKDIFEYLDNNEKINATALYKILGIGKGDGWSVDKALSKGFTGNTTKVAMAKALGKEHNTKKSDLLRFDLRLKENGVNKDTGEIIYEIDPTCENEPLYRLWHVIYSINDKDALRHALTNQFGINDGESLRELTKIDFVKQGYGSRSAKFMRKLLPALMDGARYSEACDMIGINHSGSLTKSENEARELLHKIPQLQKNELRQPVVEKILNQMINVVNAVIEQFGSIDEIRVEMARELKLSKEGRAATAKNIRDREKMNNEMAEKIKELGITPSKNKILKYRLWQESGQKCFYCGQPVGAAEFLSGLDVEIEHIVPKALLFDDSFSNKVCACRKCNAEKSNTTAYDYMKSKGENEFNDYLRRVDAAFNEHKISFTKRSRLLTPADKLPKDFISRQLVQTQYISRKAMEILKQVCHNVYGSSGEVTSYLRRIWGYDEILHSLDLPRYREGGMTSEVSYDHRGQTHTEERIKDWSKRLDHRHHAIDALTIACTRQSIIQRLNNLSAMTAVAGESMSLDKWTLAQPHFSVQEVSDNVSRILVSFKAGKKVTTPGKRYVYRGGKRVLAQEGLLIPRGALCEESVYGRIHSLEKDVPVKKLFERVDDIVKPGIRAAVEERLRACDNDVKVACASLKKEPLYMDVEKTIPLEYGTCYKAEYVMRYALSALKPKDVEFIVDEHIRKVVSERLSEYGNDPKKAFAEPLYADKSKTIPIRAVRCYTGLAQVVPVKKDSKGNDIGFVKPGNNHHIAIYRDAEGTYHENVVTFWDTVERKKYGLPVIIRKPGEIWDILIDKNIPEELAAGLPAPDWKFVMSMQQNEMFVLGMEDDEFRDAMAVKDYKTLGAHLYRVQKLASIYYVFRHQYETQLDDSKGALVMKKFYRTASFKALFALHPRKVSVSLLGEMALKDD

SEQ ID NO: 1188 - protein, 1220 aa, unidentified
  REGION 1..1220: note = Description of Unknown: uncultivated organism with predicted taxonomy: Bacteroides sp. CAG:770
  REGION 1..1220: note = MG16-102 effector
MKKILGLDLGVGSVGWSVVSCDDEHKPVEILGMGSRIVPLTPDESNEFSSGNAASKNQSRTQKRTARKGYDRYQLRRQALTVKLRELGMLPDEALIKLPVMDLWTLRARAATPGEKLSLAEIGRVLYHLNQKRGYRHSKQDDSADKTQRDYVQAVNKRFQEIKNEGLTIGQHFAVKLKESEVITDKGAFYNYRIKEQVFPRAAYVEEFDRIIQCQREFYPEVLTEANVNEIRNEIIYYQRPLKSCKHLVSVCEFMQRELFDAEHNPIRNGKGEIVVAGPKCAPKSSPLAQVCKIWEEVNNIRITNKENDEYFISIDNKHEIFDFLNTHEKMKADDLFKILGLAKNSGWSADRAMSKGMVGNTTRVALMKALKGRRDIDDILRFDLREVESNQVNSDTGEVLMEISAECESEPLYRLWHIIYSISDKNEQKAALEKQFGITDESMLESLCRIDFVKQGYSSRSFKFMRKILPSLMDGAKYSEACDVIGINHSDSITKAENQTRKLLTKLPQLQKNELRQPVVEKILNQMINVVNAVIDKYGAIDEIRVEMARELKLSKAGRESAANNIRTRKKANEEIAKRIEELGLVPSKNKILKYRLWEESGKRCFYCGQPVSATEFLNGLDVEIEHVVPKSLLFDDSFSNKVCACRKCNAEKGNATAFDFMKGRGENAFEDYLKRVETAFKENKISQTKRNRLLTPADKIPKDFISRQLVQTQYISRKAMEILNQVCRNVYCSSGDVTAYLRRIWGYDEILHSLDLPRYREGNLTGDVTYVHMGQTHTEERIKDWSKRMDHRHHAIDALTIACTRQSIIQRLNTLNAKTAIGEEQMSLDKWTLAQAHFSVADVADHVADILVSFKSGKRVTTLGKRYVYKAGRRIVAQENILVPRGALSEESVYGRIKSIEEKVPVKKLFERVDDIVKPRIRHLIRERLEACGGDCSKAVSSLKKSPLYLDEENTIMLEYGSCFKPEYVIKYSLNSIKAKDVASIVDKYIREVVTARLAAFGDDPKKAFAEPLYADEAGKIQIKTVRCYTGLSQVVPVKKDADGNDIGFVKPGNNHHIAIYKDADGKYQESIVTFRDAVERKKYGIPVVVRNPVEVLDTVIDKNVPEDLAGGLPSPEWTFVMSMQQNEMFVLGMGDDEFNDAFAGRDYKSLGEHLYRVQKLASLYYVFRSQYETKLDDSNNALAMRKFYRVRSFNALFSLNPRKVSISLLGEISLKDD

SEQ ID NO: 1189 - protein, 1220 aa, unidentified
  REGION 1..1220: note = Description of Unknown: uncultivated organism with predicted taxonomy: Bacteroides sp. CAG:770
  REGION 1..1220: note = MG16-103 effector
MKKILGLDLGVGSVGWSVVSCDDEHKPVEILGMGSRIVPLTPDESNEFSSGNAASKNQSRTQKRTARKGYDRYQSRRKALTDKLRELDMLPDETLIKLPVLDLWTLRARASTPGDKLSLPEIGRVLYHLNQKRGYRHSKQDDSADKTQRDYVQAVNKRFQEIKDEGLTIGQHFAEKLKESEIITDKGAFYNYRIKEQVFPRAAYVEEFDRIIQCQRKFYPEVLTEANVNEIRNEIIYYQRPLKSCKHLVSVCEFMQRELFDADHNPIRNGKGKIVVAGPKCAPKSSPLAQVCKIWEEVNNIRITNKENDEYFISIDNKHEIFDFLNTHEKMKADDLFKILGIAKNSGWSADKAMSKGMVGNTTRVALMKALKGRRDIDDILRFDLREVESNQVNADTGEVLMEIGAECESEPLYRLWHIIYSISDKNEQKSALEKQFGITDESMLESLCRIDFVKQGYSSRSFKFMRKILPSLMDGAKYSEACDVIGINHSDSITKAENQTRKLLTKLPQLQKNELRQPVVEKILNQMINVVNAVIDKYGSIDEIRVEMARELKLSKSGRESAAKNIRTREKANEEIAKRIEELGLVPSKNKILKYRLWEESGKRCFYCGQPVSATEFLNGLDVEIEHVVPKSLLFDNSFSNKVCACRKCNAEKGNATAFDFMKGRGENAFEDYLKRVETAFKENKISQTKRNRLLTPADKIPKDFISRQLVQTQYISRKAMEILNQVCRNVYGSSGDVTAYLRRIWGYDEILHYLDLPRYREGNLTGDVTYVHRGQTHTEERIRDWSKRLDHRHHAIDALTIACTRQSIIQRLNTLNAKTAIGEEQMSLDKWTLAQAHFSVADVADHVADILVSFKSGKKVTTPGKRYVYKAGRRNVAQKNILVPRGALSEESVYGRIKSIEEKVPVKKLFERVDDIVKPRIRHLIRERLEACGGDCSKAVSSLKKSPLYLDEENTIMLEYGSCFKPEYVIKYSLNSIKAKDAVSIVDNHIREVVTARLAAFGDDPKKSFAEPLYADEAGKIQIKTVRCYTGLSQVVPVKKDADGNDIGFVKPGNNHHIAIYKDADGKYQESIVTFRDAVERKKYGIPVVVRNPVEVLDTIIDKNVPEDLAGGLPSPEWTFVMSMQQNEMFVLGMGDDEFNDAMVGMDYKSLGEHLYRVQKLASLYYVFRSQYETKLDDSNNALAMRKFYRVRSFNALFSLNPRKVSISLLGEISLKDD

SEQ ID NO: 1190 - protein, 1221 aa, unidentified; identical to SEQ ID NO: 1119
  REGION 1..1221: note = Description of Unknown: uncultivated organism with predicted taxonomy: Bacteroides
  REGION 1..1221: note = MG16-104 effector

SEQ ID NO: 1191 - protein, 1220 aa, unidentified
  REGION 1..1220: note = Description of Unknown: uncultivated organism with predicted taxonomy: Bacteroides sp. CAG:770
  REGION 1..1220: note = MG16-105 effector
MKKILGLDLGVGSVGWSVISCDDEHRPLEILGMGSRIVPLTPEESNEFSSGNAASKNQSRTQKRTARKGYDRYQSRRKALTDKLRELDMLPDETLIKLPVLDLWTLRARAATPGDKLSLPEIGRVLYHLNQKRGYRHSKQDDSADKTQRDYVQAVNKRFQEIKNEGLTIGQHFAEKLKESEIITDKGSFYNYRIKEQVFPRAAYVEEFDRIIQCQREFYPEVFTEAIVNEIRNEIIYYQRPLKSCKHLVSVCEFMQRELFDAEHNPIRNGKGEIVVAGPKCAPKSSPLAQVCKIWEEINNIRITNKENDEYFISIDNKHEIFDFLNTHEKMKADDLFKILGLAKNSGWSADRAMSKGMVGNTTRVALMKALKGRRDIDEILRFDLREVESNQVNADTGEVLMEISAECEREPLYRLWHIIYSISDKNEQKSALKNQFGISDESMLESLYKIDFVKQGYSSRSFKFMRKILPSLMDGAKYSEACDVIGINHSDSITKAENQTRKLLTKLPQLQKNELRQPVVEKILNQMINVVNAVIDKYGAIDEIRVEMARELKLSKAGRESAANNIRTRKKVNEEIAKRIEELGLVPSKNKILKYRLWEESGKRCFYCGQPVSATEFLNGLDVEIEHVVPKSLLFDDSFSNKVCACRKCNAEKGNATAFDFMKGRGENAFEDYLKRVETAFKENRISQTKRNRLLTPADKIPKDFIARQLVQTQYISRKAMEILNQVCRNVYGSSGDVTAYLRRIWGYDEILHSLDLPRYREGNLTENVTYVHRGQTHTEERIKDWSKRLDHRHHAIDALTIACTRQSIIQRLNTLNAKTAIGEEQMSLDKWTLAQTHFSVADVADHVADILVSFKSGKRVTTPGKRYVYKAGRRRVAQENILVPRGALSEESVYGRIKSIEEKVPVKKLFERVDDIVKPRIRRLIRERLEACGGDCSKAVSSLKKSPLYLDEENTIMLEYGSCFKPEYVIKYSLNSIKAKDAVSIVDKHIREVVIARLAAFGDDPKKAFAEPLYADEAGKIQIKTVRCYTGLSQVVPVKKDADGNDIGFVKPGNNHHIAIYKDADGKYQESIVTFRDVVERKKYGIPVVVRNPAAVLDTIIDKNVPEDLAGGLPSPEWTFVMSMQQNEMFVLGMGDDEFNDAMSGMDYKSLGEHLYRVQKLASLYYVFRSQYETKLDDSKGALTMKKFYRTASFKALFALNPRKVSISLLGEISLKDD

SEQ ID NO: 1192 - protein, 1221 aa, unidentified
  REGION 1..1221: note = Description of Unknown: uncultivated organism with predicted taxonomy: Bacteroides sp. CAG:545
  REGION 1..1221: note = MG16-106 effector
MKKVLGLDLGVGSVGWSLVNVDDNYKPTEILGIGSRIISLSPDESSEFTSGNAASKNQKRTQKRTARKGYDRYQMRRQALTEKLRELKMLPDERLIKLPVLELWTLRAKAATPGEKLTLPEIGRVLYHINQKRGYRHAKSDDSADKEQRDYVQTVNKRYQEIKDEGTTIGQHFAIKLKESEIVTEKGPFYNYRIKEQVLPRDAYIEEFDRIMDCQKTFYPEELSEDNIDEIRNKIIFYQRDLKSCKHLVSQCEFMTRSFLDADHKPILNSSGELVMSGPKVAPKSSPIFQACKIWEEINNLSIRNKENDELHISPEQKKDIFEYLDNNEKINATALYKILGIGKGDGWSVDKALSKGFTGNTTKVAIAKALGKEHNTQKSDLLRFDLRLKENGVNKDTGEIIYEIDPTCENEPLYRLWHVIYSINDKDALRHALTNQFGINDGESLRELSKIDFVKQGYGSRSAKFMRKLLPALMDGARYSEACDMIGINHSGSLTKSENEARELLHKIPQLQKNELRQPVVEKILNQMINVVNAVIDQFGSIDEIRVEMARELKLSKEGRAATAKNIRDREKMNNEMAEKIKELGITPSKNKILKYRLWQESGQKCFYCGQPVGAAEFLSGLDVEIEHIVPKALLFDDSFSNKVCACRKCNAEKSNTTAYDYMKSKGENEFNDYLRRVDAAFNEHKISFTKRSRLLTPADKLPKDFISRQLVQTQYISRKAMEILKQVCHNVYGSSGEVTSYLRRIWGYDEILHSLDLPRYREGGMTAEVSYDHRGQTHTEERIKDWSKRLDHRHHAIDALTIACTRQSIIQRLNNLSAMTAVAGESMSLDKWTLAQPHFSVQEVSDNVSRILVSFKAGKKVTTPGKRYVYRGGKRVLAQEGLLIPRGALCEESVYGRIHSLDKEVPVKKLFERIDDIVKPGIRTAVEERLRACDNDVKVACASLKKEPLYLDVEKTIPLEYGTCYKAEYVMRYALSALKPKDVEFIVDEHIRKVVSERLSEYGNDPKKAFAEPLYADKSKTIPIRAVRCYTGLAQVVPVKKDSKGNDIGFVKPGNNHHIAIYKDAEGTYHESIVTFWDSVERKKYGLPVIIRKPGEIWDIIIDKNIPEELAAGLPAPDWQFVMSMQQNEMFVLGMEDDGFRDAMEVKDYKTLGAHLYRVQKLTSIDYYFRSQYETTLDDSAGARMMKKFYRIKSIKSLFALHPRKVSVSLLGEMALKDD

SEQ ID NO: 1193 - protein, 1221 aa, unidentified
  REGION 1..1221: note = Description of Unknown: uncultivated organism with predicted taxonomy: Bacteroides sp. CAG:545
  REGION 1..1221: note = MG16-107 effector
MKKVLGLDLGVGSVGWSLVNVDDNYKPTEILGIGSRIISLSPDESSEFTSGNAASKNQKRTQKRTARKGYDRYQMRRQALTEKLRELKMLPDERLIKLPVLELWTLRAKAATPGEKLTLPEIGRVLYHINQKRGYRHAKSDDSADKEQRDYVQTVNKRYQEIKDEGTTIGQHFAIKLKESEIVTDKGPFYNYRIKEQVFPRDAYIEEFDRIMDCQKTFYPEELSEDNIDEIRNKIIFYQRDLKSCKHLVSQCEFMTRSFLDAEHKPILNSSGELVMSGPKVAPKSSPIFQACKIWEEINNLSIRNKENDELHISPEQKKDIFEYLDNNEKINATALYKILGIGKGDGWSVDKALSKGFTGNTTKVAIAKALGKDHNTKKSDLLRFDLRLKENGVNKDTGEIIYEIDPTCENEPLYRLWHVIYSINDKDALRHALTNQFGINDEESLRELTKIDFVKQGYGSRSAKFMRKLLPALMDGARYSEACDMIGINHSGSLTKSENEAREFLHKIPQLQKNELRQPVVEKILNQMINVVNAVIDQFGSIDEIRVEMARELKLSKEGRAATAKNIRDREKMNNEMAEKIKELGITPSKNKILKYRLWQESGQKCFYCGQPVGAAEFLSGLDVEIEHIVPKALLFDDSFSNKVCACRKCNAEKSNTTAYDYMKSKGENEFNDYLRRVDAAFNEHKISFTKRSRLLTPADKLPKDFISRQLVQTQYISRKAMEILKQVCHNVYGSSGEVTSYLRRIWGYDEILHSLDLPRYREGGMTAEVSYDHRGQTHTEERIKDWSKRLDHRHHAIDALTIACTRQSIIQRLNNLSAMTAVAGESMSLDKWTLAQPHFSVQEVSDNVSRILVSFKAGKKVTTPGKRYVYRGGKRVLAQEGLLIPRGALCEESVYGRIHSLEKEVPVKKLFERVDDIVKPGIRAAVEERLRACDNDVKVACASLKKEPLYLDVEKTIPLEYGTCYKVEYVMRYALSALKPKDVEYIVDEHIRKVVSERLSEYGNDPKKAFAEPLYADKSKTIPIRAVRCYTGLAQVVPVKKDSKGNAIGFVKPGNNHHIAIYRDADGTYHESVVTFWDTVERKKYGLPVIIRKPEEIWDIIIDKNIPEELAAGLPAPDWKFVMSMQQNEMYVLGMEDDEFRDAMEVKDYKTLGAHLYRVQKLTSIDYYFRSQYETTLDDSAGARMMKKFYRIKSIKSLFALHPRKVSVSLLGEMALKDD

SEQ ID NO: 1194 - protein, 1220 aa, unidentified; identical to SEQ ID NO: 1111
  REGION 1..1220: note = Description of Unknown: uncultivated organism with predicted taxonomy: Bacteroides sp. CAG:770
  REGION 1..1220: note = MG16-108 effector

SEQ ID NO: 1195 - protein, 1221 aa, unidentified
  REGION 1..1221: note = Description of Unknown: uncultivated organism with predicted taxonomy: Bacteroides sp. CAG:709
  REGION 1..1221: note = MG16-109 effector
MKKILGLDLGVGSIGWSLINADKDNKPIAILGLGSRIISLSPDESSEFTSGNAASKNQKRTQKRTARKGYDRYQMRRQSLTDKLRKLKMLPDEHLIKLPVLDLWTLRARAATPGEKLTLPEIGRVLYHINQKRGYRHSRSDDSADKEQREYVQAINKRFQEIREEGVTIGQHFVKKLKESEVVTDKGAFYNYRIKEQVFPRDAYVAEFDRVMDCQKVFYPEELSEANINEFRNEIIFYQRNLKSCKHLVSRCEFMTRSFLDEGHRPVLDASGKLVISGPKVAPKSSPIFQVCKIWEEINNLSIRNKENDELHISPEQKKEIFEYLDNNEKITSAALYKILGIGKGDGWSVDKALSKGFTGNTTKVAISKALGKANDAKKRDLLRFDLRLKENGVNKDTGEIICEIDPECENEPLYKLWHVIYSINDKDAQRHALTSQFGINDEASLAELSKIDFVKQGYGSRSVKFMRKLLPSLMDGAKYSEACDVIGVNHSGSLTKSENEARELLQRIPQLQKNELRQPVVEKILNQMINVVNAVIEKFGGVDEIRVEMARELKLSKEGRAATAKNIRDREKENKEIAEKIIELGVTPSKNKILKYRLWQEAGQKCFYCGQPVGATEFLNGLDVEIEHVVPKALLFDDSFSNKVCACRKCNAEKRNSTAYDYMKSKGENAFNDYLRRVDTAFSEHKISFTKRSRLLTPADKIPKDFISRQLVQTQYISRKAMEILKQVCHNVYGSSGEVTSYLRRIWGYDEILHSLDLPRYREGGMTAEVSYEHRGQTHTEERIKDWSKRLDHRHHAIDALTIACTRQSVIQRLNNLSSMTAVAGEAMSLDKWTLAQPHFSVQEVSDKVGGILVSFKAGKKVTTPGKRYVYRGGKRILAQEGLLIPRGALCEESVYGRIHSLEKGVPVKKLFERVDDIVKPGIRAAVEERLRACDNDVKVACASLKKEPLYLDAEKTIPLEYGTCYKAEYVMKYALSALKPKDVEYIVDEHIRKVVSERLSEYGNDPKKAFAEPLYADDAKTIPIRAVRCYTGLAQVVPVKKDSKGNDIGFVKPGNNHHIAIYRDADGAYHENVVTFWDTVERKKYGLPVIIRKPGEIWDILIDKNIPEELAAGLPAPDWKFVMSMQQNEMFVLGMEDDEFRDAMEVKDYKTLGAHLYRVQKLASSYYVFRHQYETQLDDSKCAQIMKKFYRAQSFKALFALHPRKVSVSLLGEMALKDD

SEQ ID NO: 1196 - protein, 1221 aa, unidentified; identical to SEQ ID NO: 1195
  REGION 1..1221: note = Description of Unknown: uncultivated organism with predicted taxonomy: Bacteroides sp. CAG:709
  REGION 1..1221: note = MG16-110 effector

SEQ ID NO: 1197 - protein, 1221 aa, unidentified; identical to SEQ ID NO: 1150
  REGION 1..1221: note = Description of Unknown: uncultivated organism with predicted taxonomy: Bacteroides sp. CAG:770
  REGION 1..1221: note = MG16-113 effector

SEQ ID NO: 1198 - protein, 1221 aa, unidentified
  REGION 1..1221: note = Description of Unknown: uncultivated organism with predicted taxonomy: Bacteroides sp. CAG:545
  REGION 1..1221: note = MG16-114 effector
MKKVLGLDLGVGSVGWSLVNVDDNYKPTEILGIGSRIISLSPDESSEFTSGNAASKNQKRTQKRTARKGYDRYQMRRQALTEKLRELKMLPDERLIKLPVLELWTLRAKAATPGEKLTLPEIGRVLYHINQKRGYRHAKSDDSADKEQRDYVQTVNKRYQEIKDEGTTIGQHFAIKLKESEIVTDKGPFYNYRIKEQVFPRDAYIEEFDRIMDCQKTFYPEELSEDNIDEIRNKIIFYQRDLKSCKHLVSQCEFMTRSFLDADHKPILNSSGELVMSGPKVAPKSSPIFQACKIWEEINNLSIRNKENDELHISPEQKKDIFEYLDNNEKINATALYKILGIGKGDGWSVDKALSKGFTGNTTKGAIAKALGKDHNTKKSDLLRFDLRLKENGVNKDTGEIIYEIDPTCENEPLYRLWHVIYSINDKDALRHALTNQFGINDEESLRELTKIDFVKQGYGSRSAKFMRKLLPALMDGARYSEACDMIGINHSGSLTKSENEARELLHKIPQLQKNELRQPVVEKILNQMINVVNAVIDQFGSIDEIRVEMARELKLSKEGRAATAKNIRDREKMNNEMAEKIKELGITPSKNKILKYRLWQESGQKCFYCGQPVGAAEFLSGLDVEIEHIVPKALLFDDSFSNKVCACRKCNAEKSNTTAYDYMKSKGENEFNDYLRRVDAAFNEHKISFTKRSRLLTPADKLPKDFISRQLVQTQYISRKAMEILKQVCHNVYGSSGEVTSYLRRIWGYDEILHSLDLPRYREGGMTAEVSYDHRGQTHTEERIKDWSKRLDHRHHAIDALTIACTRQSIIQRLNNLSAMTAVAGESMSLDKWTLAQPHFSVQEVSDNVSRILVSFKAGKKVTTPGKRYVYRGGKRVLAQESLLIPRGALCEESVYGRIHSLEKEVPVKKLFERVDDIVRPGIRAAVEERLRACDNDVKVACASLKKEPLYLDAEKTIPLEYGTCYKAEYVMRYALSALKPKDVEFIVDEHIRKVVSERLSEYGNDPKKAFAEPLYADKSKTIPIRAVRCYTGLAQVVPVKKDSKGNDIGFVKPGNNHHIAIYRDAEGTYHESIVTFWDSVERKKYGLPVIIRKPGEIWDILIDKNIPEELAAGLPAPDWQFVMSMQQNEMFVLGMEDDEFRDAMEGKDYKTLGAHLYRVQKLACIYYVFRHQYETQLDDSKGAQIMKKFYRAQSFKALFALRQRKVSVSLLGEMALKDD

SEQ ID NO: 1199 - protein, 1221 aa, unidentified
  REGION 1..1221: note = Description of Unknown: uncultivated organism with predicted taxonomy: Bacteroides sp. CAG:770
  REGION 1..1221: note = MG16-115 effector
MKKVLGLDLGVGSVGWSLVNVDDNYKPTEILGIGSRIISLSPDESSEFTSGNAASKNQKRTQKRTARKGYDRYQMRRQALTEKLRELKMLPDERLIKLPVLELWTLRAKAATPGEKLTLPEIGRVLYHINQKRGYRHAKSDDSADKEQRDYVQTVNKRYQEIKDEGTTIGQHFAIKLKKSEIVTDKGPFYNYRIKEQVFPRDAYIEEFDRIMDCQKTFYSEELSEDNIDEIRNKIIFYQRNLKSCKHLVSQCEFMTRSFLDAEHKPILNSSGELVMSGPKVAPKSSPIFQACKIWEEINNLSIRNKENDELHISPEQKKDIFEYLDNNEKINATALYKILGIGKGDGWSVDKALSKGFTGNTTKGAIAKALGKDHNTKKSDLLRFDLRLKENGVNKDTGEIIYEIDPTCENEPLYRLWHVIYSINDKDALRHALTNQFGINDEESLRELTKIDFVKQGYGSRSAKFMRKLLPALMDGARYSEACDMIGINHSGSLTKSENEARELLHKIPQLQKNELRQPVVEKILNQMINVVNAVIEQFGSIDEIRVEMARELKLSKEGRAATAKNIRDREKMNNEMAEKIKELGITPSKNKILKYRLWQESGQKCFYCGQPVGAAEFLSGLDVEIEHIVPKALLFDDSFSNKVCACRKCNAEKSNTTAYDYMKSKGENEFNDYLRRVDAAFNEHKISFTKRSRLLSPADKLPKDFISRQLVQTQYISRKAMEILKQVCHNVYGSSGEVTSYLRRIWGYDEILHSLDLPRYREGGMTAEVSYDHRGQTHTEERIKDWSKRLDHRHHAIDALTIACTRQSIIQRLNNLSAMTAVAGESMSLDKWTLAQPHFSVQEVSDNVSRILVSFKAGKKVTTPGKRYVYRGGKRVLAQEGLLIPRGALCEESVYGRIHSLEKEVPVKKLFERVDDIVKPGIRTAVEERLRACDNDVKVACASLKKEPLYLDVEKTIPLEYGTCYKAKYVMRYVLSALKPKDVEFIVDEHIRKVVSERLSEYGNDPKKAFAEPLYSDKSKTIPIRAVRCYTGLAQVVPVKKDSKGNAIGFVKPGNNHHIAIYRDADGAYHENVVTFWDTVERKKYGLPVIIRKPGEIWDILIDKNIPEELAAGLPAPDWQFVMSMQQNEMFVLGMEDDEFRDAMEVKDYKTLGAHLYRVQSLSRSDYYYRCQYETQLDNSNGAMLMKKYYRVRSFNALFTLHPRKVSVSLLGEMALKDD

SEQ ID NO: 1200 - protein, 1221 aa, unidentified
  REGION 1..1221: note = Description of Unknown: uncultivated organism with predicted taxonomy: Bacteroides
  REGION 1..1221: note = MG16-116 effector
MKKVLGLDLGVGSVGWSLVNVDDNYKPTEILGIGSRIISLSPDESSEFTSGNAASKNQKRTQKRTTRKGYDRYQMRRQALTEKLRELKMLPDERLIKLPVLELWTLRAKAATPGEKLTLPEIGRVLYHINQKRGYRHAKSDDSADKEQRDYVQTVNKRYQEIKDEGTTIGQHFAIKLKESEIVTEKGPFYNYRIKEQVFPRDAYIEEFDRIMDCQKTFYPEELSEDNIDEIRNKIIFYQRNLKSCKHLVSQCEFMTRSFLDADHKPILNSSGELVMSGPKVAPKSSPIFQACKIWEEINNLSIRNKENDELHISPEQKKDIFEYLDNNEKINATALYKILGIGKGDGWSVDKALSKGFTGNTTKVAIAKALGKEHNTKKSDLLRFDLRLKENGVNKDTGEIIYEIDPTCENEPLYRLWHVIYSINDKDALRHALTNQFGINDGESLRELTKIDFVKQGYGSRSAKFMRKLLPALMDGARYSEACDMIGINHSGSLTKSENEARELLHKIPQLQKNELRQPVVEKILNQMINVVNAVIDQFGSIDEIRVEMARELKLSKEGRAATAKNIRDREKMNNEMAEKIKELGITPSKNKILKYRLWQESGQKCFYCGQPVGAAEFLSGLDVEIEHIVPKALLFDDSFSNKVCACRKCNAEKSNTTAYDYMKSKGENEFNDYLRRVDAAFNEHKISFTKRSRLLTPADKLPKDFISRQLVQTQYISRKAMEILKQVCHNVYGSSGEVTSYLRRIWGYDEILHSLDLPRYREGGMTAEVSYDHRGQTHTEERIKDWSKRLDHRHHAIDALTIACTRQSIIQRLNNLSAMTAVAGESMSLDKWTLAQPHFSVQEVSDNVSRILVSFKAGKKVTTPGKRYVYRGGKRVLAQEGLLIPRGALCEESVYGRIHSLEKEVPVKKLFERVDDIVKPGIRAAVEERLRACDNDVKVACASLKKEPLYLDVEKTIPLEYGTCYKAEYVMRYALSALKPKDVEFIVDEHIRKVVSERLSEYGNDLKKAFAEPLYADKSKTIPIRAVRCYTGLAQVVPVKKDSKGNAIGFVKPGNNHHIAIYKDADGTYHENVVTFWDTVERKKYGLPVIIRKPGEIWDILIDKNIPEELAAGIPAPDWKFVMSMQQNEMFVLGMEDDEFRDTMEVKDYKTLGAHLYRVQKLTSIYYVFRHQYETQLDDSKGAQIMKKFYRAQSFKALFSLHPRKVSVSLLGEMALKDD

SEQ ID NO: 1201 - protein, 1220 aa, unidentified
  REGION 1..1220: note = Description of Unknown: uncultivated organism with predicted taxonomy: Bacteroides sp. CAG:770
  REGION 1..1220: note = MG16-118 effector
MKKILGLDLGVGSVGWSVISCDDEHRPLEILGMGSRIVPLTPDESNEFSSGNAASKNQSRTQKRTARKGYDRYQLRRQALTVKLRELGMLPDEALIKLPVMDLWTLRARAATPGEKLSLAEIGRVLYHLNQKRGYRHSKEDDSADKTQRDYVQAVNKRFQEIKNEGLTIGQHFAVKLKESEVITDKGAFYNYRIKEQVFPRAAYVEEFDRIIQCQREFYPEVLTEANVNEIRNEIIYYQRPLKSSKHLVSVCEFMQRELFDAEHNPIRNGKGEIVVAGPKCAPKSSPLAQVCKIWEEVNNIRITNKENDEYFISIDNKHEIFDFLNTHEKMKADDLFKILGLAKNSGWSADRAMSKGMVGNTTRVALMKALKGRRDIDEILRFDLREVESNQVNADTGEVLMEIGAECESEPLYRLWHIIYSISDKNEQKATLEKQFGITDESMLESLCRIDFVKQGYSSRSFKFMRKILPYLMDGAKYSEACDAVGINHSDSITKAKNQARELLVKLPQLQKNELRQPVVEKILNQMINVVNAVIDKYGAIDEIRVEMARELKLSKEGRESAAKNISDRKKANEEIARRIEELGLVPSKNKILKYRLWEESGKRCFYCGQPVSAAEFLNGLDVEIEHVIPKSLLFDDSFSNKVCACRKCNAEKDNATAFDFMKGRGENAFEDYLKRVETAFKENKISQTKRNRLLTPADKIPKDFISRQLVQTQYISRKAMEILNQVCRNVYGSSGDVTAYLRRIWGYDEILHSLDLPRYREGNLTGDVTYVHKGQTHTEERIKDWSKRLDHRHHAIDALTIASTRQSIIQRLNTLNAKTAIGEEQISLDKWTLAQAHFSVADVADHVADILVSFKSGKKVTTPGKRYVYKAGRRRVAQENILVPRGALSEESVYGRIKSIEEKVPVKKLFERVDDIVKPRIRHLVRERLEACGGDCSKAVSSLKKSPLYLDEENTIMLEYGSCFKPEYVIKYSLNSIKAKDAVSIVDKHVREVVTARLAAFGDDPKKAFAEPLYADEAGKIQIKTVRCYTGLSQVVPVKKDADGNDIGFVKPGNNHHIAIYKDADGKYQECIVTFRDAVERKKYGIPVVVRKPAAVLDTVIDKNVPEDLAGGLPSPEWTFVMSMQQNEMFVLGMGDDEFNDAMAGRDYKSLGEHLYRVQSISHADYYFRSQYETMLDNSKNAMAMKKYYRIRSFKALFALNPRKVSISMLGEISLKDD

SEQ ID NO: 1202 - protein, 1221 aa, unidentified
  REGION 1..1221: note = Description of Unknown: uncultivated organism with predicted taxonomy: Bacteroides sp. CAG:709
  REGION 1..1221: note = MG16-119 effector
MKKILGLDLGVGSIGWSLINADKDNKPIAILGLGSRIISLSPDESSEFTSGNAASKNQKRTQKRTARKVYDRYQMRRQALTDKLRKLKMLPDEHLIKLPVLDLWTLRARAATPGEKLTLPEIGRVLYHINQKRGYRHSRSDDSADKEQREYVQAINKRFQEIREEGVTIGQHFVKKLKESEVVTDKGAFYNYRIKEQVFPRDAYVAEFDRVMDCQKVFYPEELSEANINEFRNEIIFYQRNLKSCKHLVSRCEFMTRSFLDEGHRPVLDASGKLVISGPKVAPKSSPIFQVCKIWEEINNLSIRNKENDELHISPEQKKEIFEYLDNNEKITSAALYKILGIGKGDGWSVDKALSKGFTGNTTKVAISKALGKANDAKKRDLLRFDLRLKENGVNKDTGEIICEIDPECENEPLYKLWHVIYSINDKDAQRHALTSQFGINDEASLAELSKIDFVKQGYGSRSVKFMRKLLPSLMDGAKYSEACDVIGVNHSGSLTKSENEARELLQRIPQLQKNELRQPVVEKILNQMINVVNAVIEKFGGVDEIRVEMARELKLSKEGRAATAKNIRDREKENKEIAEKIIELGVTPSKNKILKYRLWQEAGQKCFYCGQPVGATEFLNGLDVEIEHVVPKALLFDDSFSNKVCACRKCNAEKRNSTAYDYMKSKGENAFNDYLRRVDTAFSEHKISFTKRSRLLTPADKIPKDFISRQLVQTQYISRKAMEILKQVCHNVYGSSGEVTSYLRRIWGYDEILHSLDLPRYREGGMTAEVSYEHRGQTHTEERIKDWSKRLDHRHHAIDALTIACTRQSVIQRLNNLSSMTAVAGEAMSLDKWTLAQPHFSVQEVSDKVGGILVSFKAGKKVTTPGKRYTYRGGKRILAQDGLLIPRGALSEESVYGRISALEKNVLVKKLFERVEDIVKPGIRAVVEDRLKAYDNDVKAACTSLKEEPLYLDAEKTIPLEYGTCYKAKYVMKYALSALKPKDVEYIVDEHIRKVVSERLSEYGNDPKKAFAEPLYADDAKTIAVRTVRCYTGLDQVVPVKRDVAGNDIGFVKPGNNHHIAIYRDADGKFHECVVTFWDAVERKKCGIPVIVRNPDEVWDVVIDKNVPEELAAGLPALGWSFVMSLQQNEMFILGMEDDEFRDAMAEADYKALGAHLYRVQKLAGSDYYFRSHYETLLDDSAGARIMKKFYRISSSKALFALHPRKVAVSLLGEMSLKND

SEQ ID NO: 1203 - protein, 1221 aa, unidentified; identical to SEQ ID NO: 1135
  REGION 1..1221: note = Description of Unknown: uncultivated organism with predicted taxonomy: Bacteroides sp. CAG:709
  REGION 1..1221: note = MG16-120 effector

SEQ ID NO: 1204 - protein, 1223 aa, unidentified
  REGION 1..1223: note = Description of Unknown: uncultivated organism with predicted taxonomy: Bacteroides sp. CAG:770
  REGION 1..1223: note = MG16-121 effector
MKKILGLDLGVGSVGWSVISCDDEHRPLEIVGMGSRIVPLTPDESNEFSSGNAASKNQSRTQKRTARKGYDRYQSRRKALTDKLRELDMLPDETLIKLPVLDLWTLRARAATPGDKLSLPEIGRVLYHLNQKRGYRHSKQDDSADKTQRDYVQAVNKRFQDIKDEGLTIGQHFAEKLKESEIITDKGAFYNYRIKEQVFPRAAYVEEFDRIIQCQREFYPEVLTEANVNEIRNEIIYYQRPLKSCKHLVSVCEFMQRELFDADHNPIRNGKGKIVVAGPKCAPKSSPLARVCKIWEEINNIRVTNKENDEYFISIDNKHEIFDFLNTHEKMKADDLFKILGIAKNSGWSADRAMSKGMVGNTTRVALMKALKGRRDIDDILRFDLRDVESNQVNADTGEVLMEISAECESEPLYRLWHIIYSISDKNEQKSALKNQFGISDESMLESLCKIDFVKQGYSSRSFKFMRKILPSLMDGAKYSEACDVIGVNHSDSITKAENQARELLARLPQLQKNELRQPVVEKILNQMINVVNAVIDKYGAIDEIRVEMARELKLSKAGRESAAKNVRTREKANEEIAKRIEELGLVPSKNKILKYRLWEESGKRCFYCGQPVSATEFLNGLDVEIEHVVPKSLLFDDSFSNKVCACRKCNAEKGNATAFDFMKGHGENAFEDYLKRVETAFKENRISQTKRNRLLTPADKIPKDFISRQLVQTQYISRKAMEILNQVCRNVYGSSGDVTAYLRRIWGYDEILHSLDLPRYREGNLTGDVTYLHKGQTHTEERIKDWSKRLDHRHHAIDALTIASTRQSIIQRLNTLNAKTAIGEEQISLDKWTLAQAHFSVADVADHVADILVSFKSGKKVATPGKRYVYKAGRRIVAQENILVPRGALSEESVYGRIKSIEEKVPVKKLFERVDDIVKPRIRHLIRERLEACGGDCSKAVSSLKKSPLYLDEENTIMLEYGSCFKYSYVKKSKLIQRDKKDDCINVSLIVDKHIREVVTARLAAFGGDTKKAFAEPLYADEAGKIQIKTVRCYTNSTVVPVKKDADGNDIGFVKPGNNHHIAIYKDADGKYQESIVTFRDAVERKKYGIPVVVRNPVEVMDTVIDKNVPEDLAGGLPSPEWTFVMSMQQNEMFVLGMGDDEFNDAMAGMDYKSLGEHLYRFQSISHADYYFRSQYETMLDNSKNAMAMKKYYRIRSFKALFALNPRKVSISLLGEISLKDD

SEQ ID NO: 1205 - protein, 1220 aa, unidentified
  REGION 1..1220: note = Description of Unknown: uncultivated organism with predicted taxonomy: Bacteroides sp. CAG:770
  REGION 1..1220: note = MG16-122 effector
MKKILGLDLGVGSVGWSVISCDDEHRPLEILGMGSRIVPLTPDESNEFSSGNAASKNQSRTQKRTARKGYDRYQLRRQALTVKLRELGMLPDEALIKLPVMDLWTLRARAATPGEKLSLAEIGRVLYHLNQKRGYRHSKEDDSADKTQRDYVQAVNKRFQEIKNEGLTIGQHFAVKLKESEVITDKGAFYNYRIKEQVFPRAAYVEEFDRIIQCQREFYPEVLTEANVNEIRNEIIYYQRPLKSCKHLVSVCEFMQRELFDAEHNPIRNGKGEIVVAGPKCAPKSSPLAQVCKIWEEVNNIRITNKENDEYFISIDNKHEIFDFLNTHEKMKADDLFKILGLAKNSGWSADRAMSKGMVGNTTRVALMKALKGRRDIDEILRFDLREVESNQVNADTGEVLMEIGAECESEPLYRLWHIIYSISDKNEQKATLEKQFGITDESMLESLCRIDFVKQGYSSRSFKFMRKILPYLMDGAKYSEACDVIGVNHSDSITKAENQARELLTRLPQLQKNELRQPVVEKILNQMINVVNAVIDKYGAIDEIRVEMARELKLSKAGRESAAKNIRTREKANEEIAKRIEELGLVPSKNKILKYRLWEEFGKRCFYCGQPVSATEFLNGLDVEIEHVVPKSLLFDDSFSNKVCACRKCNAEKGNATAFDFMKGRGENAFEDYLKRVETAFKENRISQTKRNRLLTPADKIPKDFISRQLVQTQYISRKAMEILNQVCRNVYGSSGDVTAYLRRIWGYDEILHSLDLPRYREGNLTGDVTYVHKGQTHTEERIKDWSKRLDHRHHAIDALTIASTRQSIIQRLNTLNAKTAIGEEQISLDKWTLAQAHFSVADVADHVADILVSFKSGKRVTTPGKRYVYKAGRRRVVQENILVPRGALSEESVYGRIKSIEEKVPVKKLFERVDDIVKPRIRYLIRERLETCGGDCSKAVSSLKKSPLYLDEENTIMLEYGSCFKPEYVIKYSLNSIKAKDAVSIVDNHIREVVTARLAAFGDDPKKAFAEPLYADGAGKIQIRTVRCYTGLSQVVPVKKDADGNDIGFVKPGNNHHIAIYKDADGKYQESIVTFCDAVERKKYGIPVVVRNPVEALDTIIDKNVPEDLAGGLPSPEWTFVMSMQQNEMFVLGMGDDEFNDALAGMDYKSLGEHLYRVQKLATSDYFFRSQYETKLDDSKGASAMRKFFRTASLKALFALNPRKVSISLLGEISLKDD

SEQ ID NO: 1206 - protein, 1221 aa, unidentified
  REGION 1..1221: note = Description of Unknown: uncultivated organism with predicted taxonomy: Bacteroides sp. CAG:545
  REGION 1..1221: note = MG16-123 effector
MKKVLGLDLGVGSVGWSLVNVDDNYKPTEILGIGSRIISLSPDESSEFTSGNAASKNQKRTQKRTARKGYDRYQMRRQALTEKLRELKMLPDERLIKLPVLELWTLRAKAATPGEKLTLPEIGRVLYHINQKRGYRHAKSDDSADKEQRDYVQTVNKRYQEIKDEGTTIGQHFAIKLKESEIVTDKGPFYNYRIKEQVFPRDAYIEEFDRIMDCQKTFYPEELSEDNIDEIRNKIIFYQRDLKSCKHLVSQCEFMTRSFLDAEHKPILNSSGELVMSGPKVAPKSSPIFQACKIWEEINNLSIRNKENDELHISPEQKKDIFEYLDNNEKINATTLYKILGIGKGDGWSVDKALSKGFTGNTTKVAIAKVLGKEHNTKKSDLLRFDLRLKENGVNKDTGEIIYEIDPTCENEPLYRLWHVIYSINDKDALRHALTNQFGINDEESLRELTKIDFVKQGYGSRSAKFMRKLLPALMDGARYSEACDMIGINHSGSLTKSENEARELLHKIPQLQKNELRQPVVEKILNQMINVVNAVIEQFGSIDEIRVEMARELKLSKEGRAATAKNIRDREKMNNEMAEKIKELGITPSKNKILKYRLWQESGQKCFYCGQPVGAAEFLSGLDVEIEHIVPKALLFDDSFSNKVCACRKCNAEKSNTTAYDYMKSKGENEFNDYLRRVDAAFNEHKISFTKRSRLLSPADKLPKDFISRQLVQTQYISRKAMEILKQVCHNVYGSSGEVTSYLRRIWGYDEILHSLDLPRYREGGMTAEVSYDHRGQTHTEERIKDWSKRLDHRHHAIDALTIACTRQSIIQRLNNLSAMTAVAGESMSLDKWTLAQPHFSVQEVSDNVSRILVSFKAGKKVTTPGKRYVYRGGKRVLAQEGLLIPRGALCEESVYGRIHSLEKEVPVKKLFERVDDIVKPGIRTAVEERLRACDNDVKVACASLKKEPLYLDVEKTIPLEYGTCYKAKYVMRYVLSALKPKDVEFIVDEHIRKVVSERLSEYGNDPKKAFAEPLYSDKSKTIPIRAVRCYTGLAQVVPVKKDSKGNAIGFVKPGNNHHIAIYRDADGAYHENVVTFWDTVERKKYGLPVIIRKPGEIWDILIDKNIPEELAAGLPAPDWQFVMSMQQNEMFVLGMEDDEFRDAMEVKDYKTLGAHLYRVQKLASIDYYFRSQYETALDNSAGARMMKKFYRTNSIKSLFALHPRKVSVSLLGEMALKND

SEQ ID NO: 1207 - protein, 1221 aa, unidentified
  REGION 1..1221: note = Description of Unknown: uncultivated organism with predicted taxonomy: Bacteroides sp. CAG:770
  REGION 1..1221: note = MG16-126 effector
MKKVLGLDLGVGSVGWSLVNVDDNYKPTEILGIGSRIISLSPDESSEFTSGNAASKNQKRTQKRTARKGYDRYQMRRQALTEKLRELKMLPDERLIKLPVLDLWTLRAKAATPGEKLTLPEIGRVLYHINQKRGYRHAKSDDSADKEQRDYVQTVNKRYQEIKDEGTTIGQHFAIKLKESEIVTDKGPFYNYRIKEQVFPRDAYIEEFDRIMDCQKTFYPEELSEDNIDEIRNKIIFYQRDLKSCKHLVSQCEFMTRSFLDADHKPILNSSDELVISGPKVAPKSSPIFQACKIWEEINNLSIRNKENDELHISPEQKKDIFEYLDNNEKINATALYKILGIGKGDGWSVDKALSKGFTGNTTKVAIAKALGKEHNTKKSDLLRFDLRLKENGVNKDTGEIIYEIDPTCENEPLYRLWHVIYSINDKDALRHALTNQFGINDGESLRELTKIDFVKQGYGSRSAKFMRKLLPALMDGARYSEACDMIGINHSGSLTKSENEARELLHKIPQLQKNELRQPVVEKILNQMINVVNAVIDQFGSIDEIRVEMARELKLSKEGRAATAKNIRDREKMNNEMAEKIKELGITPSKNKILKYRLWQESGQKCFYCGQPVGAAEFLCGLDVEIEHIVPKALLFDDSFSNKVCACRKCNAEKSNTTAYDYMKSKGENEFNDYLRRVDAAFNEHKISFTKRSRLLTPADKLPKDFISRQLVQTQYISRKAMEILKQVCHNVYGSSGEVTSYLRRIWGYDEILHSLDLPRYREGGMTAEVSYDHRGQTHTEERIKDWSKRLDHRHHAIDALTIACTRQSIIQRLNNLSAMAAVAGESMSLDKWTLAQPHFSVQEVSDNVSRILVSFKAGKKVTTPGKRYVYRGGKRILAQEGLLIPRGALCEESVYGRIHSLEKGVPVKKLFERVDDIVKPVIRAAVEERLRACDNDVKVACASLKKEPLYLDAEKTIPLEYGTCYKAEYVMKYALSALKPKDVEYIVDEHIRKVVSERLSEYGNDPKKAFAEPLYADKSKTIPIRAVRCYTGLAQVVPVKKDSKGNDIGFVKPGNNHHIAIYRDADGTYHENVVTFWDTVERKKYGLPVIIRKPGEIWDIIIDKNIPEELATCLPAPDWQFVMSMQQNEMFVLGMEDDEFRDAMEGKDYKTLGAHLYRVQKLTSIDYYFRSQYETTLDDSAGARMMKKFYRIKSIKSLFALHPRKVSVSLLGEMALKDD

SEQ ID NO: 1208 - protein, 1221 aa, unidentified
  REGION 1..1221: note = Description of Unknown: uncultivated organism with predicted taxonomy: Bacteroides sp. CAG:709
  REGION 1..1221: note = MG16-127 effector
MKKILGLDLGVGSIGWSLINADKDNKPIAILGLGSRIISLSPDESSEFTSGNAASKNQKRTQKRTARKGYDRYQMRRQALTDKLRKLKMLPDEHLIKLPVLDLWTLRARAATPGEKLTLPEIGRVLYHINQKRGYRHSRSDDSADKEQREYVQAINKRFQEIREEGVTIGQHFVKKLKESEVVTDKGAFYNYRIKEQVFPRDAYVAEFDRVMDCQKVFYPEELSEANINEFRNEIIFYQRNLKSCKHLVSRCEFMTRSFLDEGHRPVLDASGKLVISGPKVAPKSSPIFQVCKIWEEINNLSIRNKENDELHISPEQKKEIFEYLDNNERITSAALYKILGIGKGDGWSVDKALSKGFTGNTTKVAISKALGKANDAKKRDLLRFDLRLKENGVNKDTGEIICEIDPECENEPLYKLWHVIYSINDKDAQRHALTSQFGINDEASLAELSKIDFVKQGYGSRSVKFMRKLLPSLMDGAKYSEACDVIGVNHSASLTKSENEARELLQRIPQLQKNELRQPVVEKILNQMINVVNAVIEKFGGVDEIRVEMARELKLSKEGRAATAKNIRDREKENKEIAEKIIELGVTPSKNKILKYRLWQEAGQKCFYCGQPVGATEFLNGLDVEIEHVVPKALLFDDSFSNKVCACRKCNAEKRNSTAYDYMKSKGENAFNDYLRRVDTAFSEHKISFTKRSRLLTPADKIPKDFISRQLVQTQYISRKAMEILKQVCHNVYGSSGEVTSYLRRIWGYDEILHSLDLPRYREGGMTAEVSYEHRGQTHTEERIKDWSKRLDHRHHAIDALTIACTRQSVIQRLNNLSSMTAVAGEAMSLDKWTLAQPHFSVQEVSDKVGGILVSFKAGKKVTTPGKRYTYRGGKRILAQDGLLIPRGALSEESVYGRISALEKNVLVKKLFERVEDIVKPGIRAVVEDRLKAYDNDVNAACASLKKEPLYLDAEKTIPLEYGTCYKREYVIKYPISSLKAKDVESIIDGHIRQIVSERLSEYGNDPKKAFAEPLYADDAKTIPVRTVRCYTGLDQVVPVKKDVAGNDIGFVKPGNNHHIAIYRDADGKFHECVVTFWDAVERKKYGIPVIVRNPDEVWDVVIDKNVPEELAAGLPALGWSFVMSLQQNEMFILGMEDDEFMDAMAEADYKALGAHLYRVQKLAGSDYYFRSHYETLLDDSAGARIMKKFYRISSSKALFALHPRKVAVSLLGEMSLKND

SEQ ID NO: 1209 - protein, 1221 aa, unidentified
  REGION 1..1221: note = Description of Unknown: uncultivated organism with predicted taxonomy: Bacteroides sp. CAG:770
  REGION 1..1221: note = MG16-128 effector
MKKVLGLDLGVGSVGWSLVNVDDNYKPTEILGIGSRIISLSPDESSEFTSGNAASKNQKRTQKRTARKGYDRYQMRRQALTEKLRELKMLPDERLIKLPVLELWTLRAKAATPGEKLTLPEIGRVLYHINQKRGYRHAKSDDSADKEQRDYVQTVNKRYQEIKDEGTTIGQHFAIKLKESEIVTEKGPFYNYRIKEQVFPRDAYIEEFDRIMDCQKTFYPEELSEDNIDEIRNKIIFYQRDLKSCKHLVSQCEFMTRSFLDADHKPILNSSGELVMSGPKVAPKSSPIFQACKIWEEINNLSIRNKENDELHISPEQKKDIFEYLDNNEKINATALYKILGIGKGDGWSVDKALSKGFTGNTTKVAIAKALGKEHNTKKSDLLRFDLRLKENGVNKDTGEIIYEIDPTCENEPLYRLWHVIYSINDKDALRHALTNQFGINDGESLRELTKIDFVKQGYGSRSAKFMRKLLPALMDGARYSEACDMIGINHSGSLTKSENEARELLHKIPQLQKNELRQPVVEKILNQMINVVNAVIDQFGSIDEIRVEMARELKLSKEGRAATAKNIRDREKMNNEMAEKIKELGITPSKNKILKYRLWQESGQKCFYCGQPVGAAEFLSGLDVEIEHIVPKALLFDDSFSNKVCACRKCNAEKSNTTAYDYMKSKGENEFNDYLRRVDAAFNEHKISFTKRSRLLTPADKLPKDFISRQLVQTQYISRKAMEILKQVCHNVYGSSGEVTSYLRRIWGYDEILHSLDLPRYREGGMTAEVSYDHRGQTHTEERIKDWSKRLDHRHHAIDALTIACTRQSIIQRLNNLSAMTAVAGESMSLDKWTLAQPHFSVQEVSDNVSRILVSFKAGKKVTTPGKRYVYRGGKRVLAQEGLLIPRGALCEESVYGRIHSLEKEVPVKKLFERVDDIVKPGIRTTVEERLRACDNDVKVACASLKKEPLYLDVEKTIPLEYGTCYKAKYVMRYALSALKPKDVEFIVDEHIRKVVSERLSEYGNDPKKAFAEPLYADKSKMIPIRAVRCYTGLAQVVPVKKDSKGNDIGFVKPGNNHHIAIYRDAEGTYHESIVTFWDSVERKKYGLPVIIRKPGEIWDILIDKNIPEELAAGLPAPDWQFVMSMQQNEMFVLGMEDDEFRDAMEVKDYKTLGAHLYRVQSLSRSDYYYRCQYETQLDNSNGAMLMKKYYRVRSFNALFTLHPRKVSVSLLGEMALKDD

SEQ ID NO: 1210 - protein, 1221 aa, unidentified
  REGION 1..1221: note = Description of Unknown: uncultivated organism with predicted taxonomy: Bacteroides sp. CAG:709
  REGION 1..1221: note = MG16-129 effector
MKKILGLDLGVGSIGWSLINADKDNKPIAILGLGSRIISLSPDESSEFTSGNAASKNQKRTQKRTARKGYDRYQMRRQALTDKLRKLKMLPDEHLIKLPVLDLWTLRARAATPGEKLTLPEIGRVLYHINQKRGYRHSRSDDSADKEQREYVQAINKRFQEIREEGVTIGQHFVKKLKESEVVTDKGAFYNYRIKEQVFPRDAYVAEFDRVMDCQKVFYPEELSEANINEFRNEIIFYQRNLKSCKHLVSRCEFMTRSFLDEGHRPVLDASGKLVISGPKVAPKSSPIFQVCKIWEEINNLSIRNKENDELHISPEQKKEIFEYLDNNEKITSAALYKILGIGKGDGWSVDKALSKGFTGNTTKVAISKALGKANDAKKRDLLRFDLRLKENGVNKDTGEIICEIDPECENEPLYKLWHVIYSINDKDAQRHALTSQFGINDEASLAELSKIDFVKQGYGSRSVKFMRKLLPSLMDGAKYSEACDVIGVNHSGSLTKSENEARELLQRIPQLQKNELRQPVVEKILNQMINVVNAVIEKFGGVDEIRVEMARELKLSKEGRAATAKNIRDREKENKEIAEKIIELGVTPSKNKILKYRLWQEAGQKCFYCGQPVGATEFLNGLDVEIEHVVPKALLFDDSFSNKVCACRKCNAEKRNSTAYDYMKSKGENAFNDYLRRVDTAFSEHKISFTKRSRLLTPADKIPKDFISRQLVQTQYISRKAMEILKQVCHNVYGSSGEVTSYLRRIWGYDEILHSLDLPRYREGGMTAEVSYEHRGQTHTEERIKDWSKRLDHRHHAIDALTIACTRQSVIQRLNNLSSMTAVAGEAMSLDKWTLAQPHFSVQEVSDKVGGILVSFKAGKKVTTPGKRYTYREGKRILAQDGLLIPRGALSEESVYGRISALEKNVLVKKLFERVEDIVKPGIRAVVEDRLMACDNDVNAACASLKEEPLYLDAEKTIPLEYGTCYKREYVIKYPISSLKTKDVESIIDGHIRQIVSERLSEYGNDPKKAFAEPLYADDAKTIPVRTVRCYTGLDQVVPVKRDVAGNDIGFVKPGNNHHIAIYRDADGKFHECVVTFWDAVERKKYGIPVIVRNPDEVWDVVIDKNVPEELAAGLPALGWSFVMSLQQNEMFILGMEDDEFRDAMAEADYKALGAHLYRVQSLSRSDYYYRCQYETQLDNSNGAMRMKKFYRVRSFNALFNLHPRKVAVSLLGEMSLKND

SEQ ID NO: 1211 - protein, 1220 aa, unidentified
  REGION 1..1220: note = Description of Unknown: uncultivated organism with predicted taxonomy: Bacteroides sp. CAG:770
  REGION 1..1220: note = MG16-130 effector
MKKILGLDLGVGSVGWSVISCDDEHRPLEILGMGSRIVPLTPEESNEFSSGNAASKNQSRTQKRTARKGYDRYQSRRKALTDKLRELDMLPDETLIKLPVLDLWTLRARAATPGDKLSLPEIGRVLYHLNQKRGYRYSKEDDSADKTQRDYVQAVNKRFQEIKNEGLTIGQHFAVKLKASEVITDKGAFYNYRIKEQVFPRAAYVEEFDRIIQCQREFYPEVFTEAIVNEIRNEIIYYQRPLKSCKHLVSVCEFMQRELFDAEHNPIRNGKGEIVVAGPKCAPKSSPLAQVCKIWEEINNIRITNKENDEYFISIDNKHEIFDFLNTHEKMKADDLFKILGLAKNSGWSADRAMSKGMVGNTTRVALMKALKGRRDIDEILRFDLREVESNQVNADTGEVLMEISAECEREPLYRLWHIIYSISDKNEQKSALKNQFGISDESMLESLCKIDFVKQGYSSRSFKFMRKILPSLMDGAKYSEACDVIGINHSDSITKAENQIRKLLTKLPQLQKNELRQPVVEKILNQMINVVNAVIDKYGAIDEIRVEMARELKLSKAGRESAANNIRTREKANEEIAKRIEELGLVPSKNKILKYRLWEESGKRCFYCGQPVSATEFLNGLDVEIEHVVPKSLLFDDSFSNKVCACRKCNAEKGNATAFDFMKGRGENAFEDYLKRVETAFKENKISQTKRNRLLTPADKIPKDFISRQLVQTQYISRKAMEILNQVCRNVYGSSGDVTAYLRRIWGYDEILHSLDLPRYRDGNLTEDVTYVHRGQTHTEERIKDWSKRLDHRHHAIDALTIACTRQSIIQRLNTLNAKTAIGEEQMSLDKWTLAQAHFSVADVADHVADILVSFKSGKKVTTPGKRYVYKAGRRRVAQENILVPRGALSEESVYGRIKSIEEKVPVKKLFERVDDIVKPRIRHLIRERLEACGGDCSKAVSSLKKSPLYLDEENTIMLEYGSCFKPEYVIKYSLNSIKTKDAASIVDKHVREVVTERLAAFGDDPKKAFAEPLYADEVGKIQIKTVRCYTGLSQVVPVKKDADGNDIGFVKPGNNHHIAIYKDADGKYQECIVTFRDAVERKKYGIPVVVRNPVEALDTIIDKNVPEDLAGGLPSPEWTFVMSMQQNEMFVLGMGEDEFNDAMAGMDYKSLGEHLYRVQKLASSDYFFRSQYETKLDDTKNALLMKKYYRTRSFKALFALNPHKVSISLLGEISLKDD

SEQ ID NO: 1212 - protein, 1221 aa, unidentified
  REGION 1..1221: note = Description of Unknown: uncultivated organism with predicted taxonomy: Bacteroides sp. CAG:709
  REGION 1..1221: note = MG16-131 effector
MKKILGLDLGVGSIGWSLINADKDNKPIAILGLGSRIISLSPDESSEFTSGNAASKNQKRTQKRTARKGYDRYQMRRQALTDKLRKLKMLPDEHLIKLPVLDLWTLRARAATPGEKLTLPEIGRVLYHINQKRGYRHSRSDDSADKEQREYVQAINKRFQEIREEGVTIGQHFVKKLKESEVVTDKGAFYNYRIKEQVFPRDAYVAEFDRVMDCQKVFYPEELSEANINEFRNEIIFYQRNLKSCKHLVSRCEFMTRSFLDEEHRPVLDASGKLVISGPKVAPKSSPIFQVCKIWEEINNLSIRNKENDELHISPEQKKEIFEYLDNNEKITSAALYKILGIGKGDGWSVDKALSKGFTGNTTKVAISKALGKANDAKKRDLLRFDLRLKENGVNKDTGEIICEIDPECENEPLYKLWHVIYSINDKDAQRHALTSQFGINDEASLAELSKIDFVKQGYGSRSVKFMRKLLPSLMDGAKYSEACDVIGVNHSGSLTKSENEARELLQRIPQLQKNELRQPVVEKILNQMINVVNAVIEKFGGVDEIRVEMARELKLSKEGRAATAKNIRDREKENKEIAEKIIELGVTPSKNKILKYRLWQEAGQKCFYCGQPVGATEFLNGLDVEIEHVVPKALLFDDSFSNKVCACRKCNAEKRNSTAYDYMKSKGENAFNDYLRRVDTAFSEHKISFTKRSRLLTPADKIPKDFVSRQLVQTQYISRKAMEILKQVCHNVYGSSGEVTSYLRRIWGYDEILHSLDLPRYREGGMTAEVSYEHRGQTHTEERIKDWSKRLDHRHHAIDALTIACTRQSVIQRLNNLSSMTAVAGEAMSLDKWTLAQPHFSMQEVSDKVGGILVSFKAGKKVTTPGKRYTYRRGKRILAQDGLLIPRGALSEESVYGRISALEKNVLVKKLFERVEDIVKPGIRAVVEDRLKACDDDVKAACASLKKEPLYLDAEKTIPLEYGTCYKAKYVMKYALSALKPKDVEYIVDEHIRKVVSERLSEYGNDPKKAFAEPLYADDAKTIAVRTVRCYTGLDQVVPVKKDVAGNDIGFVKPGNNHHIAIYRDADGKFHECVVTFWDAVERKKYGIPVIVRNPDEVWDVVIDKNVPEELAAGLPALGWSFVMSLQQNEMFILGMEDDEFRDAMAEADYKALGAHLYRVQKLAGSDYYFRSHYETLLDDSAGARIMKKFYRISSSKALFALHPRKVAVSLLGEMSLKND

SEQ ID NO: 1213 - protein, 1221 aa, unidentified
  REGION 1..1221: note = Description of Unknown: uncultivated organism with predicted taxonomy: Bacteroides
  REGION 1..1221: note = MG16-132 effector
MKKVLGLDLGVGSVGWSLVNVDDNYKPTEILGIGSRIISLSPDESSEFTSGNAASKNQKRTQKRTARKGYDRYQMRRQALTEKLRELKMLPDERLIKLPVLELWTLRAKAATPGEKLTLPEIGRVLYHINQKRGYRHAKSDDSADKEQRDYVQTVNKRYQEIKDEGTTIGQHFAIKLKESEIVTDKGPFYNYRIKEQVFPRDAYIEEFDRIMDCQKTFYPEELSEDNIDEIRNKIIFYQRDLKSCKHLVSQCEFMTRSFLDADHKPILNSSGELVMSGPKVAPKSSPIFQACKIWEEINNLSIRNKENDELHISPEQKKDIFEYLDNNEKINATALYKILGIGKGDGWSVDKALSKGFTGNTTKGAIAKALGKDHNTKKSDLLRFDLRLKENGVNKDTGEIIYEIDPTCENEPLYRLWHVIYSINDKDALRHALTNQFGINDEESLRELTKIDFVKQGYGSRSAKFMRKLLPALMDGARYSEACDMIGINHSGSLTKSENEARELLHKIPQLQKNELRQPVVEKILNQMINVVNAVIDQFGSIDEIRVEMARELKLSKEGRAATAKNIRDREKMNNEMAEKIKELGITPSKNKILKYRLWQESGQKCFYCGQPVGAAEFLSGLDVEIEHIVPKALLFDDSFSNKVCACRKCNAEKSNTTAYDYMKSKGENEFNDYLRRVDAAFNEHKISFTKRSRLLTPADKLPKDFISRQLVQTQYISRKAMEILKQVCHNVYGSSGEVTSYLRRIWGYDEILHSLDLPRYREGGMTAEVSYDHRGQTHTEERIKDWSKRLDHRHHAIDALTIACTRQSIIQRLNNLSAMTAVAGESMSLDKWTLAQPHFSVQEVSDNVSRILVSFKAGKKVTTPGKRYVYRGGKRVLAQKGLLIPRGALCEESVYGRIHSLEKEVPVKKLFERVDDIVKPGIRAAVEERLRACDNDVKVACASLKKEPLYLDVEKTIPLEYGTCYKVEYVMRYALSALKPKDVEYIVDEHIRKVVSERLSEYGNDPKKAFAEPLYADKSKTIPIRALRCYTGLAQVVPVKKDSKGNAIGFVKPGNNHHIAIYRDADGTYHESVVTFWDTVERKKYGLPVIIRKPEEIWDIIIDKNIPEELAAGLPAPDWKFVMSMQQNEMYVLGMEDDEFRDAMEVKDYKTLGAHLYRVQKLTSIDYYFRSQYETTLDDSAGARMMKKFYRIKSIKSLFALHPRKVSVSLLGEMALKDD

SEQ ID NO: 1214 - protein, 1257 aa, unidentified
  REGION 1..1257: note = Description of Unknown: uncultivated organism with predicted taxonomy: Bacteroidales
  REGION 1..1257: note = MG16-133 effector
MKKILGLDLGTTSIGWALINAEDNNKPTEIQDIGVRIVPLAENEGDKFTKGQDITVNADRTRARGQRRNYDRFQLRRQALTEKLRSLDMLPDEHLIKLPVMELWQLRANAVTQKVSLNELGRVLYHLNQKRGYKHSRTDSNDSKQRAYVKEINNRYAELQKLGMTIGQYFAQKLEETAIKQNGKIFYAFRIKEQIYPRQAYEEEYDAIMKCQQTFYPEILTESIIEEIRNRIIYYQRDLRSCKHLVTVCEFEKRCFYDADGNVKRNQKGEIIYDGPKVVPRTSPLFQVFKNWQSINNIRFHNRKNEYLFITKEQKQQIANVMANQEVLKLKDVQEILGVTSKSGWYCDKAIKAGIKGNITKCAIIASLSSLPQSKIREITRFNLETETTNMVDEETGELLVRIKNTYQEEPLYKLWHIIYSIKNDNERLNTIISFLKDFDIEDISISNALNDLDFVTPGYANLSAKAISKILPYMMEGLDYSDSCEYVGYNHSDSLTKEENENRILLDKIPALKKNELRQPTVEKILNQTISIFNEINANLLQKGERVDEVRIELARELKQSKEEREKTDRGIRKQQKANEVFANLLKEQGVRPTRNRILKYRLWRESYETCFYCGQPISFKEFLKFSDVEREHVIPKRLLYDDSFANQVCSCRKCNAEKGGRTAIDYMRTTQHLQPYLEKVDKMFQEHKISGKKHAHLLASYDDYLSRKKEGKETKDDIIIWEEAIERQLRLSQYISKKAQELLKKSCREVIATSGSVTDLIRHTWGYDTILHELNLPCYKEAGLTTFIKEENTGQQKEVIKDWTKRLDHRHHAVDALTVACTSRSIIQHINTLHASREVMRGDVKTPRKEWENNDLLQQWIKEKMPFDRQYVLQKVASILVSMKSGKKSTVPGKRKIYIKGKPIVMQSGLRIPRGQLHEQTVYGAIKQYSKDKKGNLIEKKEIVTRYKMGVGSVGFVFNGKETCDVVFDKKNNRYVIADGIDKAINYIIDKHIRDIVRERLNEAFPDGETYRTEAEIALAAGKTYNGKERSMKALEQLKALYEQPLYADKNKHIVIKSVRCFTGLSAVQPLRYNDKNEPTSFVLTKNNHHVAIYLDEKGELKECIYTFWQAVERSKYKLPLIIKEPKSLWDEILERENNGEIFPDTLITSLPSPNWTFVESLQLNDMFVMDMDDVKFENFISSNNYEEIGKRIYRVQSLSSHDYVFRHHTDTTSSMMPEAALCRKFIRIKSLKAYIEHHPHKVQLSLLGKILTKR

SEQ ID NO: 1215 - protein, 1243 aa, unidentified
  REGION 1..1243: note = Description of Unknown: uncultivated organism
  REGION 1..1243: note = MG16-134 effector
MKKILGLDLGTNSIGWAVVNADENGNPVSIEGMGSRIVPLTADDTNEFTKGNAISKNQSRTEKRTARKGYDRYQLRRNKLTLEFRKLNMLPDEQLIKLQPLELWQLRATAATEGHKLTLPEIGRVLYHINQKRGYKHAKSDESADTKQKAYVAEVNARYAMIKERKQTIGQFFAEKLKENEIETSKGKLYTYRIKEQVFPRRAYEAEFDQIMECQRVFYPDVLTNEEINRLRNEIIFYQRKLKSCKHLVSLCEFEKREYKNKDGKIVIDGPKVAPKSSPLFQVCKIWEEINNITLRNRRNDELYISMDQRQAMFDFLDTHEKMTLSDLYSILGISKNDGWWGGKAIGKGLQGNTTKIALKNALGDFENADNLLQFKLESIDSNFVDEETGEIIQIINPNLEKEPLYDLWHTVYSISDKEELANALKKKFNINDEDIINNLYAIDFVKPGYGNKSAKAIRRILPYLQQGLKYSDACEYAGFRHSESLTKTENEQRQLLDKLPAIQKNALRQPIVEKILNQMINVVNALMVEYKEHFYSIRVELARELKQSKDDRNTTYLQNEAMERLNDAIAKRLNSEGIKTTKRILEKYKYIFPTKGCIDKKTGKFVSKNFENLSTVNQCIYCGKSFSLTAALNGDGYEVEHIIPRDLICDNSQSNKVLSCRSCNSKKSNKTAFDFMRGQGEQALEDYIARIEKWYKDGIISPAKREHLLLSHEDYLKRKKEGKTTDEDKKYWEDFVSRQAGETQYISREAIKILKQCCKNVNATSGAVTAILRHLWGYDEILHQLDFERYKKAGLTKIVTWESDHGKNKHTKEQIVNWTKRIDHRHHAIDALVIACTQQGFVQRINTLNADETKDLMKKQIESSGVKFEEKKDLLNKYLASLTPFSTQTVADNVDKILVSFKAGKKSASTGKRIKYVKGKKVVLQKGIIIPRGALHEEGVYGQIEINGKKEIVKKYKLGKGAQGFVFTGKETYEKKVNNKTGEIHVVDKIKNVLDSIVDVNIRSKILQRLNQGFEDGKDYRDDVKKALDNLNDLDKNPIFADDNNTIPIRTVRCRTGLSAVVPIKHNEKGEPIGFVKPGNNHHIAIYSDKNGNLHEHTVTFWHAVERKKYGIPVIIENPQSVWDSIIDKQLPESFLENLPDVKWTFEISLQQNEMFVLGMENESFEDAVRNNDFSTISKYLYRVQSISESDYWFRLHIETQNDKTPSAKLANKYHRVKSLKSFHELNPHKVYISVIGKIKAL

SEQ ID NO: 1216 - protein, 1078 aa, unidentified
  REGION 1..1078: note = Description of Unknown: uncultivated organism with predicted taxonomy: Porphyromonas sp. oral taxon 278
  REGION 1..1078: note = MG16-135 effector
MKRILGLDLGTNSIGWAVVNTDENDKPVSIENMGSRIVPLTSDDTNEFTKGNAITKNQARTVKRTARKGYDRYQLRREHLTAELRKLKMLPDERLIKLPVLELWELRGRAASKGNQLTLSEIGRVLYHINQKRGYKHAKSDESADTKQKAYVAEVNARYAMIKERNQTIGQFFAEKLKENEIETSKGKFYTYRIKEQVFPRKAYEAEFDQIIECQKEFYPDILTNEEINRLRNEIIFYQRRLKSCKHLVSFCDFEKREYINKVGKVVYGGPKVAPKSSPLFQLCKIWEEVNNLTLRNRKNDELFITIEQRQAMVDFLDTHEKLTLSDMYSILGISKQDGWWGGKAIGRGLQGNTTKIALKKALGDFVNADTLLQFNLKQTDSNLVDEVTGEILQVIDPKLEKEPLYDLWHTIYSISDKEELANALKKKYNIHDEDIINRLYAIDFVKSGFGNKSTKAMRRILPYLQQGLKYSDACEYAGFRHSDSLTKAENEARQLLEKLPPVQKNALHQPIVEKILNQMINVVNALMIEYGQFDSIRVELARELKQSKDERNVTFLQNEAMQRLNDSIANRLSSEGIKPTKRTIEKYKFIFPTKGCFDKRTGKFITKNFENLSTVNRCIYCGQPFSLSAALNGDGYEVEHILPRDLICDNSQSNKVLSCRKCNSIKSNKTAFDFMRSQGEHAFETYLERVESWYKDGIISPSKRERLLLSHEDYLERKRKDKATDIDKKYWEDFVSRQAGETQYISREAIRILKQCCRYVNATSGSITATLRHLWGYDEILHQLNFERYKQAGLTKIVTWESNHGKNKHSKEQIVDWSKRIDHRHHAIDALVVACTQQGFIQRINTLNADETKDLMKKQIESAGIKYEEKKVLLDKYLISLIPFKTQIVADAVNKILVSFKAGKKTATIGKRIEYKHGNKHIVQKGIIIPRGALHEEGVYGRIEINGKKEIVKKYKLGKGAQGFVFTGKETYAEKINKKTGGIQIEDKIKNVLDSIVDSNIRAKVLQRLNQGFEEGQDYRNNVKKALDNLNNLDDNPIFADKNNTIPIRTVRCRTGLSAVVPIKKNERGEAIGYVKP

SEQ ID NO: 1217 - protein, 1217 aa, unidentified
  REGION 1..1217: note = Description of Unknown: uncultivated organism with predicted taxonomy: Bacteroidales
  REGION 1..1217: note = MG16-136 effector
MRKILGLDLGVGSIGWSLIETDAEDNPKAILGMGSRIVPLSTDDANEFSSGNAISKNQKRTQKRTQRKGYDRYQLRRALLTQKLRELGMLPDERLIKLPVLELWQLRADAATPGKQLELKEIGRVLYHINQKRGYRHSRSDDGEDKSQKDYVQQVNQRYREILDEGTTIGQHFSKKLADNEVITPKGKFYTYRIKEQVFPRDAYVEEFDRIMECQRRFYPDLLTESTIREIRDEIVFFQRPLKSCKHLVSVCEFAMREYKTKEGKSILAGPKVAPRSSPLFQVCKIWESVNNLSLKNRSGEVYHFSQEERRKMFDFLDNHDKMAVTDLYKLLGISKKEGWWGGKAIGKGLQGNTTKAALAKALGERQDLLQFQLETIDSRQIDTETGEVLKTISPSFEKEPLYRLWHILYSMHERSEVAAALERQFGITAPDTVDRLFAIDFVKAGYGNKSARFIREILPYLQAGMQYSQACDYIGINHSNSLTIEENASRVLLDRLPQLQKNELRQPVIEKILNQMVAVVNALLSQYGPIDEIRVELARELKQSRDERNDAYLSINKRERENKVIEERIREYGISPSKSRIQKYRLWEESNHLCFYCGHPVGAAEFLSGSGVEIEHIIPRSLLFDDSFANKVCACRQCNAEKGNSTAFDYMKSKPANDFEDYLKRVEKYFTEKRISKTKRERLLTPASEIPQDFIDRQLRQSQYISKKAVEMLKLVCRNVWTTSGSITDFLRHNWGYDQILHDLNLPRYSLGGMTESVHYEHNGQKHEEERIIGWTKRLDHRHHAIDALTIASTQQSYIQRLNTLSASRDVMHAEVEKQGVQWQEKHSLLEEWTAQRPHLPYSTVRDYVDGILVSFKPGKMVATPGKRYTYKNGKKELVQDGLLIPRGALSEESVYGQITTIEPSVPVKKLFEDPSLIFKPYIRELVERRIKECGGDWKKARASIGKKPIWLDTEETVALEFATCWKKEYVIKYPVSSLKAKDVDSIVDRHIREIVRKRIDEVGEKEAFKTPIYTDDAQSIPLRSVRLFTGLDAVEPVKYVDGVPVGFSKPGNNHHIAIYRDQDGNRSEHVVSFWHAVERKRYGLPVIIRDTDSVWEQIEGESLPESFLKNLPQPGLKLELSLQQNEMLILGMKEDEFNDAIREKDTRRLNKHLYRVQKLSTMYYVFRYHTETQIDDSKGALEMHKFYRTVSFRALDALFPRKVRISVTGELIPIQ

SEQ ID NO: 1218 - protein, 1045 aa, unidentified
  REGION 1..1045: note = Description of Unknown: uncultivated organism with predicted taxonomy: Prevotella
  REGION 1..1045: note = MG16-137 effector
MKKILGLDLGTTSIGWALVNVDDNNNPVDIQDIGVRRVPLSENEGDKFTKGQDITVNADRTRARGTRRNYDRYQLRRQALTEKLRQLNMLPDENLIMLPIMDLWQLRADAVTKKVSLNELGRILYHLNQKRGYKHSRTDANDSKQREYVKEINNRYAKLLESKMTIGQLFANKLAETAVVQDGKIFYNYRIKDQIYPRNAYEEEYDAIMKCQQKFYPEILTDAIIDEIKNRIIYYQRDLRSCKHLVSICEFEKRCFYDEDGNVKRNKKGDIFYDGPKVAPRTSPLFQVFKDWQSINNLRFHNRRNEYLYITKEQKEQIADFMEHHEILKLKDVQSLLDITAKSGWYCDKAIKAGIKGNSTKCAILSSLSSLPHSKIAEITRFNLETETTNIVDEETGEMLVRIRNTYQNEPLYRLWHIIYSIKNDNERINAISKFLKEFEVEEETVINSLKDIDFVTPGYANLSAKAICKILPYMMEGLDYSDSCEYVGYNHSDSLTKEENEKRELLDKIPALKKNELRQPTVEKILNQTINVFNQINEDLSKDGERISEVRVELARELKQSKDERNETEIGIRKQQKLNDEYAKILKEEGVRPTRNRILKYRLWRESNKSCFYCEQPISFHEFLDFSETEREHIIPKKLMYDDSFANQVCSCRNCNKEKGGRTAMDYMRTKQNLQFYLDKVDKMFQDHKISGKKRSHLLASYDDYLFRKENGKETKDDILIWEKPIERQLRLSQYISRKAQELLRMTCRDVTVTTGEITALIRHTWGYDTILHDLNFSSYKEAGLTEIVKGEDSGRTREIIKDWSKRLDHRHHAIDALAVACTSRSIVQRINTLNASREEIRGEIKAPRKEWKDSNLLQQWIKEKMPFDRQYVLHKVASILISMKAGKKATVPGKRKIYKKGKPIVIQTGLRIPRGQLHEKTVYGAINQYDKGQKVMKIVTRYKMGVGSMGYVFNGKETCDVIKKKNRYEIVDGIQKALDYIVDKHIREIVKARMNEAFPEGETYLTEAEKALAEGKAYDGKARCQKALDQLRTLSERPLYADK

SEQ ID NO: 1219 - protein, 1217 aa, unidentified
  REGION 1..1217: note = Description of Unknown: uncultivated organism
  REGION 1..1217: note = MG16-138 effector
MKRILGLDLGVGSIGWSLIQADEDGNPQSIIDIGCRIVPLSPDDTNEFSSGNAISKNRKRAQKRSVRKGYDRYQLRRQNLTDELRGLGMLPDERLIKLPILALWQLRANAATPGKRLTLPEIGRIFYHINQKRGYLHSKSDEEDKNQRDYVQAINNRYATIKAEGKTIGQYFAQKLADSEVTTDKGKVYAFRIKEQVFPRQAYQEEFDQIIACQRIHYPEVLTDDVIHRLRDEIIFYQRPLKSCKHLVSLCEFAMREYKTTDGRSIQAGPKVTPRSSPLFQVCKIWESVNNIELKNRDGESYPFSAEERLKLFNFLDNNEKMTVTDLKRILGLGTKDKWWGGKAIGKGLQGNITKMALKKALPYHEELLSFNLKSIESRHIDTETGDILLEIAPDFEQEPLYRLWHIIYSMKDPDEMASALNRQFGIDDPTILTNLTRIDFVKAGYGNKSARFIRQILPYLQKGMKYSEACDYISINHSNSLTTAENNSRELLPHMQQLQKNELRQPVIEKILNQMVNVVNALLDKYGSIDEVRVELGRELKQSRDERNSAFLNNNKRERDNKAISERIQEMGIRASRSRILKYRLWEEAKHICFYCGQTVGVKEFLEGTDVEIEHIIPRSLFFDDSFSNKVCACRKCNAEKGNRTAYDYMKQKSDNDFADYTRRIEDAYEKKEISKTKRERLLTTAKDIPEDFIDRQLRQSQYISKKAVEMLKQVCRNVWTTSGSVTDFIRHQWGYDNILHDLNFKRYKDAGQTEIIISDHLGQVHQEERIKNWTKRLDHRHHAIDALTIASTKQSYIQRLNHLNSSRDKMFQELEAQSKEVKEKYSLLESWMRCRPHIPVSVVSQAIDGILVSFKTGKRITTPGKRFIYKSGKREVAQYGIAVPRGALSEESVYGSISCLEANVPVKKLFEHPEIIFKPYIREKVEKRINEFSGDWKAALKSLKKTPIFLRADGTEPLEYATCWKREYVIRYPLASLLKKDLPFIVDRNIRRLVSERINAVGEKDAFKEPLFADKADINPIRSVRLFTGLTQDSLSPVKYFNGYPIGYSKPGNNHHFCYYRNKNGELFEHIVSFWHAVDRKKYGIPVIIEDTDVLWEDMANRDLPQDFLKNLPPAGLKLEVSLQQNEMFVLGMPEEDFQNAIKENDQRALNKYLFRVQKISGQYNVFRRNTDTGKDEDSKAQSLGQFVRISSVRGWIHCCPHKVRISVLGEISEI

SEQ ID NO: 1220 - protein, 930 aa, unidentified
  REGION 1..930: note = Description of Unknown: uncultivated organism with predicted taxonomy: Bacteroidales
  REGION 1..930: note = MG16-139 effector
MKKKILGLDLGVGSIGWALIKTDDNQPKQIIGMGSRIVPISKDDNDQFSKGQAISKNADRTARRTTRKGYDRYQLRRALLTDVLRQNGMLPERMDEHVIDLWKLRSDAATEGHQLTLPQIGRVLYHINQKRGYKHAKADDNGDSKQTKYVEAVNQRYTDLQAEGLTIGQHFHLELLHSKVEGASGPYYTFRIKDKVFPRAAYIAEFDQIMRVQRVYYPEILTDELIDVLRNRIIFYQRPLKSCKHMVSLCEFEMRPYKTKDGRIVYGGPKCAPRTSPLAQFCAMWETANNITLTNRNNERYEFTLDARAQIVKHLCEHAVLKLTDLYKILGITKKDGWWGGKAIGKGIKGNATLNQLRDALDGKYGEWLEMPVEIEDKVNDATGEVVKTVSAEVEHAPLFQLWHAVYSLQNADELAKTLREKFQITDEAVIEALCKIDFVKPGYANKSHKFIRRILPYLMDGYMYNEACAKVGINHSNSMTAAERDARPLAERIELLQKNALRQPVIEKIINQMINLVNRLQQEYGPIDEARVELARELKQSRDERESAYKAINKNERENSTIANRILEDYGIRPSRSRIQKYRMWEESKQRCFYCGKMIDVKQFLSGADVEIEHIVPRSILFDDSYSNKVCACRECNQEKGNLTAMEYMEGKPTGEFEAYKQRVDEAFSEHRISKTKRDHLLWRRADIPQDFIERQLRQSQYIAVKAVEILQQGIRRVWTSGGSVTDFLRHQWGYDEILHTLNLPRYKQVDEMTEWVHYEHAGQEHEVERIKNWTKRLDHRHHAIDALTVALTQQSMIQRLNTLEASHDEMEKQVKEANTPYKEKKSILEKWVTEQPHFEVSEVTDKVDSILVSFRAGKRVTTPARRAIYQGGKRTIVQTGIQVPRGALTEETIYGKSGDKFVVKYPLDHPSMKPENIVDPTIRALVEK

SEQ ID NO: 1221 - protein, 830 aa, unidentified
  REGION 1..830: note = Description of Unknown: uncultivated organism with predicted taxonomy: Fibrobacter
  REGION 1..830: note = MG16-140 effector
MKKILGLDLGVSSIGWSVISVDKNGDPSEILGMGSRIVPLSTDDANEFSTGNAISKNQKRTQKRTARKGYDRYQLRRENLTAELRKHQMLPDERLIKLPVLDLWTLRANAATEGCKLSLPEIGRVLYHINQKRGYKHAKADEAGDKKQTEYIENVNKRFAMIKELGLTIGQFFANKLKESEVVSEKGTFYTYRTKEQVFPRGAYIAEFDQIIEVQRKFYPQVFTDEFINRLRNEIIFYQRNLKSCKHLVSLCEFEKREYKNKDGKIVFDGPKVAPRTSPLFQICRIWEFVNNIRLENGYKEARVLSQEERLKVVDFLDNHEKMTAKDFTKLLRLDKNDEWDLKRYFGKNGVQGNTTKAQLVTALANIPNACEFLRFNLALENSNYVNESTGEILKVISSNFQNEPLYMLWHTVYSLSDKEELKNALNKKYGITDESVLNNLFKIDFIKPGSGNKSAKAIRRILPFLQDGLVYSDACAEAGYNHSNSLTKSENEARTLLSRLPQIKKNELRQPVIEKILNQMVNVVNAIYDEYGQIDEIRVELARELKQSKDERNTTASNIAKRERENKNIEAKIQEFGIRSSRNRIQKYRLWEESEQKCFYCGQPVQAKEFLSGLDVEVEHVIPKSLLFDDSFANKVCACRKCNAAKGNKTAYDFMKGQKEEVFDAYVKRVNDFYKDGKISKTKKERLLTTQSEIPSDFIERQLRQTQYIAKKALEMLKEICYNVYATSGSVTDFIRRTWGYDEILHQLNFDRYKKGGLTELREYEHKGETHTEERIQDWSKRLDHRHHAIDALVIAMTRQSIIQRLNHLNTERDAMFQEVEKQRKDWKN

SEQ ID NO: 1222 - protein, 797 aa, unidentified
  REGION 1..797: note = Description of Unknown: uncultivated organism with predicted taxonomy: Bacteroidales
  REGION 1..797: note = MG16-141 effector
MKKHILGLDLGVGSIGWALIETEDDQPKQIIGMGSRIVPISKDDSDQFSKGQAISKNADRTARRTTRKGYDRYQLRRALLTQVLRQNGMLPERMDENVIDLWKLRSGAATEGHQLTLPQIGRVLYHINQKRGYKHAKADDNGDSKQTKYVEAVNQRYKEIQEAKQTIGQHFYLELLRSKVESGSGPYYTFRIKDKVFPRAAYIAEFDQIMKVQRAYYPDVLTDELIDTLRNRIIFYQRPLKSCKHLVSLCEFEMKPYKTKDGKIVYGGPKCAPRTSPLAQFCAMWETANNITLTNRNNEQYDFSLEERRQIVEHLCTHEALKLTDLYKILGITKKDGWYGGKAIGKGIKGNATLNQLRKALNGKYGEWLEMPIERVDVVDNETAEVFWQVSPKVEETPLFKLWHAVYSIQDADELAKTLRNKFGIDDQDVIEALCKIDFVKPGYANKSHKFIRRLLPYLMEGMMYSEACARIGINHSNSMTAAERDARPLAERIELLQKNALRQPVIEKILNQMINLVNRLQQEYGPIDEARVELARELKQSREEREGAYRRNNQNERLNKEIAAKIEEMGIRPSRSRIQKYKMWEESNHRCMYCGKTVSLAEFLNGADVEIEHIIPRSILFDDSFSNKVCACRECNHEKGNMTALDYLETKPAAEVEAYKQRVDEAFKEGRISKTKRDHLLWHKSDIPTDFIDRQLRQSQYIAVKAVEILQQGIRQVWTSGGSVTDFLRHQWGYDEILHTLNLPRYRKVEDLTEIVHYEHAGQEHDEERIKNWSKRIDHRHHAIDALTVALTRQAY

SEQ ID NO: 1223 - protein, 1154 aa, unidentified
  REGION 1..1154: note = Description of Unknown: uncultivated organism with predicted taxonomy: Bacteroidales
  REGION 1..1154: note = MG16-142 effector
MKKKILGLDLGVGSIGWALIETENDQPKQIIGMGSRIVPISKDDNDQFSKGQAISKNADRTARRTTRKGYDRYQLRRSLLTQVLRQNGMLPERMDENVIDLWKLRSDAASEGHQLTLAQIGRVLYHINQKRGYKHAKADNNGDSKQTKYVEAVNQRYKEIQESKQTIGQHFYLELLRSKVDGVRGSYYTFRIKDKVFPRAAYMDEFDQIMRVQRDYYPDVLTEELIDTLRNRIIFYQRPLKSCKHLVGLCEFEMRPYKTQEGNIVYSGPRCAPRTSPLAQLCAMWESVNNITLTNRNNERYEFSLEERQQIVEHLCTHEVLKITDLYKILDISKKDGWYGGKAIGKGLKGNTTLNQLRKALNGKYQEWLEMPIERVDDVDNTTAEVFWVVSPKVEETPLFKLWHAVYSLQDTDELAKTLCSKFGITDQEVIEALCKIDFVKPGYANKSHKFIRRLLPYLMKGMMYSEACERIGINHSNSMTAAERNARPLAEHIELLQKNALRQPVIEKILNQMINLVNRLQQEYGPIDEARVELARELKQSREERESAYKAINKNEHENAERAAKIAEFGIRPSRSRVQKYKMWEESQHRCFYCGKMVDLAQFLNGADVEIEHIVPRSILFDDSFSNKVCACRECNKEKGNLTAMEYIETKPVGEQEAYKQRVAEAFDAHRISKTKRDHLLWRRADIPQDFIERQLRQSQYIAVKAVEILQKGIRTVWTSGGSVTDFLRHQWGYDEILHTLNLPRYRQVDELTEMVHYEHAGQEHDEERIKNWTKRIDHRHHAIDALTVALTRQSYIQRLNTLEASHDIMEKQVKEAGTQYNEKKSILEKWVAEQPHFPVADVTENVDGILVSFRAGKRVTTPARRAIYKGGKRTIVQTGLQVPRGSLTEETVYGRLEDKFVVKYPLDHPSMKPENIVDPTIRALVQKRVEEKGKDAFKEPIYSAEGMKIKSVRCYTSLSENGVVPVKFDEKGQPIGFAKKGNNHHVAIYQDKDGQYQEMVVSFWDAVERKKYGVPSVITNPRELWNSIMDIDLPQEFLLKLPQDDWQYVLSMQENEMFVLGMEEDEFHDALERHDYCSLNKHLYRVQKISHGEYVLRYHTETKVDDKYKGVEKGRDASLKLGALVSIRSFGSLFSKFPHKVKIDIMGRITKA

SEQ ID NO: 1224 - protein, 1048 aa, unidentified
  REGION 1..1048: note = Description of Unknown: uncultivated organism with predicted taxonomy: Deminuibacter soli
  REGION 1..1048: note = MG16-143 effector
YCDLLQICIGKYDVFFRLFKQMRKILGLDLGVGSIGWSLIETDANDNPVAILGIGSRIVPLSTDDANEFSSGNAISKNQKRTQKRTQRKGYDRYQLRRALLTEKLRESGMLPDERLIKLPVLDLWQLRANAATPGKQLELKEIGRVLYHINQKRGYRHSRYDDGDEKSQREYVQQVNQRFRDIRDEGVTIGQHFANKLAENEVTTPKGKFYTYRIKEQVFPREAYVEEFDRIMDCQRGFYPDILTDSTIGVIRDEIIFYQRPLKSCKHLVSVCEFAMREYKTSDGKSVLSGPKVAPRSSPLFQVCKIWESINNLSLKNRSGQVYRFSDEDRQKMFDFLDNHDRMTVTDLYKLLSISKKDGWWGGKAIGKGLQGNTTKAALAKVLGSRSELLRFQLETIDSKRIDTETGEILKVISPSFEKEPLYRLWHIVYSMHERSEVAAALERQFGITDPETVDKLFSIDFIKAGYGNKSARFIREILPYLQVGMQYSDACNYIGINHSNSLTTEDNASRVLLDKLPQLKKNELRQPVIEKILNQMVAVVNALLSQFGPIDEIRVELARELKQSRDERNDAFLKNNKRERENKVIEERIREYGITPSRSRIQKYRLWEESNHLCFYCGQPVGAAEFLSGSGVEIEHIIPRSLLFDDSYANKVCSCRKCNAEKGNSTAYDYMKAKPEGDFEDYLKRIEKFFSEKRISKSKREKLLTPASEIPQDFIDRQLRQSQYIAKKAVDMLKQVCRNVWTTSGSVTDFLRHNWGYDQILHDLNLPRYKEGGMTEMVHYEHNGQEHDEERIIGWTKRLDHRHHAIDALTIASTRQSYIQRLNTLYASRDAMHAEIKKQSAHWQEKHSLLEEWTKQRPHLPVSVVRDSVDGILVSFKPGKRVATPGKRYTYKGKKELIQDGLLIPRGALSEESVYGQITTLEEHVPVKRLFEDPSLIFKPYIRHLVEQRIEEFHGDWKKARLSIGKKPIWLDEGETVALEYATCWKKEYVIRYPVSSLKAKDVNSIVDRHIREIVRKRIDEVGEKDAFKTPLFSDATQMIPVNGIR

SEQ ID NO: 1225 - protein, 1244 aa, unidentified
  REGION 1..1244: note = Description of Unknown: uncultivated organism with predicted taxonomy: Bacteroidales
  REGION 1..1244: note = MG16-144 effector
MKRILGLDLGTTSIGWAVINVDDNLKPVSIESMGSRIVPLSSDDTNEFTKGNAISKNQSRTERRTSRKRYDRYQLRRKYLTAELRKLKMLPDERLIKLPTLELWELRANAASKGHQLTLPELGRVLYHINQKRGYKHAKSDDSSDTKQKAYVAEVNARYSMIKEKNQTIGQYFAEKLKESEVVTPKGKFYTYRTKEQVFPRKAYEAEFDQIMECQKVFYPNLLTEKEISKLRNEIIFYQRNLKSCKHLVSVCDFEKKEYKNKEGKIVFGGPKVAPKSSPLFQICKIWEEVNNLTLKNRKNEELYISLEQRQAMVDFLDTHEKMTLNDMYTILGISKKDGWWGGKAIGRGLQGNTTKIALMNALGNSENVKSLFQFNLHKIDSQLVDEVTGEIIQIIDPKLEKEPLYDLWHTIYSISDKEEFAKALKKKYNITDETIINGLYSIDFVKPGFGNKSAKSIRRILPYLQEGLKYSDACEYAGFRHSESLSKAENETRTLLDELPHINKNELRQPIVEKILNQMINVVNALMNEYGKFDSIRVELARELKQSKDERNTTFLQNEAMQRLNESIAKRLVSENINPTKRIIDKYKFIFPTKGCFDKRTGKFITKNFESLSTVNRCIYCGQSFSLSEALNGDGYEIEHILPRDLICDNSQNNKVLSCRKCNSIKSNKTAFDYMRTQDKNAFEAYLERVESWYKDGIISPAKRERLLLSHEDYLERKRIGKETDEDKKYWEEFVSRQAGETQYISRESIRILKQCCRNVNATSGSITATLRHLWGYDEVLHQLNFERFKNAGLTETVTWESNHGKNKHSKEQIIDWSKRVDHRHHAIDALVVACTQQGFIQRINTLNADETKDLMKRQIETVGVKYDEKKILLDKYLTSLAPFKTQTVANAASNILVSFKPGKKTATTGKRIEYRNGKKHVVQKGIIIPRGALHEEGVYGEIEINGKKHIVKKYKLGKGAQGFVFTGKETYTEKINKKTGEIQIEDKIKNVLDSIVDGSIRAKVLQRLNQGFEEGKDYRNDVKKALENLNDLDKNPIYADDNNTIPIRTVRCITGLSAIVPIKYNDQGKSIGFVKPGNNHHIAIYQDNEGNLREHSVTFWHAVERKKYGVPVIIDNPIQVWDSIKDRQLPESFLEKLPEVNWTYKISLQQNEMFILGMEDDAYDYAIRNQDYSTLGQYLYKVQNVSEKQYRFSLHNMTKFDIKRMNKADKCFYNIQSIDALFRLHPHKVHISLIGKIKEIQE

SEQ ID NO: 1226 - protein, 1266 aa, unidentified
  REGION 1..1266: note = Description of Unknown: uncultivated organism with predicted taxonomy: Bacteroides
  REGION 1..1266: note = MG16-145 effector
PFTQIFLYFFAIFAKNKKQIIQYTMKKILGLDLGTNSIGWAVVNAEENWKPVSIESMGSRIIPLSSDDTNEFTKGNAITKNQSRTEKRTARKRYDRYQLRREYLTATLRKLKMLPDESLIKLPILELWELRGKAACKGQQLSLPELGRVLYHINQKRGYKHAKSDESSDTKQKAYVAEVNARYAMIKKRNQTIGQYFAEKLKESEIETPKGKFYTYRTKEQVFPRKAYEAEFDQIMACQKVFYPDILTEKEINKLRNEIIFYQRRLKSCKHLVSICDFEKQEYKNKEGKIVFGGPKVAPKSSPLFQICKIWEEVNNLTLKNRKNDELFISLEQRQAMVDFLETHEKLTLSDMYAILGISKKDGWWGGKAIGRGLQGNTTKIALKKALGDFENAERLLQFNLYKTDSNLVDDTTGEIIQIIDSKLEKEPLYDLWHTIYSISDKEEFGKALKRKYNITDEDIINRLYSIDFVKPGFGNKSTKAMRRILPYLQEGLKYSDACEYAGFKHSESLTKSENEARPLLDMLPSINKNELRQPIVEKILNQMINVVNALMNEYGKFDSIRVELARELKQSKDERNTTFLQNEAMQRLNESITKRLESENIKPTKRIIEKYKFIFPTKGCFDKRTGKFITKNFEDLSTINYCIYCGQPFSLSAALNGDGYEVEHILPRDLICDNSQNNKVLSCRRCNSIKSNKTAFDFMRSQEKNAFEAYLERVETWYQDGIISPGKRERLLLSHEDYLERKRLGKETDEDKKYWEEFVSRQARETQYISRESIRILKQCCRNVNATSGAVTAILRHLWGYDEILHQLNFERYKNAGLTETVIWESNHGKNKHSREQIVDWSKRVDHRHHAIDALVVACTQQGFIQRINTLNADETKGLMKKQIETAGLKYVEKMALRDKYLISLTPFKTQAVANAVNNILVSFKPGKRTATTGKRIEYKEGKRHIVQKGIIIPRGPLHEEGVYGSIKINGEKQIVKKYKLGKGAQGFVFTGKETYEEKVNKKTGEIQIEDKIKNVLDSIVDGNIRTKVLQRLNQGFEEGKDYRNDVKKALENLNNLDKNPIYADDNKTIPIHTVRCITGLSAIVPIKYNNQGKPIGFVKPGNNHHIAIYQDEEGNLKEHSVTFWHAVERKKYGIPVIIENPTKLWDEIKDKQLPESFLEKLPEVNWTFKVSLQQNEMFILGMEDDTYDVAMGNKDFTLISKFLYRVQSISESDYWFRLHIESQNDKTPQAKQAKKFHRIKSLKGFYQLHPHKVHISVIGKIKEL

SEQ ID NO: 1227 - protein, 1218 aa, unidentified
  REGION 1..1218: note = Description of Unknown: uncultivated organism with predicted taxonomy: Bacteroidetes
  REGION 1..1218: note = MG16-146 effector
MKKILGLDLGVGSIGWSVIQADEEGNPASLLDIGCRIVPLSTDDANEFSSGNAISKNQMRTQKRTTRKGYDRYQLRRQYLTEELRKLGMLPNERLIKLPVLDLWQLRAYAATPGKKLSLPEIGRVLYHINQKRGYQHSKSDDSDDKSQRDYVQTINNRFATIKTEKKTIGQFFVERLAESEVLTDKGKFYTFRIKEQVFPRKAYVEEFDQIISCQKVYYPDILTDDEIHILRDEIIFYQRPLKSCKHLISRCKFALREYKTADGESIIAGPNVAPRTSPLFQVCKIWESVNNIELKNRDGDSYQFSMEDRQKLFDFLDNNEKLTVTDLKKVLGLNSKDKWWGGKAIGKGLQGNTTKIAIKKALQGHLELLSFNLKSIDSQHIDTQTGEILHEISPDFEKEPLYRLWHIVYSMADPEEMGAAIKRQFGIEDPEILSRLSKIDFVKAGYGNKSARFIRQILPYLQKGLKYSEACDYISINHSNSLTTAENNARKLLSHIPQLQKNELRQPVIEKILNQMVNVVNALIDKHGGIDEVRVELARELKQSKDERNSTFLNNNKRERENKIIEERIAEMGIRPSRSRILKYRLWEEAKHICFYCGQPVGVKEFLEGAEVEIEHIIPRSLFFDDSFANKVCSCRKCNAEKGNRTAFDYMKQKGENEFSDYSRRIEEAFEKKEISKVKRERLLTSAKDIPEDFIDRQLRQSQYISKKAVEMLKQVCRNVWTTSGSVTDFVRHHWGYDNIIHDLNFQRNKNAGQTAIITYEHRGQTHQEERIKEWSKRLDHRHHAIDALTIASTKQSYIQRLNHLNTSRDAMFQELEAQSEEFKEKYSLLERWIKERPHIPVSEVTEAVDGILVSFKAGKRVSTPGKRYTYKKGKRSVAQTGIVVPRGALSEESIYGAISCLEEHVPVKKLFEHPEIIFKSYIREKVENRIREFGGNWKAALQSLKKTPIYLGIDETKPLEYASCWKKEYVIRYPLSSIRKKDVDYIVDQHIRHLVSERIAAVGEKDAFREPLYADKAGKMPIKSVRLFTGLTDSSVSPVKYSHGLPIGFSKPGNNHHYCFYRNRDGELVGHLVSFWHAVERKKYGIPVIIKDTDRLWEEVANRDLPEDFLKNLPPSGLTLEVSLQQNEMFILGMPEEDYQRAIEKSSKNDLNKYLYRVQKISGQYNVFRRNTDTGKEEDSIAQSLGQFIRISSTKGWISYNPHKIHIDILGDICEL

SEQ ID NO: 1228 - protein, 1160 aa, unidentified
  REGION 1..1160: note = Description of Unknown: uncultivated organism with predicted taxonomy: Bacteroidales
  REGION 1..1160: note = MG16-147 effector
MKKKILGLDLGVGSIGWALIETEDNQPKQILGMGSRIVPISKDDNDQFSKGQAITKNADRTARRTARKGYNRYQMRRALLTQALRNNNMLPERMDENVIDLWKLRSDAATEGHQLTLPQIGRVLYHINQKRGYKHSKADENGDSKQTKYVEAVNQRFKDIQEAHQTIGQRFYLELLRTRVHREKGDYYTYRIKDQVFPRAAYIAEFDQIMHVQRVYYPEVLTDEFIDTLRNRIIFYQRPLKSCKHLVSLCEFEMRPYKTKDGKIVYGGPKCAPRTSPLAQLCAMWETANNITLTNRNNERFEFTLEQRRQIVDFLCHNKEMKVTHLQKILGISKKDGWYGGKAIGKGIKGNATLNQLRETLQGKYDQWLEMPIKHVDVVDATTSEVFWAVSPEVEETPLFKLWHAVYSLQNADELAKTLREKFQIFDEAVIEALCKIDFVKPGYANKSHKFIRRLLPYLMEGMMYSEACERININHSNSMTREEREQRPLSARIQLLQKNQLRQPVVEKVLNQMINIVNSLKDQYGEIDEARVELARELKQSREERESAYRAMGQNERRNKEIAEKISEFGIRPSRSRIQKYKMWEESMHQCFYCGKTIDLSEFLNGADVEIEHIIPRSILFDDSFSNKVCACRRCNQEKGNQTAMEYMETKSAAEQEAYKQRVDEAFTAKRISKTKRDHLLWRKADIPADFIERQLRQSQYIAVKAVEVLQDGIRHVWTSGGSVTDFLRHQWGYDEILHTLNLPRYRQVEGLTEYVEFEHAGQKHTEERIKNWSKRIDHRHHAIDALTVALTQQGYIQRLNTLEASHDLMEKQVKEAGTHYNEKKSILEKWINEQPHFSVEDVTNVVKGILVSFRAGKRVTTPARRAIYKGGKRVIAQRGIEVPRGALTKDTIYGKQGESYVVKYPLTHQSMKADNIVDPTIRALVKARLAAYNNNANEAFKTPLYSAEGMEIKSVRCVARLTENGVIPIKYNKQGMAIGYAEKGNNHHVAIYKEKDKKTFDITVSFYDAVERKRYGVPVVITNPHEVWDSVLNKDLPQEFLAKLPNDNWQFILSMQENEMFVLGMEDDEFDDAIERQDYATLNKHLYRVQKIAHNDYWFRYHTETTVDDKYGDGEDNKVNLGWSVEMGKVCRIRSCDALFAKHPHKVKVDLLGHIHKA

SEQ ID NO: 1229 - protein, 1154 aa, unidentified
  REGION 1..1154: note = Description of Unknown: uncultivated organism with predicted taxonomy: Bacteroidales
  REGION 1..1154: note = MG16-148 effector
MKKKILGLDLGVGSIGWALIETEDNQPKQILGMGSRIVPISKDDGDQFSKGQAITKNADRTARRTARKGYNRYQMRRALLTQALRNNNMLPERMDENVIDLWKLRNDAATEGHQLSLPQIGRVLYHINQKRGYKHSKADENGDSKQTKYVEDVNKRYKDIQEAHQTIGQHFYLELLRSKIERANGPYYTYRIKDQVFPRAAYIAEFDQIMNVQRVYYPEILTDEFIDTLRNRIIFYQRPLKSCKHLVSLCEFEMRPYKAKDGKIVYGGPKCAPRTSPLAQLCAMWETANNITLTNRNNERYEFTLEQRRQIVDFLCHNKEMKVTHLQKILGISKKDGWYGGKAIGKGIKGNATLNQLREALQGKYDQWLEMPIKRIDVVDATTSEVFWAVSPEVEETPLFKLWHAVYSLQNADELTKTLREKFQITDEAVIEALCRIDFVKPGYANKSHKFIRRLLPYLMEGMMYSEACERININHSNSMTREEREQRPLSARIQLLQKNQLRQPVVEKVLNQMINIVNSLKDQYGEIDEARMELARELKQSRDERESAYKAMGQNERRNKEIAAKITEFGIRPSRSRIQKYKMWEESLHQCFYCGKTIDLSEFLNGADVEIEHIIPRSILFDDSFSNKVCACRRCNQEKGNQTAMEYMETKSAAEQEAYKQRVDEAFTAKRISKTKRDHLLWRKTDIPSDFIERQLRQSQYIAVKAVEVLQDGIRQVWTSGGSVTDFLRHQWGYDEILHTLNLPRYRQVEGLTEFVDFEHAGQKHTEERIKNWSKRIDHRHHAIDALTVALTQQGYIQRLNTLEASHDFMEKQVKEAGTKYNEKKSILEKWINEQPHFSVEDVTNAVDGILVSFRAGKRVTTPARRAIYKGGKRVIAQRGIEVPRGALTEETIYGKLGDKFTVKYPLDHPSMKPENIVDSTIRELVQKRVAERGKDAFKEPIYSAEGMKIKSVRCFTSLSENGVVPVKYDEAGRPIGYAKKGNNHHIAIYQDKDGQYQEMVVSFWNAVERKRYGVPVVITNPHEVWDSLLNKDLPQEFLAKLPNDNWQFILSMQENEMFVLGMENDEFNDAIERQDYATLNKHLYRVQKLSTHDYSFRYHTETKVDDKYEGAENGRNASMSLGALVPIRSCGSLFVQFPHKVKVDILGHIHKA

SEQ ID NO: 1230 - protein, 1007 aa, unidentified
  REGION 1..1007: note = Description of Unknown: uncultivated organism with predicted taxonomy: Bacteroidetes
  REGION 1..1007: note = MG16-149 effector
MKRILGLDLGTNSIGWAVVNTDENDKPVSIERMGSRIVPLTSDDTNEFTKGNAITKNQSRTEKRTARKGYDRYQLRREHLTTELRKLKMLPDEKLIKLPVLELWELRGKAASKGNQLTLSEIGRVLYHINQKRGYKHAKSDESADTKQKAYVAEVNARYAMIKERNQTIGQFFAEKLKENEIETSKGKFYTYRIKEQVFPRKAYEAEFDQIIECQKEFYPDILTNEEINRLRNEIIFYQRRLKSCKHLVSFCDFEKREYINKVGKVVYGGPKVAPKSSPLFQLCKIWEEVNNLTLRNRKNDELFITIEQRQAMVDFLDTHEKLTLSDMYSILGISKQDGWWGGKAIGRGLQGNTTKIALKKALGDFVNADTLLQFNLKQTDSNLVDEVTGEILQVIDPKLEKEPLYDLWHTIYSISDKEELTNALKKKYNIHDEDIINRLYAIDFVKSGFGNKSTKAMRRILPYLQQGLKYSDACEYAGFRHSDSLTKAENEARQLLEKLPPVQKNALHQPIVEKILNQMINVVNALMIEYGQFDSIRVELARELKQSKDERNVTFLQNEAMQRLNDSIANRLSSEGIKPTKRTIEKYKFIFPTKGCFDKRTGKFITKNFENLSTVNRCIYCGQPFSLSAALNGDGYEVEHILPRDLICDNSQSNKVLSCRKCNSIKSNKTAFDFMRSQGEHAFETYLERVESWYKDGIISPSKRERLLLSHEDYLERKKKGKITDIDKKYWEDFVSRQAGETQYISREAIRILKQCCRYVNATSGSITATLRHLWGYDEILHQLNFERYKQAGLTEIVTWESNHGKNKHSKEQIVDWSKRIDHRHHAIDALVVACTQQGFIQRINTLNADETKDLMKKQIESAGIKYEEKKVLLDKYLISLIPFKTQIVADAVNKILVSFKAGKKTATIGKRIEYKHGNKHIVQKGIIIPRGALHEEGVYGRIEINGKKEIVKKYKLGKGAQGFVFTGKETYAEKINKKTGEIQIEDKIKNVLDSIVDGNIRNKVL

SEQ ID NO: 1231 - protein, 1250 aa, unidentified
  REGION 1..1250: note = Description of Unknown: uncultivated organism with predicted taxonomy: Bacteroidales
  REGION 1..1250: note = MG16-150 effector
MKRILGLDLGTTSVGWALITVDESNNPIDIQDIGVRIVPLAENEGDKFTKGQDITVNADRTLARGIRRNYDRYQMRRRALTEKMRQLNMLPDEHLIKLPVLDLWQLRANAAKQKISLCELGRVLYHLNQRRGYKHARTDSNDSKQKDYVQKINNRYSLLQQLGLTIGQYFAQKLAETAITHNGKTFYVFRIKEQIYPRRAYEEEFDTIMTCQQLFYPTILTDEVINEIRNNIIYYQRDLRSCKHLVSICEFEKRSFYDENGEVKRNKKGEIVYSGPKVAPRTSPLFQVFKNWQSINNLHFHNRRNEDLFITLEQKTHIASIMDNKELLKLKDVHEVLGINNKSGWYCDKAIKAGIKGNTTKTAIIACLSTLPLSIINEIARFNLKTEKTNIVDEESGEIFVRISNNYQDEPLYRLWHIIYSIKDDEERFNAISKFLKDFGIEDDSITNALKDIDFVTPGYANLSAKAISKILPYMMEGLDYSDACEYVGYNHSDSLTKEENASRDLVDKIPLLKKNELRQPTVEKILNQTINIFNQINADLIQKGERIDEVRVELARELKQSKTEREEASAGIRKQQALNDNYANILKSESIRPTRNKILKYRLWTESNKTCFYCDQPVNFKEYLQTTEFEREHVIPKRLIFDDSFANQVCSCSKCNKEKGGLTALDFMRTKANLRNYLDKVDSMYQKHEISGKKRSHLLASYDDYLERKKEGKETKEDIMIWETPIDRQLRLSQYISRKAMEILRMGCREVVATSGSITELIRHTWGYDTILHELNCPDYKEAGLTEIIIDEKTKRQREVISDWTKRLDHRHHAIDALAVACTTHSIVQHINTLHASRKIMRDEIKTSRKEWKDNYLLQQWIKEKMPFDRHYVLHKIASILVSMKAGKKATVPGKRKIYKNGKPQIIQTGIKIPRGQLHEKTIYGAIKQWSGGEEHRKIVTRYKLGIGAAGYVFNGKESCDVIFDKKKKQYVMDDGIDKAIKYIVDKHIQDVIRGRLNEAFPANETYRSEAEKALAEGKTYDGKDRSKKALEQLRTLSEKPLYADKGKTIIIKSVRCFTGLSAVQPLRYNSQNEPIAFVLTKNNHHVAIYSDEKGEYKECVYTFWQAVERSKYRLPLIIKEPHELWREIMKRENDGEHFPDSIIEALPSPNWTFIESLQLNDMFVMDLDDETFEEYITNKNYEKLGKKLYRVQSLSTGDYCFRHHTDTTTDRTNAKLTKKFLRKSLMSFISSNPRKVQISLLGKINRDC

SEQ ID NO: 1232 - protein, 1242 aa, unidentified
  REGION 1..1242: note = Description of Unknown: uncultivated organism with predicted taxonomy: Prevotella
  REGION 1..1242: note = MG16-151 effector
MKKILGLDLGTNSIGWAVVNAEENWKPVSIESMGSRIIPLSSDDTNEFTKGNAITKNQSRTEKRTARKRYDRYQLRREYLTATLRKLKMLPDESLIKLPILELWELRGKAACKGQQLSLPELGRVLYHINQKRGYKHAKSDESSDTKQKAYVAEVNARYAMIKKRNQTIGQYFAEKLKESEIETPKGKFYTYRTKEQVFPRKAYEAEFDQIMACQKVFYPDILTEKEINKLRNEIIFYQRRLKSCKHLVSICDFEKQEYKNKEGKIVFGGPKVAPKSSPLFQICKIWEEVNNLTLKNRKNDELFISLEQRQAMVDFLETHEKLTLSDMYAILGISKKDGWWGGKAIGRGLQGNTTKIALKKALGDFENAERLLQFNLYKTDSNLVDDTTGEIIQIIDSKLEKEPLYDLWHTIYSISDKEEFGKALKRKYNITDEDIINRLYSIDFVKPGFGNKSTKAMRRILPYLQEGLKYSDACEYAGFKHSESLTKSEIEARPLLDMLPSINKNELRQPIVEKILNQMINVVNALMNEYGKFDSIRVELARELKQSKDERNTTFLQNEAMQRLNESITKRLESENIKPTKRIIEKYKFIFPTKGCFDKRTGKFITKNFEDLSTINYCIYCGQPFSLSAALNGDGYEVEHILPRDLICDNSQNNKVLSCRRCNSIKSNKTAFDFMRSQEKNAFEAYLERVETWYQDGIISPGKRERLLLSHEDYLERKRLGKETDEDKKYWEEFVSRQARETQYISRESIRILKQCCRNVNATSGAVTAILRHLWGYDEILHQLNFERYKNAGLTETVIWESNHGKNKHSREQIVDWSKRVDHRHHAIDALVVACTQQGFIQRINTLNADETKGLMKKQIETAGLKYVEKMALRDKYLISLTPFKTQAVANAVNNILVSFKPGKRTATTGKRIEYKEGKRHIVQKGIIIPRGPLHEEGVYGSIKINGEKQIVKKYKLGKGVQGFVFTGKETYEEKVNKKTGEIQIEDKIKNVLDSIVDGNIRTKVLQRLNQGFEEGKDYRNDVKKALGNLNNLDKNPIYADDNKTIPIHTVRCITGLSAIVPIRCNNQGKPIGFVKPGNNHHIAIYQDEEGNLKEHSVTFWHAVERKKYGIPVIIENPTKLWDEIKDKQLPESFMEKLPEVNWTFKVSLQQNEMFILGMEDDTYDVAMGNKDFTLISKFLYRVQSISESDYWFRLHIESQNDKTPQAKQAKKFHRIQSLKGFYQLHPHKVHISVIGKIKEL

SEQ ID NO: 1233 - protein, 1228 aa, unidentified
  REGION 1..1228: note = Description of Unknown: uncultivated organism with predicted taxonomy: Fibrobacter
  REGION 1..1228: note = MG16-152 effector
MKKILGLDLGVGSIGWSVISVDENGDPSEILGMGSRIIPLSTDDANEFSTGNAISKNQKRTQKRTARKGYDRFQLRRENLTAELRKLHMLPDEKLIKLPILELWTLRAKAATEGNKLSLPEIGRILYHINQKRGYKHAKADEAGDKQQTEYVAAVNSRYAMIKERSQTIGQYFAEKIRESEVISEKGKFYTFRTKEQVFPRKAYEEEFDKIIAVQRQYYPDVLTDSAINRLRNEIIFYQRNLKSCKHLVSLCEFEKHEYKNKEGKIVYDGPKVAPRTSPLAQICRIWEFVNNISLENGYKERRELSLEEKQKVVHFLDNNEKMTATDFSKLLGLGKKNEWDLKRYFGQNGVKGNETKVSLRNALKDFPNVEELLQFNLTLDNSNYVNESTGEVLKVISPSFQNEPLYDLWHTVYSLSDKDELSNALGKKFGISDKNAIQQLFKIDFVKPGFSNKSAKAVRRILPFLQQGLMYSEACAEAGYNHSNSLTKTENEARSLLDRLPQIKKNELRQPVVEKILNQMVNVVNAIYDDYGTIDEIRVELARELKQSKDERNTTFNNIAKRERENKGIAERIKNEYGLIPNRNKIEKYRLWEEAEQKCFYCGQTVNVKEFLSGFDVEVEHVIPKSLLFDDSYANKVCACRKCNANKGNKTAFDFMKSQSEDAFNNYVSRVEEYYKNGKISRTKHDRLLTPQSEIPSDFIERQLRQTQYISKKALEMLKEVCRNVYATSGSVTDFIRHTWGYDEILHQLNFDRYKQGGLTEAREFDNKGIIHKEERIQNWSKRLDHRHHAIDALVIAMTKQSIIQRLNHLNTERDAMFQEVDKQSAEWKNDFSLLQEWLRERKHFSTKDVADRVAEILISFKAGKRVATTGKRIKYEKGQKKVLQEGIVIPRGALSEESVYGKIKVIDPHKPLKFLFENPQTIVSPQIKTAVIDRLSKFGNDVKKAIASIKKEPLTLASDKVINDADCFKEEYVIKYPLEGFKAKDIQFVVDKHIREDVLPKRLAEFDGNEKNAFKDIDKNPIFADANHNIPIKHVRCFTGLSAVVPVKHDDAGKAIGFVKPGNNHHVAIYKDECGKLHESLVSFWNAVERKIKKVPVVITQPQDAWNIAENAHCSEEFTASLPNKTWTFVQSLQVNEMFVLGLEESAYQKAVREKDYNLINKHLYRVQSISKSDYFFRHHLETIIDDTSASKEMKRFYRFKSLGSFFKENPHKVQISVLGKLIVKE

SEQ ID NO: 1234 - protein, 1154 aa, unidentified
  REGION 1..1154: note = Description of Unknown: uncultivated organism with predicted taxonomy: Bacteroidales
  REGION 1..1154: note = MG16-153 effector
MKKHILGLDLGVGSIGWALIETEDDQPKQIIGMGSRIVPISKDDSDQFSKGQAISKNADRTARRTTRKGYDRYQLRRALLTKVLRQNRMLPERMDENVIDLWKLRSDAATEGHQLTLPQIGRVLYHINQKRGYKHAKADDNVDSKQTKYVEAVNQRYAEIQEAKQTVGQHFYLELLRSKVESGNGPYYTFRIKDKVFPRAAYIAEFDQIMKVQKVYYPEVLTDEFIDTLRNRIIFYQRPLKSCKHLVSLCEFEMKPYKTKDGKIVYGGPKCAPRTSPLAQLCAMWETVNNITLTNRNNERYEFSLDERKQLVEHLCTHEALKLTDLYKILGITQKDSWYGGKAIGKGIKGNATLNQLRKALNGKYSEWLEMPIERIDAVDDETAEVFWQVSPKVEETPLFKLWHAVYSIQDADELAKTLRNKFGIDDQEVIDALCKIDFVKPGYANKSHKFIRRLLPYLMDGMMYSEACARIGINHSNSMTAVERDARQLSDHIELLQKNALRQPVIEKILNQMINLVNRLQQEYGPIDEARVELARELKQSREEREGAYRRNNQNERLNKEIIAKIEEMGIRPSRSRIQKYKMWEENNHRCMYCGKTVSLAEFLNGADVEIEHIIPRSILFDDSFSNKVCACRECNHEKGNMTALDYIETKPAAEQEAYKQRVDEAFKEGRISKTKRDHLLWHRSEIPTDFIERQLRQSQYIAVKAVEILQQGIRQVWTSGGSVTDFLRHQWGYDEILHTLNLPRYRQVEDLTEMVHYEHAGQEHDEERIKNWSKRIDHRHHAIDALTVALTRQAYIQRLNTLEASHDFMEKQVKEAGTQYNEKKSILEKWILEQPHFSVDDVTQSVDSILVSFRAGKRVTTPARRAIYQGGKRTIVQTGLQVPRGALTEDHIYGKLGDKFVYKYALTDQSMHPENIVDPTIRAIVQKRVAERGKDAFKEPLYSAEGMEIKSVRCYTSLSENGVVPVKQDEHGRNIGYAKKGNNHHVAIYQDKDGQYQEMVVSFWDAVERKKYGVPVVITNPRAVWDSIMDKDMPQEFLEKLPNDDWTYILSMQENEMFVLGMEEDEYNDAIEAKDYAALNKHLYRIQNISSLFYIFRYHTETKVDDKYEGIANGRNASMSLGALIPIRSFKALFAQFPHKVKIDIMGRITRA

SEQ ID NO: 1235 - protein, 1154 aa, unidentified
  REGION 1..1154: note = Description of Unknown: uncultivated organism with predicted taxonomy: Bacteroidales
  REGION 1..1154: note = MG16-154 effector
MKKKILGLDLGVGSIGWALIETEDNQPKQILGMGSRIVPISKDDNDQFSKGQAITKNADRTARRTTRKGYNRYQMRRALLTQALRNNNMLPERMDENVIDLWKLRSDAATEGHQLTLPQIGRVLYHINQKRGYKHSKADENGDSKQTKYVEAVNQRFKDIQEAHQTIGQHFYLELLRTRVHRENGDYYTYRIKDQVFPRAAYIAEFDQIMNVQRAYYPEVLTDEFIDTLRNRIIFYQRPLKSCKHLVSLCEFEMRPYKTKDGKIVYGGPKCAPRTSPLAQLCAMWETANNITLTNRNNERFEFTLDQRRQIVDFLCHNKEMKVTHLQKILGISKKDGWYGGKAIGKGIKGNATLNQLREALQGKYDQWLEMPIKHIDVVDAATSEVFWAVNPEVEETPLFKLWHAVYSLQNAEELAKTLREKFQITDEAVIEALCKIDFVKPGYANKSHKFIRRLLPYLMEGMMYSEACERININHSNSMTREEREQRPLSARIQLLQKNQLRQPVVEKVLNQMINIVNSLKDQYGEIDEARVELARELKQSRDERESAYKAMGQNERRNKEIAAKIAEFGIRPSRSRIQKYKMWEESQHQCFYCGKTIDLSEFLNGADVEIEHIIPRSILFDDSFSNKVCACRRCNQEKGNQTAMEYMETKSAAEQETYKQRVDEAFTAKRISKTKRDHLLWRKADIPADFIERQLRQSQYIAVKAVEVLQDGIRQVWTSGGSVTDFLRHQWGYDEILHTLNLPRYRQVEGLTEFVDFEHAGQKHTEERIKNWSKRIDHRHHAIDALTVALTQQGYIQRLNTLEASHDFMEKQVKEAGTKYNEKKSILEKWINEQPHFSVEEVTNAVDGILVSFRAGKRVTTPARRAIYKGGKRVIAQRGIEVPRGALTEETIYGKLGDKFTVKYPLDHPSMKPENIVDPTIRALVQKRVAERGKDAFKEPLYSAEGMEIKSVRCFANVTDNSVVPIKYNEEGQPIGYAKKGNNHHVAIYTDKSGKPQESVVSFWDAVERKRYGVPVVITNPHEVWDNLLNTDFPEEFLAKLPEDDWQYLFSMQENEMFVLEMEDDEFYDAIERQDYASLNKHLYRVQKIRSGEYTFRYHTETKVDDKYEGVANGTNTSFQLGALVSIRGFSSLFAKHPHKVKIDLLGHIHKA

SEQ ID NO: 1236 - protein, 1217 aa, unidentified
  REGION 1..1217: note = Description of Unknown: uncultivated organism with predicted taxonomy: Bacteroidales
  REGION 1..1217: note = MG16-155 effector
MKRILGLDLGVGSIGWSLIQADDEGNPQSILDIGCRIVPLSPDDTNEFSSGNAISKNRKRTQKRTCRKGYDRYQQRRQNLTDELRGLGMLPDERLIKLPVLDLWQLRADAATPGKKLTLPEIGRILYHINQKRGYLHSKTDEDDKAQRDYVQAINNRFAHIKAEGKTIGQYLAGKLADSEVTTDKGQFYTFRIKEQVFPRKAYQEEFDQIIACQRIHYPDILTEEVIHRLSDEIIFYQRPLKSCKHLISQCEFAMREYKTADGKRIQAGPKVAPRSSPLFQVCKIWESVNNIEMKNRNGESYPFSEEERLKLFNFLDNNEKLTVTDLKRILGLSVKDKWWGGKAIGKGLQGNTTKIALKKALQGHEGLLSFHLKTVDSRHIDTETGVILQEIAPGFEKEPLYRLWHIIYSIKEPDEMASALKQQFGIEDPEVLSRLAKIDFVKAGYGNKSARFIRQILPYLQKGLKYSEACDYISINHSNSLTTAENKSRKLQPRMQQLQKNELRQPIIEKILNQMVNVVNALLDKHVSIDEVRVELARELKQSRDERNSTFLNNSKRERENKIISERIQEMGIRPSRNRIQKYRLWEESKHICFYCGQPVGVREFMEGVDVEIEHIIPRSLFFDDSFSNKVCACRKCNAEKGNRTAYDYVKKKGENEFADYTRRIEEAFEKKEISKTKRERLLTSAKDIPEDFIDRQLRQSQYISKKAVEMLKQVCRNVWTTSGSVTDFVRHQWGYDNILHDLNFKRYKDAGQTEIIVCDQMGQVRQVERIKDWTKRLDHRHHAIDALTIASTKQSYIQRLNHLNASRDQMFQELETQSNKVREEYSLLENWMKERPHIPVSVVSQIVDGILVSFKTGKRLTTPGKRYTYKGGKREIAQSGIIVPRGALSEDSVYGVISCLEENVPVKKLFEHPDIIFKPYIRTKVENRIKEYDGDWKAALKSLKKAPIFLGDGETKPLEYATCWKKEYVIRYPLASIQKKDVKYIVDQHIRQLVSERLNAVGEKDAFKEPLFSDKAEKNPIKSVRLFTGLTHNSLSPVKYLDGFPIGYSKPGNNHHFCYYRNENGELFEHIVSFWHAVDRKKYGIPVIIEDTDVLWDEMANRDLPQDFLKYLPPVGLKLEVSLQQNEMFILGMKDEDYERSIKEKDLRMLNQYLYRVQKISSQYIVFRRNTDTGKDEDSKAQSIGQFVRVSSIKGWIQCNPHKIRVNVLGEISEI

SEQ ID NO: 1237 - protein, 1154 aa, unidentified
  REGION 1..1154: note = Description of Unknown: uncultivated organism with predicted taxonomy: Bacteroidales
  REGION 1..1154: note = MG16-156 effector
MKKKILGLDLGVGSIGWALIETENDQPKQIIGMGSRIVPISKDDNDQFSKGQAISKNADRTARRTTRKGYDRYQLRRSLLTQVLRQNGMLPERMDENVIDLWKLRSDAASEGHQLTLAQIGRVLYHINQKRGYKHAKADNNGDSKQTKYVEAVNQRYKEIQESKQTIGQHFYLELLRSKVDGVRGPYYTFRIKDKVFPRAAYLDEFDQIMRVQRDYYPDVLTEELIDTLRNRIIFYQRPLKSCKHLVGLCEFEMRPYKTQEGNIVYSGPRCAPRTSPLAQLCAMWESVNNITLTNRNNERYEFSLEERQQIVEHLCTHEVLKITDLYKILDISKKDGWYGGKAIGKGLKGNTTLNQLRKAMNGKYQEWLEMPIERVDDVDNTTAEVFWVVSPKVEETPLFKLWHAVYSLQDTDELAKTLCSKFGITDQEVIEALCKIDFVKPGYANKSHKFIRRLLPYLMKGMMYSEACERIGINHSNSMTAAERNARPLAEHIELLQKNALRQPVIEKILNQMINLVNRLQQEYGPIDEARVELARELKQSREERESAYKAINKNERENAERAAKIAEFGIRPSRSRVQKYKMWEESQHRCFYCGKMVDLAQFLNGADVEIEHIVPRSILFDDSFSNKVCACRECNKEKGNLTAMEYIETKPVGEQEAYKQRVAEAFDAHRISKTKRDHLLWRRADIPQDFIERQLRQSQYIAVKAVEILQKGIRTVWTSGGSVTDFLRHQWGYDEILHTLNLPRYRQVDELTEMVHYEHAGQEHDEERIKNWTKRIDHRHHAIDALTVALTRQSYIQRLNTLEASHDIMEKQVKEAGTQYNEKKSILEKWVAEQPHFPVADVTENVDGILVSFRAGKRVTTPARRAIYKGGKRTIVQTGLQVPRGSLTEETVYGRLEDKFVVKYPLDHPSMKPENIVDPTIRALVQKRVEEKGKDAFKEPIYSAEGMEIKSVRCYTSLSENGVVPVKFDEKGQPIGFAKKGNNHHVAIYQDKDGQYQEMVVSFWDAVERKKYGVPSVITNPRELWNSIMDKDLPQEFLLKLPQDDWQYVLSMQENEMFVLGMEEDEFHDALERHDYCSLNKHLYRVQKISHGEYVLRYHTETKVDDKYKGVEKGRDASLKLGALVSIRSFGSLFSKFPHKVKIDIMGRITKA

SEQ ID NO: 1238 - protein, 1223 aa, unidentified
  REGION 1..1223: note = Description of Unknown: uncultivated organism with predicted taxonomy: Fibrobacter
  REGION 1..1223: note = MG16-157 effector
MKKILGLDLGVSSIGWSVISVDDNGDPSDILGMGSRIVPLSTDDANEFSTGNAISKNQKRTQKRTARKGYDRYQLRRENLTVELRKHKMLPDEHLIKLPVLKLWTLRASAATEGHQLTLPEIGRVLYHINQKRGYKHAKADEAGDKKQTDYVAAVNQRFAMIKERGQTIGQYFAEKLKENEVVTEKGKFYTYRTKEQVFPRGAYIAEFDQIITVQRKFYPQILTEEFINRLRNEIIFYQRNLKSCKHLVSICEFEKHEYKNKEGKTVFDGPKVAPRTSPLFQICRIWEFVNNIRLENGYKEARELTQEERLKVVEFLDNHEKMTAKDFSKLLKLNKDNEWDLKKYFGKNGIQGNTTKTKLATAIANVPNANDLLRFDLTLENSNFVNEATGEVLKVISSDFQNEPLYMLWHTVYSLSDKDELKSSLEKKYHITDESIVDNLFRIDFIKPGFGNKSAKAIRRILPFLQEGLVYSEACAEAGYNHSNSLTKTENEARTLLARLPQIKRNELRQPVIEKILNQMVNVVNAIYDEYGQIDEIRVELARELKQSKDERKATAANIAKRERENKAIAAKIEEFGIRPSRNRIQKYRLWEESEQKCFYCGQPVDAREFLSGLDVEVEHIIPKSLLFDDSFANKVCACRKCNAAKGNRTAFDYMKSQSSNAFDAYIKRVNDFYKDGKISKTKNERLLTTQSEIPSDFIERQLRQTQYIAKKALEMLKEVCYNVYATSGSVTDFIRHTWGYDEILHQLNFDRYKKGGLTELREFDHKGATHTEERIQNWSKRLDHRHHAIDALVIAMTRQSIIQRLNHLNTERDAMFQEVEKQSKEWKNDYSLLQEWLRERKHFSTDEVAQKVSDILASFKAGKRVATIGKRIKYEQGKKKALQTGIVIPRGPLSEESVYGKIKVLDPSKPIKFLFENPQSIISAEIRTAITNRLSKFENDIKKAIQSLKDDPIILANGKNLETADCYKEEYVIKYSLNGFKAKDIESVVDGHIKEILYKRLEEFNGNEKEAFKDIENKPIFADSAHKIPIRNVRCFTGLSAVVPVKQDNNGNNIGFVKPGNNHHIAIYKDENGNLQESVVTFWHAVERKKYGLPIIITNPAEVWEIAKAKDCPSEFLACLPNEKWSFVQSLQINEMFIMGLDDETYEKTLSEHNYTLINQHLYRVQKLTSNDYFLRFHLETKIDDSAEAKQMGKVLRKSLKTFIQDNPHKVKVSVLGKLIT

SEQ ID NO: 1239 - protein, 1217 aa, unidentified
  REGION 1..1217: note = Description of Unknown: uncultivated organism with predicted taxonomy: Bacteroidetes
  REGION 1..1217: note = MG16-158 effector
MRKILGLDLGVGSIGWSLIETDTKDNPVAILGMGSRIVPLSTDDSNEFSSGNAISKNQKRTQKRTQRKGYDRYQLRRALLTEKMRELGMLSDERLIKLPVLELWQLRANAATPGKQLELKEIGRVLYHINQKRGYKHSRSDDGDEKSQREYVQQVNQRFRDIRDEGLTIGQHFANKLAENEVITPKGKFYTYRIKEQVFPREAYIEEFDRIMDCQQVFYPDILTDTIIREIRNEIIFYQRPLKSCKHLVSVCEFAMREYKTSDGKSILSGPKVAPRSSPLFQVCKIWESVNNLTLKNRSGQVYHFSDEQRQRMFDFLDNHERMTVTDLYKLLNISKKDGWWGGKSIGKGLQGNITKAALAKALSNHRDLLRFQLETIDSKRIDTETGEILKVISSSFEKEPLYSLWHIVYSMHERSEVAAALERQFGITDPDTIDRLFAIDFIKAGYGNKSARFIREILPYLQAGMQYSDACNYIGINHSNSLTTEENANRALLDKLPQLKKNELRQPVIEKILNQMVAVVNALLSRFGPIDEIRVELARELKQSRDERNNAFLNNNKRERENKVLEERIREYGISPSRSRIQKYRLWEESNHLCFYCGQPVGAAEFLSGSGVEIEHIIPRSLLFDDSYANKVCSCRKCNAEKGNSTAYDYMKAKPEGDFEDYLKRIETFFSEKRISKAKRDKLLTPATDIPQDFIDRQLRQSQYISRKAVDMLKLVCRNVWTTSGSVTDFLRHNWGYDQILHDLNLPRYKEGGMTEVVHYEHNGQEHDEERIIGWTKRMDHRHHAIDALTIACTRQSYIQRLNTLNASRDAMHAEIEKQNAYWQEKHSLLEEWTRQRPHLPVSVVRDYVDGILVSFKPGKKVATPGKRYTYNGKKELAQDGLLIPRGALSEESVYGQITSIVEHVPVKRLFEDTSLIFKPYIRNLVEQRIEEYHGDWKKARLSIGKKPIWLDKGETIALEYATCWKKEYVIRYPVSSLREKDVDSIVDRHIREIVQKRIDEVGEKDAFKTPLFYDAAQKIPIKSIRCFTGLDAVEAVKYANGIPIGFSKPGNNHHIAIYRDKEGNRFEHVVSFWHAVERKRFGLPVIIQDTDSVGDQIQGISLPESFLKNLPAPGATLELSLQQNEMFILGMKEDEFNDAIREKDNTALNKHLYRVQKLGSLYYVFRYHTETQIDDSNNAIIMHKFYRCRSLSAFDALNPHKVRVSITGEIMQGDD

SEQ ID NO: 1240 - protein, 971 aa, unidentified
  REGION 1..971: note = Description of Unknown: uncultivated organism with predicted taxonomy: Bacteroidetes
  REGION 1..971: note = MG16-159 effector
MKKVLGLDLGVGSIGWCLIEKDDDNTPKRIIRMGSRIVPISSDEESGYTRGNAISKNADRTAKRTSRKCYDRYQLRRQALLNLLKRLGMEPSKKLIFEQNPLELWQKRADAASKEITIEELGRVLLHINQKRGYKHSRLSNSDSKETAYVQEVNSRYDDLKAEGLTIGQHFAAKLKENEQTSADGKKYYTYRIKEQVYPRHAYEEETEQILEVQSRYHADILTPDVCKEIKDIIFYQRDLKSCKNLVSLCEFESYTITKDGKEMTIGPKVAPRTSPLAQLSSILETANNITIRNRRNDELYISPEQRKAIADFLDNHEVMKLTDLYKILNIGRKDGWWAGKAIGKGLKGNTTKCQIREALSNLSKEQIESLTAFKLEYDEYVDAETGEVRKRINNTLAEKQPLYRLWHLLYSIKDVDELSGALRRLGIENEESIQNLCNLDFRTAGYANKSAKAIGRILPYLMDGMMYSDACELAGFDHSRRINPDRVLLTSLPQIQKNELRQPVVEKILNQLVNVVNALLEKEGPIDESRVELARELKQSKDERNEAFRRNNQNERLNKEYAERIKEYGLTPTRNRIMKMKMWEESEYTCMYCGQPVNVTEFLQGADVEREHIIPRGLLFDNSFTNQVCSCRRCNSQKGMRTAYDFIADDKGQEGLDSYIDRINDLFNRKQISRSKFNRLLVSHKAYMSRKAQGKETEEDKELWENFIDRQLRQSQYIARKSVEMLQQVCKNVYSTSGSVTDFVRHQWGYDEILHDLNFERYMKAGLTSMVKQLHSGKEVEVERITNWTKRLDNRHHAVDALAIACTTQGMIQRLNTLNASREGILDELNSKEERVVDPERSMLEKWIYTQPHISYAQAKEAIDNIIISQRPNTRITVPGKRYITKNGKRALVQTGIIVPRGALHAEFVYGRIMKQEADGVTLTPQYVRKYKLGIGAQGFLFNGKEFYKEELKRDSKTGLSSIVVTDKIK

SEQ ID NO: 1241 - protein, 1051 aa, unidentified
  REGION 1..1051: note = Description of Unknown: uncultivated organism with predicted taxonomy: Fibrobacter
  REGION 1..1051: note = MG16-160 effector
MKKILGLDLGVSSIGWSVISVDENGDPSEILGMGSRIVPLSTDDANEFSTGNAISKNQKRTQKRTTRKGYDRYQLRRENLTAELRKHQMLPDEHLIKLPVLDLWTLRANAATEGHQLSLPEIGRVLYHINQKRGYKHAKADEAGDKKQTEYVENVNKRFAMIKELGLTIGQFFANKLKESEVISEKGTFYTYRTKEQVFPRGAYIAEFDQIIEVQRKFYPQVLTDEFINRLRNEIIFYQRNLKSCKHLVSLCEFEKHEYKNKDGKIVFDGPKVAPRTSPLFQICRIWEFVNNIRLDGYKETKALSQDERLKVVDFLDNHEKMTAKDFIKLLGLDKNDEWDLKRYFGKNGVQGNSTKTQLAAALANIPNTSELLRFNLALENSNYVNKSTGEVLKVISSDFQNEPLYMLWHTVYSISDKEELKNALNKKYGITDESVINSLFKIDFVKPGFGNKSAKAIRRILPFLQEGLVYSDACAEAGYNHSDSLTKSENEARTLLARLPQIKKNELRKPVIEKILNQMVNVVNAIYDEYGQIDEIRVELARELKQSKDERNTTASNIAKRERENEKIEAKIQEFGIRSSRNRIQKYRLWEESEQKCFYCGDTVNVKEFLSGLDVEVEHVIPKSLLFDDSFANKVCACRKCNAAKGNKTAYDFMEGQKKEVFDAYVKRVNDFYKDGKISKTKKERLLTTQSKIPSDFIERQLRQTQYIAKKALEMLKNVCYNVYATSGSITDFIRHIWGYDEILHQLNFERYKKGGLTEFREYDHKGETHTEERIQNWSKRLDHRHHAIDALVIAMTRQSIIQRLNHLNTERDAMFQEVEKQSKEWKNDYSMLQEWLRERKHFSTEDVAKKVSNILVSFKAGKRVATIGKRVKYEHEKKFILQTGIVIPRGPLSEESVYGKIKVLDRNKPLKYLFENPQFIANADIKSAVTNRLIQHENDVKKAVLSLKKSPIVLANGKTLETADCYKEEYVIKYSLNGFKAKDIDSVVDTHIKDVLYKRLEEYDGNEKEAFKDIENNPIYADATHKIKIRNVRCFTGLSAVVPVKKDEN

SEQ ID NO: 1242 - protein, 1153 aa, unidentified
  REGION 1..1153: note = Description of Unknown: uncultivated organism with predicted taxonomy: Bacteroidales
  REGION 1..1153: note = MG16-161 effector
MKKNILGLDLGVGSIGWALIETEDDQPKQIIGMGSRIVPISKDDSDQFSKGQAISKNADRTARRTTRKGYDRYQLRRAMLTETLRHNGMLPERMDENVIDLWKLRSDAATEGHQLTLPQIGRVLYHINQKRGYKHAKADDNGDSKQTKYVEAVNQRYVEIQETHQTIGQHFYLELLRSKVESGNGPYYTFRIKDKVFPRAAYIAEFDQIMNVQKAYYPEVLTDELIETLRNRIIFYQRPLKSCKHLVSLCEFEMRPYKTKEGKIVYGGPKCAPRTSPLAQLCAMWEAANNITLTNRNNERYNFSLEERKQIVEHLCSHEALKLTDLYKILGITKKDGWYGGKAIGKGIKGNSTLNQLRKALNGKYGEWLEMPIEHMDVVDEETAEVLWQVSPQVEETPLFKLWHAVYSLQDADELAKTLRNKFNITDQDVIDALCKIDFVKPGYANKSHKFIRRLLPYLIEGMMYSEACARIYINHSNSMTVAERDARPLAEHIELLQKNALRQPVIEKILNQMINLVNRLQQEYGPIDEARVELARELKQSREERENAYKRNNQNERLNKEIAAKIEEMGIRPSRSRIQKYKMWEESDHRCMYCGKMVSLAEFLNGADVEIEHIIPRSILFDDSYSNKVCACRDCNREKDNLTALDYLETKTGAELEAYKQRVDDAFKEGRISKTKRDHLLWRREDIPSDFIERQLRQSQYIAVKAVEILQQGIRKVWTSGGSVTDFLRHQWGYDEVLHTLNLPRYHKVEGMTEFVQYEHAGQTHEEERIKNWTKRVDHRHHAIDALTVALTRQAYIQRLNTLEASHDLMEKQVKDAGTLYNEKKSILEKWINEQPHFSVDEVTRQVDGILISFRAGKRVTTPARRAIYKGGKRIIVQTGLQVPRGALTEETVYGKLGDKFVVKYPLAHPSMKSENIVDPTIRAIVQKRIDERGKEAFKEPLYSAEGMEIKSVRCYTSLSENGVVPVKQDGQGNNIGFAKKGNNHHVAIYQDKNGQYQEMVVSFWDAVERKKYGIPVVITNPHAVWDSVLDKESPQEFLEKLPNDDWKYILSMQENEMFVLGMEDGDFEHAIETQNYAALNKHLYRVQKVSSKFWCFRYHTETMVDDKYGDTKNEQWSFQMGKAFRASSFDGLFRQFPHKVKIDIMGRITKA

SEQ ID NO: 1243 - protein, 1224 aa, unidentified
  REGION 1..1224: note = Description of Unknown: uncultivated organism with predicted taxonomy: Prevotella
  REGION 1..1224: note = MG16-162 effector
MKKVLGLDLGTNSIGWCLIEKSDDNIPQRILRMGSRIVPISSDEESGYTKGNAVSKNAERTHKRTARKCYDRYQLRRQALMSLLKRLGMEPSNELIFEQTPMKIWQTRADAATKKISLPELGRVLLHINQKRGYKHSRLNNFDAKETSYVQEVNSRYDELKAEGLTVGQHFALKLKKNEKTSANGRKYYTYRIKEQVYPRHAYEEEARIILNTQRIFYSDILTEDVCKEFLDTIFYQRDLKSCKNLVSLCEFESYTIKKDGKEITIGPKVCPRTSPLAQLSSILETANNITIRNKRNDELYISPEQRQAIADFLDNNEVMKLTNLYNILHIGKKDGWWAGKAIGKGLKGNTTKMQIRAALSNLPSEQVNMLLKFELEFEDYVDKETGEVRQRVDNTQVEKQPLYRLWHLIYSIKDEDELSNALRRMDIKDEETIRKLCSLDFRSAGYAKKSAKAIGRILPYLMEGMMYSQACEQAGFDHSRRVDPGRTLLSALPQIQKNEFRQPVVEKILQQLVNIINSLISKEGTIDEIRVELARELKQSKDERNEAFKRNNQNEKKNKEYAEHIKEYQLTPTRNRLLKWKLYEESDHACMYCGQPIKVREFLQGADVEREHIIPKGLLFDNSFTNQVCSCRSCNSKKGMRTAYDFIEAEKGEEGLRSYIEHINYLFDKKNISRSKYNRLLVSYKAYLQRKVQGKETEEDKNLWENFIDRQLRQSQYIARKAIEMLQQICKNVYSTSGRVTDFVRHQWGYDEILHDLNFDRYKKAGLTTMVTQLQSGDEVEVERIKDWTKRLDNRHHAVDALAIACTTQGMIQRLNTLNASRDEMQAELNDKNGSIMDPNRSMLEKWVSIQPHITYAEAKNEVDKIIISQRPNTRITVPGKRYIQKNGKRTPVQTGIIVPRGALHAEFVYGRIMKQKPTSDGVVKIPQYVRKYKLGIGAQGYLFNGKEFYKEELKKDPRTGLSTIAVTDKINDVLEKIVDGGIRKRILERLNRGFEDGKDYRSNVPRALANLKNLDDDPIYSDDAKTRPILSVRKEVVSTTMVIVRNDRNGRPLAFAEPDGNHHVAFYKNENGLIEERIVTKWHAVQRKLHHVPIIIDNPSATWSDMLGRTDVPEEILKELPKDNSIFMLSLQIGEAFVMGMEESDYQKAIEEGNKQVLAEHLYFVQNLSSSNYRLRRHVESSYDITGMNKEDQRFLNIKSIGALFNYNPHKVKITVLGDIIP

SEQ ID NO: 1244 - protein, 1261 aa, unidentified
  REGION 1..1261: note = Description of Unknown: uncultivated organism with predicted taxonomy: Bacteroides
  REGION 1..1261: note = MG16-163 effector
FLYFFAIFAKNKKQIIQYTMKKILGLDLGTNSIGWAVVNAEENWKPVSIESMGSRIIPLSSDDTNEFTKGNAITKNQSRTEKRTARKRYDRYQLRREYLTATLRKLKMLPDESLIKLPILELWELRGKAACKGQQLSLPELGRVLYHINQKRGYKHAKSDESSDTKQKAYVAEVNARYAMIKKRNQTIGQYFAEKLKESEIETPKGKFYTYRTKEQVFPRKAYEAEFDQIMACQKVFYPDILTEKEINKLRNEIIFYQRRLKSCKHLVSICDFEKQEYKNKEGKIVFGGPKVAPKSSPLFQICKIWEEVNNLTLKNRKNDELFISLEQRQAMVDFLETHEKLTLSDMYAILGISKKDGWWGGKAIGRGLQGNTTKIALKKALGDFENAERLLQFNLYKTDSNLVDDTTGEIIQIIDSKLEKEPLYDLWHTIYSISDKEEFGKALKRKYNITDEDIINRLYSIDFVKPGFGNKSTKAMRRILPYLQEGLKYSDACEYAGFKHSESLTKSENEARPLLDMLPSINKNELRQPIVEKILNQMINVVNALMNEYGKFDSIRVELARELKQSKDERNTTFLQNEAMQRLNESITKRLESENIKPTKRIIEKYKFIFPTKGCFDKRTGKFITKNFEDLSTINYCIYCGQPFSLSAALNGDGYEVEHILPRDLICDNSQNNKVLSCRRCNSIKSNKTAFDFMRSQEKNAFEAYLERVETWYQDGIISPGKRERLLLSHEDYLERKRLGKETDEDKKYWEEFVSRQARETQYISRESIRILKQCCRNVNATSGAVTAILRHLWGYDEILHQLNFERYKNAGLTETVIWESNHGKNKHSREQIVDWSKRVDHRHHAIDALVVACTQQGFIQRINTLNADETKGLMKKQIETAGLKYVEKMALRDKYLISLTPFKTQAVANAVNNILVSFKPGKRTATTGKRIEYKEGKRHIVQKGIIIPRGPLHEEGVYGSIKINGEKQIVKKYKLGKGAQGFVFTGKETYEEKVNKKTGEIQIEDKIKNVLDSIVDGNIRTKVLQRLNQGFEEGKDYRNDVKKALENLNNLDKNPIYADDNKTIPIHTVRCITGLSAIVPIKYNNQGKPIGFVKPGNNHHIAIYQDEEGNLKEHSVTFWHAVERKKYGIPVIIENPTKLWDEIKDKQLPESFLEKLPEVNWTFKVSLQQNEMFILGMEDDTYDVAMGNKDFTLISKFLYRVQSISESDYWFRLHIESQNDKTPQAKQAKKFHRIKSLKGFYQLHPHKVHISVIGKIKEL

SEQ ID NO: 1245 - protein, 1222 aa, unidentified
  REGION 1..1222: note = Description of Unknown: uncultivated organism with predicted taxonomy: Prevotella
  REGION 1..1222: note = MG16-164 effector
MKKVLGLDLGVGSIGWCLVEKDDKNIPLRIIRMGSRIVPITKEEENGYTRGNAISKNADRTVKRTARKCYDRYQLRRKALVNLLKRCGMMPDKGLILEQSPLDLWQKRADAASKEISLEEVGRVLLHINQKRGYKHSRLSNSDKKETAYVQEVNSRYDKLKAEGLTVGQHFAAKLKENEQISADGKKYYNYRIKEQVYPRHAYEEEAKRILEVQSQFHTDVLTTNVCKEIFDTIFYQRDLKSCKNLVSFCEFESYTIKRNGKDITIGPKVAPRTSPLAQLSSILETANNITIRNRRNDELYISPEQRQAIANFLDNNEVMKLTDLYKILNIGRKDGWWAGKAIGKGLKGNTTKCQIRKALSKLSQEQIDKLTSFNLIFDEYVDEETGELRKRINNSHAEHQPLYRLWHLIYSIKDNDELSIALRSLGIEDEECIHNLCNLDFRTAGYANKSAKAIGRILPYLMEGMMYSEACNRAGFDHSRRVNPERELLTSLPQIQKNELRQPIVEKILNQLVNVVNALLEKEGTIDEIRVELARELKQSKDERNETYRRNNQNEKKNKEYAERIKKYELTPTRNRIMKMKMLEESEYKCMYCGQPVKEKEFLQGADVEREHIIPRALLFDNSFTNQVCSCRSCNSQKGMRTAYDFIADDKGQEGLEAYIERINDLFNKKKISRSKLNRLLVSYKAYVSRKAQGKETEEDVQLWENFIDRQLRQSQYIAKKSVEILQQVCKNVYTTSGSVTDFVRHQWGYDEILHDLNFERFKKANLTTMVKQLHSGKEVEVERIKDWTKRLDNRHHAVDALAIACTTQGMIQRLNTLNASRDAMLDELNNKEQRMIDSERSMLEKWIISQPHVSCVEAKKEIDKILISLRPNTRITVPGKRYITKNGKRTLVQTGIIVPRGALHAEFVYGRIMKQEADGVTLTPQYVRKYKLGIGTQGYIFNGNETYKEELKKDKKTGLSQIVVTDKIKDVLDKIVDGGIRKRILERLNRGFEDGTDYRTNTAKALENLKNLDEDPIYSDDAKTRPIRTVRKYVNSSTMVAVRKDDNGKPVSFVVPDDNHHVAFYKDKDGVITESIVTKWQAVQRKLKHIPVIVDNPTQTWNDLVGRNDVPEELLQSLPKDNSEFLLSLQIGEAFIMGMEDADFHRAIEEKDIHNLAEHLYFVQNISSNNYRMRRHVEASFDTSDMNKEDQRFLNVSSIGAFFNYNPHKVKVTILGDIIK

SEQ ID NO: 1246 - protein, 1159 aa, unidentified
  REGION 1..1159: note = Description of Unknown: uncultivated organism
  REGION 1..1159: note = MG16-165 effector
MKKHILGLDLGVGSIGWALIETEDDQPKQIIGMGSRIVPISKDDSDQFSKGQAISKNADRTARRTTRKGYDRYQLRRALLTQVLRQNGMLPERMDENVIDLWKLRSDAATEGHQLTLPQIGRVLYHMNQKRGYKHAKADDNGDSKQTKYVEAVNQRYAEIKEARQTIGQHFYLELLRSKVESGNGPYYTFRIKDKVFPRAAYIAEFDQIMQVQRAYYPEVLTDELIDTLRNRIIFYQRPLKSCKHLVSLCEFEMKPYKTKDGKIVYGGPKCAPRTSPLAQFCAMWETANNITLTNRNNEQYDFSLEERRQLVEHLCTHEVLKLTDLYKILGITKKDGWYGGKAIGKGIKGNATLNQLRKALNGKYSDWLEMPIERIDAVDNETAEVFWQVSPKVEETPLFKLWHAVYSIQDAEELAKTLRNKFGIDDQDVIEALCKIDFVKPGYANKSHKFIRRLLPYLMEGMMYSEACARIGINHSNSMTAAERDARPLAERIELLQKNALRQPVIEKILNQMINLVNRLQQEYGPIDEARVELARELKQSREEREGAYRRNNQNERLNKEIAAKIEEMGIRPSRSRIQKYKMWEESNHRCMYCGKTVSLAEFLNGADVEIEHIIPRSILFDDSFSNKVCACRECNHEKGNMTALDYLETKPATEVEAYKQRVDEAFKEGQISKTKRDHLLWHRSDIPTDFIDRQLRQSQYIAVKAVEILQQGIRQVWTSGGSVTDFLRHQWGYDEILHTLNLPRYRQVEDLTEIVHYEHAGQEHDEERIKNWSKRIDHRHHAIDALTVALTRQAYIKRLNSLNAEFTREEMLKEVEEANTVYNEKKSLLEKWILEQPHFSVDDVTNSVDSILVSFRAGKRVTTPARRAIYQGGKRTIVQRGLQVPRGALTEETIYGKLGDKFVVKYPLDHPSMKPENIVDPTIRALVQKRVAERGKDAFKEPLFSAEGMEIKSVRCFTSLSENGVVPVKQDEQGRNIGYAKKGNNHHVAIYKDKDGQYQEMVVSFWDAVERKKYGVPVVITNPHDVWDSIMDKDMPQEFLEKLPKDDWSYLLSMQENEMFVLGMEEDEFNDAIEAKDYATLNKHLYRVQKVARNDYWFRYHTETTVDDKYGEGDESKVNLGWSVEMGKVYRVRSCGALFDLFPHKVKIDIMGRITKA

SEQ ID NO: 1247 - protein, 1092 aa, unidentified
  REGION 1..1092: note = Description of Unknown: uncultivated organism with predicted taxonomy: Bacteroidales
  REGION 1..1092: note = MG16-166 effector
MKKVLGLDLGVGSIGWCLIEKEDDNTPKRILRMGTRIVPIGSDEESSYTKGNAFSKNADRTAKRTARKCYDRYQLRRHALVDLLKQLGMEPTHKLIYEQTPLGLWQKRADAASKEITLEELGRVLLHINQKRGYKHSRLDNSKSKETAYVQEVNSRYDQLKDEGLTIGQHFAAKLKENEQTSADGKKYYNYRIKEQVYPRHAYEEEVKKILDVQQQYYADLLTDDVCKEIFNIIFYQRDLKSCKNLVSHCEFESYTITKNGKEITIGPKVAPKTSPLAQLSSILETVNNISIRNRRNDELYISPEQKKALADFLDNNEVMKLTDLYRILNIEKKDGWWAGKAIGKGLKGNTTKCEIRKALGNLTKEQVNSLTAFDLVFEEYVDVETGEVRKRVDNNHAEKQPLYRLWHLIYSIKNEEELKGALRNMGIEDEETLQKLSNLDFRNPGYANKSAKAIGRILPYLMEGMMYSQACEQAGFDHSRRINPERQLLKALPQIQKNELRQPVVEKILQQLVNIVNALLAKEGNIDEIRVELARELKQNREERNEAFKRNAQNEKLNKEYAERIKEYGLTPTRNRIMKMKMWEESENTCMYCGQPVDVVEFLQGADVEREHIIPRGLLFDNSFTNQVCSCRKCNSQKGMRTAYDFIEDEKGQEGLESYIKHINYLFDKKKINRSKLNRLLVSHKAYINRKSLGKETEEDKQLWENFIDRQLRLSQYIAKKSVEMLQQICRNVYVTSGSVTDFVRHQWGYDELLHDLNFERYKKAGLTAMVKQLHSGKEVEVERIKDWTKRLDNRHHAVDALAIACTTQGMIQRLNTLNASRDDMLEELNSKKRVADPNRSMLEKWLYAQPHVSYALAKEELDKIIVSQRPNTRITVPGKRYVTKNGKQTLAQTGIVVPRGALHAEFVYGRIMKQEADGKTLTPQFVRKYKLGIGAQGFLFNGKEFYKEDLKKDAKTGLSTIVVTDKIKEVLDKVVDGGIRRRILDRLNRGFEEGTDYRANVGKALANLKNLDEDPIYSDDAKTRPIRTVRKYVNSSTMVAVRKDKNGRPLSFVEPDGNHHVAFYQDDNGIITESIVTRWQAVQRKLSDIP

SEQ ID NO: 1248 - protein, 1162 aa, unidentified
  REGION 1..1162: note = Description of Unknown: uncultivated organism with predicted taxonomy: Bacteroidales
  REGION 1..1162: note = MG16-167 effector
MKTKILGLDLGVGSIGWALIETEDNQPKQILGMGSRIVPISKDDGDQFSKGQAITKNADRTARRTARKGYNRYQMRRALLTQALRNNNMLPERMDENVIDLWKLRSDAATEGHQLTLPQIGRVLYHINQKRGYKHSKADENGDSKQTKYVEEVNRRYKDIQEAHQTIGQHFYLELLRSKIERANGPYYTYRIKDQVFPRAAYIAEFDQIMNVQRIYYPEVLTDEFIDTLRNRIIFYQRPLKSCKHLVSLCEFEARPYKTKDGKIVYGGPKCAPRTSPLAQLCAIWETANNITLTNRNNERFEFTLEQRRQIVDFLCHNKEMKVSHLQKILGISKKDGWYGGKAIGKGIKGNATLNQLRDALQGKYDQWLEMPIKHIDVVDATTSEVFWAVSPDVEETPLFRLWHAVYSLQNADELAKTLREKFQITDEAVIEALCKIDFVKPGYANKSHKFIRRLLPYLMEGMMYSEACERININHSNSMTREEREQRPLSARIQLLQKNQLRQPVVEKVLNQMINIVNSLKDQYGEIDEARVELARELKQSRDERESAYKAMGQNERRNKEIAAKIAEFGIRSSRSRIQKYKMWEESLHQCFYCGKTIDLSEFLNGADVEIEHIIPRSILFDDSFSNKVCACRRCNQEKGNQTAMEYMETKSASEQEAYKQRVDEAFTTKRISLTKRDHLLWHKADIPSDFIDRQERLSQYIAVKAVDLLQQGIRQVWASSGTVTFFMRHQWGYDEILHTLNLPRYRRVEGMTEFVDFEHAGQKHTEERIKNWSKRIDHRHHAIDALTIALTRQAYIQSLNTLSSEITREEMIEIIKETGKVYKEKTSLLDKWARELPHFSVEDVTNAVDGILVSFRAGKRVTTPARRAIYKGGKRVIAQRGIEVPRGALTKDTIYGKQGESYVVKYPLTHQSMKADNIVDPTIRALVKARLAAYNNNANEAFKTPLYSAEGMEIKSVRCVARLTENGVIPIKYNKQGMAIGYAEKGNNHHVAIYKEKDKKTFDITVSFYDAVERKRYGVPVVITNPHEVWDSVLNKDLPQEFLAKLPNDNWQFILSMQENEMFVLGMEDDEFDDAIERQDYATLNKHLYRVQKIAHNDYWFRYHTETTVDDKYGDGEDNKVNLGWSVEMGKVCRIRSCDALFAKHPHKVKVDLLGHIHKA

SEQ ID NO: 1249 - protein, 901 aa, unidentified
  REGION 1..901: note = Description of Unknown: uncultivated organism with predicted taxonomy: Barnesiella viscericola
  REGION 1..901: note = MG16-168 effector
MKNILGLDLGTTSVGWALIKVDDKNNPIDIQDMGVRIVPLAENEGDKFTKGQDITVNADRTRARGQRRNYDRFQLRRQALTEKLRSLNMLPDEHLIKLPIMELWQLRANAVTQKVSLNELGRILYHLNQKRGYKHSRTDAKDSKQRAYVKEINNRYGELIKSGMTIGQFFAKKLSETAVTVEGKTFYVYRIKDQIFPRKAYEEEYDSIMKCQQTFYQEILTNDVIDEIRNRIIYYQRDLRSCKHLVSVCEFEKRCFYDAEGNVKRNKKGEIIYDGPKVVPRTSPLFQIFKNWQSINNLRFHNRKNEYLYITKEQKQQIANIMDIHKVLKLEDVQNVLDITSESGWYCDKAIKAGIKGNTTKHAILSVLSSLPQSKITELTRFNLETEATNLVDEETGEVLVRIKSTYQEEPLYRLWHIIYSIKNEDERFNAISNLLKEFCIEDDSIASALKDLDFVTPGYANLSAKAISKILPYMMEGIDYSESCAYVGYNHSDSITKEENKRRELLDQIPALKKNELRQPTVEKILNQTINIFNQINTNLKKNGERIDEVRIELARELKQSKDERKETENGIRKQQKMNDEYANILKEEGIRPTRNRVLKYRLWRESNETCFYCERPINFNEFLKFSDIEREHIIPKKLIFDDSFANQVCSCRKCNKEKGGRTALDYMQTTPNLQMYLDKVDKMFQEHKISGKKHLHLLASYEDYLIRKKEGKETKDDIKIWETPIERQLRLSQYISRKAQELLRTACRDVIATSGSITDLIRHTWGYDTILHELNFDCYKKAGLTEFIKDEKTGKNREVIQDWTKRLDHRHHAIDALAVACTSRSIIQRINTLHASREDIRKEIKSTRKEWQENDLLQQWIKEKMPFDRKYVLHKVASILVSMKAGKKATVPGKRKIYK

SEQ ID NO: 1250 - protein, 1154 aa, unidentified
  REGION 1..1154: note = Description of Unknown: uncultivated organism with predicted taxonomy: Bacteroidales
  REGION 1..1154: note = MG16-169 effector
MKKKILGLDLGVGSIGWALIETENDQPKQIIGMGSRIVPISKDDNDQFSKGQAISKNADRTARRTTRKGYDRYQLRRSLLTQVLRQNGMLPERMDENVIDLWKLRSDAASEGHQLTLAQIGRVLYHINQKRGYKHAKADNNGDSKQTKYVEAVNQRYKEIQESKQTIGQHFYLELLRSKVDGVRGSYYTFRIKDKVFPRAAYMDEFDQIMRVQRDYYPDVLTEELIDTLRNRIIFYQRPLKSCKHLVGLCEFEMRPYKTQEGNIVYSGPRCAPRTSPLAQLCAMWESVNNITLTNRNNERYEFSLEERQQIVEHLCTHEVLKITDLYKLLDISKKDGWYGGKAIGKGLKGNTTLNQLRKAMNGKYQEWLEMPIERVDDVDNTTAEVFWVVSPKVEETPLFKLWHAVYSLQDTDELAKTLCSKFGITDQEVIEALCKIDFVKPGYANKSHKFIRRLLPYLMKGMMYSEACERIGINHSNSMTAAERNARPLAEHIELLQKNALRQPVIEKILNQMINLVNRLQQEYGPIDEARVELARELKQSREERESAYKAINKNEHENAERAAKIAEFGIRPSRSRVQKYKMWEESQHRCFYCGKMVDLAQFLNGADVEIEHIVPRSILFDDSFSNKVCACRECNKEKGNLTAMEYIETKPVGEQEAYKQRVAEAFDAHRISKTKRDHLLWRRADIPQDFIERQLRQSQYIAVKAVEILQKGIRTVWTSGGSVTDFLRHQWGYDEILHTLNLPRYRQVDELTEMVHYEHAGQEHDEERIKNWTKRIDHRHHAIDALTVALTRQSYIQRLNTLEASHDIMEKQVKEAGTQYNEKKSILEKWVAEQPHFPVADVTENVDGILVSFRAGKRVTTPARRAIYKGGKRTIVQTGLQVPRGSLTEETVYGRLEDKFVVKYPLDHPSMKPENIVDPTIRALVQKRVEEKGKDAFKEPIYSAEGMEIKSVRCYTSLSENGVVPVKFDEKGQPIGFAKKGNNHHVAIYQDKDGQYQEMVVSFWDAVERKKYGVPSVITNPRELWNSIMDIDLPQEFLLKLPQDDWQYVLSMQENEMFVLGMEEDEFHDALERHDYCSLNKHLYRVQKISHGEYVLRYHTETKVDDKYKGVEKGRDASLKLGALVSIRSFGSLFSKFPHKVKIDIMGRITKA

SEQ ID NO: 1251 - protein, 1217 aa, unidentified; identical to SEQ ID NO: 1219
  REGION 1..1217: note = Description of Unknown: uncultivated organism
  REGION 1..1217: note = MG16-170 effector

SEQ ID NO: 1252 - protein, 1153 aa, unidentified; identical to SEQ ID NO: 1242
  REGION 1..1153: note = Description of Unknown: uncultivated organism with predicted taxonomy: Bacteroidales
  REGION 1..1153: note = MG16-171 effector

SEQ ID NO: 1253 - protein, 815 aa, unidentified
  REGION 1..815: note = Description of Unknown: uncultivated organism with predicted taxonomy: Prevotella brevis
  REGION 1..815: note = MG16-172 effector
MKKHILGLDLGVGSIGWALIETEDDQPKQIIGMGSRIVPISKDDSDQFSKGQAISKNADRTARRTTRKGYDRYQLRRALLTQVLRQNGMLPERMDENVIDLWKLRSDAATEGHQLTLPQIGRVLYHMNQKRGYKHAKADDNGDSKQTKYVEAVNQRYTEIQEAKQTVGQHFYLELLRSKVESGNGPYYTFRIKDKVFPRAAYIAEFDQIMKVQKAYHPEVLTDEFIDTLRNRIIFYQRPLKSCKHLVSLCEFEMKPYKNKDGKIVYGGPKCAPRTSPLAQLCTMWETVNNITLTNRNNERYEFSLDERRQLVEHLCTHEVLKLTDLYKILGITKKDGWYGGKAIGKGIKGNATLNQLRKALNGKYSDWLEMPIERIDAVDNETAEVFWQVSPKVEETPLFKLWHAVYSIQDAEELAKTLRNKFGIDDQEVIDALCKIDFVKPGYANKSHKFIRRLLPYLMEGMMYSEACARIGINHSNSMTAAERDARPLAEHIELLQKNALRQPVIEKILNQMINLVNRLQQEYGPIDEARVELARELKQSREEREGAYRRNNQNERLNKEIAAKIEEMGIRPSRSRIQKYKMWEETNHRCMYCGKTVSLAEFLNGADVEIEHIIPRSILFDDSFSNKVCACRECNHEKGNMTALDYIETKPAAEVEAYKQRVDEAFKEGQISKTKRDHLLWHKSDIPTDFIDRQLRQSQYIAVKAVEILQQAIRQVWTSGGSVTDFLRHQWGYDEILHTLNLPRYRQVEDLTEIVHYEHAGQEHEEERIKNWSKRIDHRHHAIDALTVALTRQAYIQRLNSLNAEFTREEMLK

SEQ ID NO: 1254 - protein, 1266 aa, unidentified; identical to SEQ ID NO: 1226
  REGION 1..1266: note = Description of Unknown: uncultivated organism with predicted taxonomy: Bacteroides
  REGION 1..1266: note = MG16-173 effector

SEQ ID NO: 1255 - protein, 1149 aa, unidentified
  REGION 1..1149: note = Description of Unknown: uncultivated organism with predicted taxonomy: Bacteroidetes
  REGION 1..1149: note = MG16-174 effector
MKKKILGLDLGVGSIGWALIETEDNQPKQILGMGSRIVPISKDDNDQFSKGQAITKNADRTQRRTTRKGYNRYQMRRALLTQALRNNNMLPERMDENVIDLWKLRSDAATEGHQLTLSQIGRVLYHMNQKRGYKHSKADDNGDSKQTKYVEEVNQRYKEIQEAHQTIGQHFYLELLRSKIERANGPYYTYRIKDQVFPRAAYMAEFDQIMQTQRVFYPEVLTDEFIDTLRNRIIFYQRPLKSCKHLVSLCEFEARPYKTKEGKIVYGGPKCAPRTSPLAQLCAIWETTNNITLTNRNNEKYEFTLEHRRQIVDFLCHNKEMKVSHLQKILGIGRNDGWYGGKAIGKGIKGNATLNQLRDALQGKYDQWLEMPIKRVDVVDATTGEVFWAVSAEIEETPLFRLWHAVYSLQNAEELAKTLREKFLITDESVIEALCRIDFVKPGYANKSHKFIRRLLPYLMEGMMYSEGCERININHSNSMTREEREQRPLKEHIQLLQKNQLRQPVVEKVLNQMINIVNSLKDQYGEIDEARVELARELKQSRDERESAYKAMGKNERRNKEIAEKIAEFGIRPSRSRIQKYKMWEESMHQCFYCGKTIDLAEFLNGADVEIEHIIPRSILFDDSFSNKVCACRRCNQEKSNQTAMEYMETKPVGELEAYKRRVDEAFTAKRISKTKRDHLLWRKADIPTDFIERQLRQSQYIAVKAVEVLQDGIRQVWTSGGSVTDFLRHQWGYDEILHTLNLPRYRQVEGLTEFVDYEHAGQKHTEERIKNWTKRIDHRHHAIDALTVALTQQGYIQRLNTLEASHDFMEKQVKETGTHYNEKKSILEKWINEQPHFSVEDVTSAVDGILVSFRAGKRVTTPARRAIYKGGKRVIVQRGIEVPRGALTNEFVYTKKGNKYARKYPINAISNPDNIVDETIRQLVKSRLIACGGNTNEAFKTPLYSAEGMEIKTVRCFNNKLSDRGVVAIKYNENNEPIGYAETDNNHHMAIYRQKDGSLKEKIVSFWDAVERKRYGVPVVIANPHEVWDSLLNTEFPQEFLAKLPKDDWQYVLSMQENEMFVLGMEDDEFNDAIERQDYTALNKHLYRVQSISHDDYYFCHHTETKATEKSESLKLGKTLRIRGVNSLKNYFPHKVKVDILGHIHKV

SEQ ID NO: 1256 - protein, 1258 aa, unidentified
  REGION 1..1258: note = Description of Unknown: uncultivated organism with predicted taxonomy: Prevotella
  REGION 1..1258: note = MG16-175 effector
MKNILGLDLGTTSVGWALIKVDDKNNPIDIQDMGVRIVPLAENEGDKFTKGQDITVNADRTRARGQRRNYDRFQLRRQALTEKLRSLNMLPDEHLIKLPIMELWQLRANAVTQKVSLNELGRILYHLNQKRGYKHSRTDAKDSKQRAYVKEINNRYGELIKSGMTIGQFFAKKLSETAVTVEGKTFYVYRIKDQIFPRKAYEEEYDSIMKCQQTFYQEILTNDVIDEIRNRIIYYQRDLRSCKHLVSVCEFEKRCFYDAEGNVKRNKKGEIIYDGPKVVPRTSPLFQIFKNWQSINNLRFHNRKNEYLYITKEQKQQIANIMDIHKVLKLEDVQNVLDITSESGWYCDKAIKAGIKGNTTKHAILSVLSSLPQSKITELTRFNLETEATNLVDEETGEVLVRIKSTYQEEPLYRLWHIIYSIKNEDERFNAISNLLKEFCIEDDSIASALKDLDFVTPGYANLSAKAISKILPYMMEGIDYSESCAYVGYNHSDSITKEENKRRELLDQIPALKKNELRQPTVEKILNQTINIFNQINTNLKKNGERIDEVRIELARELKQSKDERKETENGIRKQQKMNDEYANILKEEGIRPTRNRVLKYRLWRESNETCFYCERPINFNEFLKFSDIEREHIIPKKLIFDDSFANQVCSCRKCNKEKGGRTALDYMQTTPNLQMYLDKVDKMFQEHKISGKKHLHLLASYEDYLIRKKEGKETKDDIKIWETPIERQLRLSQYISRKAQELLRTACRDVIATSGSITDLIRHTWGYDTILHELNFDCYKKAGLTEFIKDEKTGKIREVIQDWTKRLDHRHHAIDALAVACTSRSIIQRINTLHASREDIRKEIKSTRKEWQENDLLQQWIKEKMPFDRKYVLHKVASILVSMKAGKKATVPGKRKIYKNGKPTIIQSGMRIPRGQLHEQTVYGAITQFSKNNKGKVFQTKEIVTRYKMGVGSMGYVFSGKETCDVINDKKNKSLVIIDGIEKAINYIVDRHIRDVVRNRLNEAFPENETYRSEAEKALAEGKKYDGKERCQKALDQLRKLSEKPLYADKNKNIIIKSARCYTGLSAVQPLRYNNNHEPISYVLTKNNHHVALYKDENGKFQECIYTFWQVVERSKFKLPLIITDTKALWNEIQQRENKGDTFPDSLIQSLPLPNWTFIESLQLNDMFVMDINDDDFEHYIATNNYEELGKKLYRIQNISSFDYSFRLHTDTTSKTTSDAALSKRYIRIKSIKAYIEHNPHKVKISLLGKIIRNTE

SEQ ID NO: 1257 - protein, 1154 aa, unidentified
  REGION 1..1154: note = Description of Unknown: uncultivated organism with predicted taxonomy: Bacteroidales
  REGION 1..1154: note = MG16-176 effector
MKKKILGLDLGVGSIGWALIETEDNQPQKILGMGSRIVPISKDDNDQFSKGQAITKNADRTARRTTRKGYNRYQMRRALLTQALRNNNMLPERMDENVIDLWKLRSDAATEGHQLTLPQIGRVLYHINQKRGYKHSKADKNGDSKQTKYVEAVNQRFKDIQEIHQTIGQHFYLELLRTRVHRENGDYYTYRIKDQVFPRAAYIAEFDQIMNVQRAYYPEVLTDEFIDTLRNCIIFYQRPLKSCKHLVSLCEFEMRPYKTKDGKIVYGGPKCAPRTSPLAQLCAMWETANNITLTNRNNERFEFTLDQRRQIVDFLCHNKEMKVTHLQKILGISKKDGWYGGKAIGKGIKGNATLNQLREALQGKYDQWLEMPIKRIDVVDATTSEVFWAVSPEIEETPLFKLWHAVYSLQNADELAKTLREKFQITDEAVIEALCKIDFVKPGYANKSHKFIRRLLPYLMEGMMYSEACKRININHSNSMTREEREQRPLSARIQLLQKNQLRQPVVEKVLNQMINIVNSLKDQYGEIDEARVELARELKQSRDERESAYKAMGQNERRNKEIAAKIAEFGIRPSRSRIQKYKMWEESLHQCFYCGKTIDLSEFLNGADVEIEHIIPRSILFDDSFSNKVCACRRCNQEKGNQTAMEYMETKSAAEQETYKQRVDEAFTAKRISKTKRDHLLWRKADIPADFIERQLRQSQYIAVKAVEVLQDGIRQVWTSGGSVTDFLRHQWGYDEILHTLNLPRYRQVEGLTEFVDFEHAGQKHTEERIKNWSKRIDHRHHAIDALTVALTQQGYIQRLNTLEASHDFMEKQVKEAGTKYNEKKSILEKWINEQPHFSVEEVTNAVDGILVSFRAGKRVTTPARRAIYKGGKRVIAQRGIEVPRGALTEETIYGKLGDKFTVKYPLDHPSMKPENIVDPTIRALVQKRVAERGKDAFKDPLYSAEGMKIKSVRCFANVTDNSVVPIKYNGEGQPIGYAKKGNNHHVAIYTDKSGKPQESVVSFWDAVERKRYGVPVVITNPHEVWDNLLNTDFPQEFLAKLPEDDWQYLFSMQENEMFVLGMEDDEFYDAIERQDYASLNKHLYRVQKIRSGEYTFRYHTETKVDDKYEGVANGTNTSFQLGALVSIRGFSSLFAKHPHKVKVDILGHIHKA

SEQ ID NO: 1258 - protein, 1154 aa, unidentified; identical to SEQ ID NO: 1234
  REGION 1..1154: note = Description of Unknown: uncultivated organism with predicted taxonomy: Bacteroidia
  REGION 1..1154: note = MG16-177 effector

SEQ ID NO: 1259 - protein, 1104 aa, unidentified
  REGION 1..1104: note = Description of Unknown: uncultivated organism with predicted taxonomy: Porphyromonas sp. oral taxon 278
  REGION 1..1104: note = MG16-178 effector
MKKKILGLDLGVGSIGWALIETENDQPKQIIGMGSRIVPISKDDNDQFSKGQAISKNADRTARRTTRKGYDRYQLRRSLLTQVLRQNGMLPERMDENVIDLWKLRSDAASEGHQLTLAQIGRVLYHINQKRGYKHAKADNNGDSKQTKYVEAVNQRYKEIQESKQTIGQHFYLELLRSKVDGVRGPYYTFRIKDKVFPRAAYMDEFDQIMRVQRDYYPDVLTEELIDTLRNRIIFYQRPLKSCKHLVGLCEFEMRPYKTQEGNIVYSGPRCAPRTSPLAQLCAMWESVNNITLTNRNNERYEFSLEERQQIVEHLCTHEVLKITDLYKILDISKKDGWYGGKAIGKGLKGNTTLNQLRKALNGKYQEWLEMPIERVDDVDNTTAEVFWVVSPKVEETPLFKLWHAVYSLQDTDELAKTLCSKFGITDQEVIEALCKIDFVKPGYANKSHKFIRRLLPYLMKGMMYSEACERIGINHSNSMTAAERNARPLAEHIELLQKNALRQPVIEKILNQMINLVNRLQQEYGPIDEARVELARELKQSREERESAYKAINKNERENAERAAKIAEFGIRPSRSRVQKYKMWEESQHRCFYCGKMVDLAQFLNGADVEIEHIVPRSILFDDSFSNKVCACRECNKEKGNLTAMEYIETKPVGEQEAYKQRVAEAFDAHRISKTKRDHLLWRRADIPQDFIERQLRQSQYIAVKAVEILQKGIRTVWTSGGSVTDFLRHQWGYDEILHTLNLPRYRQVDELTEMVHYEHAGQEHDEERIKNWTKRIDHRHHAIDALTVALTRQSYIQRLNTLEASHDIMEKQVKEAGTQYNEKKSILEKWVAEQPHFPVADVTENVDGILVSFRAGKRVTTPARRAIYKGGKRTIVQTGLQVPRGSLTEETVYGRLEDKFVVKYPLDHPSMKPENIVDPTIRALVQKRVEEKGKDAFKEPIYSAEGMEIKSVRCYTSLSENGVVPVKFDEKGQPIGFAKKGNNHHVAIYQDKDGQYQEMVVSFWDAVERKKYGVPSVITNPRELWNSIMDIDLPQEFLLKLPQDDWQYVLSMQENEMFVLGMEEDEFHDALERHDYCSLNKHLYRVQKISHGEYVLRYHTET

SEQ ID NO: 1260 - protein, 1217 aa, unidentified; identical to SEQ ID NO: 1219
  REGION 1..1217: note = Description of Unknown: uncultivated organism
  REGION 1..1217: note = MG16-179 effector

SEQ ID NO: 1261 - protein, 1130 aa, unidentified
  REGION 1..1130: note = Description of Unknown: uncultivated organism with predicted taxonomy: Bacteroidales
  REGION 1..1130: note = MG16-180 effector
MKKKILGLDLGVGSIGWALIETENDQPKQIVGMGSRIVPISKDDNDQFSKGQAISKNADRTARRTTRKGYDRYQLRRALLTQVLRQNGMLPERMDENVIDLWKLRSDAATEGLQLTLPQIGRVLYHINQKRGYKHAKADDNGDSKQTKYVEAVNQRYADLQGEKQTIGQHFYLELLRSKVEGASGPYYTFRIKDKVFPRAAYIAEFDQIMRVQRAYYPEILTEELIDTLRNRIIFYQRPLKSCKHLVSLCEFEMRPYKTKDGKIVYSGPKCAPRTSPLAQLCAMWETANNITLTNRNNERYEFSLEERQQIVEHLCTHDALKLTDLYKILGISKKDGWYGGKAIGKGIKGNVTLNQLRKALNGKYGQWLEMPIEHVDVVDNTTAEVFWAVSPKVEETPLFKLWHAVYSLQDAEELAKTLRNKFGITDQEVIDALCKIDFVKPGYANKSHKFIRRLLPYLMEGMQYSEACTRIGINHSNYMTAAERDARPLAERIELLQKNALRQPVIEKILNQMINLVNRLQQEYGPIDEARVELARELKQSREERENAFKRNNQNERLNKEIADKIEEMGIRPSRSRIQKYKMWEESNHRCMYCGKTVSLAEFLNGADVEIEHIIPRSILFDDSFSNKVCACRECNHEKDNMTALDYLETKPAVEVDAYKQRVDEAFKEGRISKTKRDHLLWHKSDIPQDFIDRQLRQSQYIAVKAVEILQQGIRQVWTSGGSVTDCLRHQWGYDEILHTLNLPRYRQVEDLTEIVHYEHAGQEHDEERIKNWSKRIDHRHHAIDALTVALTRQAYITRLNSLNAEFTREEMLKEVEEANTVYNEKKSLLEKWVNEQPHFSVEDVTQSVDGILVSFRAGKRVTTPARRAIYNGGKRTIVQRGLQVPRGALTNEFVYTKNGNKYARKYPINAISNPENIVDPTIRQLIKARLAAFNGNAKEAFKEPLYSAEGMEIRTVRCYNNKLSDRGVVAMKYNERREPIGYAETDNNHHLAIYRDSKGELQESIVSFYEAVKRKIAGLPIMDEHPEPDWNLVQTMQENEMFVLGMNDEDFEKSIANDDYQLLNKHLYRVQSISHDDYYFCLHTESKATDKNECMKLGSILRIRGVNSLQKYNPHKVKIDIMGRITKA

SEQ ID NO: 1262 - protein, 1154 aa, unidentified; identical to SEQ ID NO: 1237
  REGION 1..1154: note = Description of Unknown: uncultivated organism with predicted taxonomy: Bacteroidales
  REGION 1..1154: note = MG16-181 effector

SEQ ID NO: 1263 - protein, 1219 aa, unidentified
  REGION 1..1219: note = Description of Unknown: uncultivated organism with predicted taxonomy: Prevotella
  REGION 1..1219: note = MG16-182 effector
MKKVLGLDLGVGSIGWCLIEKDDDNTPKRIIRMGSRIVPISSDEESGYTRGNAISKNADRTAKRTSRKCYDRYQLRRQALLNLLKRLGMEPSKKLIFEQNPLELWQKRADAASKEITIEELGRVLLHINQKRGYKHSRLSNSDSKETAYVQEVNSRYDDLKAEGLTIGQHFAAKLKENEQTSADGKKYYTYRIKEQVYPRHAYEEETEKILEVQSRYHADILTPDVCKEIKDIIFYQRDLKSCKNLVSLCEFESYTITKDGKEMTIGPKVAPRTSPLAQLSSILETANNITIRNRRNDELYISPEQRKAIADFLDNHEVMKLTDLYKILNIGRKDGWWAGKAIGKGLKGNTTKCQIREALSNLSKEQIESLTAFKLEYDEYVDAETGEVRKRINNTLAEKQPLYRLWHLLYSIKDVDELSGALRRLGIENEESIQNLCNLDFRTAGYANKSAKAIGRILPYLMDGMMYSDACELAGFDHSRRINPDRVLLTSLPQIQKNELRQPVVEKILNQLVNVVNALLEKEGPIDESRVELARELKQSKDERNEAFRRNNQNERLNKEYAERIKEYGLTPTRNRIMKMKMWEESEYTCMYCGQPVNVTEFLQGADVEREHIIPRGLLFDNSFTNQVCSCRRCNSQKGMRTAYDFIADDKGQEGLDSYIDRINDLFNRKQISRSKFNRLLVSHKAYMSRKAQGKETEEDKELWENFIDRQLRQSQYIARKSVEMLQQICKNVYFTSGSVTDFVRHQWGYDEILHDLNFERYMKAGLTSMVKQLHSGKEVEVERITNWTKRLDNRHHAVDALAIACTTQGMIQRLNTLNASREGILDELNSKEERVVDPERSMLEKWIYTQPHISYAQAKEAIDNIIISQRPNTRITVPGKRYITKNGKRALVQTGIIVPRGALHAEFVYGRIMKQEADGVTLTPQYVRKYKLGIGAQGFLFNGKEFYKEELKRDSKTGLSSIVVTDKIKDVLEKVVDGGIRHRILERLNRGFEEGADYRANVAQALSNLKNLDEDPIFSDDAKTRPIRTVRKYVSSSTMVAVRKDGNGKPMSFVEPDGNHHVAFYKNEDGTITESIVTKWQAVQRKLNRIPIIIDNPSQTWSEIMGRNDVPEELLQTLPKDKTTFLLSLQIGEAFIMGMDEADFQKAFEEKDMQTLAEHLYFVQSISSSDYRFRRHIEAQYDTNDINKEDKRFLRIRKIQALFEYNPHKAKITVLGD

SEQ ID NO: 1264 - protein, 756 aa, unidentified
  REGION 1..756: note = Description of Unknown: uncultivated organism with predicted taxonomy: Prevotella
  REGION 1..756: note = MG16-183 effector
MKKVLGLDLGVGSIGWCLIEKDDDNTPKRIIRMGSRIVPISSDEESGYTRGNAISKNADRTAKRTSRKCYDRYQLRRQALLNLLKRLGMEPSKKLIFEQNPLELWQKRADAASKEITIEELGRVLLHINQKRGYKHSRLSNSDSKETAYVQEVNSRYDDLKAEGLTIGQHFAAKLKENEQTSADGKKYYTYRIKEQVYPRHAYEEETEQILEVQSRYHADILTPDVCKEIKDIIFYQRDLKSCKNLVSLCEFESYTITKDGKEMTIGPKVAPRTSPLAQLSSILETANNITIRNRRNDELYISPEQRKAIADFLDNHEVMKLTDLYKILNIGRKDGWWAGKAIGKGLKGNTTKCQIREALSNLSKEQIESLTAFKLEYDEYVDAETGEVRKRINNTLAEKQPLYRLWHLLYSIKDVDELSGALRRLGIENEESIQNLCNLDFRTAGYANKSAKAIGRILPYLMDGMMYSDACELAGFDHSRRINPDRVLLTSLPQIQKNELRQPVVEKILNQLVNVVNALLEKEGPIDESRVELARELKQSKDERNEAFRRNNQNERLNKEYAERIKEYGLTPTRNRIMKMKMWEESEYTCMYCGQPVNVTEFLQGADVEREHIIPRGLLFDNSFTNQVCSCRRCNSQKGMRTAYDFIADDKGQEGLDSYIDRINDLFNRKQISRSKFNRLLVSHKAYMNRKAQGKETEEDKELWENFIDRHLRLSPYIARKSVEMLQQICKNVYSTSGSVTDFVRHQWGYDEILH

SEQ ID NO: 1265 - protein, 1154 aa, unidentified
  REGION 1..1154: note = Description of Unknown: uncultivated organism with predicted taxonomy: Bacteroidales
  REGION 1..1154: note = MG16-184 effector
MKKKILGLDLGVGSIGWALIETENDQPKQIIGMGSRIVPISKDDNDQFSKGQAISKNADRTARRTTRKGYDRYQLRRSLLTQVLRQNGMLPERMDENVIDLWKLRSDAASEGHQLTLAQIGRVLYHINQKRGYKHAKADNNGDSKQAKYVEAVNQRYKEIQESKQTIGQHFYLELLRSKVDGVRGPYYTFRIKDKVFPRAAYMDEFDQIMRVQRDYYPDVLTEELIDTLRNRIIFYQRPLKSCKHLVGLCEFEMRPYKTQEGNIVYSGPRCAPRTSPLAQLCAMWESVNNITLTNRNNERYEFSLEERQQIVEHLCTHEVLKITDLYKILDISKKDGWYGGKAIGKGLKGNTTLNQLRKAMNGKYQEWLEMPIERVDDVDNTTAEVFWVVSPKVEETPLFKLWHAVYSLQDTDELAKTLCSKFGITDQEVIEALCKIDFVKPGYANKSHKFIRRLLPYLMKGMMYSEACERIGINHSNSMTAAERNARPLAEHIELLQKNALRQPVIEKILNQMINLVNRLQQEYGPIDEARVELARELKQSREERESAYKAINKNERENAERAAKIAEFGIRPSRSRVQKYKMWEESQHRCFYCGKMVDLAQFLNGADVEIEHIVPRSILFDDSFSNKVCACRECNKEKGNLTAMEYIETKPVGEQEAYKQRVAEAFDAHRISKTKRDHLLWRRADIPQDFIERQLRQSQYIAVKAVEILQKGIRTVWTSGGSVTDFLRHQWGYDEILHTLNLPRYRQVDELTEMVHYEHAGQEHDEERIKNWTKRIDHRHHAIDALTVALTRQSYIQRLNTLEASHDIMEKQVKETGTQYNEKKSILEKWVAEQPHFPVADVTENVDGILVSFRAGKRVTTPARRAIYKGGKRTIVQTGLQVPRGSLTEETVYGRLEDKFVVKYPLDHPSMKPENIVDPTIRALVQKRVEEKGKDAFKEPIYSAEGMEIKSVRCYTSLSENGVVPVKFDEKGQPIGFAKKGNNHHVAIYQDKDGQYQEMVVSFWDAVERKKYGVPSVITNPRELWNSIMDKDLPQEFLLKLPQDDWQYVLSMQENEMFVLGMEEDEFHDALERHDYCSLNKHLYRVQKISHGEYVLRYHTETKVDDKYKGVEKGRDASLKLGALVSIRSFGSLFSKFPHKVKIDIMGRITKA

SEQ ID NO: 1266 - protein, 930 aa, unidentified
  REGION 1..930: note = Description of Unknown: uncultivated organism with predicted taxonomy: Fibrobacter
  REGION 1..930: note = MG16-185 effector
MKKILGLDLGVSSIGWSVISVDKNGDPSEILGMGSRIVPLSTDDANEFSTGNAISKNQKRTQKRTARKGYDRYQLRRENLTAELRKHQMLPDERLIKLPVLDLWTLRANAATEGCKLSLPEIGRVLYHINQKRGYKHAKADEAGDKKQTEYIENVNKRFAMIKELGLTIGQFFANKLKESEVVSEKGTFYTYRTKEQVFPRGAYIAEFDQIIEVQRKFYPQVFTDEFINRLRNEIIFYQRNLKSCKHLVSLCEFEKREYKNKDGKIVFDGPKVAPRTSPLFQICRIWEFVNNIRLDGYKETKALSQDERLKVVDFLDNHEKMTAKDFIKLLGLDKNDEWDLKRYFGKNGVQGNSTKTQLAAALANIPNTSELLRFNLALENSNYVNKSTGEVLKVISSDFQNEPLYMLWHTVYSISDKEELKNALNKKYGITDESVINSLFKIDFVKPGFGNKSAKAIRRILPFLQEGLVYSDACAEAGYNHSDSLTKSENEARTLLARLPQIKKNELRQPVIEKILNQMVNVVNAIYDEYGQIDEIRVELARELKQSKDERNTTASNIAKRERENEKIEAKIQEFGIRSSRNRIQKYRLWEESEQKCFYCGDTVNVKEFLSGLDVEVEHVIPKSLLFDDSFANKVCACRKCNAAKGNKTAYDFMEGQKKEVFDAYVKRVNDFYKDGKISKTKKERLLTTQSKIPSDFIERQLRQTQYIAKKALEMLKNVCYNVYATSGSITDFIRHIWGYDEILHQLNFERYKKGGLTEFREYDHKGETHTEERIQNWSKRLDHRHHAIDALVIAMTRQSIIQRLNHLNTERDAMFQEVEKQSKEWKNDYSMLQEWLRERKHFSTEDVAKKVSNILVSFKAGKRVATIGKRVKYEHEKKFILQTGIVIPRGPLSEESVYGKIKVLDRNKPLKYLFENPQSIVNTDIKSA

SEQ ID NO: 1267 - protein, 1222 aa, unidentified
  REGION 1..1222: note = Description of Unknown: uncultivated organism with predicted taxonomy: Prevotella
  REGION 1..1222: note = MG16-186 effector
MKKVLGLDLGVGSIGWCLVEKDDKNIPLRIIRMGSRIVPITKEEENGYTRGNAISKNADRTVKRTARKCYDRYQLRRKALVNLLKRCGMMPDKGLILEQSPLDLWQKRADAASKEISLEEVGRVLLHINQKRGYKHSRLSNSDKKETAYVQEVNSRYDKLKAEGLTVGQHFAAKLKENEQISADGKKYYNYRIKEQVYPRHAYEEEAKRILEVQSQFHTDVLTTNVCKEIFDTIFYQRDLKSCKNLVSFCEFESYTIKRNGKDITIGPKVAPRTSPLAQLSSILETANNITIRNRRNDELYISPEQRQAIANFLDNNEVMKLTDLYKILNIGRKDGWWAGKAIGKGLKGNTTKCQIRKALSKLSQEQIDKLTSFNLIFDEYVDEETGELRKRINNSHAEHQPLYRLWHLIYSIKDNDELSIALRSLGIEDEVCIHNLCNLDFRTAGYANKSAKAIGRILPYLMEGMMYSEACNRAGFDHSRRVNPERELLTSLPQIQKNELRQPIVEKILNQLVNVVNALLEKEGTIDEIRVELARELKQSKDERNETYRRNNQNEKKNKEYAERIKKYELTPTRNRIMKMKMLEESEYKCMYCGQPVKEKEFLQGADVEREHIIPRALLFDNSFTNQVCSCRSCNSQKGMRTAYDFIADDKGQEGLEAYIERINDLFNKKKISRSKLNRLLVSYKAYVSRKAQGKETEEDVQLWENFIDRQLRQSQYIAKKSVEILQQVCKNVYTTSGSVTDFVRHQWGYDEILHDLNFERFKKANLTTMVKQLHSGKEVEVERIKDWTKRLDNRHHAVDALAIACTTQGMIQRLNTLNASRDAMLDELNNKEQRMIDSERSMLEKWIISQPHVSCVEAKKEIDKILISLRPNTRITVPGKRYITKNGKRTLVQTGIIVPRGALHAEFVYGRIMKQEADGVTLTPQYVRKYKLGIGTQGYIFNGNETYKEELKKDKKTGLSQIVVTDKIKDVLDKIVDGGIRKRILERLNRGFEDGTDYRTNTAKALENLKNLDEDPIYSDDAKTRPIRTVRKYVNSSTMVAVRKDDNGKPVSFVVPDDNHHVAFYKDKDGVITESIVTKWQAVQRKLNHIPIIVDNPTQTWNDLVGRNDVPEELLQSLPKDNSEFLLSLQIGEAFIMGMEDADFHRAIEEKDIHNLAEHLYFVQNISSNNYRMRRHVEASFDTSDMNKEDQRFLNVSSIGAFFNYNPHKVKVTILGDIIK

SEQ ID NO: 1268 - protein, 1155 aa, unidentified
  REGION 1..1155: note = Description of Unknown: uncultivated organism with predicted taxonomy: Bacteroidales
  REGION 1..1155: note = MG16-187 effector
MKKKILGLDLGVGSIGWALIETEDNQPQKILGMGSRIVPISKDDNDQFSKGQAITKNADRTARRTTRKGYNRYQMRRALLTQVLRNNNMLPERMDENVIDLWKLRSDAATEGHQLTLPQIGRVLYHINQKRGYKHSKADENGDSKQTKYVEAVNQRFKDIQEAHQTIGQHFYLELLRTRVHRENGDYYTYRIKDQVFPRAAYIAEFDQIMSVQRAYYPEVLTDEFIDTLRNRIIFYQRPLKSCKHLVSLCEFEMRPYKTKDGKIVYGGPKCAPRTSPLAQLCAMWETANNITLTNRNNERFEFTLDQRRQIVDFLCHNKEMKVTHLQKILGISKKDGWYGGKAIGKGIKGNATLNQLREALQGKYDQWLEMPIKRIDVVDATTSEVFWAVNPDVEETPLFKLWHAVYSLQNADELAKTLREKFQITDEAVIEALCKIDFVKPGYANKSHKFIRRLLPYLMEGMMYSEACERININHSNSMTREEREQRPLSARIQLLQKNQLRQPVVEKVLNQMINIVNSLKDQYGEIDEARVELARELKQSRDERESAYRAMGQNERRNKEIAAKIAEFGIRPSRSRIQKYKMWEKSLHQCFYCGKTIDLSEFLNGADVEIEHIIPRSILFDDSFSNKVCACRRCNQEKGNQTAMEYMETKSAAEQEAYKQRVDEAFTAKRISKTKRDHLLWRKADIPSDFIERQLRQSQYIAVKAVEVLQDGIRQVWTSGGSVTDFLRHQWGYDEILHTLNLPRYHQVEGLTEFVDFEHAGQKHTEERIKNWSKRIDNRHHAIDALTVALTQQGYIQRLNTLEASHDFMEKQVKEAGTKYNEKKSILEKWINEQPHFSVEDVTNAVDGILVSFRAGKRVTTPARRAIYKGGKRVIVQRGIEVPRGALTEETIYGKLGDKFTVKYPLDHPSMKPENIVDPTIRALVQKRVAERGKDAFKEPLYSAEGMKIKSVRCYTSLSENGVVPVKYDEAGKPIGYAKKGNNHHIAIYQDKDGQYQEMVVSFWDAVERKRYGVPVVITNPHEVWDSLLNKDLPQEFLAKLPNDNWQFVLSMQENEMFVLGLEDDEFNDAIERQDYAALNKHLYRVQKISHREYTFRYHTETKVDDKYEGMENGRTTSISLGASIPFKSISALLAKFPHKVKVDLLGHIHSKK

SEQ ID NO: 1269 - protein, 1222 aa, unidentified
  REGION 1..1222: note = Description of Unknown: uncultivated organism
  REGION 1..1222: note = MG16-188 effector
MKKVLGLDLGVGSIGWCLIEKDDNNTPKRILRMGSRIVPISSDEETGYTKGNAISKNADRTAKRTARKCYDRYQLRRQALVNLLKRLGMEPNKNLMLEQTPMELWQKRADAASKEISLEELGRVLLHINQKRGYKHSRLSNSDSKETAYVQEVNSRYDDLKAEELTVGQHFAAKLKENEQISADGKKYYNYRIKEQVYPRHAYEEETKKILEVQSRYHSDVLTPDVCKEMMDIIFYQRDLKSCKNLVSLCEFESYTITKDGKEITIGPKVAPRTSPLAQLSSILETANNITIRNKRNDELYISPEQRKAIADFLDNHEVMKLTDLYKILNIGRKDGWWAGKAIGKGLKGNTTKCQIREALSAHPKEQVDSLIAFQLEFDEYVDEETGEVSKRINNTLAEQQPLYKLWHMLYSIKDNRELSGALQHLGIEDNESIEKLCNLDFRTAGYANKSAKAIGRILPYLMEGVMYSEACERAGLDHSRRIDPNRPLLKHLPQIQKNELRQPVVEKILNQLVNIVNALLEKEGAIDEIRVELARELKQSKDERNETFKRNNQNERQNKEYAERIKKYGLTPTRNRIMKLKMWEESEHACMYCEQPVDPIEFLKGSDVEREHIIPRGLLFDNSFTNQVCSCRRCNSKKGMRTAYDFIADDKGQEGLNAYIEHINDLFDKKKISRSKLNRLLVSHKAYISRKAQGKETEEDKDLWENFIDRQLRQSQYIAKKSVEMLQLVCKNVYVTSGSVTDFVRHQWGYDELLHDLNFERFKKAGLTTMVKQLHSGEEVEVERIANWTKRLDNRHHAVDALAIACTTQSMIQRLNTLNASRDDMLEELNSKDQRLVDPERSMLEKWVFIQPHITYADAKKEIDKIVISQRPNTRITVPGKRYITKNGKRTLVQTGIIVPRGALHAEFVYGRIMKQKTDGVTMTPQYVRKYKLGIGAQGFLFNGKEFYKEELKKDSKTGLSKIVVTDKIKDVLEKIVDGGIRQRILERLNRGFEEGTDYRANVAQALANLKNLDEDPIYSDDAKTRPIRTVRKYVSSSTMVAVRKDDNGKPVAFVEPDGNHHVAFYKDENGVITETIVTKWQAVQRKLYHIPIIIDNPSQTWNEVLERKDIPEELLQSLPKDSFTFLLSLQIGEAFIMGMEEADYQRALEEKDMQTLAKHLYFVQSISSCDYRFRRHVEAQYDTNDINKEDLRFLRIRNLQALFEYNPQKVKVTVLGDLIH

SEQ ID NO: 1270 - protein, 1222 aa, unidentified
  REGION 1..1222: note = Description of Unknown: uncultivated organism
  REGION 1..1222: note = MG16-189 effector
MKKVLGLDLGVGSIGWCLIEKDDNNTPKRILRMGSRIVPISSDEETGYTKGNAISKNADRTAKRTARKCYDRYQLRRQALVNLLKRLGMEPNKNLMLEQTPMELWQKRADAASKEISLEELGRGLLHINQKRGYKHSRLSNSDSKETAYVQEVNSRYDDLKAEELTVGQHFAAKLKENEQISADGKKYYNYRIKEQVYPRHAYEEETKKILEVQSRYHSDVLTPDVCKEMMDIIFYQRDLKSCKNLVSLCEFESYTITKDGKEITIGPKVAPRTSPLAQLSSILETANNITIRNKRNDELYISPEQRKAIADFLDNHEVMKLTDLYKILNIGRKDGWWAGKAIGKGLKGNTTKCQIREALSAHPKEQVDSLIAFQLEFDEYVDEETGEVSKRINNTLAEQQPLYKLWHMLYSIKDNRELSGALQHLGIEDNESIEKLCNLDFRTAGYANKSAKAIGRILPYLMEGVMYREACERAGLDHSRRIDPNRPLLKHLPQIQKNELRQPVVEKILNQLVNIVNALLEKEGAIDEIRVELARELKQSKDERNETFKRNNQNERQNKEYAERIKKYGLTPTRNRIMKLKMWEESEHACMYCEQPVDPIEFLKGSDVEREHIIPRGLLFDNSFTNQVCSCRRCNSKKGMRTAYDFIADDKGQEGLNAYIEHINDLFDKKKISRSKLNRLLVSHKAYISRKAQGKETEEDKDLWENFIDRQLRQSQYIAKKSVEMLQLVCKNVYVTSGSVTDFVRHQWGYDELLHDLNFERFKKAGLTTMVKQLHSGEEVEVERIANWTKRLDNRHHAVDALAIACTTQSMIQRLNTLNASRDDMLEELNSKDQRLVDPERSMLEKWVFIQPHITYADAKKEIDKIVISQRPNTRITVPGKRYITKNGKRTLVQTGIIVPRGALHAEFVYGRIMKQKTDGVTMTPQYVRKYKLGIGAQGFLFNGKEFYKEELKKDSKTGLSKIVVTDKIKDVLEKIVDGGIRQRILERLNRGFEEGTDYRANVAQALANLKNLDEDPIYSDDAKTRPIRTVRKYVSSSTMVAVRKDDNGKPVAFVEPDGNHHVAFYKDENGVITETIVTKWQAVQRKLYHIPIIIDNPSQTWNEVLERKDIPEELLQSLPKDSFTFLLSLQIGEAFIMGMEEADYQRALEEKDMQTLAKHLYFVQSISSCDYRFRRHVEAQYDTNDINKEDLRFLRIRNLQALFEYNPQKVKVTVLGDLIH

SEQ ID NO: 1271 - protein, 1224 aa, unidentified
  REGION 1..1224: note = Description of Unknown: uncultivated organism with predicted taxonomy: Prevotella ruminicola
  REGION 1..1224: note = MG16-190 effector
MKKVLGLDLGVGSIGWCLIEKDDNNTPRRILRMGSRIVPISSDEESGYTRGNAISKNADRTAKRTARKCYDRYQLRRQALVNLLKILGMEPNKNLMFEQTPLELWQKRADAASKEITLEELGRVLLHINQKRGYKHSRLSNSDSKETAYVQEVNSRYVVLRAEGLTVGQHFAAKLKENEQESTDGKKYYNYRIKEQVYPRHAYEEEVKKILEVQSQYHSDVLTSDVCKEIGDIIFYQRDLKSCKNLVSFCEFESYTIKKDGKKITIGPKVAPRTSPLAQLSSILETANNITIRNRRNDELYISPEQRKAIAEFLDNHEVMKLTDLYKILNIGKKDGWWAGKAIGKGLKGNTTKCQIREALSGLPKEQVDSLTAFKLEIDEYVDEETGEVRKRIDNTKAEKQPLYRLWHLLYSIKDNDELTGALRHLGIENKEIIEKLCKIDSRTAGYANKSAKAIGRILPYLMDGVMYSEACGRAGYDHSRRVNPDRVLLTHLPQIQKNELRQPVVEKILNQLVNIVNALLEKEGAIDEIRVELARELKQSKDERNEVFKRNSQNERKNKEYAERIKEYGLTPTRNRIMKMRMWEESEYTCMYCGQPVNVSEFLKGADVEREHIIPRGLLFDNSFTNQVCSCRRCNSKKGMRTAYDFIADEKGQEGLDIYIDRINDLFNRKKISRSKFNRLMASHKAYMSRKAQGKETDEDKELWENFIDRQLRQSQYIAKKSVEMLQQVCKNVYTTSGSVTDFVRHQWGYDELLHELNFERFKKAGLTAMVKQLQSGKEVEVERIKDWTKRLDNRHHAVDALAIACTTQGMIQRLNTLNASRADMLEELSSNDRRLVDPDRSMLEKWIYVQPHISYAEAKNEIDKIVISQRPNTRITVPGKRYVIKSGKRTLAQTGIIVPRGALHAEFVYGRIQKQEADGDTKTYQYVRKYKLGIGAQGFLFNGKEFYKEELKKDSKTGLSSIVVTDKIKDVLDKIVDGGIRQRILERLNRGFEEGADYRANVARALENLKNLDEDPIYSDDAKTRPIRTVRKYVSSSTMVAVRKDSNGKAISFVEPDGNHHVAFYKDENDVITENIVTKWLAVQRKLNHMPIIIDNPSQTWSEILKRNDVPEELLQSLPKDSSTFLLSLQIGEAFIMGMEDGDYQKALEEKDMQTLADHLYFVQNISSNNYRLRRHVESSFDTTDMNKEDQRFLNIKSVNSFFNSNPHKVKITILGDIITDV

SEQ ID NO: 1272 - protein, 1155 aa, unidentified
  REGION 1..1155: note = Description of Unknown: uncultivated organism with predicted taxonomy: Labilibaculum filiforme
  REGION 1..1155: note = MG16-191 effector
MKKKILGLDLGVGSIGWALIETEDNQPQKILGMGSRIVPISKDDNDQFSKGQAITKNADRTARRTTRKGYNRYQMRRALLTQVLRNNNMLPERMDENVIDLWKLRSDAATEGHQLTLPQIGRVLYHINQKRGYKHSKADENGDSKQTKYVEAVNQRFKDIQEAHQTIGQHFYLELLRTRVHRENGDYYTYRIKDQVFPRAAYIAEFDQIMSVQRAYYPEVLTDEFIDTLRNRIIFYQRPLKSCKHLVSLCEFEMRPYKTKDGKIVYGGPKCAPRTSPLAQLCAMWETANNITLTNRNNERFEFTLDQRRQIVDFLCHNKEMKVTHLQKILGISKKDGWYGGKAIGKGIKGNATLNQLREALQGKYDQWLEMPIKRIDVVDATTSEVFWAVNPDVEETPLFKLWHAVYSLQNADELAKTLREKFQITDEAVIEALCKIDFVKPGYANKSHKFIRRLLPYLMEGMMYSEACERININHSNSMTREEREQRPLSARIQLLQKNQLRQPVVEKVLNQMINIVNSLKDQYGEIDEARVELARELKQSRDERESAYKAMGQNERRNKEIAAKIAEFGIRPSRSRIQKYKMWEKSLHQCFYCGKTIDLSEFLNGADVEIEHIIPRSILFDDSFSNKVCACRRCNQEKGNQTAMEYMETKSAAEQEAYKQRVDEAFTAKRISKTKRDHLLWRKADIPSDFIERQLRQSQYIAVKAVEVLQDGIRQVWTSGGSVTDFLRHQWGYDEILHTLNLPRYHQVEGLTEFVDFEHAGQKHTEERIKNWSKRIDNRHHAIDALTVALTQQGYIQRLNTLEASHDFMEKQVKEAGTKYNEKKSILEKWINEQPHFSVEDVTNAVDGILVSFRAGKRVTTPARRAIYKGGKRVIVQRGIEVPRGALTEETIYGKLGDKFTVKYPLDHPSMKPENIVDPTIRALVQKRVAERGKDAFKEPLYSAEGMKIKSVRCYTSLSENGVVPVKYDEAGKPIGYAKKGNNHHIAIYQDKDGQYQEMVVSFWDAVERKRYGVPVVITNPHEVWDSLLNKDLPQEFLAKLPNDNWQFVLSMQENEMFVLGLEDDEFNDAIERQDYAALNKHLYRVQKISHREYTFRYHTETKVDDKYEGMENGRTTSISLGASIPFKSISALLAKFPHKVKVDLLGHIHSKK

SEQ ID NO: 1273 - protein, 1222 aa, unidentified
  REGION 1..1222: note = Description of Unknown: uncultivated organism with predicted taxonomy: Bacteroidales
  REGION 1..1222: note = MG16-192 effector
MKKVLGLDLGVGSIGWCLIEKDDNNTPKRILRMGSRIVPISSDEETGYTKGNAISKNADRTVKRTARKCYDRYQLRRKALVNLLKRLGMEPNENLMFEQTPIELWQKRADAASKEVSLEELGRVLLHINQKRGYKHSRISNSDIKETAYVQEVNSRYDDLKAEGLTIGQHFAAKLKENEQETADGKKYYNYRIKEQVYPRHAYEEEVKQILEVQSQYNPDVLSSDVCKEIMDIIFYQRDLKSCKNLVSLCEFESYTITKDGKVINIGPKVAPRTSPLAQLSSILETANNITIRNRKNDELYISPEQRKAIADFLDNHEVMKLTDLYNILNIGRKDGWWAGKAIGKGLKGNTTKCQIREALSGLPKEQVDSLTAFNLEIDENVDEETGEVRKRINNTQAEQQPLYKLWHMLYSIKDNKELAGALNHLGIEDEESIEKLCKLDFRTAGYANKSAKAIGRILPYLMEGMMYSEACELAGFDHSRRINPDRVLLTHLPQIQKNELRQPVVEKILNQLVNIVNALLENEGAIDEIRVELARELKQSKDERNEAFKRNNQNERLNKELAERIMKYGLTPTRNRILKLKMWEESEHSCMYCGQPVDPVEFLKGVDVEREHIIPRGLLFDNSFTNQVCSCRRCNSKKGMRTAYDFIADDKGQEGLDTYIDRINDLFNRKKISRSKFNRLLASHKAYISRKSQGKETDEDKELWENFIDRQLRQSQYIAKKSVEILLQVCKNVYTTSGSVTDFVRHQWGYDELLHELNFERFKKAGLTAMVKQLHSGKEVEVERIKDWTKRLDNRHHAVDALAIACTTQGMIQRLNTLNASRDVILEELNSNDQRLVDPDRSMLEKWIYVQPHISYAEAKNEVDKIVISQRPNTRITVPGKRYVTKNGKRTLAQTGIIVPRGALHAEFVYGRIMRQEADGVTMTPQYVRKYKLGIGAQGFLFKGDEVYKEEVKKNSKTGLSKIVVTDKIKDVLDKIVDGDIRQRILERLNRGFEEGVDYRVNVAKALANFKNLDDDPVYSDDAMTRPIRTVRKYVSSSTMVAIRMDSNGRPIAFVEPDDNHHVAFYKDEDDEKKEIVVTKLLAVQRKLNHIPIIIDNPSQTWSEVLGRNDVPEELLQSLPKDKSIFLLSLQKGEAIIMGLEEMDYQRAILAKDMRTLCNHLFYVQSASSRDYRFRRHVEVKYDTKDINKDDMRFLRIRTINELFKINPHKVKVTVLGDIIE

SEQ ID NO: 1274 - protein, 1226 aa, unidentified
  REGION 1..1226: note = Description of Unknown: uncultivated organism
  REGION 1..1226: note = MG16-193 effector
MKKILGLDLGVGSIGWSVISVDENGDPSEILGMGSRIVPLSTDDANEFSTGNAISKNQKRTQKRTARKGYDRYQLRRENLTAELRKHQMLPDEHLIKLPVLDLWTLRANAATEGFKLSLPEIGRVLYHINQKRGYKHAKADEAGDKKQTEYVENVNKRFAMIKDLGLTIGQFFASKLKESEVVSEKGKFYTYRTKEQVFPRGAYIAEFDQIIEVQRKFYPQVFTDEFINRLRNEIIFYQRNLKSCKHLVSLCEFEKHEYKNKDGKIVFDGPKVAPRTSPLFQICRIWEFVNNIRLENGYKEARTLSQDERLKVVDFLDNHEKMTAKDFTKLLELNKNDEWDLKRYFGKNGTQGNTTKTQLATALANIPNASELLQFNLTLENSNYVNEKTGEVLKVVSSDFQNEPLYMLWHTVYSLSDKEGLKNTLNKKYGITEESVINNLFKIDFVKPGFGNKSAKAIRRILPFLREGLVYSDACVEAGYNHSDSLTKSENEARTLLSRLPQIKKNELRQPVIEKILNQMVNIVNAIYDEYGQIDEIRVELARELKQTKDERNTTASNIAKRERENKNIEAKIQEFGIRSSRNRIQKYRLWEESDQKCFYCGQPVQAKEFLSGLDVEVEHIIPKSLLFDDSFANKVCACRKCNAAKGNKTAYDFMKGQKEEVFDAYVKRVNDFYKDGKISKTKKERLLTTQSDIPSDFIERQLRQTQYIAKKAIEMLKDICYNVYATSGSVTDFIRHTWGYDEILHQLNFDRYKKGGLTELREYDHKGETHTEERIQNWSKRLDHRHHAIDALVIAMTRQSIIQRLNHLNTERDAMFQEVEKQSKEWKNDYSMLQEWLRERKHFPTEDVAKKVSDILVSFKAGKRVATIGKRVKYEHGKKIVLQTGITIPRGPLCEESVYGKIKVLDRNKPLKYLLENPQYIVNADIKFAITNRLAQYENDVKKAVQSLKKSPVVLANGKKLENADCYKEEFVIKYSLNGFKAKDIDSVVDNRIRNVLYKRLEEYNGNEKEAFKDIENNPIYADATHKIKIRNVRCFTGLSAVVPVKKDENGNAIGFVKPGNNHHVAIYKDENGNLQESVVTFWHAVERKKYGLPIVITNPIDAWKLAREQNCPKEFLDSLPNENWIYEQSLQENEMFVMGLDDNMYDKAVAEKNYALLNQHLYRVQKISSSDYYFRYHLETKLDDSASAIEIGKYKRIRSFKAFALAKPHKVKISLLGKLITRV

SEQ ID NO: 1275 - protein, 760 aa, unidentified
  REGION 1..760: note = Description of Unknown: uncultivated organism with predicted taxonomy: Sediminibacterium sp. C3
  REGION 1..760: note = MG16-194 effector
MKKVLGLDLGVGSIGWCLVEKDDNNTPTRILRMGSRIVPISSDEETGYTKGNAISKNADRTAKRTARKCYDRYQLRRKALQEMLKRLGIEPNKKLMLEQAPLELWQKRADAVSTKIALEDLGRVLLHINQKRGYKHSRLNNSDSKETAYVQEVNNRYDELKAEGLTVGQHFAAKLKDNEQTSADGKKYYNYRIKEQVFPRHAYEEEAKKILETQSRYYPDLLTPDVCKEIMNIIFYQRDLKSCKNLISYCEFESYTITKDGKEITIGPKVAPRTSPLAQLSSILESANNITIRNRKNDELYISPEQRKALADFLDNHEVMKVSDLYGILNIGRKDGWWAGKAIGKGLKGNTTKCQLREALKNLPQEKINALTSFNLEYDEYVDEETGEVRKRVNNHLAERQPLYRLWHLIYSIKDSDELAAALRRFGIDDEESILNLCNLDFRTPGYANKSAKAIGRILPYLAEGVMYSDACNMAGFDHTRRLNPNRPLLTSLPQIQKNELRQPVVEKILQQVVNIVNTLIEKEQSIDEIRVELARELKQSKDERNETFRRNSQNEKKNKEFAEHIKEYNLTPTRNRILKWKLYEESDHSCMYCGQSINIRDFLQGADAEREHIVPRGLLFDNSFTNQVCACRSCNSKKGMRTAYDFIEDEKGEEGLHSYIEHINYLFNKKNISRSKFNRLLVSHKAYLKRKALGKETEEDKELWDNFIDRQLRLSQYIAKKSVEMLQQVCRNVYSTSGSVTDFVRHQWGYDELLHDLNF

SEQ ID NO: 1276 - protein, 1248 aa, unidentified
  REGION 1..1248: note = Description of Unknown: uncultivated organism with predicted taxonomy: Bacteroides
  REGION 1..1248: note = MG16-195 effector
KMKNILGLDLGTTSIGWALIKTDNNNIPCEIRGMGVRRVPLAENEGDKFAQGQSVTINADRTKARGIRRNNDRYKLRRQALSEKLSSLGIEPNDSLMKLHMMDLWQLRANAATDRVSLPELGRILHHLNKKRGYKHSSKDEDKSMRDFLKNVRERYSELHCLNMTLGQFFAKKLLETAVTKGDKTYYVFRIKDLVFPRKAYEEEYDTIMQCQKKFYPNVLTDEVIDYIRNHIIYYQREPRSCKHLVSVCEFEKRHFYDKEGQLKRNNRNEIIYDGPKVAPRTSPIFQLYITCQSANNIRFHNKKKDYLYITREQRQRIVHFMDTNEKLKLADVKRILEINDKSEWYCDNAIKNGIKGNTTKCAIVNALSSLPQEKIAEITRFHLETEPTKDVDTETGEVLVKIKNNYQHEPLYRLWHIIYSIKKEEERTHAVTKFLQSFGVDNDDIVQKLSNIDFTTPGYGNISAKAICRILPYMMEGIEYSEACEYVGINHSNSLSKEENERRELMCQLPAIKKNSLRQPTVEKILNQTINVFNRINAELSQTGECINEVRVELARELKQSKDERHDTSEVIKALENKNKEYKTFIEKEYKLKATRKNLLRYRLWIESNQSCFYCLKPIKFTPFANESEEEREHILPKALHYDDSFANQVCSCKDCNSTKGGRTAMDYMRTTPYLQHYIDRVNKLYQANKISGKKYSHLLASYDDYQLRKKEGKETKEDILIWEKPIDRQLRLSQYISKKAMEILSFGCRDVVATSGSITAIIRHAWGWDTILEELNIQTYRNANLTEVIEVKSKGQNKKMETIKNWTKRLDNRHHAIDALVVACTSSSIIQRINTLNASKQKMRDEITSARKKWDENNILTQWIREKNPLNRKEVLEHVSSIFISMKAGKKVTVPGKRKEFKHGKAMIKQEGLRIPRGPLHEEGLYGSILIEGKKEIVIRYKLGKGTIGYLFTGKEKCEVKKNGNEYTLKDGIAAILDSIVDKHIRNLVENRLNRIFPDGETYRSEAEKALKEGREYNGEKRCKEALEQLKGLDDDPLFHDKDETRIIKSIRCKTGLNAVRPIRFNDNNEAITYVLPKNNHHVAIYRDENGKFIECVCTFWDAVGRVNQNIPCIISNIEEVWNDIHRREANGEYFSVEFKNTLPKEDWTFVESMQQNEMFVMDMDRETLERNIASGNYSVISQHLYRVQALSAGDYIFRIHTDTKSERTKEANLSKRFIRLSLKKFVASEHQKVQLSILGGITIAQ

SEQ ID NO: 1277 - protein, 891 aa, unidentified
  REGION 1..891: note = Description of Unknown: uncultivated organism with predicted taxonomy: Gammaproteobacteria bacterium
  REGION 1..891: note = MG16-196 effector
MKKVLGLDLGVGSIGWCLIEKDDNNTPKRILRMGSRIVPISSDEETGYTKGNAISKNADRTAKRTARKCYDRYQLRRKALVNLLKRLGMEPNENLMFEQTPIELWQKRADAASKEVSLEELGRVLLHINQKRGYKHSRISNSDSKETAYVQEVNSRYDDLKAEGLTIGQHFAAKLKENEQETADGKKYYNYRIKEQVYPRHAYEEEVKQILEVQSQYNPDVLSSDVCKEIMDIIFYQRDLKSCKNLVSLCEFESYTITKDGKVINIGPKVAPRTSPLAQLSSILETANNITIRNRKNDELYISPEQRKAIADFLDNHEVMKLTDLYNILNIGRKDGWWAGKAIGKGLKGNTTKCQIREALSGLPKEQVDSLTAFNLEIDENVDEETGEVRKRINNTQAEQQPLYKLWHMLYSIKDNKELAGALNHLGIEDEESIEKLCKLDFRTAGYANKSAKAIGRILPYLMEGMMYSEACELAGFDHSRRINPDRVLLTHLPQIQKNELRQPVVEKILNQLVNIVNALLENEGAIDEIRVELARELKQSKDERNEAFKRNSQNERENKEYAERIKEYGLTPTRNRIMKMRMWEESEYTCMYCGQPVNVVEFLKGADVEREHIIPRGLLFDNSFTNQVCSCRRCNSKKGMRTAYDFIADDKGQEGLDTYIDRINDLFNRKKISRSKFNRLLASHKAYISRKSQGKETDEDKELWENFIDRQLRQSQYIAKKSVEILLQVCKNVYTTSGSVTDFVRHQWGYDELLHELNFERFKKAGLTAMVKQLHSGKEVEVERIKDWTKRLDNRHHAVDALAIACTTQGMIQRLNTLNASRDVILEELNSNDQRLVDPDRSMLEKWIYVQPHISYAEAKNEVDKIVISQRPNTRITVPGKRYVTKNGKR

SEQ ID NO: 1278 - protein, 1250 aa, unidentified
  REGION 1..1250: note = Description of Unknown: uncultivated organism with predicted taxonomy: Bacteroides
  REGION 1..1250: note = MG16-197 effector
MKNILGLDLGTTSVGWALIKAEDNNTPVEIQGMGVRIVPLAENEGDKFTRGQDVTVNADRTTARGIRRNYDRYQLRRQALTEKLRQLNMLPDENLIKLPVLELWQLRANAAKEKVTLSELGRVLYHLNQKRGYKHSQADKKDSKQRAYVKEINSRYTELNSLGMTIGQFFAQKLEETAVTHDGKTLFVYRIKDQIYPRQAYEEEYDIIMKCQQGFYPDILTDEVIDEIKNRIIYYQRDLRSCKHLVSICEFEKRCFYDAEGNVKRNEKGEIIYDGPKVAPRTSPLFQIFKNWQSINNIRFHNRRNEYLFISKEQRQVIAGVMDNAETLKLKDVQSVLGLTSKSGWYCDKAMKSGIKGNTTKCAILSALSSLPDSTIKDITRFNLETEETKNVDEETGEILLRIKNTYLDEPLYRLWHIIYSIKNVDERFNAIAKFLKEFNVEDASVVNALNDIDFVTPGYANLSSKAMCKMLPYLMDGLDYSDSCEYVGYNHSGSLTKEENANRELLNQIPALKKGELRQPTVEKILNQTINVFNQLSARLEKRGERIDEVRVELARELKQSKDERKEASDGIRKQQKRNEEYAKMLVEEGVRPTRNRILRYRLWEESNKRCFYCGQPISFNEFIKSSDAEREHVIPKALMFDDSFANQVCSCRECNKEKGGRTALDYMRTKSNLQAYLDRVDDMYQSHQIGGKKHSHLLASYDDYLSRKKEGKETKEDIMIWETPIERQLRLSQYISKKAQEILKTACREVVATSGTITDLIRHTWGYDTILHELNFPNYKEAGLTSFVTDEKTNQQREVIKDWSKRLDHRHHAVDALAVACTSRSIVQHINTLHASRDEMRKEVNSARKDWKDNNLLQQWIMEKKPFDRQYVLHKVASILVSMKAGKRTTVPGKRKVYKNGKPITIQTGLRIPRGQLHEQTIYGAIKQYDKDGKETTKIVTRYKVEDIFKGKETCDVVLDKKTNQYYINDEIEKALSYVVDKHIRDVIKERLNEAFPDGETYRSEAEKALVEGKPYKGENRCKQAFEQLKTLDEHPLYADKNKSIVIKKVRCYTGLSAVQPLRYNNNNDPISYVLTKNNHHVAIYADENGKYKECIYTFWQAVERSKYRLPLIIKDPKALWDEITQRENNGENFPDSLIKSLPMRDWTFIESLQSNDMFVMDMDDNDFEICISTNNYEELGKHIYRIQSISTLDYFFRLHTDTTSTTTPEAALSKRFIRIKSFKSYIAHNPHKIQVSLLGKIFTNQND

SEQ ID NO: 1279 - protein, 818 aa, unidentified
  REGION 1..818: note = Description of Unknown: uncultivated organism with predicted taxonomy: Bacteroidales
  REGION 1..818: note = MG16-198 effector
MKKVLGLDLGVGSIGWCLIEKDDNNTPKRILRMGSRIVPISSDEETGYTKGNAISKNADRTAKRTARKCYDRYQLRRQALVNLLKRLGMEPNKNLMFEQTPIELWQKRADAASKEVSLEELGRVLLHINQKRGYKHSRISNSDIKETAYVQEVNSRYDDLKAEGLTIGQHFAAKLKENEQETADGKKYYNYRIKEQVYPRHAYEEEVKQILEVQSQYNPDVLSSDVCKEIMDIIFYQRDLKSCKNLVSLCEFESYTITKDGKVINIGPKVAPRTSPLAQLSSILETANNITIRNRKNDELYISPEQRKAIADFLDNHEVMKLTDLYNILNIGRKDGWWAGKAIGKGLKGNTTKCQIREALSGLPKEQVDSLTAFNLEIYENVDEETGEVRKRINNTQAEQQPLYKLWHMLYSIKDNKELAGALNHLGIEDEESIEKLCKLDFRTAGYANKSAKAIGRILPYLMEGMMYSEACELAGFDHSRRINPDRVLLTHLPQIQKNELRQPVVEKILNQLVNIVNALLENEGAIDEIRVELARELKQSKDERNEAFKRNNQNERLNKELAERIMKYGLTPTRNRILKLKMWEESEHSCMYCGQPVDPVEFLKGVDVEREHIIPRGLLFDNSFTNQVCSCRRCNSKKGMRTAYDFIADDKGQEGLDTYIDRINDLFNRKKISRSKFNRLLASHKAYINRKALGKETDEDKELWENFIDRQLRQSQYIAKKSVDMLQQVCKNVYTTSGSVTDFVRHQWGYDELLHELNFERFKKAGLTAMVKQLHSGKEIEVERIKDWTKRLDNRHHAVDALAIACTTQGMIQRLNT

SEQ ID NO: 1280 - protein, 988 aa, unidentified
  REGION 1..988: note = Description of Unknown: uncultivated organism with predicted taxonomy: Gammaproteobacteria bacterium
  REGION 1..988: note = MG16-199 effector
MKKVLGLDLGVGSIGWCLIEKDDNNTPKRILRMGSRIVPISSDEETGYTKGNAISKNADRTAKRTARKCYDRYQLRRKALVSLLKRLGMEPNENLMFEQTPIELWQKRADAASKEVSLEELGRVLLHINQKRGYKHSRISNSDSKETAYVQEVNSRYDDLKAEGLTIGQHFAAKLKENEQETADGKKYYNYRIKEQVYPRHAYEEEVKQILEVQSQYNPDVLSSDVCKEIMDIIFYQRDLKSCKNLVSLCEFESYTITKDGKVINIGPKVAPRTSPLAQLSSILETANNITIRNRKNDELYISPEQRKAIADFLDNHEVMKLTDLYNILNIGRKDGWWAGKAIGKGLKGNTTKCQLREALSGLPKEQVDSLTAFNLEIYENVDEETGEVRKRINNTQAEQQPLYKLWHMLYSIKDNKELAGALNHLGIEDEESIEKLCKLDFRTAGYANKSAKAIGRILPYLMEGMMYSEACELAGFDHSRRINPDRVLLTHLPQIQKNELRQPVVEKILNQLVNIVNALLENEGAIDEIRVELARELKQSKDERNEAFKRNNQNERLNKELAERIMKYGLTPTRNRILKLKMWEESEHSCMYCGQPVDPVEFLKGVDVEREHIIPRGLLFDNSFTNQVCSCRRCNSKKGMRTAYDFIADDKGQEGLDTYIDRINDLFNRKKISRSKFNRLLASHKAYISRKSQGKETDEDKELWENFIDRQLRQSQYIAKKSVDMLQQVCKNVYTTSGSVTDFVRHQWGYDELLHELNFERFKKAGLTAMVKQLHSGKEVEVERIKDWTKRLDNRHHAVDALAIACTTQGMIQRLNTLNASRDVILEELNSNDQRLVDPDRSMLEKWIYVQPHISYAEAKNEVDKIVISQRPNTRITVPGKRYVTKNGKRTLAQTGIIVPRGALHAEFVYGRIMRQEADGVTMTPQYVRKYKLGIGAQGFLFKGDEVYKEEVKKNSKTGLSKIVVTDKIKDVLDKIVDGDIRQRILE

SEQ ID NO: 1281 - protein, 1233 aa, unidentified
  REGION 1..1233: note = Description of Unknown: uncultivated organism with predicted taxonomy: Fibrobacter
  REGION 1..1233: note = MG16-200 effector
MKKILGLDLGVGSIGWSVISVDENGDPSEILGMGSRIVPLSTDDANEFSTGNAISKNQKRTQKRTTRKGYDRYQLRRENLTAELRKHQMLPDEHLIKLPVLDLWTLRANAATEGQKLSLPEIGRVLYHINQKRGYKHAKADEAGEKKQTEYVENVNKRFAMIKDLGLTIGQFFARKLKESEVVSEKGKFYTYRTKEQVFPRGAYIAEFDQIIEVQRKFYPQVFTDEFINRLRNEIIFYQRNLKSCKHLVSLCEFEKHEYTNKDGKIVFDGPKVAPRTSPLFQICRIWEFVNNIRLENGYKEARTLSQDERLKVVDFLDNHEKMTAKDFTKLLGLNKNDEWDLKRYFGKNGTQGNTSKTQLATALANVPNASELLQFNLTLENSNYVNEKTGEVLKVVSSDFQNEPLYMLWHTVYSLSDKEELKNALNKKYGITDESVINNLFKIDFVKPGFGNKSAKAIRRILPFLQEGLVYSDACAEAGYNHSDSLTKSENEARTLLARLPQIKKNELRQPVIEKILNQMVNVVNAIYDEYGQIDEIRVELARELKQSKDERNTTASNIAKKERENKNIEAKIQEFGIRSSRNRIQKYRLWEESEQKCFYCGQPVQAKEFLSGLDVEVEHIIPKSLLFDDSFANKVCACRKCNADKGNKTAYDFMKGQKTEVFDAYVKRVNDFYKDGKISKTKKERLLTTQSEIPSDFIERQLRQTQYIAKKALEMLKDVCYNVYATSGSVTDFIRHTWGYDEILHQLNFDRYKKGGLTELREYDHKGETHTEERIQDWSKRLDHRHHAIDALVIAMTRQSIIQRLNHLNTERDAMFQEVEKQSKEWKNDYSMLQEWLRERKHFSTEDVAKKVSDILVSFKAGKRVATIGKRVKYEHGKKKVLQTGVVIPRGPLSEESVYGKIKVLDRNKPLKYLFENPQSIANADIKFAVTNRLAQYEHDVKKAVQSLKKSPIVLANGKNLENADCYKEEYVIKYSLNGFKAKDIDSVVDSHIKDVLYKRLEEYDGNEKEAFKDIEDNPIYADDAHKIKIRNVRCFTGLSAVVPVKKDENGNAISFVKPGNNHHVAIYKDENGTLQESVVTFWHAVERKKYGLPIIVTKPAEAWKLAIEKNCPKEFLDCLPKENWTFVESLQVNEMFVIGMNDEEFGNAIVDKDYALLNQHLYRVQKITTKEYCFRLHTETKVDDKYKGVKDAMKSKAMGKLKMIQSMDSWQKANPHKVKISLLGKLITRE

SEQ ID NO: 1282 - protein, 1242 aa, unidentified
  REGION 1..1242: note = Description of Unknown: uncultivated organism with predicted taxonomy: Prevotella
  REGION 1..1242: note = MG16-201 effector
MKRILGLDLGTNSIGWAVVNTDENDKPVSIENMGSRIVPLTSDDTNEFTKGNAITKNQARTVKRTARKGYDRYQLRREHLTAELRKLKMLPDERLIKLPVLELWELRGRAASKGNQLTLSEIGRVLYHINQKRGYKHAKSDESADTKQKAYVAEVNARYAKIKERNQTIGQFFAEKLKENEIETSKGKFYTYRIKEQVFPRKAYEAEFDQIMECQKEFYPDILTNEEINRLRNEIIFYQRRLKSCKHLVSFCDFEKREYINKVGKVVYGGPKVAPKSSPLFQICKIWEEVNNLTLKNRKNDELFITIDQRQAMVDFLDTHEKLTLSDMYSILGISKKDGWWGGKAIGRGLQGNTTKIALKKALGDFANADNLLQFNLKQTDSNLVDEVTGEILQVIDPKLEKEPLYDLWHTIYSISDKEELANALKKKYNIHDEDIINRLYAIDFVKSGFGNKSTKAMRRILPYLQQGLKYSDACEYAGFRHSDSLTKAENEARQLLEKLPPVQKNALHQPIVEKILNQMINVVNALMIEYGQFASIRVELARELKQSKDERNTTFLQNEAMQKLNESIATRLSSEGIKPTKRTIEKYKFIFPTKGCIDNRTGKFVTKNFDNLLTVNQCIYCGQPFSLSAALNGDGYEIEHIIPRDLICDNSQNNKVLSCRNCNSKKSNRTAFDFMRSQDNATFEAYLERVELWYQKGIISPAKRERLLLSYEDYLERKKKGKITDIDKKYWEDFVSRQAGETQYISREAIRILKQCCRYVNATSGSITATLRHLWGYDEILHQLNFERYKQAGLTEIVTWESNHGKNKHSKEQIVDWSKRIDHRHHAIDALVVACTQQGFIQRINTLNADETKDLMKKQIEASGIKYEEKKVLLDKYLTSLIPFKTQIVADAVNKILVSFKAGKKTATIGKRIEYKHGNKHIVQKGIIIPRGALHEEGVYGRIEINGKKEIVKKYKLGKGAQGFVFTGKETYAEKINKKTGGIQIEDKIKNVLDSIVDSNIRAKVLQRLNQGFEEGQDYRNNVKKALDNLNNLDENPIFADKNNTIPIRTVRCRTGLSAVVPIKKDERGEAIGFVKPGNNHHIAIYRDKEGKLKEHAVTFWHAVERKKYGIPVVIENPLEVWDSIRDKQLPETFLEKLPDINWTFEMSLQQNEMFVLGMEDDTFENAMRDKEYDLISNYLYRVQSISESDYWFRLHLETQNDKTTSAKLAKKYYRTKSIKGFYSLNPHKVYISVIGKIKEL

SEQ ID NO: 1283 - protein, 1155 aa, unidentified
  REGION 1..1155: note = Description of Unknown: uncultivated organism
  REGION 1..1155: note = MG16-202 effector
MNKKILGLDLGVGSIGWALIKTEDDMPKEIIGMGSRIVPLSKDDNDQFSKGQAITKNADRTARRTARKGYDRYQLRRALLTQVLRQNGMLPERMDEQVLDLWQLRSDAATEGCQLTLPQIGRVLYHINQKRGYKHAKSDDNGDSKQTKYVEAVNNRYADLQAAHQTIGQHFYEELYRSRVEREKGFYYTYRIKDQVFPRAAYIAEFDQIMHVQKAFYPDVLTDELIDTLRNRIIFYQRPLKSCKHLVSLCEFEMRPYKTKDGKVVYGGPKCAPRTSPLAQLCAMWETANNITLTNRNNEQLLISPEQRKQIVDFLCSHDVLKLTDLYKILGINKKDGWYGGKAIGKGIKGNATLNQLRAALNGKHAEWLEMPIEIEDKVDEVTGEVVKMVQSSVEQTPLFQLWHAVYSLQNADELAKTLREKFGIAEQEIINALCKIDFVKPGYANKSHKFIRRILPYLMDGYMYSEACEKVGIRHSNSMTVAERNTRSLRARIELLTKNSLRQPVVEKILNQMINLVNRLQQEYGTIDEARVELARELKQSRDERESAYKAMGQNERRNKEIAAKIAEFGIRPSRSRIQKYKMWEESQHRCFYCGEMMDLTQFLNGADVEIEHIIPRSILFDDSYSNKVCACRRCNQEKGNMTAMEYMEAKPSAEFEAYKQRVDDVFNKDHRISKTKRDHLLWRRADIPQDFIDRQLRQSQYIAKKAVEILKDGIREVWTSGGSVTDFLRHQWGYDEILHTLNLPRYQQVEGLTETIQYEHAGQTHEEERIKNWTKRIDHRHHAIDALTVALTQQAYIQRLNTLEASHDHMQKVVNEAGTQYNEKKSLLEKWVAEQPHFSVADVTDKVDGILVSFRAGKRVTTPARRAIYQGGKRTIVQTGIQVPRGALTEETVYGKLGDKFIVKYPLDHPSMKPENIVDPTIRALVQRRVAEKGKEAFNEPLCSAEGMKIKSVRCFTSLSEKGVVPVKHNEAGEPIGYAKKGNNHHIAIYQDKKGEYHEMVVSFWDAVERKKYGVPVVIEHPHELWDSLLDKELPQEFLAKLPLDDWQFILSMQENEMFVLGMEEDEFNDAIERQEYNTLNKHLYRVQKISHADYTFRYHTETKVDDKYEGIEKGRDTSLKLGALVSIRSFGSLFTKFPHKVKIDIMGRITRT

SEQ ID NO: 1284 - protein, 1003 aa, unidentified
  REGION 1..1003: note = Description of Unknown: uncultivated organism with predicted taxonomy: Bacteroides sp. CAG:144
  REGION 1..1003: note = MG16-203 effector
MKNILGLDLGTTSVGWALIQADDNNHPIAISDMGVRIVPLAENEGDKFTKGQDITVNADRTRARGIRRNYDRFQLRRNALTEKLRQLNMLPDEHLIKLPVLELWSLRANAVSQKVTLNELGRVLYHINQKRGYKHSRTDGTDSKQRAYVKDINDRYAELKNSGKTIGQLFAQKLSETAVSHDGKTFYVFRIKDQIFPRKAYEEEYDAVMKCQQQYYPQILTNEVIDEIRNRIIFYQRELRSCKHLVSVCEFEKRCFYDANHNVLRNNKGEVVYSGPKVAPRTSPLFQVFKNWQAVNNIRFHNRRNEYLYITKEQKQQMVNIMDHQEVLKLKDVHGVLGLSAKSGWYCDKSIKSGIKGNTTKLAILNALSSLPAENTKELTRFHLEFEETSLVDEETGEIIVQIKNNYLDEPLYRLWHIIYSIKDDAERYNAIVRFLAEFHVDAPDVAHSLKDIDFVTPGYANLSAKAICKILPYMMEGVGYSEACEFVGYNHSGSVTKAENDARELLEHIPAIKKNELRQPTVEKILNQMINVFNRINDNLKSNGERIDEVRIELARELKQSKEERDETSKGISKQQKLNDEYANLLKESGIRPTRNKITRYRLWREANETCFYCGQPVNFNEFVKFSEAEREHIIPKSLILDDSFANQVCSCRKCNAEKGGRTAIDYMRTTPYLQAYLTKVDEMFQGHKISGKKHAHLLASYEDYLVRKQQGKETKEDVNIWEAPIDRQLRLSQYITKKAHELLRTACRDVLATSGSITDLTRHVWGYDTILHELNLPRYKSAGITEVITDERTGREQEVIRDWNKRLDHRHHAIDALAVACTSRSMIQRINTLHASREEMREEVSSPRKDWKENDLLRQWIKEQRPFERQYVLHKVESILVSMKAGKKATVPGKRKVFKNGKPVVVQSGLRIPRGQLHEQTVYGAITLYDKTPEGRREIVARYKMGVGSVGFVFSGKESCDVVFDKKKEQYVLVDGIEKAINYIVDRHIRDIVRERLNEAF

SEQ ID NO: 1285 - protein, 1222 aa, unidentified
  REGION 1..1222: note = Description of Unknown: uncultivated organism with predicted taxonomy: Bacteroidales
  REGION 1..1222: note = MG16-204 effector
MKKVLGLDLGVGSIGWCLIEKDDNNTPKRILRMGSRIVPISSDEESGYTKGNAISKNADRTAKRTARKCYDRYQLRRQALVNLLKRLGMEPSKNLMLEQTPMELWQKRADAASKEISLEELGRVFLHINQKRGYKHSRLSNSDSKETAYVQEVNSRYDDLKAEGLTVGQHFAAKLKENEQETADGKKYYNYRIKEQVYPRHAYEEEVKKILEVQSRYHSDVLTPDVCKEILDIIFYQRDLKSCKNLVSLCEFESYTITKDGKEITIGPKVAPRTSPLAQLSSILETANNITIRNRRNDELYISPEQRRAIAEFLDNHEVMKLTDLYKMLNIGRKDGWWAGKAIGKGLKGNTTKCQIREALSALPKEQVDSLTAFQLEFDEYVDEETGEVRKRINNTLAEQQPLYKLWHMLYSIKDNDELSGALRHLGIEDEESIDKLCKCDFRTAGYANKSAKAIGRILPYLMEGVMYSDACERAGFDHSRRINSDRTLLTHLPQIQKNELRQPVVEKILNQLVNIVNALLEKEGAIDEIRVELARELKQSKDERNEAFRRNNQNERLNKELAERIKKYGLTPTRNRIMKLKMWEESEHSCMYCKQPVDPVEFLKGADVEREHIIPRALLFDNSFTNQVCSCRRCNSKKGMRTAYDFIADEKGQEGLNAYIEHINDLFDKKKISRSKLNRLLVSHKAYISRKAQGKETDEDKELWENFIDRQLRQSQYIAKKSVEMLQLVCKNVYTTSGSVTDFVRHQWGYDELLHELNFERFKKAGLTAMVKQMHSGKEIEVERIKDWTKRLDNRHHAVDALAIACTTQGMIQRLNTLNASREEMLEELSINDQRLIDPERSMLEKWLFVQPHISYAEAKNEINKIVISQRPNTRITVPGKRYVIKNGKRTLAQTGIIVPRGALHAEFVYGQIMKQEADGVTKTLQYVRKYKLGIGAQGFLFNGKEFYKEELKKDSKTGLSSIVVTDKIKDVLEKIVDGGIRQRILERLNRGFEEGADYRANVAQALANLKNLDEDPIYSDDAKTRPIRTVRKYVSSSTMVAVRKDGNGKPMSFVEPDGNHHVAFYKDENGVITESIVTKWLAVQRKLNHIPIIIDNPSQTWCEVLERNDVPEELLQSLPKDNSTFLLSLQIGEAFIMGMEDADYQKALLAKDVRTLCDHLFYVQNASSHDYRFRRHVEAKYDTNDMNKDDMRFLRIRTIDDLFNNNPHKVKVTVLGVIVE

SEQ ID NO: 1286 - protein, 1233 aa, unidentified; identical to SEQ ID NO: 1281
  REGION 1..1233: note = Description of Unknown: uncultivated organism with predicted taxonomy: Fibrobacter
  REGION 1..1233: note = MG16-205 effector

SEQ ID NO: 1287 - protein, 1011 aa, unidentified
  REGION 1..1011: note = Description of Unknown: uncultivated organism with predicted taxonomy: Gammaproteobacteria bacterium
  REGION 1..1011: note = MG16-206 effector
MKKVLGLDLGVGSIGWCLIEKDDNNTPKRILRMGSRIVPISSDEETGYTKGNAISKNADRTVKRTARKCYDRYQLRRKALVNLLKRLGMEPNKNLMFEQTPIELWQKRADAASKEVSLEELGRVLLHINQKRGYKHSRISNSDSKETAYVQEVNSRYDDLKAEGLTIGQHFAAKLKENEQETADGKKYYNYRIKEQVYPRHAYEEEVKQILEVQSQYNPDVLSSDVCKEIMDIIFYQRDLKSCKNLVSLCEFESYTITKDGKVINIGPKVAPRTSPLAQLSSILETANNITIRNRKNDELYISPEQRKAIADFLDNHEVMKLTDLYNILNIGRKDGWWAGKAIGKGLKGNTTKCQIREALSGLPKEQVDSLTAFHLEIDEYVDEETGEVRKRINNTQAEQQPLYKLWHMLYSIKDNNELAGALNHLGIEDEESIEKLCKLDFRTVGYANKSAKAIGRILPYLMEGMMYSEACELAGFDHSRRINPDRVLLTHLPQIQKNELRQPVVEKILNQLVNIVNALLENEGAIDEIRVELARELKQSKDERNEAFKRNNQNERLNKELAERIMKYGLTPTRNRILKLKMWEESEHSCMYCGQPVDPVEFLKGVDVEREHIIPRGLLFDNSFTNQVCSCRRCNSKKGMRTAYDFIADDKGQEGLDTYIDRINDLFNRKKISRSKFNRLLASHKAYISRKSQGKETDEDKELWENFIDRQLRQSQYIAKKSVEILQQVCKDVYTTSGSVTDFVRHQWGYDELLHELNFERFKKAGLTAMVKQLHSGKEVEVERIKDWTKRLDNRHHAVDALAIACTTQGMIQRLNTLNASRDVILEELNSNDQRLVDPDRSMLEKWIYVQPHISYAEAKNEVDKIVISQRPNTRITVPGKRYVTKNGKRTLAQTGIIVPRGALHAEFVYGRIMRQEADGVTMTPQYVRKYKLGIGAQGFLFKGDEVYKEEVKKNSKTGLSIIVVTDKIKDVLDKIVDGDIRQRILERLNRGFEEGVDYRANVPQALANL

SEQ ID NO: 1288 - protein, 957 aa, unidentified
  REGION 1..957: note = Description of Unknown: uncultivated organism
  REGION 1..957: note = MG16-207 effector
MKNILGLDLGTTSVGWALIQSDDNNHPITISDMGVRIVPLAENEGDKFTKGQDITVNADRTRARGIRRNYDRFQLRRNALTEKLRQLNMLPDEHLIKLPVLELWSLRANAVSQKVTLNELGRVLYHINQKRGYKHSRTDGTDSKQRAYVKDINDRYAELKSSGMTIGQLFAQKLSETAVSHDGKTLYVFRIKDQIFPRKAYEEEYDAVMKCQQQYYPQILTNEVIDEIRNRIIFYQRELRSCKHLVSVCEFEKRCFYDANHNVLRNNKGEVVYSGPKVAPRTSPLFQVFKNWQAVNNIRFHNRRNESLYITKEQKQQMVDIMDRQEVLKLKDVHEVLGLTAKSGWYCDKSIKSGIKGNTTKLAILNALSPLPAEKTKELTRFHLEFEETSLVDEETGEIIVRIKNNYLDEPLYRLWHIIYSIKDDAERYNAIVRFLAEFHVDAPEVANSLKDIDFVTPGYANLSAKAICKILPYMMEGVGYSDACEFVGYNHSGSMTKAENDARELLEHIPAIKKNELRQPTVEKILNQMINVFNRINDNLKSNGERIDEVRIELARELKQSKEERDETSKGISKQQKLNDEYANLLKGKGIRPTRNKITRYRLLMESNETCFYCGQPVNFNEFVKFSEAEREHIIPKSLILDDSFANQVCSCRKCNAEKGGRTAIDYMRTTPHLQAFLSKVDEMFQGHKISGKKHAHLLASYEDYLVRKKQGKETKEDVNIWETPIDRQLRLSQYITKKAHELLRTACRDVLATSGSITDLTRHVWGYDTILHELNLPRYKSAGITEVITDERTGREQEVIKDWNKRLDHRHHAIDALAVACTSRSMIQRINTLHASREEMREEVSSPRRDWKENDLLRQWIKEQLPFERQYVLHKVESILVSMKAGKKATVPGKRKVFKNGKPVVVQSGLRIPRGQLHEQTVYGAITLYDKAPEGRREIVARYKMGVGSVGFVFL

SEQ ID NO: 1289 - protein, 1234 aa, unidentified
  REGION 1..1234: note = Description of Unknown: uncultivated organism
  REGION 1..1234: note = MG16-208 effector
MYLCSRKTNKTLYNMKKVLGLDLGVSSIGWALITKDNNNQPIDILKIGSRTVPLLDGEEEGFSNGNGISANSSRTQKRTARKCNNRYKLRREKLTDGLRALNMLPNAMLFNLNPLELWQLRAKAVTDKVSLPELGRILFHLNQKRGYKHSKDNEQDSKQTEYVATINKRYIDLQEKGLTIGQYFAQKLKESEKIQENGVCYTYRIKDQVYPRAAYEEECHKILLNQQRFYPEVLTDDVIKDFFNFIYYQRPLKSCKHLVSRCELEKQLLSSDDDVANYAPKVAPLSSPLAQLDKIWEAVNNFTIRDKRNDELFITLEQRKEIVNYLQEHLTINRSKMREILGISKTKRWFIKADNLRVLQGNKTRIKIAEALSKGDLSQEEINGYLRFDLGYDCQVDTQTGEIAATIIKATFEEQPLYQLWHYIYSIPEERDLKNKLMKFGIHDETVLDALCGISFKTIGYAKKSTRAIRKILPYLAEGFKYSEACYLAGYNHSNSITKDEEANRKLKEYIPQIQKNELRQPVVEKILNQMINIVNSLLKDGPINEIRVELARELKQSKDEREKTSKDIRANKKKNDECAERVKEYGFSPTRNRIMRYKMWVETNHRCIYCNDGVNVKDFLSGVDVEREHIIPKALLFDDSFSNQTCSCRKCNRDKGSRTALDYIRDCGREEEYITRVNELLEKRQISKTKYNHLLTSYRDYLERKTQGKETQEDKDLWEHFIDRQLRQSQMIARKSFEVLRQICHNVYATSGSVTDFLRHQWGYDNILHDLNFERFSKSDNIEEITIVGRDGIETKVKRIKGWNKRIDNRHHAVDALTIALTTQSMIQRLNTLYASRDAMHGDIEASKQKFNEKKSILEKWTAIQPHFTYSQASEAISRILISQRGGKRITTPGKRYEFKGGKKILKQTGIVVPRTALHDEFIYGQISRYDAKGLLTKEIVRKYGIFGGMGCLFTGKETYKEETVSDKKTGISTIKISDGIKDVLDKIVDGGVRKRILERLNRGFEEGKDYRSDTKKALDNLRHLDEDPIFLDDARTIPIKTVRKFTHSTKAIPLRYNDSHQPIAFVEPGGNHHVALYKAPDGTIKEHICTNWHAVQRRLFGLPAIIDKPSEIWVKALENDKFPEDLLSHLPEENLNFIVSLQIGDAFILGMEEEEYQQAISNNNYKLLSEKMYYIQNLSSLNYRFRRHVEAQFDTHQMNKEDLRFYNIKSIGAFFNLNPHRVNVSLIGEIIV

SEQ ID NO: 1290 - protein, 911 aa, unidentified
  REGION 1..911: note = Description of Unknown: uncultivated organism with predicted taxonomy: Chryseobacterium vrystaatense
  REGION 1..911: note = MG16-209 effector
NLTIMKRILGLDLGTNSIGWAVVNTDENDKPVSIENMGSRIVPLTSDDTNEFTKGNAITKNQARTVKRTARKGYDRYQLRREHLTAELRKLKMLPDERLIKLPVLELWELRGRAASKGNQLTLSEIGRVLYHINQKRGYKHAKSDESADTKQKAYVAEVNARYAMIKERNQTIGQFFAEKLKENEIETSKGKFYTYRIKEQVFPRKAYEAEFDQIMECQKEFYPDILTNEEINRLRNEIIFYQRRLKSCKHLVSFCDFEKREYINKVGKVVYGGPKVAPKSSPLFQICKIWEEVNNLTLKNRKNDELFITIEQRQAMVDFLDTHEKLTLNDMYSILGISKKDGWWGGKAIGRGLQGNTTKIALKKALGDIANADNLLQFNLKQTDSNLVDEVTGEILQVIDPKLEKEPLYDLWHTIYSISDKEELANALKKKYNIHDEDIINRLYAIDFVKSGFGNKSTKAMRRILPYLQQGLKYSDACEYAGFRHSDSLTKAENEARQLLEKLPPVQKNALHQPIVEKILNQMINVVNALMIEYGQFASIRVELARELKQSKDERNTTFLQNEAMQKLNESIATRLSSEGIKPTKRTIEKYKFIFPTKGCIDNRTGKFVTKNFDNLLTVNQCIYCGQPFSLSAALNGDGYEIEHIIPRDLICDNSQNNKVLSCRNCNSKKSNRTAFDFMRSQDNATFEAYLERVELWYQKGIISPAKRERLLLSYEDYLERKKKGKITDIDKKYWEDFVSRQAGETQYISREAIRILKQCCRYVNATSGSITATLRHLWGYDEILHQLNFERYKQAGLTEIVTWESNHGKNKHSKEQIVDWSKRIDHRHHAIDALVVACTQQGFIQRINTLNADETKDLMKKQIEASGIKYEEKKVLLDKYLTSLIPFKTQIVADAVNKILVSFKAGKKT

SEQ ID NO: 1291 - protein, 1152 aa, unidentified
  REGION 1..1152: note = Description of Unknown: uncultivated organism
  REGION 1..1152: note = MG16-210 effector
MKKILGLDLGVASIGWALIEADEQNAPKSILAMGSRIVPLSTDDATEFSQGKAISKNRNRTQKRTQRKGYDRYQMRRAALTEELRAHHMLPDEILIKLPVLELWQLRADAATRQLTLPEIGRVLYHINQKRGYRHAKSDSDEEKAQRDYVQAVNDRYAELKAEGKTIGQHFADKLKENCIITEKGPFYTYRIKEQVYPRAAYMEEFDLVIACQKEFYPEVFTDAFINRLRNEIIFYQRSLKSCKHLINQCEFSQRAYKKADGSIVIAGPKVAPRTSPLFQICKIWESVNNLKLTNRKGEEYPFTLSQRKELVEFLDEHEKLTLTDLYKIIGVKKNDGWWGGKAIGKGLQGNTTKCLIKKALGDKYADLLRFDLHIIESKNIDTETGEVLEIISPGLEKEPLFRLWHILYSMQDKDEMAAALHRQFGITEEDIIDALYKIDFVKPGYGNKSSRFMREILPYLQKGMMYSDACNYIGINHSNSITSEENAVRELKSRLPQLQKNELRQPVIEKVLNQMVNVVNALLDKYGEIDEIRVELARELKQSKDERNEVFLRNNKRERENAEIIKRIEEYGVRPSRSRIQKYRLWEESNQICFYCGNTVGVKEFLSGVDAEIEHIIPRSLFFDDSFSNKVCACRACNQEKGNRTAYDYMQSKSEIEFDNYLRRVENYYNEKKISKTKRERLLTAAKDIPQDFLDRQLRQSQYISKKAIEMLKQICRYVWATSGSVTDFIRHNWGYDKILHDLNFERYKSGGLTEMVHYDHQGQEHDEERIKEWTKRLDHRHHALDALTIASTQQGYIQRLNHLNTERDQMFAELEMQREEYKGRYSLLEEWIKERPHISVEDAKVAVDQIAVSFKAGKKVATPGKRYIYKSGKRILAQDGILVPRGALSEESVYGSISTIERNVPAKNLFEHPERIFKGYIRKLVEERIAECGGDWKKARASINKRPIFLDDEGQKKLEYATCWKEESVFHYPIKSIKKNDVDWIVDGHIREIIRKRIEEVGEKNAFNEPIYADKACNIPIRHVRMFTGLSAVEPIKYVDGQPVGFVKPGNNHHIAIYVDTQGNKVEQAVTFWHALERKKYGFPVIIDDTDTVWEKVDQMDLPEAFIKNLPEPGLKLYTSLQQNEMFILGMGEDEYNDAVAAKDYKSLCK

SEQ ID NO: 1292 - protein, 1242 aa, unidentified
  REGION 1..1242: note = Description of Unknown: uncultivated organism with predicted taxonomy: Prevotella
  REGION 1..1242: note = MG16-211 effector
MKKILGLDLGTNSIGWAVVNTDDNGIPTHIEGMGSRIVPLSPDDTNEFTKGNAITKNQSRTEKRTARKRYDRYQLRRENLTAELRKLKMLPDEKLIKLSVLELWELRGKAASKGNQLTLSEIGRILYHINQKRGYKHAKSDENADTKQKAYVAEVNARYAMIKERNQTIGQFFAEKLKENEIETPKGKFYTYRIKDQVFPRKAYEAEFDQIMECQKEFYPEILTEKVINKLRNEIIFYQRKLKSCKHLVSICDFEKQEYINKDGKSIYRGPKVAPKSSPLFQICKIWEEVNNLSLKNRKNDELFITLEQRQAMVNFLETHEKLTLSDMYSILGISKQDGWWGGKAIGKGLKGNVTKIALKNALGDFENADRLLQFNLKQIDSNLVDEVTGEILQVIDPKMEKEPLYDLWHTIYSISDKEELANALKKKYNIHDEDVINRLYSIDFVKSGFGNKSSKAMRRILPYLQQGLKYSDACEYAGFRHSDSLTKAENDARQLLEKLPPIQKNTLRQPIVEKILNQMINVVNALMIEYGQFDSIRVELARELKQSKDERNTTFLQNEAMQRLNESIAKRLSFEDIKPTKRTIEKYKFIFPTKGCIDKRTGKFVTKSFDGLSTINQCIYCGQPFSLSAALNGDGYEIEHIIPRDLLCDNSQNNKVLSCRKCNSRKSNKTAFDFMRSQDESIFEEYLERIELWYKNGIISPTKREHLLLSHEDYLERKKKGKVTDIDKKYWEDFVSRQVGETQYISRESIRILKQCCRTVNATSGKITAILRHLWGYDEILHQLNFERYKKAGLTETKTWESNHGKNKHSKEQIVDWSKRIDHRHHAIDALVVACTQQGVIQRINTLNADETKDLMKKQIESANIKYEEKKVLLDKYLTSLVPFNTKTVAEAVNKILVSFKAGKKTATVGKRIEYKHGKKHIVQKGIIIPRGALHEEGVYGKIEINGKKEIVKKYKLGKGAQGFVFTGKETYAEKVNKKTGAIQIEDKIKDVLDSIVDGNIRAKILQRLNRGFVEGEDYRNNVKQALDNLNNLDENPIFADDNNNIPIRTVRCRTGLSAVEIIKRNEGGEAIGFVKPGNNHHIAIYRDKEGKLKEHAVTFWHAVERKKYGIPVVIENPLEVWDSIRDKQLPETFLEKLPDINWTFEMSLQQNEMFVLGMEDDTFENAMRDNDYAKLGQYIYKVQNISEKQYRFSLHTATKFDVKRMNKTDKSFYNIRSLDALFALHPHKVYISVIGKIKEL

SEQ ID NO: 1293 - protein, 1224 aa, unidentified; identical to SEQ ID NO: 1243
  REGION 1..1224: note = Description of Unknown: uncultivated organism with predicted taxonomy: Prevotella ihumii
  REGION 1..1224: note = MG16-212 effector

SEQ ID NO: 1294 - protein, 1217 aa, unidentified
  REGION 1..1217: note = Description of Unknown: uncultivated organism with predicted taxonomy: Treponema pedis
  REGION 1..1217: note = MG16-213 effector
MKKILGLDLGVASVGWALIEADEQNAPKSILAMGSRIVPLSTDDATEFSQGKAISKNRNRTQKRTQRKGYDRYQMRRAALTEELRANDMLPDETLIKLPVLELWQLRADAVTRQLTLPEIGRVLYHINQKRGYRHAKSDSEEEKSQRDYVQAINDRYAELKAEGKTIGQHFADKLKENCIITEKGPFYTYRIKEQVYPRAAYMEEFDRVISCQKGFYPTVFTDAFINRLRNEIIFYQRNLKSCKHLINQCEFSQRAYKKADGSIVIAGPKVAPRTSPLFQICKIWECVNNLRLTNRKGEEYPFTLEQRKELVDFLDNHEKLTLSDLYKILGIRKSDGWYGGKAIGKGLQGNTTKCLIKKALGDKYADLLRFDLQTIGSKSIDTETGEVLEIISPELEKEPLFRLWHILYSMQDKDEMAAALQRQFGITEGDIIDALYKIDFVKPGYGNKSSRFMREILPYLQKGMMYSDACNYIGINHSNSVTSEENAVRELKSRLPQLQKNELRQPVIEKVLNQMVNVVNALLDKYGEIDEIRVELARELKQSKDERNEVFLRNNKRERENAEITKRIEEYGIRPSRSRIQKYRLWEESNHICFYCGQPVGAKEFLSGVDVEIEHIIPRSLFFDDSFSNKVCACRKCNQDKGNSTAFDFMKAKPEVEFDNYLRRVESYYNEKRISKTKRDRLLTAAKDIPEDFINRQLRQSQYISKKAVEMLKQVCRYVWTTSGSVTDFLRQTWGYNNILHDLNFERYKSGGLTEIRQYDHKGQEQSKECIIGWTKRLDHRHHALDALTIASTQQGYIQRLNHLNTERDEMFAELKKQSEEHKEKHSLLEDWMKERPHLSVEAVKEAVDQIAVSFKAGKKVATPGKRYIYKGGKRVLAQDDILVPRGALSEESVYGSISTIERNVPAKNLFEHPERIFKGYIRKLVEERIAEYGGDWKKARASLNKRPIFLDDKGQRKLEYATCWKEEMVLRYPIEKIDKGKVDKIVDSHILDIIRKRIEEAGEKNAFKEPIYADEACTIPIRHVRLFTGLTAVEPIKYADGQPVGFVKPGNNHHIAFYVDAQGNKSEHVVTFWHALERKKYGFPIIIEDTDAVWEKVDQMDLPEAFVRNLPEPGLKLDMSLQQNEMFILGMGEDTYRDAMAAKDYKTLCKHLYRVQNIANLDYYFRLHIDTSDDKSNEAQKIKKFYRVRSISSLMDLNPKKVKISILGEIFPLDD

SEQ ID NO: 1295 - protein, 1224 aa, unidentified
  REGION 1..1224: note = Description of Unknown: uncultivated organism with predicted taxonomy: Sediminibacterium sp. C3
  REGION 1..1224: note = MG16-214 effector
MKKVLGLDLGVGSIGWCLLEKDDKNVPIRIIRMGSRIVPISTDEETGFTKGNAISKNADRTAKRTARKCYDRYQLRRQALVNLLRRLGMEPSKNLMLEQTPMELWQKRADAASKEISLVELGRVLLHINQKRGYKHSRLSNSDSKETAYVQEVNSRYDDLKAEGLTVGQHFAAKLKENEQLSAAGKKYYNYRIKEQVYPRCAYEEEVKKILEVQSQYHSDVLTADACKEMMDIIFYQRDLKSCKNLVSLCEFESYTITKNGKEITIGPKVAPRTSPLAQLSSILETANNITIRNKRNDELYISPEQRKAIADFLDTHEVLKLSDLYKILNIGRKDGWWAGKAIGKGLKGNTTKCQIRKALSKLPKDLVDSLTAFQLEFEECVDQETGEVRKRINNTLVEKQPLYHLWHLIYSIKDVDELSGALRHLGIEDEESIRNLCDLDFRTAGYANKSAKAIGRILPYLMEGVMYSEACERAGFDHSRRIDPNRTLLKHLPPIQKNELRQPVVEKILNQLVNIINALIEKEGAIDEIRVELARELKQSKDERNETFKRNNQNERQNKEYAERIKEYGLTPTRNRIMKMKMWEESEYTCMYCGQPVNVTEFLKGADVEREHIIPRGLLFDNSFTNQVCSCRRCNSKKGMRTAYDFIADDKGQEGLNAYIDRINDLFDKKKISRSKLNRLLVSHKAYISRKAQGKETEEDKELWENFIDRQLRQSQYIAKKSVEMLLQVCKNVYTTSGSVTDFVRHQWGYDELLHDLNFDRFKKAGLTAMVKQLHSGKEVEVERIKDWTKRLDNRHHAVDALTIACTTQGMIQRLNTLNASREDILEELNSKDQRLVDPERSMLEKWIVVQPHISYSEAKNEIDKIVISQRPNTRMTVPGKRYVTKNGKRTLAQTGIVVPRGALHAEFVYGRIMKQEPDGITMTPQYVRKYKLGIGAQGFLFNGKEFYKEELKKDSKTGLSKIVVTDKIKEVLDKIVDGGIRQRILERLNRGFEEGADYRANVAQALTNLKNLDEDPIYSDDAKTRPIRTVRKYVSSSTMVAVRKDDKGKPVAFVEPDGNHHVAFYKNENGVISETIVTKWQAVQRKVNHIPIIIDNPSQTWSKVLGRNNVPEELLQSLPRDSSSFLLSLQIGEAFIMGMEEAEFQKALEEKDMQTLAEHLYFVQNISSNNYRMRRHVESSFDTTDMNKEDQRFFNIQSISSFFNSNPHKVKITILGDIVVDV

SEQ ID NO: 1296 - protein, 1222 aa, unidentified
  REGION 1..1222: note = Description of Unknown: uncultivated organism with predicted taxonomy: Prevotella
  REGION 1..1222: note = MG16-215 effector
MKKVLGLDLGVGSIGWCLIEKDDNNTPKRIIRMGSRIVPISSDEETGYTKGNAISKNADRTAKRTARKCYDRYQLRRQALVNLLKQLGMGPSKNLMLEQTPIELWQKRADAASKEITLEELGRVLLHINQKRGYKHSRLSNSDSKETAYVQEVNSRYDDLKAEGLTIGQHFAAKLKENEQESADGKRYYNYRIKEQVYPRHAYEEEAKRILEVQSRYHSDVLTSDVCKEMMDIIFYQRDLKSCKNLVSLCEFESYTITKDGKEITIGPKVAPRTSPLAQLSSILETANNITIRNRKNDELYISPEQRKAIADFLDNHEVMKLTDLYKILKIGRKDGWWAGKAIGKGLKGNTTKCQIREALSALPKEQVDSLTAFQLEIDEYVDEETGEVRKRINNTKAEKQPLYRLWHLLYSIKDVDELSGALHNLGIEDEESIEKLCNLDFRTAGYANKSAKAIGRILPYLMEGVMYSDACERAGFDHSRRINPDRVLLTHLPQIQKNELRQPVVEKILNQLVNIVNALLEKEGTIDEIRVELARELKQSRDERNETFKRNNQNERQNKVYAERIKEYGLTPTRNRIMKMKMWEESEYTCMYCGQPVNVTEFLKGADVEREHIIPRGLLFDNSFTNQVCSCRRCNSKKGMRTAYDFIADDKGQDGLNAYIDRINNLFDKKKISRSKLNRLLVSHKAYISRKAQGKETDEDKELWENFIDRQLRQSQYIAKKSVEMLQQVCKNVYTTSGSVTDFVRHQWGYDDLLHDLNFERFKKAGLTAMVKQLHSGKEVEMERIKDWTKRLDNRHHAVDALAIACTTQGMIQRLNTLNASRDEILEELNSKDQRVVDPERSMLEKWVYAQPHISYAEAKNEIDKIVISQRPNTRITVPGKRYVTKNGKRTLAQTGIIVPRGALHAEFVYGRIMKQEADGVTMTPQYVRKYKLGIGTQGFLFKGDEVYKEELKKDSKTGLSKIVVTDKIMDVLEKIVDGGIRQRILERLNRGFEEGTDYRANVAQALANLKNLDEDPIYSDDAKTRPIRTVRKYVSSSTMVAVRKDSNGKPISFVEPDDNHHVAFYMYQDGERTESVVTKWQAVQRKLNHIPIIIDNPSQTWNEVLGRNDVPDELLQSLPQDKSIFLLSLQKGEAVVMGLEEMNYQRALEKKDMRTLCNHLFYVQSASSHDYRFRRHVEAKYDTKDMNKDDMRFLRIRTVDELFKNNPHKVKVTVLGDIVE

SEQ ID NO: 1297 - protein, 1222 aa, unidentified
  REGION 1..1222: note = Description of Unknown: uncultivated organism with predicted taxonomy: Bacteroidales
  REGION 1..1222: note = MG16-216 effector
MKKVLGLDLGVGSIGWCLIEKDDDNTPKRIIRMGSRIVPISSDEETGYTKGNAISKNADRTAKRTARKCYDRYQLRRQALVNLIKRLYMLPNKELMLEQTPLEIWQKRADAASKEITLEALGRVLLHINQKRGYKHSRLSNADRKETAYVQEVNSRYDELKAEGLTIGQHFAAKLKENEQTSNDGKKYYNYRIKEQVYPRHAYEEEVKKILEIQSQFHADVLTPDVCREIMDIIFYQRDLKSCKNLVSLCEFESHTITKDGKEITIGPKVAPRTSPLAQLSSILETSNNITIRNRRNDELYISPEQRKAIADFLDNHEVMKLTDLYRILNISRKEGWWAGKAIGKGLKGNTTKCQIREALGSLPKEQVDSLTAFRLEFEEYVDEETGEVRQRVNNTLAEQQPLYKLWHMLYSIKDNKELSGALHHLGIDDEKSINKLSNLDFRTAGYANKSAKAIGRILPYLMDGIMYSEACERAGFDHSRRINPGRTLLTSLPQIQKNDLRQPIVEKILNQLVNIVNALLEKEGTIDEIRVELARELKQSKDERNEAFKRNNQNERQNKEYAERIKEYGLTPTRNRIMKMKMWEESEYTCMYCGQPINVTEFLQGADVEREHIIPRALLFDNSFTNQVCSCRRCNSQKGMRTAYDFIADDKGQEGLDLYIERINDLFDRKKISRSKLNRLLVSHKAYVSRKAQGKETEEDKELWENFIDRQLRQSQYIAKKSVEMLQQVCKNVYTTTGSVTDFVRHQWGYDEILHDLNFERFKKAELTTMVTQLHSGKEVEVERITNWTKRLDNRHHAVDALAIACTTQGMIQRLNTLSACRNEMLDELNSKDERVIDPERSMLEKWINSQPHICYAQAKDEVDKIIVSQRPNTRITVPGKRYVTKNGKRTQAQTGIIVPRGALHAEFVYGRIMKQEADGMTLTPQYVRKYKLGIGAQGFLFKGDETYKEDVKKDKKTGLSQIVVTDKIKDVLDKIVDGGIRRRILERLNRGFEEGTDYRANVAKALANLKNLDDDPIYSDDAKTRPIRTVRKYVSSSTMVAVRKNDDGKPISFVEPDGNHHVAFYKDEDGVVTESLVTKWQAVQRKLNHIPIIIENPSQVWNEVLGTNDIPNELLQSLPKDKSIFLLSMQIGEAFVMGMDETAYKRAIEKNDTQALADHLYFVQNLSSNNYRLRRHVESSFDTTDMNKEDLRFLNVKSIGALFNYNPHKVKLTILGDIIL

SEQ ID NO: 1298 - protein, 917 aa, unidentified
  REGION 1..917: note = Description of Unknown: uncultivated organism with predicted taxonomy: Porphyromonas catoniae
  REGION 1..917: note = MG16-217 effector
MKKVLGLDLGVGSIGWCLIEKDDNNTPKRILRMGSRIVPISSDEETGYTKGNAISKNADRTTKRTARKCYDRYQLRRQALVNLLKKLGMEPSKNLMLEQTPMELWQKRADAASKEVSLDELGRVLLHINQKRGYKHSRLSNSDSKETAYVQEVNSRYKDLKAEGLTIGQHFAAKLKENEQETADGKKYYNYRIKEQVYPRHAYEEEVKKILEVQSQYHSDLLTSDVCKEIADIIFYQRDLKSCKNLVSFCEFESYAITKDGKEITIGPKVAPRTSPLAQLSSILETANNITIRNRKNDELYISPEQRKAIADFLDNHEVMKLTDLYKILNIGKKDGWWAGKAIGKGLKGNTTKCQIREALANLPKEQVDSLTVFQLDIDNYVDEETGEVRQRINNTKAEKQPLYRLWHLLYSIKDVDELSGALRHLGIEDEESIEKLSKLDFRTAGYANKSAKAIGRILPYLMEGMMYSDACERAGFDHSRRINPDRALLTYLPQIQKNELRQPVVEKILNQLVNIVNALLDKEGAIDEIRIELARELKQSKDERNEAFKRNNQNERQNKEYAERIKVYGLTPTRNRIMKMKMWEESEYTCMYCGQPVNVTEFLQGADVEREHIIPRGLLFDNSFTNQVCSCRRCNSKKGMRTAYDFIADDKGQEGLDAYIDRINDLFNKKKISRSKLNRLLVSHKAYIIRKTQGKETEEDKELWENFIDRQLRQSQYIAKKSVEMLQQVCKNVYTTSGSVTDFVRHQWGYDELLHDLNFERFKKAGLTAMVKQLHSGEEVEVERIANWTKRLDNRHHAVDALAIACTTQSMIQRLNTLNASRDDMLEELNSKDQRLVDPERSMLEKWVFIQPHITYADAKKEIDKIVISQRPNTRITVPGKRYVAKNGKRTLAQTGIIVPRGALHAEFVYGRIMKQ

SEQ ID NO: 1299 - protein, 1224 aa, unidentified
  REGION 1..1224: note = Description of Unknown: uncultivated organism with predicted taxonomy: Prevotella
  REGION 1..1224: note = MG16-218 effector
MKKVLGLDLGVGSIGWCLIEKDDNNTPRRILRMGSRIVPISSDEESGYTRGNAISKNADRTAKRTARKCYDRYQLRRQALVNLLKKLGMEPNKNLMFEQTPLELWQKRADAASKEITLEELGRVLLHINQKRGYKHSRLSNSDSKETAYVQEVNSRYVVLRAEGLTVGQHFAAKLKENEQESADGKKYYNYRIKEQVYPRHAYEEEVKKILEVQSQYHSDVLTSDVCKEIGDIIFYQRDLKSCKNLVSFCEFESYTIKKDGKKITIGPKVAPRTSPLAQLSSILETANNITIRNRRNDELYISPEQRKAIAEFLDNHEVMKLTDLYKILNIGKKDGWWAGKAIGKGLKGNTTKCQIREALSGLPKEQVDSLTAFKLEIDECVDEETGEVRKRIDNTKAEKQPLYRLWHLLYSIKDNDELTGALRHLGIENKEIIEKLCKIDSRTAGYANKSAKAIGRILPYLMDGVMYSEACGRAGYDHSRRVNPDRVLLTHLPQIQKNELRQPVVEKILNQLVNIVNALLEKEGAIDEIRVELARELKQSKDERNEVFKRNSQNERKNKEYAERIKEYGLTPTRNRIMKMRMWEESEYTCMYCGQPVNVSEFLKGADVEREHIIPRGLLFDNSFTNQVCSCRRCNSKKGMRTAYDFIADEKGQEGLDIYIDRINDLFNRKKISRSKFNRLMASHKAYMRRKAQGKETDEDKELWENFIDRQLRQSQYIAKKSVEMLQQVCKNVYTTSGSITDFVRHQWGYDELLHELNFERFKKAGLTAMVKQLQSGKEVEVERIKDWTKRLDNRHHAVDALAIACTTQGMIQRLNTLNASRADMLEELSSNDRRLVDPDRSMLEKWIYVQPHISYAEAKNEIDKIVISQRPNTRITVPGKRYVIKSGKRTLAQTGIIVPRGALHAEFVYGRIQKQEADGDTKTYQYVRKYKLGIGAQGFLFNGKEFYKEELKKDSKTGLSSIVVTDKIKDVLDKIVDGGIRQRILERLNRGFEEGADYRANVARALENLKNLDEDPIYSDDAKTRPIRTVRKYVSSSTMVAVRKDSNGKAISFVEPDGNHHVAFYKDENDVITENIVTKWLAVQRKLNHMPIIIDNPSQTWSEILKRNDVPEELLQSLPKDSSTFLLSLQIGEAFIMGMEDGDYQKALEEKDMQTLADHLYFVQNISSNNYRLRRHVESSFDTTDMNKEDQRFLNIKSVNSFFNSNPHKVKITILGDIITDV

SEQ ID NO: 1300 - protein, 1228 aa, unidentified
  REGION 1..1228: note = Description of Unknown: uncultivated organism with predicted taxonomy: Fibrobacter
  REGION 1..1228: note = MG16-219 effector
MKKILGLDLGVGSIGWSVISVDENGDPSEILGMGSRIIPLSTDDANEFSTGNAISKNQKRTQKRTARKGYDRFQLRRENLTAELRKLHMLPDEKLIKLPILELWTLRAKAATEGNKLSLPEIGRILYHINQKRGYKHAKADEAGDKQQTEYVAAVNSRYAMIKERCQTIGQYFAEKIRESEVISEKGKFYTFRTKEQVFPRKAYEEEFDKIIAVQRQYYPDVLTDSAINRLRNEIIFYQRNLKSCKHLVSLCEFEKHEYKNKEGQIVYDGPKVAPRTSPLAQICRIWEFVNNISLENGYKERRELSLEEKQKVIHFLDNNEKMTATDFSKLLGLGKKNEWDLKRYFGKNGVKGNETKVSLRNALKDFPNVEELLQFNLTLDNSNYVNESTGEVLKVISPSFQNEPLYDLWHTVYSLSDKDELSNALGKKFGISDKNAIQQLFKIDFVKPGFSNKSAKAVRRILPFLQQGLMYSEACAEAGYNHSNSLTKTENEARSLLDRLPQIKKNELRQPVVEKILNQMVNVVNAIYDDYGTIDEIRVELARELKQSKDERNTTFNNIAKRERENKGIAERIKNEYGLIPNRNKIEKYRLWEEAEQKCFYCGQTVNVKEFLSGFDVEVEHVIPKSLLFDNSYANKVCACRKCNANKGNKTAFDFMKSQSEDAFNNYVSRVEEYYKNGKISRTKHDRLLTPQSEIPSDFIERQLRQTQYISKKALEMLKEVCCKVYATNGSVTDFIRHTWGYDEILHQLNFDRYKQGGLTEVREFDNKGIIHKEERIQNWSKRLDHRHHAIDALVIAMTKQSIIQRLNHLNTERDAMFQEVDKQSAEWKNDFSLLQEWLRERKHFSTKDVADRVAEILISFKAGKRVATTGKRIKYEKGQKKVLQEGIVIPRGALSEESVYGKIKVIDPHKPLKFLFENPQTIVSPQIKTAVIDRLSKFGNDVKKAIASIKKEPLTLASDKVINDADCFKEEYVIKYPLEGFKAKDIQFVVDKHIREDVLPKRLAEFDGNEKNAFKNIDKNPIFADANHNIPIKHVRCFTGLSAVVPVKHDDAGKAIGFVKPGNNHHVAIYKDECGKLHESLVSFWNAVERKIKKVPVVITQPQDAWNIAENAHCSEEFTASLPNKTWTFVQSLQVNEMFVLGLEESAYQKAVREKDYNLINKHLYRVQSISKSDYFFRHHLETIIDDTSASKEMKRFYRFKSLGSFFKENPHKVQISVLGKLIVKE

SEQ ID NO: 1301 - protein, 1222 aa, unidentified
  REGION 1..1222: note = Description of Unknown: uncultivated organism with predicted taxonomy: Sediminibacterium sp. C3
  REGION 1..1222: note = MG16-220 effector
MKKVLGLDLGVGSIGWCLIEKDDDNTPKRIIRMGSRIVPISSDEETGYTKGNAISKNADRTAKRTARKCYDRYQLRRQALVNLIKRLYMLPNKELMLEQTPLEIWQKRADAASKEITLEALGRVLLHINQKRGYKHSRLSNADRKETAYVQEVNSRYDELKAEGLTIGQHFAAKLKENEQTSNDGKKYYNYRIKEQVYPRHAYEEEVKKILEIQSQFHADVLTPDVCREIMDIIFYQRDLKSCKNLVSLCEFESHTITKDGKEITIGPKVAPRTSPLAQLSSILETSNNITIRNRRNDELYISPEQRKAIADFLDNHEVMKLTDLYRILNISRKEGWWAGKAIGKGLKGNTTKCQIREALGSLPKEQVDSLTAFRLEFEEYVDEETGEVRQRVNNTLAEQQPLYKLWHMLYSIKDNKELSGALHHLGIDDEKSINKLSNLDFRTAGYANKSAKAIGRILPYLMDGIMYSEACERAGFDHSRRINPGRTLLTSLPQIQKNDLRQPIVEKILNQLVNIVNALLEKEGTIDEIRVELARELKQSKDERNEAFKRNNQNERQNKEYAERIKEYGLTPTRNRIMKMKMWEESEYTCMYCGQPINVTEFLQGADVEREHIIPRALLFDNSFTNQVCSCRRCNSQKGMRTAYDFIADDKGQEGLDLYIERINDLFDRKKISRSKLNRLLVSHKAYVSRKAQGKETEEDKELWENFIDRQLRQSQYIAKKSVEMLQQVCKNVYTTTGSVTDFVRHQWGYDEILHDLNFERFKKAELTTMVTQLHSGKEVEVERITNWTKRLDNRHHAVDALAIACTTQGMIQRLNTLNACRNEMLDELNSKDERVIDPERSMLEKWINSQPHICYAQAKDEVDKIIVSQRPNTRITVPGKRYVTKNGKRTQAQTGIIVPRGALHAEFVYGRIMKQEADGMTLTPQYVRKYKLGIGAQGFLFKGDETYKEDVKKDKKTGLSQIVVTDKIKDVLDKIVDGGIRRRILERLNRGFEEGTDYRANVAKALANLKNLDDDPIYSDDAKTRPIRTVRKYVSSSTMVAVRKNDDGKPISFVEPDGNHHVAFYKDEDGVVTESLVTKWQAVQRKLNHIPIIIENPSQVWNEVLGTNDIPNELLQSLPKDKSIFLLSMQIGEAFVMGMDETAYKRAIEKNDTQALADHLYFVQNLSSNNYRLRRHVESSFDTTDMNKEDLRFLNVKSIGALFNYNPHKVKLTILGDIIL

SEQ ID NO: 1302 - protein, 1018 aa, unidentified
  REGION 1..1018: note = Description of Unknown: uncultivated organism with predicted taxonomy: Sediminibacterium sp. C3
  REGION 1..1018: note = MG16-221 effector
MKKVLGLDLGVGSIGWCLIEKDDNNTPKRILRMGSRIVPISSDEESGYTKGNAVSKNADRTAKRTARKCYDRYQLRRQALINLLKRFGMEPNKNLMLEQTPIKLWQKRADAASKEVSLEELGRVLFHINQKRGYKHSRLSNSDSKETAYVQEVNSRYDDLKAEGLTVGQHFAAKLKENEQESADGKKYYNYRIKEQVYPRHAYEEEVKKILEVQSRYHSDILTPDVCKEIMDIIFYQRDLKSCKNLVSLCEFESYTITKDGKEITIGPKVAPRTSPLAQLSSILETANNITIRNRKNDELYISPEQRKAIADFLDNHEVMKLTDLYKILNIGRKDGWWAGKAIGKGLKGNTTKYQIREALANLPKEKVDSLTAFQLEFDEYVDEETGEVRKRINNTKAEKQPLYKLWHLLYSIKDNKELSGALCHLGIEDEESIEKLGKLDFRTAGYANKSAKAIGRILPYMMEGMMYSDACERAGFDHSKRIDPNRTLLTHLPQIQKNELRQPVVEKILNQLVNIVNALLEKEGTIDEIRVELARELKQSKDERNETFKRNSQNERNNKEYAERIKEYGLTPTRNRIMKMKMWEESEYTCVYCGQPVNVTEFLKGADVEREHIIPRGLLFDNSFTNQVCSCRLCNSKKGMRTAYDFIADDKGQAGLETYIDRINDLFNRKKISRSKFNRLLVSYKAYISRKAKGKETEEDKELWENFIDRQLRQSQYIAKKSVEMLQQVCKNVYTTSGSVTDFVRHQWGYDEILHDLNFERFKKAGLTAMVKQLHSGKEVEVERIMDWTKRLDNRHHAVDALTIACTTQGMIQRLNTLNASRDEMLEELNSKDQRVVDPERSMLEKWIFVQPHISYVEAKNEIDKIVISQRPNTRITVPGKRYVNKNGKRTLVQTDIIVPRGALHAEFVYGRILKQEADGVTMTPQYVRKYKLGIGAQGFLFNGKEFYKEELKKDSKTGLSSIVVTDKIKDVLEKIVDGGIRQRILERLNRGFEEGTDYRANVAKALANLKNLDEDP

SEQ ID NO: 1303 - protein, 1222 aa, unidentified
  REGION 1..1222: note = Description of Unknown: uncultivated organism with predicted taxonomy: Prevotella sp. ne3005
  REGION 1..1222: note = MG16-222 effector
MKKVLGLDLGVGSIGWCLLEKDDKNVPIRIIRMGSRIVPISTDEETGFTKGNAISKNADRTAKRTARKCYDRYQLRRQALVNLLRRLGMEPSKNLMLEQPPMELWQKRADAASKEISLVELGRVLLHINQKRGYKHSRLSNSDSKETAYVQEVNSRYDDLKAEGLTVGQHFAAKLKENEQLSADGKKYYNYRIKEQVYPRCAYEEEVKKILEVQSQYHSDVLTADACKEIMDIIFYQRDLKSCKNLVSLCEFESYTITKNGKEITIGPKVAPRTSPLAQLSSILETANNITIRNKRNDELYISPEQRKAIADFLDTHEVLKLTDLYKILNIGRKDGWWAGKAIGKGLKGNTTKCQIRKALSKLPKDLVDSITAFQLEFEEYVDQETGEVRKRINNTLVEKQPLYHLWHLIYSIKDVDELSGALRHLGIEDEESIRNLCDLDFRTAGYANKSAKAIGRILPYLMEGVMYSEACERAGLDHSRRIDPNRTLLKHLPPIQKNELRQPVVEKILNQLVNIVNALLEKEGAIDEVRVELARELKQSKDERNETFKRNNQNERQNKEYAERIKKYSLTPTRNRIMKLKMWEESEHACMYCEEPVDPIEFLKGADVEREHIIPRGLLFDNSFTNQVCSCRRCNSKKGMRTAYDFIADDKGQEGLNAYIDRINDLFDKKKISRSKLNRLLVSHKAYISRKAQGKETEEDKELWENFIDRQLRQSQYIAKKSVEMLLQVCKNVYTTSGSVTDFVRHQWGYDELLHDLNFDRFKKAGLTAMVKQLHSGKEVEVERIKDWTKRLDNRHHAVDALTIACTTQGMIQRLNTLNASREDILEELNSKDQRLVDPERSMLEKWVFVQPHISYSEAKNEIDKIVISQRPNTRMTVPGKRYVTKNGKRTLAQTGIVVPRGALHAEFVYGRIMKQEPDGITMTPQYVRKYKLGIGAQGFLFNGKEFYKEELKKDSKTGLSKIVVTDKIKEVLDKIVDGGIRQRILERLNRGFEEGADYRANVAQALTNLKNLDEDPIYSDDAKTRPIRTVRKYVSSSTMVAVRKDDKGKPVAFVEPDGNHHVAFYKDENGVISETIVTKWQAVQRKLNHIPIIIDNPSQTWSEVLGRNNVPEELLQSLPKDSSSFLLSLQIGEAFIMGMEEAELQKALEEKDMQKLAEHLYFVQNISSNNYRMRRHVESSFDTTDMNKEDQRFLNISSLDALYRLNPHKVKLTVLGDIVP

SEQ ID NO: 1304 - protein, 1222 aa, unidentified
  REGION 1..1222: note = Description of Unknown: uncultivated organism with predicted taxonomy: Prevotella copri
  REGION 1..1222: note = MG16-223 effector
MKKVLGLDLGVGSIGWCLVEKDDKNIPLRIIRMGSRIVPITKEEENGYTRGNAISKNADRTTKRTARKCYDRYQLRRKALVNLLKRCGMMPDKGLILEQSPLDLWQKRADAASKEISLEELGRVLLHINQKRGYKHSRLSNSDKKETAYVQEVNSRYDKLKAEGLTVGQHFAAKLKENEQISADGKKYYNYRIKEQVYPRHAYEEEAKRILEVQSQFHTDVLTTNVCKEIFDIIFYQRDLKSCKNLVSFCEFESYTINKNGKDITIGPKVAPRTSPLAQLSSILETANNITIRNRRNDELYISPEQRQAIANFLDNNEVMKLTDLYKILNIGRKDGWWAGKAIGKGLKGNTTKCQIRKALSKLSQEQIDKLTSFDLIFDEYVDEETGEVRKRINNSHAERQPLYRLWHLVYSIKDNDELSGALRGLGIEDEECIHNLCNLDFRTAGYANKSAKAIGRILPYLMEGMMYSEACNRAGFDHSRRVNPERELLTSLPQIQKNELRQPIVEKILNQLVNVVNALLEKEGTIDEIRVELARELKQSKDERNETYRRNNQNEKKNNEYAERIKEYGLTPTRNRIMKMKMLEESEYKCMYCGQPVREKEFLQGADVEREHIIPKALLFDNSFTNQVCSCRSCNSQKGMRTAYDFIADDKGQEGLEAYIERINDLFNKKKISRSKLNRLLVSHKAYVSRKAQGKETEEDVQLWENFIDRQLRQSQYIAKKSVEILQQVCKNVYTTSGSVTDFVRHQWGYDEILHDLNFEHFKKANLTTMVKQLHSGKEVEVERIKDWTKRLDNRHHAVDALAIACTTQGMIQRLNTLNASRDAMLDELNNKEQRMIDSERSMLEKWIISQPHVSYAEAKKEIDKILISLRPNTRITVPGKRYITKNGKRTLVQTGIIVPRGALHAEFVYGRIMKQEADGVTLTPQYVRKYKLGIGTQGYIFNGNETYKEELKKDKKTGLSQIVVTDKIKDVLEKIVDGGIRKRILERLNRGFEDGTDYRTNTAKALENLKNLDEDPIYSDDAKTRPIRTVRKYVNSSTMVAVRKNDNGKPVSFVEPDDNHHVAFYKDKDGVITESIVTKWQAVQRKLKHIPVIVDNPTQTWNDLVGRNDVSEELLQSLPKDNSEFLLSLQKGEAVILGLEEAAYQKAIDSNDMHTLSNHLYFVQSASLSDYRFRRHVESSFDKMGMNKEDQRFLNVKSIGAFFNYNPHKVKVTILGDIIK

SEQ ID NO: 1305 - protein, 848 aa, unidentified
  REGION 1..848: note = Description of Unknown: uncultivated organism with predicted taxonomy: Bacteroides sp. CAG:770
  REGION 1..848: note = MG16-224 effector
MKKVLGLDLGVGSIGWCLIEKDDNNVPKRILRIGSRIVPISSDEETGYTKGNAVSKNADRTAKRTARKCYDRYQLRRQALVSLLKRLGMEPNKKLMFEQTPMELWQKRADAASKEVSLEELGRVLLHINQKRGYKHSRLSNSDSKETAYVQEVNSRYDDLKAEGLTVGQHFAAKLKENEQESADGKKYYNYRIKEQVYPRHAYEEEVKKILEIQSQYHSEVLSSDVCKDIMDIIFYQRDLKSCKNLVSLCEFESYTITKDGKEITIGPKVAPRTSPLAQLSSILETANNITIRNRKNDELYISPEQRKAIADFLDNHEVMKLTDLYKILNIGRKDGWWAGKAIGKGLKGNTTKCQIREALSALSKEQIDSLTAFLLEIDEYVDEETGEVRKRINNTLAEQQPLYKLWHMLYSIKDNKELSGALNHLGIEDKESIEKLCKLDFRTAGYANKSAKAIGRILPYLMEGMMYSDACERAGFDHSRRINPERVLLTHLPQIQKNELRQPVVEKILNQLVNIVNALLEKEGAIDEIRVELARELKQSKDERNEAFKRNNQNERQNKELAERIKNYGLTPTRNRIMKLKMWEESEHSCMYCKQPVDPIEFLKGADVEREHIIPRGLLFDNSFTNQVCSCRRCNSQKGMRTAYDFIADDKGQEGLNAYIEHINDLFEKKKISRSKLNRLLVSHKAYLSRKAQGRETEEDKELWENFIDRQLRQSQYIAKKSVEMLQQVCKNVYTTSGSVTDFVRHQWGYDELLHELNIERFKKAGLTAMVKQLHSGKEVEVERIKDWTKRLDNRHHAVDAFAIACTTQGMIQRLNTLNASRDEMFEELNTKDQRLIDPERSMLEKW

SEQ ID NO: 1306 - protein, 1164 aa, unidentified
  REGION 1..1164: note = Description of Unknown: uncultivated organism with predicted taxonomy: Bacteroidales
  REGION 1..1164: note = MG16-225 effector
MATKKILGLDLGVGSIGWALIEMEDDKASSILGMGSRIVPLTTDDSTQFSKGQAITKNADRTARRTARKGYDRYQLRRAKLTQVLRQHNMLPERMDEHVIDLWRLRADAATEGKQLTLQQIGRVLYHINQKRGYKHAKADVSADSKQTKYVATVNQRYKDLQNLNQTIGQFFYQQLVDTAVQTPSGPYYTFRIKDKVFPRAAYVAEFDQIMQVQKIFYPEVLTTELINTLRNEIIFYQRPLKSCKHLVGLCEFEMKAYTNKHTGQVVYSGPKCAPRTSPLAQLCAIWEGVNNITLFNKHNEYLDITLEQRKAMVEHLCNNEKMTAKDLQKILGISSKEGWSVEKAIGKGLKGNMTLHQLRKALSKKYSDLLQFDLLMTDHVDEATGEVISRISEAIEQEPLYRLWHVVYSVQEREELGKALHKQFGIDDEAVVEALFKIDFVKPGYANKSHKFIRKLLPYLMKGYKYSEACDHIYVNHSNSMTKEQNATRELVDKIPLLLKNELRQPIIEKILNQMINIVNTLKEQHGNIDEVRVELARELKQSKDERAQTTERINKNERENKAIEERIREHGIRPSRARIQKYKMWEESQHQCFYCGKSISAAEFLSGADVEVEHIIPKSILFDDSFSNKVCACRDCNHTKDNLTARDFMETRGQAELDAYLARVNTAFEEGRISKTKRDHLLWHKEEIPQDFIDRQLRQSQYISKKAVEILRSAIRDVYATSGSVTDFLRHIWGYDQILHNLNLPKYRDAELTEFVTYDHRGQEHQEERIKNWSKRIDHRHHAIDALTIALTRQGYIQRLNNLNASHDDIAEAVRKVNPLMEKKYSLLEKYIYIQPHFTVQEVTDKVDGILVSFRAGKKVTTPAKRAIYRKGKRINVQDGLLVPRGALTEETVYGKLGNKYVVKYPLTHPSMKVDDIVDPTIREIVRARLAAFSGKAKDAFAKPLYSDAAQKMEIKTVRCYTGLQDKAVASVRFNAQGEPIGFAKTGNNHHIAIYQDAKGQYQESVVSFWQAVERKRYGLPIVIEDPKAIWDKLLDSDLPQEFLSTLPQDDWQFVVSLQANEMFILGMEDGDFEMAMQNKDYQLLNKYLYRVQKIRGKEYTFRYHIETTVDDKYSNEKGESKPNPALSMQMKKLISIRSFGGWLAQHPHKVRVNLLGEISEV

SEQ ID NO: 1307 - protein, 811 aa, unidentified
  REGION 1..811: note = Description of Unknown: uncultivated organism
  REGION 1..811: note = MG16-226 effector
MVPLCYRSATVNGLKKPACILYAPFGDVQDANEMRMVEDAKWNENYWYLKSRHLMWRKHFFIYFYYLTQNFACIYQKKVLPLQRKGFGINTNTYIMTKNILGLDLGVGSIGWALIQTEDDQPKRIIGMGSRIVPLTKDDSDQFTKGQAISKNADRTTRRTTRKGYDRYQLRRALLTQVLRQNGMLPECMDENMIDLWKLRSDAATDGKQLTLQQIGRVLYHINQKRGYKHAKSDNDGDSKQTKYVEEVNLRYKEIQEKNVTVGQHFYAELLNSKVESGNGPYYTFRIKDKVFPRAAYIAEFDQIMRVQKCYYPDVLTDELIETLRNRIIFYQRPLKSCKHLVGLCEFEMRPYKKDGKIVYGGPKCAPRTSPLAQLCAMWETVNNITLTNRNNERLEISNEQRQQLVQFLCTHETLKLTDLYKILGITKKDGWYGGKAIGKGIKGNVTLNQLRKALDGKYSQWLEMPIERIDVVDKNTAEAFWAVSPKVDETPLFQLWHAVYSLQNAEELTKTLQNKFGITDSQVIDALCKIDFVKPGYANKSHKFIRRLLPYLMEGMMYSEACACIQVNHSNSMTKAEREARPLAEKIELLQKNALRQPVIEKILNQMINLVNRLQQEYGSIDEARVELARELKQSRDERKDAFDRNNENEKRNKKISALISEQGIRPSRSRIQKYKMWEESEHRCMYCGKVVNLSEFLNGADVEIEHIIPRSILFDDSFSNKVCACRDCNREKDNMTAMDYMASKPEGEFEAYKQRVDEAFNAHRISKTKRDHLLWRRADIPQAFIDRQLRLSQYIATKAVEILQQGIRQ

SEQ ID NO: 1308 - protein, 854 aa, unidentified
  REGION 1..854: note = Description of Unknown: uncultivated organism with predicted taxonomy: Bacteroidales
  REGION 1..854: note = MG16-228 effector
MADFLNQHDKMGVKDLQKILGISPKDGWWAGKAIGKGLKGNTTFTQLREALGNLPDAEHLLEMKLHLVDSAVDTTTGELIRQVSPQVEEEPLFRLWHLVYSLQNEDELRKALRKQFGIDDEEILAKLCKIDFVKPGYANKSHKFIRKLLPYLMEGYQYHEACAHIGVNHSDSLTAEQNAARPLLDKIPLLEKNELRQPVIEKILNQMINVVNALKAEYGDIDDVRIELARELKSSKEEREAAFKRNNENERQNKIYEDRIREYGIRPSRSRIQKYKMWEESNHLCFYCGKPVNVTDFLAGAEVEIEHIIPQSVLFDDSYSNKVCACRTCNHTKGNQTAREFMETHSKAEYESYLLRVDDAFNAHRISKTKRDHLLWRKEDIPQDFIDRQLRQSQYIAKKAAEILRQGYRNVYATSGSVTDFLRHQWGYDEILHRLNLPRYQQVEGLTELVTYDHCGQEHQQERIKGWTKRLDHRHHAIDALTIALTQQSVIQRLNTLNTSREQMFDDLGKRTDTPEYTEKRSLLENWIDAQPHFSVQEVTDKVDGILVSFRAGKRAATPAKRAVYQNGKRHIVQTGLQVPRGALSEETVYGKLGNKYVVKYPLGHQSMKVDDIVDPTIREIVRTRLNAFGGKAKDAFAEPLYSDAAHQMQIKTVRCYMGLQDKAVVPVRFNAKGEPVGFVKMGNNHHIAIYRDANGQFQESVVSFWQAVERKRYGIPVVIEHPHEVWDKLINIDNIPQEFLETLPRDDWQFVVSLQQNEMFILGMDDADFEAAMEQKDYRTLNKYLYRVQKIATKNYYFRYHTETSVDDKYDGEKNEMWSKNMKKLINIRSFDAFFSQHPHKVRINLLGEVSAL

SEQ ID NO: 1309 - protein, 887 aa, unidentified
  REGION 1..887: note = Description of Unknown: uncultivated organism with predicted taxonomy: Bacteroidales
  REGION 1..887: note = MG16-229 effector
LAQLCTVWEAVNNITLTNRQNETFEITQEQRVAMADFLNQHDKMGVKDLQKILGISPKDGWWAGKAIGKGLKGNTTFTQLREALGNLPDAEHLLEMKLHLVDSAVDTTTGELIRQVSPQVEEEPLFRLWHLVYSLQNEDELRKALRKQFGIDDEEILAKLCKIDFVKPGYANKSHKFIRKLLPYLMEGYQYHEACAHIGVNHSDSLTAEQNAARPLLDKIPLLEKNELRQPVIEKILNQMINVVNALKAEYGDIDDVRIELARELKSSKDEREAAFKRNNENERQNKIYEDRIREYGIRPSRSRIQKYKMWEESNHLCFYCGKPVNVTDFLAGAEVEIEHIIPQSVLFDDSYSNKVCACRTCNHTKGNQTAREFMETHSKAEYESYLLRVDDAFNAHRISKTKRDHLLWRKEDIPQDFIDRQLRQSQYIAKKAAEILRQGYRNVYATSGSVTDFLRHQWGYDEILHRLNLPRYQQVEGLTELVTYDHCGQEHQQERIKGWTKRLDHRHHAIDALTIALTQQSVIQRLNTLNTSREQMFDDLGKRTDTPEYTEKRSLLENWIDAQPHFSVQEVTDKVDGILVSFRAGKRAATPAKRAVYQNGKRHIVQTGLQVPRGALSEETVYGKLGNKYVVKYPLGHQSMKVDDIVDPTIREIVRTRLNAFGGKAKDAFAEPLYSDAAHQMQIKTVRCYMGLQDKAVVPVRFNAKGEPVGFVKMGNNHHIAIYRDANGQFQESVVSFWQAVERKRYGIPVVIEHPHEVWDKLINIDNIPQEFLETLPRDDWQFVVSLQQNEMFILGMDDADFEAAMEQKDYRTLNKYLYRVQKIATKNYYFRYHTETSVDDKYDGEKNEMWSKNMKKLINIRSFDAFFSQHPHKVRINLLGEVSAL

SEQ ID NO: 1310 - protein, 1175 aa, unidentified
  REGION 1..1175: note = Description of Unknown: uncultivated organism with predicted taxonomy: Bacteroides sp. CAG:545
  REGION 1..1175: note = MG16-230 effector
EFTSGNAASKNQKRTQKRTARKGYDRYQMRRQALTEKLRELKMLPDERLIKLPVLELWTLRAKAATPGEKLTLPEIGRVLYHINQKRGYRHAKSDDSADKEQRDYVQTVNKRYQEIKDEGTTIGQHFAIKLKESEIVTEKGPFYNYRIKEQVFPRDAYIEEFDRIMDCQKTFYPEELSEDNIDEIRNKIIFYQRNLKSCKHLVSQCEFMTRSFLDAEHKPILNSSGELVMSGPKVAPKSSPIFQACKIWEEINNLSIRNKENDELHISPEQKKDIFEYLDNNEKINATALYKILGIGKGDGWSVDKALSKGFTGNTTKVAIAKALGKEHNTKKSDLLRFVLRLKENGVNKDTGEIIYEIDPTCENEPLYRLWHVIYSINDKDALRHALTNQFGINDGESLRELTKIDFVKQGYGSRSAKFMRKLLPALMDGARYSEACDMIGINHSGSLTKSENEARELLHKIPQLQKNELRQPVVEKILNQMINVVNAVIDQFGSIDEIRVEMARELKLSKEGRAATAKNIRDREKMNNEMAEKIKELGITPSKNKILKYRLWQESGQKCFYCGQPVGAAEFLSGLDVEIEHIVPKALLFDDSFSNKVCACRKCNAEKSNTTAYDYMKSKGENEFNDYLRRVDAAFNEHKISFTKRSRLLTPADKLPKDFISRQLVQTQYISRKAMEILKQVCHNVYGSSGEVTSYLRRIWGYDEILHSLDLPRYREGGMTAEVSYDHRGQTHTEERIKDWSKRLDHRHHAIDALTIACTRQSIIQRLNNLSAMTAVAGESMSLDKWTLAQPHFSVQEASDNVSRILVSFKAGKKVTTPGKRYVYRGGKRVLAQEGLLIPRGALCEESVYGRIHSLEKEVPVKKLFERVDDIVKPGIRTTVEERLRACDNDVKVACASLKKEPLYLDAEKTIPLEYGTCYKAEYVMRYALSALKPKDVEFIVDEHIRKVVSERLSEYGNDPKKAFAEPLYADKSKTIPIRAVRCYTGLAQVVPVKKDSKGNDIGFVKPGNNHHIAIYRDAEGTYHESIVTFWDSVERKKYGLPVIIRKPGEIWDILIDKNIPEELAAGIPAPDWKFVMSMQQNEMFVLGMEDDEFRDAMEVKDYKTLGAHLYRVQKLTSIYYVFRHQYETQLDDSKGAQIMKKFYRAQSFKALFSLHPRKVSVSLLGEMALKDD

SEQ ID NO: 1311 - protein, 890 aa, unidentified
  REGION 1..890: note = Description of Unknown: uncultivated organism with predicted taxonomy: Bacteroides sp. CAG:770
  REGION 1..890: note = MG16-231 effector
MKADDLFKILGLAKNSGWSADRAMSKGMVGNTTRVALMKALKGRRDIDEILRFDLREVESNQVNADTGEVLMEIGAECESEPLYRLWHIIYSISDKNEQKATLEKQFGITDESMLESLCRIDFVKQGYSSRSFKFMRKILPSLMDGAKYSEACDVIGINHSDSITKAENQTRKLLTKLPQLQKNELRQPVVEKILNQMINVVNAVIDKYGSIDEIRVEMARELKLSKAGRESAAKNIRTREKANEEIAKRIEELGLVPSKNKILKYRLWEESGKRCFYCGQPVSAAEFLNGLDVEIEHVVPKSLLFDDSFSNKVCACRKCNAEKGNATAFDFMKGRGENAFEDYLKRVETAFKENKISQTKRNRLLTPADKIPKDFIARQLVQTQYISRKAMEILNQVCRNVYGSSGDVTAYLRRIWGYDEILHSLDLPRYREGNLTGDVTYVHRGQTHTEERIRDWSKRLDHRHHAIDALTIACTRQSIIQRLNILNAKTAIGEEQMSLDKWTLAQAHFSVADVADHVADILVSFKSGKRVTTPGKRYVYKAGRRIVAQENILVPRGALSEESVYGRIKSIEEKVPVKKLFERADDIVKPRIRHLIRERLATCGGDCSKAVSSLKKSPLYLDEENTIMLEYGSCFKPEYVIKYSLNSIKAKDAVSIVDNHVREVVTERLAAFGDDPKKAFAEPLYADETGKIQIKTVRCYTGLSQVVPVKKDADGNDIGFVKPGNNHHIAIYKDADGKYQESIVTFRDAVERKKYGIPVVVRNPVEVLDTIIDKNVPEDLAGGLPSPEWTFVMSMQQNEMFVLGMGDDEFNDAMAGMDYKSLGEHLYRVQKLASLYYVFRSQYETKLDDSNNALAMRKFYRIRSFNALFSLNPRKVSISLLGEISLKDD

SEQ ID NO: 1312 - protein, 1133 aa, unidentified
  REGION 1..1133: note = Description of Unknown: uncultivated organism with predicted taxonomy: Bacteroides sp. CAG:770
  REGION 1..1133: note = MG16-232 effector
MLPDERLIKLPVLELWTLRAKAATPGEKLTLPEIGRVLYHINQKRGYRHAKSDDSADKEQRDYVQTVNKRYQEIKDEGTTIGQHFAIKLKESEIVTEKGPFYNYRIKEQVFPRDAYIEEFDRIMDCQKTFYPEELSEDNIDEIRNKIIFYQRNLKSCKHLVSQCEFMTRSFLDAEHKPILNSSGELVMSGPKVAPKSSPIFQACKIWEEINNLSIRNKENDELHISPEQKKDIFEYLDNNEKINATALYKILGIGKGDGWSVDKALSKGFTGNTTKVAIAKALGKEHNTKKSDLLRFVLRLKENGVNKDTGEIIYEIDPTCENEPLYRLWHVIYSINDKDALRHALTNQFGINDGESLRELTKIDFVKQGYGSRSAKFMRKLLPALMDGARYSEACDMIGINHSGSLTKSENEARELLHKIPQLQKNELRQPVVEKILNQMINVVNAVIDQFGSIDEIRVEMARELKLSKEGRAATAKNIRDREKMNNEMAEKIKELGITPSKNKILKYRLWQESGQKCFYCGQPVGAAEFLSGLDVEIEHIVPKALLFDDSFSNKVCACRKCNAEKSNTTAYDYMKSKGENEFNDYLRRVDAAFNEHKISFTKRSRLLTPADKLPKDFISRQLVQTQYISRKAMEILKQVCHNVYGSSGEVTSYLRRIWGYDEILHSLDLPRYREGGMTAEVSYDHRGQTHTEERIKDWSKRLDHRHHAIDALTIACTRQSIIQRLNNLSAMTAVAGESMSLDKWTLSQPHFSVQEVSDNVSRILVSFKAGKKVTTPGKRYVYRGGKRVLAQEGLLIPRGALCEESVYGRIHSLEKEVPVKKLFERIDDIVKPGIRAAVEERLRACDNDVKVACASLKKEPLYLDVEKTIPLEYGTCYKAKYVMRYALSALKPKDVEFIVDEHIRKVVSERLSEYGNDPKKAFAEPLYADKSKTIPIRAVRCYTGLAQVVPVKKDSKGNDIGFVKPGNNHHIAIYRDAEGTYHESIVTFWDSVERKKYGLPVIIRKPGEIWDILIDKNIPEELAAGLPAPDWQFVMSMQQNEMFVLGMEDDEFRDAMEGKDYKTLGAHLYRVQKLASIDYYFRSQYETALDNSAGARMMKKFYRINSIKSLFALHPRKVSVSLLGEMALKDD

SEQ ID NO: 1313 - protein, 1010 aa, unidentified
  REGION 1..1010: note = Description of Unknown: uncultivated organism with predicted taxonomy: Bacteroides sp. CAG:545
  REGION 1..1010: note = MG16-233 effector
MDCQKTFYPEELSEDNIDEIRNKIIFYQRDLKSCKHLVSQCEFMTRSFLDADHKPILNSSGELVMSGPKVAPKSSPIFQACKIWEEINNLSIRNKENDELHISPEQKKDIFEYLDNNEKINATALYKILGIGKGDGWSVDKALSKGFTGNTTKVAIAKALGKEHNTKKSDLLRFDLRLKENGVNKDTGEIIYEIDPTCENEPLYRLWHVIYSINDKDALRHALTNQFGINDEESLRELTKIDFVKQGYGSRSAKFMRKLLPALMDGARYSEACDMIGINHSGSLTKSENEARELLHKIPQLQKNELRQPVVEKILNQMINVVNAVIDQFGSIDEIRVEMARELKLSKEGRAATAKNIRDREKMNNEMAEKIKELGITPSKNKILKYRLWQESGQKCFYCGQPVGAAEFLSGLDVEIEHIVPKALLFDDSFSNKVCACRKCNAEKSNTTAYDYMKSKGENEFNDYLRRVDAAFNEHKISFTKRSRLLTPADKLPKDFISRQLVQTQYISRKAMEILKQVCHNVYGSSGEVTSYLRRIWGYDEILHALDLPRYREGGMTAEVSYDHRGQTHTEERIKDWSKRLDHRHHAIDALTIACTRQSIIQRLNNLSAMTAVAGESMSLDKWTLAQPHFSVQEVSDNVSRILVSFKAGKKVTTPGKRYVYRGGKRVLAQEGLLIPRGALCEESVYGRIHSLEKEVPVKKLFERVDDIVKPGIRTAVEERLRACDNDVKVACASLKKEPLYLDAEKTIPLEYGTCYKAEYVMRYALSALKPKDVEFIVDEHIRKVVSERLSEYGNDPKKAFAEPLYADKSKTIPIRAVRCYTGLAQVVPVKKDSKGNDIGFVKPGNNHHIAIYRDAEGTYHENIVTFWDSVERKKYGLPVIIRKPGEIWDILIDKNIPEELAAGLPAPDWQFVMSMQQNEMFVLGMEDDEFRDAMEVKDYKTLGAHLYRVQKLTSIDYYFRSQYETTLDDSAGARMMKKFYRIKSIKSLFALHPRKVSVSLLGEMALKDD

SEQ ID NO: 1314 - protein, 1121 aa, unidentified
  REGION 1..1121: note = Description of Unknown: uncultivated organism with predicted taxonomy: Bacteroides sp. CAG:770
  REGION 1..1121: note = MG16-234 effector
MDLWTLRARAATPGEKLSLAEIGRVLYHLNQKRGYRHSKEDDSADKTQRDYVQAVNKRFQEIKNEGLTIGQHFAVKLKESEVITDKGAFYNYRIKEQVFPRAAYVEEFDRIIQCQREFYPEVLTEANVNEIRNEIIYYQRPLKSCKHLVSVCEFMQRELFDAEHNPIRNGKGEIVVAGPKCAPKSSPLAQVCKIWEEVNNIRITNKENDEYFISIDNKHEIFDFLNTHEKMKADDLFKILGLAKNSGWSADRAMSKGMVGNTTRVALMKALKGRRDIEEVLRFDLSAVESNQVNADTGEVLMEISAECGREPLYRLWHIIYSISDKNEQKSALKSQFGILDESMLESLCRIDFVKQGYSSRSFKFMRKILPSLMDGAKYSEACDAVGINHSDSITKAENQARELLVKLPQLQKNELRQPVVEKILNQMINVVNAVIDKYGAIDEIRVEMARELKLSKEGRESAAKNIRAREKANEEIAKRIEELGLVPSKNKILKYRLWEESGKRCFYCGQPVSAAEFLNGLDVEIEHVIPKSLLFDDSFSNKVCACRKCNAEKDNATAFDFMKGRGENAFEDYLKRVETAFKENRISQTKKNRLLTPADKIPKDFISRQLVQTQYISRKAMEILNQVCRNVYGSSGDVTAYLRRIWGYDEILHSLDLPRYREGNLTGDVTYVHRGQTHTEERIKDWSKRLDHRHHAIDALTIACTRQSIIQRLNTLNAKTAIGEEQISLDKWTLAQAHFSVADVADHVADILVSFKSGKRVTTPGKRYVYKAGRRRVVQENILVPRGALSEESVYGRIKSIEEKVPVKKLFERVDDIVKPRIRRLIRERLEACGGDCSKAVSSLKKSPLYLDEEKTIMLEYGSCFKYSYVKKSKLIQRDKKDDFINVSLIVDKHIREVVTARLAAFGGDTKKAFAEPLYADEAGKIQIRTVRCYTNSTVVPVKKDADGNDIGFVKPGNNHHIAIYKDADGTYYWKLVTLWNAVDRKRYGLPIIVRNPYEISDIIIDSNIPDALASGLPEPNWSFVMSLQQNEMFVLGMSEEEFRCAIENKDYKTLGMHLYRVQKLSHLRFRSQYETRLDDSSEAKNMKKFYEIRSLKSFWSLNPRKVSISLLGEISLKDD

SEQ ID NO: 1315 - protein, 1121 aa, unidentified; identical to SEQ ID NO: 1314
  REGION 1..1121: note = Description of Unknown: uncultivated organism with predicted taxonomy: Bacteroides sp. CAG:770
  REGION 1..1121: note = MG16-235 effector

SEQ ID NO: 1316 - protein, 1045 aa, unidentified
  REGION 1..1045: note = Description of Unknown: uncultivated organism with predicted taxonomy: Bacteroides sp. CAG:770
  REGION 1..1045: note = MG16-236 effector
KLKESEIITDKGAFYNYRIKEQVFPRAAYVEEFDRIIQCQREFYPEVFTEAIVNEIRNEIIYYQRPLKSCKHLVSVCEFMQRELFDAEHNPIRNGKGEIVVAGPKCAPKSSPLAQVCKIWEEVNNIRITNKENDEYFISIDNKHEIFDFLNTHEKMKADDLFKILGLAKNSGWSADRAMSKGMVGNTTRVALMKALKGRRDIDEILRFDLREVESNQVNADTGEVLMEIGAECESEPLYRLWHIIYSISDKNEQKATLEKQFGITDESMLESLCRIDFVKQGYSSRSFKFMRKILPYLMDGAKYSEACDAVGINHSDSITKAKNQARELLVKLPQLQKNELRQPVVEKILNQMINVVNAVIDKYGAIDEIRVEMARELKLSKEGRESAAKNISDRKKANEEIARRIEELGLVPSKNKILKYRLWEESGKRCFYCGQPVSAAEFLNGLDVEIEHVIPKSLLFDDSFSNKVCACRKCNAEKDNATAFDFMKGRGENAFEDYLKRVETAFKENKISQTKRNRLLTPADKIPKDFISRQLVQTQYISRKAMEILNQVCRNVYGSSGDVTASLRRIWGYDEILHSLDLPRYREGNLTGDVTYVHKGQTHTEERIKDWSKRLDHRHHAIDALTIASTRQSIIQRLNTLNAKTAIGEEQISLDKWTLAQAHFSVADVADHVADILVSFKSGKKVATPGKRYVYKAGRRRVVQENILVPRGALSEESVYGRIKSIEEKIPVKKLFERADDIVKPRIRRLIRERLEACGGDCSKAVSSLKKSPLYLDEEKTIMLEYGSCFKPEYVIKYSLNSIKAKDAVSIVDKHVREVVTERLAAFGDDPKKAFAEPLYADEAGKIQIKTVRCYTGLSQVVPVKKDADGNDIGFVKPGNNHHIAIYKDADGKYQECIVTFRDAVERKKYGIPVVVRKPAAVLDTVIDKNVPEDLAGGLPSPEWTFVMSMQQNEMFVLGMGDDEFNDAMAGRDYKSLGEHLYRVQSISHADYYFRSQYETMLDNSKNAMAMKKYYRIRSFKALFALNPRKVSISLLGEISLKDD

SEQ ID NO: 1317 - protein, 956 aa, unidentified
  REGION 1..956: note = Description of Unknown: uncultivated organism with predicted taxonomy: Bacteroides sp. CAG:770
  REGION 1..956: note = MG16-237 effector
PILNSSGELVMSGPKVAPKSSPIFQACKIWEEINNLSIRNKENDELHISPEQKKDIFEYLDNNEKINATALYKILGIGKGDGWSVDKALSKGFTGNTTKVAIAKALGKDHNTKKSDLLRFDLRLKENGVNKDTGEIIYEIDPTCENEPLYRLWHVIYSINDKDALRHALTNQFGINDEESLRELTKIDFVKQGYGSRSAKFMRKLLPALMDGARYSEACDMIGINHSGSLTKSENEARELLHKIPQLQKNELRQPVVEKILNQMINVVNAVIDQFGSIDEIRVEMARELKLSKEGRAATAKNIRDREKMNNEMAEKIKELGITPSKNKILKYRLWQESGQKCFYCGQPVGAAEFLSGLDVEIEHIVPKALLFDDSFSNKVCACRKCNAEKSNTTAYDYMKSKGENEFNDYLRRVDAAFNEHKISFTKRSRLLTPADKLPKDFISRQLVQTQYISRKAMEILKQVCHNVYGSSGEVTSYLRRIWGYDEILHSLDLPRYREGGMTAEVSYDHRGQTHTEERIKDWSKRLDHRHHAIDALTIACTRQSIIQRLNNLSAMTAVAGESMSLDKWTLAQPHFSVQEVSDNVSRILVSFKAGKKVTTPGKRYVYRGGKRVLAQEGLLIPRGALCEESVYGRIHSLEKEVPVKKLFERVDDIVKPGIRAAVEERLRACDNDVKVACASLKKEPLYLDVEKTIPLEYGTCYKVEYVMRYALSALKPKDVEYIVDEHIRKVVSERLSEYGNDPKKAFAEPLYADKSKTIPIRAVRCYTGLAQVVPVKKDSKGNDIGFVKPGNNHHIAIYRDAEGTYHESIVTFWDSVERKKYGLPVIIRKPGEIWDILIDKNIPEELAAGLPAPDWQFVMSMQQNEMFVLGMEDDEFRDAMEVKDYKTLGEHLYRVQKLTSLYYVFRHQYETQLDDSKGAQIMKKFYRVRSFNAMFALHPRKVSVSLLGEMALKDD

SEQ ID NO: 1318 - protein, 970 aa, unidentified
  REGION 1..970: note = Description of Unknown: uncultivated organism with predicted taxonomy: Bacteroides sp. CAG:545
  REGION 1..970: note = MG16-238 effector
MRIYDKEFPGRRSQTNIEQFRRTRNAGPKVAPKSSPIFQACKIWEEINNLSIRNKENDELHISPEQKKDIFEYLDNNEKINATALYKILGIGKGDGWSVDKALSKGFTGNTTKVAIAKALGKEHNTKKSDLLRFDLRLKENGVNKDTGEIIYEIDPTCENEPLYRLWHVIYSINDKDALRHALTNQFGINDEESLRELTKIDFVKQGYGSRSAKFMRKLLPALMDGARYSEACDMIGINHSGSLTKSENEARELLHKIPQLQKNELRQPVVEKILNQMINVVNAVIDQFGSIDEIRVEMARELKLSKEGRAATAKNIRDREKMNNEMAEKIKELGITPSKNKILKYRLWQESGQKCFYCGQPVGAAEFLSGLDVEIEHIVPKALLFDDSFSNKVCACRKCNAEKSNTTAYDYMKSKGENEFNDYLRRVDAAFNEHKISFTKRSRLLTPADKLPKDFISRQLVQTQYISRKAMEILKQVCHNVYGSSGEVTSYLRRIWGYDEILHSLDLPRYREGGMTAEVSYDHRGQTHTEERIKDWSKRLDHRHHAIDALTIACTRQSIIQRLNNLSAMTAVAGESMSLDKWTLAQPHFSVQEVSDNVSRILVSFKAGKKVTTPGKRYVYRGGKRVLAQEGLLIPRGALCEESVYGRIHSLEKEVPVKKLFERVDDIVKPGIRTAVEERLRACDNDVKVACASLKKEPLYLDVEKTIPLEYGTCYKAKYVMRYALSALKPKDVEFIVDEHIRKVVSERLSEYGNDPKKAFAEPLYADKSKMIPIRAVRCYTGLAQVVPVKKDSKGNDIGFVKPGNNHHIAIYRDAEGTYHESIVTFWDSVERKKYGLPVIIRKPGEIWDILIDKNIPEELAAGLPAPDWQFVMSMQQNEMFVLGMEDDEFRDAMEGKDYKTLGAHLYRVQKLTSIDYYFRSQYETTLDDSAGARMMKKFYRITSIKSLFALHPRKVSVSLLGEMALKDD

SEQ ID NO: 1319 - protein, 788 aa, unidentified
  REGION 1..788: note = Description of Unknown: uncultivated organism with predicted taxonomy: Bacteroides sp. CAG:770
  REGION 1..788: note = MG16-239 effector
LTSQFGINDEASLAELSKIDFVKQGYGSRSVKFMRKLLPSLMDGAKYSEACDVIGVNHSGSLTKSENEARELLQRIPQLQKNELRQPVVEKILNQMINVVNAVIEKFGGVDEIRVEMARELKLSKEGRAATAKNIRDREKENKEIAEKIIELGVTPSKNKILKYRLWQEAGQKCFYCGQPVGATEFLNGLDVEIEHVVPKALLFDDSFSNKVCACRKCNAEKRNSTAYDYMKSKGENAFNDYLRRVDTAFSEHKISFTKRSRLLTPADKIPKDFISRQLVQTQYISRKAMEILKQVCHNVYGSSGEVTSYLRRIWGYDEILHSLDLPRYREGGMTAEVSYEHRGQTHTEERIKDWSKRLDHRHHAIDALTIACTRQSVIQRLNNLSSMTAVAGEAMSLDKWTLAQPHFSVQEVSDKVGGILVSFKAGKKVTTPGKRYTYRGGKRILAQDGLLIPRGALSEESVYGRISALEKNVLVKKLFERVEDIVKPGIRAVVEDRLKACDNDVKAACTSLKEEPLYLDAEKTIPLEYGTCYKREYVIKYPISSLKTKDVESIIDGHIRQIVSERLSEYGNDPKKAFAEPLYADDAKTIPVRTVRCYTGLDQVVPVKKDVAGNDIGFVKPGNNHHIAIYRDADGKFHECVVTFWDAVERKKYGIPVIVRNPDEVWDVVIDKNVPEELAAGLPALGWSFVMSLQQNEMFILGMEDDEFRDAMAEADYKALGAHLYRVQKLTGSDYYFRSHYETLLDDSAGARIMKKFYRVRSFNALFNLHPRKVAVSLLGEMSLKND

SEQ ID NO: 1320 - protein, 1182 aa, unidentified
  REGION 1..1182: note = Description of Unknown: uncultivated organism with predicted taxonomy: Bacteroides sp. CAG:709
  REGION 1..1182: note = MG16-240 effector
LSPDESSEFTSGNAASKNQKRTQKRTARKGYDRYQMRRQALTDKLRKLKMLPDEHLIKLPILDLWTLRARAATPGEKLTLPEIGRVLYHINQKRGYRHSRSDDSADKEQREYVQAINKRFQEIREEGVTIGQHFVKKLKESEVVTDKGAFYNYRIKEQVFPRDAYVAEFDKVMDCQKVFYPEELSEANINEFRNEIIFYQRNLKSCKHLVSRCEFMTRSFLDEGHRPVLDASGKLVISGPKVAPKSSPIFQVCKIWEEINNLSIRNKENDELHISPEQKKEIFEYLDNNEKITSAALYKILGIGKGDGWSVDKALSKGFTGNTTKVAISKALGKANDAKKRDLLRFDLRLKENGVNKDTGEIICEIDPECENEPLYKLWHVIYSINDKDAQRHALTSQFGINDEASLAELSKIDFVKQGYGSRSVKFMRKLLPSLMDGAKYSEACDVIGVNHSGSLTKSENEARELLQRIPQLQKNELRQPVVEKILNQMINVVNAVIEKFGGVDEIRVEMARELKLSKEGRAATAKNIRDREKENKEIAEKIIELGVTPSKNKILKYRLWQEAGQKCFYCGQPVGATEFLNGLDVEIEHVVPKALLFDDSFSNKVCACRKCNAEKRNSTAYDYMKSKGENAFNDYLRRVDTAFSEHKISFTKRSRLLTPADKIPKDFISRQLVQTQYISRKAMEILKQVCHNVYGSSGEVTSYLRRIWGYDEILHSLDLPRYREGGMTAEVSYEHRGQTHTEERIKDWSKRLDHRHHAIDALTIACTRQSVIQRLNNLSSMTAVAGEAMSLDKWTLAQPHFSVQEVSDKVGGILVSFKAGKKVTTPGKRYTYRGGKRILAQDGLLIPRGALSEESVYGRISALEKNVPVKKLFERVEDIVKPGIRAVVEDKLKACDNDVNAACASLKKEPLYLDAEKTIPLEYGTCYKRKYVIKYPISSLKAKDVESIIDGHIRQIVSERLSEYGNDPKKAFAEPLYADDAKTIPVRTVRCYTGLDQVVPVKKDVAGNDIGFVKPGNNHHIAIYRDADGKFHECVVTFWDAVERKKWGIPVIVRNPDEVWDVVIDKNVPEELAAGLPALGWSFVMSLQQNEMFVLGMEDDEFRDAMAEADYKALGAHLYRVQKLAGSDYYFRSHYETLLDDSAGARIMKKFYRISSSKALFALHPRKVAVSLLGEMSLKND

SEQ ID NO: 1321 - protein, 1180 aa, unidentified
  REGION 1..1180: note = Description of Unknown: uncultivated organism with predicted taxonomy: Bacteroides sp. CAG:770
  REGION 1..1180: note = MG16-242 effector
PDESSEFTSGNAASKNQKRTQKRTARKGYDRYQMRRQALTDKLRKLKMLPDEHLIKLPVLDLWTLRARAATPGEKLTLPEIGRVLYHINQKRGYRHSRSDDSADKEQREYVQAINKRFQEIREEGVTIGQHFVKKLKESEVVTDKGAFYNYRIKEQVFPRDAYVAEFDRVMDCQKVFYPEELSEANINEFRNEIIFYQRNLKSCKHLVSRCEFMTRSFLDEGHRPVLDASGKLVISGPKVAPKSSPIFQVCKIWEEINNLSIRNKENDELHISPEQKKEIFEYLDNNEKITSAALYKILGIGKGDGWSVDKALSKGFTGNTTKVAISKALGKANDAKKRDLLRFDLRLKENGVNKDTGEIICEIDPECENEPLYKLWHVIYSINDKDAQRHALTSQFGINDEASLAELSKIDFVKQGYGSRSVKFMRKLLPSLMDGAKYSEACDVIGVNHSGSLTKSENEARELLQRIPQLQKNELRQPVVEKIINQMINVVNAVIEKFGGVDEIRVEMARELKLSKEGRAATAKNIRDREKENKEIAEKIIELGVTPSKNKILKYRLWQEAGQKCFYCGQPVGATEFLNGLDVEIEHVVPKALLFDDSFSNKVCACRKCNAEKRNSTAYDYMKSKGENAFNDYLRRVDTAFSEHKISFTKRSRLLTPADKIPKDFISRQLVQTQYISRKAMEILKQVCHNVYGSSGEVTSYLRRIWGYDEILHSLDLPRYREGGMTAEVSYEHRGQTHTEERIKDWSKRLDHRHHAIDALTIACTRQSVIQRLNNLSSMTAVAGEAMSLDKWTLAQPHFSVQEVSDKVGGILVSFKAGKKVTTPGKRYVYRGGKRILAQEGLLIPRGALCEESVYGRISALEKNVPVKKLFERVEDIVKPGIRAVVEDRLMACDNDVNAACASLKKEPLYLDAEKTIPLEYGTCYKAKYVMKYALSALKPKDVEYIVDEHIRKVVSERLSEYGNDPKKAFAEPLYADDAKTIPVRTVRCYTGLDQVVPVKKDVAGNDIGFVKPGNNHHIAIYRDADGKFHECVVTFWDAVERKKYGMPVIVRNPDEVWDDVIDKNVPEELAAGLPALGWSFVMSLQQNEMFILGMEDDEFRDAMAEADYKALGAHLYRVQKLAGSDYYFRSHYETLLDDSAGARIMKKFYRISSSKALFALHPRKVAVSLLGEMSLKND

SEQ ID NO: 1322 - protein, 1221 aa, unidentified
  REGION 1..1221: note = Description of Unknown: uncultivated organism with predicted taxonomy: Bacteroides sp. CAG:709
  REGION 1..1221: note = MG16-243 effector
MKKNLGLDLGVGSIGWSLINADKDNKPIAILGLGSRIISLSPDESSEFTSGNAASKNQKRTQKRTARKGYDRYQMRRQALTDKLRKLKMLPDEHLIKLPVLDLWTLRARAATPGEKLTLPEIGRVLYHINQKRGYRHSRSDDSADKEQREYVQAINKRFQEIREEGVTIGQHFVKKLKESEVVTDKGAFYNYRIKEQVFPRDAYVAEFDRVMDCQKVFYPEELSEANINEFRNEIIFYQRNLKSCKHLVSRCEFMTRSFLDEEHRPVLDASGKLVISGPKVAPKSSPIFQVCKIWEEINNLSIRNKENDELHISPEQKKEIFEYLDNNEKITSAALYKILGISKGDGWSVDKALSKGFTGNTTKVAISKALGKANDAKKRDLLRFDLRLKENGVNKDTGEIICEIDPECENEPLYKLWHVIYSINDKDAQRHALTSQFGINDEASLAELSKIDFVKQGYGSRSVKFMRKLLPSLMDGAKYSEACDVIGVNHSGSLTKSENEARELLQRIPQLQKNELRQPVVEKILNQMINVVNAVIEKFGGVDEIRVEMARELKLSKEGRAATAKNIRDREKENKEIAEKIIELGVTPSKNKILKYRLWQEAGQKCFYCGQPVGATEFLNGLDVEIEHVVPKTLLFDDSFSNKVCACRKCNAEKRNSTAYDYMKSKGENAFNDYLRRVDTAFSEHKISFTKRSRLLTPADKIPKDFISRQLVQTQYISRKAMEILKQVCHNVYGSSGEVTSYLRRIWGYDEILHSLDLPRYREGGMTAEVSYEHRGQTHTEERIKDWSKRLDHRHHAIDALTIACTRQSVIQRLNNLSSMTAVAGEAMSLDKWTLAQPHFSVQEVSDKVGGILVSFKAGKKVTTPGERYTYRGGKRILAQDGLLIPRGALSEESVYGRISALEKNVPVKKLFERVEDIVKPGIRAVVEDRLMACDNDVNAACASLKKEPLYLDAEKTIPLEYGTCYKAKYVMKYALSALKPKDVEYIVDEHIRKVVSERLSEYGNDPKKAFAEPLYADDAETIPVRTVRCYTGLDQVVPVKRDVAGNDIGFVKPGNNHHIAIYRDADGKFHECVVTFWDAVERKKCGIPVIVRNPDEVWDVVIDKNVPEELAAGLPALGWSFVMSLQQNEMFILGMEDDEFRDAMAEADYKALGAHLYRVQKLAGSDYYFRSHYETLLDDSAGARIMKKFYRISSSKALFALHPRKVAVSLLGEMSLKND

SEQ ID NO: 1323 - protein, 1159 aa, unidentified
  REGION 1..1159: note = Description of Unknown: uncultivated organism with predicted taxonomy: Bacteroidales
  REGION 1..1159: note = MG16-245 effector
MKKKVLGLDLGVGSIGWALIETTDNQPEEIVGMGCRIVPIGKDDSDQFSKGQAISKNADRTARRTARKGYDRYQLRRALLTQVLRQNGMLPERMDENVIDLWKLRSDAATEGEKLTLPQIGRVLYHINQKRGYKHAKADDSADKKQTDYVAAVNQRYADLQAENKTIGQHFYLELLRSKVEGASGPYYTFRIKDKVFPRAAYIEEFDQIMHVQRTYYPTILTNELIDTLRNRIIFYQRPLKSCKHLVSLCEFEMRPYKTKDGRIVYGGPKCAPRTSPLAQLCAMWETVNNITLTNRDNEKLDITLEQRKQMVEFLCANKELKLTNLYKILGISKKDGWYGGKAIGKGLKGNATLLQLREALGGKYDQWLEMPVELKDSKWVDTETGEVIKEVAETIEQTPLFRLWHAVYSLQNADELAKTLREKFEITDKAVIDALCKIDFVKPGYANKSHKFIRRLLPYLMNGYQFSEACAHIGINHSNSMTAEERDSRTLVERIELLPKNALRQPVIEKILNQMINLVNRLQQEYGPIDEARIELARELKQSREERDNAYKAINKNERENAAIAAKIAEFGIRPSRSRIQKYKMWEESNHRCFYCGKTMDIAQFLNGADVEIEHIIPRSILFDDSYSNKVCACRDCNREKDNATAMEYMAGKPTGEFEAYKQRVDEAFTEHRISKTKRDHLLWRRADIPQDFIERQLRQSQYIAVKAVEILQTGIRRVWTSGGSVTDFLRHQWGYDEILHTLNLPRYRKVDELTEIVHFEHAGQEHEEERIKNWTKRIDHRHHAIDALTVALTQQSYIQRLNTLEASHEWMEKQVKEANTAYNEKKSILERWVADQPHFSVADVTNKVDGILVSFRAGKRVTTPARRAIYSGGKRKIVQTGLQVPRGALTEDTIYGKREEGFVVKYPLDHPSMKVENILDPTIQNLVKEHIAAFGGNAKEAFKMPLFSAKGMQIKSVRCKTNLSENSVVPVKVNADGQPIGYAKKGNNHHVAIYQDKKGEYQELVVSFWDAVERKHYGVPVVIINPHEVWTDLVNKDLSQDFLNKLPHDDWQFVLSMQENEMFVLGLEDDEFNDAIERQDYNLLNKHLYRVQKISSKDYSFRYHTETKVDDKYDGIENGRSTSMSLGALFRFKSINGLFSQFPHKVKIDIMGRITKA

SEQ ID NO: 1324 - protein, 972 aa, unidentified
  REGION 1..972: note = Description of Unknown: uncultivated organism with predicted taxonomy: Bacteroides sp. CAG:770
  REGION 1..972: note = MG16-246 effector
SYTIKKDGKEITIGPKVAPRTSPLAQLSSFLETANNITIRNKRNDELYISPEQRKAIADFLDNNEVMKLTDLYKILNIGRKDGWWAGKAIGKGLKGNTTKCQIRKALSNFPKDQINSLTAFQLEFDEYVDEETGEVLKRVNNTQAEKQPLYRLWHLLYSIKDVDELSGALRHLGIEDEESITKLCNLDFRTAGYANKSAKAIGRILPYLMEGMMYSDACERAGFDHSRRINPDRDLLKSLPQIQKNELRQPVVEKILNQLVNIVNALLEKEGIIDEIRVELARELKQSKDERNEAFKRNNQNERQNKEYAERIKEYGLTPTRNRIMKMKMWEESEYTCMYCGQPVNVTEFLQGADVEREHIIPRALLFDNSFTNQVCSCRRCNSQKGMRTAYDFIEDDKGQEGLNAYIERINDLFNRKKISRSKFNRLLVSHKAYISRKAQGKETEENKELWENFIDRQLRQSQYIARKSVEMLQQVCKDVYTTSGSVTDFVRHQWGYDEILHDLNFERFKKAGLTTMVTQLHSGKEVEVERIKDWTKRLDNRHHAVDALAIACTTQGMIQRLNTLNASREGILDELNSKEERVVDPERSMLEKWIYTQPHISYAQAKEAIDNIIISQRPNIRITVPGKRYITKNGKRTLAQTGIIVPRGALHAEFVYGRIMKQGADGVTLTPQYVRKYKLGIGAQGFLFNGKEFYKEELKKDSKTDLSSIIVTDKIKDVLEKVVDGGIRQRILERLNRGFEEGTDYRANVAQALANLKNLDEDPIFSDDAKTRPIRTVRKYVSSSTMVAVRKDCNGKPIAFVEPDGNHHVAIYKDENGMITESIVTKWQAVQRKLNHIPVIIDNPSQTWSEIMGKNDVPEELLQTLPKDKSTLLLSLQIGEAFIMGMDDAEYQKAVEEKDMQALAEHLYFVQSISSSDYRFRRHIESQYDTNDINKEDLRFLRIRKIQALFEYNPQKVKVTVLGDIILLNT

SEQ ID NO: 1325 - protein, 1162 aa, unidentified
  REGION 1..1162: note = Description of Unknown: uncultivated organism with predicted taxonomy: Porphyromonas sp. oral taxon 278
  REGION 1..1162: note = MG16-247 effector
MKKRILGLDLGVGSIGWALIETTDNKPEQIVGMGCRIVPISKDDNDQFSKGQAISKNADRTARRTARKGYDRYQLRRALLTQVLRQNGMLPDRMDENAIDLWKLRSDAATEGEQLTLPQIGRVLYHINQKRGYKHAKSDDNGDKKQTDYVAAVNQRYVDLQAEDKTIGQHFYLELLNSRVEGVNGPYYTFRIKDKVFPRAAYIAEFDQIMRVQQPFYPDVLTDELIDTLRNRIIFYQRPLKSCKHLVSLCEFEMRPYKTKDGRIVYGGPKCAPRTSPLAQLCAMWETVNNITLTNRNNEKLDITLDQRKQMVDFLCSNKELKLTNLYKILGISKKDGWYGGKAIGKGIKGNATLLQLREALGGKYDQWLEMPIELKDSKWVDAETGEVMKEVTEAVEQTPQFRLWHAVYSLQNVDELAKTLRTTFQITDEAVIEALCKIDFVKPGYANKSHKFIRRLLPYLMDGYQYSEACAHIGINHSNSMTAEERDERPLAERIELLPKNALRQPVIEKILNQMINLVNRLQQEYGPIDEARVELARELKQSRDERDSAYKAINKNERENAAIAAKIAEFGIRSSRSRIQKYKMWEESSHRCFYCGKTMDITQFLSGADVEIEHIIPRSILFDDSFSNKVCACRECNREKGNMTAMEYMEHKPAGEFEAYKQRVDEAFTDHRISKTKRDHLLWRRADIPQDFIDRQLRQSQYIAVKAVEILQTGVRRVWTSGGSVTDFLRHQWGYDEILHTLNLPRYRQVEALTEIVHYEHAGQEHNEERIKNWTKRTDHRHHAIDALTVALTQQSYIQRLNTLEASHDWMEKQVKEANTPYNEKKSVLERWVADQPHFSVAEVTDKVDGILVSFRAGKRVTTPARRAVYRGGKRTIVQTGLLVPRGALTEDTIYGKCEDGFVVKYPLDHPTMKPENIVDPTIRRLVEKRIAAYGGNTKEAFKTPLYSAEGMEIKSVRCLTNLSEKGVVPVKYDKTGQPIGFAKKGNNHHVAIYKSDNDKPFDQVVSFWDAVERKRYSVPIVIDNPHEVWDGLLNRDMPQEFLDKLPHDDWQFVLSMQENEMFVLGLEDDEFNDAIERQDYNSLNKHLYRVQKITHNDYWFRFHTETTVDDKYGDQENQVVNVAWSTEMKKVFRFKSQGALFAQFPHKVKIDIMGRITKA

SEQ ID NO: 1326 - protein, 863 aa, unidentified
  REGION 1..863: note = Description of Unknown: uncultivated organism with predicted taxonomy: Coprobacter sp.
  REGION 1..863: note = MG16-248 effector
KLDITLEQRKQMVEFLCTNKELKLTNLYKILGISKKDGWYGGKAIGKGLKGNATLLQLREALGGKYDKWLEMPVELKDSKWVDTETGEVIKEVAETVEQTPLFKLWHAVYSLQNEDELAKTLREKFQITDAIVIDALCKIDFVKPGYANKSHKFIRRLLPYLMAGYQYSEACAHIGINHSNSMTKEEREARPLTEQIELLHKNALRQPVIEKVLNQMINLVNRLQQEYGPIDEARVELARELKQSREERDSAYKAINKNERDNAAIAAKIAEFGVRPSRSRIQKYKMWEESNHRCFYCGKIMDITQFLNGADVEIEHIIPRSILFDDSYSNKVCACRDCNHEKDNSTAMEYMESKPAGEFEAYKQRVDEAFSAHRISKTKRDHLLWRRGDIPQDFIERQLRQSQYIAVKAVEILQAGIRHVWTSGGSVTDFLRHQWGYDEILHTLNLPRYRKVDELTEIVHFEHAGQEHEEERIKNWTKRIDHRHHAIDALTVALTQQSYIQRLNTLEASHDWMEKQVKEVNTPYNEKKSVLERWIADQPHFSVSDVTDKVDGILVSFRAGKRVTTPARRAIYPGGKRTIVQTGLQVPRGALTEDTIYGKREEGFAVKYPLDHPSMKAENILDPTIRRLVEERIAAFGGNAKEAFKTPLYSAKGMEIKSVRCKTNLSENGVVPVKRNALGQPIGFAKKGNNHHVAIYKTGNEKPFDQVVSFWDAVERKRYGVSVVIDNPREMWNGLLNKELPQDFLNKLPHDDWQFVLSMQENEMFVLGMENDEFNDAIERHDYNTLNKHLYRVQKIAHNDYWFRFHIETSVDDKYGDKEKQVLNMAWSTELKKVYRFNSQGALFAQFPHKVKIDIIGRITKV

SEQ ID NO: 1327 - protein, 970 aa, unidentified
  REGION 1..970: note = Description of Unknown: uncultivated organism with predicted taxonomy: Bacteroides sp. CAG:144
  REGION 1..970: note = MG16-249 effector
ISQCEFAMREYTTADGKRIQAGPKVAPRSSPLFQVCKIWESVNNIEMKNRNGESYPFSEEERLKLFNFLDNNEKLTVTDLKRILGLSVKDKWWGGKAIGKGLQGNTTKIALKKALQGHEGLLSFHLKTVDSRHIDTETGVILQEIAPGFEKEPLYRLWHIIYSIKEPDEMASALKQQFGIEDPEVLSRLAKIDFVKAGYGNKSARFIRQILPYLQKGLKYSEACDYISINHSNSLTTAENKSRKLQPRMQQLQKNELRQPIIEKILNQMVNVVNALLDKHVSIDEVRVELARELKQSRDERNSTFLNNSKRERENKIISERIQEMGIRPSRNRIQKYRLWEESKHICFYCGQPVGVREFMEGVDVEIEHIIPRSLFFDDSFSNKVCACRKCNAEKGNRTAYDYVKKKGENEFADYTRRIEEAFEKKEISKTKRERLLTSAKDIPEDFIDRQLRQSQYISKKAVEMLKQVCRNVWTTSGSVTDFVRHQWGYDNILHDLNFKRYKDAGQTEIIVCDQMGQVRQVERIKDWTKRLDHRHHAIDALTIASTKQSYIQRLNHLNASRDQMFQELETQSNKVREEYSLLENWMKERPHIPVSVVSQIVDGILVSFKTGKRLTTPGKRYTYKGGKREIAQSGIIVPRGALSEDSVYGVISCLEENVPVKKLFEHPDIIFKPYIRTKVENRIKEYDGDWKAALKSLKKAPIFLGDGETKPLEYATCWKKEYVIRYPLASIQKKDVKYIVDQHIRQLVSERLNAVGEKDAFKEPLFSDKAEKNPIKSVRLFTGLTHNSLSPVKYLDGFPIGYSKPGNNHHFCYYRNENGELFEHIVSFWHAVDRKKYGIPVIIEDTDVLWDEMANRDLPQDFLKYLPPVGLKLEVSLQQNEMFILGMKDEDYERSIKEKDLRMLNQYLYRVQKISSQYIVFRRNTDTGKDEDSKAQSIGQFVRVSSIKGWIQCNPHKIRVNVLGEISEI

SEQ ID NO: 1328 - protein, 758 aa, unidentified
  REGION 1..758: note = Description of Unknown: uncultivated organism with predicted taxonomy: Sediminibacterium sp. C3
  REGION 1..758: note = MG16-250 effector
MYSEACERAGFDHSRRIDPNRTLLTHLPQIQKNELRQPVVEKILNQLVNIINALIEKEGAIDEIRVELARELKQSKDERNETFKRNNQNERQNKEYAERIKEYGLTPTRNRIIKMKMWEESEYTCMYCGQPVNVTEFLKGADVEREHIIPRGLLFDNSFTNQVCSCRRCNSKKGMRTAYDFIADDKGQEGLNAYIDRINNLFDKKKISRSKLNRLLVSHKAYISRKAQGKETEEDKELWENFIDRQLRQSQYIAKKSVEMLQQVCKNVYTTSGSVTDFVRHQWGYDELLHDLNFDRFKKAGLTAMVKQLHSGKEVEVERIKDWTKRLDNRHHAVDALAIACTTQGMIQRLNTLNASRDVMLEELSSNDQRLVDPERSMLEKWIYVQPHISYAEAKNEVDKIVISQRPNTRITVPGKRYVTKNGKRTLAQTGIIVPRGALHAEFVYGRIMKQEADGFTMTPQYVRKYKLGIGAQGFLFNGKEFYKEELKKDSKTGLSSIVVTDKIKDVLDKIVDGGIRKRILERLNRGFVGGADYRANIAQALANLKNLDEDPIYSDDAKTRPIRTVRKYVSSSTMVAVRKDSNGKPMSFIEPDGNHHVAFYKDENGVIKESIVTKWQAVQRKLNHIPIIIDNPSQTWSEVLGRNDVPEELLQSLPKDSSTFLLSLQIGEAFIMGMEDSDYQKALEERDMRTLSEHLYFVQNISSNNYRLRRHVESSFDITDMNKEDQRFLNIKSVNSFFNNNPHKVKITILGDIIADL

SEQ ID NO: 1329 - protein, 808 aa, unidentified
  REGION 1..808: note = Description of Unknown: uncultivated organism with predicted taxonomy: Bacteroides sp. CAG:144
  REGION 1..808: note = MG16-251 effector
NALNDLDFVTPGYANLSAKAISKILPYMMEGLDYSDSCEYVGYNHSDSLTKEENEKRELLDKIPALKKNELRQPTVEKILNQTINVFNEINANFISKGERVDEVRVELARELKQSKEEREETERGIRKQQKANDGYAKLLKEGGVRPTRNRILKYRLWRESNETCFYCGQPINFNEFLKFSDVEREHVIPKKLLFDDSFANQVCSCRKCNAEKGGRTAFDYMRTKQNLQDYLDKVDKMFQEHKIGGKKHSHLLASYDDYLSRKKEGKETKDDVKIWEEPIERQLRLSQYISKKSQELLKMACRNVVATSGNITDLVRHTWGYDTILHELNFPCYKEAGLTTFIKDENTGQQREVIKDWTKRLDHRHHAIDALAVACTSRSIVQRINTLHASREEMREDVKSPRKDWEDNDLLQQWIKEKMPFDRDYVLHKVASILVSMKAGKKATVPGKRKIYKNGKPITVQSRLRIPRGQLHEQTVYGAIKQYSKDKKGNVIESREIVTRYKMGVGSVGLVFNGKETCDVIYNKKKECYEIIDGIEKSINYIVDKHIREVVRERINEAFPNGETYRSEAENALAEGRVYNGKERCQKALEQLKSLDEHPLYADKNHHIVIKSVRCFTGLGAVQPLRYNNDNEPISFVLTKNNHHVAIYADENGDYKECIYTFWQVVERSKYKLPLIIKDPKALWEEIRQRENNGERFPDTLIASLPSPNWAFVESLQLNDMFVLDIDDEDFENFIANDNYEEIGKKLYRIQNISSGDYFLRLHTDTTSDRSNSKLTKKFLRKSLMGFLNSNPHKVSISILGKMKIVK

SEQ ID NO: 1330 - protein, 936 aa, unidentified
  REGION 1..936: note = Description of Unknown: uncultivated organism with predicted taxonomy: Bacteroidales
  REGION 1..936: note = MG16-252 effector
QVCKIWESVNNLSLKNRSGEVYHFSQEERRKMFDFLDNHDKMTVTDLYKLLGISKKEGWWGGKAIGKGLQGNTTKAALAKALGERQDLLQFQLETIDSRQIDTETGEVLKTISPSFEKEPLYRLWHILYSMHERSEVAAALERQFGITAPDTVDRLFAIDFVKAGYGNKSARFIREILPYLQAGMQYSQACDYIGINHSNSLTIEENASRVLLDRLPQLQKNELRQPVIEKILNQMVAVVNALLSQYGPIDEIRVELARELKQSRDERNDAYLSINKRERENKVIEERIREYGISPSKSRIQKYRLWEESNHLCFYCGHPVGAAEFLSGSGVEIEHIIPRSLLFDDSFANKVCACRKCNAEKGNSTAFDYMKSKPANDFEDYLKRVEKYFTEKRISKTKRERLLTPASEIPQDFIDRQLRQSQYISKKAVEMLKLVCRNVWTTSGSITDFLRHNWGYDQILHDLNLPRYSLGGMTESVHYEHNGQKHEEERIIGWTKRLDHRHHAIDALTIASTQQSYIQRLNTLSASRDVMHAEVEKQGVQWQEKHSLLEEWTAQRPHLPYSTVRDYVDGILVSFKPGKKVATPGKRYTYKNGKKELVQDGLLIPRGALSEESVYGQITTIEPSVPVKKLFEDPSLIFKPYIRELVERRIKECGGDWKKARASIGKKPIWLDTEETVALEFATCWKKEYVMKYPVSSLKAKDVDSIVDRHIREIVRRRIDEVGEKEAFKTPIYTDDAQSIPLRSVRLFTGLDAVEPVKYVDGVPVGFSKPGNNHHIAIYRDKDGNRSEHVVSFWHAVERKRYGLPVIIRDTDSVWDQIEGESLPESFLKNLPQPGLKLELSLQQNEMLILGMKEDEFNDAIREKDTRRLNKHLYRVQKLSTMYYVFRYHTETQIDDSKGALEMHKFYRTVSFRALDALFPHKVRISVTGELIPIQ

SEQ ID NO: 1331 - protein, 851 aa, unidentified
  REGION 1..851: note = Description of Unknown: uncultivated organism
  REGION 1..851: note = MG16-253 effector
KLKDVHEVLGINSKSGWYCDKAIKSGIKGNSTKCAIISALSSLPNSIIREITRFNLETETSNMVDEETGELLVRIKSTYQEEPLYRLWHIIYSIKNDAERLNTILVFLKEFGIEDVSIANALNDIDFVTPGYSNLSAKAISKILPYMMEGLDYSESCEYVGYNHSDSLTKEENEKRELLDQIPAIKKNELRQPTVEKILNQTINVFNQINADLGKKGERVDEVRVELARELKQSKEEREETDKGIRKQQKANEEYADILKKKGVRPTRNRILKYRLWKESEEACFYCGRDIDFHEFLRFSDVEREHVIPKKLLFDDSFANQVCSCRRCNAEKGGRTALDYMRTKPNLQEYLDKVDKLFQEHKIGGKKHAHLLASYDDYLSRKKEGKETKDDIMIWEEPIDRQLRLSQYISKKAQELLKAACREVMATSGSITDLIRHTWGYDTILHELNFPRYKDAGLTEIIKDEETGMQREVIPDWSKRLDHRHHAIDALAVACTSRSIVQRINTLNASREIIREEIKTSRKEWEDNDLLQQWIKEKMPFDRQYVVQKVASILVSMKAGKKATVPGKRKIYKNGKPVIMQTGLRIPRGQLHEQTVYGAIKHHSKDKKGNVIETKEIVTRYKMGAGSVGFVFTGKETCDVVFDKKNERYVIVDGIGKAINYIVDRHIREIVRERINEAFPDGETYLSEAEKALAEGRLYNSKDRCQKALEQLKSLDEHPLYADKNKTIVIKSVRCFTGLNAVQPLRYNSKHEPISFVLTKNNHHVAIYVDEKGEYQECVYTFWQVVERAKYRLPLIIQDPKTIWDEIRQREKDGDSFPDDLITSLPLPNWTFVESLQQNDMFVMDMDDDTF

SEQ ID NO: 1332 - protein, 919 aa, unidentified
  REGION 1..919: note = Description of Unknown: uncultivated organism with predicted taxonomy: Marinilabiliaceae
  REGION 1..919: note = MG16-254 effector
NRIIFYQRPLKSCKHLVSLCEFEARPYKTKDGKIVYGGPKCAPRTSPLAQLCAMWETANNITLTNRNNERFEFTLDQRRQIVDFLCHNKEMKVTHLQKILGISKKDGWYGGKAIGKGIKGNATLNQLREALQGKYDQWLEMPIKHIDVVDATTSEVFWAVSPEVEETPLFKLWHAVYSLQNADELAKTLREKFQITDEAVIEALCKIDFVKPGYANKSHKFIRRLLPYLMEGMMYSEACERININHSNSMTREEREQRPLSARIQLLQKNQLRQPVVEKVLNQMINIVNSLKDQYGEIDEARVELARELKQSRDERESAYKAMGQNERRNKEIAEKISEFGIRPSRSRIQKYKMWEESLHQCFYCGKTIDLSEFLNGADVEIEHIIPRSILFDDSFSNKVCACRRCNQEKGNQTAMEYMETKSAAEQEAYKQRVDEAFTAKRISKTKRDHLLWRKTDIPADFIERQLRQSQYIAVKAVEVLQDGIRQVWTSGGSVTDFLRHQWGYDEILHTLNLPRYRQVEGLTELVDFEHAGQKHTEERIKNWSKRIDHRHHAIDALTVALTQQGYIQRLNTLEASHDFMEKQVKEAGTKYNEKKSILEKWINEQPHFSVEEVTNAVDRILVSFRAGKRVTTPARRAIYKGSKKTIVQTGLQVPRGALTNDFVYTKHGKKYARKYPINAISNPENIVDATIRQLVKARLASHGGNINDAFKTPLYSAEGMEIKTVRCYNNKLSDRGVVAIKYNEQKEPIGFAETDNNHHMAIYKLADGSLKERVVSFWDAVERKRYGLPIIITNPNEVWSIVLEKDLPQDFLNKLPEDKWEYVLSLQENEMFVLGMEDDEFNDAIDTHDYNLLNKHLYRVQSISYGDYYFCHHTETKATDKNESIKLGKTLRIRGVNSLKSYFPHKVQVDLLGHIHKV

SEQ ID NO: 1333 - protein, 1221 aa, unidentified
  REGION 1..1221: note = Description of Unknown: uncultivated organism with predicted taxonomy: Bacteroidetes
  REGION 1..1221: note = MG16-255 effector
MKRVLGLDLGVGSVGWALVEKDERNIPINVNKIGSRTVPLSNDEENNFSKGAAIPTNKDRTIKRTARKCNNRYKLRREQLTNGLRALKMLPDETLFKLDPLQLWELRAKAATEKVSLPELGRVLYHLNQKRGYKHSKDNEQDSKQTDYVATVNKRYKDLQSKNLTIGQYFAQKLKESEHIQEGGKSYSFRIKDNVYPRAAYEEECKRILSTQKQFYPDILTDNNVKDLFQFIYYQRPLRSCKHLISRCSLEEQLHDVKEKDFYAPKVAPISSPLAQLDKIWEAVNNFTVRGKRNEELYITHEQRSAIVEHLEHNKDIKLTAIQKILGIGKSKEWFIKKEQLKPLQGDITRIKLAEALSSGHLSKEKIENLLLLKIDFEEMADTTTGEVMGGIVVKNNIESQPLYQLWHAIYSIDDEKALRKTLAKLGIDDDDVMDALCKISFKTSGYAKKSTRAIKKILPYLMEGYQYSDACQMAGYNHSNSITKEEEASRPLQDHIPQIQKNELRQPVVEKILNQMINIVNTLLKDGPIDEIRVELARELKRSKDEREMANIRMNRNKRRNDEIASIIQNEYGLIPTKNRIMKYKMWEETDGFCIYCGTKIKLAEFLGGVDSEREHIIPKSLLFDDSFSNQSCACRKCNKEKGNRTALDYMRDIGKEKQYVEHIAELLEKDKISKTKYSNLLASYKDYLERKAKGKETEEDKNLWENFIDRQLRLSQNIARSAMELLRQVCHNVYATSGSVTDFVRHQWGYDNILHDLNFSRFAKSGNTEFITVVGADGKETQQERIKGWSKRMDNRHHAVDALAIALTTQSMIQRINNLNASREFMQKDVEASKEKFKEKKSLLEKWVAIQPHLSYGQAKDAISGILVSQRSGKHITTPGKRYEYKGGSKILRQQGLVVPRTALHDEFVYGRISRYDKNGILQPEIVRKYGILGGMGCLFDGKETYKETEKTDKKIGLPKIKIEDKIKDVLDKIVDGGVRKRILERLNRGFEEGKDYRNDTKKALDNLRNLDEDPIYLDDAHTIPIKTVRKFTHSTKAIPLRYNDKNEPIAFVEPGGNHHVALYETADGTVKEHVCTNWHAVQRRMYGFPAIIDNPSDAWQQASNNDKLPEDLLMHLPDDNSKFLLSMQIGDAFILGMEEYEYQAAINEKNYKLLGEYLYFVQKLSSNDYAFRRHVESKYEEKQTNKDDGRFIRIRSIDKYENYNPHKVKITLLGEIFP

SEQ ID NO: 1334 - protein, 829 aa, unidentified
  REGION 1..829: note = Description of Unknown: uncultivated organism with predicted taxonomy: Bacteroides sp. CAG:144
  REGION 1..829: note = MG16-256 effector
ERLHSIIRFLKDFDVEDILIANALNDLDFVTPGYANLSAKAISKILPYMMEGLGYSDSCEYVGYNHSDSLTKDENEKRELLDKIPALKKNELRQPTVEKILNQTINVFNEINANLISKGERVDEVRVELARELKQSKEEREETERGIRKQQKANDEYAKLLKEGGVRPTRNRILKYRLWRESNETCFYCGQPINFNEFLKFSDVEREHVIPKKLLFDDSFANQVCSCRKCNAEKGGRTAFDYMRTKQNLQDYLDKVDKMFQEHKIGGKKHSHLLASYDDYLSRKKEGKETKDDVKIWEEPIERQLRLSQYISKKSQELLKMACRNVVATSGNITDLVRHTWGYDTILHELNFPCYKEAGLTTFIKDENTGQQREVIKDWTKRLDHRHHAIDALAVACTSRSIVQRINTLHASREEMREDVKSPRKDWEDNDLLQQWIKEKMPFDRDYVLHKVASILVSMKAGKKATVPGKRKIYKNGKPITVQSRLRIPRGQLHEQTVYGAIKQYSKDKKGNVIESREIVTRYKMGVGSVGLVFNGKETCDVIYNKKKECYEIVDGIEKSINYIVDKHIREVVRERINEAFPNGETYRSEAENAFAEGRVYNGKERCQKALEQLKSLDEHPLYADKNHHIVIKSVRCFTGLGAVQPLRYNNDNEPISFVLTKNNHHVAIYADENGDYKECIYTFWQVVERSKYKLPLIIKDPKALWEEIRQRENNGERFPDTLIASLPSPNWAFVESLQLNDMFVLDIDDEDFENFIANENYEEIGKKLYRIQNISSGDYFLRLHTDTTSDRSNSKLTKKFLRKSLMGFLNSNPHKVSISILGKMKIVK

SEQ ID NO: 1335 - protein, 1159 aa, unidentified
  REGION 1..1159: note = Description of Unknown: uncultivated organism with predicted taxonomy: Bacteroidia
  REGION 1..1159: note = MG16-257 effector
MIKHILGLDLGVGSIGWALIETENDQPKQIIGIGSRIVPLSKDDSDQFSKGQAISKNADRTARRTTRKGYDRYQLRRALLTQVLRQNGMLPERMDENVIDLWKLRSDAATEGHQLTLPQIGRVLYHINQKRGYKHAKADNNGDSKQTKYVETVNQRYAEIQETGQTIGQHFYLELLHSKVESGNGPYYTYRIKDKVFPRAAYIAEFDQIIKVQKAYYPEVLTDELIDTLRNRIIFYQRPLKSCKHLVSLCEFEMKPYKTKEGKIVYGGPKCAPRTSPLAQLCAMWETANNITLTNRNNEQYDFSLDERRQLVEHLCTHEVLKLTDLYKILGITKKDGWYGGKAIGKGIKGNATLNQLRKALNGKYGEWLEMPIEHIDAVDNETAEVFWQVSPKVEETPLFRLWHAVYSIQDADELAQTLRNKFGITEQEVIDALCKIDFVKPGYANKSHKFIRRLLPYLMDGMMYSEACKLLRINHSNSMTTEERDARPLAERIELLPKNALRQPVIEKILNQMINLVNRLQQEYGPIDEARVELARELKQSREEREGAYRRNNQNERLNKEIFAKIEEMGIRPSRSRIQKYKMWEESNHRCMYCGKTVSLAEFLNGAEVEIEHIIPRSILFDDSFSNKVCACRECNHEKGNLTALDYLETKPTAEQEAYKQRVDEAFKEGRISKTKRDHLLWHRSDIPTDFIDRQLRQSQYIAVKAVEILQQGIRQVWTSGGSVTDFLRHLWGYDEILHTLNLPRYRQVEELTEIVHYEHAGQEHDEERIKNWSKRIDHRHHAIDALTVALTRQAYIQRLNSLNAEFTREEMLKEVEEANTVYNEKKSLLEKWVNEQPHFSVDDVTQSVDSILVSFRAGKRVTTPARRAIYQGGKRTIVQRNIQVPRGALTNEFVYTKNGNKYARKYPIDAISNPENIVDPTIRQLIKARLAAFNGNAKEAFKEPLFSAEGMEIRTIRCYNNKLADKGVVAVKYNERQEPIGFSETDSNHHIAIYRDKSGKYQEMVVSFWDAVERKKFGVPVVISNPHDVWDSIMDKDLPQEFLVKLPKDDWTYILSMQENEMFVLGMEEDEFNDAIEAKDNAVLNKHLYRIQNISSLFYNFRYHTETKVDDKYAGIENGRNASMSLGALVPIRSFGSLFALFPHKVKIDIMGRITKA

SEQ ID NO: 1336 - protein, 943 aa, unidentified
  REGION 1..943: note = Description of Unknown: uncultivated organism with predicted taxonomy: Bacteroidales
  REGION 1..943: note = MG16-258 effector
VLTDELIDTLRNRIIFYQRPLKSCKHLVSLCEFEMRPYKTKDGRIVYGGPKCAPRTSPLAQLCAMWETVNNITLTNRNNEKLDITLDQRKQMVDFLCSNKELKLTNLYKILGISKKDGWYGGKAIGKGIKGNATLLQLREALGGKYDQWLEMPIELKDSKWVDAETGEVMKEVTEAVEQTPQFRLWHAVYSLQNVDELAKTLRTTFQITDEAVIEALCKIDFVKPGYANKSHKFIRRLLPYLMDGYQYSEACAHIGINHSNSMTAEERDERPLAERIELLPKNALRQPVIEKILNQMINLVNRLQQEYGPIDEARVELARELKQSRDERDSAYKAINKNERENAAIAAKIAEFGIRSSRSRIQKYKMWEESSHRCFYCGKTMDITQFLSGADVEIEHIIPRSILFDDSFSNKVCACRECNREKGNMTAMEYMEHKPAGEFEAYKQRVDEAFTDHRISKTKRDHLLWRRADIPQDFIDRQLRQSQYIAVKAVEILQTGVRRVWTSGGSVTDFLRHQWGYDEILHTLNLPRYRQVEALTEIVHYEHAGQEHNEERIKNWTKRTDHRHHAIDALTVALTQQSYIQRLNTLEASHDWMEKQVKEANTPYNEKKSVLERWVADQPHFSVAEVTDKVDGILVSFRAGKRVTTPARRAVYRGGKRTIVQTGLLVPRGALTEDTIYGKCEDGFVVKYPLDHPTMKPENIVDPTIRRLVEKRIAAYGGNTKEAFKTPLYSAEGMEIKSVRCLTNLSEKGVVPVKYDKTGQPIGFAKKGNNHHVAIYKSDNDKPFDQVVSFWDAVERKRYSVPIVIDNPHEVWDGLLNRDMPQEFLDKLPHDDWQFVLSMQENEMFVLGLEDDEFNDAIERQDYNSLNKHLYRVQKITHNDYWFRFHTETTVDDKYGDQENQVVNVAWSTEMKKVFRFKSQGALFAQFPHKVKIDIMGRITKA

SEQ ID NO: 1337 - protein, 921 aa, unidentified
  REGION 1..921: note = Description of Unknown: uncultivated organism with predicted taxonomy: Prevotella saccharolytica
  REGION 1..921: note = MG16-259 effector
FVNNIRLENGYKEARALSQDERLKVVDYLDNHEKMTARDFTKLLGLDKNDEWDLKKYFGKNGVQGNITKTQLATALANVSNASELLRFNLALENSNYVNESTGEVLKVISSDFQNEPLYMLWHTVYSLSDKEELKNALNKKYGITDESVLNNLFKIDFVKPGFGNKSAKAIRRILPFLQDGLVYSDACAEAGYNHSNSLTKSENEARTLLSRLPQIKKNELRQPVIEKILNQMVNVVNAIYDEYGQIDEIRVELARELKQSKDERNTTASNIAKRERENKNIEAKIQEFGIRSSRNRIQKYRLWEESEQKCFYCGQPVQAKEFLSGLDVEVEHVIPKSLLFDDSFANKVCACRKCNAAKGNKTAYDFMKGQKEEVFDAYVKRVNDFYKDGKISKTKKERLLTTQSEIPSDFIERQLRQTQYIAKKALEMLKDVCYNVYATSGSVTDFIRHTWGYDEILHQLNYDRYKKGGLTEFREYDHKGETHTEERIQDWSKRLDHRHHAIDALVIAMTRQSIIQRLNHLNTERDAMFQEVEKQRKEWKNDYSMLQEWLRERKHFSAEDVAKKVSDILVSFKAGKRVATIGKRVKYEHGKKNVLQTGIVIPRGPLSEESVYGKIKVLDRNKPVKHLFENPESIVNADIKSAVTNRLIQNKSDVKKAVQSLKKSPIVLANGKTLENADCYKEEYVIKYSLNGFKAKDIDSIVDTHIKDVLYKRLEEYNGNEKEAFKDIENNPIYADAAHKIKIRNVRCFTGLSAVVPVKKDENGNAIGFVKPGNNHHVAIYKDENGNLQESVATFWHAVERKKYGLPIVITNPIDAWKLARERNCPKEFLDCLPKENWTFVQSLQINEMFVMGLTNEAYEKAVAEKDYALLNQYLYRVQKLTSNDYFVRYHLETVLDDSAEARSIKKFYRFKSLGSLFKE

SEQ ID NO: 1338 - protein, 777 aa, unidentified
  REGION 1..777: note = Description of Unknown: uncultivated organism with predicted taxonomy: Bacteroides sp. CAG:770
  REGION 1..777: note = MG16-260 effector
LYITHEQRSAIVEHLEHNKDIKLTAIQKILGIGKSKEWFIKKEQLKPLQGDITRIKLAEALSSGHLSKEKIENLLLLKIDFEEMADTTTGEVMGGIVVKNNIESQPFYQLWHAIYSIDDEKALRKTLAKLGIDDDDVMDALCKISFKTSGYAKKSTRAIKKILPYLMEGYQYSDACQMAGYNHSNSITKEEEASRPLQDHIPQIQKNELRQPVVEKILNQMINIVNTLLKDGPIDEIRVELARELKRSKDEREMANIRMNRNKRRNDEIASIIQNEYGLIPTKNRIMKYKMWEETDGFCIYCGTKIKLAEFLGGVDSEREHIIPKSLLFDDSFSNQSCACRKCNKEKGNRTALDYMRDIGKEKQYVEHIAELLEKDKISKTKYSNLLASYKDYLERKAKGKETEEDKNLWENFIDRQLRLSQNIARSAMELLRQVCHNVYATSGSVTDFVRHQWGYDNILHDLNFSRFAKSGNTEFITVVGADGKETQQERIKGWSKRMDNRHHAVDALAIALTTQSMIQRINNLNASREFMQKDVEASKEKFKEKKSLLEKWVAIQPHLSYGQAKDAISGILVSQRSGKHITTPGKRYEYKGGSKILRQQGLVVPRTALHDEFVYGRISRYDKNGILQPEIVRKYGILGGMGCLFDGKETYKETEKTDKKIGLPKIKIEDKIKDVLDKIVDGGVRKRILERLNRGFEEGKDYRNDTKKALDNLRNLDEDPIYLDDAHTIPIKTVRKFTHSTKAIPLRYNDKNEPIAFVEPGGNHHVALYETADGTV

SEQ ID NO: 1339 - protein, 934 aa, unidentified
  REGION 1..934: note = Description of Unknown: uncultivated organism with predicted taxonomy: Bacteroidales
  REGION 1..934: note = MG16-261 effector
ATEGHKLSLPELGRILYHINQKRGYKHAKADEAGDKQQTEYVAAVNSRHAMIKERHQTIGQYFAEEIRKSEIISEKGKFYTFRTKEKVFPRKAYEEEFDKIIATQRQFYPTVLTGTTINRLRNEIIFYQRKLKSCKHLVSLCEFEKHEYKNKEGKTVFDGPKVAPRTSPLAQICRIWEFVNNISLENGYKERKELSLEEKQKVVNFLDNNDKMTATDFSKLLGLGKKNGWDLKRYFGKNGVKGNETKVSLRNALKNLPNVEDLLRFNPTLDNSNYVNEATGEVLKVISPSFQNEPLYELWHTVYSLSDKDDLSNALNKKFGISDENAVQKLFKIDFVKPGFSNKSAKAIRRILPFLQQGLMYSEACAEAGYNHSNSLTKTGNEARVLLERLPQIKKNELRQPVVEKILNQMVNVVNAIYDDYGAIDEIRVELARELKQSKDERNTTFNNIAKRERENKGIAERIKNEYGLIPNRNKIEKFRLCEESDHKCFYCGQAVNAKEFLLGSDVEVEHVIPKSLLFDDSFANKVCACRKCNAQKGNKTAFDFMKSQSEDEFNNYVSRVEEYYKNGKISRTKHDRLLTPQTEIPSDFIERQLRQTQYISKKALELLREICHNVYATSGSVTDFIRHTWGYDEILHQLNFDRYKQSGLTEIREFDNKGEIHKEERIQKWNKRLDHRHHAIDALVIAMTKQSIIQRLNHLNTERDAMFQEVEKQSIEWKNDFSLLQEWLRERKHFSTKDVANRVANILISFKAGKRVATIGKRIKYEKGQKKVLQEGIVIPRGALSEESVYGKIKVIDPHKPLKFLFENPQTVISPQIKAAVVNRLSKFENDFKKTIVSIKKEPLTLASGKVINDADCYKEEYVIKYPLEGFKAKDIPYIIDKRIREVVEKRLSEYDGNEKNAFKDLENNPVFVDANHKISIKHIRCFTGLSA

SEQ ID NO: 1340 - protein, 821 aa, unidentified
  REGION 1..821: note = Description of Unknown: uncultivated organism with predicted taxonomy: Porphyromonas catoniae
  REGION 1..821: note = MG16-262 effector
SIGWCLIEKDDNNVPKRILRIGSRIVPISSDEETGYTKGNAISKNADRTAKRTARKCYDRYQLRRQALVNLLKRLGMEPNKNLMLEQTPMELWQKRADAASKEISLEELGRVLLHINQKRGYKHSRLSNSDSKETAYVQEVNSRYNDLKAEGLTIGQHFAAKLKENEQKSTDGKKYYNYRIKEQVYPRHAYEEETKKILEVQSRYHSDVLTPDVRNEMMETIFYQRDLKSCKNLVSLCEFESYTITKDGKEITIGPKVAPRTSPLAQLSSILETANNITIRNRRNDELYISPEQRKAIADFLDNHEVMKLTDLYKILNIGRKDGWWAGKAIGKGLKGNTTKCQIREALSALPKEQVDSLTAFQLEFDEYVDEETGEVRKRINNTQAEQQPLYKLWHMLYSIKDNTELSGALNHLGIEDNESIEKLCKLDFRTAGYANKSAKAIGRILPYLMEGVMYSQACERAGLDHSRRIDPNRPMLKRLPQIQKNELRQPVVEKILNQLVNIVNALLEEEGAIDEIRVELARELKQSKDERNETFKRNNQNERQNKEYAGRIKEYGLTPTRNRIMKMKMWEESEYTCMYCGQPVNVTEFLKGADVEREHIIPKSLLFDNSFTNQVCSCRRCNSKKGMRTAYDFIADDKGQEGLNAYIDRINNLFDKKKISRSKFNRLLVSHKAYISRKAQGKETEEDIELWENFIDRQLRQSQYIAKKSVEMLLQVCKNVYTTSGSVTDFVRHQWGYDELLHDLNFDRFKKAGLTAMVKQLHSGKEVEVERIKDWTKRLDNRHHAVDALAIACTTQGMIQRLNTLNASRDEMLEELNGK

SEQ ID NO: 1341 - protein, 973 aa, unidentified
  REGION 1..973: note = Description of Unknown: uncultivated organism with predicted taxonomy: Sediminibacterium sp. C3
  REGION 1..973: note = MG16-263 effector
MLKRLGIEPNKKLMLEQAPLELWQKRADAVSTKIALEDLGRVLLHINQKRGYKHSRLNNSDSKETAYVQEVNNRYDELKAEGLTVGQHFAAKLKDNEQTSADGKKYYNYRIKEQVFPRHAYEEEAKKILETQSRYYPDLLTPDVCKEIMNIIFYQRDLKSCKNLISYCEFESYTITKDGKEITIGPKVAPRTSPLAQLSSILESANNITIRNRKNDELYISPEQRKALADFLDNHEVMKLSDLYGILNIGRKDGWWAGKAIGKGLKGNTTKCQIREALKNLPQEKINALTSFNLEYDEYVDEETGEVRKRVNNHLAERQPLYRLWHLIYSIKDSDELAAALRRFGIDDEESILNLCNLDFRTPGYANKSAKAIGRILPYLAEGVMYSDACNMAGFDHTRRLNPNRPLLTSLPQIQKNELRQPVVEKILQQVVNIVNTLIEKEQSIDEIRVELARELKQSKDERNETFRRNSQNEKKNKEFAEHIKEYNLTPTRNRILKWKLYEESDHSCMYCGQSINIRDFLQGADAEREHIVPRGLLFDNSFTNQVCACRSCNSKKGMRTAYDFIEDEKGEEGLHSYIEHINYLFNKKNISRSKFNRLLVSHKAYLKRKALGKETEEDKELWENFIDRQLRLSQYIAKKSVEMLQQVCRNVYSTSGSVTDFVRHQWGYDELLHDLNFERYKRAGLTAMVTQLRSGKEVEVERIKDWTKRLDNRHHAVDALAIACTTQGMIQRLNTLNASREDILDELNKTEERNDDSERSMLEKWICSQPHISYAEAKDELDKIIISQRPSTRLTVPGKRYVKKDGKRTPVQAGILVPRGALHAEFVYGRIMKYGADGVTLTPQYVRKYKMGIGAQGYLFSGKEFYKEEQKKDSKTGQTSTVVTDKIKEVLDKVVDGGIRRRILERLNRGFEDGKDYRSNVPQALANLKNLDEDPIYSDDAKTRRILTVRKYVASSTMVAIRKDADGKPLAF

SEQ ID NO: 1342 - protein, 906 aa, unidentified
  REGION 1..906: note = Description of Unknown: uncultivated organism
  REGION 1..906: note = MG16-264 effector
QDGWWGGKAIGRGLQGNTTKIALKNALGDFDNAEKLLQFNLKNTDSGLIDEVTGEVIQMIDAKVEKEPLYDLWHTVYSISDKAELANALKKKFNIYDEDIINSLYAIDFVKQGFGNKSAKAMRRILPYLQQGMKYSDACEYAGFSHSDSLTKTENEARQLLEKLPPIQKNALRQPIVEKILNQMINVVNALMVEYGQFESIRVELARELKQSKDDRNTTFLQNEAMEKLNEAIAKRLTSEGITPTKRIMEKYKFIFPTKGCIDKKTGKFVTKNFDALATVNQCIYCGKPFSLSAALNGEGYEIEHIIPRDMICDNSQSNKVLSCRSCNSKKSNKTEFDFMRSQDKAVFDDYIKRVEKWFDDGIISPSKRERLLLSHEDYLERKKKGKTTEEDKKYWEEFVSRQAGETQYISRESIRILKQCCRNVNATSGTVTATLRHLWGYDEILHQLNFERYKQAGLTETVTWTSNHGKNEHSKEQIVDWSKRIDHRHHAIDALVVACTQQGFIQRINTLNADDTKDLMRKQIESAGIKFEEKKVLLDKYLASFVPFTTKVVADEVNKILVSFKAGKKSASTGKRIKYVKRKKEVLQEGVIIPRGALHEEGVYGQIEINGEKVIVKKYKLGKGAQGFVFTGKETYEEKVNKKTGEVQVDDKIKNVLDSIVDGNIRAKVLQRLNQGFEEGKDYRNDVKKALDNLNNLDKNPIFADENKTIPIRTVRCRTGLSAVVPVKRNEQGEPIGFVKPGNNHHIAIYRDKEGQLQEHTVTFWHAVERKKYGLPVIIENPTEVWDSIMDRQLPESFLEKLPDVNWTFEMSLQQNEMFVLGMEDETFENAIREKNYSMIGAYLYRVQSISESDYWFRLHIETQNDKTPSAKLAMKYHRVKSLKAFYGLNPHKVYVSVIGKMKEL

SEQ ID NO: 1343 - protein, 992 aa, unidentified
  REGION 1..992: note = Description of Unknown: uncultivated organism
  REGION 1..992: note = MG16-265 effector
MNIIFYQRDLKSCKNLVSLCEFESYAITKNGKEITIGPKVAPRTSPLAQLSCILETANNITIRNRKNDELYISPEQRKAIADFLDNHEIMKLTDLYKILEIGRKDGWWAGKAIGKGLKGNTTKSQIRKALSSLPKEQVDSLTAFQLEYDEYVDEETGEVRKRINNALAEKQPLYRLWHLLYSIKDVDELSGALRHIGIEDDESIQKLCNLDFRTAGYANKSAKAIGRILPYLMEGLMYSEACERAGFDHSRRINPERTLLTSLPQIQKNELRQPVVEKILNQLVNIVNALLEKEGHIDEIRVELARELKQSKDERNETFKRNSQNERKNKEYAERIKEYGLTPTRNRIMKMKMWEESEHSCMYCGQPVDVKEFLQGADVEREHIVPRGLLFDNSFTNQVCSCRRCNSQKGMRTAYDFIEDDKGEAGLNSYIEHINYLFDKKQISRNKFNRLLVSHKAYINRKAQGKETEEDKELWENFIDRQLRQSQYIAKKSVEMLQLVCRNVYTTSGSVTETVRRLWGYNELLHDLNFERFKKAGLTTMVTQLHSGEEIEVERIKDWTKRLDNRHHAVDALAIACTTQGMIQRLNTLNASRDDMLKELNSQEQRVVDPEHSMLEKWIYTQPHISYVQAKEAIEKIIISQRPNTRITVPGKRYVTKNGKRTLVQTGIVVPRGALHAEFVFGRIMKQEADGKILTPQYVRKYKLGIGAQGFLFNGKEFYKEELKKDSKTGLSTIVVTDKIKDVLEKIVDGGIRKRILERLNRGFGEGTDYRANVAKALDNLKNLDEDPIFSDDAKTRPIRTVRKYVSSTTMVAVRKDSEGQPLAFVEPDGNHHVAFYKDEDGVITESIVTKWQAVQRKLNHIPIIIDNPSQTWNEVIGRNDIPDELLQTLPKDKSTLMLSLQIGEALIMGMEEADYQKAIEEKNMLALAEHLYFVQNISIGNYRLRRHVETSYDVKDMNKEDLRFLNIASIAALFNYNPHKVKITVLGDIIP

SEQ ID NO: 1344 - protein, 960 aa, unidentified
  REGION 1..960: note = Description of Unknown: uncultivated organism with predicted taxonomy: Porphyromonas sp. oral taxon 278
  REGION 1..960: note = MG16-266 effector
RKHQMLPDEHLIKLPVLDLWTLRANAATEGFKLSLPEIGRVLYHINQKRGYKHAKADEAGDKKQTEYVENVNKRFAMIKDLGLTIGQFFASKLKESEVVSEKGKFYTYRTKEQVFPRGAYIAEFDQIIEVQRKFYPQVFTDEFINRLRNEIIFYQRNLKSCKHLVSLCEFEKHEYKNKDGKIVFDGPKVAPRTSPLFQICRIWEFVNNIRLENGYKEARTLSQDERLKVVDFLDNHEKMTAKDFTKLLELNKNDEWDLKRYFGKNGTQGNTTKTQLATALANIPNASELLQFNLTLENSNYVNEKTGEVLKVVSSDFQNEPLYMLWHTVYSLSDKEGLKNTLNKKYGITEESVINNLFKIDFVKPGFGNKSAKAIRRILPFLREGLVYSDACVEAGYNHSDSLTKSENEARTLLSRLPQIKKNELRQPVIEKILNQMVNIVNAIYDEYGQIDEIRVELARELKQTKDERNTTASNIAKRERENKNIEAKIQEFGIRSSRNRIQKYRLWEESDQKCFYCGQPVQAKEFLSGLDVEVEHIIPKSLLFDDSFANKVCACRKCNAAKGNKTAYDFMKGQKEEVFDAYVKRVNDFYKDGKISKTKKERLLTTQSDIPSDFIERQLRQTQYIAKKAIEMLKDICYNVYATSGSVTDFIRHTWGYDEILHQLNFDRYKKGGLTELREYDHKGETHTEERIQNWSKRLDHRHHAIDALVIAMTRQSIIQRLNHLNTERDAMFQEVEKQSKEWKNDYSMLQEWLRERKHFPTEDVAKKVSDILVSFKAGKRVATIGKRVKYEHGKKIVLQTGITIPRGPLCEESVYGKIKVLDRNKPLKYLLENPQYIVNADIKFAITNRLAQYENDVKKAVQSLKKSPVVLANGKKLENADCYKEEFVIKYSLNGFKAKDIDSVVDNRIRNVLYKRLEEYNGNEKEAFKDIENNPIYADATHKIKIRNVRCFTGLSAV

SEQ ID NO: 1345 - protein, 765 aa, unidentified
  REGION 1..765: note = Description of Unknown: uncultivated organism
  REGION 1..765: note = MG16-267 effector
ILPYLMEGVMYRQAWERAGLHHSRRIDPNRPMLKRLPQIQKNELRQPVVEKILNQLVNIVNALLEEEGAIDEIRVDLARHLNKNKYQRNETFKRNNQNERQNKEYAGRIKEYGLTPTRNRIMKMKMWEESEYTCMYCGQPVNVTEFLKGADVEREHIIPKSLLFDNSFTNQVCSCRRCNSKKGMRTAYDFIADDKGQEGLNAYIDRINNLFDKKKISRSKFNRLLVSHKAYISRKAQGKETEEDIELWENFIDRQLRQSQYIAKKSVEMLLQVCKNVYTTSGSVTDFVRHQWGYDELLHDLNFERFKKAGLTAMVKQLHSGEEVEVERIANWTKRLDNRHHAVDALAIACTTQSMIQRLNTLNASRDDMLEELNSKDQRLVDPERSMLEKWVFIQPHITYADAKKEIDKIVISQRPNTRITVPGKRYVAKNGKRTLAQTGIIVPRGALHAEFVYGRIMKQETDGMTMTPQYVRKYKLGIGAQGFLFNGKEFYKEELKKDSKTGLSKIVVTDKIKDVLEKIVDGGIRQRILERLNRGFEEGTDYRANVAQALANLKNLDEDPIYSDDAKTRPIRTVRKYVSSSTMVAGRKGDNGKPVAFVEPDGNHHVAFYKDENGVITETIVTKWQAVQHKLYHIPIIIDNPSQTWSEVLGRNDVPEELLQSLPKDSSTFLLSLQIGEAFIMGMEDADYGRALEGKDVQSLAEHLYFVQNISSNNYRLRRHVESSFDTTDMNKEDQRFLNISSLDALFRINPHKVKLTVLGDIIP

SEQ ID NO: 1346 - protein, 983 aa, unidentified
  REGION 1..983: note = Description of Unknown: uncultivated organism with predicted taxonomy: Prevotella
  REGION 1..983: note = MG16-268 effector
VFKKRHNHKKFQSIREPSLFDDMDILDNDILYITQEQRHSMFEYMETHDRLKLCDVLRILGLNEHSGWYAGKAIGVGLQGNTTKNTILKALRTLPKEKRDMITRFELKITSRNEINENTGEVIRHIDSSYTDEPLYRLWHIIYSIQNDEERRNAISKFLQSFDIVDEVVVDKLCGIDFVKAGYGNKSAKAISKLLPYLMDGINYSDACEYVGYRHSDYLTKEENIDRELKDIIPAIKKNALRQPVVEKILNQTINIVNAVNRELRENGQGQVDIIRIELARELKMDRESRHRKFTQNNSRKRQNEEYADKINEHGIIPTRNRVIKYRLWEEANMQCFYCGQPINITELLRDPTIEKEHIIPKALLLDNSYSNLVCSCRKCNQEKGARTAYDYMRQKSDLDAYIKRINKLAETQKISQTKRLHLLASYEDYLVRKRLGKATEEDRNLWEEFINRQLSLSQYISRKAMEILQTGCRKVYATSGSITDIERHLWGYDTILHELNFPRYKCAGLTTVIKEEYEEGIITEKEVITNWSKRKDNRHHAIDALVIACTTQDTIQRINTLHASRDELQKETSGNPVFYSEKSTLLERWIKGKQPIPRHEVLEQVKQIAISIKAGKKVTTPGKRKTYKQGKPKLIQTGLLIPRGQLHEETIYGQINVPVKTKNGTIRQEPKSVVRYKLGCGKGFVFSGKETCKVEKDKKTDEYFITDEIDKALSYIVDKHIREVIRQRLNRPFPEGETYRTKAEQAQKDGRIYDGEEECKQALQGIRNLDIDPLFADKDGRIPILRVRCFTGLTLLQPLRYNSEGKPISFVSLGNNHHIALYKQTNGDIVEHVVTFWHAVERSTRGIPIVIKRPDDVWNDILNKPSDELPESFLNQLPYPNATYITSMQQNEMFILGMSQDEYQDAIACNNQTELCRHLYRVQSLSTNQYYFRLHIESENDKTLAGMKAGKFIRCKSIGSFLRLNPHKVTVTLLGKIIINNS

SEQ ID NO: 1347 - protein, 992 aa, unidentified
  REGION 1..992: note = Description of Unknown: uncultivated organism with predicted taxonomy: Bacteroidales
  REGION 1..992: note = MG16-269 effector
MDIIFYQRDLKSCKNLVSLCEFESHTITKDGKEITIGPKVAPRTSPLAQLSSILETSNNITIRNRRNDELYISPEQRKAIADFLDNHEVMKLTDLYRILNISRKEGWWAGKAIGKGLKGNTTKCQIREALGSLPKEQVDSLTAFRLEFEEYVDEETGEVRQRVNNTLAEQQPLYKLWHMLYSIKDNKELSGALHHLGIDDEKSINKLSNLDFRTAGYANKSAKAIGRILPYLMDGIMYSEACERAGFDHSRRINPGRTLLTSLPQIQKNDLRQPIVEKILNQLVNIVNALLEKEGTIDEIRVELARELKQSKDERNEAFKRNNQNERQNKEYAERIKEYGLTPTRNRIMKMKMWEESEYTCMYCGQPINVTEFLQGADVEREHIIPRALLFDNSFTNQVCSCRRCNSQKGMRTAYDFIADDKGQEGLDLYIERINDLFDRKKISRSKLNRLLVSHKAYVSRKAQGKETEEDKELWENFIDRQLRQSQYIAKKSVEMLQQVCKNVYTTTGSVTDFVRHQWGYDEILHDLNFERFKKAELTTMVTQLHSGKEVEVERITNWTKRLDNRHHAVDALAIACTTQGMIQRLNTLSACRNEMLDELNSKDERVIDPERSMLEKWINSQPHICYAQAKDEVDKIIVSQRPNTRITVPGKRYVTKNGKRTQAQTGIIVPRGALHAEFVYGRIMKQEADGMTLTPQYVRKYKLGIGAQGFLFKGDETYKEDVKKDKKTGLSQIVVTDKIKDVLDKIVDGGIRRRILERLNRGFEEGTDYRANVAKALANLKNLDDDPIYSDDAKTRPIRTVRKYVSSSTMVAVRKNDDGKPISFVEPDGNHHVAFYKDEDGVVTESLVTKWQAVQRKLNHIPIIIENPSQVWNEVLGTNDIPNELLQSLPKDKSIFLLSMQIGEAFVMGMDETAYKRAIEKNDTQALADHLYFVQNLSSNNYRLRRHVESSFDTTDMNKEDLRFLNVKSIGALFNYNPHKVKLTILGDIIL

SEQ ID NO: 1348 - protein, 1159 aa, unidentified
  REGION 1..1159: note = Description of Unknown: uncultivated organism with predicted taxonomy: Bacteroidales
  REGION 1..1159: note = MG16-270 effector
MKKKVLGLDLGVGSIGWALIETTDNQPEEIVGMGCRIVPIGKDDSDQFSKGQAISKNADRTARRTARKGYDRYQLRRALLTQVLRQNGMLPERMDENVIDLWKLRSDAATEGEKLTLPQIGRVLYHINQKRGYKHAKADDSADKKQTDYVAAVNQRYADLQAENKTIGQHFYLELLRSKVEGASGPYYTFRIKDKVFPRAAYIEEFDQIMHVQRTYYPTILTDELIDTLRNRIIFYQRPLKSCKHLVSLCEFEMRPYKTKDGRIVYGGPKCAPRTSPLAQLCAMWETVNNITLTNRDNEKLDITLEQRKQMVEFLCANKELKLTNLYKILGISKKDGWYGGKAIGKGLKGNATLLQLREALGGKYDQWLEMPVELKDSKWVDTETGEVIKEVTEKIEQTPLFRLWHAVYSLQNADELAKTLREKFQITDKAVIDALCKIDFVKPGYANKSHKFIRRLLPYLMNGYQFSEACARIGINHSNSMTAEERDSRTLVEQIELLPKNALRQPVIEKILNQMINLVNRLQQEYGPIDEARIELARELKQSREERDNAYKAINKNERENAAIAAKIAEFGIRPSRSRIQKYKMWEESNHRCFYCGKTMDIAQFLNGADVEIEHIIPRSILFDDSYSNKVCACRDCNREKGNSTAMEYMEGKPTGEFEAYKQRVDEAFTEHRISKTKRDHLLWRRADIPQDFIERQLRQSQYIAVKAVEILQTGIRRVWTSGGSVTDFLRHQWGYDEILHTLNLPRYRKVDELTEIVHFEHAGQEHEEERIKNWTKRIDHRHHAIDALTVALTQQSYIQRLNTLEASHEWMEKQVKEANTAYNEKKSVLERWVADQPHFSVADVTDKVDGILVSFRAGKRVTTPARRAIYSGGKRKIVQTGLQVPRGALTEDTIYGKREEGFVVKYPLDHPSMKVENILDPTIRNLVKEHIVAFGGNAKEAFKMPLYSAKGMQIKSVRCKTNLSENSVVPVKVNADGQPIGYAKKGNNHHVAIYQDKKGEYQELVVSFWDAVERKHYGVPVVIINPHEVWTDLVNKDLSQDFLNKLPHDDWQFVLSMQENEMFVLGLEDDEFNDAIERHDYNLLNKHLYRVQNISNKDYSFRYHTETKVDDKYDGIENGRSTSMTLGALFRFKSISGLLSHFPHKVKIDIMGRITKA

SEQ ID NO: 1349 - protein, 1161 aa, unidentified
  REGION 1..1161: note = Description of Unknown: uncultivated organism with predicted taxonomy: Bacteroidales
  REGION 1..1161: note = MG16-271 effector
MTKKILGLDLGVGSIGWALIETQDDKPSQILGIGSRIVPISNDDSDQFQKGQAITKNAERTQRRTARKGYDRYQLRRALLTNLLREKNMLPDYMNESAIDLWRLRSDAATEGKKLSLKEIGRVLYHINQKRGYKHSKADVSADSKQTKYVQEVNKRFQELKELGQTIGQHFYQMLQQSVVQSEKGVYYTYRIKDKVYPRRAYEEEFDKIMSTQKVFYPDILTDEFIDTLRNRIIFYQRPLKSCKHLVGLCEFEMRPYKKADGSIVYSGPKCAPRTSPLAQICAVWEAVNNIKLTNRNNEIYPISQEERQAMVDFLQTHKEMKVADMQRILGIKKSDGWWGGKAIGKGIKGNQTLCQLREALGEKYQELLKMEIKKIDSGFFDAETAEVIEIIDPACENEPLFQLWHVVYSVQDKDELRKALLKKFNIDDEQVVENLYNLDFVKPGYANKSHKFIRRILPYLMQGEMYSVACARVGINHSNSRTKEELNTRPLVEHIKLLQKNTLRQPVIEKILNQMINIVNALRDKYGEIAEVRVELARELKQNKEERETTYKNNSKNERLNREITERIKEMGIRPSRMRVQKYKLWEESLHQCFYCGKTVGAAEFLSGADVEIEHIIPRSVLFDDSYSNKVCACRECNHAKNNQTAFDFMKAQSTDKFEAYKSRVDDAFKEKRISKTKRDHLLWGLEDIPQDFIDRQLRQSQYIAAKAVEILQTAIRDVHATSGSVTELLRHQWGYDEILHHLNLPRYNKADLTEIVQYDHAGQKHTVERIKNWNKRLDQRHHAVDALTIALTKQSYIQRLNTLNASRETIYNEVEQADAKLRNEEKRTLLENWVAIQPHFPVKDVEDKVAGILVSFRAGKRVTTPAKRAVYRNGKRINVQKGLLVPRGALTEETVYGKLGDRFVVKYPHQHPSMSPDNIVDPTIRELVKKRLSEFNNDPKQAFATPLYSDKAQKMEIKSVRCFAPGVSAQGSTPVRFNNDGNPIGYSKTGNNHHIAIYKDANGKYKESVVSFTEAVHRKLIGLPIVIDNPKQVWDKVINMNLPEDYLLTLPQDNWEFVVSMQVNDMFIMGLTDVEFEDAIHEKDYALLNQHLYRVQKLSSTKYYFRYHLETSVDDKYDGVANEKLSMEIGKLINLRSPNAMAVNVHKVRISILGEITPL

SEQ ID NO: 1350 - protein, 763 aa, unidentified
  REGION 1..763: note = Description of Unknown: uncultivated organism with predicted taxonomy: Bacteroides sp. CAG:770
  REGION 1..763: note = MG16-272 effector
EAYTIKKDGKEITIGPKVAPRTSPLAQLSSIFETANNITIRNRRNDELYISPEQRRAIADFLDNHEVMKLTDLYKILNIGRKDGWWAGKAIGKGLKGNTTKCQIREALSILPKEQVDSLTAFQLEFDEYVDEETGEVRKRINNARAEQQPLYKLWHLLYSIKDNDELSGALRHLGIEDEESIEKLCKLDFRTAGYANKSSKAIGRILPYLMEGVMYSEACERAGFDHSRRINPDRILLTHLPQIQKNELRQPVVEKILNQLVNIVNALLEKEGAIDEIRVELARELKQSKDERNEAFKRNNQNERQNKDYAERIKEYGLTPTRNRIMKMRMWEESEYTCMYCGQPVNVTEFLKGADVEREHIIPRGLLFDNSFTNQVCSCRRCNSKKGMRTAYDFIADEKGQEGLDTYIDRINDLFNRKKISRSKLNRLFVSYKAYMSRKAQGKETDEDKDLWENFIDRQLRQSQYIAKKSVEMLQQVCKNVYTTSGSVTDFVRHQWGYDELLHELNFERFKKAGLTAMVKQLHSGKEIEVERIKDWTKRLDNRHHAVDALAIACTTQGMIQRLNTLNASRDEMQEELSSKEQRLVDPERSMLEKWIFAQPHISYAEAKNEIDKIIISQRPNTRITVPGKRYVTKNGKRTLAQTGIIVPRGALHAEFVYGRIMKQEADGVTMIPQYVRKYKLGIGAQGFLFNGKEFYKEELKKDSKTGLSSIVVTDKIKDVLEKIVDGGIRQRILERLNRGFEEGTDYRSNVAQALDNLKNLD

SEQ ID NO: 1351 - protein, 1016 aa, unidentified
  REGION 1..1016: note = Description of Unknown: uncultivated organism with predicted taxonomy: Bacteroidetes
  REGION 1..1016: note = MG16-273 effector
VLLHINQKRGYKHSRLSNSDSKETAYVQEVNSRYDDLMAEGLTIGQHFAAKLKENEQESIDGKKYYNYRIKEQVYPRHAYEEEAKKILEVQSRYHSDVLTPDVCKEMMGIIFYQRDLKSCKNLVSLCEFESYTITKDGKEITIGPKVAPRTSPLAQLSSILETANNITIRNKRNDELYISPEQRKAIADFLDNHEVMKLTDLYKILNIGRKDGWWAGKAIGKGLKGNTTKCLIREALSALPKEQVDTLTSFQLEFDEYVDEETGEIRKRINNTLAEQQPLYKLWHMLYSIKDNTELSGALHHLGIEDKESLEKLCRLDFRTAGYASKSAKAIGRILPYLMEGVMYSEACERAGLDHSRRIDPNRTLLTHLPQIQKNELRQPVVEKILNQLVNVVNALLEKEGAIDEIRIELARELKQSKDERNETFKRNNQNERQNKEYAERIKKYGLTPTRNRIMKLKMWEESEHACMYCEQPVDPIEFLKGADVEREHIIPRGLLFDNSFTNQVCSCRRCNSKKGMRTAYDFIADDKGQEGLNAYIEHINDLFDKKKISRSKLNRLLVSHKAYISRKAQGKETEEDKELWENFIDRQLRLSQYIAKKSVEMLQQVCKNVYATSGSITDFVRHQWGYDELLHDLNFERFKKAGLTTMVKQLHSGEEVEVERIANWTKRLDNRHHAVDALAIACTTQSMIQRLNTLNASRDDMLEEQNSKDQRLVDPERSMLEKWVFIQPHITYADAKKEIDKIVISQRPNTRITVPGKRYITKNGKRTLVQTGIIVPRGALHAEFVYGRIMKRDIDGVTMTPQYVRKYKLGIGAQGFLFNGKEFYKEELKKDSKTGLSKIVVTDKIKDVLEKIVDGGIRQRILERLNRGFEEGADYRANVAQALANLKNLDEDPVYSDDAKTRPIRTVRKYVSSSTMVAVRKDDKGKPVAFVEPDGNHHVAFYKDDNGVITETIVTKWQAVQRKLYHIPIIIDNPSQTWSEVLERNDVPDELLQSLPKDSSTFLLSLQIGEAFIM

SEQ ID NO: 1352 - protein, 951 aa, unidentified
  REGION 1..951: note = Description of Unknown: uncultivated organism with predicted taxonomy: Bacteroidales
  REGION 1..951: note = MG16-274 effector
LFITREQKQQIANIMDNKEVLKLKDVHEVLGINSKSGWYCDKAIKSGIKGNSTKCAIISALSSLPNSTIREITRFNLETETTNMVDEETGELLVRIKSTYQEEPLYRLWHIIYSIKNDAERLNTILVFLKEFGIEDVSIANALNDIDFVTPGYANLSAKAISKILPYMMEGLDYSESCEYVGYNHSDSLTKEENEKRELLDQIPAIKKNELRQPTVEKILNQTINVFNQINAELGKKGERVDEVRVELARELKQSKEEREETDKGIRKQQKANEEYADILKKKGVRPTRNRILKYRLWKESEEACFYCGRDIDFHEFLRFSDIEREHVIPKKLLFDDSFANQVCSCRRCNAEKGGRTALDYMRTKPNLQEYLDKVDKMFQEHKIGGKKHTHLLASYDDYLSRKKEGKETKDDILIWEEPIDRQLRLSQYISKKAQELLKTACREVMATSGSITDLIRHTWGYDTILHELNFPRYKDAGLTEIIKDEETGMQRELIPDWSKRLDHRHHAIDALAVACTSRSIVQRINTLHASREIIRDEIKTSRKEWEDNDLLQQWIKEKMPFDRQYVVQKVASILVSMKAGKKATVPGKRKIYKNGKPVIMQTGLRIPRGQLHEQTVYGAIKHHSKDKKGNVIETKEIVTRYKMGVGSVGFVFTGKETCDVVFDKKNERYVIVDGIGKAINYIVDRHIREIVRERINEAFPDGETYLSEAEKALAEGKPYNGKGRSQKALEQLKALDEHPLYADKNKTIVIKSVRCFTGLNAVQPLRYNSKHEPISFVLTKNNHHVAIYVDEKGEYQECVYTFWQVVERAKYRLPLIIQDPKTIWDEIRQREKDGDSFPDDLITSLPLPNWTFVESLQQNDMFVMDMDDDTFKENVTSNNYKELGEKLYRVQNLSTHDYFFRLHSDTTSKTTPDLAQCKKFIRIKSFKAYFEHNPHKVQLSLLGKIILKND

SEQ ID NO: 1353 - protein, 984 aa, unidentified
  REGION 1..984: note = Description of Unknown: uncultivated organism with predicted taxonomy: Bacteroidetes
  REGION 1..984: note = MG16-275 effector
YENKEGKIVFGGPKVAPKSSPLFQICKIWEAVNNITLKNRKNDELYITLEQRKAMVDFLDTHEKLTLKEVYSILGISKQDGWWGGKAIGRGLQGNTTKIALKNALGDFDNAEKLLQFNLKNTDSGLIDEVTGEVIQMIDAKVEKEPLYDLWHTVYSISDKAELANALKKKFNIYDEDIINSLYAIDFVKQGFGNKSAKAMRRILPYLQQGMKYSDACEYEGFSHSDSLTKTENEARQLLEKLPPIQKNALRQPIVEKILNQMINVVNALMVEYGQFESIRVELARELKQSKDDRNTTFLQNEAMEKLNEAIAKRLTSEGITPTKRIMEKYKFIFPTKGCIDKKTGKFVTKNFDALATVNQCIYCGKPFSLSAALNGEGYEIEHIIPRDMICDNSQSNKVLSCRSCNSKKSNKTAFDFMRSQDKAMFDDYIKRVEKWFDDGIISPSKRERLLLSHEDYMERKKKGKTTEEDKKYWEEFVSRQAGETQYISRESIRILKQCCRNVNATSGTVTATLRHLWGYDEILHQLNFERYKQAGLTETVTWTSNHGKNEHSKEQIVDWSKRIDHRHHAIDALVVACTQQGFIQRINTLNADDTKDLMRKQIESAGIKFEEKKVLLDKYLASFVPFTTKVVADEVNKILVSFKAGKKSASTGKRIKYVKGKKEVLQEGVIIPRGALHEEGVYGQIEINGEKVIVKKYKLGKGAQGFVFTGKETYEEKVNKKTGEVQVDDKIKNVLDSIVDGNIRAKVLQRLNQGFEEGKDYRNDVKKALDNLNNLDKNPIFADENKTIPIRTVRCRTGLSAVVPVKCNEQGEPIGFVKPGNNHHIAIYRDKEGQLQEHTVTFWHAVERKKYGLPVIIENPTEVWDSIMDRQLPESFLEKLPVVNWTFEMSLQQNEMFVLGMEDETFENAIREKNYSMIGAYLYRVQSISESDYWFRLHIETQNDKTPSAKLAMKYHRVKSLKAFYGLNPHKVYVSVIGKMKEL

SEQ ID NO: 1354 - protein, 1348 aa, unidentified
  REGION 1..1348: note = Description of Unknown: uncultivated organism with predicted taxonomy: Clostridiales
  REGION 1..1348: note = MG18-1 effector
MDQSKEYYIGLDGGTDSVGWAVLNPDYTVVKKRGKSLWGVRLFESGQTAAERRLARSARRRTDRKKWRLKLLKELFAEEVAACDPAFFARLAESRYWEDDKKVDGADTLFHDADFTDKDYHRQFPTIYHLRRHLMCCTEKPDIRLLYLAVAHMIKNRGHFLNEGQDLNQVRRFDDVWQNLCAAVSDVLGIELAVENGAKAAEVLTSSVKIKEKTKQLESVLGEGESEADRSVCKALAGLLAGAKVSAVDLFNGDEALKECGKFSLAEKSIEELEPDLGDALGEERFSLLQYAYAAYNWAVFARLLPEGKTISEVKTEEYEAYKADLRALKQLVKQYASDQYYRVFRSAKIKGNYASYVGKTNCGNEKSNPESCKPEEFFAFLKKELKPLWSQNIPAAASLAAKLESGTLLRRQRSGENAAIPYQAHLQELQIILKNMQQFYPFLQKADENGFTPAYKIEKLLTFRIPYYVGPLNDAHKEKGFCWIVKKADVPVLPWNFDQVVDENACEDAFIGRMSATCTYLVGENVLPQNSPLYCRFMVLNELNNLRIRSEKITPALKQAIFTQLFCAGKGGKVTQKKLLDFLHSQGIDANKQDISGIDGDFKASMAPAVKLQSIFTEPLPPEILERLAFALTVSGESHKMLQNRIRAILPNADNAVIRKVCALKFTGWGRLSQKLLTEIYDVDQTTGECRSLMDLLWSTNNNLMQLLSGDFTFAAGIDAYNAAQNGTENIFDYDHLVKDLYVSPSVKRGLWQTLLLVKEVRKIMGCDPARVFIEMARGVSPEQKNKRTVSRKDQLLALYKACKEDARDWCGELEALPEDKLRSDKLYLYYTQMGRCMYSGEPIRLDDLMHDTANQLYDIDHIYPQSKTKDDSLTNRVLVKRQLNAIKSNDYPLPQTMRQTALWKALLEKGLISKQKYLRLTRTTPFTEEELAGFINRQLVETRQSTKAAAHLLEQLLPNTEVVYVKAGLAADFRQEFGFVKCRDANDFHHAKDAYLNAVVGNVYHEKFTKNPLRFVRSGQEYSLNLSALFQNWNIYKGGRVIWQKGEDGSLETVRARMAKNDPMVTRYCTEGRGALYDLQPMKKSKGQLPLKSSDERLQHIDRYGGYNKLAGAYFTLAAYYKKGKRVKSIESVPLYLAAKLQRDPAALQQYLADQLGTDRVEILVPEIKLGTLFKWNGYPMTLSGRTGPQLLFRNAAELRTNAEQEQYIKKMSRYLEKCKGRKEPLPIRPAYDKLTPEENLQLYDAFTQWLTSGIYAKRLSLQGKFLLEKRDAFAALSPEAQVRQLMEILHLFQCNPVAANLSELGGAAHAGILLASKNIDGKVPVSIVHQSVTGYFTQEVCLNDL

SEQ ID NO: 1355 - protein, 1379 aa, unidentified
  REGION 1..1379: note = Description of Unknown: uncultivated organism with predicted taxonomy: Phascolarctobacterium succinatutens
  REGION 1..1379: note = MG18-3 effector
MQKLKNCDYYIGLDMGDASVGWAVTDTNYNILKFNGKALWGIRLFDSANTAASTRVFRSGRRRIDRTTWRLKMLQELFAEEIAKVDPGFFMRLEDSRLHLDDKRDKAVYNLFVDKNYTDKDFYQQYPTMYHLRYALATQAGPFDVRLLYLAVQHIAKHRGHFLFDNLDASKVNDFNAVFSEVENYVRDEMGIEDWSCQNIDELAKVLCDVNLGRTTKQKAMQSLLPAQTKQQKAIIQLFSGGKAKLAELFVDEELDECEKKSVSFQDDDLNEFEPVLTAALGERYEGLLRFKAIYDWSLLAKILHLDTSKKDEGEQHLLSECKVQVYEDHKRDLAVLKSMLKGKPLYNKIFRQDGDISYEKYAKGIKGRNQIDFCKDLKKQLEGIAEYKKIMQEITSIDDAKTEEERLLFRITNGFAFPKQTTKDNGIIPIQVHLAELKCILDNAEGYLPFLGETDNNGLSVREKIEQIVKFRIPYYVGPLAGTRMSREQGRCWVVRKNEKIYPWNFTEIVNLEESAEKFITNMTAKCTYLVGEDVLPKESLLYSEFMVRNAINNITVDGERLPVDVLEKIFKQLFLAKTSKVTKKTLERFFRQENISFQNIGGIDDKINASMKSYNDFRRIFGEDYIQLHRDEIENIIRWITLFCDEKKMLVTKIKNTYPQISDDEIKAIKKLKYKDWGRLSATLLNSSTIAYEDKAFGELVTIISALRHTNKNFMELLSSYCSYDFIGKIKEFNGSRQSSNGKLTYKDVEELYVSPSVKRSIWQTLTILEEIKKIMGCEPKRIFIEMARSKEESKRTDSRLKKLQDLYKKCREENIDFMPRKDEFNALKTQLSSKKEDDLRSDKLYLYYTQMGRCMYTGERIELASLYDNNLYDIDHIYPRSKTKDDSLSNRVLVKKQVNAAKTDTYPLDAAIRIKMHSFWKLLYDKGFIDERKYERLTRSTQLRDEELAGFISRQLVETRQSTKAVATILKTAYKHSEVVYVKAGNVSDFRHQFKFVKCREVNDLHHAKDAYLNIVVGNCYYVKFTANPLNFIKKNQDSRSYSLKPEIFYKFNIKRDDDIAWLGGEDGTMATVARTMHKNNILFTRQAVEGKGELFKQNPLKANSGQLPLKAGLSIEKYGGYNSLTTAYFAVVKSEGKKGAVQLSIEAIPLVYAKQGEIAVQNYLTEVVQLCKPEIMLSKIKKYSLFKINGFPMHISGRTDNRILFYGAGQLCIDEADADYLKKALKYEADIAENELVIADTNADDIQKQNAQKRLDYYNQKWRIGRKINMHIYDMLLAKSGNSLYKNRPASQTTDLQEQRDVFEKLSLADQIHVIGEVLKLFKCASASANLKLLDKGNACGVIKVSNNILKFKQCILINQSPTGVFEQKVDLMKL

SEQ ID NO: 1356 - protein, 1379 aa, unidentified
  REGION 1..1379: note = Description of Unknown: uncultivated organism with predicted taxonomy: Phascolarctobacterium succinatutens
  REGION 1..1379: note = MG18-4 effector
MQKLKNCDYYIGLDMGDASVGWAVTDTNYNILKFNGKALWGIRLFDSANTAASTRVFRSGRRRIDRTTWRLKMLQELFADEIAKVETGFFMRLEDSRLQLDDKREKAVYNLFVDKSYTDKEFYQQYPTMYHLRYALATQKGPFDVRLLYLAVQHIAKHRGHFLFDNLDASKVNDFNAVFSEVENYVRDEMGIEDWSCQNIDELAKVLCDVNLGRTTKQKAMQSLLPAQTKQQKAIIQLFSGGKAKLAELFVDEELDECEKKSVSFQDDDLNEFEPVLTAALGERYEGLLRFKAIYDWSLLAKILHLDTSKKDEDEQHLLSECKVQVYEDHKRDLAVLKSMLKGKPLYNKIFRQDGDISYEKYAKGIKGRNQLDFCKDLKKQLDGIAEYKKIMQEITSIDAAGTEEERLLFRIANGFAFPKQTTKDNGIIPIQVHLAELKCILDNAEGYLQFLGETDNNGLSVREKIEQIVKFRIPYYVGPLAGTRMSREQGRCWVVRKNEKIYPWNFTEIVNLEESAEKFITNMTAKCTYLVGEDVLPKESLLYSEFMVRNAINNITVDGERLPVDVLEKIFKQLFLAKTSKVTKKTLERFFRQENISFQNIGGIDDKINASMKSYNDFRRIFGEDYIQLHRDEIENIIRWITLFCDEKKMLVTKIKNTYPQIADDQIKAIKKLKYKDWGRLSATLLNSSAIAYEDKAFGELVTIISALRHTNKNFMELLSSYCSYDFIGKIKEFNGSRQSSNGKLTYKDVEELYVSPSVKRSIWQTLTILEEIKKIMGCEPKRIFIEMARSKEESKRTDSRLKKLQDLYKKCREENIDFMPHTDELNAFKIQLSSKKEDDLRSDKLYLYYTQMGRCMYTGERIELASLYNDNLYDIDHIYPRSKTKDDSLSNRVLVKKEVNAAKTDIYPLDAAIRTKMHSFWKLLYDKGFIDERKYERLTRSTQLRDEELAGFISRQLVETRQSTKAVATILKTAYKHSEIVYVKAGNVSDFRQKFEFVKCRDVNDLHHAKDAYLNIVVGNCYHVKFTDKPMDFIKKNQDNRSYSLKPEIFYKFSIKRDSEIAWVGGKDGTITTVTKTMHKNNILFTRQPVEGKGELFKQQPLKAKSGQLPLKAGLSVEKYGGYDSLTTAYFALVKSEGKKGAVQLSIEGIPLVYAKQGEKAVQNYLTDVLQLCEPEIKIPKIKKYSLFKINGFPMHISGRQLKQLQFYVASQLCIDEYSIAYLKKAFKYENNLAVNDEIIADKNADEEKKQKARKRLDFYEKTWGIGKENNIRIYDILLAKSANNLYKKRPASQSATLEKRRENFKGLFVSKQIHVLKEILNLFKCLSATADLQLLGAGKNVGKVTWNTNISNVKQCILINQSPTGIFEQEVDLMKL

SEQ ID NO: 1357 - protein, 1379 aa, unidentified
  REGION 1..1379: note = Description of Unknown: uncultivated organism with predicted taxonomy: Phascolarctobacterium succinatutens
  REGION 1..1379: note = MG18-5 effector
MQRLKNCDYYIGLDMGDASVGWAVTDTNYNILKFNGKALWGIRLFDSANTAASTRVFRSGRRRIDRTTWRLKMLQELFAEEIAKVDPGFFMRLEDSRLHLDDKRDKAVYNLFVDKNYTDKDFYQQYPTMYHLRYALAMQAGPFDVRLLYLAVQHIAKHRGHFLFDNLDASKVNDFNAVFSEVENYVRDEMGIEDWSCQNIDELAKVLCDVNLGRTTKQKAMQSLLPAQTKQQKAIIQLFSGGKAKLAELFGDAELDECEKKSVSFQDDDLDELEPVLTAALGERYEGLLRFKAIYDWSLLAKILHLDTSKKDEDEQHLLSECKVQVYEDHKRDLAVLKSMLKGKPLYNKIFRQDGDISYEKYAKGIKGRNQLDFCKDLKKQLDGIAEYKKIMQEITSIDAAGTEEERLLFRIANGFAFPKQTTKDNGIIPIQVHLAELKCILDNAEGYLQFLGETDNNGLSVREKIEQIVKFRIPYYVGPLAGTRMSREQGRCWVVRKNEKIYPWNFTQVVNLEESAEKFITNMTAKCTYLVGEDVLPKESLLYSEFMVRNAINNITVDGERLPVDVLEKIFKQLFLAKTSKVTKKTLERFFRQENISFQNIGGIDDKINASMKSYNDFRRIFGEDYIQLHRDEIENIIRWITLFCDEKKMLVTKIKNTYPQIADDQIKAIKKLKYKDWGRLSATLLNSSAIAYEDKAFGELVTIISALRHTNKNFMELLSSYCSYDFIGKIKEFNGSRQSSNGKLTYKDVEELYVSPSVKRSIWQTLTILEEIKKIMGCEPKRIFIEMARSKEESKRTDSRLKKLQDLYKKCREENIDFMPRKDEFNTLKTQLSSKKEDDLRIDKLYLYYTQMGRCMYTGEKIELASLYDNNLYDIDHIYPRSKTKDDSLSNRVLVKKQVNAAKTDTYPLDAAIRTKMHSFWKLLYDKGFIDERKYERLTRSTQLRDEELAGFISRQLVETRQSTKAVAAILKTAYQNSEVVYVKAGNVSDFRKQFKFVKCRDVNDLHHAKDAYLNIVVGNCYHVKFTANPLNFITKNQDNRRYSLKPEIFYKFSIKRDGEIAWIGGKDGTITTVTKTMHKNNILFTRQPVEGKGELFKQQPLKAKSGQLPLKAGLSVEKYGGYDSLTTAYFALVKSEGKKGAVQLSIEGIPLVYAKQGEKAVQNYLTDVLQLCEPEIKIPKIKKYSLFKINGFPMHISGRQLKQLQFYVASQLCIDEYSIAYLKKAFKYENNLAVNDEIIADKNADEEKKQKARKRLDFYEKTWGIGKENNIRIYDILLAKSANNLYKKRPASQSATLEKRRENFKGLFVSKQIHVLKEILNLFKCLSATADLQLLGAGKNVGKVTWNTNISNVKQCILINQSPTGIFEQEVDLMKL

SEQ ID NO: 1358 - protein, 1379 aa, unidentified
  REGION 1..1379: note = Description of Unknown: uncultivated organism with predicted taxonomy: Phascolarctobacterium
  REGION 1..1379: note = MG18-6 effector
MQKLKNCDYYIGLDMGDASVGWAVTDTNYNILKFNGKALWGIRLFDSANTAASTRVFRSGRRRIDRTTWRLKMLQELFAEEIAKVDPGFFMRLEDSRLHLDDKRDKAVYNLFVDKNYTDKDFYQQYPTMYHLRYALATQAGPFDVRLLYLAVQHIAKHRGHFLFDNLDASKVNDFNAVFSEVENYVRDEMGIEDWSCQNIDELAKVLCDVNLGRTTKQKAMQSLLPAQTKQQKAIIQLFSGGKAKLAELFVDEELDECEKKSVSFQDDDLNEFEPVLTAALGERYEGLLRFKAIYDWSLLAKILHLDTSKKDEGEQHLLSECKVQVYENHKRDLAVLKSMLKGKPLYNKIFRQDGDISYEKYAKGIKGRNQIDFCKDLKKQLEGIAEYKKIMQEITSIDDAKTEEERLLFRITNGFAFPKQTTKDNGIIPIQVHLAELKCILDNAEGYLPFLGETDNNGLSVREKIEQIVKFRIPYYVGPLAGTRMSREQGRCWVVRKNEKIYPWNFTEIVNLEESAEKFITNMTAKCTYLVGEDVLPKESLLYSEFMVRNAINNITVDGERLPVDVLEKIFKQLFLAKTSKVTKKTLERFFRQENISFQNIGGIDDKINASMKSYNDFRRIFGEDYIQLHRDEIENIIRWITLFCDEKKMLVTKIKNTYPQISDDEIKAIKKLKYKDWGRLSATLLNSSNIAYEDKAFGELVTIISALRHTNKNFMELLSSYCSYDFIGKIKEFNGSRQSSNGKLTYKDVEELYVSPSVKRSIWQTLTILEEIKKIMGCEPKRIFIEMARSKEESKRTDSRLKKLQDLYKKCREENIDFMPRKDEFNALKTQLSSKKEDDLRSDKLYLYYTQMGRCMYTGERIELASLYDNNLYDIDHIYPRSKTKDDSLSNRVLVKKQVNAAKTDTYPLDAAIRIKMHSFWKLLYDKGFIDERKYERLTRSTQLRDEELAGFISRQLVETRQSTKAVAAILKTAYQNSEVVYVKAGNVSDFRQQFNFVKCRDVNDLHHAKDAYLNIVVGNCYHVKFTANPLNFITKNQDNRRYSLKPEIFYKFNIKRDDDIAWLGGEDGTMAIVARTMHKNNILFTRQAVEGKGELFKQNPLKANSGQLPLKAGLSVEKYGGYDSLTTAYFAVVKSEGKKGAVQLSIEGIPLVYARQGEDAIKKYLIEVVHLCNPIIKLNKIKKYSLFKINGFPMHISGRHGKQLIFYVAGQLCLDEESIAYLKKAFKYESDLAINEEIIDDKNAAEENKQKAHEKLGFYENTWGISEASNMRLYDILIAKSANNFYKNRPASQTSVLKQQRDKFAKLPLSKQIRVINEAINLFKCASATADFKLLEKGSACGKIQVSTNITKCKQCILINQSPTGVFEQEVDLMKL

SEQ ID NO: 1359 - protein, 1383 aa, unidentified
  REGION 1..1383: note = Description of Unknown: uncultivated organism with predicted taxonomy: Acidaminococcales
  REGION 1..1383: note = MG18-7 effector
MQNKKNVDYYVGLDMGDASVGWAVTDLNYNILKFNGKALWGIRLFDSAETAAARRGFRSARRRIDRVSWRISMLQELFAEEIAKVDAGFFQRLKDSRLQVEDKQEKTAYNLFVGQNYTDKDFYQQYPTMYHLRYALATQAGPFDVRLLYLAVQHIVKHRGHFLFENLDASKVGDFVAVFGEVESYVHDEMELDEWYCHDIDALAKVLCNANLGITAKQKAIQNLLPAKTKQEKAIVQLLSGGKAKLCDLFCDEELAECEKKSISFQEDNLDELEPILEAILQERYEALLRFKAVYDWSLLAKILRLDADKKSENEMHLLSECKVKVYEEHKKDLAVLKSMLKGKPLYNKLFRQDGEDTYANYAQGIKGINQVDFCKSLKKQLESIGEYKKQMQQLTSFEDAQTDVERLLFRVANGLAFPKQTTKDNGIIPIQVHLAELQCILAHAEKYLPFLKNADANGLSVREKITQIVKFRIPYYVGPLAGTRLSREQGRCWVERRAELKNEKIYPWNFDKVVDLEASAENFITNMTAKCTYLVGEDVLPKESLLYSEFMVRNALNNLTIDGERLPVSLLQKIYKQLFLEKTFKVTKKALERFFKQENVSYHDIGGIDDKINASMKAYNDFKRIFGEAYIEMHRDEIENIIRWITLFCDEKKMLETKIRKTYPQIPDDKIKAIKKLKYKDWGRLSATLLDSGKIAYEDASVGERITIISALRHTNKNFMELLSSNCQYDFIGKIKDFNGSKQSDNGKLTYKDVEELYVSPSVKRSIWQTLTILEEIKKIMGCEPKRIFIEMARSKEESLRTNSRLQRLQDLYKKCKEENIDFMPKADELTDIRSQLQCKNEEDLRSDKLYLYYTQMGRCMYTGERIELASLYDQNKYDVDHIYPRSKTKDDSLNNRVLVKKEINSAKTDNYPIDADIRKKMHAFWKMLYDKGFIDQKKYERLTRSTQLTDEELAGFINRQLVETRQSTKATADILKSAYEHSEVVYVKAGNVSDFRQQFDFVKCREVNDLHHAKDAYLNIVVGNCYHVKFTINPLMFIRGNQDNRRYSLKPEVFYAHDIKRNGEIAWLAGDNGTMATVKRVMQKNNVLFTRLAVEGKGELFKQNPLKAKSGQLPLKAGLSIDKYGGYDSLSTAYFALVESEGKKGAVQFTIEAIPLVYAKQGEATIKKYLTEVVQLCKPEIKVMRIKKYSLLKINGFPMHISGRTGKQLIFYVASQLCIDENSVAYLKKALKYESNLEENEAILADKNADESMKQKAFNRLEFYKNTWEISAVANLQIYDMLLAKSANNLYKNRPASQTATLKEKREQFAKLSLSKQIHVIKEILNLFKCASASADFKLLDKGTSCGTLKVSNNITKLKQCVLINQSPTGVFEQEVDLMKL

SEQ ID NO: 1360 - protein, 1379 aa, unidentified
  REGION 1..1379: note = Description of Unknown: uncultivated organism
  REGION 1..1379: note = MG18-8 effector
MQKSKNCDYYIGLDMGDASVGWAVTDTNYNISKFNGKALWGIRLFDYANTAASTRVFRSGRRRIDRTTWRLKMLQELFADEIAKVDTGFFMRLEDSRLQLDDKREKAVYNLFVDKSYTDKEFYQQYPTMYHLRYALATQKGPFDVRLLYLAVQHIAKHRGHFLFDNLDASKVNDFNAVFSEVENYVRDEMGIEDWSCQNIDELAKVLCDVNLGRTTKQKAMQSLLPAQTKQQKAIIQLFSGGKAKLAELFVDEELDECEKKSVSFQDDDLNEFEPVLTAALGERYEGLLRFKAIYDWSLLAKILHLDTSKKDEGEQHLLSECKVQVYEDHKRDLAVLKSMLKGKPLYNKIFRQDGDISYEKYAKGIKGRNQIDFCKDLKKQLEGIAEYKKIMQEITSIDDAKTVEEHLLFRITNGFAFPKQTTKDNGIIPIQVHLAELKCILDNAEGYLPFLGETNNNGLSVREKIEQIVKFRIPYYVGPLAGTRMSREQGRCWVVRKNEKIYPWNFTEIVNLEESAEKFITNMTAKCTYLVGEDVLPKESLLYSEFMVRNAINNITVDGERLPVDVLEKIFKQLFLAKTSKVTKKTLERFFRQENISFQNIGGIDDKINASMKSYNDFRRIFGEDYIQLHRDEIENIIRWITLFCDEKKMLVTKIKNTYPQIADDQIKAIKKLKYKDWGRLSATLLNSSAIAYEDKAFGELVTIISALRHTNKNFMELLSSYCSYDFIGKIKEFNGSRQSSNGKLTYKDVEELYVSPSVKRSIWQTLTILEEIKKIMGREPKRIFIEMARSKEESKRTDSRLKKLQDLYKKCKEENIDFVPRKDEFNALKTQLSSKKEDDLRSDKLYLYYTQMGRCMYTGERIELASLYDNNLYDIDHIYPRSKTKDDSLSNRVLVKKQVNAAKTDTYPLDAAIRIKMHSFWKLLYDKGFIDERKYERLTRSTQLRDEELAGFISRQLVETRQSTKAVATILKTAYKHSEVVYVKAGNVSDFRQQFKFVKCREVNDLHHAKDAYLNIVVGNCYYVKFTANPLNFIKKNQDSRSYSLKPEIFYKFNIKRDDDIAWLGGEDGTMATVARTMHKNNILFTRQAVEGKGELFKQNPLKANSGQLPLKAGLSIEKYGGYNSLTTAYFAVVKSEGKKGAVQLSIEAIPLVYAKQGEIAVQNYLTEVVQLCKPEIMLSKIKKYSLFKINGFPMHISGRTDNRILFYGAGQLCIDEADADYLKKALKYEADIAENELVIADTNADDIQKQNAQKRLDYYNQKWRIGRKINMHIYDMLLAKSGNSLYKNRPASQTTDLQEQRDVFEKLSLADQIHVIGEVLKLFKCASASANLKLLDKGNACGVIKVSNNILKFKQCILINQSPTGVFEQEVDLMKL

SEQ ID NO: 1361 - protein, 1379 aa, unidentified
  REGION 1..1379: note = Description of Unknown: uncultivated organism with predicted taxonomy: Phascolarctobacterium succinatutens
  REGION 1..1379: note = MG18-9 effector
MQKLQNKDYYIGLDMGDASVGWAVTDANYNILKFNGKALWGIRLFDSANTAASTRVFRSGRRRIDRTTWRLKMLQELFAEEIAKVDPGFFMRLEDSRLHLDDKRDKAVYNLFVDKNYTDKDFYQQYPTMYHLRYALATQAGPFDVRLLYLAVQHIAKHRGHFLFDNLDASKVNDFNAVFSEVENYVRDEMGIEDWSCQNIDELAKVLCDVNLGRTTKQKAMQSLLPAQTKQQKAIIQLFSGGKAKLAELFVDEELDECEKKSVSFQDDDLNEFEPVLTAALGERYEGLLRFKAIYDWSLLAKILHLDTSKKDEDEQHLLSECKVQVYEDHKRDLAVLKSMLKGKPLYNKIFRQDGDISYEKYAKGIKGRNQLDFCKDLKKQLDGIAEYKKIMQEITSIDAAGTEEERLLFRIANGFAFPKQTTKDNGIIPIQVHLAELKCILDNAEGYLQFLGETDNNGLSVREKIEQIVKFRIPYYVGPLAGTRMSREQGRCWVVRKNEKIYPWNFTQVVNLEESAEKFITNMTAKCTYLVGEDVLPKESLLYSEFMVRNAINNITVDGERLPVDVLEKIFKQLFLAKTSKVTKKTLERFFRQENISFQNIGGIDDKINASMKSYNDFRRIFGEDYIQLHRDEIENIIRWITLFCDEKKMLVTKIKNTYPQIADDQIKAIKKLKYKDWGRLSATLLNSSAIAYEDKAFGELVTIISALRHTNKNFMELLSSYCSYDFIGKIKEFNGSRQSSNGKLTYKDVEELYVSPSVKRSIWQTLTILEEIKKIMGCEPKRIFIEMARSKEESKRTDSRLKKLQDLYKKCREENIDFMPRKDEFNTLKTQLNSKKEDDLRSDKLYLYYTQMGRCMYTGEKIELASLYDNNLYDIDHIYPRSKTKDDSLSNRVLVKKQVNAAKTDTYPLDAAIRTKMHSFWKLLYDKGFIDERKYQRLTRSTQLRDEELAGFISRQLVETRQSTKAVATILKTAYQNSEVVYVKAGNVSDFRQQFKFVKCREVNDLHHAKDAYLNIVVGNCYHVKFTANPLNFITKNQDNRRYSLKPEIFYKFSIKRDGEIAWLGGEDGTMATVARTMHKNNILFTRQAVEGKGELFDQQPLKAKGGQLPLKAGLSIEKYGGYNSLTTAYFAVVKSEGKKGAVQLSIEAIPLVYAKQGEIAVQKYLTEVVQLCKPEIMLPKIKKYSLFKINGFPMHISGRTGNRMLFYGAGQLCLDEADVDYLKKALKYENDIAENELVIADKNSDDIQKQQAQKNLDYYNQKWRISRKVNMHIYDMLLAKSGNNLYKNRPASQTTDLQEQREFFEKLSLANQIHVIGEVLKLFKCASASANLKLLDKGNACGVIKVSNNILKFKQCVLINQSPTGVFEQEVDLMKL

SEQ ID NO: 1362 - protein, 1379 aa, unidentified; identical to SEQ ID NO: 1361
  REGION 1..1379: note = Description of Unknown: uncultivated organism with predicted taxonomy: Phascolarctobacterium
  REGION 1..1379: note = MG18-10 effector

SEQ ID NO: 1363 - protein, 1379 aa, unidentified
  REGION 1..1379: note = Description of Unknown: uncultivated organism with predicted taxonomy: Phascolarctobacterium succinatutens
  REGION 1..1379: note = MG18-11 effector
MQKLKNCDYYIGLDMGDASVGWAVTDTNYNILKFNGKALWGIRLFDSANTAASTRVFRSGRRRIDRTTWRLKMLQELFAEKIAKVDPGFFMRLEDSRLHLDDKRDKAVYNLFVDKNYTDKDFYQQYPTMYHLRYALATQAGPFDVRLLYLAVQHIAKHRGHFLFDNLDASKVNDFNAVFSEVENYVRDEMGIEDWSCQNIDELAKVLCDVNLGRTTKQKAMQSLLPAQTKQQKAIIQLFSGGKAKLAELFVDEELDECEKKSVSFQDDDLNEFEPVLTAALGERYEGLLRFKAIYDWSLLAKILHLDTSKKDEDEQHLLSECKVQVYEDHKRDLAVLKSMLKGKPLYNKIFRQDGDISYEKYAKGIKGRNQIDFCKDLKKQLEGIAEYKKIMQEITSIDDAKTEEERVLFRITNGFAFPKQTTKDNGIIPIQVHLAELKCILDNAEGYLPFLGETDNNGLSVREKIEQIVKFRIPYYVGPLAGTRMSREQGRYWVVRKNEKIYPWNFTEIVNLEESAEKFITNMTAKCTYLVGEDVLPKESLLYSEFMVRNAINNITVDGERLPVDVLEKIFKQLFLAKTSKVTKKTLERFFRQENISFQNIGGIDDKINASMKSYNDFRRIFGEDYIQLHRDEIENIIRWITLFCDEKKMLVTKIKNTYPQISDDEIKAIKKLKYKDWGRLSATLLNSSTIAYEDKAFGELVTIISALRHTNKNFMELLSSYCSYDFIGKIKEFNGSRQSSNGKLTYKDVEELYVSPSVKRSIWQTLTILEEIKKIMGCEPKRIFIEMARSKEESKRTDSRLKKLQDLYKKCREENIDFMPRKDEFNALKTQLSSKKEEDLRSDKLYLYYTQMGRCMYTGERIELASLYDNNLYDIDHIYPRSKTKDDSLSNRVLVKKQVNAAKTDTYPLDAAIRTKMHSFWKLLYDKGFIDERKYERLTRSTQLRDEELAGFISRQLVETRQSTKAVAAILKIAYQNSEVVYVKAGNVSDFRQQFKFVKCREVNDLHHAKDAYLNIVVGNCYHVKFTANPLNFITKNQDNRRYSLKPEIFYKFSIKRDGEIAWLGGEDGTMATVARTMHKNNILFTRQAVEGKGELFDQQPLKAKGGQLPLKAGLSIEKYGGYNSLTTAYFAVVKSEGKKGAVQLSIEAIPLVYAKQGEIAVQKYLTEVVQLCKPEIMLPQIKKYSLFKINGFPMHISGRTGNRMLFYGAGQLCLDEADVDYLKKALKYENDIAENELVIADKNSDDIQKQQAQKNLDYYNQKWRIGRKVNMHIYDMLLAKSGNNLYKNRPASQTTDLQEQREFFEKLSLANQIHVIGEVLKLFKCASASANLKLLDKGNACGVIKVSNNILKFKQCVLINQSPTGVFEQEVDLMKL

SEQ ID NO: 1364 - protein, 1379 aa, unidentified
  REGION 1..1379: note = Description of Unknown: uncultivated organism with predicted taxonomy: Phascolarctobacterium succinatutens
  REGION 1..1379: note = MG18-12 effector
MQKSKNCDYYIGLDMGDASVGWAVTDTNYNILKFNGKALWGIRLFDSANTAASTRVFRSGRRRIDRTTWRLKMLQELFAEEIAKVDPGFFMRLEDSRLHLDDKRDKAVYNLFVDKNYTDKDFYQQYPTMYHLRYALATQAVPFDVRLLYLAVQHIAKHRGHFLFDNLDASKVNDFNAVFSEVENYVRDEMGIEDWSCQNIDELAKVLCDVNLGRTTKQKAMQSLLPAQTKQQKAIIQLFSGGKAKLAELFVDEELDECEKNSVSFQDDDLNEFEPVLTAALGERYEGVLRFKAIYDWSLLAKILHLDTSKKDEDEQHLLSECKVQVYEDHKRDLAVLKSMLKGKPLYNKIFRQDGDISYEKYAKGIKGRNQIDFCKDLKKQLEGIAEYKKIMQEITNIDDAKTEEERLLFRITNGFAFPKQTTKDNGIIPIQVHLAELKCILDNAEGYLPFLGETDNNGLSVREKIEQIVKFRIPYYVGPLAGTRMSREQGRCWVVRKNEKIYPWNFTEIVNLEESAEKFITNMTAKCTYLVGEDVLPKESLLYSEFMVRNAINNITVDGERLPVDVLEKIFKQLFLAKTSKVTKKTLERFFRQENISFQNIGGIDDKINASMKSYNDFRRIFGEDYIQLHRDEIENIIRWITLFCDEKKMLVTKIKNTYPQISDDEIKAIKKLKYKDWGRLSATLLNSRAIGYEDKAVGEIITIISALRHTNKNLMELLSNYCPYDFIGKIKDFNGSRQSSNGKLTYKDVEELYVSPSVKRSIWQTLTILEEIKKIMGCEPKRIFIEMARSKEESKRTDSRLKKLQDLYKKCKEENIDFMPRKDEFNALKTQLSSKKEDDLRSDKLYLYYTQMGRCMYTGERIELASLNDNNLYDIDHIYPRSKTKDDSLSNRVLVKKQVNAAKTDTYPLDAAIRIKMHSFWKLLYDKGFIDERKYERLTRSTQLRDEELAGFISRQLVETRQSTKAVATILKTAYKHSEVVYVKAGNVSDFRQQFKFVKCREVNDLHHAKDAYLNIVVGNCYYVKFTANPLNFIKKNQDSRSYSLKPEIFYKFNIKRDDDIAWLGGEDGTMATVARTMHKNNILFTRQPLEGKGELFKQNPLKAKSGQLPLKAGLSVEKYGGYDSLTTAYFALVKSEGKKGSVQLSIEGIPLVYAKQGEKAVQDYLTEVVQLCKPEIKIPKIKKYSLFKINGFPMHISGRTGKQLVFYGAGQLCIADDVADYLKKALKYETDIAEKEKTLADQNADDIQKQKAQKGLDFYEQKWGISGAVNVQLYDMFIAKSANNLYKNRPASQTITLKEKREHFVKLTLSKQIHIIKEILNLFKCASASADFKLIDKGTSCGTLKISNNITKLKECILINQSPTGVFEQEVDLMKL

SEQ ID NO: 1365 - protein, 1379 aa, unidentified; identical to SEQ ID NO: 1356
  REGION 1..1379: note = Description of Unknown: uncultivated organism with predicted taxonomy: Phascolarctobacterium succinatutens
  REGION 1..1379: note = MG18-13 effector

SEQ ID NO: 1366 - protein, 1379 aa, unidentified; identical to SEQ ID NO: 1361
  REGION 1..1379: note = Description of Unknown: uncultivated organism with predicted taxonomy: Phascolarctobacterium
  REGION 1..1379: note = MG18-14 effector

SEQ ID NO: 1367 - protein, 1379 aa, unidentified
  REGION 1..1379: note = Description of Unknown: uncultivated organism with predicted taxonomy: Phascolarctobacterium succinatutens
  REGION 1..1379: note = MG18-15 effector
MQKLKNCDYYIGLDMGDASVGWAVTDTNYNILKFNGKALWGIRLFDSANTAASTRVFRSGRRRIDRTTWRLKMLQELFAEEIAKVDPGFFMRLEDSRLHLDDKRDKAVYNLFVDKNYTDKDFYQQYPTMYHLRYALATQAGPFDVRLLYLAVQHIAKHRGHFLFDNLDASKVNDFNAVFSEVENYVRDEMGIEDWSCQNIDEFAKVLCDVNLGRTTKQKAMQSLLPAQTKQQKAIIQLFSGGKAKLAELFVDEELDECEKKSVSFQDDDLNEFEPVLTAALGERYEGLLRFKAIYDWSLLAKILHLDTSKKDEDEQHLLSECKVQVYEDHKRDLAVLKSMLKGKPLYNKIFRQDGDISYEKYAKGIKGRNQIDFCKDLKKQLEGIAEYKKIMQEITNIDDAKTEEERLLFRITNGFAFPKQTTKDNGIIPIQVHLAELKCILDNAEGYLPFLGETDNNGLSVREKIEQIVKFRIPYYVGPLAGTRMSREQGRCWVVRKNEKIYPWNFTEIVNLEESAEKFITNMTAKCTYLVGEDVLPKESLLYSEFMVRNAINNITVDGERLPVDVLEKIFKQLFLAKTSKVTKKTLERFFRQENISFQNIGGIDDKINASMKSYNDFRRIFGEDYIQLHRDKIENIIRWITLFCDEKKMLVTKIKNTYPHISDDKIKAIKKLKYKDWGRLSATLLNSSAIAYEDKAFGELVTIISALRHTNKNFMELLSSYCYYDFIGKIKEFNGSRQSSNGKLTYKDVEELYVSPSVKRSVWQTLTILEEIKKIMGCEPKRIFIEMARSKEESKRTDSRLKKLQDLYKKCREENIDFMPRKDEFNVLKTQLSSKNEEDLRSDKLYLYYTQMGRCMYTGEIIELASLYDNNLYDIDHIYPRSKTKDDSLSNRVLVKKQVNAAKTDIYPLDAAIRTKMHSFWKLLYDKGFIDERKYERLTRSMQLRDEELAGFISRQLVETRQSTKAVAAILKTAYQNSEVVYVKAGNVSDFRQQFKFEKCREVNDLHHAKDAYLNIVVGNCYHVKFTANPLNFITKNQDNRRYSLKPEIFYKFSIKRDGEIAWLGGEDGTMATVARTMHKNNILFTRQAVEGKGELFDQQPLKAKGGQLPLKAGLSIEKYGGYNSLTTAYFAVVKSEGKKGAVQLSIEAIPLVYAKQGEIAVQKYLTEVVQLCKPEIMLPKIKKYSLFKINGFPMHISGRTGNRMLFYGAGQLCLDEADVDYLKKALKYENDIAENELVIADKNSDDIQKQQAQKNLDYYNQKWRIGRKVNMHIYDMLLAKSGNNLYKNRPASQTTDLQEQREFFEKLSLANQIHVIGEVLKLFKCASASANLKLLDKGNACGVIKVSNNILKFKQCVLINQSPTGVFEQEVDLMKL

SEQ ID NO: 1368 - protein, 1379 aa, unidentified; identical to SEQ ID NO: 1364
  REGION 1..1379: note = Description of Unknown: uncultivated organism with predicted taxonomy: Phascolarctobacterium succinatutens
  REGION 1..1379: note = MG18-16 effector

SEQ ID NO: 1369 - protein, 1379 aa, unidentified; identical to SEQ ID NO: 1361
  REGION 1..1379: note = Description of Unknown: uncultivated organism with predicted taxonomy: Phascolarctobacterium
  REGION 1..1379: note = MG18-17 effector

SEQ ID NO: 1370 - protein, 1379 aa, unidentified; identical to SEQ ID NO: 1361
  REGION 1..1379: note = Description of Unknown: uncultivated organism with predicted taxonomy: Phascolarctobacterium succinatutens
  REGION 1..1379: note = MG18-18 effector

SEQ ID NO: 1371 - protein, 1379 aa, unidentified; identical to SEQ ID NO: 1361
  REGION 1..1379: note = Description of Unknown: uncultivated organism with predicted taxonomy: Phascolarctobacterium
  REGION 1..1379: note = MG18-19 effector

SEQ ID NO: 1372 - protein, 1379 aa, unidentified; identical to SEQ ID NO: 1361
  REGION 1..1379: note = Description of Unknown: uncultivated organism with predicted taxonomy: Phascolarctobacterium
  REGION 1..1379: note = MG18-20 effector

SEQ ID NO: 1373 - protein, 1379 aa, unidentified; identical to SEQ ID NO: 1361
  REGION 1..1379: note = Description of Unknown: uncultivated organism with predicted taxonomy: Phascolarctobacterium
  REGION 1..1379: note = MG18-21 effector

SEQ ID NO: 1374 - protein, 1379 aa, unidentified; identical to SEQ ID NO: 1356
  REGION 1..1379: note = Description of Unknown: uncultivated organism with predicted taxonomy: Phascolarctobacterium
  REGION 1..1379: note = MG18-22 effector

SEQ ID NO: 1375 - protein, 1379 aa, unidentified
  REGION 1..1379: note = Description of Unknown: uncultivated organism with predicted taxonomy: Phascolarctobacterium succinatutens
  REGION 1..1379: note = MG18-23 effector
MQKLKNCDYYIGLDMGDASVGWAVTDTNYNILKFNGKALWGIRLFDSANTAASTRVFRSGRRRIDRTTWRLKMLQELFAEEIAKVDPGFFMRLEDSRLHLDDKRDKAVYNLFVDKNYTDKDFYQQYPTMYHLRYALATQAGPFDVRLLYLAVQHIAKHRGHFLFDNLDASKVNDFNAVFSEVENYVRDEMGIEDWSCQNIDELAKVLCDVNLGRTTKQKAMQSLLPAQTKQQKAIIQLFSGGKAKLAELSVDEELDECEKKSVSFQDDDLNEFEPVLTAALGERYEGLLRFKAIYDWSLLAKILHLDTSKKDEGEQHLLSECKVQVYENHKRDLAVLKSMLKGKPLYNKIFRQDGDISYEKYAKGIKGRNQIDFCKDLKKQLEGIAEYKKIMQEITSIDDAKTEEERLLFRITNGFAFPKQTTKDNGIIPIQVHLAELKCILDNAEGYLPFLGETDNNGLSVREKIEQIVKFRIPYYVGPLAGTRMSREQGRCWVVRKNEKIYPWNFTEIVNLEESAEKFITNMTAKCTYLVGEDVLPKESLLYSEFMVRNAINNITVDGERLPVDVLEKIFKQLFLAKTSKVTKKTLERFFRQENISFQNIGGIDDKINASMKSYNDFRRIFGEDYIQLHRDEIENIIRWITLFCDEKKMLVTKIKNTYPQISDDEIKAIKKLKYKDWGRLSATLLNSSTIAYEDKAFGELVTIISALRHTNKNFMELLSSYCSYDFIGKIKEFNGSRQSSNGKLTYKDVEELYVSPSVKRSIWQTLTILEEIKKIMGCEPKRIFIEMARSKEESKRTDSRLKKLQDLYKKCREENIDFMPRKDEFNALKTQLSSKKEEDLRSDKLYLYYTQMGRCMYTGERIELASLYDNNLYDIDHIYPRSKTKDDSLSNRVLVKKQINAAKTDTYPLDAAIRTKMHSFWKLLYDKGFIDERKYERLTRSTQLRDEELAGFISRQLVETRQSTKAVAAILKTAYQNSEVVYVKAGNVSDFRQQFKFVKCREVNDLHHAKDAYLNIVVGNCYHVKFTANPLNFITKNQDNRRYSLKPEIFYKFSIKRDGEIAWLGGEDGTMATVVRTMHKNNILFTRQAVEGKGELFDQQPLKAKGGQLPLKAGLSIEKYGGYNSLTTAYFAVVKSEGKKGAVQLSIEAIPLVYAKQGEIAVQKYLTEVVQLCKPEIMLPKIKKYSLFKINGFPMHISGRTGNRMLFYGAGQLCLDEADVDYLKKALKYENDIAENELVIADKNSDDIQKQQAQKNLDYYNQKWRIGRKVNMHIYDMLLAKSGNNLYKNRPASQTTDLQEQREFFEKLSLANQIHVIGEVLKLFKCASASANLKLLDKGNACGVIKVSNNILKFKQCVLINQSPTGVFEQEVDLMKL

SEQ ID NO: 1376 - protein, 1379 aa, unidentified
  REGION 1..1379: note = Description of Unknown: uncultivated organism with predicted taxonomy: Phascolarctobacterium
  REGION 1..1379: note = MG18-24 effector
MQKLKNCDYYIGLDMGDASVGWAVTDTNYNILKFNGKALWGIRLFDSANTAASTRVFRSGRRRIDRTTWRLKMLQELFAEEIAKVDSGFFMRLEDSRLQLDDKREKAVYNLFVDKNYTDKEFYQQYPTMYHLRYALATQKGPFDVRLLYLAVQHIAKHRGHFLFDNLDASKVNDFNAVFSEVENYVRDEMGIEDWSCQNIDELAKVLCDVNLGRTIKQKAMQSLLPAQTKQQKAIIQLFSGGKAKLAELFLDEELDECEKKSVSFQDDDLDELEPVLTAALGERYEGLLRFKAIYDWSLLAKILHLDAEKKDDSEQHLLSECKVQVYEEHKRDLTVLKSMLKGKPLYNKIFRQDGDISYEKYAKGIKGRNQIDFCKDLKKQLEGIAEYKKIMQEITNIDDAKTEEERLLFRITNGFAFPKQTTKDNGIIPIQVHLAELKCILDNAEGYLPFLGETDNNGLSVREKIEQIVKFRIPYYVGPLAGTRMSREQGRCWVVRKNEKIYPWNFTEIVNLEESAEKFITNMTAKCTYLVGEDVLPKESLLYSEFMVRNAINNITVDGERLPVDVLEKIFKQLFLAKTSKVTKKTLERFFRQENISFQNIGGIDDKINASMKSYNDFRRIFGEDYIQLHRDEIENIIRWITLFCDEKKMLVTKIKNTYPQISDDEIKAIKKLKYKDWGRLSATLLNSSTIAYEDKAFGELVTIISALRHTNKNFMELLSSYCYYDFIGKIKEFNGSRQSSNGKLTYKDVEELYVSPSVKRSIWQTLTILEEIKKIMGCEPKRIFIEMARSKEESKRTDSRLKKLQDLYKKCREENIDFMPRKDEFNALKTQLSSKKEENLRSDKLYLYYTQMGRCMYTGERIELASLYDNNLYDIDHIYPRSKTKDDSLSNRVLVKKQVNAAKTDTYPLDAAIRTKMHSFWKLLYDKGFIDERKYERLTRSTQLRDEELAGFISRQLVETRQSTKAVAAILKTAYQNSEVVYVKAGNVSDFRQQFKFVKCREVNDLHHAKDAYLNIVVGNCYHVKFTANPLNFITKNQDNRRYSLKPEIFYKFSIKRDGEIAWLGGEDGTMATVARTMHKNNILFTRQAVEGKGELFDQQPLKAKGGQLPLKAGLSIEKYGGYNSLTTAYFAVVKSEGKKGAVQLSIEAIPLVYAKQGEIAVQKYLTEVVQLCKPEIKIPKIKKYSLFKINGFPMHISGRTGNRLVFYGAGQLCISENETVYLKRALKYRDSIEENENIITAKDTDDKQKEKAQKRLDFYKQTWGISREANMRIYDILLAKSGNNLYKNRPASQTKDLQEQRGTFEKLPLSKQIYVIGEFLNLFKCASTSADFKLLGKGNSCGVIKTTNNVTKCKQCVLINQSPTGVFEQEVDLMKL

SEQ ID NO: 1377 - protein, 1379 aa, unidentified; identical to SEQ ID NO: 1361
  REGION 1..1379: note = Description of Unknown: uncultivated organism with predicted taxonomy: Phascolarctobacterium succinatutens
  REGION 1..1379: note = MG18-25 effector

SEQ ID NO: 1378 - protein, 1379 aa, unidentified; identical to SEQ ID NO: 1361
  REGION 1..1379: note = Description of Unknown: uncultivated organism with predicted taxonomy: Phascolarctobacterium succinatutens
  REGION 1..1379: note = MG18-26 effector

SEQ ID NO: 1379 - protein, 1379 aa, unidentified
  REGION 1..1379: note = Description of Unknown: uncultivated organism with predicted taxonomy: Phascolarctobacterium succinatutens
  REGION 1..1379: note = MG18-27 effector
MQKLKNCDYYIGLDMGDASVGWAVTDTNYNILKFNGKALWGIRLFDSANTAASTRVFRSGRRRIDRTTWRLKMLQELFAEEIAKVDPGFFMRLEDSRLHLDDKRDKAVYNLFVDKNYTDKDFYQQYPTMYHLRYALATQAGPFDVRLLYLAVQHIAKHRGHFLFDNLDASKVNDFNAVFSEVENYVRDEMGIEDWSCQNIDELAKVLCDVNLGRTTKQKAMQSLLPAQTKQQKAIIQLFSGGKAKLAELFVDEELDECEKKSVSFQDDDLNEFEPVLTAALGERYEGLLRFKAIYDWSLLAKILHLDTSKKDEDEQHLLSECKVQVYEDHKRDLAVLKSMLKGKPLYNKIFRQDGDISYEKYAKGIKGRNQIDFCKDLKKQLEGIAEYKKIMQEITNIDDAKTEEERLLFRITNGFAFPKQTTKDNGIIPIQVHLAELKCILDNAEGYLPFLGETDNNGLSVREKIEQIVKFRIPYYVGPLAGTRMSREQGRCWVVRKHEKIYPWNFTEIVNLEESAEKFITNMTAKCTYLVGEDVLPKESLLYSEFMVRNAINNITVDGERLPVDVLEKIFKQLFLAKTSKVTKKTLERFFRQENISFQNIGGIDDKINASMKSYNDFRRIFGEDYIQLHRDEIENIIRWITLFCDEKKMLVTKIKNTYPQISDDEIKAIKKLKYKDWGRLSATLLNSSTIAYEDKAFGELVTIISALRHTNKNFMELLSSYCYYDFIGKIKEFNGSRQSSNGKLTYKDVEELYVSPSVKRSIWQTLTILEEIKKIMGCEPKRIFIEMARSKEESKRTDSRLKKLQDLYKKCREENIDFMPRKDEFNALKTQLSSKKEENLRSDKLYLYYTQMGRCMYTGERIELASLYDNNLYDIDHIYPRSKTKDDSLSNRVLVKKQVNAAKTDTYPLDAAIRTKMHSFWKLLYDKGFIDERKYERLTRSTQLRDEELAGFISRQLVETRQSTKAVAAILKTAYQNSEVVYVKAGNVSDFRQQFKFVKCREVNDLHHAKDAYLNIVVGNCYHVKFTANPLNFITKNQDNRRYSLKPEIFYKFSIKRDGEIAWLGGEDGTMATVARTMHKNNILFTRQAVEGKGELFDQQPLKAKGGQLPLKAGLSIEKYGGYNSLTTAYFAVVKSEGKKGAVQLSLEAIPLVYAKQGEIAVQKYLTEVVQLCKPEIMLPKIKKYSLFKINGFPMHISGRTGKQLIFYGAGQLCIADDVADYLKKALMYETNIAEKEKTLADQNADDIQKQKAQKGLDFYEQKWGISGAVNVQLYDMFIAKSANNLYKNRPVSQTITLKEKREHFVKLTVSKQIHIIKEILNLFKCASASADFKLIDKGTSCGTLKISNNINKLKECILINQSPTGVFEQEVDLMKL

SEQ ID NO: 1380 - protein, 1379 aa, unidentified
  REGION 1..1379: note = Description of Unknown: uncultivated organism with predicted taxonomy: Phascolarctobacterium
  REGION 1..1379: note = MG18-28 effector
MQKLKNCDYYIGLDMGDASVGWAVTDTNYNILKFNGKALWGIRLFDSANTAASTRVFRSGRRRIDRTTWRLKMLQELFAEEIAKVDPGFFMRLEDSRLHLDDKRDKAVYNLFVDKNYTDKDFYQQYPTMYHLRYALATQAGPFDVRLLYLAVQHIAKHRGHFLFDNLDASKVNDFNAVFSEVENYVRDEMGIEDWSCQNIDELAKVLCDVNLGRTTKQKAMQSLLPAQTKQQKAIIQLFSGGKAKLAELFVDEELDECEKKSVSFQDDDLNEFEPVVTAALGERYEGLLRFKAIYDWSLLAKILHLDTSKKDEGEQHLLSECKVQVYEDHKRDLAVLKSMLKGKPLYNKIFRQDGDISYEKYAKGIKGRNQIDFCKDLKKQLEGIAEYKKIMQEITSIDDAKTEEERLLFRITNGFAFPKQTTKDNGIIPIQVHLAELKCILDNAEGYLPFLGETDNNGLSVREKIEQIVKFRIPYYVGPLAGTRMSREQGRCWVVRKNEKIYPWNFTEIVNLEESAEKFITNMTAKCTYLVGEDVLPKESLLYSEFMVRNAINNITVDGERLPVDVLEKIFKQLFLAKTSKVTKKTLERFFRQENISFQNIGGIDDKINASMKSYNDFRRIFGEDYIQLHRDEIENIIRWITLFCDEKKMLVTKIKNTYPQISDDEIKAIKKLKYKDWGRLSATLLNSSNIAYEDKAFGELVTIISALRHTNKNFMELLSSYCSYDFIGKIKEFNGSRQSSNGKLTYKDVEELYVSPSVKRSIWQTLTILEEIKKIMGCEPKRIFIEMARSKEESKRTDSRLKKLQDLYKKCREENIDFMPRKDEFNALKTQLSSKKEEDLRSDKLYLYYTQMGRCMYTGERIELASLYDNNLYDIDHIYPRSKTKDDSLSNRVLVKKQVNAAKTDIYPLDAAIRTKMHSFWKLLYDKGFIDERKYERLTRSTQLRDEELAGFISRQLVETRQSTKAVAAILKTAYQNSEVVYVKAGNVSDFRQQFNFVKCRDVNDLHHAKDAYLNIVVGNCYHVKFTANPLNFITKNQDNRRYSLKPEIFYKFSIKRDGEIAWLGGEDGTMATVARTMHKNNILFTRQAVEGKGELFDQQPLKAKGGQLPLKAGLSIEKYGGYNSLTTAYFAVVKSEGKKGAVQLSIEAIPLVYAKQGEIAVQKYLTEVVQLCKPEIMLPKIKKYSLFKINGFPMHISGRTGNRMLFYGAGQLCLDEADVNYLKKALKYENDIAENELVIADKNSDDIQKQQAQKNLDYYNQKWRIGRKVNMHIYDMLLAKSGNNLYKNRPASQTTDLQEQREFFEKLSLANQIHVIGEVLKLFKCASASANLKLLDKGNACGVIKVSNNILKFKQCVLINQSPTGVFEQEVDLMKL

SEQ ID NO: 1381 - protein, 1379 aa, unidentified
  REGION 1..1379: note = Description of Unknown: uncultivated organism with predicted taxonomy: Phascolarctobacterium succinatutens
  REGION 1..1379: note = MG18-29 effector
MQKLKNCDYYIGLDMGDASVGWAVTDTNYNILKFNGKALWGIRLFDSANTAASTRVFRSGRRRIDRTTWRLKMLQELFAEEIAKVDPGFFMRLEDSRLHLDDKRDKAVYNLFVDKNYTDKDFYQQYPTMYHLRYALATQAGPFDVRLLYLAVQHIAKHRGHFLFDNLDASKVNDFNAVFSEVENYVRDEMGIEDWSCQNIDELAKVLCDVNLGRTTKQKAMQSLLPAQTKQQKAIIQLFSGGKAKLAELFVDAELDECEKKSVSFQDDDLNEFEPVLTAALGERYEGLLRFKAIYDWSLLAKILHLDTSKKDEDEQHLLSECKVQVYEDHKRDLAVLKSMLKGKPLYNKIFRQDGDISYEKYAKGIKGRNQIDFCKDLKKQLEGIAEYKKIMQEITSIDDAKTEEERLLFRITNGFAFPKQTTKDNGIIPIQVHLAELKCILDNAEGYLPFLGETDNNGLSVREKIEQIVKFIIPYYVGPLAGTRMSREQGRCWVVRKNEKIYPWNFTEIVNLEESAEKFITNMTAKCTYLVGEDVLPKESLLYSEFMVRNAINNITVDGERLPVDVLEKIFKQLFLAKTSKVTKKTLERFFRQENISFQNIGGIDDKINASMKSYNDFRRIFGEDYIQLHRDEIENIIRWITLFCDEKKMLVTKIKNTYPQISDDEIKAIKKLKYKDWGRLSATLLNSSAIAYEDKAFGELVTIISALRHTNKNFMELLSSYCSYDFIGKIKEFNGSRQSSNGKLTYKDVEELYVSPSVKRSIWQTLTILEEIKKIMGCEPKRIFIEMARSKEESKRTDSRLKKLQDLYKKCREENIDFMPRKDEFNTLKTQLSSKKEDDLRSDKLYLYYTQMGRCMYTGEKIELASLYDNNLYDIDHIYPRSKTKDDSLSNRVLVKKQVNAAKTDTYPLDAAIRTKMHSFWKLLYDKGFIDERKYQRLTRSTQLRDEELAGFISRQLVETRQSTKAVAAILKTAYQNSEVVYVKAGNVSDFRQQFKFVKCREVNDLHHAKDAYLNIVVGNCYHVKFTANPLNFITKNQDNRRYSLKPEIFYKFSIKRDGEIAWLGGEDGTMATVARTMHKNNILFTRQAVEGKGELFDQQPLKAKGGQLPLKAGLSIEKYGGYNSLTTAYFAVVKSEGKKGAVQLSIEAIPLVYAKQGEIAVQKYLTKVVQLCKPEIMLPKIKKYSLFKINGFPMHISGRTGNRMLFYGAGQLCLDEADVDYLKKALKYENDIAENELVIADKNSDDIQKQQAQKNLDYYNQKWRIGRKVNMHIYDMLLAKSGNNLYKNRPASQTTDLQEQREFFEKLSLANQIHVIGEVLKLFKCASASANLKLLDKGNACGVIKVSNNILKFKQCVLINQSPTGVFEQEVDLMKL

SEQ ID NO: 1382 - protein, 1148 aa, unidentified
  REGION 1..1148: note = Description of Unknown: uncultivated organism with predicted taxonomy: Phascolarctobacterium succinatutens
  REGION 1..1148: note = MG18-30 effector
MQKLKNCDYYIGLDMGDASVGWAVTDTNYNILKFNGKALWGIRLFDSANTAASTRVFRSGRRRIDRTTWRLKMLQELFAEEIAKVDPGFFMRLEDSRLHLDDKRDKVVYNLFVDKNYTDKDFYQQYPTMYHLRYALATQAGPFDVRLLYLAVQHIAKHRGHFLFDNLDASKVNDFNAVFSEVENYVRDEMGIEDWSCQNIDELAKVLCDVNLGRTTKQKAMQSLLPAQTKQQKAIIQLFSGGKAKLAELFVDEELDECEKKSVSFQDDDLNEFEPVLTAALGERYEGLLRFKAIYDWSLLAKILHLDTSKKDEDEQHLLSECKVQVYEDHKRDLAVLKSMLKGKPLYNKIFRQDGDISYEKYAKGIKGRNQIDFCKDLKKQLEGIAEYKKIMQEITNIDDAKTEEERLLFRITNGFAFPKQTTKDNGIIPIQVHLAELKCILDNAEGYLPFLGETDNNGLSVREKIEQIVKFRIPYYVGPLAGTRMSREQGRCWVVRKNEKIYPWNFTEIVNLEESAEKFITNMTAKCTYLVGEDVLPKESLLYSEFMVRNAINNITVDGERLPVDVLEKIFKQLFLAKTSKVTKKTLERFFRQENISFQNIGGIDDKINASMKSYNDFRRIFGEDYIQLHRDKIENIIRWITLFCDEKKMLVTKIKNTYPQIADDQIKAIKKLKYKDWGRLSATLLNSSAIAYEDKAFGELVTIISALRHTNKNFMELLSSYCSYDFIGKIKDFNGSRQSSNGKLTYKDVEELYVSPSVKRSIWQTLTILEEIKKIMGREPKRIFIEMARSKEESKRTDSRLKKLQDLYKKCREENIDFMPRKDEFNALKTQLSSKKEEDLRSDKLYLYYTQMGRCMYTGERIELASLYDDNLYDIDHIYPRSKTKDDSLSNRVLVKKEVNAAKTDIYPLDAAIRTKMHSFWKLLYDKGFIDERKYERLTRSTQLRDEELAGFISRQLVETRQSTKAVAAILKTAYQNSEVVYVKAGNVSDFRQQFKFVKCRDVNDLHHAKDAYLNIVVGNCYHVKFTANPLNFITKNQDNRRYSLKPEIFYKFSIKRDSEIAWIGGKDGTITTVTKTMHKNNILFTRQPVEGKGELFKQNPLKAKNGQLPLKAGLSVEKYGGYNSLSTAYFAVVKSEGKMEQFSYL

SEQ ID NO: 1383 - protein, 1148 aa, unidentified; identical to SEQ ID NO: 1382
  REGION 1..1148: note = Description of Unknown: uncultivated organism with predicted taxonomy: Phascolarctobacterium succinatutens
  REGION 1..1148: note = MG18-31 effector

SEQ ID NO: 1384 - protein, 1379 aa, unidentified
  REGION 1..1379: note = Description of Unknown: uncultivated organism with predicted taxonomy: Phascolarctobacterium succinatutens
  REGION 1..1379: note = MG18-32 effector
MQKLQNKDYYIGLDMGDASVGWAVTDANYNILKFNGKALWGIRLFDSANTAASTRVFRSGRRRIDRTTWRLKMLQELFAEEIAKVDPGFFMRLEDSRLHLDDKRDKAVYNLFVDKNYTDKDFYQQYPTMYHLRYALATQAGPFDVRLLYLAVQHIAKHRGHFLFDNLDASKVYDFNAVFSEVENYVRDEMGIEDWSCQNIDELAKVLYDVNLGRTTKQKAMQSLLPAQTKQQKAIIQLFSGGKAKLAELFVDEELDECEKKSVSFQDDDLNEFEPVLTAALGERYEGLLRFKAIYDWSLLAKILHLDTSKKDEDEQHLLSECKVQVYEDHKRDLAVLKSMLKGKPLYNKIFRQDGDISYEKYAKGIKGRNQIDFCKDLKKQLEGIAEYKKIMQEITSIDDAKTEEERLLFRITNGFAFPKQTTKDNGIIPIQVHLAELKCILDNAEGYLPFLGETDNNGLSVREKIEQIVKFRIPYYVGPLAGTRMSREQGRCWVVRKNEKIYPWNFTEIVNLEESAEKFITNMTAKCTYLVGEDVLPKESLLYSEFMVRNAINNITVDGERLPVDVLEKIFKQLFLAKTSKVTKKTLERFFRQENISFQNIGGIDDKINASMKSYNDFRRIFGEDYIQLHRDEIENIIRWITLFCDEKKMLVTKIKNTYPHISDDKIKAIKKLKYKDWGRLSATLLNSSAIAYEDDAFGERVTIISALRHTNKNFMELLSNYCSYDFIGKIKDFNGSRQSSNSKLTYKDVEELYVSPSVKRSIWQTLTILEEIKKIMGHEPKRIFIEMARSKEESKRTDSRLKKLQDLYKQCREENIDFMPRKDEFNTLKTQLSSKKEDDLRIDKLYLYYTQMGRCMYTGEIIELASLYDNNLYDIDHIYPRSKTKDDSLSNRVLVKKQVNAAKTDIYPLDAAIRTKMHSFWKLLYDKGFIDERKYERLTRSTQLRDEELAGFISRQLVETRQSTKAVAAILKTAYQNSEVVYVKAGNVSDFRQQFKFVKCREVNDLHHAKDAYLNIVVGNCYHVKFTANPLNFITKNQDNRRYSLKPEIFYKFSIKRDSEIAWIGGKDGTITTVTKTMHKNNILFTRQPVEGKGELFKQNPLKAKNGQLPLKAGLSVEKYGGYNSLSTAYFAVVKSEGKKGAVQLSIEAIPLVYAKQGEEAVQDYLTEVVQLCNPEIRIPKIKKYSLFKINGFPMHISGKTVKQIIFYAAGQLCLADDVAEYLKKALKYEAYIALNEGLISDKNADDTQKQKAQQRLDYFKQKWGISSDANMKIYDILLAKSANNLYKNRPASQTKDLQEQRCVFEKLSLAEQIHIIGEVLNLFKCASASANLKLLGKGTSCGVIKTSNNITKCEQCILINQSPTGVFEQEVDLMKL

SEQ ID NO: 1385 - protein, 1379 aa, unidentified; identical to SEQ ID NO: 1361
  REGION 1..1379: note = Description of Unknown: uncultivated organism with predicted taxonomy: Phascolarctobacterium succinatutens
  REGION 1..1379: note = MG18-33 effector

SEQ ID NO: 1386 - protein, 1379 aa, unidentified; identical to SEQ ID NO: 1361
  REGION 1..1379: note = Description of Unknown: uncultivated organism with predicted taxonomy: Phascolarctobacterium succinatutens
  REGION 1..1379: note = MG18-34 effector

SEQ ID NO: 1387 - protein, 1379 aa, unidentified; identical to SEQ ID NO: 1364
  REGION 1..1379: note = Description of Unknown: uncultivated organism with predicted taxonomy: Phascolarctobacterium succinatutens
  REGION 1..1379: note = MG18-35 effector

SEQ ID NO: 1388 - protein, 1379 aa, unidentified; identical to SEQ ID NO: 1361
  REGION 1..1379: note = Description of Unknown: uncultivated organism with predicted taxonomy: Phascolarctobacterium succinatutens
  REGION 1..1379: note = MG18-36 effector

SEQ ID NO: 1389 - protein, 1379 aa, unidentified
  REGION 1..1379: note = Description of Unknown: uncultivated organism with predicted taxonomy: Phascolarctobacterium succinatutens
  REGION 1..1379: note = MG18-37 effector
MQKLKNCDYYIGLDMGDASVGWAVTDTNYNILKFNGKALWGIRLFDSANTAASTRVFRSGRRRIDRTTWRLKMLQELFAEEIAKVDPGFFMRLEDSRLHLDDKRDKAVYNLFVDKNYTDKDFYQQYPTMYHLRYALATQAGPFDVRLLYLAVQHIAKHRGHFLFDNLDASKVNDFNAVFSEVENYVRDEMGIEDWSCQNIDELAKVLCDVNLGRTTKQKAMQSLLPAQTKQQKAIIQLFSGGKAKLAELFVDEELDECEKKSVSFQDDDLNEFEPVLTAALGERYEGLLRFKAIYDWSLLAKILHLDTSKKDEDEQHLLSECKVQVYEDHKRDLAVLKSMLKGKPLYNKIFRQDGDISYEKYAKGIKGRNQIGFCKDLKKQLEGIAEYKKIMQEITNIDDAKTEEERLLFRITNGFAFPKQTTKDNGIIPIQVHLAELKCILDNAEGYLPFLGETDNNGLSVREKIEQIVKFRIPYYVGPLAGTRMSREQGRCWVVRKHEKIYPWNFTEIVNLEESAEKFITNMTAKCTYLVGEDVLPKESLLYSEFMVRNAINNITVDGERLPVDVLEKIFKQLFLAKTSKVTKKTLERFFRQENISFQNIGGIDDKINASMKSYNDFRRIFGEDYIQLHRDEIENIIRWITLFCDEKKMLVTKIKNTYPQISDDEIKAIKKLKYKDWGRLSATLLNSSTIAYEDKAFGELVTIISALRHTNKNFMELLSSYCYYDFIGKIKEFNGSRQSSNGKLTYKDVEELYVSPSVKRSIWQTLTILEEIKKIMGCEPKRIFIEMARSKEESKRTDSRLKKLQDLYKKCREENIDFMPRKDEFNALKTQLSSKKEENLRSDKLYLYYTQMGRCMYTGERIELASLYDNNLYDIDHIYPRSKTKDDSLSNRVLVKKQVNAAKTDTYPLDAAIRTKMHSFWKLLYDKGFIDERKYERLTRSTQLRDEELAGFISRQLVETRQSTKAVAAILKTAYQNSEVVYVKAGNVSDFRQQFKFVKCREVNDLHHAKDAYLNIVVGNCYHVKFTANPLNFITKNQDNRRYSLKPEIFYKFSIKRDGEIAWLGGEDGTMATVARTMHKNNILFTRQAVEGKGELFDQQPLKAKGGQLPLKAGLSIEKYGGYNSLTTAYFAVVKSEGKKGAVQLSIEAIPLVYAKQGEIAVQKYLTEVVQLCKPEIMLPKIKKYSLFKINGFPMHISGRTGKQLIFYGAGQLCIADDVADYLKKALMYETNIAEKEKTLADQNADDIQKEKAQKGLDFYEQKWGISGAVNVQLYDMFIAKSANNLYKNRPVSQTITLKEKREHFVKLTVSKQIHIIKEILNLFKCASASDDFKLIDKGTSCGTLKISNNINKLKECILINQSPTGVFEQEVDLMKL

SEQ ID NO: 1390 - protein, 1379 aa, unidentified
  REGION 1..1379: note = Description of Unknown: uncultivated organism with predicted taxonomy: Phascolarctobacterium
  REGION 1..1379: note = MG18-38 effector
MQKLKNCDYYIGLDMGDASVGWAVTDTNYNILKFNGKALWGIRLFDSANTAASTRVFRSGRRRIDRTTWRLKMLQELFAEEIAKVDPGFFMRLEDSRLHLDDKRDKAVYNLFVDKNYTDKDFYQQYPTMYHLRYALATQAGPFDVRLLYLAVQHIAKHRGHFLFDNLDASKVNDFNAVFSEVENYVRDEMGIEDWSCQNIDELAKVLCDVNLGRTTKQKAMQSLLPAQTKQQKAIIQLFSGGKAKLAELFVDEELDECEKKSVSFQDDDLNEFEPVLTAALGERYEGLLRFKAIYDWSLLAKILHLDTSKKDEDEQHLLSECKVQVYEDHKRDLAVLKSMLKGKPLYNKIFRQDGDISYEKYAKGIKGRNQIDFCKDLKKQLEGIAEYKKIMQEITNIDDAKTEEERLLFRITNGFAFPKQTTKDNGIIPIQVHLAELKCILDNAEGYLPFLGETDNNGLSVREKIEQIVKFRIPYYVGPLAGTRMSREQGRCWVVRKNEKIYPWNFTEIVNLEESAEKFITNMTAKCTYLVGEDVLPKESLLYSEFMVRNAINNITVDGERLPVDVLEKIFKQLFLAKTSKVTKKTLERFFRQENISFQNIGGIDDKINASMKSYNDFRRIFGEDYIQLHRDKIENIIRWITLFCDEKKMLVTKIKNTYPQIADDQIKAIKKLKYKDWGRLSATLLNSSAIAYEDKAFGELVTIISALRHTNKNFMELLSSYCSYDFIGKIKDFNGSRQSSNGKLTYKDVEELYVSPSVKRSIWQTLTILEEIKKIMGREPKRIFIEMARSKEESKRTDSRLKKLQDLYKKCREENIDFMPRKDEFNALKTQLSSKKEEDLRSDKLYLYYTQMGRCMYTGERIELASLYDDNLYDIDHIYPRSKTKDDSLSNRVLVKKEVNAAKTDIYPLDAAIRTKMHSFWKLLYDKGFIDERKYERLTRSTQLRDEELAGFISRQLVETRQSTKAVAAILKTAYQNSEVVYVKAGNVSDFRQQFKFVKCRDVNDLHHAKDAYLNIVVGNCYHVKFTANPLNFITKNQDNRRYSLKPEIFYKFSIKRDSEIAWIGGKDGTITTVTKTMHKNNILFTRQPVEGKGELFKQNPLKAKNGQLPLKAGLSVEKYGGYNSLSTAYFAVVKSEGKKGAVQLSIEAIPLVYAKQGEKAVQDYLTEVVQLCNPEIRIPKIKKYSLFKINGFPMHISGKTVKQIIFYAAGQLCLADDVADYLKKALKYEAYIALNEGLISDKNADDTQKQKAQQRLDYFKQKWGISSDANMKIYDILLAKSANNLYKNRPASQTKDLQEQRCVFEKLSLAEQIHIIGEVLNLFKCASASANLKLLGKGNSCGVIKTSNNITKCKQCILINQSPTGVFEQEVDLMKL

SEQ ID NO: 1391 - protein, 1379 aa, unidentified
  REGION 1..1379: note = Description of Unknown: uncultivated organism with predicted taxonomy: Phascolarctobacterium
  REGION 1..1379: note = MG18-39 effector
MQKLQNKDYYIGLDMGDASVGWAVTDANYNILKFNGKALWGIRLFDSANTAASTRVFRSGRRRIDRTTWRLKMLQELFAEEIAKVDPGFFMRLEDSRLHLDDKRDKAVYNLFVDKNYTDKDFYQQYPTMYHLRYALATQAGPFDVRLLYLAVQHIAKHRGHFLFDNLDASKVNDFNAVFSEVENYVRDEMGIEDWSCQNIDELAKVLCDVNLGRTTKQKAMQSLLPAQTKQQKAIIQLFSGGKAKLAELFVDEELDECEKKSVSFQDDDLNEFEPVLTAALGERYEGLLRFKAIYDWSLLAKILHLDTSKKDEDEQHLLSECKVQVYEDHKRDLAVLKSMLKGKPLYNKIFRQDGDISYEKYAKGIKGRNQLDFCKDLKKQLDGIAEYKKIMQEITSIDAAGTEEERLLFRIANGFAFPKQTTKDNGIIPIQVHLAELKCILDNAEGYLQFLGETDNNGLSVREKIEQIVKFRIPYYVGPLAGTRMSREQGRCWVVRKNEKIYPWNFTQVVNLEESAEKFITNMTAKCTYLVGEDVLPKESLLYSEFMVRNAINNITVDGERLPVDVLEKIFKQLFLAKTSKVTKKTLERFFRQENISFQNIGGIDDKINASMKSYNDFRRIFGEDYIQLHRDEIENIIRWITLFCDEKKMLVTKIKNTYPQIADDQIKAIKKLKYKDWGRLSATLLNSSAIAYEDKAFGELVTIISALRHTNKNFMELLSSYCSYDFIGKIKEFNGSRQSSNGKLTYKDVEELYVSPSVKRSIWQTLTILEEIKKIMGCEPKRIFIEMARSKEESKRTDSRLKKLQDLYKKCREENIDFMPRKDEFNTLKTQLSSKKEDDLRIDKLYLYYTQMGRCMYTGEKIELASLYDNNLYDIDHIYPRSKTKDDSLSNRVLVKKQVNAAKTDTYPLDAAIRTKMHSFWKLLYDKGFIDERKYQRLTRSTQLRDEELAGFISRQLVETRQSTKAVAAILKTAYQNSEVVYVKAGNVSDFRQQFKFVKCREVNDLHHAKDAYLNIVVGNCYHVKFTANPLNFITKNQDNRRYSLKPEIFYKFSIKRDSEIAWIGGKDGTITTVTKTMHKNNILFTRQPVEGKGELFKQQPLKAKSGQLPLKAGLSVEKYGGYDSLTTAYFALVKSEGKKGAVQLSIEGIPLVYAKQGEIAVQKYLTEVVQLCKPEIMLPKIKKYSLFKINGFPMHISGRQLKQLQFYVASQLCIDEYSIAYLKKAFKYENNLAVNDEIIADKNADEEKKQKARKRLDFYEKTWGIGKENNMRIYDILLAKSANNLYKKRPASQSATLEKRRENFKGLFVSKQIHVLKEILNLFKCLSATADLQLLGAGKNVGKVTWNTNISNVKQCILINQSPTGIFEQEVDLMKL

SEQ ID NO: 1392 - protein, 1379 aa, unidentified
  REGION 1..1379: note = Description of Unknown: uncultivated organism with predicted taxonomy: Phascolarctobacterium succinatutens
  REGION 1..1379: note = MG18-40 effector
MQKLKNCDYYIGLDMGDASVGWAVTDTNYNILKFNGKALWGIRLFDSANTAASTRVFRSGRRRIDRTTWRLKMLQELFAEEIAKVDPGFFMRLEDSRLHLDDKRDKAVYNLFVDKNYTDKDFYQQYPTMYHLRYALATQAGPFDVRLLYLAVQHIAKHRGHFLFDNLDASKVNDFNAVVSEVENYVRDEMGIEDWSCQNIDELAKVLCDVNLGRTTKQKAMQSLLPAQTKQQKAIIQLFSGGKAKLAELFADEELDECEKKSVSFQDDDLNEFEPVLTAALGERYEGLLRFKAIYDWSLLAKILHLDTSKKDKDEQPLLSECKVQVYEDHKRDLAVLKSMLKGKPLYNKIFRQDGDISYEKYAKGIKGRNQIDFCKDLKKQLEGIAEYKKIMQEITSIDDAKTEEERLLFRITNGFAFPKQTTKDNGIIPIQVHLAELKCILDNAEGYLPFLGETDNNGLSVREKIEQIVKFIIPYYVGPLAGTRMSREQGRCWVVRKNEKIYPWNFTEIVNLEESAEKFITNMTAKCTYLVGEDVLPKESLLYSEFMVRNAINNITVDGERLPVDVLEKIFKQLFLAKTSKVTKKTLERFFRQENISFQNIGGIDDKINASMKSYNDFRRIFGEDYIQLHRDEIENIIRWITLFCDEKKMLVTKIKNTYPQISDDEIKAIKKLKYKDWGRLSATLLNSSAIAYEDKAFGELVTIISALRHTNKNFMELLSSYCSYDFIGKIKEFNGSRQSSNGKLTYKDVEELYVSPSVKRSIWQTLTILEEIKKIMGCEPKRIFIEMARSKEESKRTDSRLKKLQDLYKKCREENIDFMPRKDEFNTLKTQLSSKKEDDLRSDKLYLYYTQMGRCMYTGEKIELASLYDNNLYDIDHIYPRSKTKDDSLSNRVLVKKQVNAAKTDTYPLDAAIRTKMHSFWKLLYDKGFIDERKYQRLTRSTQLRDEELAGFISRQLVETRQSTKAVAAILKTAYQNSEVVYVKAGNVSDFRQQFKFVKCREVNDLHHAKDAYLNIVVGNCYHVKFTANPLNFITKNQDNRRYSLKPEIFYKFSIKRDGEIAWLGGEDGTMATVARTMHKNNILFTRQPLEGKGELFKQNPLKAKSGQLPLKAGLSVEKYGGYDSLTTAYFALVKSEGKKGSVQLSIEGIPLVYAKQGEKAVKDYLTEVVQLCKPEIKIPKIKKYSLFKINGFPMHISGRQGKQLIFYVAGQLCINEDSIAYLKKVFKYESDLAVNEEILADENGDEVRKQKARNRLAFYDNTWGISLEANMQLYDMLLAKSANNLYKNRPASQTSTLKEQREQFSILPLSKQIHVIKEILKLFKCASATADFKLLEKGSTCGKIQVSTNITKCKQCILINQSPTGVFEQEVDLMKL

SEQ ID NO: 1393 - protein, 1291 aa, unidentified
  REGION 1..1291: note = Description of Unknown: uncultivated organism with predicted taxonomy: Phascolarctobacterium succinatutens
  REGION 1..1291: note = MG18-41 effector
MQKLQNKDYYIGLDMGDASVGWAVTDANYNILKFNGKALWGIRLFDSANTAASTRVFRSGRRRIDRTTWRLKMLQELFADEIAKVDPGFFMRLEDSRLHLDDKRENAVYNLFVDKNYTDKEFHQQYPTMYHLRYALATKKGPFDIRLLYLAVQHIAKHRGHFLFDNLDASTVNDFNAVFSEVENYVHDEMGLEDWSCQNKDALAKVLCDVNLGRTTKQKAMQSLLPAKSKQQKAILQLFSGGKAKLAELFDDEELDDCEKKSISFQDDDLDEIEPVLTAALGERYEGLLRFKAIYDWSLLAKILHLDTSKKDEDEQHLLSECKVQVYEDHKRDLAVLKSMLKGKPLYNKIFRQDGDISYEKYAKGIKGRNQIDFCKDLKKQLEGIAEYKKIMQEITSIDDAKTEEERVLFRITNGFAFPKQTTKDNGIIPIQVHLAELKCILDNAEGYLSFLGETDNNGLSVREKIEQIVKFRIPYYVGPLAGTRMSREQGRCWVVRKNEKIYPWNFTEIVNLEESAEKFITNMTAKCTYLVGEDVLPKESLLYSEFMVRNAINNITVDGERLPVDVLEKIFKQLFLAKTSKVTKKTLERFFRQENISFQNIGGIDDKINASMKSYNDFRRIFGEDYIQLHRDEIENIIRWITLFCDEKKMLVTKIKNTYPQISDDEIKAIKKLKYKDWGRLSATLLNSSTIAYEDKAFGELVTIISALRHTNKNFMELLSSYCYYDFIGKIKEFNGSRQSSNGKLTYKDVEELYVSPSVKRSIWQTLTILEEIKKIMGCEPKRIFIEMARSKEESKRTDSRLKKLQDLYKKCREENIDFMPRKDEFNALKIQLNSKKDYDLRSDKLYLYYTQMGRCMYTGERIELASLYDDNLYDIDHIYPRSKTKDDSLSNRVLVKKEVNAAKTDIYPLDAAIRTKMHSFWKLLYDKGLIDERKYERLTRSTQLRDEELAGFISRQLVETRQSTKAVAAILKTAYQNSEVVYVKAGNVSDFRQQFKFVKCRDVNDLHHAKDAYLNIVVGNCYHVKFTAHPLNFITKNQDNRRYSLKPEIFYKFSIKRDGEIAWLGGEDGTMATVARTMHKNNILFTRQAVEGKGELFDQQPLKAKGGQLPLKAGLSIEKYGGYNSLTTAYFAVVKSEGKKGAVQLSIEAIPLVYAKQGEIAVQKYLTEVVQLCKPEIMLPKIKKYSLFKINGFPMHISGRTGNRMLFYGAGQLCLDEADVDYLKKALKYENDIAENELVIADKNSDDIQKQQAQKNLDYYNQKWRIGRKVNMHIYDMLLAKSGNNLYKI

SEQ ID NO: 1394 - protein, 1379 aa, unidentified; identical to SEQ ID NO: 1355
  REGION 1..1379: note = Description of Unknown: uncultivated organism with predicted taxonomy: Phascolarctobacterium succinatutens
  REGION 1..1379: note = MG18-42 effector

SEQ ID NO: 1395 - protein, 1379 aa, unidentified; identical to SEQ ID NO: 1364
  REGION 1..1379: note = Description of Unknown: uncultivated organism with predicted taxonomy: Phascolarctobacterium succinatutens
  REGION 1..1379: note = MG18-43 effector

SEQ ID NO: 1396 - protein, 1379 aa, unidentified
  REGION 1..1379: note = Description of Unknown: uncultivated organism with predicted taxonomy: Phascolarctobacterium succinatutens
  REGION 1..1379: note = MG18-44 effector
MQKLKNCDYYIGLDMGDASVGWAVTDTNYNILKFNGKALWGIRLFDSANTAASTRVFRSGRRRIDRTTWRLKMLQELFAEEIAKVDPGFFMRLEDSRLHLDDKRDKAVYNLFVDKNYTDKDFYQQYPTMYHLRYALATQAGPFDVRLLYLAVQHIAKHRGHFLFDNLDASKVNDFNAVFSEVENYVRDEMGIEDWSCQNIDEFAKVLCDVNLGRTTKQKAMQSLLPAQTKQQKAIIQLFSGGKAKLAELFVDEELDECEKKSVSFQDDDLNEFEPVLTAALGERYEGLLRFKAIYDWSLLAKILHLDTSKKDEDEQHLLSECKVQVYEDHKRDLAALKSMLKGKPLYNKIFRQDGDISYEKYAKGIKGRNQIDFCKDLKKQLEGIAEYKKIMQEITSIDDAKTEEERLLFRITNGFAFPKQTTKDNGIIPIQVHLAELKCILDNAEGYLPFLGETDNNGLSVREKIEQIVKFRIPYYVGPLAGTRMSREQGRYWVVRKNEKIYPWNFTEIVNLEESAEKFITNMTAKCTYLVGEDVLPKESLLYSEFMVRNAINNITVDGERLPVDVLEKIFKQLFLAKTSKVTKKTLERLFRQENISFQNIGGIDDKINASMKSYNDFRRIFGEDYIQLHRDKIENIIRWITLFCDEKKMLVTKIKNTYPQIADDQIKAIKKLKYKDWGRLSATLLNSSAIAYEDKAFGELVTIISALRHTNKNFMELLSSYCYYDFIGKIKEFNGSRQSSNGKLTYKDVEELYVSPSVKRSVWQTLTILEEIKKIMGCEPKRIFIEMARSKEESKRTDSRLKKLQDLYKKCREENIDFMPRKDEFNVLKTQLSSKNEEDLRSDKLYLYYTQMGRCMYTGEIIELASLYDNNLYDIDHIYPRSKTKDDSLSNRVLVKKQVNAAKTDIYPLDAAIRTKMHSFWKLLYDKGFIDERKYERLTRSMQLRDEELAGFISRQLVETRQSTKAVAAILKTAYQNSEVVYVKAGNVSDFRQQFKFVKCREVNDLHHAKDAYLNIVVGNCYHVKFTANPLNFITKNQDNRRYSLKPEIFYKFSIKRDGEIAWLGGEDGTMATVARTMHKNNILFTRQAVEGKGELFDQQPLKAKGGQLPLKAGLSIEKYGGYNSLTTAYFAVVKSEGKKGAVQLSIEAIPLVYAKQGEIAVQKYLTEVVQLCKPEIMLPQIKKYSLFKINGFPMHISGRTGNRMLFYGAGQLCLDEADVDYLKKALKYENDIAENELVIADKNSDDIQKQQAQKNLDYYNQKWRIGRKVNMHIYDMLLAKSGNNLYKNRPASQTTDLQEQREFFEKLSLANQIHVIGEVLKLFKCASASANLKLLDKGNACGVIKVSNNILKFKQCVLINQSPTGVFEQEVDLMKL

SEQ ID NO: 1397 - protein, 1379 aa, unidentified
  REGION 1..1379: note = Description of Unknown: uncultivated organism with predicted taxonomy: Phascolarctobacterium succinatutens
  REGION 1..1379: note = MG18-45 effector
MQKLKNCDYYIGLDMGDASVGWAVTDTNYNILKFNGKALWGIRLFDSANTAASTRVFRSGRRRIDRTTWRLKMLQELFAEEIAKVDPGFFMRLEDSRLHLDDKRDKAVYNLFVDKNYTDKDFYQQYPTMYHLRYALATQAGPFDVRLLYLAVQHIAKHRGHFLFDNLDASKVNDFNAVFSEVENYVRDEMGIEDWSCQNIDELAKVLCDVNLGRTTKQKAMQSLLPAQTKQQKAIIQLFSGGKAKLAELFVDEELDECEKKSVSFQDDDLNEFEPVLTAALGERYEGLLRFKAIYDWSLLAKILHLDTSKKDEDEQHLLSECKVQVYEDHKRDLAVLKSMLKGKPLYNKIFRQDGDISYEKYAKGIKGRNQIDFCKDLKKQLEGIAEYKKIMQEITNIDDAKTEEERLLFRITNGFAFPKQTTKDNGIIPIQVHLAELKCILDNAEGYLPFLGETDNNGLSVREKIEQIVKFRIPYYVGPLAGTRMSREQGRCWVVRKHEKIYPWNFTEIVNLEESAEKFITNMTAKCTYLVGEDVLPKESLLYSEFMVRNAINNITVDGERLPVDVLEKIFKQLFLAKTSKVTKKTLERFFRQENISFQNIGGIDDKINASMKSYNDFRRIFGEDYIQLHRDEIENIIRWITLFCDEKKMLVTKIKNTYPQISDDEIKAIKKLKYKDWGRLSATLLNSSTIAYEDKAFGELVTIISALRHTNKNFMELLSSYCYYDFIGKIKEFNGSRQSSNGKLTYKDVEELYVSPSVKRSIWQTLTILEEIKKIMGCEPKRIFIEMARSKEESKRTDSRLKKLQDLYKKCREENIDFMPRKDEFNALKTQLSSKKEENLRSDKLYLYYTQMGRCMYTGERIELASLYDNNLYDIDHIYPRSKTKDDSLSNRVLVKKQVNAAKTDTYPLDAAIRTKMHSFWKLLYDKGFIDERKYERLTRSTQLRDEELAGFISRQLVETRQSTKAVAAILKTAYQNSEVVYVKAGNVSDFRQQFKFVKCREVNDLHHAKDAYLNIVVGNCYHVKFTANPLNFITKNQDNRRYSLKPEIFYKFSIKRDGEIAWLGGEDGTMATVARTMHKNNILFTRQAVEGKGELFDQQPLKAKGGQLPLKAGLSIEKYGGYNSLTTAYFAVVKSEGKKGAVQLSIEAIPLVYAKQGEIAVQKYLTEVVQLCKPEIMLPKIKKYSLFKINGFPMHISGRTGKQLIFYGAGQLCIADDVADYLKKALMYETNIAEKEKTLADQNADDIQKQKAQKGLDFYEQKWGISGAVNVQLYDMFIAKSANNLYKNRPVSQTITLKEKREHFVKLTVSKQIHIIKEILNLFKCASASADFKLIDKGTSCGTLKISNNINKLKECILINQSPTGVFEQEVDLMKL

SEQ ID NO: 1398 - protein, 1158 aa, unidentified
  REGION 1..1158: note = Description of Unknown: uncultivated organism with predicted taxonomy: Phascolarctobacterium
  REGION 1..1158: note = MG18-46 effector
MQKLKNCDYYIGLDMGDASVGWAVTDTNYNILKFNGKALWGIRLFDSANTAASTRVFRSGRRRIDRTTWRLKMLQELFAEEIAKVDPGFFMRLEDSRLHLDDKRDKAVYNLFVDKNYTDKDFYQQYPTMYHLRYALATQAGPFDVRLLYLAVQHIAKHRGHFLFDNLDASKVNDFNAVFSEVENYVRDEMGIEDWSCQNIDELAKVLCDVNLGRTTKQKAMQSLLPAQTKQQKAIIQLFSGGKAKLAELFVDEELDECEKKSVSFQDDDLNEFEPVLTAALGERYEGLLRFKAIYDWSLLAKILHLDTSKKDEDEQHLLSECKVQVYEDHKRDLAVLKSMLKGKPLYNKIFRQDGDISYEKYAKGIKGRNQIDFCKDLKKQLEGIAEYKKIMQEITSIDDAKTEEERVLFRITNGFAFPKQTTKDNGIIPIQVHLAELKCILDNAEGYLPFLGETDNNGLSVREKIEQIVKFRIPYYVGPLAGTRMSREQGRCWVVRKHEKIYPWNFTEIVNLEESAEKFITNMTAKCTYLVGEDVLPKESLLYSEFMVRNAINNITVDGERLPADVLEKIFKQLFLEKTSKVTKKTLERFFRQENISFQNIGGIDDKINASMKSYNDFKRIFGEDYIQLHREEIENIIRWITLFCDEKKMLVTKIKNTYTQISDDEIKAIKKLKYKDWGRLSATLLNSRAIGYEDKAVGEIITIISALRHTNKNLMELLSNYCPYDFIGEIKDFNGSRQSSNGKLTYKDVEELYVSPSVKRSIWQTLTILEEIKKIMGCESKRIFIEMARSKEESKRTDSRLKKLQDLYKKCKEENIDFMPRKDEFNALKTQLSSKKEDDLRSDKLYLYYTQMGRCMYTGERIELASLYDNNLYDIDHIYPRSKTKDDSLSNRVLVKKQVNAAKTDTYPLDAAIRTKMHSFWKLLYDKGFIDERKYERLTRSTQLRDEELAGFISRQLVETRQSTKAVAAILKTAYQNSEVVYVKAGNVSDFRQQFKFVKCREVNDLHHAKDAYLNIVVGNCYHVKFTANHLNFITKNQDNRRYSLKPEIFYKFSIKRDGEIAWLGGEDGTMATVARTMHKNNILFTRQAVEGKGELFDQQPLKAKGGQLPLKAGLSIEKYGGYNSLTTAYFAVVKSEGKKGAVQLSIEAIPLVYAK

SEQ ID NO: 1399 - protein, 1383 aa, unidentified; identical to SEQ ID NO: 1359
  REGION 1..1383: note = Description of Unknown: uncultivated organism with predicted taxonomy: Phascolarctobacterium
  REGION 1..1383: note = MG18-47 effector

SEQ ID NO: 1400 - protein, 1379 aa, unidentified
  REGION 1..1379: note = Description of Unknown: uncultivated organism with predicted taxonomy: Phascolarctobacterium succinatutens
  REGION 1..1379: note = MG18-48 effector
MQKLKNCDYYIGLDMGDASVGWAVTDTNYNILKFNGKALWGIRLFDSANTAASTRVFRSGRRRIDRTTWRLKMLQELFAEEIAKVDPGFFMRLEDSRLHLDDKRDKAVYNLFVDKNYTDKDFYQQYPTMYHLRYALATQAGPFDVRLLYLAVQHIAKHRGHFLFDNLDASKVNDFNAVFSEVENYVRDEMGIEDWSCQNIDELAKVLCDVNLGRTTKQKAMQSLLPAQTKQQKAIIQLFSGGKAKLAELFVDEELDECEKKSVSFQDDDLNEFEPVLTAALGERYEGLLRFKAIYDWSLLAKILHLDTSKKDEDEQHLLSECKVQVYEDHKRDLAVLKSMLKGKPLYNKIFRQDGDISYEKYAKGIKGRNQIDFCKDLKKQLEGIAEYKKIMQEITNIDDAKTEEERLLFRITNGFAFPKQTTKDNGIIPIQVHLAELKCILDNAEGYLPFLGETDNNGLSVREKIEQIVKFRIPYYVGPLAGTRMSREQGRCWVVRKHEKIYPWNFTEIVNLEESAEKFITNMTAKCTYLVGEDVLPKESLLYSEFMVRNAINNITVDGERLPVDVLEKIFKQLFLAKTSKVTKKTLERFFRQENISFQNIGGIDDKINASMKSYNDFRRIFGEDYIQLHRDEIENIIRWITLFCDEKKMLVTKIKNTYPQISDDEIKAIKKLKYKDWGRLSATLLNSSTIAYEDKAFGELVTIISALRHTNKNFMELLSSYCYYDFIGKIKEFNGSRQSSNGKLTYKDVEELYVSPSVKRSIWQTLTILEEIKKIMGCEPKRIFIEMARSKEESKRTDSRLKKLQDLYKKCREENIDFMPRKDEFNALKTQLSSKKEENLRSDKLYLYYTQMGRCMYTGERIELASLDDNNLYDIDHIYPRSKTKDDSLSNRVLVKKQVNAAKTDTYPLDAAIRTKMHSFWKLLYDKGFIDERKYERLTRSTQLRDEELAGFISRQLVETRQSTKAVAAILKTAYQNSEVVYVKAGNVSDFRQQFKFVKCREVNDLHHAKDAYLNIVVGNCYHVKFTANPLNFITKNQDNRRYSLKPEIFYKFSIKRDGEIAWLGGEDGTMATVARTMHKNNILFTRQAVEGKGELFDQQPLKAKGGQLPLKAGLSIEKYGGYNSLTTAYFAVVKSEGKKGAVQLSIEAIPLVYAKQGEIAVQKYLTEVVQLCKPEIMLPKIKKYSLFKINGFPMHISGRTGKQLIFYGAGQLCIADDVADYLKKALMYETNIAEKEKTLADQNADDIQKQKAQKGLDFYEQKWGISGAVNVQLYDMFIAKSANNLYKNRPVSQTITLKEKREHFVKLTVSKQIHIIKEILNLFKCASASADFKLIDKGTSCGTLKISNNINKLKECILINQSPTGVFEQEVDLMKL

SEQ ID NO: 1401 - protein, 1379 aa, unidentified
  REGION 1..1379: note = Description of Unknown: uncultivated organism with predicted taxonomy: Phascolarctobacterium succinatutens
  REGION 1..1379: note = MG18-49 effector
MQKLKNCDYYIGLDMGDASVGWAVTDTNYNILKFNGKALWGIRLFDSANTAASTRVFRSGRRRIDRTTWRLKMLQELFAEEIAKVDPGFFMRLEDSRLHLDDKRDKAVYNLFVDKNYTDKDFYQQYPTMYHLRYALATQAGPFDVRLLYLAVQHIAKHRGHFLFDNLDASKVNDFNAVFSEVENYVRDEMGIEDWSCQNIDELAKVLCDVNLGRTTKQKAMQSLLPAQTKQQKAIIQLFSGGKAKLAELFVDAELDECEKKSVSFQDDDLNEFEPVLTAALGERYEGLLRFKAIYDWSLLAKILHLDTSKKDEDEQHLLSECKVQVYEDHKRDLAVLKSMLKGKPLYNKIFRQDGDISYEKYAKGIKGRNQIDFCKDLKKQLEGIAEYKKIMQEITSIDDAKTEEERLLFRITNGFAFPKQTTKDNGIIPIQVHLAELKCILDNAEGYLPFLGETDNNGLSVREKIEQIVKFIIPYYVGPLAGTRMSREQGRCWVVRKNEKIYPWNFTEIVNLEESAEKFITNMTAKCTYLVGEDVLPKESLLYSEFMVRNAINNITVDGERLPVDVLEKIFKQLFLAKTSKVTKKTLERFFRQENISFQNIGGIDDKINASMKSYNDFRRIFGEDYIQLHRDEIENIIRWITLFCDEKKMLVTKIKNTYPQISDDEIKAIKKLKYKDWGRLSATLLNSSAIAYEDKAFGELVTIISALRHTNKNFMELLSSYCSYDFIGKIKEFNGSRQSSNGKLTYKDVEELYVSPSVKRSIWQTLTILEEIKKIMGCEPKRIFIEMARSKEESKRTDSRLKKLQDLYKKCREENIDFMPRKDEFNTLKTQLSSKKEDDLRSDKLYLYYTQMGRCMYTGEKIELASLYDNNLYDIDHIYPRSKTKDDSLSNRVLVKKQVNAAKTDTYPLDAAIRTKMHSFWKLLYDKGFIDERKYQRLTRSTQLRDEELAGFISRQLVETRQSTKAVAAILKTAYQNSEVVYVKAGNVSDFRQQFKFVKCREVNDLHHAKDAYLNIVVGNCYHVKFTANPLNFITKNQDNRRYSLKPEIFYKFSIKRDGEIAWLGGEDGTMATVARTMHKNNILFTRQAVEGKGELFDQQPLKAKGGQLPLKAGLSIEKYGGYNSLTTAYFAVVKSEGKKGAVQLSIEAIPLVYAKQGEIAVQKYLTEVVQLCKPEIMLPKIKKYSLFKINGFPMHISGRTGNRMLFYGAGQLCLDEADVDYLKKALKYENDIAENELVIADKNSDDIQKQQAQKNLDYYNQKWRIGRKVNMHIYDMLLAKSGNNLYKNRPASQTTDLQEHREFFEKLSLANQIHVIGEVLKLFKCASASANLKLLDKGNACGVIKVSNNILKFKQCVLINQSPTGVFEQEVDLMKL

SEQ ID NO: 1402 - protein, 1379 aa, unidentified; identical to SEQ ID NO: 1361
  REGION 1..1379: note = Description of Unknown: uncultivated organism with predicted taxonomy: Phascolarctobacterium succinatutens
  REGION 1..1379: note = MG18-50 effector

SEQ ID NO: 1403 - protein, 1275 aa, unidentified
  REGION 1..1275: note = Description of Unknown: uncultivated organism with predicted taxonomy: Phascolarctobacterium succinatutens
  REGION 1..1275: note = MG18-51 effector
MHKLKNCDYYIGLDMGDASVGWAVTDTNYNILKFNGKALWGIRLFDSANTAASTRVFRSGRRRIDRTTWRLKMLQELFAEEIAKVDPGFFMRLEDSRLHLDDKRDKAVYNLFVDKNYTDKDFYQQYPTMYHLRYALATQAGPFDVRLLYLAVQHIAKHRGHFLFDNLDASKVNDFNAVFSEVENYVRDEMGIEDWSSQNIDELAKVLCDVNLGRTTKQKAMQSLLPAQTKQQKAIIQLFSGGKAKLAELFVDEELDECEKKSVSFQDDDLNEFEPVLTAALGERYEGLLRFKAIYDWSLLAKILHLDTSKKDEDEQHLLSECKVQVYEDHKRDLAVLKSMLKGKPLYNKIFRQDGDISYEKYAKGIKGRNQIDFCKDLKKQLEGIAEYKKIMQEITNIDDAKTEEERLLFRITNGFAFPKQTTKDNGIIPIQVHLAELKCILDNAEGYLPFLGETDNNGLSVREKIEQIVKFRIPYYVGPLAGTRMSREQGRCWVVRKHEKIYPWNFTEIVNLEESAEKFITNMTAKCTYLVGEDVLPKESLLYSEFMVRNAINNITVDGERLPVDVLEKIFKQLFLAKTSKVTKKTLERFFRQENISFQNIGGIDDKINASMKSYNDFRRIFGEDYIQLHRDEIENIIRWITLFCDEKKMLVTKIKNTYPQIADDQIKAIKKLKYKDWGRLSATLLNSSAIAYEDKAFGELVTIISALRHTNKNFMELLSSYCSYDFIGKIKEFNGSRQSSNGKLTYKDVEELYVSPSVKRSIWQTLTILEEIKKIMGREPKRIFIEMARSKEESKRTDSRLKKLQDLYKKCREENIDFMPRKDEFNALKTQLSSKKEEDLRSDKLYLYYTQMGRCMYTGERIELASLDDNNLYDIDHIYPRSKTKDDSLSNRVLVKKEVNAAKTDIYPLDAVIRTKMHSFWKLLYDKGFIDERKYERLTRSTQLRDEELAGFISRQLVETRQSTKAVAAILKTAYKHSEIVYVKAGNVSDFRQKFEFVKCRDVNDLHHAKDAYLNIVVGNCYHVKFTANPLNFITKNQDNRRYSLKPEIFYKFSIKRDSEIAWIGGKDGTITTVTKTMHKNNILFTRQPVEGKGELFKQQPLKAKSGQLPLKAGLSVEKYGGYDSLTTAYFALVKSEGKKGAVQLSIEGIPLVYAKQGEIAVQKYLTEVVQLCKPEIILPKIKKYSLFKINGFPMHISGRQLKQLQFYVASQLCIDEYSIAYLKKAFKYENNLAVNDEIIADKNADEEKKQKARKRLDFYEKTWGIGKENNMR

SEQ ID NO: 1404 - protein, 1379 aa, unidentified
  REGION 1..1379: note = Description of Unknown: uncultivated organism with predicted taxonomy: Phascolarctobacterium succinatutens
  REGION 1..1379: note = MG18-52 effector
MQKLKNCDYYIGLDMGDASVGWAVTDTNYNILKFNGKALWGIRLFDSANTAASTRVFRSGRRRIDRTTWRLKMLQELFAEEIAKVDPGFFMRLEDSRLHLDDKRDKAVYNLFVDKNYTDKDFYQQYPTMYHLRYALATQAGPFDVRLLYLAVQHIAKHRGHFLFDNLDASKVNDFNAVFSEVENYVRDEMGIEDWSCQNIDELAKVLCDVNLGRTTKQKAMQSLLPAQTKQQKAIIQLFSGGKAKLAELFVDEELDECEKKSVSFQDDDLNEFEPVLTAALGERYEGLLRFKAIYDWSLLAKILHLDTSKKDEDEQHLLSECKVQVYEDHKRDLAVLKSMLKGKPLYNKIFRQDGDISYEKYAKGIKGRNQIDFCKDLKKQLEGIAEYKKIMQEITNIDDAKTEEERLLFRITNGFAFPKQTTKDNGIIPIQVHLAELKCILDNAEGYLPFLGETDNNGLSVREKIEQIVKFRIPYYVGPLAGTRMSREQGRCWVVRKHEKIYPWKFTEIVNLEESAEKFITNMTAKCTYLVGEDVLPKESLLYSEFMVRNAINNITVDGERLPVDVLEKIFKQLFLAKTSKVTKKTLERFFRQENISFQNIGGIDDKINASMKSYNDFRRIFGEDYIQLHRDEIENIIRWITLFCDEKKMLVTKIKNTYPQISDDEIKAIKKLKYKDWGRLSATLLNSSTIAYEDKAFGELVTIISALRHTNKNFMELLSSYCYYDFIGKIKEFNGSRQSSNGKLTYKDVEELYVSPSVKRSIWQTLTILEEIKKIMGCEPKRIFIEMARSKEESKRTDSRLKKLQDLYKKCREENIDFMPRKDEFNALKTQLSSKKEENLRSDKLYLYYTQMGRCMYTGERIELASLYDNNLYDIDHIYPRSKTKDDSLSNRVLVKKQVNAAKTDTYPLDAAIRTKMHSFWKLLYDKGFIDERKYERLTRSTQLRDEELAGFISRQLVETRQSTKAVAAILKTAYQNSEVVYVKAGNVSDFRQQFKFVKCREVNDLHHAKDAYLNIVVGNCYHVKFTANPLNFITKNQDNRRYSLKPEIFYKFSIKRDGEIAWLGGEDGTMATVARTMHKNNILFTRQAVEGKGELFDQQPLKAKGGQLPLKAGLSIEKYGGYNSLTTAYFAVVKSEGKKGAVQLSIEAIPLVYAKQGEIAVQKYLTEVVQLCKPEIMLPKIKKYSLFKINGFPMHISGRTGKQLIFYGAGQLCIADDVADYLKKALMYETNIAEKEKTLADQNADDIQKQKAQKGLDFYEQKWGISGAVNVQLYDMFIAKSANNLYKNRPVSQTITLKEKREHFVKLTVSKQIHIIKEILNLFKCASASADFKLIDKGTSCGTLKISNNINKLKECILINQSPTGVFEQEVDLMKL

SEQ ID NO: 1405 - protein, 1379 aa, unidentified
  REGION 1..1379: note = Description of Unknown: uncultivated organism with predicted taxonomy: Firmicutes
  REGION 1..1379: note = MG18-53 effector
MQKLQNKDYYIGLDMGDASVGWAVTDANYNILKVNGKALWGIRLFDSANTAASTRVFRSGRRRIDRTTWRLKMLQELFADEIAKVDPGFFMRLEDSRLHLDDKRDKAVYNLFVDKNYTDKDFYQQYPTMYHLRYALATQAGPFDVRLLYLAVQHIAKHRGHFLFDNLDASKVNDFNAVFSEVENYVRDEMGIEDWSCQNIDELAKVLCDVNLGRTTKQKAMQSLLPAQTKQQKAIIQLFSGGKAKLAELFVDEELDECEKKSVSFQDDDLNEFEPVLTAALGERYEGLLRFKAIYDWSLLAKILHLDTSKKDEDEQHLLSECKVQVYEDHKRDLAVLKSMLKGKPLYNKIFRQDGDISYEKYAKGIKGRNQIDFCKDLKKQLEGIAEYKKIMQEITSIDDAKTEEERLLFRITNGFAFPKQTTKDNGIIPIQVHLAELKCILDNAEGYLPFLGETDNNGLSVREKIEQIVKFRIPYYVGPLAGTRMSREQGRCWVVRKNEKIYPWNFTEIVNLEESAEKFITNMTAKCTYLVGEDVLPKESLLYSEFMVRNAINNITVDGERLPVDVLEKIFKQLFLAKTSKVTKKTLERFFRQENISFQNIGGIDDKINASMKSYNDFRRIFGEDYIQLHRDEIENIIRWITLFCDEKKMLVTKIKNTYPQIADDQIKAIKKLKYKDWGRLSATLLNSSAIAYEDKAFGELVTIISALRHTNKNFMELLSSYCSYDFIGKIKVFNGSRQSSNGKLTYKDVEELYVSPSVKRSIWQTLTILEEIKKIMGCEPKRIFIEMARSKEESKRTDSRLKKLQDLYKKCREENIDFMPRKDEFNALKTQLSSKKEEDLRSDKLYLYYTQMGRCMYTGERIELASLYDNNLYDIDHIYPRSKTKDDSLSNRVLVKKQVNAAKTDIYPLDAAIRTKMHSFWKLLYDKGFIDERKYERLTRNTQLGDEELAGFISRQLVETRQSTKAVAAILKTAYQNSEVVYVKAGNVSDFRQQFKFVKCRDVNDLHHAKDAYLNIVVGNCYHVKFTANPLNFITKNQDNRRYSLKPEIFYKFSIKRDSEIAWIGGKDGTITTVTKTMHKNNILFTRQPVEGKGELFKQNPLKAKNGQLPLKAGLSVEKYGGYNSLSTAYFAVVKSEGKKGAVQLSIEAIPLVYAKQGEEAVQDYLTEVVQLCNPEIRIPKIKKYSLLKINGFPMHISGKTVKQIIFYAAGQLCLADDVADYLKKALKYEVYIALNEGLISDKNADDTQKQKAQQRLDYFKQKWGISSDANMKIYDILLAKSANNLYKNRPASQTKDLQEQRCVFEKLSLAEQIHIIGEVLNLFKCASASANLKLLGKGNSCGVIKTSNNITKCKQCILINQSPTGVFEQEVDLMKL

SEQ ID NO: 1406 - protein, 1379 aa, unidentified
  REGION 1..1379: note = Description of Unknown: uncultivated organism with predicted taxonomy: Phascolarctobacterium
  REGION 1..1379: note = MG18-54 effector
MQKLKNCDYYIGLDMGDASVGWAVTDTNYNILKFNGKALWGIRLFDSANTAASTRVFRSGRRRIDRTTWRLKMLQELFAEEIAKVDPGFFMRLEDSRLQLDDKREKAVYNLFVDKNYTDKEFYQQYPTMYHLRYALATQKGHFDVRLLYLAVQHIAKHRGHFLFDNLDASKVNDFNAVFSEVENYVRDEMGIEDWSCQNVDELAKVLCDVNLGRTIKQKAMQSLLPAQTKQQKAIIQLFSGGKAKLAELFLDEELDECEKKSVSFQDDDLDELEPVLTAALGERYEGLLRFKAIYDWNLLAKILHLDAEKKDDSEQHLLSECKVQVYEEHKRDLTVLKSMLKGKPLYNKIFRQDGDISYEKYAKGIKGRNQIDFCKDLKKQLEGIAEYKKIMQEITSIDDAKTEEERLLFRIANGFAFPKQTTKDNGIIPIQVHLAELKCILDNAESYLPFLGETDNNGLSVREKIEQIVKFRIPYYVGPLAGTRMSREQGRCWVVRKNEKIYPWNFTEIVNLEESAEKFITNMTAKCTYLVGEDVLPKESLLYSEFMVRNAINNITVDGERLPVDVLEKIFKQLFLAKTSKVTKKTLERFFRQENISFQNIGGIDNKINASMKSYNDFRRIFGEDYIQLHRDEIENIIRWITLFCDEKKMLATKIRNTYPQISDDKIKAIKKLKYKDWGRLSATLLNSSAIAYEDKGFGELVTIISALRHTNKNFMELLSSYCSYDFIGKIKEYNSGRQNSNSKLTYKDVEELYVSPSVKRSIWQTLTILEEIKKITGHEPKRIFIEMARSKEESKRTDSRLKKLQDLYKQCKEENIDFMPHTDELNAFKIQLSSKKEDDLRSDKLYLYYTQMGRCMYTGERIEIASLYDDNLYDIDHIYPRSKTKDDSLSNRVLVKKEVNAAKTDIYPLDAAIRTKMHTFWKLLYDKGFIDERKYERLIRSKQLRDEELAGFISRQLVETRQSTKAVATILKTAYKHSEIVYVKAGNVSDFRQKFEFVKCRDVNDLHHAKNAYLNIVVGNCYYVKFTAKPLDFIKKNQDNRSYSLKPEIFYKFSIKRDSEIAWVGGKDGTITTVTKTIHKNNILFTRQPVEGKGELFKQNPLKANSGQLPLKAGLSVEKYGGYDSLTTAYFALVKSEGKKGAVQLSIEAIPLVYAKQGENAVQKYLTDVVQLCKPEIKIPKIKKYSLFKINGFPMHIYGRTGNRLVFYGAGQLCISENETVYLKRALKYRDSIEKNENIITAKDTDDKQKEKAQKRLDFYKQTWGISREANMRIYDILLAKSGNNLYKNRPASQTKDLQEQRGTFEKLPLSKQIYVIGEFLNLFKCASTSADFKLLGKGNSCGVIKTTNNVTKCKQCVLINQSPTGVFEQEVDLMKL

SEQ ID NO: 1407 - protein, 1379 aa, unidentified
  REGION 1..1379: note = Description of Unknown: uncultivated organism with predicted taxonomy: Phascolarctobacterium
  REGION 1..1379: note = MG18-55 effector
MQKLQNKDYYIGLDMGDASVGWAVTDANYNILKFNGKALWGIRLFDSANTAASTRVFRSGRRRIDRTTWRLKMLQELFAEEIAKVDPGFFMRLEDSRLHLDDKRDKAVYNLFVDKNYTDKDFYQQYPTMYHLRYALATQAGPFDVRLLYLAVQHIAKHRGHFLFDNLDASKVNDFNAVFSEVENYVRDEMGIEDWSCQNIDELAKVLCDVNLGRTTKQKAMQSLLPAQTKQQKAIIQLFSGGKAKLAELFVDEELDECEKKSVSFQDDDLNEFEPVLTAALGERYEGLLRFKAIYDWSLLAKILHLDTSKKDEDEQHLLSECKVQVYEDHKRDLAVLKSMLKGKPLYNKIFRQDGDISYEKYAKGIKGRNQLDFCKDLKKQLDGIAEYKKIMQEITSIDAAGTEEERLLFRIANGFAFPKQTTKDNGIIPIQVHLAELKCILDNAEGYLQFLGETDNNGLSVREKIEQIVKFRIPYYVGPLAGTRMSREQGRCWVVRKNEKIYPWNFTQVVNLEESAEKFITNMTAKCTYLVGEDVLPKESLLYSEFMVRNAINNITVDGERLPVDVLEKIFKQLFLAKTSKVTKKTLERFFRQENISFQNIGGIDDKINASMKSYNDFRRIFGEDYIQLHRDEIENIIRWITLFCDEKMMLVTKIKNTYPQIADDQIKAIKKLKYKDWGRLSATLLNSSAIAYEDKAFGELVTIISALRHTNKNFMELLSSYCSYDFIGKIKEFNGSRQSSNGKLTYKDVEELYVSPSVKRSIWQTLTILEEIKKIMGCEPKRIFIEMARSKEESKRTDSRLKKLQDLYKKCREENIDFMPRKDEFNTLKTQLSSKKEDDLRIDKLYLYYTQMGRCMYTGEKIELASLYDNNLYDIDHIYPRSKTKDDSLSNRVLVKKQVNAAKTDTYPLDAAIRTKMHSFWKLLYDKGFIDERKYQRLTRSTQLRDEELAGFISRQLVETRQSTKAVAAILKTAYQNSEVVYVKAGNVSDFRQQFKFVKCREVNDLHHAKDAYLNIVVGNCYHVKFTANPLNFITKNQDNRRYSLKPEIFYKFSIKRDGEIAWLGGEDGTMATVARTMHKNNILFTRQAVEGKGELFDQQPLKAKGGQLPLKAGLSIEKYGGYNSLTTAYFAVVKSEGKKGAVQLSIEAIPLVYAKQGEIAVQKYLTEVVQLCKPEIMLPKIKKYSLFKINGFPMHISGRQLKQLQFYVASQLCIDEYSIAYLKKAFKYENNLAVNDEIIADKNADEEKKQKARKRLDFYEKTWGIGKENNMRIYDILLAKSANNLYKKRPASQSATLEKRRENFKGLFVSKQIHVLKEILNLFKCLSATADLQLLGAGKNVGKVTWNTNISSVKQCILINQSPTGIFEQEVDLMKL

SEQ ID NO: 1408 - protein, 1379 aa, unidentified
  REGION 1..1379: note = Description of Unknown: uncultivated organism with predicted taxonomy: Phascolarctobacterium succinatutens
  REGION 1..1379: note = MG18-56 effector
MQKLQNKDYYIGLDMGDASVGWAVTDANYNILKFNGKALWGIRLFDSANTAASTRVFRSGRRRIDRTTWRLKMLQELFAEEIAKVDPGFFMRLEDSRLHLDDKRDKAVYNLFVDKNYTDKDFYQQYPTMYHLRYALATQAGPFDVRLLYLAVQHIAKHRGHFLFDNLDASKVNDFNAVFSEVENYVRDEMGIEDWSCQNIDELAKVLCDVNLGRTTKQKAMQSLLPAQTKQQKAIIQLFSGGKAKLAELFVDEELDECEKKSVSFQDDDLNEFEPVLTAALGERYEGLLRFKAIYDWSLLAKILHLDTSKKDEDEQHLLSECKVQVYEDHKRDLAVLKSMLKGKPLYNKIFRQDGDISYEKYAKGIKGRNQLDFCKDLKKQLDGIAEYKKIMQEITSIDAAGTEEERLLFRIANGFAFPKQTTKDNGIIPIQVHLAELKCILDNAEGYLQFLGETDNNGLSVREKIEQIVKFRIPYYVGPLAGTRMSREQGRCWVVRKNEKIYPWNFTQVVNLEESAEKFITNMTAKCTYLVGEDVLPKESLLYSEFMVRNAINNITVDGERLPVDVLEKIFKQLFLAKTSKVTKKTLERFFRQENISFQNIGGIDDKINASMKSYNDFRRIFGEDYIQLHRDEIENIIRWITLFCDEKKMLVTKIKNTYPQIADDQIKAIKKLKYKDWGRLSATLLNSSAIAYEDKAFGELVTIISALRHTNKNFMELLSSYCSYDFIGKIKEFNGSRQSSNGKLTYKDVEELYVSPSVKRSIWQTLTILEEIKKIMGCEPKRIFIEMARSKEESKRTDSRLKKLQDLYKKCREENIDFMPRKDEFNTLKTQLNSKKEDDLRSDKLYLYYTQMGRCMYTGEKIELASLYDNNLYDIDHIYPRSKTKDDSLSNRVLVKKQVNAAKTDTYPLDAAIRTKMHSFWKLLYDKGFIDERKYQRLTRSTQLRDEELAGFISRQLVETRQSTKAVATILKTAYQNSEVVYVKAGNVSDFRQQFKFVKCREVNDLHHAKDAYLNIVVGNCYHVKFTANPLNFITKNQDNRRYSLKPEIFYKFSIKRDGEIAWLGGEDGTMATVARTMHKNNILFTRQAVEGKGELFDQQPLKAKGGQLPLKAGLSIEKYGGYNSLTTAYFAVVKSEGKKGAVQLSIEAIPLVYAKQGEIAVQKYLTEVVQLCKPEIMLPKIKKYSLFKINGFPMHISGRTGNRMLFYGAGQLCLDEADVDYLKKALKYENDIAENELVIADKNSDDIQKQQAQKNLDYYNQKWRIGRKVNMHIYDMLLAKSGNNLYKNRPASQTTDLQEQREFFEKLSLANQIHVIGEVLKLFKCASASANLKLLDKGNACGVIKVSNNILKFKQCVLINQSPTGVFEQEVDLMKL

SEQ ID NO: 1409 - protein, 1379 aa, unidentified
  REGION 1..1379: note = Description of Unknown: uncultivated organism with predicted taxonomy: Phascolarctobacterium succinatutens
  REGION 1..1379: note = MG18-57 effector
MQKLKNCDYYIGLDMGDASVGWAVTDTNYNILKFNGKALWGIRLFDSANTAASTRVFRSGRRRIDRTTWRLKMLQELFAEEIAKVDPGFFMRLEDSRLHLDDKRDKAVYNLFVDKNYTDKDFYQQYPTMYHLRYALATQTGPIDVRLLYLAVQHIAKHRGHFLFDNLDASKVNDFNAVFSEVENYVRDEMGIEDWSCQNIDELAKVLCDVNLGRTTKQKAMQSLLPAQTKQQKAIIQLFSGGKAKLAELFVDEELDECEKKSVSFQDDDLNEFEPVLTAALGERYEGLLRFKAIYDWSLLAKILHLDTSKKDEDEQHLLSECKVQVYEEHKRDLAVLKSMLKGKPLYNKIFRQDGDISYEKYAKGIKGRNQIDFCKDLKKQLEGIAEYKKIMQEITSIDDAKTEEERLLFRITNGFAFPKQTTKDNGIIPIQVHLAELKCILDNAEGYLPFLGETDNNGLSVREKIEQIVKFRIPYYVGPLAGTRMSREQGRCWVVRKNEKIYPWNFTEIVNLEDSAEKFITNMTAKCTYLVGEDVLPKESLLYSEFMVRNAINNITVDGERLPVDVLEKIFKQLFLAKTSKVTKKTLERFFRQENISFQNIGGIDDKINASMKSYNDFRRIFGEDYIQLHRDEIENIIRWITLFCDEKKMLVTKIKNTYPQISDDEIKAIKKLKYKDWGRLSATLLNSSTIAYEDKAFGELVTIISALRHTNKNFMELLSSYCSYDFIGKIKEFNGRRQSSNGKLTYKDVEELYVSPSVKRSIWQTLTILEEIKKIMGCEPKRIFIEMARSKEESKRTDSRLKKLHDLYKKCREENIDFMPRKDEFNALKTQLSSKKEENLRSDKLYLYYTQMGRCMYTGERIELASLHDNNLYDIDHIYPRSKTKDDSLSNRVLVKKQINAAKTDTYPLDAAIRTKMHSFWKLLYDKGFIDERKYERLTRSTQLRDEELAGFISRQLVETRQSTKAVAAILKTAYQNSEVVYVKAGNVSDFRQQFKFVKCREVNDLHHAKDAYLNIVVGNCYHVKFTANPLNFITKNQDNRRYSLKPEIFYKFSIKRDGEIAWLGGEDGTMATVARTMHKNNILFTRQAVEGKGELFDQQPLKAKGGQLPLKAGLSIEKYGGYNSLTTAYFAVVKSEGKKGAVQLSIEAIPLVYAKQGEIAVQKYLTEVVQLCKPEIMLPKIKKYSLFKINGFPMHISGRTGNRMLFYGAGQLCLDEADVDYLKKALKYENDIAENELVIADKNSDDIQKQQAQKNLDYYNQKWRIGRKVNMHIYDMLLAKSGNNLYKNRPASQTTDLQEQREFFEKLSLANQIHVIGEVLKLFKCASASANLKLLDKGNACGVIKVSNNILKFKQCVLINQSPTGVFEQEVDLMKL

SEQ ID NO: 1410 - protein, 1379 aa, unidentified
  REGION 1..1379: note = Description of Unknown: uncultivated organism with predicted taxonomy: Phascolarctobacterium succinatutens
  REGION 1..1379: note = MG18-58 effector
MQKLKNCDYYIGLDMGDASVGWAVTDTNYNILKFNGKALWGIRLFDSANTAASTRVFRSGRRRIDRTTWRLKMLQELFAEEIAKVDPGFFMRLEDSRLHLDDKRDKAVYNLFVDKNYTDKDFYQQYPTMYHLRYALAMQAGPFDVRLLYLAVQHIAKHRGHFFFDNLDASKVNDFNAVFSEVENYVRDEMGIEDWSCQNIDELAKVLCDVNLGRTTKQKAMQSLLPAQTKQQKAIIQLFSGGKAKLAELFVDEELDECEKKSVSFQDDDLNEFEPVLTAALGERYEGLLRFKAIYDWSLLAKILHLDTSKKDEDEQHLLSECKVQVYEDHKRDLAVLKSMLKGKPLYNKIFRQDGDISYEKYAKGIKGRNQIDFCKDLKKQLEGIAEYKKIMQEITSIDDAKTEEERLLFRITNGFAFPKQTTKDNGIIPIQVHLAELKCILDNAEGYLPFLGETDNNGLSVREKIEQIVKFRIPYYVGPLAGTRMSREQGRCWVVRKNEKIYPWNFTEIVNLEESAEKFITNMTAKCTYLVGEDVLPKESLLYSEFMVRNAINNITVDGERLPVDVLEKIFKQLFLAKTSKVTKKTLERFFRQENISFQNIGGIDDKINASMKSYNDFRRIFGEDYIQLHRDEIENIIRWITLFCDEKKMLVTKIKNTYPQISDDEIKAIKKLKYKDWGRLSATLLNSSTIAYEDKAFGELVTIISALRHTNKNFMELLSSYCSYDFIGKIKEFNGSRQSSNGKLTYKDVEELYVSPSVKRSIWQTLTILEEIKKIMGCEPKRIFIEMARSKEESKRTDSRLKKLQDLYKKCREENIDFMPRKDEFNALKTQLSSKKEEDLRSDKLYLYYTQMGRCMYTGERIELASLHDNNLYDIDHIYPRSKTKDDSLSNRVLVKKQVNAAKTDIYPLDAAIRTKMHSFWKLLYDKGFIDERKYERLTRSTQLRDEELAGFISRQLVETRQSTKAVAAILKTAYQNSEVVYVKAGNVSDFRQQFKFVKCREVNDLHHAKDAYLNIVVGNCHHVKFTANPLNFITKNQDNRRYSLKPEIFYKFSIKRDGEIAWLGGEDGTMATVARTMHKNNILFTRQAVEGKGELFDQQPLKAKGGQLPLKAGLSIEKYGGYNSLTTAYFAVVKSEGKKGAVQLSIEAIPLVYAKQGEIAVQKYLTEVVQLCKPEIMLPKIKKYSLFKINGFPMHISGRTGNRMLFYGAGQLCLDEADVDYLKKALKYENDIAENELVIADKNSDDIQKQQAQKNLDYYNQKWRIGRKVNMHIYDMLLAKSGNNLYKNRPASQTTDLQEQREFFEKLSLANQIHVIGEVLKLFKCASASANLKLLDKGNACGVIKVSNNILKFKQCVLINQSPTGVFEQEVDLMKL

SEQ ID NO: 1411 - protein, 1379 aa, unidentified; identical to SEQ ID NO: 1405
  REGION 1..1379: note = Description of Unknown: uncultivated organism with predicted taxonomy: Phascolarctobacterium succinatutens
  REGION 1..1379: note = MG18-59 effector

SEQ ID NO: 1412 - protein, 1345 aa, unidentified
  REGION 1..1345: note = Description of Unknown: uncultivated organism
  REGION 1..1345: note = MG18-60 effector
NGKALWGIRLFDSANTAASTRVFRSGRRRIDRTTWRLKMLQELFAEEIAKVDPGFFMRLEDSRLHLDDKRDKAVYNLFVDKNYTDKDFYQQYPTMYHLRYALATQAGPFDVRLLYLAVQHIAKHRGHFLFDNLDASKVNDFNAVFSEVENYVRDEMGIEDWSCQNIDELAKVLCDVNLGRTTKQKAMQSLLPAQTKQQKAIIQLFSGGKAKLAELFVDAELDECEKKSVSFQDDDLNEFEPVLTAALGERYEGLLRFKAIYDWSLLAKILHLDTSKKDEDEQHLLSECKVQVYEDHKRDLAVLKSMLKGKPLYNKIFRQDGDISYEKYAKGIKGRNQIDFCKDLKKQLEGIAEYKKIMQEITSIDDAKTEEERLLFRITNGFAFPKQTTKDNGIIPIQVHLAELKCILDNAEGYLPFLGETDNNGLSVREKIEQIVKFIIPYYVGPLAGTRMSREQGRCWVVRKNEKIYPWNFTEIVNLEESAEKFITNMTAKCTYLVGEDVLPKESLLYSEFMVRNAINNITVDGERLPVDVLEKIFKQLFLAKTSKVTKKTLERFFRQENISFQNIGGIDDKINASMKSYNDFRRIFGEDYIQLHRDEIENIIRWITLFCDEKKMLVTKIKNTYPQISDDEIKAIKKLKYKDWGRLSATLLNSSAIAYEDKAFGELVTIISALRHTNKNFMELLSSYCSYDFIGKIKEFNGSRQSSNGKLTYKDVEELYVSPSVKRSIWQTLTILEEIKKIMGCEPKRIFIEMARSKEESKRTDSRLKKLQDLYKKCREENIDFMPRKDEFNTLKTQLSSKKEDDLRSDKLYLYYTQMGRCMYTGEKIELASLYDNNLYDIDHIYPRSKTKDDSLSNRVLVKKQVNAAKTDTYPLDAAIRTKMHSFWKLLYDKGFIDERKYQRLTRSTQLRDEELAGFISRQLVETRQSTKAVAAILKTAYQNSEVVYVKAGNVSDFRQQFKFVKCREVNDLHHAKDAYLNIVVGNCYHVKFTANPLNFITKNQDNRRYSLKPEIFYKFSIKRDGEIAWLGGEDGTMATVARTMHKNNILFTRQAVEGKGELFDQQPLKAKGGQLPLKAGLSIEKYGGYNSLTTAYFAVVKSEGKKGAVQLSIEAIPLVYAKQGEIAVQKYLTEVVQLCKPEIMLPKIKKYSLFKINGFPMHISGRTGNRMLFYGAGQLCLDEADVDYLKKALKYENDIAENELVIADKNSDDIQKQQAQKNLDYYNQKWRIGRKVNMHIYDMLLAKSGNNLYKNRPASQTTDLQEQREFFEKLSLANQIHVIGEVLKLFKCASASANLKLLDKGNACGVIKVSNNILKFKQCVLINQSPTGVFEQEVDLMKL

SEQ ID NO: 1413 - protein, 1259 aa, unidentified
  REGION 1..1259: note = Description of Unknown: uncultivated organism with predicted taxonomy: Phascolarctobacterium succinatutens
  REGION 1..1259: note = MG18-61 effector
MLQELFAEEIAKVDPGFFMPLEDSRLHLDDKRDKAVYNLFVDKNYTDKDFYQQYPTMYHLRYALATQAGPFDVRLLYLAVQHIAKHRGHFLFDNLDASKVNDFNAVFSEVENYVRDEMGIEDWSCQNIDELAKVLCDVNLGRTTKQKAMQSLLPAQTKQQKAIIQLFSGGKAKLAELFVDEELDECEKKSVSFQDDDLNEFEPVLTAALGERYEGLLRFKAIYDWSLLAKILHLDTSKKDEDEQHLLSECKVQVYEDHKRDLAVLKSMLKGKPLYNKIFRQDGDISYEKYAKGIKGRNQIDFCKDLKKQLEGIAEYKKIMQEITNIDDAKTEEERLLFRITNGFAFPKQTTKDNGIIPIQVHLAELKCILDNAEGYLPFLGETDNNGLSVREKIEQIVKFRIPYYVGPLAGTRMSREQGRCWVVRKHEKIYPWNFTEIVNLEESAEKFITNMTAKCTYLVGEDVLPKESLLYSEFMVRNAINNITVDGERLPVDVLEKIFKQLFLAKTSKVTKKTLERFFRQENISFQNIGGIDDKINASMKSYNDFRRIFGEDYIQLHRDEIENIIRWITLFCDEKKMLVTKIKNTYPQISDDEIKAIKKLKYKDWGRLSATLLNSSTIAYEDKAFGELVTIISALRHTNKNFMELLSSYCYYDFIGKIKEFNGSRQSSNGKLTYKDVEELYVSPSVKRSIWQTLTILEKIKKIMGCEPKRIFIEMARSKEESKRTDSRLKKLQDLYKKCREENIDFMPRKDEFNALKTQLSSKKEENLRSDKLYLYYTQMGRCMYTGERIELASLYDNNLYDIDHIYPRSKTKDDSLSNRVLVKKQVNAAKTDTYPLDAAIRTKMHSFWKLLYDKGFIDERKYERLTRSTQLRDEELAGFISRQLVETRQSTKAVAAILKTAYQNSEVVYVKAGNVSDFRQQFKFVKCRELNDLHHAKDAYLNIVVGNCYHVKFTANPLNFITKNQDNRRYSLKPEIFYKFSIKRDGEIAWLGGEDGTMATVARTMHKNNILFTRQAVEGKGELFDQQPLKAKGGQLPLKAGLSIEKYGGYNSLTTAYFAVVKSEGKKGAVQLSIEAIPLVYAKQGEIAVQKYLTEVVQLCKPEIMLPKIKKYSLFKINGFPMHISGRTGNRMLFYGAGQLCLDEADVDYLKKALKYENDIAENELVIADKNSDDIQKQQAQKNLDYYNQKWRIGRKVNMHIYDMLLAKSGNNLYKNRPASQTTDLQEQREFFEKLSLANQIHVIGEVLKLFKCASA

SEQ ID NO: 1414 - protein, 1379 aa, unidentified
  REGION 1..1379: note = Description of Unknown: uncultivated organism with predicted taxonomy: Phascolarctobacterium succinatutens
  REGION 1..1379: note = MG18-62 effector
MQKSKNCDYYIGLDMGDASVGWAVTDTNYNILKFNGKALWGIRLFDSANTAASTRVFRSGRRRIDRTTWRLKMLQELFAEEIAKVDPGFFMRLEDSRLHLDDKRDKAVYNLFVDKNYTDKDFYQQYPTMYHLRYALATQAVPFDVRLLYLAVQHIAKHRGHFLFDNLDASKVNDFNAVFSEVENYVRDEMGIEDWSCQNIDELAKVLCDVNLGRTTKQKAMQSLLPAQTKQQKAIIQLFSGGKAKLAELFVDEELDECEKNSVSFQDDDLNEFEPVLTAALGERYEGLLRFKAIYDWSLLAKILHLDTSKKDEDEQHLLSECKVQVYEDHKRDLAVLKSMLKGKPLYNKIFRQDGDISYEKYAKGIKGRNQIDFCKDLKKQLEGIAEYKKIMQEITNIDDAKTEEERLLFRITNGFAFPKQTTKDNGIIPIQVHLAELKCILDNAEGYLPFLGETDNNGLSVREKIEQIVKFRIPYYVGPLAGTRMSREQGRCWVVRKHEKIYPWNFTEIVNLEESAEKFITNMTAKCTYLVGEDVLPKESLLYSEFMVRNAINNITVDGERLPVDVLEKIFKQLFLAKTSKVTKKTLERFFRQENISFQNIGGIDDKINASMKSYNDFRRIFGEDYIQLHRDEIENIIRWITLFCDEKKMLVTKIKNTYPQISDDEIKAIKKLKYKDWGRLSATLLNSSTIAYEDKAFGELVTIISALRHTNKNFMELLSSYCYYDFIGKIKEFNGSRQSSNGKLTYKDVEELYVSPSVKRSIWQTLTILEEIKKIMGCEPKRIFIEMARSKEESKRTDSRLKKLQDLYKKCREENIDFMPRKDEFNALKTQLSSKKEENLRSDKLYLYYTQMGRCMYTGERIELASLYDNNLYDIDHIYPRSKTKDDSLSNRVLVKKQVNAAKTDTYPLDAAIRIKMHSFWKLLYDKGFIDERKYERLTRSTQLRDEELAGFISRQLVETRQSTKAVATILKTAYKHSEVVYVKAGNVSDFRQQFKFVKCREVNDLHHAKDAYLNIVVGNCYYVKFTANPLNFIKKNQDSRSYSLKPEIFYKFNIKRDDDIAWLGGEDGTMATVARTMHKNNILFTRQPLEGKGELFKQNPLKAKSGQLPLKAGLSVEKYGGYDSLTTAYFALVKSEGKKGSVQLSIEGIPLVYAKQGEKAVQDYLTEVVQLCKPEIKIPKIKKYSLFKINGFPMHISGRTGTQLVFYGAGQLCIADDVADYLKKALKYETDIAEKEKTLADQNADDIQKQKAQKGLDFYEQKWGISGAVNVQLYDMFIAKSANNLYKNRPASQTITLKEKREHFVKLTLSKQIHIIKEILNLFKCASASADFKLIDKGTSCGTLKISNNITKLKECILINQSPTGVFEQEVDLMKL

SEQ ID NO: 1415 - protein, 1379 aa, unidentified
  REGION 1..1379: note = Description of Unknown: uncultivated organism
  REGION 1..1379: note = MG18-63 effector
MQKLKNCDYYIGLDMGDASVGWAVTDTNYNILKFNGKALWGIRLFDSANTAASTRVFRSGRRRIDRTTWRLKMLQELFAEEIAKVDPGFFMRLEDSRLQLDDKREKAVYNLFVDKSYTDKEFYQQYPTMYHLRYALATQKGPFDVRLLYLAVQHIAKHRGHFLFDNLDASKVNDFNAVFSEVENYVRDEMGIEDWSCQNIDELAKVLCDVNLGRTTKQKAMQSLLPAQTKQQKAIIQLFSGGKAKLAELFVDEELDECEKKSVSFQDDDLNEFEPVLTAALGERYEGLLRFKAIYDWSLLAKILHLDTSKKDEDEQHLLSECKVQVYEDHKRDLAVLKSMLKGKPLCNKIFRQDGDISYEKYAKGIKGRNQIDFCKDLKKQLEGIAEYKKIMQEITSIDDAKTEEERLLFRITNGFAFPKQTTKDNGIIPIQVHLAELKCILDNAEGYLPFLGETDNNGLSVREKIEQIVKFRIPYYVGPLAGTRMSREQGRCWVVRKHEKIYPWNFTEIVNLEESAEKFITNMTAKCTYLVGEDVLPKESLLYSEFMVRNAINNITVDGERLPVDVLEKIFKQLFLAKTSKVTKKTLERFFRQENISFQNIGGIDDKINASMKSYNDFRRIFGEDYIQLHRDEIENIIRWITLFCDEKKMLVTKIKNTYPQISDDEIKAIKKLKYKDWGRLSATLLNSSTIAYEDKAFGELVTIISALRHTNKNFMELLSSYCYYDFIGKIKEFNGSRQSSNGKPTYKDVEELYVSPSVKRSIWQTLTILEEIKKIMGCEPKRIFIEMARSKEESKRTDSRLKKLQDLYKKCREENIDFMPRKDEFNALKTQLSSKKEENLRSDKLYLYYTQMGRCMYTGERIELASLYDNNLYDIDHIYPRSKTKDDSLSNRVLVKKQVNAAKTDTYPLDAAIRTKMHSFWKLLYDKGFIDERKYERLTRSTQLRDEELAGFISRQLVETRQSTKAVAAILKTAYQNSEVVYVKAGNVSDFRQQFKFVKCREVNDLHHAKDAYLNIVVGNCYHVKFTANPLNFITKNQDNRRYSLKPEIFYKFSIKRDGEIAWLGGEDGTMATVARTMHKNNILFTRQAVEGKGELFDQQPLKAKGGQLPLKAGLSIEKYGGYNSLTTAYFAVVKSEGKKGAVQLSIEAIPLVYAKQGEIAVQKYLTEVVQLCKPEIMLPKIKKYSLFKINGFPMHISGRTGNRMLFYGAGQLCLDEADVDYLKKALKYENDIAENELVIADKNSDDIQKQQAQKNLDYYNQKWRIGRKVNMHIYDMLLAKSGNNLYKNRPASQTTDLQEQREFFEKLSLANQIHVIGEVLKLFKCASASANLKLLDKGNACGVIKVSNNILKFKQCVLINQSPTGVFEQEVDLMKL

SEQ ID NO: 1416 - protein, 1379 aa, unidentified
  REGION 1..1379: note = Description of Unknown: uncultivated organism with predicted taxonomy: Phascolarctobacterium succinatutens
  REGION 1..1379: note = MG18-64 effector
MQKLKNCDYYIGLDMGDASVGWAVTDTNYNILKFNGKALWGIRLFDSANTAASTRVFRSGRRRIDRTTWRLKMLQELFADEIAKVDTGFFMRLEDSRLQLDDKREKAVYNLFVDKSYTDKEFYQQYPTMYHLRYALATQKGPFDVRLFYLAVQHIAKHRGHFLFDNLDASKVNDFNAVFSEVENYVRDEMGIEDWSCQNIDELAKVLCDVNLGRTTKQKAMQSLLPAQTKQQKAIIQLFSGGKAKLAELFVDEELDECEKKSVSFQDDDLDEIEPVLTAALGERYEGLLRFKAIYDWSLLAKILHLDAEKKDDSEQHLLSECKVQVYEEHKRDLAVLKSMLKGKPLYNKIFRQDGDISYEKYAKGIKGCNQIDFCKDLKKQLEGIAEYKKIMQEITSIDDAKTEEERLLFRITNGFAFPKQTTKDNGIIPIQVHLAELKCILDNAEGYLPFLGETDNNGLSVREKIEQIVKFRIPYYVGPLAGTRMSREQGRCWVVRKNEKIYPWNFTEIVNLEESAEKFITNMTAKCTYLVGEDVLPKESLLYSEFMVRNAINNITVDGERLPVDVLEKIFKQLFLAKTSKVTKKTLERFFRQENISFQNIGGIDDKINASMKSYNDFRRIFGEDYIQLHRDEIENIIRWITLFCDEKKMLVTKIKNTYPQISDDEIKAIKKLKYKDWGRLSATLLNSSTIAYEDKAFGELVTIISALRHTNKNFMELLSSYCSYDFIGKIKEFNGSRQSSNGKLTYKDVEELYVSPSVKRSIWQTLTILEEIKKIMGCEPKRIFIEMARSKEESKRTDSRLKKLQYLYKKCREENIDFMPRKDEFNALKTQLSSKKEEDLRSDKLYLYYTQMGRCMYTGESIELASLYDNNLYDIDHIYPRSKTKDDSLSNRVLVQKQVNAAKTDIYPLDAAIRTKMHSFWNLLYDKGFIDERKYERLMRSTQLRDEELAGFISRQLVETRQSTKAVAAILKTAYQNSEVVYVKAGNVSDFRQQFKFVKCRDVNDLHHAKDAYLNIVVGNCYHVKFTANPLNFITKNQDNRRYSLKPEIFYKFSIKRDGEIAWLGGEDGTMATVARTMHKNNILFTRQAVEGKGELFDQQPLKAKGGQLPLKAGLSIEKYGGYNSLTTAYFAVVKSEGKKGAVQLSIEAIPLVYAKQGEIAVQKYLTEVVQLCKPEIKIPKIKKYSLFKINGFPMHISGRTGKQLVFYGAGQLCIADDVADYLKKALKYETDIAEKEKTLADQNADDIQKQKAQKGLDFYEQKWGISGAVNVQLYDMFIAKSANNLYKNRPASQTITLKEKREHFVKLTLSKQIHIIKEILNLFKCASASADFKLIDKGTSCGTLKISNNITKLKECILINQSPTGVFEQEVDLMKL

SEQ ID NO: 1417 - protein, 1379 aa, unidentified
  REGION 1..1379: note = Description of Unknown: uncultivated organism with predicted taxonomy: Firmicutes
  REGION 1..1379: note = MG18-65 effector
MQKLKNCDYYIGLDMGDASVGWAVTDTNYNILKFNGKALWGIRLFDSANTAASTRVFRSGRRRIDRTTWRLKMLQELFAEEIAKVDPGFFMRLEDSRLHLDDKRDKAVYNLFVDKNYTDKDFYQQYPTMYHLRYALATQAGPFDVRLLYLAVQHIAKHRGHFLFDNLDASKVNDFNAVFSEVENYVRDEMGIEDWSCQNIDELAKVLCDVNLGRTTKQKAMQSLLPAQTKQQKAIIQLFSGGKAKLAELFADEELDECEKKSVSFQDDDLNEFEPVLTAALGERYEGLLRFKAIYDWSLLAKILHLDTSKKDKDEQPLLSECKVQVYEDHKRDLAVLKSMLKGKPLYNKIFRQDGDISYEKYAKGIKGRNQIDFCKDLKKQLEGIAEYKKIMQEITSIDDAKTEEERLLFRITNGFAFPKQTTKDNGIIPIQVHLAELKCILDNAEGYLPFLGETDNNGLSVREKIEQIVKFIIPYYVGPLAGTRMSREQGRCWVVRKNEKIYPWNFTEIVNLEESAEKFITNMTAKCTYLVGEDVLPKESLLYSEFMVRNAINNITVDGERLPVDVLEKIFKQLFLAKTSKVTKKTLERFFRQENISFQNIGGIDDKINASMKSYNDFRRIFGEDYIQLHRDEIENIIRWITLFCDEKKMLVTKIKNTYPQISDDEIKAIKKLKYKDWGRLSATLLNSSAIAYEDKAFGELVTIISALRHTNKNFMELLSSYCSYDFIGKIKEFNGSRQSSNGKLTYKDVEELYVSPSVKRSIWQTLTILEEIKKIMGCEPKRIFIEMARSKEESKRTDSRLKKLQDLYKKCREENIDFMPRKDEFNTLKTQLSSKKEDDLRSDKLYLYYTQMGRCMYTGEKIELASLYDNNLYDIDHIYPRSKTKDDSLSNRVLVKKQVNAAKTDTYPLDAAIRTKMHSFWKLLYDKGFIDERKYQRLTRSTQLRDEELAGFISRQLVETRQSTKAVAAILKTAYQNSEVVYVKAGNVSDFRQQFKFVKCREVNDLHHAKDAYLNIVVGNCYHVKFTANPLNFITKNQDNRRYSLKPEIFYKFSIKRDGEIAWLGGEDGTMATVARTMHKNNILFTRQPLEGKGELFKQNPLKAKSGQLPLKAGLSVEKYGGYDSLTTAYFALVKSEGKKGSVQLSIEGIPLVYAKQGEKAVKDYLTEVVQLCKPEIKIPKIKKYSLFKINGFPMHISGRQGKQLIFYVAGQLCINEDSIAYLKKVFKYESDLAVNEEILADENGDEVRKQKARNRLAFYDNTWGISLEANMQLYDMLLAKSANNLYKNRPASQTSTLKEQREQFSILPLSKQIHVIKEILKLFKCASATADFKLLEKGSTCGKIQVSTNITKCKQCILINQSPTGVFEQEVDLMKL

SEQ ID NO: 1418 - protein, 1379 aa, unidentified
  REGION 1..1379: note = Description of Unknown: uncultivated organism with predicted taxonomy: Phascolarctobacterium succinatutens
  REGION 1..1379: note = MG18-66 effector
MQKLKNCDYYIGLDMGDASVGWAVTDTNYNILKFNGKALWGIRLFDSANTAASTRVFRSGRRRIDRTTWRLKMLQELFAEEIAKVDPGFFMRLEDSRLQLDDKREKAVYNLFVDKSYTDKEFYQQYPTMYHLRYALATQKGPFDVRLLYLAVQHIAKHRGHFLFDNLDASKVNDFNAVFSEVENYVRDEMGIEDWSCQNIDELAKVLCDVNLGRTTKQKAMQSLLPAQTKQQKAIIQLFSGGKAKLAELFVDEELDECEKKSVSFQDDDLNEFEPVLTAALGERYEGLLRFKAIYDWSLLAKILHLDTSKKDEDEQHLLSECKVQVYEDHKRDLAVLKSMLKGKPLCNKIFRQDGDISYEKYAKGIKGRNQIDFCKDLKKQLEGIAEYKKIMQEITSIDDAKTEEERLLFRITNGFAFPKQTTKDNGIIPIQVHLAELKCILDNAEGYLPFLGETDNNGLSVREKIEQIVKFRIPYYVGPLAGTRMSREQGRCWVVRKHEKIYPWNFTEIVNLEESAEKFITNMTAKCTYLVGEDVLPKESLLYSEFMVRNAINNITVDGERLPVDVLEKIFKQLFLAKTSKVTKKTLERFFRQENISFQNIGGIDDKINASMKSYNDFRRIFGEDYIQLHRDEIENIIRWITLFCDEKKMLVTKIKNTYSQISDDEIKAIKKLKYKDWGRLSATLLNSSTIAYEDKAFGELVTIISALRHTNKNFMELLSSYCYYDFIGKIKEFNGSRQSSNGKPTYKDVEELYVSPSVKRSIWQTLTILEEIKKIMGCEPKRIFIEMARSKEESKRTDSRLKKLQDLYKKCREENIDFMPRKDEFNALKTQLSSKKEENLRSDKLYLYYTQMGRCMYTGERIELASLYDNNLYDIDHIYPRSKTKDDSLSNRVLVKKQVNAAKTDTYPLDAAIRTKMHSFWKLLYDKGFIDERKYERLTRSTQLRDEELAGFISRQLVETRQSTKAVAAILKTAYQNSEVVYVKAGNVSDFRQQFKFVKCREVNDLHHAKDAYLNIVVGNCYHVKFTANPLNFITKNQDNRRYSLKPEIFYKFSIKRDGEIAWLGGEDGTMATVARTMHKNNILFTRQAVEGKGELFDQQPLKAKGGQLPLKAGLSIEKYGGYNSLTTAYFAVVKSEGKKGAVQLSIEAIPLVYAKQGEIAVQKYLTEVVQLCKPEIMLPKIKKYSLFKINGFPMHISGRTGNRMLFYGAGQLCLDEADVDYLKKALKYENDIAENELVIADKNSDDIQKQQAQKNLDYYNQKWRIGRKVNMHIYDMLLAKSGNNLYKNRPASQTTDLQEQREFFEKLSLANQIHVIGEVLKLFKCASASANLKLLDKGNACGVIKVSNNILKFKQCVLINQSPTGVFEQEVDLMKL

SEQ ID NO: 1419 - protein, 1379 aa, unidentified
  REGION 1..1379: note = Description of Unknown: uncultivated organism
  REGION 1..1379: note = MG18-67 effector
MQKLKNCDYYIGLDMGDASVGWAVTDTNYNILKFNGKALWGIRLFDSANTAASTRVFRSGRRRIDRTTWRLKMLQELFAEKIAKVDPGFFMRLEDSRLHLDDKRDKAVYNLFVDKNYTDKDFYQQYPTMYHLRYALATQAGPFDVRLLYLAVQHIAKHRGHFLFDNLDASKVNDFNAVFSEVENYVRDEMGIEDWSCQNIDELAKVLCDVNLGRTTKQKAMQSLLPAQTKQQKAIIQLFSGGKAKLAELFVDEELDECEKKSVSFQDDDLNEFEPVLTAALGERYEGLLRFKAIYDWSLLAKILHLDTSKKDEDEQHLLSECKVQVYEDHKRDLAVLKSMLKGKPLYNKIFRQDGDISYEKYAKGIKGRNQIDFCKNLKKQLEGIAEYKKIMQEITSIDDAKTEEERVLFRITNGFAFPKQTTKDNGIIPIQVHLAELKCILDNAEGYLPFLGETDNNGLSVREKIEQIVKFRIPYYVGPLAGTRMSREQGRYWVVRKNEKIYPWNFTEIVNLEESAEKFITNMTAKCTYLVGEDVLPKESLLYSEFMVRNAINNITVDGERLPVDVLEKIFKQLFLAKTSKVTKKTLERFFRQENISFQNIGGIDDKINASMKSYNDFRRIFGEDYIQLHRDEIENIIRWITLFCDEKKMLVTKIKNTYPQISDDEIKAIKKLKYKDWGRLSATLLNSSTIAYEDKAFGELVTIISALRHTNKNFMELLSSYCSYDFIGKIKEFNGSRQSSNGKLTYKDVEELYVSPSVKRSIWQTLTFLEEIKKIMGCEPKRIFIEMARSKEESKRTDSRLKKLQDLYKKCREENIDFMPRKDEFNALKTQLSSKKEEDLRSDKLYLYYTQMGRCMYTGERIELASLYDNNLYDIDHIYPRSKTKDDSLSNRVLVKKQVNAAKTDTYPLDAAIRTKMHSFWKLLYDKGFIDERKYERLTRSTQLRDEELAGFISRQLVETRQSTKAVAAILKIAYQNSEVVYVKAGNVSDFRQQFKFVKCREVNDLHHAKDAYLNIVVGNCYHVKFTANPLNFITKNQDNRRYSLKPEIFYKFSIKRDGEIAWLGGEDGTMATVARTMHKNNILFTRQAVEGKGELFDQQPLKAKGGQLPLKAGLSIEKYGGYNSLTTAYFAVVKSEGKKGAVQLSIEAIPLVYAKQGEIAVQKYLTEVVQLCKPEIMLPQIKKYSLFKINGFPMHISGRTGNRMLFYGAGQLCLDEADVDYLKKALKYENDIAENELVIADKNSDDIQKQQAQKNLDYYNQKWRIGRKVNMHIYDMLLAKSGNNLYKNRPASQTTDLQEQREFFEKLSLANQIHVIGEVLKLFKCASASANLKLLDKGNACGVIKVSNNILKFKQCVLINQSPTGVFEQEVDLMKL

SEQ ID NO: 1420 - protein, 1379 aa, unidentified
  REGION 1..1379: note = Description of Unknown: uncultivated organism with predicted taxonomy: Phascolarctobacterium succinatutens
  REGION 1..1379: note = MG18-68 effector
MQKLKNCDYYIGLDMGDASVGWAVTDTNYNILKFNGKALWGIRLFDSANTAASTRVFRSGRRRIDRTTWRLKMLQELFAEEIAKVDPGFFMRLEDSRLHLDDKRDKEVYNLFVDKNYTDKDFYQQYPTMYHLRYALATQAGPFDVRLLYLAVQHIAKHRGHFLFDNLDASKVNDFNAVFSEVENYVRDEMGIEDWSCQNIDELAKVLCDVNLGRTTKQKAMQSLLPAQTKQQKAIIQLFSGGKAKLAELFVDAELDECEKKSVSFQDDDLNEFEPVLTAALGERYEGLLRFKAIYDWSLLAKILHLDTSKKDEDEQHLLSECKVQVYEDHKRDLAVLKSMLKGKPLYNKIFRQDGDISYEKYTKGIKGRNQIDFCKDLKKQLEGIAEYKKIMQEITSIDDAKTEEERVLFRITNGFAFPKQTTKDNGIIPIQVHLAELKCILDNVEGYLPFLGETDNNGLSVREKIEQIVKFRIPYYVGPLAGTRMSREQGRYWVVRKNEKIYPWNFTEIVNLEESAEKFITNMTAKCTYLVGEDVLPKESLLYSEFMVRNAINNITVDGERLPVDVLEKIFKQLFLAKTSKVTKKTLERFFRQENISFQNIGGIDDKINASMKSYNDFRRIFGEDYIQLHRDEIENIIRWITLFCDEKKMLVTKIKNTYPQISDDEIKAIKKLKYKDWGRLSATLLNSSAIAYEDKAFGELVTIISALRHTNKNFMELLSSYCSYDFIGKIKEFNGSRQSSNGKLTYKDVEELYVSPSVKRSIWQTLTILEEIKKIMGCEPKRIFIEMARSKEESKRTDSRLKKLQDLYKKCREENIDFMPRKDEFNTLKTQLSSKKEDDLRSDKLYLYYTQMGRCMYTGEKIELASLYDNNLYDIDHIYPRSKTKDDSLSNRVLVKKQVNAAKTDTYPLDAAIRTKMHSFWKLLYDKGFIDERKYQRLTRSTQLRDEELAGFISRQLVETRQSTKAVAAILKTAYQNSEVVYVKAGNVSDFRQQFKFVKCREVNDLHHAKDAYLNIVVGNCYHVKFTANPLNFITKNQDNRRYSLKPEIFYKFSIKRDGEIAWLGGEDGTMATVARTMHKNNILFTRQAVEGKGELFDQQPLKAKGGQLPLKAGLSIEKYGGYNSLTTAYFAVVKSEGKKGAVQLSIEAIPLVYAKQGEIAVQKYLTKVVQLCKPEIMLPKIKKYSLFKINGFPMHISGRTGNRMLFYGAGQLCLDEADVDYLKKALKYENDIAENELVIADKNSDDIQKQQAQKNLDYYNQKWRIGRKVNMHIYDMLLAKSGNNLYKNRPASQTTDLQEQREFFEKLSLANQIHVIGEVLKLFKCASASANLKLLDKGNACGVIKVSNNILKFKQCVLINQSPTGVFEQEVDLMKL

SEQ ID NO: 1421 - protein, 1379 aa, unidentified
  REGION 1..1379: note = Description of Unknown: uncultivated organism with predicted taxonomy: Phascolarctobacterium succinatutens
  REGION 1..1379: note = MG18-69 effector
MQKLKNCDYYIGLDMGDASVGWAVTDTNYNILKFNGKALWGIRLFDSANTAASTRVFRSGRRRIDRTTWRLKMLQELFAEEIAKVDPGFFMRLEDSRLHLDDKRDKAVYNLFVDKNYTDKDFYQQYPTMYHLRYALATQAGPFDVRLLYLAVQHIAKHRGHFLFDNLDASKVNDFNAVFSEVENYVRDEMGIEDWSCQNIDELAKVLCDVNLGRTTKQKAMQSLLPAQTKQQKAIIQLFSGGKAKLAELFVDAELDECEKKSVSFQDDDLNEFEPVLTAALGERYEGLLRFKAIYDWSLLAKILHLDTSKKDEDEQHLLSECKVQVYEDHKRDLAVLKSMLKGKPLYNKIFRQDGDISYEKYAKGIKGRNQIDFCKDLKKQLEGIAEYKKIMQEITSIDDAKTEEERVLFRITNGFAFPKQTTKDNGIIPIQVHLAELKCILDNVEGYLPFLGETDNNGLSVREKIEQIVKFRIPYYVGPLAGTRMSREQGRYWVVRKNEKIYPWNFTEIVNLEESAEKFITNMTAKCTYLVGEDVLPKESLLYSEFMVRNAINNITVDGERLPVDVLEKIFKQLFLAKTSKVTKKTLERFFRQENISFQNIGGIDDKINASMKSYNDFRRIFGEDYIQLHRDEIENIIRWITLFCDEKKMLVTKIKNTYPQISDDEIKAIKKLKYKDWGRLSATLLNSSAIAYEDKAFGELVSIISALRHTNKNFMELLSSYCSYDFIGKIKEFNGSRQSSNGKLTYKDVEELYVSPSVKRSIWQTLTILEEIKKIMGCEPKRIFIEMARSKEESKRTDSRLKKLQDLYKKCREENIDFMPRKDEFNTLKTQLSSKKEDDLRSDKLYLYYTQMGRCMYTGEKIELASLYDNNLYDIDHIYPRSKTKDDSLSNRVLVKKQVNAAKTDIYPLDAAIRTKMHSFWKLLYDKGFIDERKYQRLTRSTQLRDEELAGFISRQLVETRQSTKAVAAILKTAYQNSEVVYVKAGNVSDFRQQFKFVKCREVNDLHHAKDAYLNIVVGNCYHVKFTANPLNFITKNQDNRRYSLKPEIFYKFSIKRDGEIAWLGGEDGTMATVARTMHKNNILFTRQAVEGKGELFDQQPLKAKGGQLPLKAGLSIEKYGGYNSLTTAYFAVVKSEGKKGAVQLSIEAIPLVYAKQGEIAVQKYLTKVVQLCKPEIMLPKIKKYSLFKINGFPMHISGRTGNRMLFYGAGQLCLDEADVDYLKKALKYENDIAENELVIADKNSDDIQKQQAQKNLDYYNQKWRIGRKVNMHIYDMLLAKSGNNLYKNRPASQTTDLQEQREFFEKLSLANQIHVIGEVLKLFKCASASANLKLLDKGNACGVIKVSNNILKFKQCVLINQSPTGVFEQEVDLMKL

SEQ ID NO: 1422 - protein, 1379 aa, unidentified; identical to SEQ ID NO: 1360
  REGION 1..1379: note = Description of Unknown: uncultivated organism with predicted taxonomy: Negativicutes
  REGION 1..1379: note = MG18-70 effector

SEQ ID NO: 1423 - protein, 1379 aa, unidentified
  REGION 1..1379: note = Description of Unknown: uncultivated organism with predicted taxonomy: Phascolarctobacterium succinatutens
  REGION 1..1379: note = MG18-71 effector
MQKLKNCDYYIGLDMGDASVGWAVTDTNYNILKFNGKALWGIRLFDSANTAASTRVFRSGRRRIDRTTWRLKMLQELFAEEIAKVDPGFFMRLEDSRLHLDDKRDKEVYNLFVDKNYTDKDFYQQYPTMYHLRYALATQAGPFDVRLLYLAVQHIAKHRGHFLFDNLDASKVNDFNAVFSEVENYVRDEMGIEDWSCQNIDELAKVLCDVNLGRTTKQKAMQSLLPAQTKQQKAIIQLFSGGKAKLAELFADEELDECEKKSVSFQDDDLNEFEPVLTAALGERYEGLLRFKAIYDWSLLAKILHLDTSKKDKDEQHLLSECKVQVYEDHKRDLAVLKSMLKGKPLYNKIFRQDGDISYEKYAKGIKGRNQIDFCKDLKKQLEGIAEYKKIMQEITSIDDAKTEEERLLFRITNGFAFPKQTTKDNGIIPIQVHLAELKCILDNAEGYLPFLGETDNNGLSVREKIEQIVKFIIPYYVGPLAGTRMSREQGRCWVVRKNEKIYPWNFTEIVNLEESAEKFITNMTAKCTYLVGEDVLPKESLLYSEFMVRNAINNITVDGERLPVDVLEKIFKQLFLAKTSKVTKKTLERFFRQENISFQNIGGIDDKINASMKSYNDFRRIFGEDYIQLHRDEIENIIRWITLFCDEKKMLVTKIKNTYPQISDDEIKAIKKLKYKDWGRLSATLLNSSAIAYEDKAFGELVTIISALRHTNKNFMELLSSYCSYDFIGKIKEFNGSRQSSNGKLTYKDVEELYVSPSVKRSIWQTLTILEEIKKIMGCEPKRIFIEMARSKEESKRTDSRLKKLQDLYKKCREENIDFMPRKDEFNTLKTQLSSKKEDDLRSDKLYLYYTQMGRCMYTGEKIELASLYDNNLYDIDHIYPRSKTKDDSLSNRVLVKKQVNAAKTDTYPLDAAIRTKMHSFWKLLYDKGFIDERKYQRLTRSTQLRDEELAGFISRQLVETRQSTKAVAAILKTAYQNSEVVYVKAGNVSDFRQQFKFVKCREVNDLHHAKDAYLNIVVGNCYHVKFTANPLNFITKNQDNRRYSLKPEIFYKFSIKRDGEIAWLGGEDGTMATVARTMHKNNILFTRQAVEGKGELFDQQPLKAKGGQLPLKAGLSIEKYGGYNSLTTAYFAVVKSEGKKGAVQLSIEAIPLVYAKQGEIAVQKYLTEVVQLCKPEIMLPKIKKYSLFKINGFPMHISGRTGNRMLFYGAGQLCLDEADVDYLKKALKYENDIAENELVIADKNSDDIQKQQAQKNLDYYNQKWRIGRKVNMHIYDMLLAKSGNNLYKNRPASQTTDLQEQREFFEKLSLANQIHVIGEVLKLFKCASASANLKLLDKGNACGVIKVSNNILKFKQCVLINQSPTGVFEQEVDLMKL

SEQ ID NO: 1424 - protein, 1379 aa, unidentified
  REGION 1..1379: note = Description of Unknown: uncultivated organism with predicted taxonomy: Phascolarctobacterium succinatutens
  REGION 1..1379: note = MG18-72 effector
MQKSKNCDYYIGLDMGDASVGWAVTDTNYNILKFNGKALWGIRLFDSANTAASTRVFRSGRRRIDRTTWRLKMLQELFAEEIAKVDPGFFMRLEDSRLHLDDKRDKAVYNLFVDKNYTDKDFYQQYPTMYHLRYALATQAVPFDVRLLYLAVQHIAKHRGHFLFDNLDASKVNDFNAVFSEVENYVRDEMGIEDWSCQNIDELAKVLCDVNLGRTTKQKAMQSLLPAQTKQQKAIIQLFSGGKAKLAELFVDEELDECEKNSVSFQDDDLNEFEPVLTAALGERYEGLLRFKAIYDWSLLAKILHLDTSKKDEDEQHLLSECKVQVYEDHKRDLAVLKSMLKGKPLYNKIFRQDGDISYEKYAKGIKGRNQIDFCKDLKKQLEGIAEYKKIMQEITNIDDAKTEEERLLFRITNGFAFPKQTTKDNGIIPIQVHLAELKCILDNAEGYLPFLGETDNNGLSVREKIEQIVKFRIPYYVGPLAGTRMSREQGRCWVVRKNEKIYPWNFTEIVNLEESAEKFITNMTAKCTYLVGEDVLPKESLLYSEFMVRNAINNITVDGERLPVDVLEKIFKQLFLAKTSKVTKKTLERFFRQENISFQNIGGIDDKINASMKSYNDFRRIFGEDYIQLHRDEIENIIRWITLFCDEKKMLVTKIKNTYPQISDDEIKAIKKLKYKDWGRLSATLLNSRAIGYEDKAVGEIITIISALRHTNKNLMELLSNYCPYDFIGKIKDFNGSRQSSNGKLTYKDVEELYVSPSVKRSIWQTLTILEEIKKIMGCEPKRIFIEMARSKEESKRTDSRLKKLQDLYKKCKEENIDFMPRKDEFNALKTQLSSKKEDDLRSDKLYLYYTQMGRCMYTGERIELASLYDNNLYDIDHIYPRSKTKDDSLSNRVLVKKQVNAAKTDTYPLDAAIRIKMHSFWKLLYDKGFIDERKYERLTRSTQLRDEELAGFISRQLVETRQSTKAVAAILKTAYQNSEVVYVKAGNVSDFRQQFKFVKCREVNDLHHAKDAYLNIVVGNCYHVKFTANPLNFITKNQDNRRYSLKPEIFYKFSIKRDGEIAWLGGEDGTMATVARTMHKNNILFTRQPLEGKGELFKQNPLKAKSGQLPLKAGLSVEKYGGYDSLTTAYFALVKSEGKKGSVQLSIEGIPLVYAKQGEKAVQDYLTEVVQLCKPEIKIPKIKKYSLFKINGFPMHISGRQGKQLIFYVAGQLCINEDSIAYLKKAFKYESDLAVNEEILADENGDEVRKQKARNRLAFYDNTWGISLEANMQLYDMLLAKSANNLYKNRPASQTSTLKEQREQFSILPLSKQIHVIKEILKLFKCASATADFKLLEKGSTCGKIQVSTNITKCKQCILINQSPTGVFEQEVDLMKL

SEQ ID NO: 1425 - protein, 1379 aa, unidentified
  REGION 1..1379: note = Description of Unknown: uncultivated organism with predicted taxonomy: Phascolarctobacterium
  REGION 1..1379: note = MG18-73 effector
MQKLKNCDYYIGLDMGDASVGWAVTDTNYNILKFNGKALWGIRLFDSANTAASTRVFRSGRRRIDRTTWRLKMLQELFAEEIAKVDPGFFMRLEDSRLHLDDKRDKAVYNLFVDKNYTDKDFYQQYPTMYHLRYALATQAGPFDVRLLYLAVQHIAKHRGHFLFDNLDASKVNDFNAVFSEVENYVRDEMGIEDWSCQNIDELAKVLCDVNLGRTTKQKAMQSLLPAQTKQQKAIIQLFSGGKAKLAELFVDEELDECEKKSVSFQDDDLNEFEPVLTAALGERYEGLLRFKAIYDWSLLAKILHLDTSKKDEDEQHLLSECKVQVYEDHKRDLAVLKSMLKGKPLYNKIFRQDGDISYEKYAKGIKGRNQIDFCKDLKKQLEGIAEYKKIMQEITNIDDAKTEEERLLFRITNGFAFPKQTTKDNGIIPIQVHLAELKCILDNAEGYLPFLGETDNNGLSVREKIEQIVKFRIPYYVGPLAGTRMSREQGRCWVVRKHEKIYPWNFTEIVNLEESAEKFITNMTAKCTYLVGEDVLPKESLLYSEFMVRNAINNITVDGERLPVDVLEKIFKQLFLAKTSKVTKKTLERFFRQENISFQNIGGIDDKINASMKSYNDFRRIFGEDYIQLHRDEIENIIRWITLFCDEKKMLVTKIKNTYPQISDDEIKAIKKLKYKDWGRLSATLLNSSTIAYEDKAFGELVTIISALRHTNKNFMELLSSYCSYDFIGKIKEFNGSRQSSNGKLTYKDVEELYVSPSVKRSIWQTLTILEEIKKIMGREPKRIFIEMARSKEESKRTDSRLKKLQDLYKKCREENIDFMPRKDEFNALKTQLSSKKEEDLRSDKLYLYYTQMGRCMYTGERIELASLDDNNLYDIDHIYPRSKTKDDSLSNRVLVKKEVNAAKTDIYPLDAVIRTKMHSFWKLLYDKGFIDERKYERLTRSTQLRDEELAGFISRQLVETRQSTKAVAAILKTAYKHSEIVYVKAGNVSDFRQKFEFVKCRDVNDLHHAKDAYLNIVVGNCYHVKFTANPLNFITKNQDNRRYSLKPEIFYKFSIKRDSEIAWIGGKDGTITTVTKTMHKNNILFTRQPVEGKGELFKQQPLKAKSGQLPLKAGLSVEKYGGYDSLTTAYFALVKSEGKKGAVQLSIEGIPLVYAKQGEIAVQKYLTEVVQLCKPEIMLPKIKKYSLFKINGFPMHISGRQLKQLQFYVASQLCIDEYSIAYLKKAFKYENNLAVNDEIIADKNADEEKKQKARKRLDFYEKTWGIGKENNMRIYDILLAKSANNLYKKRPASQSATLEKRRENFKGLFVSKQIHVLKEILNLFKCLSATADLQLLGAGKNVGKVTWNTNISNVKQCILINQSPTGIFEQEVDLMKL

SEQ ID NO: 1426 - protein, 1379 aa, unidentified
  REGION 1..1379: note = Description of Unknown: uncultivated organism with predicted taxonomy: Phascolarctobacterium succinatutens
  REGION 1..1379: note = MG18-74 effector
MQKLQNKDYYIGLDMGDASVGWAVTDANYNILKFNGKALWGIRLFDSANTAASTRVFRSGRRRIDRTTWRLKMLQELFAEEIAKVDPGFFMRLEDSRLHLDDKRDKAVYNLFVDKNYTDKDFYQQYPTMYHLRYALATQAGPFDVRLLYLAVQHIAKHRGHFLFDNLDASKVNDFNAVFSEVENYVRDEMGIEDWSCQNIDELAKVLCDVNLGRTTKQKAMQSLLPAQTKQQKAIIQLFSGGKAKLAELFVDEELDECEKKSVSFQDDDLNEFEPVLTAALGERYEGLLRFKAIYDWSLLAKILHLDTSKKDEDEQHLLSECKVQVYEDHKRDLAVLKSMLKGKPLYNKIFRQDGDISYEKYAKGIKGRNQIDFCKDLKKQLEGITEYKKIMQEITSIDDAKTEEERVLFRITNGFAFPKQTTKDNGIIPIQVHLAELKCILDNAEGYLPFLGETDNNGLSVREKIEQIVKFRIPYYVGPLAGTRMSREQGRCWVVRKNEKIYPWNFTQVVNLEESAEKFITNMTAKCTYLVGEDVLPKESLLYSEFMVRNAINNITVDGERLPVDVLEKIFKQLFLAKTSKVTKKTLERFFRQENISFQNIGGIDDKINASMKSYNDFRRIFGEDYIQLHRDEIENIIRWITLFCDEKKMLVTKIKNTYPQIADDQIKAIKKLKYKDWGRLSATLLNSSAIAYEDKAFGELVTIISALRHTNKNFMELLSSYCSYDFIGKIKEFNGSRQSSNGKLTYKDVEELYVSPSVKRSIWQTLTILEEIKKIMGCEPKRIFIEMARSKEESKRTDSRLKKLQDLYKKCREENIDFMPRKDEFNTLKTQLSSKKEDDLRIDKLYLYYTQMGRCMYTGEKIELASLYDNNLYDIDHIYPRSKTKDDSLSNRVLVKKQVNAAKTDTYPLDAAIRTKMHSFWKLLYDKGFIDERKYQRLTRSTQLRDEELAGFISRQLVETRQSTKAVAAILKTAYQNSEVVYVKAGNVSDFRQQFKFVKCREVNDLHHAKDAYLNIVVGNCYHVKFTANPLNFITKNQDNRRYSLKPEIFYKFSIKRDSEIAWIGGKDGTITTVTKTMHKNNILFTRQAVEGKGELFDQQPLKAKGGQLPLKAGLSIEKYGGYNSLTTAYFAVVKSEGKKGAVQLSIEAIPLVYAKQGEIAVQKYLTEVVQLCKPEIMLPKIKKYSLFKINGFPMHISGRTGNRMLFYGAGQLCLDEADVDYLKKALKYENDIAENELVIADKNSDDIQKQQAQKNLDYYNQKWRIGRKVNMHIYDMLLAKSGNNLYKNRPASQTTDLQEQREFFEKLSLANQIHVIGEVLKLFKCASASANLKLLDKGNACGVIKVSNNILKFKQCVLINQSPTGVFEQEVDLMKL

SEQ ID NO: 1427 - protein, 1379 aa, unidentified; identical to SEQ ID NO: 1358
  REGION 1..1379: note = Description of Unknown: uncultivated organism with predicted taxonomy: Phascolarctobacterium
  REGION 1..1379: note = MG18-75 effector

SEQ ID NO: 1428 - protein, 1124 aa, unidentified
  REGION 1..1124: note = Description of Unknown: uncultivated organism with predicted taxonomy: Phascolarctobacterium succinatutens
  REGION 1..1124: note = MG18-76 effector
MQRLKNCDYYIGLDMGDASVGWAVTDTNYNILKFNGKALWGIRLFDSANTAASTRVFRSGRRRIDRTTWRLKMLQELFAEEIAKVDPGFFMRLEDSRLHLDDKRDKAVYNLFVDKNYTDKDFYQQYPTMYHLRYALAMQAGPFDVRLLYLAVQHIAKHRGHFLFDNLDASKVNDFNAVFSEVENYVRDEMGIEDWSCQNIDELAKVLCDVNLGRTTKQKAMQSLLPAQTKQQKAIIQLFSGGKAKLAELFGDAELDECEKKSVSFQDDDLDELEPVLTAALGERYEGLLRFKAIYDWSLLAKILHLDTSKKDEDEQHLLSECKVQVYEDHKRDLAVLKSMLKGKPLYNKIFRQDGDISYEKYAKGIKGRNQLDFCKDLKKQLDGIAEYKKIMQEITSIDAAGTEEERLLFRIANGFAFPKQTTKDNGIIPIQVHLAELKCILDNAEGYLQFLGETDNNGLSVREKIEQIVKFRIPYYVGPLAGTRMSREQGRCWVVRKNEKIYPWNFTQVVNLEESAEKFITNMTAKCTYLVGEDVLPKESLLYSEFMVRNAINNITVDGERLPVDVLEKIFKQLFLAKTSKVTKKTLERFFRQENISFQNIGGIDDKINASMKSYNDFRRIFGEDYIQLHRDEIENIIRWITLFCDEKKMLVTKIKNTYPQIADDQIKAIKKLKYKDWGRLSATLLNSSAIAYEDKAFGELVTIISALRHTNKNFMELLSSYCSYDFIGKIKEFNGSRQSSNGKLTYKDVEELYVSPSVKRSIWQTLTILEEIKKIMGCEPKRIFIEMARSKEESKRTDSRLKKLQDLYKKCREENIDFMPRKDEFNTLKTQLSSKKEDDLRIDKLYLYYTQMGRCMYTGEKIELASLYDNNLYDIDHIYPRSKTKDDSLSNRVLVKKQVNAAKTDTYPLDAAIRTKMHSFWKLLYDKGFIDERKYERLTRSTQLRDEELAGFISRQLVETRQSTKAVAAILKTAYQNSEVVYVKAGNVSDFRKQFKFVKCRDVNDLHHAKDAYLNIVVGNCYHVKFTANPLNFITKNQDNRRYSLKPEIFYKFSIKRDGEIAWIGGKDGTITTVTKTMHKNNILFTRQPVEGKGELFKQQPLKAKSGQLPLKAGLSVEKYGG

SEQ ID NO: 1429 - protein, 811 aa, unidentified
  REGION 1..811: note = Description of Unknown: uncultivated organism with predicted taxonomy: Clostridiales
  REGION 1..811: note = MG18-77 effector
MQKLKNCDYYIGLDMGDASVGWAVTDTNYNILKFNGKALWGIRLFDSANTAASTRVFRSGRRRIDRTTWRLKMLQELFAEEIAKVDPGFFMRLEDSRLHLDDKRDKAVYNLFVDKNYTDKDFYQQYPTMYHLRYALATQAGPFDVRLLYLAVQHIAKHRGHFLFDNLDASKVNDFNAVFSEVENYVRDEMGIEDWSCQNIDELAKVLCDVNLGRTTKQKAMQSLLPAQTKQQKAIIQLFSGGKAKLAELFVDEELDECEKKSVSFQDDDLNEFEPVLTAALGERYEGLLRFKAIYDWSLLAKILHLDTSKKDEDEQHLLSECKVQVYEDHKRDLAVLKSMLKGKPLYNKIFRQDGDISYEKYAKGIKGRNQIDFCKDLKKQLEGIAEYKKIMQEITNIDDAKTEEERLLFRITNGFAFPKQTTKDNGIIPIQVHLAELKCILDNAEGYLPFLGETDNNGLSVREKIEQIVKFRIPYYVGPLAGTRMSREQGRCWVVRKHEKIYPWNFTEIVNLEESAEKFITNMTAKCTYLVGEDVLPKESLLYSEFMVRNAINNITVDGERLPVDVLEKIFKQLFLAKTSKVTKKTLERFFRQENISFQNIGGIDDKINASMKSYNDFRRIFGEDYIQLHRDEIENIIRWITLFCDEKKMLVTKIKNTYPQISDDEIKAIKKLKYKDWGRLSATLLNSSTIAYEDKAFGELVTIISALRHTNKNFMELLSSYCYYDFIGKIKEFNGSRQSSNGKLTYKDVEELYVSPSVKRSIWQTLTILEEIKKIMGCEPKRIFIEMARSKEESKRTDSRLKKLQGRKY

SEQ ID NO: 1430 - protein, 1379 aa, unidentified; identical to SEQ ID NO: 1397
  REGION 1..1379: note = Description of Unknown: uncultivated organism with predicted taxonomy: Phascolarctobacterium
  REGION 1..1379: note = MG18-78 effector

SEQ ID NO: 1431 - protein, 1379 aa, unidentified
  REGION 1..1379: note = Description of Unknown: uncultivated organism with predicted taxonomy: Phascolarctobacterium succinatutens
  REGION 1..1379: note = MG18-79 effector
MQKLKNCDYYIGLDMGDASVGWAVTDTNYNILKFNGKALWGIRLFDSANTAASTRVFRSGRRRIDRTTWRLKMLQELFAEEIAKVDPGFFMRLEDSRLHLDDKRDKAVYNLFVDKNYTDKDFYQQYPTMYHLRYALATQAGPFDVRLLYLAVQHIAKHRGHFLFDNLDASKVNDFNAVFSEVENYVRDEMGIEDWSCQNIDELAKVLCDVNLGRTTKQKAMQSLLPAQTKQQKAIIQLFSGGKAKLAELFVDEELDECEKKSVSFQDDDLNEFEPVLTAALGERYEGLLRFKAIYDWSLLAKILHLDTSKKDEDEQHLLSECKVQVYEDHKRDLAVLKSMLKGKPLYNKIFRQDGDISYEKYAKGIKGRNQIDFCKDLKKQLEGIAEYKKIMQEITNIDDAKTEEERLLFRITNGFAFPKQTTKDNGIIPIQVHLAELKCILDNAEGYLPFLGETDNNGLSVREKIEQIVKFRIPYYVGPLAGTRMSREQGRCWVVRKHEKIYPWKFTEIVNLEESAEKFITNMTAKCTYLVGEDVLPKESLLYSEFMVRNAINNITVDGERLPVDVLEKIFKQLFLAKTSKVTKKTLERFFRQENISFQNIGGIDDKINASMKSYNDFRRIFGEDYIQLHRDEIENIIRWITLFCDEKKMLVTKIKNTYPQISDDEIKAIKKLKYKDWGRLSATLLNSSTIAYEDKAFGELVTIISALRHTNKNFMELLSSYCYYDFIGKIKEFNGSRQSSNGKLTYKDVEELYVSPSVKRSIWQTLTILEEIKKIMGCEPKRIFIEMARSKEESKRTDSRLKKLQDLYKKRREENIDFMPRKDEFNALKTQLSSKKEENLRSDKLYLYYTQMGRCMYTGERIELASLHDNNLYDIDHIYPRSKTKDDSLSNRVLVKKQVNAAKTDTYPLDAAIRTKMHSFWKLLYDKGFIDERKYERLTRSTQLRDEELAGFISRQLVETRQSTKAVAAILKTAYQNSEVVYVKAGNVSDFRQQFKFVKCREVNDLHHAKDAYLNIVVGNCYHVKFTANPLNFITKNQDNRRYSLKPEIFYKFSIKRDGEIAWLGGEDGTMATVARTMHKNNILFTRQAVEGKGELFDQQPLKAKGGQLPLKAGLSIEKYGGYNSLTTAYFAVVKSEGKKGAVQLSIEAIPLVYAKQGEIAVQKYLTEVVQLCKPEIMLPKIKKYSLFKINGFPMHISGRTGKQLIFYGAGQLCIADDVADYLKKALMYETNIAEKEKTLADQNADDIQKQKAQKGLDFYEQKRGISGAVNVQLYDMFIAKSANNLYKNRPVSQTITLKEKREHFVKLTVSKQIHIIKEILNLFKCASASADFKLIDKGTSCGTLKISNNINKLKECILINQSPTGVFEQEVDLMKL

SEQ ID NO: 1432 - protein, 1379 aa, unidentified; identical to SEQ ID NO: 1375
  REGION 1..1379: note = Description of Unknown: uncultivated organism with predicted taxonomy: Phascolarctobacterium succinatutens
  REGION 1..1379: note = MG18-80 effector

SEQ ID NO: 1433 - protein, 1383 aa, unidentified
  REGION 1..1383: note = Description of Unknown: uncultivated organism with predicted taxonomy: Phascolarctobacterium succinatutens
  REGION 1..1383: note = MG18-81 effector
MQNKKNVDYYVGLDMGDASVGWAVTDLNYNILKFNGKALWGIRLFDSAETAAARRGFRSARRRIDRVSWRISMLQELFADEIAKVDAGFFQRLKDSRLQVEDKQEKTAYNLFVGQNYTDKDFYQQYPTMYHLRYALATQAGPFDVRLLYLAVQHIVKHRGHFLFENLDASKVGDFVAVFGEVESYVHDEMELDEWYCHDIDALAKVLCNANLGITAKQKAIQNLLPAKTKQEKAIVQLLSGGKAKLCDLFCDEELAECEKKSISFQEDNLDELEPILEAILQERYEALLRFKAVYDWSLLAKILRLDADKKSENEMHLLSECKVKVYEEHKKDLAVLKSMLKGKPLYNKLFRQDGEDTYANYAQGIKGINQVDFCKSLKKQLESIGEYKKQMQQLTSFEDAQTDVERLLFRVANGLAFPKQTTKDNGIIPIQVHLAELQCILAHAEKYLPFLKNADANGLSVREKITQIVKFRIPYYVGPLAGTRLSREQGRCWVERRAELKNEKIYPWNFDKVVDLEASAENFITNMTAKCTYLVGEDVLPKESLLYSEFMVRNALNNLTIDGERLPVSLLQKIYKQLFLEKTFKVTKKALERFFKQENVSYHDIGGIDDKINASMKAYNDFKRIFGEAYIEMHRDEIENIIRWITLFCDEKKMLETKIRKTYPQIPDDKIKAIKKLKYKDWGRLSATLLDSGKIAYEDASVGERITIISALRHTNKNFMELLSSNCQYDFIGKIKDFNGSKQSDNGKLTYKDVEELYVSPSVKRSIWQTLTILEEIKKIMGCEPKRIFIEMARSKEESLRTNSRLQRLQDLYKKCKEENIDFMPKADELTDIRSQLQCKNEEDLRSDKLYLYYTQMGRCMYTGERIELASLYDQNKYDVDHIYPRSKTKDDSLNNRVLVKKEINSAKTDNYPIDADIRKKMHAFWKMLYDKGFIDQKKYERLTRSTQLTDEELAGFINRQLVETRQSTKATADILKSAYEHSEVVYVKAGNVSDFRQQFDFVKCREVNDLHHAKDAYLNIVVGNCYHVKFTINPLMFIRGNQDNRRYSLKPEVFYAHDIKRNGEIAWLAGDNGTMATVKRVMQKNNVLFTRLAVEGKGELFKQNPLKAKSGQLPLKAGLSIDKYGGYDSLSTAYFALVESEGKKGAVQFTIEAIPLVYAKQGEATIKKYLTEVVQLCKPEIKVMRIKKYSLLKINGFPMHISGRTGKQLIFYVASQLCIDENSVAYLKKALKYESNLEENEAILADKNADESMKQKAFNRLMFYKDTWGISAEANLQLYDMLLAKSANNLYKNRPASQTATLKEKREQFAKLSLSKQIHVIKEILNLFKCASASADFKLLDKGAACGILKVSNNITKLKQCVLINQSPTGVFEQEVDLMRL

SEQ ID NO: 1434 - protein, 1379 aa, unidentified
  REGION 1..1379: note = Description of Unknown: uncultivated organism with predicted taxonomy: Phascolarctobacterium succinatutens
  REGION 1..1379: note = MG18-82 effector
MQKSKNCDYYIGLDMGDASVGWAVTDTNYNILKFNGKALWGIRLFDSANTAASTRVFRSGRRRIDRTTWRLKMLQELFAEEIAKVDPGFFMRLEDSRLHLDDKRDKAVYNLFVDKNYTDKDFYQQYPTMYHLRYALATQAVPFDVRLLYLAVQHIAKHRGHFLFDNLDASKVNDFNAVFSEVENYVRDEMGIEDWSCQNIDELAKVLCDVNLGRTTKQKAMQSLLPAQTKQQKAIIQLFSGGKAKLAELSVDEELDECEKNSVSFQDDDLNEFEPVLTAALGERYEGVLRFKAIYDWSLLAKILHLDTSKKDEDEQHLLSECKVQVYEDHKRDLAVLKSMLKGKPLYNKIFRQVGDISYEKYAKGIKGRNQIDFCKDLKKQLEGIAEYKKIMQEITNIDDAKTEEERLLFRITNGFAFPKQTTKDNGIIPIQVHLAELKCILDNAEGYLPFLGETDNNGLSVREKIEQIVKFRIPYYVGPLAGTRMSREQGRCWVVRKNEKIYPWNFTEIVNLEESAEKFITNMTAKCTYLVGEDVLPKESLLYSEFMVRNAINNITVDGERLPVDVLEKIFKQLFLAKTSKVTKKTLERFFRQENISFQNIGGIDDKINASMKSYNDFRRIFGEDYIQLHRDEIENIIRWITLFCDEKKMLVTKIKNTYPQISDDEIKAIKKLKYKDWGRLSATLLNSRAIGYEDKAVGEIITIISALRHTNKNLMELLSNYCPYDFIGKIKDFNGSRQSSNGKLTYKDVEELYVSPSVKRSIWQTLTILEEIKKIMGCEPKRIFIEMARSKEESKRTDSRLKKLQDLYKKCKEENIDFMPRKDEFNALKTQLSSKKEDDLRSDKLYLYYTQMGRCMYTGERIELASLNDNNLYDIDHIYPRSKTKDDSLSNRVLVKKQVNAAKTDTYPLDAAIRIKMHSFWKLLYDKGFIDERKYERLTRSTQLRDEELAGFISRQLVETRQSTKAVATILKTAYKHSEVVYVKAGNVSDFRQQFKFVKCREVNDLHHAKDAYLNIVVGNCYYVKFTANPLNFIKKNQDSRSYSLKPEIFYKFNIKRDDDIAWLGGEDGTMATVARTMHKNNILFTRQPLEGKGELFKQNPLKAKSGQLPLKAGLSVEKYGGYDSLTTAYFALVKSEGKKGSVQLSIEGIPLVYAKQGEKAVQDYLTEVVQLCKPEIKIPKIKKYSLFKINGFPMHISGRTGKQLVFYGAGQLCIADDVADYLKKALKYETDIAEKEKTLADQNADDIQKQKAQKGLDFYEQKWGISGAVNVQLYDMFIAKSANNLYKNRPASQTITLKEKREHFVKLTLSKQIHIIKEILNLFKCASASADFKLIDKGTSCGTLKISNNITKLKECILINQSPTGVFEQEVDLMKL

SEQ ID NO: 1435 - protein, 1379 aa, unidentified
  REGION 1..1379: note = Description of Unknown: uncultivated organism with predicted taxonomy: Phascolarctobacterium succinatutens
  REGION 1..1379: note = MG18-83 effector
MQKLQNKDYYIGLDMGDASVGWAVTDANYNILKFNGKALWGIRLFDSANTAASTRVFRSGRRRIDRTTWRLKMLQELFAEEIAKVDPGFFMRLEDSRLHLDDKRDKAVYNLFVDKNYTDKDFYQQYPTMYHLRYALATQAGPFDVRLLYLAVQHIAKHRGHFLFDNLDASKVNDFNAVFSEVENYVRDEMGIEDWSCQNIDELAKVLCDVNLGRTTKQKAMQSLLPAQTKQQKAIIQLFSGGKAKLAELFVDEELDECEKKSVSFQDDDLNEFEPVLTAALGERYEGLLRFKAIYDWSLLAKILHLDTSKKDEDEQHLLSECKVQVYEDHKRDLAVLKSMLKGKPLYNKIFRQDGDISYEKYAKGIKGRNQIDFCKDLKKQLEGIAEYKKIMQEITNIDDAKTEKERLLFRITNGFAFPKQTTKDNGIIPIQVHLAELKCILDNAEGYLPFLGETDNNGLSVREKIEQIVKFRIPYYVGPLAGTRMSREQGRCWVVRKNEKIYPWNFTEIVNLEESAEKFITNMTAKCTYLVGEDVFPKESLLYSEFMVRNAINNITVDGERLPVDVLEKIFKQLFLAKTSKVTKKTLERFFRQENISFQNIGGIDDKINASMKSYNDFRRIFGEDYIQLHRDEIENIIRWITLFCDEKKMLVTKIKNTYPHISDDKIKAIKKLKYKDWGRLSATLLNSSAIAYEDDAFGERVTIISALRHTNKNFMELLSNYCSYDFIGKIKDFNGSRQSSNSKLTYKDVEELYVSPSVKRSIWQTLTILEEIKKIMGREPKRIFIEMARSKEESKRTDSRLKKLQDLYKKCREENIDFMPRKDEFNALKTQLSSKKEEDLRSDKLYLYYTQMGRCMYTGERIELASLYDNNLYDIDHIYPRSKTKDDSLSNRVLVKKQVNAAKTDIYPLDAAIRTKMHSFWKLLYDKGFIDERKYERLTRSTQLRDEELAGFISRQLVETRQSTKAVAAILKTAYQNSEVVYVKAGNVSDFRQQFNFVKCRDVNDLHHAKDAYLNIVVGNCYHVKFTANPLNFITKNQDNRRYSLKPEIFYKFSIKRDGEIAWLGGEDGTMATVARTMHKNNILFTRQAVEGKGELFDQQPLKAKGGQLPLKAGLSIEKYGGYNSLTTAYFAVVKSEGKKGAVQLSIEAIPLVYAKQGEIAVQKYLTEVVQLCKPEIMLPKIKKYSLFKINGFPMHISGRTGNRMLFYGAGQLCLDEADVNYLKKALKYENDIAENELVIADKNSDDIQKQQAQKNLDYYNQKWRIGRKVNMHIYDMLLAKSGNNLYKNRPASQTTDLQEQREFFEKLSLANQIHVIGEVLKLFKCASASANLKLLDKGNACGVIKVSNNILKFKQCVLINQSPTGVFEQEVDLIKL

SEQ ID NO: 1436 - protein, 1379 aa, unidentified
  REGION 1..1379: note = Description of Unknown: uncultivated organism with predicted taxonomy: Phascolarctobacterium succinatutens
  REGION 1..1379: note = MG18-84 effector
MQKSKNCDYYIGLDMGDASVGWAVTDTNYNILKFNGKALWGIRLFDSANTAASTRVFRSGRRRIDRTTWRLKMLQELFAEEIAKVDPGFFMRLEDSRLHLDDKRDKAVYNLFVDKNYTDKDFYQQYPTMYHLRYALATQAVPFDVRLLYLAVQHIAKHRGHFLFDNLDASKVNDFNAVFSEVENYVRDEMGIEDWSCQNIDELAKVLCDVNLGRTTKQKAMQSLLPAQTKQQKAIIQLFSGGKAKLAELFVDEELDECEKNSVSFQDDDLNEFEPVLTAALGERYEGLLRFKAIYDWSLLAKILHLDTSKKDEDEQHLLSECKVQVYEDHKRDLAVLKSMLKGKPLYNKIFRQDGDISYEKYAKGIKGRNQIDFCKDLKKQLEGIAEYKKIMQEITNIDDAKTEEERLLFRITNGFAFPKQTTKDNGIIPIQVHLAELKCILDNAEGYLPFLGETDNNGLSVREKIEQIVKFRIPYYVGPLAGTRMSREQGRCWVVRKNEKIYPWNFTEIVNLEESAEKFITNMTAKCTYLVGEDVLPKESLLYSEFMVRNAINNITVDGERLPVDVLEKIFKQLFLAKTSKVTKKTLERFFRQENISFQNIGGIDDKINASMKSYNDFRRIFGEDYIQLHRDEIENIIRWITLFCDEKKMLVTKIKNTYPQISDDEIKAIKKLKYKDWGRLSATLLNSRAIGYEDKAVGEIITIISALRHTNKNLMELLSNYCPYDFIGKIKDFNGSRQSSNGKLTYKDVEELYVSPSVKRSIWQTLTILEEIKKIMGCEPKRIFIEMARSKEESKRTDSRLKKLQDLYKKCKEENIDFMPRKDEFNALKTQLSSKKEDDLRIDKLYLYYTQMGRCMYTGERIELASLYDNNLYDIDHIYPRSKTKDDSLSNRVLVKKQVNAAKTDTYPLDAAIRIKMHSFWKLLYDKGFIDERKYERLTRSTQLRDEELAGFISRQLVETRQSTKAVATILKTAYKHSEVVYVKAGNVSDFRQQFKFVKCREVNDLHHAKDAYLNIVVGNCYYVKFTANPLNFIKKNQDSRSYSLKPEIFYKFNIKRDDDIAWLGGEDGTMATVARTMHKNNILFTRQPLEGKGELFKQNPLKAKSGQLPLKAGLSVEKYGGYDSLTTAYFALVKSEGKKGSVQLSIEGIPLVYAKQGEKAVQDYLTEVVQLCKPEIKIPKIKKYSLFKINGFPMHISGRTGKQLVFYGAGQLCIADDVADYLKKALKYETDIAEKEKTLADQNADDIQKQKAQKGLDFYEQKWGISGAVNVQLYDMFIAKSANNLYKNRPASQTITLKEKREHFVKLTLSKQIHIIKEILNLFKCASASADFKLIDKGTSCGTLKISNNITKLKECILINQSPTGVFEQEVDLMKL

SEQ ID NO: 1437 - protein, 1379 aa, unidentified
  REGION 1..1379: note = Description of Unknown: uncultivated organism with predicted taxonomy: Phascolarctobacterium
  REGION 1..1379: note = MG18-85 effector
MQKLQNKDYYIGLDMGDASVGWAVTDANYNILKFNGKALWGIRLFDSANTAASTRVFRSGRRRIDRTTWRLKMLQELFADEIAKVDPGFFMRLEDSRLHLDDKRENAVYNLFVDKNYTDKEFHQQYPTMYHLRYALATKKGPFDIRLLYLAVQHIAKHRGHFLFDNLDASTVNDFNAVFSEVENYVHDEMGLEDWSCQNKDALAKVLCDVNLGRTTKQKAMQSLLPAKSKQQKAILQLFSGGKAKLAELFDDEELDDCEKKSISFQDDDLDEIEPVLTAALGERYEGLLRFKAIYDWSLLAKILHLDTGKKEEGEQHLLSECKVQVYEEHKRDLAVLKSMLRGNFLYNKIFRQDGDISYEKYAKGIKGRNQFDFCKDLKKQLECIAEYKKIMQEITSIDAAGTEEERLLFRIANGFAFPKQTTKDNGIIPIQVHLAELKCILDNAEGYLPFLGETDNNSLSVREKIEQIVKFRIPYYVGPLAGTRMSREQGRCWVVRKNEKIYPWNFTEIVNLEESAEKFITNMTAKCTYLFGEDVLPKESLLYSEFMVRNAINNITVDGERLPFDVLEKIFKQLFLAKTSKVTKKTLARFFRQENISFQNIGGIDDKINASMKSYNDFRRIFGEDYIQLHRDEIENIIRWITLFCDEKKMLVTKIKNTYPQISDDEIKAIKKLKYKDWGRLSATLLNSSTIAYEDKAFGELVTIISALRHTNKNFMELLSSYCSYDFIGKIKEFNGSRQSSNGKLTYKDVEELYVSPSVKRSIWQTLTILEEIKKIMGCEPKRIFIEMARSKEESKRTDSRLKKLQDLYKKCREENIDFMPRKDEFNALKTQLSSKKEEDLRSDKLYLYYTQMGRCMYTGERIELASLYDNNLYDIDHIYPRSKTKDDSLSNRVLVKKQINAAKTDTYPLDAAIRTKMHSFWKLLYDKGFIDERKYERLTRSTQLRDEELAGFISRQLVETRQSTKAVAAILKTAYQNSEVVYVKAGNVSDFRQQFKFVKCREVNDLHHAKDAYLNIVVGNCYHVKFTANPLNFITKNQDNRRYSLKPEIFYKFSIKRDGEIAWLGGEDGTMATVARTMHKNNILFTRQAVEGKGELFDQQPLKAKGGQLPLKAGLAIEKYGGYNSLTTAYFAVVKSEGKKGAVQLSIEAIPLVYAKQGEIAVQKYLTEVVQLCKPEIMLPKIKKYSLFKINGFPMHISGRTGNRMLFYGAGQLCLDEADVNYLKKALKYENDIAENELVIADKNSDDIQKQQAQKKLDYYNQKWRIGRKVNMHIYDMLLAKSGNNLYKNRPASQTTDLQEQREFFEKLSLANQIHVIGEVLKLFKCASASANLKLLDKGNACGVIKVSNNILKFKQCVLINQSPTGVFEQEVDLMKL

SEQ ID NO: 1438 - protein, 1379 aa, unidentified; identical to SEQ ID NO: 1361
  REGION 1..1379: note = Description of Unknown: uncultivated organism with predicted taxonomy: Phascolarctobacterium succinatutens
  REGION 1..1379: note = MG18-86 effector

SEQ ID NO: 1439 - protein, 1379 aa, unidentified
  REGION 1..1379: note = Description of Unknown: uncultivated organism with predicted taxonomy: Phascolarctobacterium succinatutens
  REGION 1..1379: note = MG18-87 effector
MQKLKNCDYYIGLDMGDASVGWAVTDTNYNILKFNGKALWGIRLFDSANTAASTRVFRSGRRRIDRTTWRLKMLQELFAEEIAKVDPGFFMRLEDSRLHLDDKRDKAVYNLFVDKNYTDKDFYQQYPTMYHLRYALATQAGPFDVRLLYLAVQHIAKHRGHFLFDNLDASKVNDFNAVFSEVENYVRDEMGIEDWSCQNIDELAKVLCDVNLGRTTKQKAMQSLLPAQTKQQKAIIQLFSGGKAKLAELFVDAELDECEKKSVSFQDDDLNEFEPVLTAALGERYEGLLRFKAIYDWSLLAKILHLDTSKKDEDEQHLLSECKVQVYEDHKRDLAVLKSMLKGKPLYNKIFRQDGDISYEKYAKGIKGRNQIDFCKDLKKQLEGIAEYKKIMQEITSIDDAKTEEERLLFRITNGFAFPKQTTKDNGIIPIQVHLAELKCILDNAEGYLPFLGETDNNGLSVREKIEQIVKFIIPYYVGPLAGTRMSREQGRCWVVRKNEKIYPWNFTEIVNSEESAEKFITNMTAKCTYLVGEDVLPKESLLYSEFMVRNAINNITVDGERLPVDVLEKIFKQLFLAKTSKVTKKTLERFFRQENISFQNIGGIDDKINASMKSYNDFRRIFGEDYIQLHRDEIENIIRWITLFCDEKKMLVTKIKNTYPQISDDEIKAIKKLKYKDWGRLSATLLNSSAIAYEDKAFGELVTIISALRHTNKNFMELLSSYCSYDFIGKIKEFNGSRQSSNGKLTYKDVEELYVSPSVKRSIWQTLTILEEIKKIMGCEPKRIFIEMARSKEESKRTDSRLKKLQDLYKKCREENIDFMPRKDEFNTLKTQLSSKKEDDLRSDKLYLYYTQMGRCMYTGEKIELASLYDNNLYDIDHIYPRSKTKDDSLSNRVLVKKQVNAAKTDTYPLDAAIRTKMHSFWKLLYDKGFIDERKYERLTRSTQLRDEELAGFISRQLVETRQSTKAVAAILKTAYQNSEVVYVKAGNVSDFRQQFKFVKCREVNDLHHAKDAYLNIVVGNCYHVKFTANPLNFITKNQDNRRYSLKPEIFYKFSIKRDGEIAWLGGEDGTMATVARTMHKNNILFTRQAVEGKGELFDQQPLKAKGGQLPLKAGLSIEKYGGYNSLTTAYFAVVKSEGKKGAVQLSIEAIPLVYAKQGEIAVQKYLTEVVQLCKPEIMLPKIKKYSLFKINGFPMHISGRTGNRMLFYGAGQLCLDEADVDYLKKALKYENDIAENELVIADKNSDDIQKQQAQKNLDYYNQKWRIGRKVNMHIYDMLLAKSGNNLYKNRPASQTTDLQEQREFFEKLSLANQIHVIGEVLKLFKCASASANLKLLDKGNACGVIKVSNNILKFKQCVLINQSPTGVFEQEVDLMKL

SEQ ID NO: 1440 - protein, 1379 aa, unidentified; identical to SEQ ID NO: 1358
  REGION 1..1379: note = Description of Unknown: uncultivated organism with predicted taxonomy: Phascolarctobacterium
  REGION 1..1379: note = MG18-88 effector

SEQ ID NO: 1441 - protein, 1379 aa, unidentified
  REGION 1..1379: note = Description of Unknown: uncultivated organism with predicted taxonomy: Firmicutes
  REGION 1..1379: note = MG18-89 effector
MQKLKNCDYYIGLDMGDASVGWAVTDTNYNILKFNGKALWGIRLFDSANTAASTRVFRSGRRRIDRTTWRLKMLQELFAEEIAKVDPGFFMRLEDSRLHLDDKRDKAVYNLFVDKNYTDKDFYQQYPTMYHLRYALATQAGPFDVRLLYLAVQHIAKHRGHFLFDNLDASKVNDFNAVFSEVENYVRDEMGIEDWSCQNIDELAKVLCDVNLGRTTKQKAMQSLLPAQTKQQKAIIQLFSGGKAKLAELFVDEELDECEKKSVSFQDDDLNEFEPVLTAALGERYEGLLRFKAIYDWSLLAKILHLDTSKKDEGEQHLLSECKVQVYEDHKRDLAVLKSMLKGKPLYNKIFRQDGDISYEKYAKGIKGRNQIDFCKDLKKQLEGIAEYKKIMQEITSIDDAKTEEERLLFRITNGFAFPKQTTKDNGIIPIQVHLAELKCILDNAEGYLPFLGETDNNGLSVREKIEQIVKFRIPYYVGPLAGTRMSREQGRCWVVRKNEKIYPWNFTEIVNLEESAEKFITNMTAKCTYLVGEDVLPKESLLYSEFMVRNAINNITVDGERLPVDVLEKIFKQLFLAKTSKVTKKTLERFFRQENISFQNIGGIDDKINASMKSYNDFRRIFGEDYIQLHRDEIENIIRWITLFCDEKKMLVTKIKNTYPQISDDEIKAIKKLKYKDWGRLSATLLNSSTIAYEDKAFGELVTIISALRHTNKNFMELLSRYCSYDFIGKIKEFNGRRQSSNGKLTYKDVEELYVSPSVKRSIWQTLTILEEIKKIMGCEPKRIFIEMARSKEESKRTDSRLKKLQDLYKKCREENIDFMPRKDEFNVLKTQLSSKKEEDLRSDKLYLYYTQMGRCMYTGERIELASLYDNNLYDIDHIYPRSKTKDDSLSNRVLVKKQINAAKTDTYPLDAAIRTKMHSFWKLLYDKGFIDERKYERLTRSTQLRDEELAGFISRQLVETRQSTKAVAAILKTAYQNSEVVYVKAGNVSDFRQQFKFVKCREVNDLHHAKDAYLNIVVGNCYHVKFTANPLNFITKNQDNRRYSLKPEIFYKFSIKRDGEIAWLGGEDGTMETVARTMHKNNILFTRQAVEGKGELFDQQPLKAKGGQLPLKAGLSIEKYGGYNSLTTAYFAVVKSEGKKGAVQLSIEAIPLVYAKQGEIAVQKYLTEVVQLCKPEIMLPKIKKYSLFKINGFPMHISGRTGNRMLFYGAGQLCLDEADVNYLKKALKYENDIAENELVIADKNSDDIQKQQAQKNLDYYNQKWRIGRKVNMHIYDMLLAKSGNNLYKNRPASQTTDLQEQREFFEKLSLANQIHVIGEVLKLFKCASASANLKLLDKGNACGVIKVSNNILKFKQCVLINQSPTGVFEQEVDLMKL

SEQ ID NO: 1442 - protein, 1379 aa, unidentified
  REGION 1..1379: note = Description of Unknown: uncultivated organism with predicted taxonomy: Phascolarctobacterium
  REGION 1..1379: note = MG18-90 effector
MQRLKNCDYYIGLDMGDASVGWAVTDTNYNILKFNGKALWGIRLFDSANTAASTRVFRSGRRRIDRTTWRLKMLQELFAEEIAKVDPGFFMRLEDSRLHLDDKRDKAVYNLFVDKNYTDKDFYQQYPTMYHLRYALATQAGPFDVRLLYLAVQHIAKHRGHFLFDNLDASKVNDFNAVFSEVENYVRDEMGIEDWSCQNIDELAKVLCDVNLGRTTKQKAMQSLLPAQTKQQKAIIQLFSGGKAKLAELFVDEELDECEKKSVSFQDDDLNEFEPVLTAALGERYEGLLRFKAIYDWSLLAKILHLDTSKKDEDEQHLLSECKVQVYEDHKRDLAVLKSMLKGKPLYNKIFRQDGDISYEKYAKGIKGRNQIDFCKDLKKQLEGIAEYKKMMQEITSIDDAKTEEERLLFRITNGFAFPKQTTKDNGIIPIQVHLAELKCILDNAEGYLPFLGETDNNGLSVREKIEQIVKFRIPYYVGPLAGTRMSREQGRCWVVRKNEKIYPWNFTEIVNLEESAEKFITNMTAKCTYLVGEDVLPKESLLYSEFMVRNAINNITVDGERLPVDVLEKIFKQLFLAKTSKVTKKTLERFFRQENISFQNIGGIDDKINASMKSYNDFRRIFGEDYIQLHRDEIENIIRWITLFCDEKKMLVTKIKNTYPQISDDEIKAIKKLKYKDWGRLSATLLNSSTIAYEDKAFGELVTIISALRHTNKNFMELLSSYCSYDFIGKIKEFNGSRQSSNGKLTYKDVEELYVSPSVKRSIWQTLTILEEIKKIMGCEPKRIFIEMARSKEESKRTDSRLKKLQDLYKKCREENIDFMPRKDEFNTLKTQLSSKKEDDLRIDKLYLYYTQMGRCMYTGEKIELASLYDNNLYDIDHIYPRSKTKDDSLSNRVLVKKQVNAAKTDTYPLDAAIRTKMHSFWKLLYDKGFIDERKYQRLTRSTQLRDEELAGFISRQLVETRQSTKAVAAILKTAYQNSEVVYVKAGNVSDFRQQFKFVKCREVNDLHHAKDAYLNIVVGNCYHVKFTANPLNFITKNQDNRRYSLKPEIFYKFSIKRDSEIAWIGGKDGTITTVTKTMHKNNILFTRQPVEGKGELFKQQPLKAKSGQLPLKAGLSVEKYGGYDSLTTAYFALVKSEGKKGAVQLSIEGIPLVYAKQGEIAVQKYLTEVVQLCKPEIMLPKIKKYSLFKINGFPMHISGRQLKQLQFYVASQLCIDEYSIAYLKKAFKYENNLAVNDEIIADKNADEEKKQKARKRLDFYEKTWGIGKENNMRIYDILLAKSANNLYKKRPASQSATLEKRRENFKGLFVSKQIHVLKEILNLFKCLSATADLQLLGAGKNVGKVTWNTNISNVKQCILINQSPTGIFEQEVDLMKL

SEQ ID NO: 1443 - protein, 1379 aa, unidentified
  REGION 1..1379: note = Description of Unknown: uncultivated organism with predicted taxonomy: Phascolarctobacterium succinatutens
  REGION 1..1379: note = MG18-91 effector
MQKLKNCDYYIGLDMGDASVGWAVTDTNYNILKFNGKALWGIRLFDSANTAASTRVFRSGRRRIDRTTWHLKMLQELFAEEIAKVDPGFFMRLEDSRLHLDDKRDKAVYNLFVDKNYTDKDFYQQYPTMYHLRYALATQAGPFDVRLLYLAVQHIAKHRGHFLFDNLDASKVNDFNAVFSEVENYVRDEMGIEDWSCQNIDELAKVLCDVNLGRTTKQKAMQSLLPAQTKQQKAIIQLFSGGKAKLAELFVDEELDECEKKSVSFQDDDLNEFEPVLTAALGERYEGLLRFKAIYDWSLLAKILHLDTSKKDEGEQHLLSECKVQVYEDHKRDLAVLKSMLKGKPLYNKIFRQDGDISYEKYAKGIKGRNQIDFCKDLKKQLEGIAEYKKIMQEITSIDDAKTEEERLLFRITNGFAFPKQTTKDNGIIPIQVHLAELKCILDNAEGYLPFLGETDNNGLSVREKIEQIVKFRIPYYVGPLAGTRMSREQGRCWVVRKNEKIYPWNFTEIVNLEESAEKFITNMTAKCTYLVGEDVLPKESLLYSEFMVRNAINNITVDGERLPVDVLEKIFKQLFLAKTSKVTKKTLERFFRQENISFQNIGGIDDKINASMKSYNDFRRIFGEDYIQLHRDEIENIIRWITLFCDEKKMLVTKIKNTYPQISDDEIKAIKKLKYKDWGRLSATLLNSSTIAYEDKAFGELVTIISALRHTNKNFMELLSSYCSYDFIGKIKEFNGRRQSSNGKLTYKEVEDLYVSPSVKRSIWQTLTILEEIKKIMGCEPKRIFIEMARSKEESKRTDSRLKKLQDLYKKCREENIDFMPRKDEFNALKTQLSSKKEEDLRSDKLYLYYTQMGRCMYTGERIELASLYDNNLYDIDHIYPRSKTKDDSLSNRVLVKKQVNAAKTDIYPLDAAIRTKMHSFWKLLYDKGFIDERKYERLTRSTQLRDEELAGFISRQLVETRQSTKAVAAILKTAYQNSEVVYVKAGNVSDFRQQFNFVKCRDVNDLHHAKDAYLNIVVGNCYHVKFTANPLNFITKNQDNRRYSLKPEIFYKFNIKRDDDIAWLGGADGTMATVARTMHKNNILFTRQPLEGKGELFKQNPLKAKSGQLPLKAGLSVEKYGGYDSLTTAYFALVKSEGKKGSVQLSIEGIPLVYAKQGEKAVQDYLTEVVQLCKPEIKIPKIKKYSLFKINGFPMHISGRQGKQLIFYVAGQLCINEDSIAYLKKAFKYESDLAVNEEILADENGDEVRKQKARNRLAFYDNTWGISLEANMQLYDMLLAKSANNLYKNRPASQTSTLKEQREQFSILPLSKQIHVIKEILKLFKCASATADFKLLEKGSTCGKIQVSTNITKCKQCILINQSPTGVFEQEVDLMKL

SEQ ID NO: 1444 - protein, 1379 aa, unidentified
  REGION 1..1379: note = Description of Unknown: uncultivated organism with predicted taxonomy: Phascolarctobacterium succinatutens
  REGION 1..1379: note = MG18-92 effector
MQKLKNCDYYIGLDMGDASVGWAVTDTNYNILKFNGKALWGIRLFDSANTAASTRVFRSGRRRIDRTTWRLKMLQELFAEEIAKVDPGFFMRLEDSRLHLDDKRDKAVYNLFVDKNYTDKDFYQQYPTMYHLRYALATQAGPFDVRLLYLAVQHIAKHRGHFLFDNLDASKVNDFNAVFSEVENYVRDEMGIEDWSCQNIDELAKVLCDVNLGRTTKQKAMQSLLPAQTKQQKAIIQLFSGGKAKLAELFVDAELDECEKKSVSFQDDDLNEFEPVLTAALGERYEGLLRFKAIYDWSLLAKILHLDTSKKDEDEQHLLSECKVQVYEDHKRDLAVLKSMLKGKPLYNKIFRQDGDISYEKYAKGIKGRNQIDFCKDLKKQLEGIAEYKKIMQEITSIDDAKTEEERVLFRITNGFAFPKQTTKDNGIIPIQVHLAELKCILDNVEGYLPFLGETDNNGLSVREKIEQIVKFRIPYYVGPLAGTRMSREQGRYWVVRKNEKIYPWNFTEIVNLEESAEKFITNMTAKCTYLVGEDVLPKESLLYSEFMVRNAINNITVDGERLPVDVLEKIFKQLFLAKTSKVTKKTLERFFRQENISFQNIGGIDDKINASMKSYNDFRRIFGEDYIQLHRDEIENIIRWITLFCDEKKMLVTKIKNTYPQISDDEIKAIKKLKYKDWGRLSATLLNSSAIAYEDKAFGELVTIISALRHTNKNFMELLSSYCSYDFIGKIKEFNGSRQSSNGKLTYKDVEELYVSPSVKRSIWQTLTILEEIKKIMGCEPKRIFIEMARSKEESKRTDSRLKKLQDLYKKCREENIDFMPRKDEFNTLKTQLSSKKEDDLRSDKLYLYYTQMGRCMYTGEKIELASLYDNNLYDIDHIYPRSKTKDDSLSNRVLVKKQVNAAKTDIYPLDAAIRTKMHSFWKLLYDKGFIDERKYQRLTRSTQLRDEELAGFISRQLVETRQSTKAVAAILKTAYQNSEVVYVKAGNVSDFRQQFKFVKCREVNDLHHAKDAYLNIVVGNCYHVKFTANPLNFITKNQDNRRYSLKPEIFYKFSIKRDGEIAWLGGEDGTMATVARTMHKNNILFTRQAVEGKGELFDQQPLKAKGGQLPLKAGLSIEKYGGYNSLTTAYFAVVKSEGKKGAVQLSIEAIPLVYAKQGEIAVQKYLTKVVQLCKPEIMLPKIKKYSLFKINGFPMHISGRTGNRMLFYGAGQLCLDEADVDYLKKALKYENDIAENELVIADKNSDDIQKQQAQKNLDYYNQKWRIGRKVNMHIYDMLLAKSGNNLYKNRPASQTTDLQEQREFFEKLSLANQIHVIGEVLKLFKCASASANLKLLDKGNACGVIKVSNNILKFKQCVLINQSPTGVFEQEVDLMKL

SEQ ID NO: 1445 - protein, 1379 aa, unidentified
  REGION 1..1379: note = Description of Unknown: uncultivated organism
  REGION 1..1379: note = MG18-93 effector
MQKSKNCDYYIGLDMGDASVGWAVTDTNYNILKFNGKALWGIRLFDSANTAASTRVFRSGRRRIDRTTWRLKMLQELFAEEIAKVDPGFFMRLEDSRLHLDDKRDKAVYNLFVDKNYTDKDFYQQYPTMYHLRYALATQAVPFDVRLLYLAVQHIAKHRGHFLFDNLDASKVNDFNAVFSEVENYVRDEMGIEDWSCQNIDELAKVLCDVNLGRTTKQKAMQSLLPAQTKQQKAIIQLFSGGKAKLAELFVDEELDECEKNSVSFQDDDLNEFEPVLTAALGERYEGVLRFKAIYDWSLLAKILHLDTSKKDEDEQHLLSECKVQVYEDHKRDLAVLKSMLKGKPLYNKIFRQDGDISYEKYAKGIKGRNQIDFCKDLKKQLEGIAEYKKIMQEITNIDDAKTEEERLLFRITNGFAFPKQTTKDNGIIPIQVHLAELKCILDNAEGYLPFLGETDNNGLSVREKIEQIVKFRIPYYVGPLAGTRMSREQGRCWVVRKNEKIYPWNFTEIVNLEESAEKFITNMTAKCTYLVGEDVLPKESLLYSEFMVRNAINNITVDGERLPVDVLEKIFKQLFLAKTSKVTKKTLERFFRQENISFQNIGGIDDKINASMKSYNDFRRIFGEDYIQLHRDEIENIIRWITLFCDEKKMLVTKIKNTYPQISDDEIKAIKKLKYKDWGRLSATLLNSRAIGYEDKAVGEIITIISALRHTNKNLMELLSNYCPYDFIGKIKDFNGSRQSSNGKLTYKDVEELYVSPSVKRSIWQTLTILEEIKKIMGCEPKRIFIEMARSKEESKRTDSRLKKLQDLYKKCKEENIDFMPRKDEFNALKTQLSSKKEDDLRSDKLYLYYTQMGRCMYTGERIELASLNDNNLYDIDHIYPRSKTKDDSLSNRVLVKKQVNAAKTDTYPLDAAIRIKMHSFWKLLYDKGFIDERKYERLTRSTQLRDEELAGFISRQLVEMRQSTKAVATILKTAYKHSEVVYVKAGNVSDFRQQFKFVKCREVNDLHHAKDAYLNIVVGNCYYVKFTANPLNFIKKNQDSRSYSLKPEIFYKFNIKRDDDIAWLGGEDGTMATVARTMHKNNILFTRQPLEGKGELFKQNPLKAKSGQLPLKAGLSVEKYGGYDSLTTAYFALVKSEGKKGSVQLSIEGIPLVYAKQGEKAVQDYLTEVVQLCKPEIKIPKIKKYSLFKINGFPMHISGRTGKQLVFYGAGQLCIADDVADYLKKALKYETDIAEKEKTLADQNADDIQKQKAQKGLDFYEQKWGISGAVNVQLYDMFIAKSANNLYKNRPASQTITLKEKREHFVKLTLSKQIHIIKEILNLFKCASASADFKLIDKGTSCGTLKISNNITKLKECILINQSPTGVFEQEVDLMKL

SEQ ID NO: 1446 - protein, 1379 aa, unidentified; identical to SEQ ID NO: 1423
  REGION 1..1379: note = Description of Unknown: uncultivated organism with predicted taxonomy: Phascolarctobacterium succinatutens
  REGION 1..1379: note = MG18-94 effector

SEQ ID NO: 1447 - protein, 1363 aa, unidentified
  REGION 1..1363: note = Description of Unknown: uncultivated organism
  REGION 1..1363: note = MG18-95 effector
MQKLKNCDYYIGLDMGDASVGWAVTDTNYNILKFNGKALWGIRLFDSANTAASTRVFRSGRRRIDRTTWRLKMLQELFAEEIAKVDPGFFMRLEDSRLHLDDKRDKEVYNLFVDKNYTDKDFYQQYPTMYHLRYALATQAGPFDVRLLYLAVQHIAKHRGHFLFDNLDASKVNDFNAVFSEVENYVRDEMGIEDWSCQNIDELAKVLCDVNLGRTTKQKAMQSLLPAQTKQQKAIIQLFSGGKAKLAELFADEELDECEKKSVSFQDDDLNEFEPVLTAALGERYEGLLRFKAIYDWSLLAKILHLDTSKKDKDEQHLLSECKVQVYEDHKRDLAVLKSMLKGKPLYNKIFRQDGDISYEKYAKGIKGRNQIDFCKDLKKQLEGIAEYKKIMQEITSIDDAKTEEERLLFRITNGFAFPKQTTKDNGIIPIQVHLAELKCILDNAEGYLPFLGETDNNGLSVREKIEQIVKFIIPYYVGPLAGTRMSREQGRCWVVRKNEKIYPWNFTEIVNLEESAEKFITNMTAKCTYLVGEDVLPKESLLYSEFMVRNAINNITVDGERLPVDVLEKIFKQLFLAKTSKVTKKTLERFFRQENISFQNIGGIDDKINASMKSYNDFRRIFGEDYIQLHRDEIENIIRWITLFCDEKKMLVTKIKNTYPQISDDEIKAIKKLKYKDWGRLSATLLNSSAIAYEDKAFGELVTIISALRHTNKNFMELLSSYCSYDFIGKIKEFNGSRQSSNGKLTYKDVEELYVSPSVKRSIWQTLTILEEIKKIMGCEPKRIFIEMARSKEESKRTDSRLKKLQDLYKKCREENIDFMPRKDEFNTLKTQLSSKKEDDLRSDKLYLYYTQMGRCMYTGEKIELASLYDNNLYDIDHIYPRSKTKDDSLSNRVLVKKQVNAAKTDTYPLDAAIRTKMHSFWKLLYDKGFIDERKYQRLTRSTQLRDEELAGFISRQLVETRQSTKAVAAILKTAYQNSEVVYVKAGNVSDFRQQFKFVKCREVNDLHHAKDAYLNIVVGNCYHVKFTANPLNFITKNQDNRRYSLKPEIFYKFSIKRDGEIAWLGGEDGTMATVARTMHKNNILFTRQPLEGKGELFKQNPLKAKSGQLPLKAGLSVEKYGGYDSLTTAYFALVKSEGKKGSVQLSIEGIPLVYAKQGEKAVKDYLTEVVQLCKPEIKIPKIKKYSLFKINGFPMHISGRQGKQLIFYVAGQLCINEDSIAYLKKVFKYESDLAVNEEILADENGDEVRKQKARNRLAFYDNTWGISLEANMQLYDMLLAKSANNLYKNRPASQTSTLKEQREQFSILPLSKQIHVIKEILKLFKCASATADFKLLEKGSTCGKIQVSTNILQVFLNRKWI

SEQ ID NO: 1448 - protein, 1222 aa, unidentified
  REGION 1..1222: note = Description of Unknown: uncultivated organism with predicted taxonomy: Clostridium sp. CAG:964
  REGION 1..1222: note = MG18-96 effector
RTTWRLKMLQELFAEEIAKVDPGFFMRLEDSRLHLDDKRDKAVYNLFVDKNYTDKDFYQQYPTMYHLRYALATQAGPFDVRLLYLAVQHIAKHRGHFLFDNLDASKVNDFNAVFSEVENYVRDEMGIEDWSCQNIDELAKVLCDVNLGRTTKQKAMQSLLPAQTKQQKAIIQLFSGGKAKLAELFVDAELDECEKKSVSFQDDDLNEFEPVLTAALGERYEGLLRFKAIYDWSLLAKILHLDTSKKDEDEQHLLSECKVQVYEDHKRDLAVLKSMLKGKPLYNKIFRQDGDISYEKYAKGIKGRNQIDFCKDLKKQLEGIAEYKKIMQEITSIDDAKTEEERVLFRITNGFAFPKQTTKDNGIIPIQVHLAELKCILDNVEGYLPFLGETDNNGLSVREKIEQIVKFRIPYYVGPLAGTRMSREQGRYWVVRKNEKIYPWNFTEIVNLEESAEKFITNMTAKCTYLVGEDVLPKESLLYSEFMVRNAINNITVDGERLPVDVLEKIFKQLFLAKTSKVTKKTLERFFRQENISFQNIGGIDDKINASMKSYNDFRRIFGEDYIQLHRDEIENIIRWITLFCDEKKMLVTKIKNTYPQISDDEIKAIKKLKYKDWGRLSATLLNSSAIAYEDKAFGELVTIISALRHTNKNFMELLSSYCSYDFIGKIKEFNGSRQSSNGKLTYKDVEELYVSPSVKRSIWQTLTILEEIKKIMGCEPKRIFIEMARSKEESKRTDSRLKKLQDLYKKCREENIDFMPRKDEFNTLKTQLSSKKEDDLRSDKLYLYYTQMGRCMYTGEKIELASLYDNNLYDIDHIYPRSKTKDDSLSNRVLVKKQVNAAKTDIYPLDAAIRTKMHSFWKLLYDKGFIDERKYQRLTRSTQLRDEELAGFISRQLVETRQSTKAVAAILKTAYQNSEVVYVKAGNVSDFRQQFKFVKCREVNDLHHAKDAYLNIVVGNCYHVKFTANPLNFITKNQDNRRYSLKPEIFYKFSIKRDGEIAWLGGEDGTMATVARTMHKNNILFTRQAVEGKGELFDQQPLKAKGGQLPLKAGLSIEKYGGYNSLTTAYFAVVKSEGKKGAVQLSIEAIPLVYAKQGEIAVQKYLTKVVQLCKPEIMLPKIKKYSLFKINGFPMHISGRTGNRMLFYGAGQLCLDEADVDYLKKALKYENDIAENELVIADKNSDDIQKQQAQKNLDYYNQKWRIGRKVNMHIYDMLLAKSGNN

SEQ ID NO: 1449 - protein, 1379 aa, unidentified; identical to SEQ ID NO: 1397
  REGION 1..1379: note = Description of Unknown: uncultivated organism with predicted taxonomy: Phascolarctobacterium succinatutens
  REGION 1..1379: note = MG18-97 effector

SEQ ID NO: 1450 - protein, 1379 aa, unidentified
  REGION 1..1379: note = Description of Unknown: uncultivated organism with predicted taxonomy: Phascolarctobacterium succinatutens
  REGION 1..1379: note = MG18-98 effector
MQKLKNCDYYIGLDMGDASVGWAVTDTNYNILKFNGKALWGIRLFDSANTAASTRVFRSGRRRIDRTTWRLKMLQELFAEKIAKVDPGFFMRLEDSRLHLDDKRDKAVYNLFVDKNYTDKVFYQQYPTMYHLRYALATQAGPFDVRLLYLAVQHIAKHRGHFLFDNLDASKVNNFNAVFSEVENYVRDEMGIEDWSCQNIDELAKVLCDVNLGRTTKQKAMQSLLPAQTKQQKAIIQLFSGGKAKLAELFVDEELDECEKKSVSFQDDDLNEFEPVLTAALGERYEGLLRFKAIYDWSLLAKILHLDTSKKDEGEQHLLSECKVQVYEDHKRDLAVLKSMLKGKPLYNKIFRQDGDISYEKYAKGIKGRNQIDFCKDLKKQLEGIAEYKKIMQEITSIDDAKTEEERLLFRITNGFAFPKQTTKDNGIIPIQVHLAELKCILDNAEGYLPFLGETDNNGLSVREKIEQIVKFRIPYYVGPLAGTRMSREQGRCWVVRKNEKIYPWNFTEIVNLEESAEKFITNMTAKCTYLVGEDVLPKESLLYSEFMVRNAINNITVDGERLPVDVLEKIFKQLFLAKTSKVTKKTLERFFRQENISFQNIGGIDDKINASMKSYNDFRRIFGEDYIQLHRDEIENIIRWITLFCDEKKMLVTKIKNTYPQISDDEIKAIKKLKYKDWGRLSATLLNSSTIAYEDKAFGELVTIISALRHTNKNFMELLSSYCSYDFIGKIKEFNGRRQSSNGKLTYKEVEDLYVSPSVKRSIWQTLTILEEIKKIMGCEPKRIFIEMARSKEESKRTDSRLKKLQDLYKKCREENIDFMPRKDEFNALKTQLSSKKEEDLRSDKLYLYYTQMGRCMYTGERIELASLYDNNLYDIDHIYPRSKTKDDSLSNRVLVKKQVNAAKTDIYPLDAAIRTKMHSFWKLLYDKGFIDERKYERLTRSTQLRDEELAGFISRQLVETRQSTKAVAAILKTAYQNSEVVYVKAGNVSDFRQQFNFVKCRDVNDLHHAKDAYLNIVVGNCYHVKFTANPLNFITKNQDNRRYSLKPEFFYKFNIKRDDDIAWLGGADGTMATVARTMHKNNILFTRQPLEGKGELFKQNPLKAKSGQLPLKAGLSVEKYGGYDSLTTAYFALVKSEGKKGSVQLSIEGIPLVYAKQGEKAVQDYLTEVVQLCKPEIKIPKIKKYSLFKINGFPMHISGRQGKQLIFYVAGQLCINEDSIAYLKKAFKYESDLAVNEEILADENGDEVRKQKARNRLAFYDNTWGISLEANMQLYDMLLAKSANNLYKNRPASQTSTLKEQREQFSILPLSKQIHVIKEILKLFKCASATADFKLLEKGSTCGKIQVSTNITKCKQCILINQSPTGVFEQEVDLMKL

SEQ ID NO: 1451 - protein, 1379 aa, unidentified; identical to SEQ ID NO: 1357
  REGION 1..1379: note = Description of Unknown: uncultivated organism with predicted taxonomy: Firmicutes
  REGION 1..1379: note = MG18-99 effector

SEQ ID NO: 1452 - protein, 1379 aa, unidentified
  REGION 1..1379: note = Description of Unknown: uncultivated organism with predicted taxonomy: Phascolarctobacterium succinatutens
  REGION 1..1379: note = MG18-100 effector
MHKLKNCDYYIGLDMGDASVGWAVTDTNYNILKFNGKALWGIRLFDSANTAASTRVFRSGRRRIDRTTWRLKMLQELFAEEIAKVDPGFFMRLEDSRLHLDDKRDKAVYNLFVDKNYTDKDFYQQYPTMYHLRYALATQAGPFDVRLLYLAVQHIAKHRGHFLFDNLDASKVNDFNAVFSEVENYVRDEMGIEDWSCQNIDELAKVLCDVNLGRTTKQKAMQSLLPAQTKQQKAIIQLFSGGKAKLAELFADEELDECEKKSVSFQDDDLNEFEPVLTAALGERYEGLLRFKAIYDWSLLAKILHLDTSKKDKDEQHLLSECKVQVYEDHKRDLAVLKSMLKGKPLYNKIFRQDGDISYEKYAKGIKGRNQIDFCKDLKKQLEGIAEYKKIMQEITNIDDAKTEEERLLFRITNGFAFPKQTTKDNGIIPIQVHLAELKCILDNAEGYLPFLGETDNNGLSVREKIEQIVKFRIPYYVGPLAGTRMSREQGRCWVVRKHEKIYPWNFTEIVNLEESAEKFITNMTAKCTYLVGEDVLPKESLLYSEFMVRNAINNITVDGERLPVDVLEKIFKQLFLAKTSKVTKKTLERFFRQENISFQNIGGIDDKINASMKSYNDFRRIFGEDYIQLHRDEIENIIRWITLFCDEKKMLVTKIKNTYPQISDDEIKAIKKLKYKDWGRLSATLLNSSAIAYEDKAFGELVTIISALRHTNKNFMELLSSYCYYDFIGKIKEFNGSRQSSNGKLTYKDVEELYVSPSVKRSIWQTLTILEEIKKIMGCEPKRIFIEMARSKEESKRTDSRLKKLQDLYKKCREENIDFMPRKDEFNALKTQLSSKKEEDLRSDKLYLYYTQMGRCMYTGERIELASLYDNNLYDIDHIYPRSKTKDDSLSNRVLVKKQVNAAKTDTYPLDAAIRTKMHSFWKLLYDKGFIDERKYERLTRSTQLRDEELAGFISRQLVETRQSTKAVAAILKTAYQNSEVVYVKAGNVSDFRQQFKFVKCREVNDLHHAKDAYLNIVVGNCYHVKFTANPLNFITKNQDNRRYSLKPEIFYKFSIKRDGEIAWLGGEDGTMATVARTMHKNNILFTRQAVEGKGELFDQQPLKAKGGQLPLKAGLSIEKYGGYNSLTTAYFAVVKSEGKKGAVQLSIEAIPLVYAKQGEIAVQKYLTEVVQLCKPEIKIPKIKKYSLFKINGFPMHISGRTGKQLVFYGAGQLCIADDVADYLKKALKYETDIAEKEKTLADQNADDIHKQKAQKGLDFYEQKWGISGAVNVQLYDMFIAKSANNLYKNRPASQTITLKEKREHFVKLTLSKQIHIIKEILNLFKCASASADFKLIDKGTSCGTLKISNNITKLKECILINQSPTGVFEQEVDLMKL

SEQ ID NO: 1453 - protein, 1379 aa, unidentified
  REGION 1..1379: note = Description of Unknown: uncultivated organism with predicted taxonomy: Firmicutes
  REGION 1..1379: note = MG18-101 effector
MQKLKNCDYYIGLDMGDASVGWAVTDTNYNILKFNGKALWGIRLFDSANTAASTRVFRSGRRRIDRTTWRLKMLQELFAEEIAKVDPGFFMRLEDSRLHLDDKRDKAVYNLFVDKIYTDKDFYQQYPTMYHLRYALATQAGPFDVRLLYLAVQHIAKHRGHFLFDNLDASKVNDFNAVFSEVENYVRDEMGIEDWSCQNIDELAKVLCDVNLGRTTKQKAMQSLLPAQTKQQKAIIQLFSGGKAKLAELFGDAELDECEKKSVSFQDDDLDELEPVLTAALGERYEGLLRFKAIYDWSLLAKILHLDTSKKDEDEQHLLSECKVQVYEDHKRDLAVLKSMLKGKPLYNKIFRQDGDISYEKYAKGIKGRNQIDFCKDLKKQLEGIAEYKKIMQEITSIDDAKTEEERLLFRITNGFAFPKQTTKDNGIIPIQVHLAELKCILDNAEGYLPFLGETDNNGLSVREKIEQIVKFRIPYYVGPLAGTRMSREQGRCWVVRKNEKIYPWNFTEIVNLEESAEKFITNMTAKCTYLVGEDVLPKESLLYSEFMVRNAINNITVDGERLPADVLEKIFKQLFLEKTSKVTKKTLERFFRQENISFQNIGGIDDKINASMKSYNDFRRIFGEDYIQLHRDEIENIIRWITLFCDEKKMLVTKIKNTYPQISDDEIKAIKKLKYKDWGRLSATLLNSRAIGYEDKAVGEIITIISALRHTNKNLMELLSNYCPYDFIGKIKDFNGSRQSSNGKLTYKDVEELYVSPSVKRSIWQTLTILEEIKKIMGCEPKRIFIEMARSKEESKRTDSRLKKLQDLYKKCKEENIDFMPRKDEFNALKTQLSSKKEDDLRSDKLYLYYTQMGCCMYTGERIELASLYNDNLYDIDHIYPRSKTKDDSLSNRVLVKKEVNAAKTDIYPLDAAIRTKMHSFWKLLYDKGFIDERKYERLTRSTQLRDEELAGFISRQLVETRQSTKAVAAILKTAYQNSEVVYVKAGNVSDFRQQFKFVKCRDVNDLHHAKDAYLNIVVGNCYHVKFTANPLNFITKNQDNRRYSLKPEIFYKFSIKRDSEIAWIGGKDGTITTVTKTMHKNNILFTRQPVEGKGELFKQNPLKAKNGQLPLKAGLSVEKYGGYNSLSTAYFAVVKSEGKKGAVQLSIEAIPLVYAKQGEEAVQDYLTEVVQLCNPEIRIPKIKKYSLFKINGFPMHISGKTVKQIIFYAAGQLCLADDVAEYLKKALKYEAYIALNEGLISDKNADDTQKQKAQQRLDYFKQKWGISSDANMKIYDILLAKSANNLYKNRPASQTKDLQEQRCVFEKLSLAEQIHIIGEVLNLFKCASASANLKLLGKGNSCGVIKTSNNITKCEKCILINQSPTGVFEQEVDLMKL

SEQ ID NO: 1454 - protein, 1378 aa, unidentified
  REGION 1..1378: note = Description of Unknown: uncultivated organism with predicted taxonomy: Firmicutes
  REGION 1..1378: note = MG18-102 effector
MQKLKNCDYYIGLDMGDASVGWAVTDTNYNILKFNGKALWGIRLFDSANTAASTRVFRSGRRRIDRTTWRLKMLQELFAEEIAKVDPGFFMRLEDSRLHLDDKRDKAVYNLFVDKNYTDKDFYQQYPTMYHLRYALATQAGPFDVRLLYLAVQHIAKHRGHFLFDNLDASKVNDFNAVFSEVENYVRDEMGIEDWSCQNIDELAKVLCDVNLGRTKQKAMQSLLPAQTKQQKAIIQLFSGGKAKLAELFVDEELDECEKKSVSFQDDDLNEFEPVLTAALGERYEGLLRFKAIYDWSLLAKILHLDTSKKDEDEQHLLSECKVQVYEDHKRDLAVLKSMLKGKPLYNKIFRQDGDISYEKYAKGIKGRNQIDFCKDLKKQLEGIAEYKKIMQEITNIDDAKTEEERLLFRITNGFAFPKQTTKDNGIIPVQVHLAELKCILDNAEGYLPFLGETDNNGLSVREKIEQIVKFRIPYYVGPLAGTRMSREQGRCWVVRKNEKIYPWNFTEIVNLEESAEKFITNMTAKCTYLVGEDVLPKESLLYSEFMVRNAINNITVDGERLPVDVLEKIFKQLFLAKTSKVTKKTLERFFRQENISFQNIGGIDDKINASMKSYNDFRRIFGEDYIQLHRDEIENIIRWITLFCDEKKMLVTKIKNTYPHISDDKIKAIKKLKYKDWGRLSATLLNSSAIAYEDDAFGERVTIISALRHTNKNFMELLSNYCSYDFIGKIKDFNGSRQSSNSKLTYKDVEELYVSPSVKRSIWQTLTILEEIKKIMGHESKRIFIEMARSKEESKRTDSRLKKLQDLYKKCREENIDFMPRKDEFNALKTQLSSKKEDDLRSDKLYLYYTQMGRCMYTGESIELASLYDNNLYDIDHIYPRSKTKDDSLSNRVLVKKQVNAAKTDIYPLDAAIRTKMHSFWKLLYDKGFIDERKYERLMRSTQLRDEELAGFISRQLVETRQSTKAVAAILKTAYQNSEVVYVKAGNVSDFRQQFKFVKCRDVNDLHHAKDAYLNIVVGNCYHVKFTANPLNFITKNQDNRRYSLKPEIFYKFSIKRDGEIAWLGGEDGTMATVARTMHKNNILFTRQAVEGKGELFDQQPLKAKGGQLPLKAGLSIEKYGGYNSLTTAYFAVVKSEGKKGAVQLSIEAIPLVYAKQGEIAVQKYLTEVVQLCKPEIKIPKIKKYSLFKINGFPMHISGRTGKQLVFYGAGQLCIADDVADYLKKALKYETDIAEKEKTLADQNADDIQKQKAQKGLDFYEQKWGISGAVNVQLYDMFIAKSANNLYKNRPASQTITLKEKREHFVKLTLSKQIHIIKEILNLFKCASASADFKLIDKGTSCGTLKISNNITKLKECILINQSPTGVFEQEVDLMKL

SEQ ID NO: 1455 - protein, 1379 aa, unidentified
  REGION 1..1379: note = Description of Unknown: uncultivated organism with predicted taxonomy: Phascolarctobacterium succinatutens
  REGION 1..1379: note = MG18-103 effector
MQRLKNCDYYIGLDMGDASVGWAVTDTNYNILKFNGKALWGIRLFDSANTAASTRVFRSGRRRIDRTTWRLKMLQELFAEEIAKVDPGFFMRLEDSRLHLDDKRDKAVYNLFVDKNYTDKDFYQQYPTMYHLRYALATQAGPFDVRLLYLAVQHIAKHRGHFLFDNLDASKVNDFNAVFSEVENYVRDEMGIEDWSCQNIDELAKVLCDVNLGCTTKQKAMQSLLPVQTKQQKAIIQLFSGSKAKLAELFGDAELDECEKKSVSFQDDDLNEFEPVLTAALGERYEGLLRFKAIYDWSLLAKILHLDAGKKDEGEQHLLSECKVQVYEEHKRDLAVLKSMLKGKPLYNKIFRQDGDISYEKYAKGIKGRNQLDFCKDLKKQLEGITEYKKIMQAITSIDDAKTDEERLLFRIANGFAFPKQTTKDNGIIPIQVHLAELKCILDNAEGYLPFLGETDNNGLSVREKIEQIVKFRIPYYVGPLAGTRMSREQGRCWVVRKNEKIYPWNFTEIVNLEESAEKFITNMTAKCTYLVGEDVLPKESLLYSEFMVRNAINNITVDGERLPVDVLEKIFKQLFLAKTSKVTKKTLERFFRQENISFQNIGGIDDKINASMKSYNDFRRIFGEDYIQLHRDEIENIIRWITLFCDEKKMLVTKIKNTYPQIADDQIKAIKKLKYKDWGRLSATLLNSSAIAYEDKAFGELVTIISALRHTNKNFMELLSSYCSYDFIGKIKEFNGSRQSSNGKLTYKDVEELYVSPSVKRSIWQTLTILEEIKKIMGREPKRIFIEMARSKEESKRTDSRLKKLQDLYKKCREENIDFMPRKDEFNALKTQLSSKKEEDLRSDKLYLYYTQMGRCMYTGERIELASLHDNNLYDIDHIYPRSKTKDDSLSNRVLVKKEVNAAKTDIYPLDAVIRTKMHSFWKLLYDKGFIDERKYERLTRSTQLRDEELAGFISRQLVETRQSTKAVAAILKTAYKHSEIVYVKAGNVSDFRQKFEFVKCRDVNDLHHAKDAYLNIVVGNCYHVKFTANPLNFITKNQDNRRYSLKPEIFYKFSIKRDSEIAWIGGKDGTITTVTKTMHKNNILFTRQAVEGKGELFDQQPLKAKGGQLPLKAGLSIEKYGGYNSLTTAYFAVVKSEGKKGAVQLSIEAIPLVYAKQGEIAVQKYLTEVVQLCKPEIMLPKIKKYSLFKINGFPMHISGRTGKQLIFYGAGQLCIADDVADYLKKALMYETNIAEKEKTLADQNADDIQKQKAQKGLDFYEQKWGISGAVNVQLYDMFIAKSANNLYKNRPVSQTITLKEKREHFVKLTVSKQIHIIKEILNLFKCASASADFKLIDKGTSCGTLKISNNINKLKECILINQSPTGVFEQEVDLMKL

SEQ ID NO: 1456 - protein, 1379 aa, unidentified
  REGION 1..1379: note = Description of Unknown: uncultivated organism with predicted taxonomy: Phascolarctobacterium
  REGION 1..1379: note = MG18-104 effector
MQKLKNCDYYIGLDMGDASVGWAVTDTNYNILKFNGKALWGIRLFDSANTAASTRVFRSGRRRIDRTTWRLKMLQELFADEIAKVDPGFFMRLEDSRLHLDDKRDKAVYNLFVDKNYTDKDFYQQYPTMYHLRYALATQAGPFDVRLLYLAVQHIAKHRGHFLFDNLDASKVNDFNAVFSEVENYVRDEMGIEDWSCQNIDELAKVLCDVNLGRTTKQKAMQSLLPAQTKQQKAIIQLFSGGKAKLAELFVDEELDECEKKSVSFQDDDLNEFEPVLTAALGERYEGLLRFKAIYDWSLLAKILHLDTSKKDEGEQHLLSECKVQVYEDHKRDLAVLKSMLKGKPLYNKIFRQDGDISYEKYAKGIKGRNQIDFCKDLKKQLEGIAEYKKIMQEITSIDDAKTEEERLLFRITNGFAFPKQTTKDNGIIPIQVHLAELKCILDNAEGYLPFLGETDNNGLSVREKIEQIVKFRIPYYVGPLAGTRMSREQGRCWVVRKNEKIYPWNFTEIVNLEESAEKFITNMTAKCTYLVGEDVLPKESLLYSEFMVRNAINNITVDGERLPVDVLEKIFKQLFLAKTSKVTKKTLERFFRQENISFQNIGGIDDKINASMKSYNDFRRIFGEDYIQLHRDEIENIIRWITLFCDEKKMLVTKIKNTYPQISDDEIKAIKKLKYKDWGRLSATLLNSSTIAYEDKAFGELVTIISALRHTNKNFMELLSSYCSYDFIGKIKEFNGSRQSSNGKLTYKDVEELYVSPSVKRSIWQTLTILEEIKKIMGCEPKRIFIEMARSKEESKRTDSRLKKLQDLYKKCREENIDFMPRKDEFNALKTQLSSKKEEDLRSDKLYLYYTQMGRCMYTGERIELASLYDNNLYDIDHIYPRSKTKDDSLSNRVLVKKQVNAAKTDTYPLDAAIRTKMHSFWKLLYDKGFIDERKYERLTRSTQLRDEELAGFISRQLVETRQSTKAVAAILKTAYQNSEVVYVKAGNVSDFRQQFKFVKCREVNDLHHAKDAYLNIVVGNCYHVKFTANPLNFITKNQDNRRYSLKPEIFYKFSIKRDGEIAWLGGEDGTMATVARTMHKNNILFTRQAVEGKGELFDQQPLKAKGGQLPLKAGLSIEKYGGYNSLTTAYFAVVKSEGKKGAVQLSIEAIPLVYAKQGEIAVQKYLTEVVQLCKPEIMLPQIKKYSLFKINGFPMHISGRTGNRMLFYGAGQLCLDEADVDYLKNALKYENDIAENELVIADKNSDDIQKQQAQKNLDYYNQKWRIGRKVNMHIYDMLLAKSGNNLYKNRPASQTTDLQEQREFFEKLSLANQIHVIGEVLKLFKCASASANLKLLDKGNACGVIKVSNNILKFKQCVLINQSPTGVFEQEVDLMKL

SEQ ID NO: 1457 - protein, 1379 aa, unidentified; identical to SEQ ID NO: 1452
  REGION 1..1379: note = Description of Unknown: uncultivated organism with predicted taxonomy: Phascolarctobacterium succinatutens
  REGION 1..1379: note = MG18-105 effector

SEQ ID NO: 1458 - protein, 1379 aa, unidentified; identical to SEQ ID NO: 1361
  REGION 1..1379: note = Description of Unknown: uncultivated organism with predicted taxonomy: Firmicutes
  REGION 1..1379: note = MG18-106 effector

SEQ ID NO: 1459 - protein, 1379 aa, unidentified
  REGION 1..1379: note = Description of Unknown: uncultivated organism with predicted taxonomy: Phascolarctobacterium succinatutens
  REGION 1..1379: note = MG18-107 effector
MQKLKNCDYYIGLDMGDASVGWAVTDTNYNILKFNGKALWGIRLFDSANTAASTRVFRSGRRRIDRTTWRLKMLQELFAEEIAKVDPGFFMRLEDSRLHLDDKRDKAVYNLFVDKNYTDKDFYQQYPTMYHLRYALAMQAGPFDVRLLYLAVQHIAKHRGHFLFDNLDASKVNDFNAVFSEVENYVRDEMGIEDWSCQNIDELAKVLCDVNLGRTTKQKAMQSLLPAQTKQQKAIIQLFSGGKAKLAELFGDAELDECEKKSVSFQDDDLDELEPVLTAALGERYEGLLRFKAIYDWSLLAKILHLDTSKKDEDEQHLLSECKVQVYEDHKRDLAVLKSMLKGKPLYNKIFRQDGDISYEKYAKGIKGRNQIDFCKDLKKQLEGIAEYKKIMQEITSIDDAKTEEERLLFRITNGFAFPKQTTKDNGIIPIQVHLAELKCILDNAEGYLPFLGETDNNGLSVREKIEQIVKFRIPYYVGPLAGTRMSREQGRCWVVRKNEKIYPWNFTEIVNLEESAEKFITNMTAKCTYLVGEDVLPKESLLYSEFMVRNAINNITVDGERLPVDVLEKIFKQLFLAKTSKVTKKTLERFFRQENISFQNIGGIDDKINASMKSYNDFRRIFGEDYIQLHRDEIENIIRWITLFCDEKKMLVTKIKNTYPQISDDEIKAIKKLKYKDWGRLSATLLNSSTIAYEDKAFGELVTIISALRHTNKNFMELLSSYCSYDFIGKIKEFNGSRQSSNGKLTYKDVEELYVSPSVKRSIWQTLTILEEIKKIMGCEPKRIFIEMARSKEESKRTDSRLKKLQDLYKKCREENIDFMPRKDEFNAFKTQLSSKKEEDLRSDKLYLYYTQMGRCMYTGERIELASLHDNNLYDIDHIYPRSKTKDDSLSNRVLVKKQVNAAKTDTYPLDAAIRTKMHSFWKLLYDKGFIDERKYERLTRSTQLRDEELAGFISRQLVETRQSTKAVAAILKTAYQNSAVVYVKAGNVSDFRQQFKFVKCREVNDLHHAKDAYLNIVVGNCYHVKFTASPLNFITKNQDNRRYSLKPEIFYKFSIKRDGEIAWLGGEDGTMATVARTMHKNNILFTRQAVEGKGELFDQQPLKAKGGQLPLKAGLSIEKYGGYNSLTTAYFAVVKSEGKKGAVQLSIEAIPLVYAKQGEIAVQKYLTEVVQLCKPEIMLPKIKKYSLFKINGFPMHISGRTGNRMLFYGAGQLCLDEADVDYLKKALKYENDIAENELVIADKNSDDIQKQQAQKNLDYYNQKWRIGRKVNMHIYDMLLAKSGNNLYKNRPASQTTDLQEQREFFEKLSLANQIHVIGEVLKLFKCASASANLKLLDKGNACGVIKVSNNILKFKQCVLINQSPTGVFEHEVDLMKL

SEQ ID NO: 1460 - protein, 1379 aa, unidentified
  REGION 1..1379: note = Description of Unknown: uncultivated organism with predicted taxonomy: Ruminococcaceae bacterium
  REGION 1..1379: note = MG18-108 effector
MQRLKNCDYYIGLDMGDASVGWAVTDTNYNILKFNGKALWGIRLFDSANTAASTRVFRSGRRRIDRTTWRLKMLQELFAEEIAKVDPGFFMRLEDSRLHLDDKRDKAVYNLFVDKNYTDKDFYQQYPTMYHLRYALATQAGPFDVRLLYLAVQHIAKHRGHFLFDNLDASKVNDFNAVFSEVENYVRDEMGIEDWSCQNIDELAKVLCDVNLGRTTKQKAMQSLLPAQTKQQKAIIQLFSGGKAKLAELFVDEELDECEKKSVSFQDDDLNEFEPVLTAALGERYEGLLRFKAIYDWSLLAKILHLDTSKKDEDEQHLLSECKVQVYEDHKRDLAVLKSMLKGKPLYNKIFRQDGDISYEKYAKGIKGRNQLDFCKDLKKQLDGIAEYKKIMQEITSIDAAGTEEERLLFRIANGFAFPKQTTKDNGIIPIQVHLAELKCILDNAEGYLQFLGETDNNGLSVREKIEQIVKFRIPYYVGPLAGTRMSREQGRCWVVRKNEKIYPWNFTQVVNLEESAEKFITNMTAKCTYLVGEDVLPKESLLYSEFMVRNAINNITVDGERLPVDVLEKIFKQLFLAKTSKVTKKTLERFFRQENISFQNIGGIDDKINASMKSYNDFRRIFGEDYIQLHRDEIENIIRWITLFCDEKKMLVTKIKNTYPQIADDQIKAIKKLKYKDWGRLSATLLNSSAIAYEDKAFGELVTIISALRHTNKNFMELLSSYCSYDFIGKIKEFNGSRQSSNGKLTYKDVEELYVSPSVKRSIWQTLTILEEIKKIMGCEPKRIFIEMARSKEESKRTDSRLKKLQDLYKKCREENIDFMPHTDELNAFKIQLSSKKEDDLRSDKLYLYYTQMGRCMYTGERIELASLYNDNLYDIDHIYPRSKTKDDSLSNRVLVKKEVNAAKTDIYPLDAAIRTKMHSFWKLLYDKGFIDERKYERLTRSTQLRDEELAGFISRQLVETRQSTKAVAAILKTAYQNSEVVYVKAGNVSDFRQQFKFVKCRDVNDLHHAKDAYLNIVVGNCYHVKFTANPLNFITKNQDNRRYSLKPEIFYKFSIKRDSEIAWIGGKDGTITTVTKTMHKNNILFTRQPVEGKGELFKQNPLKAKNGQLPLKAGLSVEKYGGYNSLSTAYFAVVKSEGKKGAVQLSIEAIPLVYAKQGEEAVQDYLTEVVQLCNPEIRIPKIKKYSLFKINGFPMHISGKTVKQIIFYAAGQLCLADDVAEYLKKALKYEAYIALNEGLISDKNADDTQKQKAQQRLDYFKQKWGISSDANMKIYDILLAKSANNLYKNRPASQTKDLQEQRCVFEKLSLAEQIHIIGEVLNLFKCASASANLKLLGKGNSCGVIKTSNNITKCEQCILINQSPTGVFEQEVDLMKL

SEQ ID NO: 1461 - protein, 1379 aa, unidentified
  REGION 1..1379: note = Description of Unknown: uncultivated organism with predicted taxonomy: Phascolarctobacterium succinatutens
  REGION 1..1379: note = MG18-109 effector
MQKLKNCDYYIGLDMGDASVGWAVTDTNYNILKFNGKALWGIRLFDSANTAASTRVFRSGRRRIDRTTWHLKMLQELFAEEIAKVDPGFFMRLEDSRLHLDDKRDKAVYNLFVDKNYTDKDFYQQYPTMYHLRYALATQAGPFDVRLLYLAVQHIAKHRGHFLFDNLDASKVNDFNAVFSEVENYVRDEMGIEDWSCQNIDELAKVLCDVNLGRTTKQKAMQSLLPAQTKQQKAIIQLFSGGKAKLAELFVDEELDECEKKSVSFQDDDLNEFEPVLTAALGERYEGLLRFKAIYDWSLLAKILHLDTSKKDEGEQHLLSECKVQVYEDHKRDLAVLKSMLKGKPLYNKIFRQDGDISYEKYAKGIKGRNQIDFCKDLKKQLEGIAEYKKIMQEITSIDDAKTEEERLLFRITNGFAFPKQTTKDNGIIPIQVHLAELKCILDNAEGYLPFLGETDNNGLSVREKIEQIVKFRIPYYVGPLAGTRMSREQGRCWVVRKNEKIYPWNFTEIVNLEESAEKFITNMTAKCTYLVGEDVLPKESLLYSEFMVRNAINNITVDGERLPVDVLEKIFKQLFLAKTSKVTKKTLERFFRQENISFQNIGGIDDKINASMKSYNDFRRIFGEDYIQLHRDEIENIIRWITLFCDEKKMLVTKIKNTYPQISDDEIKAIKKLKYKDWGRLSATLLNSSTIAYEDKAFGELVTIISALRHTNKNFMELLSSYCSYDFIGKIKEFNGSRQSSNGKLTYKDVEELYVSPSVKRSIWQTLTILEEIKKIMGCEPKRIFIEMARSKEESKRTDSRLKKLQDLYKKCREENIDFMPRKDEFNALKTQLSSKKEENLRSDKLYLYYTQMGRCMYTGERIELASLYDNNLYDIDHIYPRSKTKDDSLSNRVLVKKQINAAKTDTYPLDAAIRTKMHSFWKLLYDKGFIDERKYERLTRSTQLRDEELVGFISRQLVETRQSTKAVAAILKTAYQNSEVVYVKAGNVSDFRQQFKFVKCREVNDLHHAKDAYLNIVVGNCYHVKFTANPLNFITKNQDNRRYSLKPEIFYKFSIKRDGEIAWLGGEDGTMATVARTMHKNNILFTRQAVEGKGELFDQQPLKAKGGQLPLKAGLSIEKYGGYNSLTTAYFAVVKSEGKKGAVQLSIEAIPLVYAKQGEIAVQKYLTEVVQLCKPEIMLPKIKKYSLFKINGFPMHISGRTGNRMLFYGAGQLCLDEADVDYLKKALKYENDIAENELVIADKNSDDIQKQQAQKNLDYYNQKWRIGRKVNMHIYDMLLAKSGNNLYKNRPASQTTDLQEQREFFEKLSLANQIHVIGEVLKLFKCASASANLKLLDKGNACGVIKVSNNILKFKQCVLINQSPTGVFEQEVDLMKL

SEQ ID NO: 1462 - protein, 879 aa, unidentified
  REGION 1..879: note = Description of Unknown: uncultivated organism with predicted taxonomy: Clostridiales bacterium
  REGION 1..879: note = MG18-110 effector
MQKLKNCDYYIGLDMGDASVGWAVTDTNYNILKFNGKALWGIRLFDSANTTASTRVFRSGRRRIDRTTWRLKMLQELFAEEIAKVDPGFFMRLEDSRLHLDDKRDKAVYNLFVDKNYTDKDFYQQYPTMYHLRYALATQAGPFDVRLLYLAVQHIAKHRGHFLFDNLDASKVNDFNAVFSEVENYVRDEMGIEDWSCQNIDELAKVLCDVNLGRTTKQKAMQSLLPAQTKQQKAIIQLFSGGKAKLAELFVDEELDECEKKSVSFQDDDLNEFEPVLTAALGERYEGLLRFKAIYDWSLLAKILHLDTSKKDEDEQHLLSECKVQVYEDHKRDLAVLKSMLKGKPLYNKIFRQDGDISYEKYAKGIKGRNQIDFCKDLKKQLEGIAEYKKIMQEITNIDDAKTEEERLLFRITNGFAFPKQTTKDNGIIPIQVHLAELKCILDNAEGYLPFLGETDNNGLSVREKIEQIVKFRIPYYVGPLAGTRMSREQGRCWVVRKHEKIYPWNFTEIVNLEESAEKFITNMTAKCTYLVGEDVLPKESLLYSEFMVRNAINNITVDGERLPVDVLEKIFKQLFLAKTSKVTKKTLERFFRQENISFQNIGGIDDKINASMKSYNDFRRIFGEDYIQLHRDEIENIIRWITLFCDEKKMLVTKIKNTYPQISDDEIKAIKKLKYKDWGRLSATLLNSSTIAYEDKAFGELVTIISALRHTNKNFMELLSSYCYYDFIGKIKEFNGSRQSSNGKLTYKDVEELYVSPSVKRSIWQTLTILEEIKKIMGCEPKRIFIEMARSKEESKRTDSRLKKLQDLYKKCREENIDFMPRKDEFNALKTQLSSKKEENLRSDKLYLYYTQMGRCMYTGERLSLIHISEPTRPLYIS

SEQ ID NO: 1463 - protein, 1379 aa, unidentified; identical to SEQ ID NO: 1357
  REGION 1..1379: note = Description of Unknown: uncultivated organism with predicted taxonomy: Phascolarctobacterium succinatutens
  REGION 1..1379: note = MG18-111 effector

SEQ ID NO: 1464 - protein, 1379 aa, unidentified
  REGION 1..1379: note = Description of Unknown: uncultivated organism with predicted taxonomy: Phascolarctobacterium succinatutens
  REGION 1..1379: note = MG18-112 effector
MQKLKNCDYYIGLDMGDASVGWAVTDTNYNILKFNGKALWGIRLFDSANTAASTRVFRSGRRRIDRTTWRLKMLQELFAEEIAKVDPGFFMRLEDSRLHLDDKRDKAVYNLFVDKNYTDKDFYQQYPTMYHLRYALATQAGPFDVRLLYLAVQHIAKHRGHFLFDNLDASKVNDFNAVFSEVENYVRDEMGIEDWSCQNIDELAKVLCDVNLGRTTKQKAMQSLLPAQTKQQKAIIQLFSGGKAKLAELFVDAELDECEKKSVSFQDDDLNEFEPVLTAALGERYEGLLRFKAIYDWSLLAKILHLDTSKKDEDEQHLLSECKVQVYEDHKRDLAVLKSMLKGKPLYNKIFRQDGDISYEKYAKGIKGRNQIDFCKDLKKQLEGIAEYKKIMQEITSIDDAKTEEERLLFRITNGFAFPKQTTKDNGIIPIQVHLAELKCILDNAEGYLPFLGETDNNGLSVREKIEQIVKFIIPYYVGPLAGTRMSREQGRCWVVRKNEKIYPWNFTEIVNLEESAEKFITNMTAKCTYLVGEDVLPKESLLYSEFMVRNAINNITVDGERLPVDVLEKIFKQLFLAKTSKVTKKTLERFFRQENISFQNIGGIDDKINASMKSYNDFRRIFGEDYIQLHRDEIENIIRWITLFCDEKKMLVTKIKNTYPQISDDEIKAIKKLKYKDWVRLSATLLNSSAIAYDDKAFGELVTIISALRHTNKNFMELLSSYCSYDFIGKIKEFNGSRQSSNGKLTYKDVEELYVSPSVKRSIWQTLTILEEIKKIMGCEPKRIFIEMARSKEESKRTDSRLKKLQDLYKKCREENIDFMPRKDEFNTLKTQLSSKKEDDLRSDKLYLYYTQMGRCMYTGEKIELASLYDNNLYDIDHIYPRSKTKDDSLSNRVLVKKQVNAAKTDTYPLDAAIRTKMHSFWKLLYDKGFIDERKYERLTRSTQLRDEELAGFISRQLVETRQSTKAVAAILKTAYQNSEVVYVKAGNVSDFRQQFKFVKCREVNDLHHAKDAYLNIVVGNCYHVKFTANPLNFITKNQDNRRYSLKPEIFYKFSIKRDGEIAWLGGEDGTMATVARTMHKNNILFTRQAVEGKGELFDQQPLKAKGGQLPLKAGLSIEKYGGYNSLTTAYFAVVKSEGKKGAVQLSIEAIPLVYAKQGEIAVQKYLTEVVQLCKPEIMLPKIKKYSLFKINGFPMHISGRTGNRMLFYGAGQLCLDEADVDYLKKALKYENDIAENELVIADKNSDDIQKQQAQKNLDYYNQKWRIGRKVNMHIYDMLLAKSGNNLYKNRPASQTTDLQEQREFFEKLSLANQIHVIGEVLKLFKCASASANLKLLDKGNACGVIKVSNNILKFKQCVLINQSPTGVFEQEVDLMKL

SEQ ID NO: 1465 - protein, 1379 aa, unidentified
  REGION 1..1379: note = Description of Unknown: uncultivated organism with predicted taxonomy: Clostridiales
  REGION 1..1379: note = MG18-113 effector
MQKLKNCDYYIGLDMGDASVGWAVTDTNYNILKFNGKALWGIRLFDSANTAASTRVFRSGRRRIDRTTWRLKMLQELFADEIAKVDTGFFMRLEDSRLHLDDKRDKAVYNLFVDKNYTDKDFYQQYPTMYHLRYALATQKGPFDVRLLYLAVQHIAKHRGHFLFDNLDASKVNDFNAVFSEVENYVRDEMGIEDWSCQNIDELAKVLCDVNLGRTTKQKAMQSLLPAQTKQQKAIIQLFSGGKAKLAELFVDEELDECEKKSVSFQDDDLNEFEPVLTAALGERYEGLLRFKAIYDWSLLAKILHLDTSKKDEDEQHLLSECKVQVYEDHKRDLAVLKSMLKGKPLYNKIFRQDGDISYEKYAKGIKGRNQIDFCKDLKKQLEGIAEYKKIMQEITSIDDAKTEEERVLFRITNGFAFPKQTTKDNGIIPIQVHLAELKCILDNAEGYLPFLGETDNNGLSVREKIGQIVKFRIPYYVGPLAGTRMSREQGRCWVVRKNEKIYPWNFTEIVNLEESAEKFITNMTAKCTYLVGEDVLPKESLLYSEFMVRNAINNITVDGERLPVDVLEKIFKQLFLAKTSKVTKKTLERFFRQENISFQNIGGIDDKINASMKSYNDFRRIFGEDYIQLHRDEIENIIRWITLFCDEKKMLVTKIKNTYPQISDDEIKAIKKLKYKDWGRLSATLLNSSTIAYEDKAFGELVTIISALRHTNKNFMELLSSYCSYDFIGKIKEFNGSRQSSNGKLTYKDVEELYVSPSVKRSIWQTLTILEEIKKIMGCEPKRIFIEMARSKEESKRTDSRLKKLQDLYKKCREENIDFIPLKDEFNALKTQLSSKKEEDLRSDKLYLYYTQMGCCMYTGERIELASLYDNNLYDIDHIYPRSKTKDDSLSNRVLVKKQVNAAKTDIYPLDAAIRTKMHSFWKLLYDKGFIDERKYERLTRSTQLRDEELAGFISRQLVETRQSTKAVAAILKTAYQNSEVVYVKAGNVSDFRQQFKFVKCRDVNDLHHAKDAYLNIVVGNCYHVKFTANPLNFITKNQDNRRYSLKPEIFYKFSIKRDGEIAWLGGEDGTMATVARTMHKNNILFTRQPLEGKGELFKQNPLKAKSGQLPLKAGLSVEKYGGYDSLTTAYFALVKSEGKKGSVQLSIEGIPLVYAKQGEKAVQDYLTEVVQLCKPEIKIPKIKKYSLFKINGFPMHISGRTGKQLIFYGAGQLCIADDVADYLKKALKYETDIAEKEKTLADQNADEIQKQKAQKGLDFCEQKWGISGAVNVQLYDMFIAKSANNLYKNRPASQTITLKEKREHFVKLTLSKQIHIIKEILNLFKCASASADFKLIDKGTSCGTLKISNNITKLKECILINQSPTGVFEQEVDLMKL

SEQ ID NO: 1466 - protein, 1379 aa, unidentified
  REGION 1..1379: note = Description of Unknown: uncultivated organism with predicted taxonomy: Phascolarctobacterium
  REGION 1..1379: note = MG18-114 effector
MQKLKNCDYYIGLDMGDASVGWAVTDTNYNILKFNGKALWGIRLFDSANTAASTRVFRSGRRRIDRTTWRLKMLQELFAEEIAKVDPGFFMRLEDSRLHLDDKRDKAVYNLFVDKNYTDKDFYQQYPTMYHLRYALATQAGPFDVRLLYLAVQHIAKHRGHFLFDNLDASKVNDFNAVFSEVENYVRDEMGIEDWSCQNIDELAKVLCDVNLGRTTKQKAMQSLLPAQTKQQNAIIQLFSGGKAKLAELFVDEELDECEKKSVSFQDDDLNEFEPVLTAALGERYEGLLRFKAIYDWSLLAKILHLDTSKKDEDEQHLLSECKVQVYEDHKRDLAVLKSMLKGKPLYNKIFRQDGDISYEKYAKGIKGRNQIDFCKDLKKQLEGIAEYKKIMQEITSIDDAKTEEERVLFRITNGFAFPKQTTKDNGIIPIQVHLAELKCILDNAEGYLPFLGETDNNGLSVREKIEQIVKFRIPYYVGPLAGTRMSREQGRCWVVRKNEKIYPWNFTEIVNLEESAEKFITNMTAKCTYLVGEDVLPKESLLYSEFMVRNAINNITVDGERLPVDVLEKIFEQLFLAKTSKVTKKTLERFFRQENISFQNIGGIDDKINASMKSYNDFRRIFGEDYIQLHRDEIENIIRWITLFCDEKKMLVTKIKNTYPQISDDEIKAIKKLKYKDWGRLSATLLNSSTIAYEDKAFGELVTIISALRHTNKNFMELLSSYCSYDFIGKIKEFNGSRQSSNGKLAYKDVEELYVSPSGKRSIWQTLTILEEIKKIMGCEPKRIFIEMARSKEESKRTDSRLKKLQDLYKKCREENIDFMPRKDEFNVLKTQLSSKNEEDLRSDKLYLYYTQMGRCMYTGEIIELASLNDNNLYDIDHIYPRSKTKDDSLSNRVLVKKQVNAAKTDIYPLDAAIRTKMHSFWKLLYDKGFIDERKYERLTRSTQLRDEELAGFISRQLVETRQSTKAVAAILKTAYQNSEVVYVKAGNVSDFRQQFKFVKCREVNDLHHAKDAYQNIVVGNCYHVKFTANPLNFITKNQDNRRYSLKPEIFYKFSIKRDGEIAWLGGEDGTMATVARTMHKNNILFTRQAVEGKGELFDQQPLKAKGGQLPLKAGLSIEKYGGYNSLTTAYFAVVKSEGKKGAVQLSIEAIPLVYAKQGEIAVQKYLTEVVQLCKPEIMLPKIKKYSLFKINGFPMHISGRTGNRMLFYGAGQLCLDEADVDYLKKALKYENDIAENELVIADKNSDDIQKQQAQKNLDYYNQKWRIGRKVNMHIYDMLLAKSGNNLYKNRPASQTTDLQEQREFFEKLSLANQIHVIGEVLKLFKCASASANLKLLDKGNACGVIKVSNNILKFKQCVLINQSPTGVFEQEVDLMKL

SEQ ID NO: 1467 - protein, 1379 aa, unidentified
  REGION 1..1379: note = Description of Unknown: uncultivated organism with predicted taxonomy: Phascolarctobacterium succinatutens
  REGION 1..1379: note = MG18-115 effector
MHKLKNCDYYIGLDMGDASVGWAVTDTNYNILKFNGKALWGIRLFDSANTAASTRVFRSGRRRIDRTTWRLKMLQELFAEEIAKVDPGFFMRLEDSRLHLDDKRDKAVYNLFVDKNYTDKDFYQQYPTMYHLRYALATQAGPFDVRLLYLAVQHIAKHRGHFLFDNLDASKVNDFNAVFSEVENYVRDEMGIEDWSSQNIDELAKVLCDVNLGRTTKQKAMQSLLPAQTKQQKAIIQLFSGGKAKLAELFVDEELDECEKKSVSFQDDDLNEFEPVLTAALGERYEGLLRFKAIYDWSLLAKILHLDTSKKDEDEQHLLSECKVQVYEDHKRDLAVLKSMLKGKPLYNKIFRQDGDISYEKYAKGIKGRNQIDFCKDLKKQLEGIAEYKKIMQEITNIDDAKTEEERLLFRITNGFAFPKQTTKDNGIIPIQVHLAELKCILDNAEGYLPFLGETDNNGLSVREKIEQIVKFRIPYYVGPLAGTRMSREQGRCWVVRKHEKIYPWNFTEIVNLEESAEKFITNMTAKCTYLVGEDVLPKESLLYSEFMVRNAINNITVDGERLPVDVLEKIFKQLFLAKTSKVTKKTLERFFRQENISFQNIGGIDDKINASMKSYNDFRRIFGEDYIQLHRDEIENIIRWITLFCDEKKMLVTKIKNTYPQIADDQIKAIKKLKYKDWGRLSATLLNSSAIAYEDKAFGELVTIISALRHTNKNFMELLSSYCSYDFIGKIKEFNGSRQSSNGKLTYKDVEELYVSPSVKRSIWQTLTILEEIKKIMGREPKRIFIEMARSKEESKRTDSRLKKLQDLYKKCREENIDFMPRKDEFNALKTQLSSKKEEDLRSDKLYLYYTQMGRCMYTGERIELASLDDNNLYDIDHIYPRSKTKDDSLSNRVLVKKEVNAAKTDIYPLDAVIRTKMHSFWKLLYDKGFIDERKYERLTRSTQLRDEELAGFISRQLVETRQSTKAVAAILKTAYKHSEIVYVKAGNVSDFRQKFEFVKCRDVNDLHHAKDAYLNIVVGNCYHVKFTANPLNFITKNQDNRRYSLKPEIFYKFSIKRDSEIAWIGGKDGTITTVTKTMHKNNILFTRQPVEGKGELFKQQPLKAKSGQLPLKAGLSVEKYGGYDSLTTAYFALVKSEGKKGAVQLSIEGIPLVYAKQGEIAVQKYLTEVVQLCKPEIKIPKIKKYSLFKINGFPMHISGRTGKQLVFYGAGQLCIADDVADYLKKALKYETDIAEKEKTLADQNADDIQKQKAQKGLDFYEQKWGISGAVNVQLYDMFIAKSANNLYKNRPASQTITLKEKREHFVKLTLSKQIHIIKEILNLFKCASASADFKLIDKGTSCGTLKISNNITKLKECILINQSPTGVFEQEVDLMKL

SEQ ID NO: 1468 - protein, 1379 aa, unidentified
  REGION 1..1379: note = Description of Unknown: uncultivated organism with predicted taxonomy: Phascolarctobacterium succinatutens
  REGION 1..1379: note = MG18-116 effector
MQKLKNCDYYIGLDMGDASVGWAVTDTNYNILKFNGKALWGIRLFDSANTAASTRVFRSGRRRIDRTTWRLKMLQELFAEEIAKVDPGFFMRLEDSRLHLDDKRDKAVYNLFVDKNYTDKDFYQQYPTMYHLRYALATQAGPFDVRLLYLAVQHIAKHRGHFLFDNLDASKVNDFNAVFSEVENYVRDEMGIEDWSCQNIDELAKVLCDVNLGRTTKQKAMQSLLPAQTKQQKAIIQLFSGGKAKLAELFVDEELDECEKKSVSFQDDDLNEFEPVLTAALGERYEGLLRFKAIYDWSLLAKILHLDTSKKDEDEQHLLSECKVQVYEDHKRDLAVLKSMLKGKPLYNKIFRQDGDISYEKYAKGIKGRNQIDFCKDLKKQLEGIAEYKKIMQEITSIDDAKTEEERLLFRITNGFAFPKQTTKDNGIIPIQVHLAELKCILDNAEGYLPFLGETDNNGLSVREKIEQIVKFRIPYYVGPLAGTRMSREQGRCWVVRKNEKIYPWNFTEIVNLEESAEKFITNMTAKCTYLVGEDVLPKESLLYSEFMVRNAINNITVDGERLPVDVLEKIFKQLFLAKTSKVTKKTLERFFRQENISFQNIGGIDDKINASMKSYNDFRRIFGEDYIQLHRDEIENIIRWITLFCDEKKMLVTKIKNTYPQISDDEIKAIKKLKYKDWGRLSATLLNSSTIAYEDKAFGELVTIISALRHTNKNFMELLSSYCSYDFIGKIKEFNGSRQSSNGKLTYKDVEELYVSPSVKRSIWQTLTILEEIKKIMGCEPKRIFIEMARSKEESKRTDSRLKKLQDLYKKCREENIDFMPRKDEFNALKTQLSSKKEEDLRSDKLYLYYTQMGRCMYTGERIELASLYDNNLYDIDHIYPRSKTKDDSLSNRVLVKKQVNAAKTDIYPLDAAIRTKMHSFWKLLYDKGFIDERKYERLTRSTQLRDEELAGFISRQLVETRQSTKAVAAILKTAYQNSEVVYVKAGNVSDFRQQFKFVKCRDVNDLHHAKDAYLNIVVGNCYHVKFTANPLNFITKNQDNRRYSLKPEIFYKFNIKRDDDIAWLGGEDGTMATVARTMHKNNILFTRQAVEGKGELFKQNPLKANSGQLPLKAGLSVEKYGGYDSLTTAYFAVVKSEGKKGAVQLSIEGIPLVYARQGEDAIKKYLIEVVHLCNPIIKLNKIKKYSLFKINGFPMHISGRQGKQLIFYVAGQLCLDEESIAYLKKAFKYESDLAINEEIIDDKNAAEENKQKAHKRLDFYENTWGISEVANMQLYDILIAKSANNLYKNRPASQTSTLKQQRDMFAKLPLSKQIRVIKEAMNLFKCASATADFKLLGKGSVCGKIQVSTNITKCKQCILINQSPTGVFEQEVDLMKL

SEQ ID NO: 1469 - protein, 1379 aa, unidentified; identical to SEQ ID NO: 1397
  REGION 1..1379: note = Description of Unknown: uncultivated organism with predicted taxonomy: Phascolarctobacterium
  REGION 1..1379: note = MG18-117 effector

SEQ ID NO: 1470 - protein, 1379 aa, unidentified
  REGION 1..1379: note = Description of Unknown: uncultivated organism with predicted taxonomy: Phascolarctobacterium succinatutens
  REGION 1..1379: note = MG18-118 effector
MQKLKNCDYYIGLDMGDASVGWAVTDTNYNILKFNGKALWGIRLFDSANTAASTRVFRSGRRRIDRTTWRLKMLQELFAEEIAKVDPGFFMRLEDSRLHLDDKRDKAVYNLFVDKNYTDKDFYQQYPTMYHLRYALATQAGPFDVRLLYLAVQHIAKHRGHFLFDNLDASKVNDFNAVFSEVENYVRDEMGIEDWSCQNIDELAKVLCDVNLGRTTKQKAMQSLLPAQTKQQKAIIQLFSGGKAKLAELFVDAELDECEKKSVSFQDDDLNEFEPVLTAALGERYEGLLRFKAIYDWSLLAKILHLDTSKKDEDEQHLLSECKVQVYEDHKRDLAVLKSMLKGKPLYNKIFRQDGDISYEKYAKGIKGRNQIDFCKDLKKQLEGIAEYKKIMQEITSIDDAKTEEERVLFRITNGFAFPKQTTKDNGIIPIQVHLAELKCILDNVEGYLPFLGETDNNGLSVREKIEQIVKFRIPYYVGPLAGTRMSREQGRYWVVRKNEKIYPWNFTEIVNLEESAEKFITNMTAKCTYLVGEDVLPKESLLYSEFMVRNAINNITVDGERLPVDVLEKIFKQLFLAKTSKVTKKTLERFFRQENISFQNIGGIDDKINASMKSYNDFRRIFGEDYIQLHRDEIENIIRWITLFCDEKKMLVTKIKNTYPQISDDEIKAIKKLKYKDWGRLSATLLNSSAIAYEDKAFGELVTIISALRHTNKNFMELLSSYCSYDFIGKIKEFNGSRQSSNGKLTYKDVEELYVSPSVKRSIWQTLTILEEIKKIMGCEPKRIFIEMARSKEESKRTDSRLKKLQDLYKKCREENIDFMPRKDEFNTLKTQLSSKKEDDLRSDKLYLYYTQMGRCMYTGEKIELASLYDNNLYDIDHIYPRSKTKDDSLSNRVLVKKQVNAAKTDIYPLDAAIRTKMHSFWKILYDKGFIDERKYQRLTRSTQLRDEELAGFISRQLVETRQSTKAVAAILKTAYQNSEVVYVKAGNVSDFRQQFKFVKCREVNDLHHAKDAYLNIVVGNCYHVKFTANPLNFITKNQDNRRYSLKPEIFYKFSIKRDGEIAWLGGEDGTMATVARTMHKNNILFTRQAVEGKGELFDQQPLKAKGGQLPLKAGLSIEKYGGYNSLTTAYFAVVKSEGKKGAVQLSIEAIPLVYAKQGEIAVQKYLTKVVQLCKPEIMLPKIKKYSLFKINGFPMHISGRTGNRMLFYGAGQLCLDEADVDYLKKALKYENDIAENELVIADKNSDDIQKQQAQKNLDYYNQKWRIGRKVNMHIYDMLLAKSGNNLYKNRPASQTTDLQEQREFFEKLSLANQIHVIGEVLKLFKCASASANLKLLDKGNACGVIKVSNNILKFKQCVLINQSPTGVFEQEVDLMKL

SEQ ID NO: 1471 - protein, 1379 aa, unidentified; identical to SEQ ID NO: 1420
  REGION 1..1379: note = Description of Unknown: uncultivated organism with predicted taxonomy: Phascolarctobacterium succinatutens
  REGION 1..1379: note = MG18-119 effector

SEQ ID NO: 1472 - protein, 1379 aa, unidentified; identical to SEQ ID NO: 1421
  REGION 1..1379: note = Description of Unknown: uncultivated organism with predicted taxonomy: Phascolarctobacterium succinatutens
  REGION 1..1379: note = MG18-120 effector

SEQ ID NO: 1473 - protein, 1379 aa, unidentified; identical to SEQ ID NO: 1425
  REGION 1..1379: note = Description of Unknown: uncultivated organism with predicted taxonomy: Phascolarctobacterium succinatutens
  REGION 1..1379: note = MG18-121 effector

SEQ ID NO: 1474 - protein, 1379 aa, unidentified
  REGION 1..1379: note = Description of Unknown: uncultivated organism with predicted taxonomy: Phascolarctobacterium
  REGION 1..1379: note = MG18-122 effector
MQKLKNCDYYIGLDMGDASVGWAVTDTNYNILKFNGKALWGIRLFDSANTAASTRVFRSGRRRIDRTTWRLKMLQELFAEEIAKVDPGFFMRLEDSRLHLDDKRDKAVYNLFVDKNYTDKDFYQQYPTMYHLRYALATQAGPFDVRLLYLAVQHIAKHRGHFLFDNLDASKVNDFNAVFSEVENYVRDEMGIEDWSCQNIDELAKVLCDVNLGRTTKQKAMQSLLPAQTKQQKAIIQLFSGGKAKLAELFVDEELDECEKKSVSFQDDDLNEFEPVLTAALGERYEGLLRFKAIYDWSLLAKILHLDTSKKDEGEQHLLSECKVQVYEDHKRDLAVLKSMLKGKPLYNKIFRQDGDISYEKYAKGIKGRNQIDFCKDLKKQLEGIAEYKKIMQEITSIDDAKTEEERLLFRITNGFAFPKQTTKDNGIIPIQVHLAELKCILDNAEGYLPFLGETDNNGLSVREKIEQIVKFRIPYYVGPLAGTRMSREQGRCWVVRKNEKIYPWNFTEIVNLEESAEKFITNMTAKCTYLVGEDVLPKESLLYSEFMVRNAINNITVDGERLPVDVLEKIFKQLFLAKTSKVTKKTLERFFRQENISFQNIGGIDDKINASMKSYNDFRRIFGEDYIQLHRDEIENIIRWITLFCDEKKMLVTKIKNTYPQISDDEIKAIKKLKYKDWGRLSATLLNSSTIAYEDKAFGELVTIISALRHTNKNFMELLSSYCSYDFIGKIKEFNGSRQSSNGKLTYKDVEELYVSPSVKRSIWQTLTILEEIKKIMGCEPKRIFIEMARSKEESKRTDSRLKKLQDLYKKCREENIDFMHRKDEFNALKTQLSSKKEEDLRSDKLYLYYTQMGRCMYTGERIELASLYDNNLYDIDHIYPRSKTKDDSLSNRVLVKKQVNAAKTDIYPLDAAISTKMHSFWKLLYDKGFIDERKYERLTRSTQLRDEELAGFISRQLVETRQSTKAVAAILKTAYQNSEVVYVKAGNVSDFRQQFKFVKCRDVNDLHHAKDAYLNIVVGNCYHVKFTANPLNFITKNQDNRRYSLKPEIFYKFSIKRDSEIAWIGGKDGTITTVTKTMHKNNILFTRQPVEGKGELFKQNPLKAKNGQLPLKAGLSVEKYGGYNSLSTAYFAVVKSEGKKGAVQLSIEAIPLVYAKQGEEAVQDYLTEVVQLCNPEIRIPKIKKYSLFKINGFPMHISGKTVKQIIFYAAGQLCLADDVADYLKKALKYEAYIALNEGLISDKNADDTQKQKAQQRLDYFKQKWGISSDANMKIYDILLAKSANNLYKNRPASQTKDLQEQRCVFEKLSLAEQIHIIGEVLNLFKCASASANLKLLGKGNSCGVIKTSNNITKCKQCILINQSPTGVFEQEVDLMKL

SEQ ID NO: 1475 - protein, 1379 aa, unidentified
  REGION 1..1379: note = Description of Unknown: uncultivated organism with predicted taxonomy: Phascolarctobacterium succinatutens
  REGION 1..1379: note = MG18-123 effector
MQKSKNCDYYIGLDMGDASVGWAVTDTNYNILKFNGKALWGIRLFDSANTAASTRVFRSGRRRIDRTTWRLKMLQELFAEEIAKVDPGFFMRLEDSRLHLDDKRDKAVYNLFVDKNYTDKDFYQQYPTMYHLRYALATQAVPFDVRLLYLAVQHIAKHRGHFLFDNLDASKVNDFNAVFSEVENYVRDEMGIEDWSCQNIDELAKVLCDVNLGRTTKQKAMQSLLPAQTKQQKAIIQLFSGGKAKLAELFVDEELDECEKNSVSFQDDDLNEFEPVLTAALGERYEGVLRFKAIYDWSLLAKILHLDTSKKDEDEQHLLSECKVQVYEDHKRDLAVLKSMLKGKPLYNKIFRQDGDISYEKYAKGIKGRNQIDFCKDLKKQLEGIAEYKKIMQEITNIDDAKTEEERLLFRITNGFAFPKQTTKDNGIIPIQVHLAELKCILDNAEGYLPFLGETDNNGLSVREKIEQIVKFRIPYYVGPLAGTRMSREQGRCWVVRKHEKIYPWNFTEIVNLEESAEKFITNMTAKCTYLVGEDVLPKESLLYSEFMVRNAINNITVDGERLPVDVLEKIFKQLFLAKTSKVTKKTLERFFRQENISFQNIGGIDDKINASMKSYNDFRRIFGEDYIQLHRDEIENIIRWITLFCDEKKMLVTKIKNTYPQISDDEIKAIKKLKYKDWGRLSATLLNSSTIAYEDKAFGELVTIISALRHTNKNFMELLSSYCYYDFIGKIKEFNGSRQSSNGKLTYKDVEELYVSPSVKRSIWQTLTILEEIKKIMGCEPKRIFIEMARSKEESKRTDSRLKKLQDLYKKCREENIDFMPRKDEFNALKTQLSSKKEENLRSDKLYLYYTQMGRCMYTGERIELASLYDNNLYDIDHIYPRSKTKDDSLSNRVLVKKQVNAAKTDTYPLDAAIRTKMHSFWKLLYDKGFIDERKYERLTRSTQLRDEELAGFISRQLVETRQSTKAVAAILKTAYQNSEVVYVKAGNVSDFRQQFKFVKCREVNDLHHAKDAYLNIVVGNCYHVKFTANPLNFITKNQDNRRYSLKPEIFYKFSIKRDGEIAWLGGEDGTMATVARTMHKNNILFTRQAVEGKGELFDQQPLKAKGGQLPLKAGLSIEKYGGYNSLTTAYFAVVKSEGKKGAVQLSIEAIPLVYAKQGEIAVQKYLTEVVQLCKPEIMLPKIKKYSLFKINGFPMHISGRTGKQLIFYGAGQLCIADDVADYLKKALMYETDIAEKEKTLADQNADDIQKQKAQKGLDFYEQKWGISGAVNVQLYDMFIAKSANNLYKNRPVSQTITLKEKREHFVKLTVSKQIHIIKEILNLFKCASASADFKLIDKGTSCGTLKISNNINKLKECILINQSPTGVFEQEVDLMKL

SEQ ID NO: 1476 - protein, 1379 aa, unidentified
  REGION 1..1379: note = Description of Unknown: uncultivated organism with predicted taxonomy: Phascolarctobacterium succinatutens
  REGION 1..1379: note = MG18-124 effector
MQKLKNCDYYIGLDMGDASVGWAVTDTNYNILKFNGKALWGIRLFDSANTAASTRVFRSGRRRIDRTTWRLKMLQELFADEIAKVDTGFFMRLEDSRLQLDDKREKAAYNLFVDKSYTDKEFYQQYPTMYHLRYALATQKGPFDVRLLYLAVQHIAKHRGHFLFDNLDASKVNDFNAVFSEVENYVRDEMGIEDWSCQNIDEFAKVLRDVNLGRTTKQKAMQSLLPAQTKQQKAIIQLFSGGKAKLAELFVDEELDECEKKSVSFQDDDLNEFEPVLTAALGERYEGLLRFKAIYDWSLLAKILHLDTSKKDEDEQHLLSECKVQVYEDHKRDLAVLKSMLKGKPLYNKIFRQDGDISYEKYAKGIKGRNQIDFCKDLKKQLEGIAEYKKIMQEITSIDDAKTEEERLLFRITNGFAFPKQTTKDNGIIPIQVHLAELKCILENAEGYLPFLGETDNNGLSVREKIKQIVKFRIPYYVGPLAGTRMSREQGRCWVVRKNEKIYPWNFTEIVNLEESAEKFITNMTAKCTYLVGEDVLPKESLLYSEFMVRNAINNITVDGERLPVDVLEKIFKQLFLAKTSKVTKKTLERFFRQENISFQNIGGIDDKINASMKSYNDFRRIFGEDYIQLHRDEIENIIRWITLFCDEKKMLVTKIKNTYPQISDDEIKAIKKLKYKDWGRLSATLLNSSTIAYEDKAFGELVTIISALRHTNKNFMELLSSYCSYDFIGKIKEFNGSRQSSNGKLTYKDVEELYVSPSVKRSIWQTLTILEEIKKIMGCEPKRIFIEMVRSKEESKRTDSRLKKLQDLYKKCREENIDFMPRKDEFNALKTMLSSQKEEDLRSDKLYLYYTQMGRCMYTGERIELASLYDNNLYDIDHIYPRSKTKDDSLSNRVLVKKQVNAAKTDTYPLDAAIRTKMHSFWKLLYDKGFIDERKYERLTRSTQLRDEELAGFISRQLVETRQSTKAVAAILKTAYQNSEVVYVKAGNVSDFRQQFKFVKCRDVNDLHHAKDAYLNIVVGNCYHVKFTANPLNFITKNQDNRRYSLKPEIFYKFSIKRDGEIAWLGGEDGTMATVARTMHKNNILFTRQPLEGKGELFKQNPLKAKSGQLPLKAGLSVEKYGGYDSLTTAYFALVKSEGKKGSVQLSIEGIPLVYAKQGEKAVQDYLTEVVQLCKPEIKIPKIKKYSLFKINGFPMHISGRQGKQLIFYVAGQLCINEDSIAYLKKAFKYESDLAVNEEILADENGDEVRKQKARNRLAFYDNTWGISLEANMQLYDMLLAKSANNLYKNRPASQTSTLKEQREQFSILPLSKQIHVIKEILKLFKCASATADFKLLEKGSTCGKIQVSTNITKCKQCILINQSPTGVFEQEVDLMKL

SEQ ID NO: 1477 - protein, 1379 aa, unidentified; identical to SEQ ID NO: 1391
  REGION 1..1379: note = Description of Unknown: uncultivated organism with predicted taxonomy: Phascolarctobacterium
  REGION 1..1379: note = MG18-125 effector

SEQ ID NO: 1478 - protein, 1379 aa, unidentified
  REGION 1..1379: note = Description of Unknown: uncultivated organism with predicted taxonomy: Phascolarctobacterium
  REGION 1..1379: note = MG18-126 effector
MQKLKNCDYYIGLDMGDASVGWAVTDTNYNILKFNGKALWGIRLFDSANTAASTRVFRSGRRRIDRTTWRLKMLQELFADEIAKVDTGFFMRLEDSRLHLDDKRDKAVYNLFVDKNYTDKDFYQQYPTMYHLRYALATQKGPFDVRLLYLAVQHIAKHRGHFLFDNLDASKVNDFNAVFSEVENYVRDEMGIEDWSCQNIDELAKVLCDVNLGRTTKQKAMQSLLPAQTKQQKAIIQLFSGGKAKLAELFVDEELDECEKKSVSFQDDDLNEFEPVLTAALGERYEGLLRFKAIYDWSLLAKILHLDTSKKDEDEQHLLSECKVQVYEDHKRDLAVLKSMLKGKPLYNKIFRQDGDISYEKYAKGIKGRNQIDFCKDLKKQLEGIAEYKKIMQEITSIDDAKTEEERVLFRITNGFAFPKQTTKDNGIIPIQVHLAELKCILDNAEGYLPFLGETDNNGLSVREKIEQIVKFRIPYYVGPLAGTRMSREQGRCWVVRKNEKIYPWNFTEIVNLEESAEKFITNMTAKCTYLVGEDVLPKESLLYSEFMVRNAINNITVDGERLPVDVLEKIFKQLFLAKTSKVTKKTLERFFRQENISFQNIGGIDDKINASMKSYNDFRRIFGEDYIQLHRDEIENIIRWITLFCDEKKMLVTKIKNTYPQISDDEIKAIKKLKYKDWGRLSATLLNSSTIAYEDKAFGELVTIISALRHTNKNFMELLSSYCSYDFIGKIKEFNGSRQSSNGKLTYKDVEELYVSPSVKRSIWQTLTILEEIKKIMGCEPKRIFIEMARSKEESKRTDSRLKKLQDLYKKCREENIDFIPLKDEFNALKTQLSSKKEEDLRSDKLYLYYTQMGCCMYTGERIELASLYDNNLYDIDHIYPRSKTKDDSLSNRVLVKKQVNAAKTDIYPLDAAIRTKMHSFWKLLYDKGFIDERKYERLTRSTQLRDEELAGFISRQLVETRQSTKAVAAILKTAYQNSEVVYVKAGNVSDFRQQFKFVKCRDVNDLHHAKDAYLNIVVGNCYHVKFTANPLNFITKNQDNRRYSLKPEIFYKFSIKRDGEIAWLGGEDGTMATVARTMHKNNILFTRQPLEGKGELFKQNPLKAKSGQLPLKAGLSVEKYGGYDSLTTAYFALVKSEGKKGSVQLSIEGIPLVYAKQGEKAVQDYLTEVVQLCKPEIKIPKIKKYSLFKINGFPMHISGRTGKQLIFYGAGQLCIADDVADYLKKALKYETDIAEKEKTLADQNADEIQKQKAQKGLDFYEQKWGISGAVNVQLYDMFIAKSANNLYKNRPASQTITLKEKREHFVKLTLSKQIHIIKEILNLFKCASASADFKLIDKGTSCGTLKISNNITKLKECILINQSPTGVFEQEVDLMKL

SEQ ID NO: 1479 - protein, 1379 aa, unidentified; identical to SEQ ID NO: 1436
  REGION 1..1379: note = Description of Unknown: uncultivated organism with predicted taxonomy: Phascolarctobacterium
  REGION 1..1379: note = MG18-127 effector

SEQ ID NO: 1480 - protein, 1379 aa, unidentified
  REGION 1..1379: note = Description of Unknown: uncultivated organism with predicted taxonomy: Phascolarctobacterium
  REGION 1..1379: note = MG18-128 effector
MQKLKNCDYYIGLDMGDASVGWAVTDTNYNILKFNGKALWGIRLFDSANTAASTRVFRSGRRRIDRTTWHLKMLQELFAEEIAKVDPGFFMRLEDSRLHLDDKRDKAVYNLFVDKNYTDKDFYQQYPTMYHLRYALATQAGPFDVRLLYLAVQHIAKHRGHFLFDNLDASKVNDFNAVFSEVENYVRDEMGIEDWSCQNIDELAKVLCDVNLGRTTKQKAMQSLLPAQTKQQKAIIQLFSGGKAKLAELFVDEELDECEKKSVSFQDDDLNEFEPVLTAALGERYEGLLRFKAIYDWSLLAKILHLDTSKKDEDEQHLLSECKVQVYEDHKRDLAVLKSMLKGKPLYNKIFRQDGDISYEKYAKGIKGRNQIDFCKDLKKQLEGIAEYKKIMQEITNIDDAKTEEERLLFRITNGFAFPKQTTKDNGIIPIQVHLAELKCILDNAEGYLPFLGETDNNGLSVREKIEQIVKFRIPYYVGPLAGTRMSREQGRCWVVRKNEKIYPWNFTEIVNLEESAEKFITNMTAKCTYLVGEDVLPKESLLYSEFMVRNAINNITVDGERLPVDVLEKIFKQLFLAKTSKVTKKTLERFFRQENISFQNIGGIDDKINASMKSYNDFRRIFGEDYIQLHRDKIENIIRWITLFCDEKKMLVTKIKNTYPHISDDKIKAIKKLKYKDWGRLSATLLNSSAIAYEDDAFGERVTIISALRHTNKNFMELLSNYCSYDFIGKIKDFNGSRQSSNSKLTYKDVEELYVSPSVKRSIWQTLTILEEIKKIMGHEPKRIFIEMARSKEESKRTDSRLKKLQDLYKQCREENIDFMPHTDELNAFKIQLSSKKEDDLRSDKLYLYYTQMGRCMYTGEIIELASLYDNNLYDIDHIYPRSKTKDDSLSNRVLVKKQVNAAKTDIYPLDAAIRTKMHSFWKLLYDKGFIDERKYERLTRSTQLRDEELAGFISRQLVETRQSTKAVAAILKTAYQNSEVVYVKAGNVSDFRQQFKFVKCREVNDLHHAKDAYLNIVVGNCYHVKFTANPLNFITKNQDNRRYSLKPEIFYKFSIKRDGEIAWLGGEDGTMATVARTMHKNNILFTRQAVEGKGELFDQQPLKAKGGQLPLKAGLSIEKYGGYNSLTTAYFAVVKSEGKKGAVQLSIEAIPLVYAKQGEIAVQKYLTEVVQLCKPEIMLPKIKKYSLFKINGFPMHISGRTGNRMLFYGAGQLCLDEADVDYLKKALKYENDIAENELVIADKNSDDIQKQQAQKNLDYYNQKWRIGRKVNMHIYDMLLAKSGNNLYKNRPASQTTDLQEQREFFEKLSLANQIHVIGEVLKLFKCASASANLKLLDKGNACGVIKVSNNILKFKQCVLINQSPTGVFEQEVDLMKL

SEQ ID NO: 1481 - protein, 1379 aa, unidentified
  REGION 1..1379: note = Description of Unknown: uncultivated organism with predicted taxonomy: Phascolarctobacterium succinatutens
  REGION 1..1379: note = MG18-129 effector
MQKLKNCDYYIGLDMGDASVGWAVTDTNYNILKFNGKALWGIRLFDSANTAASTRVFRSGRRRIDRTTWRLKMLQELFAEKIAKVDPGFFMRLEDSRLHLDDKRDKAVYNLFVDKNYTDKDFYQQYPTMYHLRYALATQAGPFDVRLLYLAVQHIAKHRGHFLFDNLDASKVNDFNAVFSEVENYVRDEMGIEDWSCQNIDELAKVLCDVNLGRTTKQKAMQSLLPAQTKQQKAIIQLFSGGKAKLAELFVDEELDECEKKSVSFQDDDLNEFEPVLTAALGERNEGLLRFKAIYDWSLLAKILHLDTSKKDEDEQHLLSECKVQVYEDHKRDLAVLKSMLKGKPLYNKIFRQDGDISYEKYAKGIKGRNQIDFCKDLKKQLEGITEYKKIMQEITSIDDAKTEEERVLFRITNGFAFPKQTTKDNGIIPIQVHLAELKCILDNAEGYLPFLGETDNNGLSVREKIEQIVKFRIPYYVGPLAGTRMSREQGRYWVVRKNEKIYPWNFTEIVNLEESAEKFITNMTAKCTYLVGEDVLPKESLLYSEFMVRNAINNITVDGERLPVDVLEKIFKQLFLAKTSKVTKKTLERFFRQENISFQNIGGIDDKINASMKSYNDFRRIFGEDYIQLHRDEIENIIRWITLFCDEKKMLVTKIKNTYPQISDDEIKAIKKLKYKDWGRLSATLLNSSTIAYEDKAFGELVTIISALRHTNKNFMELLSSYCSYDFIGKIKEFNGSRQSSNGKLAYKDVEELYVSPSVKRSIWQTLTILEEIKKIMGCEPKRIFIEMARSKEESKRTDSRLKKLQDLYKKCREENIDFMPRKDEFNVLKTQLSSKNEEDLRSDKLYLYYTQMGRCMYTGEIIELASLYDNNLYDIDHIYPRSKTKDDSLSNRVLVKKQVNAAKTDIYPLDAAIRTKMHSFWKLLYDKGFIDERKYERLTRSTQLRDEELAGFISRQLVETRQSTKAVAAILKTAYQNSEVVYVKAGNVSDFRQQFKFVKCREVNDLHHAKDAYLNIVVGNCYHVKFTANPLNFITKNQDNRRYSLKPEIFYKFSIKRDGEIAWLGGEDGTMATVARTMHKNNILFTRQAVEGKGELFDQQPLKAKGGQLPLKAGLSIEKYGGYNSLTTAYFAVVKSEGKKGAVQLSIEAIPLVYAKQGEIAVQKYLTEVVQLCKPEIMLPKIKKYSLFKINGFPMHISGRTGKQLIFYGAGQLCIADDVADYLKKALMYETNIAEKEKTLADQNADDIQKQKAQKGLDFYEQKWGISGAVNVQLYDMFIAKSANNLYKNRPVSQTITLKEKREHFVKLTVSKQIHIIKEILNLFKCASASADFKLIDKGTSCGTLKISNNINKLKECILINQSPTGVFEQEVDLMKL

SEQ ID NO: 1482 - protein, 1379 aa, unidentified
  REGION 1..1379: note = Description of Unknown: uncultivated organism with predicted taxonomy: Phascolarctobacterium succinatutens
  REGION 1..1379: note = MG18-130 effector
MQKLQNKDYYIGLDMGDASVGWAVTDANYNILKFNGKALWGIRLFDSANTAASTRVFRSGRRRIDRTTWRLKMLQELFAEEIAKVDPGFFMRLEDSRLHLDDKRDKAVYNLFVDKNYTDKDFYQQYPTMYHLRYALATQAGPFDVRLLYLAVQHIAKHRGHFLFDNLDASKVNDFNAVFSEVENYVRDEMGIEDWSCQNIDELAKVLCDVNLGRTTKQKAMQSLLPAQTKQQKAIIQLFSGGKAKLAELFVDEELDECEKKSVSFQDDDLNEFEPVLTAALGERYEGLLRFKAIYDWSLLAKILHLDTSKKDEDEQHLLSECKVQVYEDHKRDLAVLKSMLKGKPLYNKIFRQDGDISYEKYAKGIKGRNQLDFCKDLKKQLDGIAEYKKIMQEITSIDAAGTEEERLLFRIANGFAFPKQTTKDNGIIPIQVHLAELKCILDNAEGYLQFLGETDNNGLSVREKIEQIVKFRIPYYVGPLAGTRMSREQGRCWVVRKNEKIYPWNFTQVVNLEESAEKFITNMTAKCTYLVGEDVLPKESLLYSEFMVRNAINNITVDGERLPVDVLEKIFKQLFLAKTSKVTKKTLERFFRQENISFQNIGGIDDKINASMKSYNDFRRIFGEDYIQLHRDEIENIIRWITLFCDEKKMLVTKIKNTYPQIADDQIKAIKKLKYKDWGRLSATLLNSSAIAYEDKAFGELVTIISALRHTNKNFMELLSSYCSYDFIGKIKEFNGSRQSSNGKLTYKDVEELYVSPSVKRSIWQTLTILEEIKKIMGCEPKRIFIEMARSKEESKRTDSRLKKLQDLYKKCREENIDFMPRKDEFNTLKTQLNSKKEDDLRRDKLYLYYTQMGRCMYTGEKIELASLYDNNLYDIDHIYPRSKTKDDSLSNRVLVKKQVNAAKTDTYPLDAAIRTKMHSFWKLLYDKGFIDERKYQRLTRSTQLRDEELAGFISRQLVETRQSTKAVATILKTAYQNSEVVYVKAGNVSDFRQQFKFVKCREVNDLHHAKDAYLNIVVGNCYHVKFTANPLNFITKNQDNRRYSLKPEIFYKFSIKRDGEIAWLGGEDGTMATVARTMHKNNILFTRQAVEGKGELFDQQPLKAKGGQLPLKAGLSIEKYGGYNSLTTAYFAVVKSEGKKGAVQLSIEAIPLVYAKQGEIAVQKYLTEVVQLCKPEIMLPKIKKYSLFKINGFPMHISGRTGNRMLFYGAGQLCLDEADVDYLKKALKYENDIAENELVIADKNSDDIQKQQAQKNLDYYNQKWRISRKVNMHIYDMLLAKSGNNLYKNRPASQTTDLQEQREFFEKLSLANQIHVIGEVLKLFKCASASANLKLLDKGNACGVIKVSNNILKFKQCVLINQSPTGVFEQEVDLMKL

SEQ ID NO: 1483 - protein, 1379 aa, unidentified
  REGION 1..1379: note = Description of Unknown: uncultivated organism with predicted taxonomy: Phascolarctobacterium succinatutens
  REGION 1..1379: note = MG18-131 effector
MQKLKNCDYYIGLDMGDASVGWAVTDTNYNILKFNGKALWGIRLFDSANTAASTRVFRSGRRRIDRTTWRLKMLQELFAEEIAKVDTGFFMRLEDSRLQLDDKREKAVYNLFVDKSYTDKEFYQQYPTMYHLRYALATQAGPFDVRLLYLAVQHIAKHRGHFLFDNLDASKVNNFNAVFSEVENYVRDEMGIEDWSCQNIDELAKVLCDVNLGRTTKQKAMQSLLPAQTKQQKAIIQLFSGGKAKLAELFVDEELDECEKKSVSFQDDDLNEFEPVLTAALGERYEGLLRFKAIYDWSLLAKILHLDTSKKDEGEQHLLSECKVQVYEDHKRDLAVLKSMLKGKPLYNKIFRQDGDISYEKYAKGIKGRNQIDFCKNLKKQLEGIAEYKKIMQEITSIDDAKTEEERLLFRITNGFAFPKQTTKDNGIIPIQVHLAELKCILDNAEGYLPFLGETDNNGLSVREKIEQIVKFRIPYYVGPLAGTRMSREQGRCWVVRKNEKIYPWNFTEIVNLEESAEKFITNMTAKCTYLVGEDVLPKESLLYSEFMVRNAINNITVDGERLPVDVLEKIFKQLFLAKTSKVTKKTLERFFRQENISFQNIGGIDDKINASMKSYNDFRRIFGEDYIQLHRDEIENIIRWITLFCDEKKMLVTKIKNTYPQISDDEIKAIKKLKYKDWGRLSATLLNSSTIAYEDKAFGELVTIISALRHTNKNFMELLSSYCSYDFIGKIKEFNGRRQSSNGKLTYKEVEDLYVSPSVKRSIWQTLTILEEIKKIMGCEPKRIFIEMARSKEESKRTDSRLKKLQDLYKKCREENIDFMPRKDEFNALKTQLSSKKEEDLRSDKLYLYYTQMGRCMYTGERIELASLYDNNLYDIDHIYPRSKTKDDSLSNRVLVKKQVNAAKTDIYPLDAAIRTKMHSFWKLLYDKGFIDERKYERLTRSTQLRDEELAGFISRQLVETRQSTKAVAAILKTAYQNSEVVYVKAGNVSDFRQQFKFVKCREVNDLHHAKDAYLNIVVGNCYHVKFTANPLNFITKNQDNRRYSLKPEIFYKFSIKRDGEIAWLGGEDGTMATVARTMHKNNILFTRQAVEGKGELFDQQPLKAKGGQLPLKAGLSIEKYGGYNSLTTAYFAVVKSEGKKGAVQLSIEAIPLVYAKQGEIAVQKYLTEVVQLCKPEIMLPKIKKYSLFKINGFPMHISGRTGNRMLFYGAGQLCLDEADVDYLKKALKYENDIAENELVIADKNSDDIQKQQAQKNLDYYNQKWRIGRKVNMHIYDMLLAKSGNNLYKNRPASQTTDLQEQREFFEKLSLANQIHVIGEVLKLFKCASASANLKLLDKGNACGVIKVSNNILKFKQCVLINQSPTGVFEQEVDLMKL

SEQ ID NO: 1484 - protein, 1379 aa, unidentified
  REGION 1..1379: note = Description of Unknown: uncultivated organism with predicted taxonomy: Phascolarctobacterium succinatutens
  REGION 1..1379: note = MG18-132 effector
MQKLKNCDYYIGLDMGDASVGWAVTDTNYNILKFNGKALWGIRLFDSANTAASTRVFRSGRRRIDRTTWRLKMLQELFAEEIAKVDPGFFMRLEDSRLHLDDKRDKAVYNLFVDKNYTDKDFYQQYPTMYHLRYALATQAGPFDVRLLYLAVQHIAKHRGHFLFDNLDASKVNDFNAVFSEVENYVRDEMGIEDWSCQNIDELAKVLCDVNLGRTTKQKAMQSLLPAQTKQQKAIIQLFSGGKAKLAELFVDAELDECEKKSVSFQDDDLNEFEPVLTAALGERYEGLLRFKAIYDWSLLAKILHLDTSKKDEDEQHLLSECKVQVYEDHKRDLAVLKSMLKGKPLYNKIFRQDGDISYEKYAKGIKGRNQIDFCKDLKKQLEGIAEYKKIMQEITSIDDAKTEEERVLFRITNGFAFPKQTTKDNGIIPIQVHLAELKCILDNVEGYLPFLGETDNNGLSVREKIEQIVKFRIPYYVGPLAGTRMSREQGRYWVVRKNEKIYPWNFTEIVNLEESAEKFITNMTAKCTYLVGEDVLPKESLLYSEFMVRNAINNITVDGERLPVDVLEKIFKQLFLAKTSKVTKKTLERFFRQENISFQNIGGIDDKINASMKSYNDFRRIFGEDYIQLHRDEIENIIRWITLFCDEKKMLVTKIKNTYPQISDDEIKAIKKLKYKDWGRLSATLLNSSAIAYEDKAFGELVTIISALRHTNKNFMELLSSYCSYDFIGKIKEFNGSRQSSNGKLTYKDVEELYVSPSVKRSIWQTLTILEEIKKIMGCEPKRIFIEMARSKEESKRTDSRLKKLQDLYKKCREENIDFMPRKDEFNTLKTQLSSKKEDDLRSDKLYLYYTQMGRCMYTGEKIELASLYDNNLYDIDHIYPRSKTKDDSLSNRVLVKKQVNAAKTDIYPLDAAIRTKMHSFWKLLYDKGFIDERKYQRLTRSTQLRDEELAGFISRQLVETRQSTKAVAAILKTAYQNSEVVYVKAGNVSDFRQQFKFVKCREVNDLHHAKDAYLNIVVGNCYHVKFTANPLNFITKNQDNRRYSLKPEIFYKFSIKRDGEIAWLGGEDGTMATVARTMHKNNILFTRQAVEGKGELFDQQPLKAKGGQLPLKAGLSIEKYGGYNSLTTAYFAVVKSEGKKGTVQLSIEAIPLVYAKQGEIAVQKYLTKVVQLCKPEIMLPKIKKYSLFKINGFPMHISGRTGNRMLFYGAGQLCLDEADVDYLKKALKYENDIAENELVIADKNSDDIQKQQAQKNLDYYNQKWRIGRKVNMHIYDMLLAKSGNNLYKNRPASQTTDLQEQREFFEKLSLANQIHVIGEVLKLFKCASASANLKLLDKGNACGVIKVSNNILKFKQCVLINQSPTGVFEQEVDLMKL

SEQ ID NO: 1485 - protein, 1235 aa, unidentified
  REGION 1..1235: note = Description of Unknown: uncultivated organism with predicted taxonomy: Phascolarctobacterium succinatutens
  REGION 1..1235: note = MG18-133 effector
VRLLYLAVQHIAKHRGHFLFDNLDASKVNDFNAVFSEVENYVRDEMGIEDWSCQNIDELAKVLCDVNLGRTTKQKAMQSLLPAQTKQQKAIIQLFSGGKAKLAELFVDEELDECEKKSVSFQDDDLNEFEPVLTAALGERYEGLLRFKAIYDWSLLAKILHLDTSKKDEGEQHLLSECKVQVYEDHKRDLAVLKSMLKGKPLYNKIFRQDGDISYEKYAKGIKGRNQIDFCKDLKKQLEGIAEYKKIMQEITSIDDAKTEEERLLFRITNGFAFPKQTTKDNGIIPIQVHLAELKCILDNAEGYLPFLGETDNNGLSVREKIEQIVKFRIPYYVGPLAGTRMSREQGRCWVVRKNEKIYPWNFTEIVNLEESAEKFITNMTAKCTYLVGEDVLPKESLLYSEFMVRNAINNITVDGERLPVDVLEKIFKQLFLAKTSKVTKKTLERFFRQENISFQNIGGIDDKINASMKSYNDFRRIFGEDYIQLHRDEIENIIRWITLFCDEKKMLVTKIKNTYPQISDDEIKAIKKLKYKDWGRLSATLLNSSTISYEDKAFGELVTIISALRHTNKNFMELLSSYCSYDFIGKIKEFNGSRQSSNGKLTYKDVEELYVSPSVKRSIWQTLTILEEIKKIMGCEPKRIFIEMARSKEESKRTDSRLKKLQDLYKKCREENIDFMHRKDEFNALKTQLSSKKEEDLRSDKLYLYYTQMGRCMYTGERIELASLYDNNLYDIDHIYPRSKTKDDSLSNRVLVKKQVNAAKTDIYPLDAAISTKMHSFWKLLYDKGFIDERKYERLTRSTQLRDEELAGFISRQLVETRQSTKAVAAILKTAYQNSEVVYVKAGNVSDFRQQFKFVKCRDVNDLHHAKDAYLNIVVGNCYHVKFTANPLNFITKNQDNRRYSLKPEIFYKFSIKRDSEIAWIGGKDGTITTVTKTMHKNNILFTRQPVEGKGELFKQNPLKAKNGQLPLKAGLSVEKYGGYNSLSTAYFAVVKSEGKKGAVQLSIEAIPLVYAKQGEEAVQDYLTEVVQLCNPEIRIPKIKKYSLFKINGFPMHISGKTVKQIIFYAAGQLCLADDVADYLKKALKYEAYIALNEGLISDKNADDTQKQKAQQRLDYFKQKWGISSDANMKIYDILLAKSANNLYKNRPASQTKDLQEQRCVFEKLSLAEQIHIIGEVLNLFKCASASANLKLLGKGNSCGVIKTSNNITKCKQCILINQSPTGVFEQEVDLMKL

SEQ ID NO: 1486 - protein, 1348 aa, unidentified
  REGION 1..1348: note = Description of Unknown: uncultivated organism with predicted taxonomy: Clostridiales
  REGION 1..1348: note = MG18-135 effector
MDQNKEYYIGLDGGTDSVGWAVLNPDYTVVKKRGKSLWGVRLFESGQTAAERRLARSARRRTDRRKWRLKLLKELFAEEVAACDPAFFARLAESRYWEDDKKVDGADTLFHDADFTDKDYHRQFPTIYHLRRHLMCCTEKPDIRLLYLAVAHMIKNRGHFLNEGQDLNQVRRFDDVWQNLCAAVSDVLGIELAVENGAKAAEVLTSSVKIKEKTKQLESVLGEGESEADRSVCKALAGLLAGAKVSAVDLFNGDEALKECGKFSLAEKSIEELEPDLGDALGEDRFSLLQYAYAAYNWAVFARLLPEGKTISEVKTEEYEAYKADLRALKQLVKQYAPDQYYRVFRSAKIKGNYASYVGKTNCGNEKSNPEPCKPEEFFAFLKKELKPLWSQSIPAAASLAAKLESGTLLRRQRSGENAAIPYQAHLQELQIILKNMQQFYPFLQKADENGFTPAYKIEKLLTFRIPYYVGPLNDAHKEKGFCWIVKKADMPVLPWNFDQVVDESACEDAFIGRMSATCTYLVGENVLPQNSPLYCRFMVLNELNNLRIRGEKITPALKQAIFTQLFCAGKGGKVTQKKLLDFLHSQGIDANKQDISGIDGDFKASMAPAVKLQSIFTEPLPPETLERLAFALTVSGESRKMLQNRIRAILPNADNAVIRKVCALNFTGWGRLSQKLLTEIYDVDQTTGECRSLMDLLWSTNNNLMQLLSGDFTFAAGIDAYNAAQNGTENIFDYDHLVKDLYVSPSVKRGLWQTLLLVKEVRKIMGCDPARVFVEMARGASPEQKNKRTVSRKDQLLALYKACKEDARDWCSELEALPEDKLRSDKLYLYYTQMGRCMYSGELIRLDDLMHDTANQLYDIDHIYPQSKTKDDSLTNRVLVKRQLNAIKSNDYPLPQAMRQTALWKALLEKGLISKQKYLRLTRTTPFTGEELAGFINRQLVETRQSTKAAAHLLEQLLPNTEVVYVKAGLAADFRQEFGFVKCRDANDFHHAKDAYLNAVVGNVYHEKFTKNPLRFVRSGQEYSLNLSALFQNWNIYKGGRVIWQKGEDGSLETVRARMAKNDPMVTRYCTEGRGALYKLQPLKKGKGQLPLKSSDEHPQPINRYGGYNEVKGAYFVLAAYLKKGKRVKSIESVPLYLAAKLQRDPAALQQYLADQLGTDRVEILVPEIKLGTLFKWNGYPMTLSGRTGPQLLFRNAAELRTNAEQEQYIKKMSRYLEKCKGRKEPLPIRPAYDKLTPEENLQLYDAFTQWLTSGIYAKRLFLQGKFLLEKRDVFAALNPEAQVRQLMEILHLFQCNPVAANLSELGGAAHAGILLASKNIDGKVPVSIVHQSVTGYFSQEVCLNDL

SEQ ID NO: 1487 - protein, 1348 aa, unidentified
  REGION 1..1348: note = Description of Unknown: uncultivated organism with predicted taxonomy: Clostridiales
  REGION 1..1348: note = MG18-136 effector
MDQNKEYYIGLDGGTDSVGWAVLNPDYTVVKKRGKSLWGVRLFESGQTAAERRLARSARRRTDRKKWRLKLLKELFAEEVAACDPAFFARLAESRYWEDDKKVDGADTLFHDADFTDKDYHRQFPTIYHLRRHLMCCTEKPDIRLLYLAVAHMIKNRGHFLNEGQDLNQVRRFDDVWQNLCAAVSDVLGIELAVENGAKAAEVLTSSVKIKEKTKQLESVLGEGESEADRSVCKALAGLLAGAKVSAVDLFNGDEALKECGKFSLAEKSIEELEPDLGDALGEERFSLLQYAYAAYNWSVFARLLPEGKTISEVKTEEYEAYKADLRALKQLVKQYAPDQYYRVFRSAKIKGNYASYVGKTNCGNEKSNPESCKPEEFFAFLKKELKPLWSQSIPAAASLAAKLESGTLLRRQRSGENAAIPYQAHLQELQIILKNMQQFYPFLQKADENGFTPAYKIEKLLTFRIPYYVGPLNDAHKEKGFCWIVKKADMPVLPWNFDQVVDENACEDAFIGRMSATCTYLVGENVLPQNSPLYCRFMVLNELNNLRIRGEKITPALKQAIFTQLFCAGKGGKVTQKKLLDFLHSQGIDANKQDISGIDGDFKASIAPAVKLQSIFTEPLPPETLERLAFALTVSGESRKMLQNRIRAILPNADNAVVRKVCALKFTGWGRLSQKLLTEIYDVDQTTGECRSLMDLLWSTNNNLMQLLSGDFTFAAGIDAYNAAQNGTENIFDYDHLVKDLYVSPSVKRGLWQTLLLVKEVRKIMGCDPARVFIEMARGASPEQKNKRTVSRKDQLLALYKACKEDARDWCGELEALPEDKLRSDKLYLYYTQMGRCMYSGEPIRLDDLMHDTANQLYDIDHIYPQSKTKDDSLTNRVLVKRQLNAIKSNDYPLPQAMRQTALWKALLEKGLISKQKYLRLTRTTPFTEEELAGFINRQLVETRQSTKAAAHLLEQLLPNTEVVYVKAGLAADFRQEFGFVKCRDANDFHHAKDAYLNAVVGNVYHEKFTKNPLRFVRSGQEYSLNLSALFQNWNIYKGGRVIWQKGEDGSLETVRARMAKNDPMVTRYCTEGRGALYDLQPMKKSKGQLPLKSSDERLQHIDRYGGYNKLAGAYFTLAAYYKKGKRVKSIESVPLYLAAKLQLNPAALQQYLADQLGTDRVEILVPEIKLGTLFKWNGYPMTLSGRTGPQLLFRNAAELRTNAEQEQYIKKMSRYLEKCKGRKEPLPIRPAYDKLTPEENLQLYDAFTQWLTSGIYAKRLSLQGKFLLEKRDAFAALSPEAQVRQLMEILHLFQCNPVAANLSELGGVAHAGILLASKNIDGKVPVSIVHQSVTGYFVQEVCLNDL

SEQ ID NO: 1488 - protein, 913 aa, unidentified
  REGION 1..913: note = Description of Unknown: uncultivated organism with predicted taxonomy: Dorea sp. OM02-2LB
  REGION 1..913: note = MG18-137 effector
NMQQFYPFLQKADENGFTPAYKIEKLLTFRIPYYVGPLNDAHKEKGFCWIVKKADMPVLPWNFDQVVDENACEDAFIGRMSATCTYLVGENVLPQNSPLYCRFMVLNELNNLRIRGEKITPALKQAIFTQLFCAGKGGKVTQKKLLDFLHSQGIDANKQDISGIDGDFKASMAPAVKLQSIFTEPLPPETLERLAFALTVSGESRKMLQNRIRAILPNADNAVVRKVCALKFTGWGRLSQKLLTEIYDVDQTTGECRSLMDLLWSTNNNLMQLLSGDFTFAAGIDAYNAAQNGTENIFDYDHLVKDLYVSPSVKRGLWQTLLLVKEVRKIMGCDPARVFIEMARGASPEQKNKRTVSRKDQLLALYKACKEDARDWCGELEALPEDKLRSDKLYLYYTQMGRCMYSGEPIRLDDLMHDTANQLYDIDHIYPQSKTKDDSLTNRVLVKRQLNAIKSNDYPLPQAMRQTALWKALLEKGLISKQKYLRLTRTTPFTEEELAGFINRQLVETRQSTKAAAHLLEQLLPNTEVVYVKAGLAADFRQEFGFVKCRDANDFHHAKDAYLNAVVGNVYHEKFTKNPLRFVRSGQEYSLNLSALFQNWNIYKGGRVIWQKGEDGSLETVRARMAKNDPMVTRYCTEGRGALYDLQPMKKSKGQLPLKSSDERLQHIDRYGGYNKLAGAYFTLAAYYKKGKRVKSIESVPLYLAAKLQLNPAALQQYLADQLGTDRVEILVPEIKLGTLFKWNGYPMTLSGRTGPQLLFRNAAELRTNAEQEQYIKKMSRYLEKCKGRKEPLPIRPAYDKLTPEENLQLYDAFTQWLTSGIYAKRLSLQGKFLLEKRDAFAALSPEAQVRQLMEILHLFQCNPVAANLSELGGVAHAGILLASKNIDGKVPVSIVHQSVTGYFVQEVCLNDL

SEQ ID NO: 1489 - protein, 988 aa, unidentified
  REGION 1..988: note = Description of Unknown: uncultivated organism with predicted taxonomy: Phascolarctobacterium
  REGION 1..988: note = MG18-138 effector
MQEITNIDDAKTEEERLLFRITNGFAFPKQTTKDNGIIPIQVHLAELKCILDNAEGYLPFLGETDNNGLSVREKIEQIVKFRIPYYVGPLAGTRMSREQGRCWVVRKHEKIYPWNFTEIVNLEESAEKFITNMTAKCTYLVGEDVLPKESLLYSEFMVRNAINNITVDGERLPVDVLEKIFKQLFLAKTSKVTKKTLERFFRQENISFQNIGGIDDKINASMKSYNDFRRIFGEDYIQLHRDEIENIIRWITLFCDEKKMLVTKIKNTYPQISDDEIKAIKKLKYKDWGRLSATLLNSSTIAYEDKAFGELVTIISALRHTNKNFMELLSSYCSYDFIGKIKEFNGSRQSSNGKLTYKDVEELYVSSSVKRSIWQTLTILKEIKKIMGCEPKRIFIEMARSKEESKRTDSRLKKLQDLYKKCREENIDFMPRKDEFNALKTLLSSQKEEDLRSDKLYLYYTQMGRCMYTGERIELASLYDNNLYDIDHIYPRSKTKDDSLSNRVLVKKQVNAAKTDTYPLDAAIRTKMHSFWKLLYDKGFIDERKYERLTRSTQLRDEELAGFISRQLVETRQSTKAVAAILKTAYQNSEVVYVKAGNVSDFRQQFKFVKCREVNDLHHAKDAYLNIVVGNCYHVKFTANPLNFITKNQDNRRYSLKPEIFYKFSIKRDGEIAWLGGEDGTMATVARTMHKNNILFTRQAVEGKGELFDQQPLKAKGGQLPLKAGLSIEKYGGYNSLTTAYFAVVKSEGKKGAVQLSIEAIPLVYAKQGEIAVQKYLTEVVQLCKPEIKIPKIKKYSLFKINGFPMHISGRTGKQLVFYGAGQLCIADDVADYLKKALKYETDIAEKEKTLADQNADDIHKQKAQKGLDFYEQKWGISGAVNVQLYDMFIAKSANNLYKNRPASQTITLKEKREHFVKLTLSKQIHIIKEILNLFKCASASADFKLIDKGTSCGTLKISNNITKLKECILINQSPTGVFEQEVDLMKL

SEQ ID NO: 1490 - protein, 1218 aa, unidentified
  REGION 1..1218: note = Description of Unknown: uncultivated organism with predicted taxonomy: Phascolarctobacterium succinatutens
  REGION 1..1218: note = MG18-139 effector
FLFDNLDASTVNDFNAVFSEVENYVHDEMGLEDWSCQNKDALAKVLCDVNLGRTTKQKAMQSLLPAKSKQQKAILQLFSGGKAKLAELFDDEELDDCEKKSISFQDDDLDEIEPVLTAALGERYEGLLRFKAIYDWSLLAKILHLDTGKKEEGEQHLLSECKVQVYEDHKRDLAVLKSMLKGKPLYNKIFRQDGDISYEKYAKGIKGRNQIDFCKDLKKQLEGIAEYKKIMQEITSIDDAKTEEERLLFRITNGFAFPKQTTKDNGIISIQVHLAELKFILDNAEGYLPFLGETDNNGLSVREKIEQIVKFRIPYYVGPLAGTRMSREQGRCWVVRKNEKIYPWNFTEIVNLEESAEKFITNMTAKCTYLVGEDVLPKESLLYSEFMVRNAINNITVDGERLPVDVLEKIFKQLFLAKTSKVTKKTLERFFRQENISFQNIGGIDDKINASMKSYNDFRRIFGEDYIQLHRDEIENIIRWITLFCDEKKMLVTKIKNTYPQISDYEIKAIKKLKYKDWGRLSATLLNSSTIAYEDKAFGELVTIISALRHTNKNFMELLSSYCYYDFIGKIKEFNGSRQSSNGKLTYKDVEELYVSPSVKRSIWQTLTILEEIKKIMGCEPKRIFIEMARSKEESKRTDSRLKKLQELYKKCREENIDFMPRKDEFNALKTQLSSKKEENLRSDKLYLYYTQMGRCMYTGERIELASLYDNNLYDIDHIYPRSKTKDDSLSNRVLVKKQVNAAKTDTYPLDAAIRTKMHSFWKLLYDKGFIDERKYERLTRSTQLRDEELAGFISRQLVETRQSTKAVAAILKTAYQNSEVVYVKAGNVSDFRQQFKFVKCREVNDLHHAKDAYLNIVVGNCYHVKFTANPLNFITKNQDNRRYSLKPEIFYKFSIKRDGEIAWLGGEDGTMATVARTMHKNNILFTRQAVEGKGELFDQQPLKAKGGQLPLKAGLSIEKYGGYNSLTTAYFAVVKSEGKKGAVQLSIEAIPLVYAKQGEIAVQKYLTEVVQLCKPEIMLPKIKKYSLFKINGFPMHISGRTGNRMLFYGAGQLCLDEADVDYLKKALKYENDIAENELVIADKNSDDIQKQQAQKNLDDYNQKWRIGRKVNMHIYDMLLAKSGNNLYKNRPASQTTDLQEQRELFEKLSLANQIHVIGEVLKLFKCASASANLKLLDKGNACGVIKVSNNILKFKQCVLINQSPTGVFEQEVDLMKL

SEQ ID NO: 1491 - protein, 947 aa, unidentified
  REGION 1..947: note = Description of Unknown: uncultivated organism with predicted taxonomy: Phascolarctobacterium succinatutens
  REGION 1..947: note = MG18-140 effector
VHLAELKFILDNAEGYLPFLGETDNNGLSVREKIEQIVKFRIPYYVGSLAGTRMSREQGRCWVVRKNEKIYPWNFTEIVNLEESAEKFITNMTAKCTYLVGEDVLPKESLLYSEFMVRNAINNITVDGERLPVDVLEKIFKQLFLAKTSKVTKKTLERFFRQENISFQNIGGIDDKINASMKSYNDFRRIFGEDYIQLHRDEIENIIRWITLFCDEKKMLVTKIKNTYPQISDYEIKAIKKLKYKDWGRLSATLLNSSTIAYEDKAFGELVTIISALRHTNKNFMELLSSYCYYDFIGKIKEFNGSRQSSNGKLTYKDVEELYVSPSVKRSIWQTLTILEEIKKIMGCEPKRIFIEMARSKEESKRTDSRLKKLQELYKKCREENIDFMPRKDEFNALKTQLSSKKEENLRSDKLYLYYTQMGRCMYTGERIELASLYDNNLYDIDHIYPRSKTKDDSLSNRVLVKKQVNAAKTDTYPLDAAIRTKMHSFWKLLYDKGFIDERKYERLTRSTQLRDEELAGFISRQLVETRQSTKAVAAILKTAYQNSEVVYVKAGNVSDFRQQFKFVKCREVNDLHHAKDAYLNIVVGNCYHVKFTANPLNFITKNQDNRRYSLKPEIFYKFSIKRDGEIAWLGGEDGTMATVARTMHKNNILFTRQAVEGKGELFDQQPLKAKGGQLPLKAGLSIEKYGGYNSLTTAYFAVVKSEGKKGAVQLSIEAIPLVYAKQGEIAVQKYLTEVVQLCKPEIMLPKIKKYSLFKINGFPMHISGRTGNRMLFYGAGQLCLDEADVDYLKKALKYENDIAENELVIADKNSDDIQKQQAQKNLDDYNQKWRIGRKVNMHIYDMLLAKSGNNLYKNRPASQTTDLQEQRELFEKLSLANQIHVIGEVLKLFKCASASANLKLLDKGNACGVIKVSNNILKFKQCVLINQSPTGVFEQEVDLMKL

SEQ ID NO: 1492 - protein, 947 aa, unidentified
  REGION 1..947: note = Description of Unknown: uncultivated organism with predicted taxonomy: Firmicutes
  REGION 1..947: note = MG18-141 effector
VHLAELKCILDNAEGYLPFLGETDNNGLSVREKIEQIVKFRIPYYVGPLAGTRMSREQGRCWVVRKNEKIYPWNFTEIVNLEESAEKFITNMTAKCTYLVGEDVLPKESLLYSEFMVRNAINNITVDGERLPVDVLEKIFKQLFLAKTSKVTKKTLERFFRQENISFQNIGGIDDKINASMKSYNDFRRIFGEDYIQLHRDEIENIIRWITLFCDEKKMLVTKIKNTYPQISDDEIKAIKKLKYKDWGRLSATLLNSSTIAYEDKAFGELVTIISALRHTNKNFMELLSSYCSYDFIGKIKEFNGSRQSSNGKLTYKDVEELYVSSSVKRSIWQTLTILKEIKKIMGCEPKRIFIEMARSKEESKRTDSRLKKLQDLYKKCREENIDFMPRKDEFNALKTQLSSKKEEDLRSDKLYLYYTQMGRCMYTGERIELASLYNDNLYDIDHIYPRSKTKDDSLSNRVLVKKQVNAAKTDIYPLDAAIRTKMHSFWKLIYDKGFIDERKYERLTRSTQLRDEELAGFISRQLVETRQSTKAVAAILKTAYQNSEVVYVKAGNVSDFRQQFKFVKCREVNDLHHAKDAYLNIVVGNCYHVKFTANPLNFITKNQDNRRYSLKPEIFYKFSIKRDGEIAWLGGEDGTMATVARTMHKNNILFTRQAVEGKGELFDQQPLKAKGGQLPLKAGLSIEKYGGYNSLTTAYFAVVKSEGKKGAVQLSIEAIPLVYAKQGEIAVQKYLTEVVQLCKPEIMLPKIKKYSLFKINGFPMHISGRQLKQLQFYVASQLCIDEYSIAYLKKAFKYENNLAVNDEIIADKNADEEKKQKARKRLDFYEKTWGIGKENNMRIYDILLAKSANNLYKKRPASQSATLEKRRENFKGLFVSKQIHVLKEILNLFKCLSATADLQLLGAGKNVGKVTWNTNISNVKQCILINQSPTGIFEQEVDLMKL

SEQ ID NO: 1493 - protein, 1056 aa, unidentified
  REGION 1..1056: note = Description of Unknown: uncultivated organism with predicted taxonomy: Clostridium sp. CAG:964
  REGION 1..1056: note = MG18-142 effector
AVYNLFVDKNYTDKDFYQQYPTMYHLRYALATQAGPFDVRLLYLAVQHIAKHRGHFLFDNLDASKVNDFNAVFSEVENYVRDEMGIEDWSCQNIDELAKVLCDVNLGRTTKQKAMQSLLPAQTKQQKAIIQLFSGGKAKLAELFVDAELDECEKKSVSFQDDDLNEFEPVLTAALGERYEGLLRFKAIYDWSLLAKILHLDTSKKDEDEQHLLSECKVQVYEDHKRDLAVLKSMLKGKPLYNKIFRQDGDISYEKYAKGIKGRNQIDFCKDLKKQLEGIAEYKKIMQEITSIDDAKTEEERVLFRITNGFAFPKQTTKDNGIIPIQVHLAELKCILDNVEGYLPFLGETDNNGLSVREKIEQIVKFRIPYYVGPLAGTRMSREQGRYWVVRKNEKIYPWNFTEIVNLEESAEKFITNMTAKCTYLVGEDVLPKESLLYSEFMVRNAINNITVDGERLPVDVLEKIFKQLFLAKTSKVTKKTLERFFRQENISFQNIGGIDDKINASMKSYNDFRRIFGEDYIQLHRDEIENIIRWITLFCDEKKMLVTKIKNTYPQISDDEIKAIKKLKYKDWGRLSATLLNSSAIAYEDKAFGELVTIISALRHTNKNFMELLSSYCSYDFIGKIKEFNGSRQSSNGKLTYKDVEELYVSPSVKRSIWQTLTILEEIKKIMGCEPKRIFIEMARSKEESKRTDSRLKKLQDLYKKCREENIDFMPRKDEFNTLKTQLSSKKEDDLRSDKLYLYYTQMGRCMYTGEKIELASLYDNNLYDIDHIYPRSKTKDDSLSNRVLVKKQVNAAKTDIYPLDAAIRTKMHSFWKLLYDKGFIDERKYQRLTRSTQLRDEELAGFISRQLVETRQSTKAVAAILKTAYQNSEVVYVKAGNVSDFRQQFKFVKCREVNDLHHAKDAYLNIVVGNCYHVKFTANPLNFITKNQDNRRYSLKPEIFYKFSIKRDGEIAWLGGEDGTMATVARTMHKNNILFTRQAVEGKGELFDQQPLKAKGGQLPLKAGLSIEKYGGYNSLTTAYFAVVKSEGKKGAVQLSIEAIPLVYACLLYT

SEQ ID NO: 1494 - protein, 1348 aa, unidentified; identical to SEQ ID NO: 1486
  REGION 1..1348: note = Description of Unknown: uncultivated organism with predicted taxonomy: Clostridiales
  REGION 1..1348: note = MG18-143 effector

SEQ ID NO: 1495 - protein, 1348 aa, unidentified; identical to SEQ ID NO: 1487
  REGION 1..1348: note = Description of Unknown: uncultivated organism with predicted taxonomy: Firmicutes
  REGION 1..1348: note = MG18-144 effector

SEQ ID NO: 1496 - protein, 951 aa, unidentified
  REGION 1..951: note = Description of Unknown: uncultivated organism with predicted taxonomy: Dorea sp. OM02-2LB
  REGION 1..951: note = MG18-145 effector
GPELVLWVGVILLRRQRSGENAAIPYQAHLQELQIILKNMQQFYPFLQKADENGFTPAYKIEKLLTFRIPYYVGPLNDAHKEKGFCWIVKKADMPVLPWNFDQVVDENACEDAFIGRMSATCTYLVGENVLPQNSPLYCRFMVLNELNNLRIRGEKITPALKQAIFTQLFCAGKGGKVTQKKLLDFLHSQGIDANKQDISGIDGDFKASMAPAVKLQSIFTEPLPPETLERLAFALTVSGESRKMLQNRIRAILPNADNAVVRKVCALKFTGWGRLSQKLLTEIYDVDQTTGECRSLMDLLWSTNNNLMQLLSGDFTFAAGIDAYNAAQNGTENIFDYDHLVKDLYVSPSVKRGLWQTLLLVKEVRKIMGCDPARVFIEMARGASPEQKNKRTVSRKDQLLALYKACKEDARDWCGELEALPEDKLRSDKLYLYYTQMGRCMYSGEPIRLDDLMHDTANQLYDIDHIYPQSKTKDDSLTNRVLVKRQLNAIKSNDYPLPQAMRQTALWKALLEKGLISKQKYLRLTRTTPFTEEELAGFINRQLVETRQSTKAAAHLLEQLLPNTEVVYVKAGLAADFRQEFGFVKCRDANDFHHAKDAYLNAVVGNVYHEKFTKNPLRFVRSGQEYSLNLSALFQNWNIYKGGRVIWQKGEDGSLETVRARMAKNDPMVTRYCTEGRGALYDLQPMKKSKGQLPLKSSDERLQHIDRYGGYNKLAGAYFTLAAYYKKGKRVKSIESVPLYLAAKLQLNPAALQQYLADQLGTDRVEILVPEIKLGTLFKWNGYPMTLSGRTGPQLLFRNAAELRTNAEQEQYIKKMSRYLEKCKGRKEPLPIRPAYDKLTPEENLQLYDAFTQWLTSGIYAKRLSLQGKFLLEKRDAFAALSPEAQVRQLMEILHLFQCNPVAANLSELGGVAHAGILLASKNIDGKVPVSIVHQSVTGYFVQEVCLNDL

SEQ ID NO: 1497 - protein, 947 aa, unidentified; identical to SEQ ID NO: 1491
  REGION 1..947: note = Description of Unknown: uncultivated organism with predicted taxonomy: Phascolarctobacterium succinatutens
  REGION 1..947: note = MG18-146 effector

SEQ ID NO: 1498 - protein, 1218 aa, unidentified; identical to SEQ ID NO: 1490
  REGION 1..1218: note = Description of Unknown: uncultivated organism with predicted taxonomy: Firmicutes
  REGION 1..1218: note = MG18-147 effector

SEQ ID NO: 1499 - protein, 1306 aa, unidentified
  REGION 1..1306: note = Description of Unknown: uncultivated organism with predicted taxonomy: Lactobacillus oryzae
  REGION 1..1306: note = MG18-148 effector
LQELFAEEIAKVDPGFFMRLEDSRLHLDDKRDKAVYNLFVDKNYTDKDFYQQYPTMYHLRYALATQAGPFDVRLLYLAVQHIAKHRGHFLFDNLDASKVNDFNAVFSEVENYVRDEMGIEDWSCQNIDELAKVLCDVNLGRTTKQKAMQSLLPAQTKQQKAIIQLFSGGKAKLAELFVDAELDECEKKSVSFQDDDLNEFEPVLTAALGERYEGLLRFKAIYDWSLLAKILHLDTSKKDEDEQHLLSECKVQVYEDHKRDLAVLKSMLKGKPLYNKIFRQDGDISYEKYAKGIKGRNQIDFCKDLKKQLEGIAEYKKIMQEITSIDDAKTEEERLLFRITNGFAFPKQTTKDNGIIPIQVHLAELKCILDNAEGYLPFLGETDNNGLSVREKIEQIVKFIIPYYVGPLAGTRMSREQGRCWVVRKNEKIYPWNFTEIVNLEESAEKFITNMTAKCTYLVGEDVLPKESLLYSEFMVRNAINNITVDGERLPVDVLEKIFKQLFLAKTSKVTKKTLERFFRQENISFQNIGGIDDKINASMKSYNDFRRIFGEDYIQLHRDEIENIIRWITLFCDEKKMLVTKIKNTYPQISDDEIKAIKKLKYKDWGRLSATLLNSSAIAYEDKAFGELVTIISALRHTNKNFMELLSSYCSYDFIGKIKEFNGSRQSSNGKLTYKDVEELYVSPSVKRSIWQTLTILEEIKKIMGCEPKRIFIEMARSKEESKRTDSRLKKLQDLYKKCREENIDFMPRKDEFNTLKTQLSSKKEDDLRIDKLYLYYTQMGRCMYTGEKIELASLYDNNLYDIDHIYPRSKTKDDSLSNRVLVKKQVNAAKTDIYPLDAAIRTKMHSFWKLLYDKGFIDERKYQRLTRSTQLRDEELAGFISRQLVETRQSTKAVAAILKTAYQNSEVVYVKAGNVSDFRQQFKFVKCREVNDLHHAKDAYLNIVVGNCYHVKFTANPLNFITKNQDNRRYSLKPEIFYKFSIKRDGEIAWLGGKDGTITTVTKTMHKNNILFTRQPVEGKGELFKQQPLKAKSGQLPLKAGLSVEKYGGYDSLTTAYFALVKSEGKKGAVQLSIEGIPLVYAKQGEKAVQNYLTDVLQLCEPEIKIPKIKKYSLFKINGFPMHISGRQLKQLQFYVASQLCIDEYSIAYLKKAFKYENNLAVNDEIIADKNADEEKKQKARKRLDFYEKTWGIGKENNMRIYDILLAKSANNLYKKRPASQSATLEKRRENFKGLFVSKQIHVLKEILNLFKCLSATADLQLLGAGKNVGKVTWNTNISNVKQCILINQSPTGIFEQEVDLMKL

SEQ ID NO: 1500 - protein, 947 aa, unidentified
  REGION 1..947: note = Description of Unknown: uncultivated organism with predicted taxonomy: Phascolarctobacterium
  REGION 1..947: note = MG18-149 effector
VHLAELKCILDNAEGYLPFLGETDNNGLSVREKIEQIVKFRIPYYVGPLAGTRMSREQGRCWVVRKNEKIYPWNFTEIVNLEESAEKFITNMTAKCTYLVGEDVLPKESLLYSEFMVRNAINNITVDGERLPVDVLEKIFKQLFLAKISKVTKKTLERFFRQENISFQNIGGIDDKINASMKSYNDFRRIFGEDYIQLHRDKIENIIRWITLFCDEKKMLVTKIKNTYPQIADDQIKAIKKLKYKDWGRLSATLLNSSAIAYEDKAFGELVTIISALRHTNKNFMELLSSYCSYDFIGKIKDFNGSRQSSNGKLTYKDVEELYVSPSVKRSIWQTLTILEEIKKIMGREPKRIFIEMARSKEESKRTDSRLKKLQDLYKKCREENIDFMPRKDEFNALKTQLSSKKEEDLRSDKLYLYYTQMGRCMYTGERIELASLYDDNLYDIDHIYPRSKTKDDSLSNRVLVKKEVNAAKTDIYPLDAAIRTKMHSFWKLLYDKGFIDERKYERLTRSTQLRDEELAGFISRQLVETRQSTKAVAAILKTAYQNSEVVYVKAGNVSDFRQQFKFVKCRDVNDLHHAKDAYLNIVVGNCYHVKFTANPLNFITKNQDNRRYSLKPEIFYKFSIKRDSEIAWIGGKDGTITTVTKTMHKNNILFTRQPVEGKGELFKQNPLKAKNGQLPLKAGLSVEKYGGYNSLSTAYFAVVKSEGKKGAVQLSIEAIPLVYAKQGEKAVQDYLTEVVQLCNPEIRIPKIKKYSLFKINGFPMHISGKTVKQIIFYAAGQLCLADDVADYLKKALKYEAYIALNEGLISDKNADDTQKQKAQQRLDYFKQKWGISSDANMKIYDILLAKSANNLYKNRPASQTKDLQEQRCVFEKLSLAEQIHIIGEVLNLFKCASASANLKLLGKGNSCGVIKTSNNITKCKQCILINQSPTGVFEQEVDLMKL

SEQ ID NO: 1501 - protein, 947 aa, unidentified
  REGION 1..947: note = Description of Unknown: uncultivated organism with predicted taxonomy: Firmicutes
  REGION 1..947: note = MG18-150 effector
VHLAELKCILDNAEGYLPFLGETDNNGLSVREKIEQIVKFRIPYYVGPLAGTRMSREQGRCWVVRKNEKIYPWNFTEIVNLEESAEKFITNMTAKCTYLVGEDVLPKESLLYSEFMVRNAINNITVDGERLPVDVLEKIFKQLFLAKISKVTKKTLERFFRQENISFQNIGGIDDKINASMKSYNDFRRIFGEDYIQLHRDKIENIIRWITLFCDEKKMLVTKIKNTYPQIADDQIKAIKKLKYKDWGRLSATLLNSSAIAYEDKAFGELVTIISALRHTNKNFMELLSSYCSYDFIGKIKDFNGSRQSSNGKLTYKDVEELYVSPSVKRSIWQTLTILEEIKKIMGREPKRIFIEMARSKEESKRTDSRLKKLQDLYKKCREENIDFMPRKDEFNALKTQLSSKKEEDLRSDKLYLYYTQMGRCMYTGERIELASLYDDNLYDIDHIYPRSKTKDDSLSNRVLVNKEVNAAKTDIYPLDAAIRTKMHSFWKLLYDKGFIDERKYERLTRSTQLRDEELAGFISRQLVETRQSTKAVAAILKTAYQNSEVVYVKAGNVSDFRQQFKFVKCRDVNDLHHAKDAYLNIVVGNCYHVKFTANPLNFITKNQDNRRYSLKPEIFYKFSIKRDSEIAWIGGKDGTITTVTKTMHKNNILFTRQPVEGKGELFKQNPLKAKNGQLPLKAGLSVEKYGGYNSLSTAYFAVVKSEGKKGAVQLSIEAIPLVYAKQGEKAVQDYLTEVVQLCNPEIRIPKIKKYSLFKINGFPMHISGKTVKQIIFYAAGQLCLADDVADYLKKALKYEAYIALNEGLISDKNADDTQKQKAQQRLDYFKQKWGISSDANMKIYDILLAKSANNLYKNRPASQTKDLQEQRCVFEKLSLAEQIHIIGEVLNLFKCASASANLKLLGKGNSCGVIKTSNNITKCKQCILINQSPTGVFEQEVDLMKL

SEQ ID NO: 1502 - protein, 781 aa, unidentified
  REGION 1..781: note = Description of Unknown: uncultivated organism with predicted taxonomy: Phascolarctobacterium
  REGION 1..781: note = MG18-151 effector
FQNIGGIDDKINASMKSYNDFRRIFGEDYIQLHRDEIENIIRWITLFCDEKKMLVTKIKNTYPQIADDQIKAIKKLKYKDWGRLSATLLNSSAIAYEDKAFGELVTIISALRHTNKNFMELLSSYCSYDFIGKIKEFNGSRQSSNGKLTYKDVEELYVSPSVKRSIWQTLTILEEIKKIMGCEPKRIFIEMARSKEESKRTDSRLKKLQDLYKKCREENIDFMPHTDELNAFKIQLSSKKEDDLRSDKLYLYYTQMGRCMYTGERIELASLYNDNLYDIDHIYPRSKTKDDSLSNRVLVKKEVNAAKTDIYPLDAVIRTKMHSFWKLLYDKGFIDERKYERLTRSTQLRDEELAGFISRQLVETRQSTKAVAAILKTAYKHSEIVYVKAGNVSDFRQKFEFVKCRDVNDLHHAKDAYLNIVVGNCYHVKFTANPLNFITKNQDNRRYSLKPEIFYKFSIKRDSEIAWIGGKDGTITTVTKTMHKNNILFTRQPVEGKGELFKQQPLKAKSGQLPLKAGLSVEKYGGYDSLTTAYFALVKSEGKKGAVQLSIEGIPLVYAKQGEIAVQKYLTEVVQLCKPEIMLPKIKKYSLFKINGFPMHISGRQLKQLQFYVASQLCIDEYSIAYLKKAFKYENNLAVNDEIIADKNADEEKKQKARKRLDFYEKTWGIGKENNMRIYDILLAKSANNLYKKRPASQSATLEKRRENFKGLFVSKQIHVLKEILNLFKCLSATADLQLLGAGKNVGKVTWNTDISNVKQCILINQSPTGIFEQEVDLMKL

SEQ ID NO: 1503 - protein, 947 aa, unidentified; identical to SEQ ID NO: 1500
  REGION 1..947: note = Description of Unknown: uncultivated organism with predicted taxonomy: Phascolarctobacterium succinatutens
  REGION 1..947: note = MG18-152 effector

SEQ ID NO: 1504 - protein, 1010 aa, unidentified
  REGION 1..1010: note = Description of Unknown: uncultivated organism with predicted taxonomy: Firmicutes
  REGION 1..1010: note = MG18-153 effector
VHCGFFILFFVQVDYTIYHKKIMQEITNIDDAKTEEERLLFRITNGFAFPKQTTKDNGIIPIQVHLAELKCILDNAEGYLPFLGETDNNGLSVREKIEQIVKFRIPYYVGPLAGTRMSREQGRCWVVRKHEKIYPWNFTEIVNLEESAEKFITNMTAKCTYLVGEDVLPKESLLYSEFMVRNAINNITVDGERLPVDVLEKIFKQLFLAKTSKVTKKTLERFFRQENISFQNIGGIDDKINASMKSYNDFRRIFGEDYIQLHRDEIENIIRWITLFCDEKKMLVTKIKNTYPQISDDEIKAIKKLKYKDWGRLSATLLNSSTIAYEDKAFGELVTIISALRHTNKNFMELLSSYCSYDFIGKIKEFNGSRQSSNGKLTYKDVEELYVSSSVKRSIWQTLTILKEIKKIMGCEPKRIFIEMARSKEESKRTDSRLKKLQDLYKKCREENIDFMPRKDEFNALKTLLSSQKEEDLRSDKLYLYYTQMGRCMYTGERIELASLYDNNLYDIDHIYPRSKTKDDSLSNRVLVKKQVNAAKTDTYPLDAAIRTKMHSFWKLLYDKGFIDERKYERLTRSTQLRDEELAGFISRQLVETRQSTKAVAAILKTAYQNSEVVYVKAGNVSDFRQQFKFVKCREVNDLHHAKDAYLNIVVGNCYHVKFTANPLNFITKNQDNRRYSLKPEIFYKFSIKRDGEIAWLGGEDGTMATVARTMHKNNILFTRQAVEGKGELFDQQPLKAKGGQLPLKAGLSIEKYGGYNSLTTAYFAVVKSEGKKGAVQLSIEAIPLVYAKQGEIAVQKYLTEVVQLCKPEIKIPKIKKYSLFKINGFPMHISGRTGKQLVFYGAGQLCIADDVADYLKKALKYETDIAEKEKTLADQNADDIHKQKAQKGLDFYEQKWGISGAVNVQLYDMFIAKSANNLYKNRPASQTITLKEKREHFVKLTLSKQIHIIKEILNLFKCASASADFKLIDKGTSCGTLKISNNITKLKECILINQSPTGVFEQEVDLMKL

SEQ ID NO: 1505 - protein, 1056 aa, unidentified
  REGION 1..1056: note = Description of Unknown: uncultivated organism with predicted taxonomy: Phascolarctobacterium succinatutens
  REGION 1..1056: note = MG18-154 effector
VQVYEDHKRDLAVLKSMLKGKPLYNKIFRQDGDISYEKYAKGIKGRNQIDFCKDLKKQLEGIAEYKKIMQEITNIDDAKTEEERLLFRITNGFAFPKQTTKDNGIIPIQVHLAELKCILDNAEGYLPFLGETDNNGLSVREKIEQIVKFRIPYYVGPLAGTRMSREQGRCWVVRKHEKIYPWNFTEIVNLEESAEKFITNMTAKCTYLVGEDVLPKESLLYSEFMVRNAINNITVDGERLPVDVLEKIFKQLFLAKTSKVTKKTLERFFRQENISFQNIGGIDDKINASMKSYNDFRRIFGEDYIQLHRDEIENIIRWITLFCDEKKMLVTKIKNTYPQISDDEIKAIKKLKYKDWGRLSATLLNSSTIAYEDKAFGELVTIISALRHTNKNFMELLSSYCYYDFIGKIKEFNGSRQSSNGKLTYKDVEELYVSPSVKRSIWQTLTILEEIKKIMGCEPKRIFIEMARSKEESKRTDSRLKKLQDLYKKCREENIDFMPRKDEFNALKTQLSSKKEENLRSDKLYLYYTQMGRCMYTGERIELASLYDNNLYDIDHIYPRSKTKDDSLSNRVLVKKQVNAAKTDTYPLDAAIRTKMHSFWKLLYDKGFIDERKYERLTRSTQLRDEELAGFISRQLVETRQSTKAVAAILKTAYQNSEVVYVKAGNVSDFRQQFKFVKCREVNDLHHAKDAYLNIVVGNCYHVKFTANPLNFITKNQDNRRYSLKPEIFYKFSIKRDGEIAWLGGEDGTMATVARTMHKNNILFTRQAVEGKGELFDQQPLKAKGGQLPLKAGLSIEKYGGYNSLTTAYFAVVKSEGKKGAVQLSIEAIPLVYAKQGEIAVQKYLTEVVQLCKPEIMLPKIKKYSLFKINGFPMHISGRTGKQLIFYGAGQLCIADDVADYLKKALMYETNIAEKEKTLADQNADDIQKQKAQKGLDFYEQKWGISGAVNVQLYDMFIAKSANNLYKNRPVSQTITLKEKREHFVKLTVSKQIHIIKEILNLFKCASASADFKLIDKGTSCGTLKISNNINKLKECILINQSPTGVFEQEVDLMKL

SEQ ID NO: 1506 - protein, 1046 aa, unidentified
  REGION 1..1046: note = Description of Unknown: uncultivated organism with predicted taxonomy: Phascolarctobacterium succinatutens
  REGION 1..1046: note = MG18-155 effector
LAVLKSMLKGKPLYNKIFRQDGDISYEKYAKGIKGRNQLDFCKDLKKQLDGIAEYKKIMQEITSIDAAGTEEERLLFRIANGFAFPKQTTKDNGIIPIQVHLAELKCILDNAEGYLQFLGETDNNGLSVREKIEQIVKFRIPYYVGPLAGTRMSREQGRCWVVRKNEKIYPWNFTQVVNLEESAEKFITNMTAKCTYLVGEDVLPKESLLYSEFMVRNAINNITVDGERLPVDVLEKIFKQLFLAKTSKVTKKTLERFFRQENISFQNIGGIDDKINASMKSYNDFRRIFGEDYIQLHRDEIENIIRWITLFCDEKKMLVTKIKNTYPQIADDQIKAIKKLKYKDWGRLSATLLNSSAIAYEDKAFGELVTIISALRHTNKNFMELLSSYCSYDFIGKIKEFNGSRQSSNGKLTYKDVEELYVSPSVKRSIWQTLTILEEIKKIMGCEPKRIFIEMARSKEESKRTDSRLKKLQDLYKKCREENIDFMPRKDEFNTLKTQLNSKKEDDLRSDKLYLYYTQMGRCMYTGEKIELASLYDNNLYDIDHIYPRSKTKDDSLSNRVLVKKQVNAAKTDTYPLDAAIRTKMHSFWKLLYDKGFIDERKYQRLTRSTQLRDEELAGFISRQLVETRQSTKAVATILKTAYQNSEVVYVKAGNVSDFRQQFKFVKCREVNDLHHAKDAYLNIVVGNCYHVKFTANPLNFITKNQDNRRYSLKPEIFYKFSIKRDGEIAWLGGEDGTMATVARTMHKNNILFTRQAVEGKGELFDQQPLKAKGGQLPLKAGLSIEKYGGYNSLTTAYFAVVKSEGKKGAVQLSIEAIPLVYAKQGEIAVQKYLTEVVQLCKPEIMLPKIKKYSLFKINGFPMHISGRTGNRMLFYGAGQLCLDEADVDYLKKALKYENDIAENELVIADKNSDDIQKQQAQKNLDYYNQKWRISRKVNMHIYDMLLAKSGNNLYKNRPASQTTDLQEQREFFEKLSLANQIHVIGEVLKLFKCASASANLKLLDKGNACGVIKVSNNILKFKQCVLINQSPTGVFEQEVDLMKL

SEQ ID NO: 1507 - protein, 759 aa, unidentified
  REGION 1..759: note = Description of Unknown: uncultivated organism with predicted taxonomy: Clostridium sp. CAG:964
  REGION 1..759: note = MG18-156 effector
VHLAELKCILDNAEGYLPFLGETDNNGLSVREKIEQIVKFRIPYYVGPLAGTRMSREQGRCWVVRKNEKIYPWNFTEIVNLEESAEKFITNMTAKCTYLVGEDVLPKESLLYSEFMVRNAINNITVDGERLPVDVLEKIFKQLFLAKTSKVTKKTLERFFRQENISFQNIGGIDDKINASMKSYNDFRRIFGEDYIQLHRDEIENIIRWITLFCDEKKMLVTKIKNTYPQISDDEIKAIKKLKYKDWGRLSATLLNSSTIAYEDKAFGELVTIISALRHTNKNFMELLSSYCSYDFIGKIKEFNGSRQSSNGKLTYKDVEELYVSSSVKRSIWQTLTILKEIKKIMGCEPKRIFIEMARSKEESKRTDSRLKKLQDLYKKCREENIDFMPRKDEFNALKTQLSSKKEEDLRSDKLYLYYTQMGRCMYTGERIELASLYNDNLYDIDHIYPRSKTKDDSLSNRVLVKKQVNAAKTDIYPLDAAIRTKMHSFWKLIYDKGFIDERKYERLTRSTQLRDEELAGFISRQLVETRQSTKAVAAILKTAYQNSEVVYVKAGNVSDFRQQFKFVKCREVNDLHHAKDAYLNIVVGNCYHVKFTANPLNFITKNQDNRRYSLKPEIFYKFSIKRDGEIAWLGGEDGTMATVARTMHKNNILFTRQAVEGKGELFDQQPLKAKGGQLPLKAGLSIEKYGGYNSLTTAYFAVVKSEGKKGAVQLSIEAIPLVYAKQGEIAVQKYLTEVVQLCKPEIMLPKIKKYSLFK

SEQ ID NO: 1508 - protein, 988 aa, unidentified
  REGION 1..988: note = Description of Unknown: uncultivated organism with predicted taxonomy: Ruminococcaceae bacterium
  REGION 1..988: note = MG18-157 effector
MYHLRYALATQAGPFDVRLLYLAVQHIAKHRGHFLFDNLDASKVNDFNAVFSEVENYVRDEMGIEDWSSQNIDELAKVLCDVNLGRTTKQKAMQSLLPAQTKQQKAIIQLFSGGKAKLAELFVDEELDECEKKSVSFQDDDLNEFEPVLTAALGERYEGLLRFKAIYDWSLLAKILHLDTSKKDEDEQHLLSECKVQVYEDHKRDLAVLKSMLKGKPLYNKIFRQDGDISYEKYAKGIKGRNQIDFCKDLKKQLEGIAEYKKIMQEITNIDDAKTEEERLLFRITNGFAFPKQTTKDNGIIPIQVHLAELKCILDNAEGYLPFLGETDNNGLSVREKIEQIVKFRIPYYVGPLAGTRMSREQGRCWVVRKHEKIYPWNFTEIVNLEESAEKFITNMTAKCTYLVGEDVLPKESLLYSEFMVRNAINNITVDGERLPVDVLEKIFKQLFLAKTSKVTKKTLERFFRQENISFQNIGGIDDKINASMKSYNDFRRIFGEDYIQLHRDEIENIIRWITLFCDEKKMLVTKIKNTYPQIADDQIKAIKKLKYKDWGRLSATLLNSSAIAYEDKAFGELVTIISALRHTNKNFMELLSSYCSYDFIGKIKEFNGSRQSSNGKLTYKDVEELYVSPSVKRSIWQTLTILEEIKKIMGREPKRIFIEMARSKEESKRTDSRLKKLQDLYKKCREENIDFMPRKDEFNALKTQLSSKKEEDLRSDKLYLYYTQMGRCMYTGERIELASLYDNNLYDIDHIYPRSKTKDDSLSNRVLVKKEVNAAKTDIYPLDAVIRTKMHSFWKLLYDKGFIDERKYERLTRSTQLRDEELAGFISRQLVETRQSTKAVAAILKTAYKHSEIVYVKAGNVSDFRQKFEFVKCRDVNDLHHAKDAYLNIVVGNCYHVKFTANPLNFITKNQDNRRYSLKPEIFYKFSIKRDSEIAWIGGKDGTITTVTKTMHKNNILFTRQPVEGKGELFKQQPLKAKSGHWPLKAG

SEQ ID NO: 1509 - protein, 814 aa, unidentified
  REGION 1..814: note = Description of Unknown: uncultivated organism with predicted taxonomy: Clostridium sp. CAG:964
  REGION 1..814: note = MG18-158 effector
FITNMTAKCTYLVGEDVLPKESLLYSEFMVRNAINNITVDGERLPVDVLEKIFKQLFLAKTSKVTKKTLERFFRQENISFQNIGGIDDKINASMKSYNDFRRIFGEDYIQLHRDEIENIIRWITLFCDEKKMLVTKIKNTYPQIADDQIKAIKKLKYKDWGRLSATLLNSSAIAYEDKAFGELVTIISALRHTNKNFMELLSSYCSYDFIGKIKEFNGSRQSSNGKLTYKDVEELYVSPSVKRSIWQTLTILEEIKKIMGCEPKRIFIEMARSKEESKRTDSRLKKLQDLYKKCREENIDFMPRKDEFNTLKTQLNSKKEDDLRSDKLYLYYTQMGRCMYTGEKIELASLYDNNLYDIDHIYPRSKTKDDSLSNRVLVKKQVNAAKTDTYPLDAAIRTKMHSFWKLLYDKGFIDERKYQRLTRSTQLRDEELAGFISRQLVETRQSTKAVATILKTAYQNSEVVYVKAGNVSDFRQQFKFVKCREVNDLHHAKDAYLNIVVGNCYHVKFTANPLNFITKNQDNRRYSLKPEIFYKFSIKRDGEIAWLGGEDGTMATVARTMHKNNILFTRQAVEGKGELFDQQPLKAKGGQLPLKAGLSIEKYGGYNSLTTAYFAVVKSEGKKGAVQLSIEAIPLVYAKQGEIAVQKYLTEVVQLCKPEIMLPKIKKYSLFKINGFPMHISGRTGNRMLFYGAGQLCLDEADVDYLKKALKYENDIAENELVIADKNSDDIQKQQAQKNLDYYNQKWRISRKVNMHIYDMLLAKSGNNLYKNRPASQTTDLQEQREFFEKLSLANQIHVIGEVLKLFKCASASA

SEQ ID NO: 1510 - protein, 767 aa, unidentified
  REGION 1..767: note = Description of Unknown: uncultivated organism with predicted taxonomy: Phascolarctobacterium succinatutens
  REGION 1..767: note = MG18-159 effector
MKSYNDFRRIFGEDYIQLHRDEIENIIRWITLFCDEKKMLVTKIKNTYPQISDDEIKAIKKLKYKDWGRLSTTLLNSSTIAYEDKAFGELVTIISALRHTNKNFMELLSSYCSYDFIGKIKEFNGSRQSSNGKLTYKDVEELYVSPSVKRSIWQTLTILEEIKKIMGCEPKRIFIEMARSKEESKRTDSRLKKLQDLYKKCREENIDFMPRKDEFNTLKTQLSSKKEDDLRIDKLYLYYTQMGRCMYTGEKIELASLYDNNLYDIDHIYPRSKTKDDSLSNRVLVKKQVNAAKTDTYPLDAAIRTKMHSFWKLLYDKGFIDERKYQRLTRSTQLRDEELAGFISRQLVETRQSTKAVAAILKTAYQNSEVVYVKAGNVSDFRQQFKFVKCREVNDLHHAKDAYLNIVVGNCYHVKFTANPLNFITKNQDNRRYSLKPEIFYKFSIKRDSEIAWIGGKDGTITTVTKTMHKNNILFTRQPVEGKGELFKQQPLKAKSGQLPLKAGLSVEKYGGYDSLTTAYFALVKSEGKKGAVQLSIEGIPLVYAKQGEIAVQKYLTEVVQLCKPEIMLPKIKKYSLFKINGFPMHISGRQLKQLQFYVASQLCIDEYSIAYLKKAFKYENNLAVNDEIIADKNADEEKKQKARKRLDFYEKTWGIGKENNMRIYDILLAKSANNLYKKRPASQSATLEKRRENFKGLFVSKQIHVLKEILNLFKCLSATADLQLLGAGKNVGKVTWNTNISNVKQCILINQSPTGIFEQEVDLMKL

SEQ ID NO: 1511 - protein, 815 aa, unidentified
  REGION 1..815: note = Description of Unknown: uncultivated organism with predicted taxonomy: Clostridiales
  REGION 1..815: note = MG18-160 effector
DVLPKQSPLYSRYMVLNELNNIRVDGIRLPVEVKQQAYKDLFLSLPKVSMKKFREYLRTINIQGEISGIDGEFQGSLKPHIDLKRIFGPARNLGAMGEDIIRWIVLFGEAKNILRKKIAEKYDLTEEQMKGVLRLHYSGWGRFSEKFLNGIRDVNKETGEVGDTVIESLWNSSQNLMELLGREHHFLGAISMHNDAFGSSDRITYQTVQDLYVAPAVKRQIWQALTIVKELKGVMGREPKRVFIEMARGPGEKKRTVSRKDALIELYKTLKSDERDWINEIAVQPEDRFRSDRLYFYYLQLGKCLYTGKPIDLDQIYNEMVYDVDHIYPQSKVKDDSLVNRVLVDSTKNKEKSDRYPIDKEIRDRMKPFWKMLLQQGFMEKEKYERLTRSTPFSDNELAEFIARQLVETRQSTKAVAEILQQVYPLSKIVYVKAGLVADFRRYMGHVKCREVNDYHHAKDAYLNIVAGNIYHTRFTDNPYNFIKEAKDKDQKYSLKLEKLLTRDIRRGDITAWDTTGNKTRGVVEKVLARNDIRFTRYPYTEKGQLFDVTLMKKGLGQLPIKANLPIEKYGGYNKVKGAYFMLVEHTDKKGKRIRTLKDVPVHLASQLATDVKKQEYCLDLGMKDPVIRYSKIKMKSLVEVDGFRMHISGRKGDALVLSHAHELVIGEYWEQYIKKLVKFRERAQAFSKSNRGMNLKITTYDGIDGNNNMELYDLFVSKLNNTIYQLKLSKQGTDLLDERERFLNLTIEEQVGILLEILNFFKCNRTSSDLKLLGKGGQAGNLSINSTISGYQTFKLINQSPTGVFEESVDLLKV

SEQ ID NO: 1512 - protein, 1098 aa, unidentified
  REGION 1..1098: note = Description of Unknown: uncultivated organism with predicted taxonomy: Firmicutes
  REGION 1..1098: note = MG21-1 effector
MTSHSIRYTLGLDIGIASVGWAVLRNGSDSEPYRIETLGVRIFDKAEVPKTGASLAAPRREARSSRRVVRRRRHRKERIKYLIEQEGIMTQAEMTRLFQNSSFEKSVYEIRVEALDRMLTREETVRLLIHFAQRRGYKSNSKAEEAKDNENGVIKQAISQNKQAMKAHGYRTFGEMLLMDERFYYTQPDGSRIFIPHNKASDYKVTAERSMLADELHMIFAAQRSLGSLWFSDTFETAYMDVWSSQRSFDEGPGGDSPYGGSQIEKMLGTSSDGESRAPKASYSAEYFRLLQDVNHLRIVSLDGTSSPLTQEQRDIVVAASKKSGTLTYTQLRKKLALADDQYFNALYYGDKTAVEVEKKRFGHLQFYHQLRTALDTVEKGAADTLTWAQRDEIARILTVYKADVRRTDELRKAGIPAEYIRALLPLSPTRAMHLSVTAIRKMIPHLEAGMSYSDAYSKAYGNQSTASAAPKKNKLSLNDIEEITNPVVRRAVSQSIKVINAIVRQYGAPERVRIELAREMGKNFKDRGKIAKSQADHAAKNERIKAQISEYKSDHITGQDIVKFKLFKEQDGICLYSGKSLDIARLFEPGYVDVDHIIPYSISFDDSYNNKVLVLSSENRQKGNRIPYAYFGQNSDRWEKYETLVSNTVRSYRKRKNLLLKSLSEAQIDGFKQRNLQDTQYLSKVIFRLIENHLQFAETAPGKKHTQPVNGAITAQVRKRLGIEKIREDGDLHHAVDAAVIACITPGMIQKITKYAQNHERFYATAKGYVDIETGEVLTRSEYEAMDDIRFPEPWPGFRSELEARVSEHPQEAIARLKLPHYENSEEIRPIFVSRMPNHKVTGAAHLETIRSKKGGAGSTVTKTALPDLKLDKNGEIAGYYRKEDDPLLYEALKARLKAFGGDGKKAFAEPFHKPKHNGEPGPIVKKVKIQESATLTVPVNHGIAANGSMVRLDVFHVDGDGYYFVPIYTSDTVKPELPNRAVVAGRRVQEWKVMDDSYFKFSLYPKDLIRIRSKKGIKLKAVNRNADLQEYSTNDCLCYFVKFNISTGALSVENHDRKFEQPGLGGKTLLSIEKYQVDVLGNYSPVALPEKRMKFR

SEQ ID NO: 1513 - protein, 915 aa, unidentified
  REGION 1..915: note = Description of Unknown: uncultivated organism with predicted taxonomy: Roseburia sp. AM23-20
  REGION 1..915: note = MG21-3 effector
HNTSGVYDLTVARTFIEEEAHKLFAAQRQFGNAFATENIENEYCEILLSQRHFSDGPGGERTFKFDLRGNCTFEKDELRAFKACYTFEFFKLLQDINHLRIIPEYRKGSNKQTRPLTPEERQKIIDLCLKSSSIDFSKLRKELKLADDEIFNRVGYDVKKKKSKKKDAEEQPEEQLTPEQQRTKCEEATKFTQMQSYHEMRKALDKVAKGTISKFSHDKLDEIGEILSLYKADDKRRERLEQIGLSNEEIEALLPLTFTKAGNLSLGAMRKLIPYLEQGLTYDKACEIVYGDHRAQYKGERMPLLSFGKLKEEGALDSVNNPVVLRAIAQTFKVVNAIIRRYGSPQAIHIELARDMKRNFADRQDIKSKQKDNWSENNRRREKVEEIKGSVATGQDIVKMKLYEDQNGVCLYSGKQLELHRLFEVGYAEVDHIVPYSKCFDDSYNNKVLVFSSENQRKGNRLPLEYMLAEGDEDKLDDYVTLVEANIKNTRKKQRLLKPCLTEQDITDWKARNLTDTQYITKAVADILRNYLAFEEDSPFIKKPVRSINGAVTDQVRKRLGLQKHREEGDLHHAMDAAVIAVTTDGYINRISRYTQRREFGKRIGCYKDKQTGEKVEIERQKGQAPLYIDPETGEKLTEQVFDHKYAPTFPAPWKEFTKELKARMAPNADEAIRQLYLPSYGSEEIKPIFVSQMPDRKISGQAHAETIRSARIDVDESGKERIIAVAKTPLTSLKLDKDGEIDGYYMPSSDRLLYEELKNRLIKTKTSGKTYGNAEQAFKEPVYKPKKDGSQGPRVYKVKTWKPTTSNVKVAGGIAKKGDIVRVDIFHITGGKDQGYYFVPIYVADTIKNTLPKHAVVTNFKSSKVEWKEMDDSNFIFSLYKGDLIHIELCADCRDKDSNNKIRKAKDMYVYYDG

SEQ ID NO: 1514 - protein, 1166 aa, unidentified
  REGION 1..1166: note = Description of Unknown: uncultivated organism with predicted taxonomy: Clostridiales
  REGION 1..1166: note = MG21-4 effector
MHYILGLDIGITSIGWAVIESDQDGAPFKIADLGVRIFKAAEQPKTGSSLALPRRSARSLRRRLWRKAHRKERIKLLLDRVGLITKENLEKLFSASSFEKDVYTLRSEGLDRKLNNEEWARVLYHLAQRRGYRSSSKAEEADTKNDAGKLLKAVKNNSDKMAQNNFRTVGEMFCKDSSDLFQVKDGSGHVIGRKTHNTSGVYDLTVARTFIEEEAHKLFAAQRQFGNAFATENIENEYCEILLSQRHFSDGPGGERTFKFDLRGNCTFEKDELRAFKACYTFEFFKLLQDINHLRIIPEYRKGSNKQTRPLTPEERQKIIDLCLKSSSIDFSKLRKELKLADDEIFNRVGYDVKKKKSKKKDAEEQPEEQLTPEQQRTKCEEATKFTQMQSYHEMRKALDKVAKGTISKFSHDKLDEIGEILSLYKADDKRRERLEQIGLSNEEIEALLPLTFTKAGNLSLGAMRKLIPYLEQGLTYDKACEIVYGDHRAQYKGERMPLLSFGKLKEEGALDSVNNPVVLRAIAQTFKVVNAIIRRYGSPQAIHIELARDMKRNFADRQDIKSKQKDNWSENNRRREKVEEIKGSVATGQDIVKMKLYEDQNGVCLYSGKQLELHRLFEVGYAEVDHIVPYSKCFDDSYNNKVLVFSSENQRKGNRLPLEYMLAEGDEDKLDDYVTLVEANIKNTRKKQRLLKPCLTEQDITDWKARNLTDTQYITKAVADILRNYLAFEEDSPFIKKPVRSINGAVTDQVRKRLGLQKHREEGDLHHAMDAAVIAVTTDGYINRISRYTQRREFGKRIGCYKDKQTGEKVEIERQKGQAPLYIDPETGEKLTEQVFDHKYAPTFPAPWKEFTKELKARMAPNADEAIRQLYLPSYGSEEIKPIFVSQMPDRKISGQAHAETIRSARIDVDESGKERIIAVAKTPLTSLKLDKDGEIDGYYMPSSDRLLYEELKNRLKAYGNAEQAFKEPVYKPKKDGSQGPRVYKVKTYKTTTSNVKVAGGIADNGSMVRIDVFHIKEGKDKGYYFIPIYVADTIKQKLPQKAVVAAKSIDQWKEMDDEDFIFSLYPGDLVRVEHKKDIVFKSTDKNSSDTISCKNLLTYYSGANISTGAITITNHDRSYIVHGLGIKTLQLLEKYEVDVLGNYHKVRLPEKRQAFNLKYSQKKQ

SEQ ID NO: 1515 - protein, 1166 aa, unidentified; identical to SEQ ID NO: 1514
  REGION 1..1166: note = Description of Unknown: uncultivated organism
  REGION 1..1166: note = MG21-5 effector

SEQ ID NO: 1516 - protein, 1166 aa, unidentified; identical to SEQ ID NO: 1514
  REGION 1..1166: note = Description of Unknown: uncultivated organism
  REGION 1..1166: note = MG21-6 effector

SEQ ID NO: 1517 - protein, 1136 aa, unidentified
  REGION 1..1136: note = Description of Unknown: uncultivated organism with predicted taxonomy: Clostridium sp. CAG:571
  REGION 1..1136: note = MG21-7 effector
MGYRIGLDIGITSVGWSVIEDDSNGNPIRIIDLGSRIFDAAEKPKDGSPLAKERRDARGLRRRLRRKKYRVERTKRLLERYDIITKKEVDEMYANKAHVKHLYNVYELRVLGIEQKLTNKELARVLISLVKKRGYKSNSKAEESNGEAGKLLTATRDNELLMQSKGYRTVAEMYLKDDKFKAKDKNGEILVDKDGSPLLKIKNSTGDYKNTTLRKLLVEEIKLILNKQKELNSKITDDFINEYLKIFESQRNFDDGPGFPSPYGGNLIENMLGNCTFEKEEKRAPKATYTFEYFKFLQTLNHIKIETINKKDDGTINKEKRELTSEEKEKLKELVFSKVTVTYSDVRKTLQLESNQRFNMFTYRDLLNYTEETNKEIEKEKKLKEFESYKKIKTALNHIEKNYITKLTTDDLDEIGYALTVYKSNDKRKEYLEKHTPNLSKEAIEELLKLSFSKVGNLSLKAMKKIIPELEKGVTYDKAVDKVYEDFRGTVDTQKKRKLRLKDFEQEISNPVVRRGLSQAIKVLNAITLRYNEKFGKPDVVVVELARELGKNFADRRTIEKRQSDNMQTNEKAKESIIALGKNNPTGKDIVKFKLWQDQDCKCIYSGKTIPVEELFTDLVDVDHIIPYSQCFDDSYNNKVLVLASENRQKGNRVPYKYLKESGKNLEEYEIRVNTLIRNNKKKQNLLRQDFTREDAEDWKERNLNDTKYICKYMYNLIRNHLEFSDNANFVRKVWTVNGKLTAHIRKRLGIEKVRDGDTHHAVDATVIAITTQNMINRLTRYYQYVDGRYMNNKGEYIDTYTGEIINAKEYEEKYGIYFPEPWPKFRKELDIRTNCKTRERMIECLEAEKIYTYEDYDDVEPIFVSRMPRRKVTGTAHLDTIRGIKEKDGELKTITKTELTKLKLKDGEIEGYPENCKRDDRLLYEALKNRLIEFNGDATKAFSEPFYKPKSDGTRGPVVNKVKIEANTTMGVKLNDNKAFAANGDCVRLDIFYVENEGYYFIPIYVSDTVKKELPNKACVAGKKYADWKEMRDENFIFSIYPKDLIYIQGKNKIKLNPVIKDKDSIEVEEILAYYVKAGISVAQIAIQTNDNKYNQSSLGIKNLKKLEKYEVDILGNYHKVKLPEKRLPFNINKK

SEQ ID NO: 1518 - protein, 1121 aa, unidentified
  REGION 1..1121: note = Description of Unknown: uncultivated organism with predicted taxonomy: Clostridiales
  REGION 1..1121: note = MG21-8 effector
MGGNAMKKEQKHCHYTLGLDIGIASIGWAVLGNNEDGTPNRIIDLGVRIFESAEVQKTGESLAAPRRDARSARRRLRRHRHRLERIRYLLVQQGVLTQEEMTHLYDKSDMVSPYQLRTEGLDRLLNAREFSKVLIHLAQRRGYQSNSTAEEAKNEKENGIIKTAILENQQRMGRGGYRTIGEMMYRDAAFWETINGIRYHCTRNKAGDYRFTVDRASILAEVSILFEAQRRLGAPWASVEMEDAYTAILSGQRSFDEGPGNDSHGNESPFRKAMSHNVGNCTLIPTELRAARADYTAEYFKLLQDLNHMRLVDNSGSHPLTQQQRAILEEMAFRSANLTYGQLRKKLGISDEVRFAGLYYGEDTIEKAEKRKWPQMQSYHKIRTALDKVSKDAIQTLTQDQLDAIGEILAGGVSDAKRINSFCLAGIPEEYHKALLPLSISKRAKLSIAAMRKLIPFLQQGMRYDEACKAAGLDFHGADGKVEKLSDFLNEITNPVVRRAVSQTIKVVKAVVDTYSNRKEMKLDAVRIELAREMHHSIKERNRMKKRQEENREKNEQVKAQILETKPGTRVTGLDIVKFKLYQEQDGICPYSGKPLLIERLYEPGYAEVDHIIPYSRCFDDSYSNKVLVLAEENQQKGNRTPYEYFGANEQRWHEFSARVRASVRDFKKRQKLLNTSFGEEQGKDFIQRNLNDTQHITRVVYNYLRNNLKFADSAYAKAPVRAVNGAVTAMLRGRWGIEKMRGNGDLHHCKDAVVIAATSDSMIKDLTKYYQEEEQLFMGKTHFVDPATGEVLTRKEFQQRFAPKFPQPWDRFREELEVRLDPTNPKEALMALNLSTYEFDPEEEIPPVFVSHMPKHTVTGAAHKETIRGKTETGTAVKTALTSLKLDKNGEIDGYYNPQTDPRLYQALVERLKKFGGDGAKAFAEPFYKPKRDGTPGPRVDKVKIAEKASLSVPTGRGEADNGEMIRIDVFRVPNERKPDDNYYFVPIYVADTKKAILPSKAVVGKKPPEAWKQMKPEHFLFSIFKGDLIYVESKKGISLALAKEAVGEKTIQVKSGLFYFCGADISDGSIKIETHDRRYYKKSLGIKELKAFEKRQVEVLGEVRKVKLPEKRLEFRGRK

SEQ ID NO: 1519 - protein, 1093 aa, unidentified
  REGION 1..1093: note = Description of Unknown: uncultivated organism
  REGION 1..1093: note = MG21-9 effector
MHYILGLDIGITSIGWAVIESDQDGKPFKIADLGVRIFKAAEQPKTGASLALPRRSARSLRRRLWRKAHRKERIKLLLDKVGLISKENLEKLFSASSFEKDVYTLRSEGLDRKLNNKEWARVLYHLAQRRGYRSSSKAEEADTKNDAGKLLKAVKNNSDKMAQNNFRTVGEMFCKDSSDLFQVKDGSGHVIGRKTHNTSGVYDLTVARIFIEEEAHKLFAAQRQFGNAFATESIENEYCEILLSQRHFSDGPGGERTFKFDLRGNCTFEKDELRAFKACYTFEFFKLLQDINHLRIIPEYRKGSNKQTRSLTPEERQKIIDLCLKSPDVKFSKLRKELKLEDDELFNRVNYDVKKKKSKKKDAEEQPEEQLTPEQQRTKCEEAAKFTQMQSYHEMRKALDKVAKGTISKFSHDKLDEIGEILSLYKADDKRRERLEQIGLSNEEIEGIGGKLFVLTGNLSLIAMRKLIPYLEQGLTYDKACEIVYSDHRAQYKGERMPLLSFGKLKEEGALDSVNNPVVLRAIAQTFKVVNAIIRRYGSPQAIHIELARDMKRNFTDRQDIKKKQDSNWSYNDKIREKVEELKGSAATGQDIVKMKLYEEQDGYCLYSGKQLDIRRLFEVGYAEVDHIVPYSKCFDDSYNNKVLVFSSENQRKGNRLPLEYMLAEGDEDKLDDYVTLVEARIKNTRKKQRLLKPCLTAEDSNDWKERNLTDTQYITKAVADILRNYLAFEEDSPFIKKPVRSINGAVTDQVRKRLGLQKHREEGDLHHAMDAAVIAVTTDGYINRISRYTQRREFGKRIGCYVDLETGEKLTKQAFEQKYEPTFPAPWNKFTKELKARMAPNADEAIRQLYLPSYGSEEIKPIFVSQMPDRKVSGQAHAETIRSARIDVDGNGKERIIAVAKTPLTSLKLDKDGEIDGYYMPSSDRLLYEELKNRLKAYGNAEQAFKEPVYKPKKDGSQGPRVYKVKTWKTTTSNVKVAGGIADNGSMVRIDVFHIKEGKDKGYYFVPIYVADTIKKELPQKAVVAAKPIDHWKEMDDKDFIFSLYPGDLIRVEHKKDIVFKSTDKNSSDTISCKNLLTYYVFANISTGAIAI

SEQ ID NO: 1520 - protein, 1136 aa, unidentified
  REGION 1..1136: note = Description of Unknown: uncultivated organism with predicted taxonomy: Clostridiales
  REGION 1..1136: note = MG21-10 effector
MGYRIGLDIGITSVGWSVIEDDSNGNPIRIIDLGSRIFDAAEKPKDGSPLAKERRDARGLRRRLRRKKHRIERTKRLLERYDIITKKEIDEMYANQAHVKHLYNVYELRVLGIEQRLTNKELARVLISLVKKRGYKSNSKAEESNGEAGKLLTATRENEILMQSKGYRTVAEMYLKDDKFKAKNKKGEILVDKDGTPLLKIKNSTGDYKNTTLRKLLIEEIKLILNKQKELNSKITDDFITEYLKIFESQRNFDDGPGFPSPYGGNLIENMLGNCTFEKEEKRAPKATYTFEYFKFLQTLNHIKIETINIKDDGTINKEKRELRSEEKEKLKELVFSKVTVTYSDVRKTLQLEPNQRFNMFTYRDLLNYTEETNKEIEKEKKLKEFESYKKIKTALNHIEKNYITKLTTDELDEIGYAVTVYKNDDKRKEYLENHTTNLSKEAIEELLNLSFSKVGNLSLKAMKKIIPELEKGVTYDKAVDKVYEDFRGTVNTQKKRKLRLKDFEQEISNPVVRRGLSQAIKVLNAITLRYNEKFGKPDVVVVELARELGKNFADRRTIEKRQSDNMQTNEKAKESIIALGKNNPTGKDIVKFKLWQDQDCKCIYSGKTIPVEELFTDLVDVDHIIPYSQCFDDSYNNKVLVLASENRQKGNRVPYKYLKESGKNVEEYEIRVNTLIRNNKKKQNLLRQDFTREDAEDWKERNLNDTKYICKYMYNLIRNHLEFSDNPNFVRKVWTVNGKLTAHIRKRLGIEKVRDGDTHHAVDATVIAITTQNMINRLTRYYQYVDGRYMNNKGEYIDIYTGEIINAKEYEEKNGIYFPEPWPKFRKELDIRTNCKTRERMIECLEAEKIYTYEDYDDVEPIFVSRMPRRKVTGTAHLDTIRGIKEKDGELKTITKTELTKLKLKDGEIEGYPDNCKRDDRLLYEALKNRLVEFNGDAAKAFSEPFYKPKSDGTRGPIVNKVKIEANTTMGVTLNDGKAFAANGDCVRLDIFYVENEGYYFIPIYVSDTVKKELPNKACVAGKKYADWKEMKEKDFIFSIYPKDLLYIQGKNKIKLNPVVKDKDPIEVEEILAYYLKIDISTATIEIKSNENKYVKRGLGGKGLKKLEKYEVDILGNYHKVKLPEKRLPFNINKK

SEQ ID NO: 1521 - protein, 1136 aa, unidentified
  REGION 1..1136: note = Description of Unknown: uncultivated organism with predicted taxonomy: Clostridiales
  REGION 1..1136: note = MG21-11 effector
MGYRIGLDIGITSVGWSVIEDDSKGNPIRIIDLGSRIFDAAENPQDGSALAKERRDARGLRRRLRRKKHRIERTKRLLERYDIITKKEIDEMYANQAHVKHLYNVYELRVLGIEQRLTNKELARVLISLVKKRGYKSNSKAEESNGEAGKLLTATRDNEILMQSKGYRTVAEMYLKDDKFKAKDKNEEILVDKDGIPLLKIKNSTGDYKNTTLRKLLIEEIKLILNKQKELNSKITDDFITEYLKIFESQRNFDDGPGFPSPYGGNLIENMLGNCTFEKEEKRAPKATYTFEYFKFLQTLNHIKIETINIKDDGTIKKEKRELTSDEKEKLKELVFSKVTVTYSDVRKTLQLEPNQRFNMFTYKDLLNYTEETNKEIEKEKKLKEFESYKKIKTALNHIEKNYITKLTTDELDEIGYALTVYKNDDKRKEYLENHTTNLSKEAIEELLKLSFSKVGNLSLKAMKKIIPELEKGVTYDKAVDKVYEDFRGTVNTQKKSKLRLKDFEQEISNPVVRRGLSQAIKVLNAITLRYNEKFGKPDVVVVELARELGKNFADRRTIEKRQSDNMQTNEKAKESIIALGKNNPTGKDIVKFKLWQDQDCKCIYSGKTIPVEELFTDLVDVDHIIPYSQCFDDSYNNKVLVLASENRQKGNRVPYKYLKESGKNLEEYEIRVNTLIRNNKKKQNLLRQDFTREDSEDWKERNLNDTKYICKYMYNLIRNHLEFSDNTNFVRKVWTVNGALTAHIRKRLGIEKVRDGDTHHAVDATVIAITTQGMVNKLTKYYQYVDGRYMNNKGEYIDTYTGEIINAKEYEEKYGIYFPEPWPKFRKELDIRTNCKTRERMIECIEAERIYTYEDYNDVEPIFVSRMPRRKVTGPAHVATIRGVKEKDGELKKITKTELTKLKLKDGEIEGYPENCKRDDRLLYEALKNRLIEFNGDATQAFSEPFYKPKSDGTRGPVVNKVKIEANTTMGVILNDKKAFAANGDCVRLDVFYVENEGYYFIPIYVSDTVKKELPNKACVAGKKYADWKEMKDEDFIFSIYPKDLIYIQGKNKIKLNPVIKDKEPIEVEEIFAYYVKAGISSAAITIQTNDSKYVQPSLGIKSLKKLEKYEVDILGNYHKVKLPEKRLPFNINKK

SEQ ID NO: 1522 - protein, 1088 aa, unidentified
  REGION 1..1088: note = Description of Unknown: uncultivated organism with predicted taxonomy: Helicobacter sp. MIT 11-5569
  REGION 1..1088: note = MG21-12 effector
MHYILGLDIGITSIGWAVIESDQDGVPFKIADLGVRIFKAAEQPKTGASLALPRRSARSLRRRLWRKAHRKERIKFLLDKVGLISKENLEELFLASGFEKDVYTLRAEGLDRKLNNEEWARVLYHLSQRRGYKSSSKAEESDKDNKEAGKLLNAVKSNSDKMKQNNFRTVGEMFCKDNSDLFQVKDGSGHIVGRKTHNTSGVYDLTIARNLIEAEVHKLFAAQRQLGNAFATESIENEYCEILLSQRHFSDGPGGERTFKFDLRGNCTFEKDELRAFKACYTFEYFKLLQDINHLRIIPEYRKGSAKQTRPLTPEERQKIIDLCLKSPSIDFSKLRKELKLADNELFNRVNYDVKKKKGKKKDTEEQSEEQLTPEQQRLKCEKAAKFQQMQSYHEICKALDKVAKGTISKLSHDQLDAIGEALSLYKADDKRRERLEQIVLSNEEIEALLPLDSTKAGNLSLIAMRKLIPYLEQGLTYDKACEQVYGDHRAQYNGERMPLLSFGNLKEEGALDSVNNPVVLRAIAQTFKVVNAIIRRYDSPQAIHIELARDMKRNFADRQDIKKKQDNNWSCNDRIRQKVEEYKGSAATGQDIVKMKLYEEQNGVCLYSGKQLDIHRLFEVGYAEVDHIVPYSKCFDDSYNNKVLVFSSENQSKGNRLPLEYMLAEGDEDKLDNYVTLVEAFIKNTRKRQRLLKPCLTAEDSSDWKERNLTDTQYITKAVADILRNYLAFEEDSPFAKKPVRSINGAVTDQVRKRLGLQKHREEGDLHHAMDAAVIAVTTDGYINRISRYTQRREFGKRIGCYKDKQTGEKVEIEKQKGQAPLYVDPETGEKLTEQAFDQKYAPTFPAPWPEFTKELKARMAPNADEAIRQLYLPSYGSEEIKPIFVSQMPDRKISGQAHAETIRSARVDVDESGKERIIAVAKTPLTSLKLDKDGEIENYYMPSSDRLLYEELKNRLKAYNNDPKEAFKEPVYKPKKDGSQGPRVYKVKTWKTTTSNVKVAGGIADNGSMVRIDVFYVKEGKDKGYYFIPIYVADTIKKELPQKAVVQGESMNNWKEMDDKDFIFSLYPGDLVRVEHKKNIEIGRAS

SEQ ID NO: 1523 - protein, 1132 aa, unidentified
  REGION 1..1132: note = Description of Unknown: uncultivated organism with predicted taxonomy: Clostridium
  REGION 1..1132: note = MG21-13 effector
MGYRIGLDIGITSVGWAAIEDDANGNPKRIIDLGSRIFEAAEKPKDGSPLAKDRRDARGLRRRLRRKKHRVERTKRLLERYNIITKKELEDLYENYRFQYNVYELRVMALDEKITNKDLARILISMVKKRGYKSNSKSEEIASGSDAGKLLTATKENEELMKEKGYRTVAEMYLKDDKFKLKNSNGEYILYKKGRKQIKIRNSINEYKNTALRKLLVDEIKLILEKQRELNSSINDNFIKEYLEIFESQRSFDEGPGEPSPYGGNQIEKMLGNCTFEKEEKRAAKASYTFEYFKLLQDINHIKINKYDLETRKIEKRELTEEERQKIIKIVKEKANVTYSSLRKELNLSRTERFNMLSYKNILMWSDETNEEVEKTAKFKEFESYNKIKTALNRVEKGYIEKLTTEELDKIGYALTVYKNDDKRIAYLKENTQNLTEEAIQELLKLSFTKVGNLSIKAMKKIIPELEKGITYDKAVDNVYEDFRGIVNTEKKRKLRLQDLEQEISNPVVRRGISQAIKVLNAITLRYNEKYGKPDVVVIELSREMGKNFNDRSKIKKSQEENMQRNENIRQAIIELGKSNPTGQDIVKYKLWQEQDNFCVYSGKKITVDMLFTEAVDVDHIIPYSMCFDDTYNNKVLVLASENRQKGNRVPYKYEKEIGRNIDEYVVRVGNIIKNPKKLRRLLREDFTKEDAKDWKNRNIQDTQYMCKLMYNLVRNHLEFSDNKNFERKVWTVNGSVTAHIRKRLGIEKTRDGDTHHAVDAAVIAITTQNMINRITKYYQYNDGKYMNNKGEYIDLETGEILDAKEYEAKNGIYFPEPWPKFRKELDIRVNCNSKERMIECLNAEKIFTYEDYEDVEPIFVSRMPRRKVTGMAHLETIRGLREENGSLKTITKTELAKLKLDKSGEIEGYPEKNKKDDKLLYDALKEQLTKFGGDGKVAFKKDFYKPRADGNKGPIVRKVQIEANATLGVTLKDREGFAGNGDCVRLDIFYVEGEGYYFVPIYVSDTIKEKLPNKACVQGKKYEEWKEMREEDFIFSLYPKDLIYVKGKNKIKLNATNKSGEQIEVEDTMAYYINAGISVAQITIQTHDNKYEQPSLGIKSLKELKKYEVDVLGNYHEVKIPEKRMPFNIKK

SEQ ID NO: 1524 - protein, 1169 aa, unidentified
  REGION 1..1169: note = Description of Unknown: uncultivated organism with predicted taxonomy: Clostridiales
  REGION 1..1169: note = MG21-14 effector
MGYRIGLDLGISSIGWACVEDKENGEPKRIIDLGTRIFDRAENPKDGAPLAAPRREARELRRRLRRRNHRIKRTKILLEKYDIISQQEIEKMYENYNFPNTPYELRVIGLDNKLTNKELARVLISLVKKRGYKSNSKSEESNDKETGKLLTATKDNENLMKEKGYRSVAEMYLKDEKFKMRLPNGQIATRIDKNTGKEIEIIKIKNSINDYKNTPLRKLLVEEIKLILNKQKEYNPKITDQFINEYLNIFTSQRNFDEGPGEPSPYAGNQIEKMLGKCTFEREEYRAPKSTYTFEYFKLLQDLNHIKIIKYELKQDNEIVQTVRTLTEEERKKLIELAKKTPTLNYYKIRKEIKLKENERFNMCRYKSTREFTDDVNKEAENDNKKIKEFQSYHEIRKALDKYKKEYIQELSTNDLDSIGYALCVYKNDKKRIEYIKTNVTQIPDEVINYLLPLSFSKVGNLSLKAMKKIIPYLEKGLTYDKAVNELGKIDSNYSDFRGVVNTEKRRKLSINNLEDNISNPVVRRAVSQTIKVLNAITLKYNSIYGKPDLVVVELARELGKSFKERQSIEKIYEENRTRNEKAIQEIRELGKTNVTGKDIVKYKLWKDQNEICIYSGKHIKVEDLFTDAVDIDHIIPYSQCFDDTYKNKVLVLASENRQKGNRTAYKYIKEAGKNLEEYEVRVNNYIKDYRKKERLLKADFSTEDAKNWKDRNIEDTQYISRLVYKLINNYMEFSDNPNVNRKVRNINGAVTHYIRNRLGIEKIRADGDEHHAVDACIIATTSNYMVNKITRYSQYIDGRFMNDRGEYIDIETGEIINKEEYEEEYGPKFPEPWEGFRRELEIRSSDDVANRAEKTPEELKNIMIQEINDEIKNGKLYSYIEHDDGINRFDDIEPIFVSRMPRRKVKGQAHMETIRGIEKENGKLKTVTKTPLTKLKLDDNNEIKNYSKKAKQDDKLLYDALVEQLKKFNGKGEEAFKEPFFKPKKDGSKGPIVNTVKIEENATLGVEFKEGKAFAGNGNMVRIDVFYVEGEGYYFIPIYVADTIKKELPNKACVANKGTDKWKTMDDKNFIFSLYPNDLIYIESEKGIKLNGNNDNKKEQIEVKKLFAYYVKAGISTAAITIDNQDGEYTQPGLGIKGLKKIEKYDIDVLGNYHKIKLPEKRIKFNIN

SEQ ID NO: 1525 - protein, 1133 aa, unidentified
  REGION 1..1133: note = Description of Unknown: uncultivated organism
  REGION 1..1133: note = MG21-15 effector
MGYRIGLDIGITSVGWAVIEDDIEGKPKRIIDLGSRIFDAAENPKDGSALAKVRRDARGIRRRGRRKKHRIERTLHLLERHHIISKKEWISMFENYNFQFNIYELRVKALEEKITNKDLARILVNFVKKRGYKSNSKSEENDSSNDAGKLLTATKENQNIMQEKGYRTIGELYLKDDRFKLKDKNGDYILDKNGQKIMKVRNTTNDYKGTALRTLISDEIKLILNKQKEYTSLITDEFIQEYISIFESQRNFDEGPGEPSPYAGNQIEKMLGFCTFEKEERRAPKATYTFEYFKLLQDINHIKIEKLSLDDNMQRVKSKRSLVKDEKEKIIELVKSKTKISYYDIRKALNLQENERFNMFTYKNVLLWNNETNAEVEKDKIFKEFESYNKIKTALNRIEKNYILKLNTDELDYIGYALTVYKNDEKRISFLKENTSLPDRIINELLNLSFTKVGNLSLKSMKKIIPYLENGLTYDKAVNSVYEDFRGEINTEKKQKLRLKDLEEDISNPVVRRGISQAIKVLNAITLRYNAKYGKPDVVVIELAREMGRNFKDRNIIKKSQEINMKNNEFVKERIVELGKENPRGQDIVKYKLWQEQDGVCIYSGKKIPIENLFTEAVDVDHIIPYSMCFDDTYNNKVLVLASENRQKGNRVPYKYEKEIGRDIEEYEVRVNNIIKNPYKRVKLLREDFTREDALEWKDRNIQDTQYICKLMYNLVKNHLEFSNNKNFDRKVWTVNGAITSHIRKRLGIEKTRDGDIHHAIDAVVIAITTQEMINKLTKYYQYKDGKYMNNKGEFIDLETGEILDAEKYEKENGIYFPEPWPKFRKELEIRTICPTKETMISYLHNEKIFTYDDYEDVEPIFVSRMPKRKITGTAHLETVRGFEKRDNEIYTITKTELKKLKLDKDGEIEGYPEKNKRDDRLLYDALREQLKRYNNDGEKAFKDDFYKPRKDGSRGPLVKKVQIESKTTLGVELKNKGFAANGDSVRIDVFYIEGDGYYFIPIYVSDTIKKELPNRACVPNKTYSEWKEMDEKNFIFSLYPKDLLYIKGKNKIKLNPTNKIDEPIEVEETMAYYVKAGISVASITIQTHDNKYQQPNLGIKTLKKLKKYEVDVLGNYHEVKLPEKRMPFNIKK

SEQ ID NO: 1526 - protein, 1166 aa, unidentified
  REGION 1..1166: note = Description of Unknown: uncultivated organism
  REGION 1..1166: note = MG21-16 effector
MHYILGLDIGITSIGWAVIESDQDGVPFKIADLGVRIFKAAEQPKTGASLALPRRSARSLRRRLWRKAHRKERIKLLLDKVGLISKKNLEKLFSASSFEKDVYTLRAEGLDRKLNNEEWARVLYHLAQRRGYRSSSKAEEADKDNKEAGKLLNAVKSNSDKMKQNNFRTVGEMFCKDNSDLFQVKDGSGHIVGRKTHNTSGVYDLTIARNLIEAEVHKLFAAQRQLGNAFATESIENEYCEILLSQRHFSDGPGGERTFKFDLRGNCTFEKDELRAFKACYTFEYFKLLQDINHLRIIPEYRKGSAKQIRPLTPEERQKIIDLCLKSPGLDFSKLRKELKLEDDELFNRVSYDVKKKKGKKKDTEEQSEEQLTPEQQRLKCEKAAKFQQMQSYHEMRVALDKVAKGTISKLSHDQLDGIGEVLSLYKADDKRRERLEQIGLSNEEIEALLPLKFTKAGNLSLTAMRKLIPYLEQGLTYDKACEIVYSDHRAQYNGERMPLLSFGKLKEEGALDSVNNPVVLRAIAQTFKVVNAIIRRYSSPQAIHIELARDMKRNFTDRQDIKKKQDNNWSYNDRIRQKVEELKGSAATGQDIVKMKLYEEQNGVCLYSGKQLDIHRLFEVGYAEVDHIVPYSKCFDDSYNNKVLVFSSENQSKGNRLPLEYMLAEGDEDKLDNYVTLVEAFIKNTRKRQRLLKPCLTAEDSSDWKERNLTDTQYITKAVADILRNYLAFEEDSPFAKKPVRSINGAVTDQVRKRLGLQKHREEGDLHHAMDAAVIAVTTDGYINRISRYTQRREFGKRIGCYKDKQTGEKVEIEKQKGQAPLYVDPETGEKLTEQAFDQKYAPTFPAPWPEFTKELKARMAPNADEAIRQLYLPSYGSEEIKPIFVSQMPNRKVSGQAHAETIRSARVDVDESGKERIIAVAKTPLASLKLDKDGEIENYYMPSSDRLLYEELKNRLKAYDSAEQAFKEPVYKPKKDGNRGPRVYKVKTWKKTTSNVKVAGGIADNGSMVRIDVFYVKGEGYYFIPIYVADTIKKELPQKAVVDKSVAVKHGWKEMNDKDFIFSLYPGDLIRVEHKSQIVLKSTQKNSKDTKVGKEFFLYYKSANISNGAIDASYHDQSYEKEGLGIKTLQSFEKYEVDVLGNYHKVHLPEKRQAFNLKYSQKEQ

SEQ ID NO: 1527 - protein, 1100 aa, unidentified
  REGION 1..1100: note = Description of Unknown: uncultivated organism with predicted taxonomy: Clostridiales
  REGION 1..1100: note = MG21-17 effector
MSDFHYALGLDIGIGSVGWAVLRNQPNGEPDRIQDLGVRIFDKAEQPKTGASLAAPRRDARSARRRLRRHRHRLERIRYLMEQHDIMSVSDIQAMYTAGGFKKSPYQLRAEALDRPLSKEETVRVLIHLAQRRGYKSNSMAEAAKDEKETGKVKSAIEENRACMEQHGYRTVGEMMFRDERFWQNNPDGTRYHKTRNKVEDYRFTVERSDIVNEAKQIFAAQRQFGTGWLDDGMETAYLSILESQRSFDEGPGGDSPFRGGIGERVGSCTFEPDEQRAAKATYTFEYFKLLQDLNHMRLAGNGMAPRPLTAQQREILKAAALQSASLSYGQLRKKLALDDDVFFSGLCYGDKLKEEAEKRKWPQMQSYHKMRTALDKVGKGTIGTLTEFQLNAIASILTQYKSDARRIAALREAGIPMQFDEALLPLSFSKYGNLSVKAMQRLIPLLEQGMRYDEACTQIYGDHRGLHSEQRKSKLSLNDMEEITNPVVRRAVSQTIKVVNAVVRTYGPPDVVRIELAREMSQNFDDRRKAEKRQEENRAANERVKEQIAEYKGDRATGLDIVKFKLYREQDGVCLYSGKNLDIGRLFEPGYADVDHIIPYSRCFDDSYQNKVLVLASENRQKGNRLPYEYFGQDETRWHEYEVRVENLIRNYRKRQKLLKKQLTEEESTGFIDRNLKDTQYITRSIYNLLRDNLAFAESRYSKKPVQTVNGAVTSMLRSRWGVQKIREDGDLHHCMDAAVIAATSPGLVQRLTEYSKRREALEEAPRGYVDPSTGELVEQSEQPRRDPFPKPWEQFHQELEARLATVDPRHQIDLLKLATYESDEEVKPVFVSRMPNHKVTGAAHAETIRSSKGGDGYTVTKTPLISLKLNKSGEIDGYYNWSSDKLLYDALLARLKEFGGDGAKAFAEPFYKPKRDGTPGPRVDKVKICERATTGLPVRDGIAANGSMVRIDVFYVEDEGYYFVPIYVADTKKECLPNKAVVAYKAYSDWKEMTDENFIFSLYPGDLVRIQSRKGIKLNIAKGGTGEKEIVRQDGMYYYQTANISSGAITISTHDRRYSQPSLGIKTLQSIEKYQVDVLGNYYKVDLPEKRMSFSEEG

SEQ ID NO: 1528 - protein, 1007 aa, unidentified
  REGION 1..1007: note = Description of Unknown: uncultivated organism with predicted taxonomy: Clostridiales bacterium 42_27
  REGION 1..1007: note = MG21-18 effector
AMFAAGGFKKSPYRLRAEALDRLLSKEETVRVLIHLAQRRGYKSNSMAEAAKDEKETGKVKSAVEENRACMEQHGYRTVGEMMFRDERFWQSNPDGTRYHQTRNEAEDYRFTVERSDIVNEAKQIFAAQRQFRADWMDDGMEAAYLSILESQRSFDEGPGGDSPFRGGIGEKVGFCTFEPEEHRAAKATYTFEYFKLLQDLNHMRLAGSGTAPQPLNAQQREILKAAALQSASLSYGQLRKKLALDDDVFFNGLYYGDKPREEAEKRKWPQMQSYHKIRTALNKAGKGTIRSLTEEQLNAITSILTQYKSDARRIEKLREAGIPELFDNALLPLSFSKYGNLSVKAMQRLIPLLEQGMRYDEACTQIYVDHRGLHPEQRKNRLSLNDMEEIINPVVRRAVSQTIKVVNAVVRTYGPPDVVRIELAREMSRNFDDRRKAEKRQEENRAANERAKEQIVEYKGDCATGLDIVKFKLYREQDGVCLYSGQNLDLSRLFEPGYVDVDHIIPYSRCFDDSYQNKTLVLASENRQKGNRLPYEYFGQDEARWHEYEVRVENLIRNYRKRQRLLKKRLTEDESAGFIDRNLKDTQYITRSIYNLLRDNLAFAESRYSKKPVQTVNGAVTSMLRSRWGVQKIREDGDLHHCMDAAVIAATSPGLVQRLTEYSKQREAFVKAPAGYVDPSTGGLVEQSEASRRDPFPKPWEQFHQELEARLDPIDPQHQIDLLKLATYESDEEVKPVFVSRMPNHKVTGAAHAETIRSSKGGDGYTVTKTPLANLKLNKLGEIDGYYNPGSDKLLYDALLARLKEFGGDGAKAFAEPFYKPKRDGTPGPRVDKVKICEKATTGLPVRDGIAANGSMVRIDVFYVEDEGYYFVPIYVADTKKESLPNKAVVAYKAYSDWKEMIDENFIFSLYPGDLVRIQSRKGIKLNIAKGGTGEKEVVRQDGMYYYRAAGITVGAIQIETHDRRYLQPSLGLKTLQSIEKYQVDVLGNYYKVDLPEKRMKFSKEG

SEQ ID NO: 1529 - protein, 1193 aa, unidentified
  REGION 1..1193: note = Description of Unknown: uncultivated organism
  REGION 1..1193: note = MG21-19 effector
MQQKMEKPEMPYVLGLCLSTTSVGWSVLETDETGIPFRIADLGVRTFQEAKTNYKRSKCRTSRRRLQRKSCIKSRVSELFERSGLITKEALEEIFVKSGFEKDIIVLRKDGLDRKLENDEWARVLYNFTQRRGYKVVSAAREISAKKIAEESKKQNSKSNLSNEDKVAQEEAKRHAGLLAAVNNNTKELKKDNYRTIGEMFCSSKDERFMVKDGSNREIGRTTRNKHGIYSFAVSRELIKDEISKLFDAQRKQGNKFADKSFQKEYENIVFSHNDKSQDLRGNCFFEKGEKCAFKGGYTFEYFKLLCELNNIRIISTESKVDEAVRKITESQRNTIIGLYKKSPKLTPKDLSKKLNLKSSEYLRSFNTKQMQSYHEIREALNKVTKNIANDLSNEQFDEIGEILSLYKNDDERREKLQELRINVGLGNNGLGDAEIKSLLELNFSGTGSLSLKAMKNLIPYLEKGLSYGEACEKVYGDHRTQCGGERMEYLSFKKLKEEGALDSINSPVVARATTQAFKVINAVICKYGSPQSVHIELSRDIKCGSRTRERIAQENEANRERREKLINEVENIKKQKHCEKVNATEQEILKLQLYKDQHGKCLYSGKELDKDKVISESGYAEIDHIIPYSQSFDNSEANKVLTLSEENRNKGNDVPVAYILRKHKNSEKEYDAFVKRVKSVTKEVSNTNKDRQKILEKRKQNLLISPNFKVDELEGLLVRETVGVQNIQKRIADILRNYLRFYGEMPMEQHIVVTKNSITEAICEQLGLQRYYTKVSALSSALNAILIAVTPANYEAKVTQYVQSREEHYTDDGYIDPENGKKLTIEEFDAKYMPESDLKCIYSYLKEEIEIWMSSASDKKSINAKRGKLEKLHKKLGLKGKYENEINNWKPIFVSQMPDRKISGQAHAETIRSARIDIDENGKERIIAVAKTPLTSLKLDKNGEIDGYYMPSSDRLLYEELKNRLIKTKTSGKTYGNAEQAFKEPVYKPKKDGSQGPRVYKVKTWKPTTSNVKVAGGIAKKGDIVRVDIFHITGGKDQGYYFVPIYVADTIKNTLPKHAVVTNFKSSKVEWKEMDDSNFIFSLYKGDLIHIELCADCRDKDSNNKIRKAKDMYVYYDGVDFYQSGKCTNQSIGELNGAINVSWHDGSCEDSIHIKEINVLEKYEVDVLGNYHKVRLPERRQAFNLKYSQKEQ

SEQ ID NO: 1530 - protein, 1100 aa, unidentified; identical to SEQ ID NO: 1527
  REGION 1..1100: note = Description of Unknown: uncultivated organism with predicted taxonomy: Clostridiales
  REGION 1..1100: note = MG21-20 effector

SEQ ID NO: 1531 - protein, 808 aa, unidentified
  REGION 1..808: note = Description of Unknown: uncultivated organism with predicted taxonomy: Clostridiales bacterium 42_27
  REGION 1..808: note = MG21-21 effector
VERTKRLLERYDIITKKEVEAMYANQAHVKHLYNVYELRVLGIEQKLTNKELARVLISLVKKRGYKSNSKAEESNGEAGKLLTATRDNELLMQSKGYRTVAEMYLKDDKFKAKDKNGEILVDKDGSPLLKIKNSTGDYKNTTLRKLLVEEIKLILNKQKELNSKITDDFINEYLKIFESQRNFDDGPGFPSPYGGNLIENMLGNCTFEKEEKRAPKATYTFEYFKFLQTLNHIKIETINKKDDGTINKEKRELTSEEKEKLKELVFSKVTVTYSDVRKTLQLESNQRFNMFTYRDLLNYTEETNKEIEREKKLKEFESYKKIKTTLNHIEKNYITKLTTDELDEIGYALTVYKNDDKRKEYLENHTTNLSKEAIEELLKLSFSKVGNLSLKAMKKIIPELEKGVTYDKAVDKVYEDFRGTVDTQKKRKLSIKDFEQEISNPVVRRGLSQAIKVLNAITLRYNEKFGKPDVVVVELARELGKNFADRKAIEKRQNDNMQTNEKAKESIIALGKNNPTGKDIVKFKLWQDQDCKCIYSGKTIPVEELFTDLVDVDHIIPYSQCFDDSYNNKVLVLASENRQKGNRVPYKYLKESGKNLEEYEIRVNTLIRNNKKKQNLLRQDFTREDAEDWKERNLNDTKYICKYMYNLIRNHLEFSDNPNFVRKVWTVNGALTAHIRKRLGIEKVRDGDTHHAVDATVIAITTQGMVNKLTKYYQYVDGRYMNNKGEYIDTYTGEIINAKEYEEKYGIYFPEPWPKFRKELDIRTNCKTRERMIECLEAEKVYTYEDYDDVEPIFVSRMPRRKVTGTAH

SEQ ID NO: 1532 - protein, 769 aa, unidentified
  REGION 1..769: note = Description of Unknown: uncultivated organism with predicted taxonomy: Clostridiales
  REGION 1..769: note = MG21-22 effector
MSEFHYALGLDIGIGSVGWAVLRNQPNGEPDRIQDLGVRIFDKAEQPKTGASLAAPRRDARSARRRLRRHRHRLERIRYLMEQRGMMSVSDIQAMYAAGGFQKSPYQLRAEALDRPLSKEEAVRVLIHLAQRRGYKSNSTAEAAKDEKETGKVKTAIEENRRCMDEHGYRTVGEMMYRDERFWQSNPDGTRYQQTRNKTDDYRFTVERSAIVDEAKQIFAAQRKLGADWSSEDLEAAYLSILEGQRSFDEGPGGESPFRGGIGDKVGFCTFEPDEKRAAKATYTFEYFKLLQDLNRMRLTGMGMPPEPLDDEQREVLKSAALRSASLSYGQIRKKLNLDDDVFFNDLYYGEKTKEEAEKRKWPQMQSYHKMRTALDKVGKDTIGTLTEEQLNAIATILTECKSDAKRIAALRMAGIPVQFDEALLPLSFSKYGSLSVQAMQKLIPLLEQGMRYDEACTQIYGDHRGLHSEQRKNRLSLTDMEEITNPVVRRAVSQTIKVINAVVRTYGPPDVVRIELAREMSRTFDERRKMEKRQDDNRAANERAKDQIAEYKGDHATGLDIVKFKLYQEQDGVCLYSGQNLDIARLFEPGYADVDHIIPYSRCFDDSYQNKVLVLASENRQKGNRLPYEYFGQDEARWHGYEVRVENLIHNYRKRQKLLKRRLTEEESTGFIDRNLKDTQYITRAVYNLIRDHLAFAESNYRKKPVQAVNGAVTAMLRGRWGVQKIREDGDLHHCLDAAVIAATTPGLVQCLTAYNKHRETWERPPAG

SEQ ID NO: 1533 - protein, 861 aa, unidentified
  REGION 1..861: note = Description of Unknown: uncultivated organism with predicted taxonomy: Roseburia inulinivorans
  REGION 1..861: note = MG21-23 effector
VLIHLAQRRGYQSNSTAEEAKNEKENGIIKSAILENQQRMERGGYRTIGEMMYRDAAFWETINGIRYHCTRNKAGDYRFTVDRASILSEVSILFEAQRRLGSPWASVEMEDAYTAILSGQRSFDEGPGNDSHGNESPFRKAMSHNVGNCTLIPTELRAARADYTAEYFKLLQDLNHMRLVDNSGSHPLTQQQRAILEEMAFRSANLTYGQLRKKLGLSDEVRFAGLYYGEDTIEKAEKRKWPQMQSYHKIRTALDKVSKNAIRTLTQDQLDAIGEILAGGVSDAKRINSFCLEGIPEEYHKALLPLSISKRAKLSIAAMRKLIPFLQQGMRYDEACKAAGLDFHGADGKVEKLSDFLNEITNPVVRRAVSQTIKVVKAVVDTYSKREEMKLDAVRIELAREMHHSIKERNRMKKRQEENREKNEQVKAQILETKPGTRVTGLDIVKFKLYQEQKGFCPYSGVEIKKERLYEPGYAEVDHIIPYSRCFDDSYSNKVLVLAEENRQKGNRTPYEYFGADEQRWHEFSARVRASVRDFKKRQKLLNTSFGEEQGKDFIQRNLNDTQHITRVVYNYLRNNLEFADSAYAKAPVQAVNGAVTAMLRGRWGIEKMRGDGDLHHCKDAVVIAATSDSMIKDLTKYYQEEEQLFMGKTNFVDPATGEVLTRKEFQQRFAPKFPQPWPRFREELEARLDPTNPKEALMALNLSTYEFDPEEEIPPVFVSHMPKHTVTGAAHKETIRGKTETGTVVKTALTSLKLDKNGEIDGYYNPQTDPRLYQALVERLRQFDGEGKKAFAEPFYKPKKDGTPGPRVDKVKIAEKASLSVSTGRGVADNGEMIRMDVFRVPNERKPDDSYYFVPIYVAD

SEQ ID NO: 1534 - protein, 1107 aa, unidentified
  REGION 1..1107: note = Description of Unknown: uncultivated organism with predicted taxonomy: Firmicutes
  REGION 1..1107: note = MG21-24 effector
MKKRKKKKKDKKDCHYTLGLDIGIASIGWAVLGNDEDGTPNRIIDLGVRIFESAEVQKTGESLAAPRRDARSARRRLRRHRHRLERIRYLLVQQGVLTQEEMTHLYDKSDMVSPYQLRTEGLDRLLNAREFSKVLIHLAQRRGYQSNSTAEEAKNEKENGIIKSAILENQQRMERGGYRTIGEMMYRDAAFWETINGIRYHCTRNKAGDYRFTVDRASILSEVSIFFEAQRRLGAPWASVEMEDAYTAILSGQRSFDEGPGNDSHGNESPFRKAMSHNVGNCTLIPTELRAARADYTAEYFKLLQDLNHMRLVDNSGSHPLTQQQRAILEEMAFRSANLTYGQLRKKLGLSDEVRFAGLYYGQDTIEKAEKRKWPQMQSYHKIRTALDKVSKNAIRTLTQDQLDAIGEILAGGVSDAKRINSFCLEGIPEEYHKALLPLSISKRAKLSIAAMRKLIPFLQQGMRYDEACKAAGLDFHGADGKVEKLSDFLNEITNPVVRRAVSQTIKVVKAVVDTYSKREEMKLDAVRIELAREMHHSIKERNRMKKRQEENREKNEQVKAQILETKPGTRVTGLDIVKFKLYQEQDGICLYSGKPMEIERLYEPGYAEVDHIIPYSRCFDDSYSNKVLVLAEENRQKGNRTPYEYFGADEQRWHEFSARVRASVRDFKKRQKLLNTSFGEEQKNEFTQRNLNDTQHITRVVYNYLRNNLEFADSAYAKAPVQAVNGAVTAMLRGRWGIEKMRGDGDLHHCKDAVVIAATSRSMIEDLTKYYQEEEQRFMGKTHFVDPATGEVLTRKEFPQPWPRFREELEARLDPIDPMEAVMALHLSTYEPEEEIAPVFVSHMPKHTVTGAAHEETIRSRTETGTVVKTALTSLKLDKNGGIEGYYNPQTDPRLYQALVERLRQFDGKGEKAFAEPFYKPKKDGTPGPRVDKVKIERKSSLSVSTGRGVADNGRMVRIDVFRVPDDGYYFVPIYVADTKKAVLPSKAVVAGKSPEAWKQMKPERFLFSLFKDDLIYVESRKGISLALAKEAVGEKTIQPKSGLFYFCGANISSGSIGIETDDRRYGKESLGLKTLTLIEKCQVDVLGNVSKVRLPEKRLEFRGRK

SEQ ID NO: 1535 - protein, 1058 aa, unidentified
  REGION 1..1058: note = Description of Unknown: uncultivated organism with predicted taxonomy: Clostridiales bacterium 42_27
  REGION 1..1058: note = MG21-25 effector
KAEQPKTGASLAAPRRDARSARRRLRRHRHRLERIHYLMEQRGIMPVADIQAMYAAGGFQKSPYQLRAEALDRPLIKEEAVRVLIHLAQRRGYKSNSTAEAAKDEKETGKVKTAIEENRRCMAEHGYRTVGEMMYRDERFWQKHPDGTRYHQTRNKAEDYRFTVERAAIVDEVRQIFAAQRRLGVVWMDEDMETAYLSVLESQRRFDEGPGGDSPFSGGIGERVGACTFEPDEKRAAKATYTFEYFKLLQDLNRMRLTGMGMPPEPLDDEQREVLKSAALRSASLSYGQIRKKLNLDDDVFFNDLYYGEKTKEEAEKRKWPQMQSYHKMRTALDKVGKGAIGTLTEEQLNAIATILTECKSDAKRIAALREAGIPPQFDEALLPLSFSKYGSLSVRAMQKLIPLLEEGLRYDEACTRVYGDHRGLRSEQRTNRLSLNDMEEITNPVVRRAVSQTIKVINAVVRTYGPPDVVRIELAREMSRTFDERRKMEKRQDDNRAANEQAKDQIAEYKGDHATGLDIVKFKLYREQDGVCLYSGQNLDIARLFEPGYADVDHIIPYSRCFDDSYQNKVLVLASENRQKGNRLPYEYFGQDEARWHGYEVRVENLIHNYRKRQKLLKRRLTEEESSGFIDRNLKDTQYITRAVYNLIRDHLAFAESNYRKKPVQAVNGAVTSMLRGRWGVQKIREDGDLHHCLDAAVIATTTPGLVQRLTAYNKHRETWERPPAGYVDPATGELIELPQEARHDPFPKPWERFRQELEARLDPIDPRHQIDLLKLETYESDEEIKPVFVSRMPNHKVTGAAHAETIRSSKGGDGFTVTKTPLTNLKLNKFGEIEGYYNPASDTLLYDALLARLKDFGGDGAKAFAQPFYKPKKDGSPGPRVDKVKICEKATVGLPVRDGIAANGSMVRIDVFYVEGDGYYFVPIYVADTKKESLPNKAAVAMKPYNLWKKMKDENFVFSLYPGDLVRIQSRKGIKLNLAKGGTGEKEIVRQEGMYYYRSAGIAVAQISVETHDRRYLQPSLGIKTLQSIEKYQVDVLGNYYKVDLPEKRMTFSKEG

SEQ ID NO: 1536 - protein, 1100 aa, unidentified
  REGION 1..1100: note = Description of Unknown: uncultivated organism with predicted taxonomy: Ruminococcaceae bacterium TF06-43
  REGION 1..1100: note = MG21-26 effector
MSEFHYALGLDIGIGSVGWAVLRNQPNGEPDRIQDLGVRIFDKAEQPKTGASLAAPRRDARSARRRLRRHRHRLERIRYLMEQRGIMPVADIQAMYAAGGFQKSPYQLRAEALDRPLIKEEAVRVLIHLAQRRGYKSNSTAEAAKDEKETGKVKTVIEENRRCMAEYGYRTVGEMMYRDERFWQKHPDGTRYHQTRNKAEDYRFTVERAAIVDEVRQIFAAQRKLGVVWMDEDMETTYLSVLESQRSFDEGPGGDSPFSGGIGERVGACTFEPDEKRAAKATYTFEYFKLLQDLNRMRLTGMGMPPEPLDDEQREVLKSAALRSASLSYGQIRKKLNLDDDVFFNDLYYGEKTKEEAEKRKWPQMQSYHKLRMALDKVGKGAIGTLTEEQLNAIATILTECKSDAKRIAALREAGIPPQFDEALLPLSFSKYGSLSVRAMQKLIPLLEEGLRYDEACTRVYGDHRGLRSEQRTNRLSLNDMEEITNPVVRRAVSQTIKVINAVVRTYGPPDVVRIELAREMSRTFDERRKMEKRQDDNRAANEQAKDQIAEYKGDHATGLDIVKFKLYREQDGVCLYSGQNLDIARLFEPGYADVDHIIPYSRCFDDSYQNKVLVLASENRQKGNRLPYEYFGQDEARWHGYEVRVENLIHNYRKRQKLLKRRLTEEESSGFIDRNLKDTQYITRAVYNLIRDHLAFAESNYRKKPVQAVNGAVTSMLRGRWGVQKIREDGDLHHCLDAAVIATTTPGLVQRLTAYNKHRETWERPPAGYVDPATGELIELPQEARRDPFPKPWERFRQELEARLDPIDPRHQIDLLKLETYESDEEIKPVFVSRMPNHKVTGAAHAETIRSSKGGDGFTVTKTPLTNLKLNKFGEIEGYYNPASDTLLYDALLARLKDFGGDGTKAFAQPFYKPKKDGTPGPRVDKVKICEKATVGLPVRDGIAANGSMVRIDVFYVEDDGYYFVPIYVADTKKESLPNKAVVAYKAYSEWKEMKDENFIFSLYPGDLVRIQSRKGIKLNLAKGGTGEKEIVRQEGMYYYRAAGITVGAIQIETHDRRYLQPSLGIKTLQSIEKYQVDVLGNYYKVDLPEKRMTFSKEG

SEQ ID NO: 1537 - protein, 1098 aa, unidentified
  REGION 1..1098: note = Description of Unknown: uncultivated organism with predicted taxonomy: Clostridiales
  REGION 1..1098: note = MG21-27 effector
LSLRYTLGLDIGIASVGWAVLENNIDGEPIKIERLGVRIFDKAEHPKTGASLAEPRREARGQRRTIRRKRHRKDRIKQLIQQNGIMTRVEMSEMFEHSQFETSVYELRVQALERALTKQEFVRVLIHLAQRRGYKSNSKSEEAKDKENGKVKSAISENKQCMEENGYRTIGEMLLHDDRFWECNPDGTKIFVPHNHLDDYRTTVERSMVEDEIRLIFSQQRALGVSYVTAEFEEAYLEIWGSQRNFDEGPGGKSPYGGNMIEKMLGHCTFEKDEPRAAKGSYSAEYFRLLQDVNHLRLVKNNGESSALTAEQKQIYIDLVMKSATASYAQLRKKLELSNDISFNMLRYGSDEIEKVERKKLGHMKFYHEMRKALNTVQKDAISTVSWEQRDEIARILLCYKSDDKRKAQLEKLDIPHEFIPALLTLSTSKTAHLSAKALRKLIPYLEKDMTYAEACKEVYGEHKSSITKKNKLSLFDIEPINNPVVRRAVSQTIRVINAVVREYGAPEVVRVELAREMGKPYDVRTQITKKQEANAKKNEELRQQIKKIKGAEPTGQDIVKFKLFQDQNGVCLYSGQNLDITRLFEAGYVDVDHIIPYSISFDDSYTNKVLVRSPENRQKGNRIPADYFKSDPARWQRFETLVNTRVHNWKKKRNLLTQALSEEQKNGFKQRNLVDTQYIARVIYNLINDHLQFAETGKYDKKRRTQAVNGAITAHVRKRLGIQKIREDGDLHHAVDAAVVACVSPGMIQKVTQYTKHRECIRKTKEGYLDTETGELMTREAYDAKYSPRFPAPWERFRQELEARLSDNPAEEIARLHLATYDSEEEIKPVFVSRKQTHKISGAAHEATIRSAKKPGGSISKKTLTSLSLNKKTGEIEGYYAPESDRLLYEALKKRLEEFDGNAKEAFAEPFYKPKRDGTRGPLVKKVKIYEKKTITVPVNGGNADNGSMIRVDVFYMEDDGYYYVPIYTADVIKGKLPNKAVVQGKTFEDWKEMDDRDFLFSMYPSDLLYIESRRGIKLKTKKGSSWQEEIARKAGLYYFKGLNISSGNLFIITHDHSYEQSSLGGKTLSCLKKYTVDALGNYSEVSLPEKRKPLRG

SEQ ID NO: 1538 - protein, 1100 aa, unidentified
  REGION 1..1100: note = Description of Unknown: uncultivated organism with predicted taxonomy: Clostridiales bacterium 42_27
  REGION 1..1100: note = MG21-28 effector
MSEFHYALGLDIGIGSVGWAVLRNQPNGEPDRIQDLGVRIFDKAEQPKTGASLAAPRRDARSARRRLRRHRHRLERIRYLMEQRGIMPVADIQAMYAAGGFQKSPYQLRAEALDRPLTKEEAVRVLIHLAQRRGYKSNSTAEAAKDEKETGKVKTAIEENRRCMAEHGYRTVGEMMYRDERFWQKHPDGTRYHQTRNKAEDYRFTVERAAIVDEVRQIFAAQRRLGTAWMDEYMETAYLSILESQRSFDEGPGGDSPFSGGIGERVGACTFEPDEKRAAKATYTFEYFKLLQDLSRMRLTGMGMPPEPLDAAQREVLKSAALRSASLSYGQIRKKLNLDDDVFFHGLYYGEKTKEEAEKRKWPQMQSYHKMRTALDKVGKGAIGTLTEEQLNAVATILTECKSDAKRIAALREAGIPPQFDEALLPLSFSKYGSLSVQAMQKLIPLLEEGLRYDEACTRVYGDHRGLHPEQRKNRLSLTDMDEITNPVVRRAVSQTIKVINAVVRTYGPPDVVRIELAREMSRTFDERRKMEKRQDDNRAANERAKDQIAEYKGDHATGLDIVKFKLYREQDGVCLYSGQNLDIARLFEPGYADVDHIIPYSRCFDDSYQNKVLVLASENRQKGNRLPYEYFGQDEARWHGYEVRVENLIHNYRKRQKLLKRRLTEEESSGFIDRNLKDTQYITRAVYNLIRDHLAFAESNYRKKPVQAVNGAVTAMLRGRWGVQKIREDGDLHHCLDAAVIAATTPGLVQRLTAYNKHRETWERSPAGYVDPATGEMIELPQEARRDPFPKPWERFRQELEARLDPIDPRHQIDLLKLETYESDEEIKPVFVSRMPNHKVTGAAHAETIRSSKGGDGFTVTKTPLTNLKLNKFGEIEGYYNPASDTLLYDALLARLKDFGGDGAKAFAQPFYKPKKDGSPGPRVDKVKICEKATVGLPVRDGIAANGSMVRIDVFYVEGDGYYFVPIYVADTKKESLPNKAAVAMKPYNLWKKMKDENFVFSLYPGDLVRIQSRKGIKLNLAKGGTGEKEIVRQEGMYYYRSAGIAVAQISVETHDRRYLQPSLGIKTLQSIEKYQVDVLGNYYKVDLPEKRMTFSKEG

SEQ ID NO: 1539 - protein, 1100 aa, unidentified
  REGION 1..1100: note = Description of Unknown: uncultivated organism with predicted taxonomy: Firmicutes
  REGION 1..1100: note = MG21-29 effector
MSEFHYALGLDIGIGSVGWAVLRNQPNGEPDRIQDLGVRIFDKAEQPKTGASLAAPRRDARSARRRLRRHRHRLERIRYLMEQRGMMSVSDIQAMYAAGGFQKSPYQLRAEALDRPLSKEEAVRVLIHLAQRRGYKSNSTAEAAKDEKETGKVKTAIEENRRCMAEHGYRTVGEMMYRDERFWQSNPDGTRYQQTRNKTDDYRFTVERSAIVDEAKQIFAAQRKLGADWSSEDLEAAYLSILEGQRSFDEGPGGQSPFRGGIGDKVGFCTFEPDQQRAAKATYTFEYFKLLQDLNHMRLAGRGMSPQPLNAQQREILKETALRSASLSYGQLRKKLALADDTFFSGLYYGDKSREEAEKRKWPQMQSYHKIRTALDKVGKGTISSLTEEQLNAIASILTQYKSDAKRIEALRLAGIPMQFDEALLPLSFSKYGSLSVQAMQKLIPLLEQGMRYDEACTQIYGDHRGLHSEQRKNRLSLTDMDEIANPVVRRAVSQTIKVINAVVRTYGPPDVVRIELAREMSRNFDERRKAEKRQDENRAANERAKEQIAEYKGDHATGLDIVKFKLYQEQDGVCLYSGKNLDPSRLFEPGYADVDHIVPYSRCFDDSYQNKVLVLASENRQKGNRLPYEYFGNDDVRWHEYEVRVENLIRNYRKRQKLLKRQLSEEESAGFIDRNLKDTQYITRAIYTLIRDNLVFAESNYKKRPVQTVNGAVTSMLRNRWGVQKIREDGDLHHCLDAAVIAATTPGLVQRLTEHSKRRETLEKAPAGYVDPATGELIELPQEARRDPFPKPWERFRQELEARLDPIDPRHQIDLLKLETYESDEEIKPVFVSRMPNHKVTGAAHAETIRSSKGGDGFTVTKTPLTNLKLNKFGEIEGYYNPASDTLLYDALLARLKDFGGDGAKAFAQPFYKPKKDGTPGPRVDKVKICEKATIGLPVRNGIAANGSMIRIDVFYVEDDGYYFVPIYVADTKREKLPNKAAVAMKPYNLWKEMKDENFVFSLYPGDLVRIQSRKGIKLNLAKGGTGEKEIVRQDGMYYYRSAGIAVAQIFVETHDRRYLQPSLGIKTLQSIEKYQVDVLGNYQKVDLPEKRMTFSKEG

SEQ ID NO: 1540 - protein, 836 aa, unidentified
  REGION 1..836: note = Description of Unknown: uncultivated organism with predicted taxonomy: Clostridiales bacterium 42_27
  REGION 1..836: note = MG21-30 effector
RVGACTFEPDEKRAAKATYTFEYFKLLQDLNRMRLTGMGMPPEPLDDEQREVLKSAALRSASLSYGQIRKKLNLDDDVFFNDLYYGEKTKEEAEKRKWPQMQSYHKLRMALDKVGKGAIGTLTEEQLNAIATILTECKSDAKRIAALREAGIPPQFDEALLPLSFSKYGSLSVRAMQKLIPLLEEGLRYDEACTRVYGDHRGLRSEQRTNRLSLNDMEEITNPVVRRAVSQTIKVINAVARTYGPPDVVRIELAREMSRTFDERRKMEKRQDDNRAANEQAKDQIAEYKGDHATGLDIVKFKLYREQDGVCLYSGQNLDIARLFEPGYADVDHIIPYSRCFDDSYQNKVLVLASENRQKGNRLPYEYFGQDEARWHGYEVRVENLIHNYRKRQKLLKRRLTEEESSGFIDRNLKDTQYITRAVYNLIRDHLAFAESNYRKKPVQAVNGAVTSMLRGRWGVQKIREDGDLHHCLDAAVIAATTPGLVQRLTAYNKHRETWERPPAGYVDPATGELIELPQEARRDPFPKPWERFRQELEARLDPIDPRHQIDLLKLETYESDEEIKPVFVSRMPNHKVTGAAHAETIRSSKGGDGFTVTKTPLTNLKLNKFGEIEGYYNPASDTLLYDALLARLKDFGGDGAKAFAQPFYKPKKDGSPGPRVDKVKICEKATVGLPVRDGIAANGSMIRIDVFYVEDDGYYFVPIYVADTKKESLPNKAAVAMKPYNLWKKMKDENFVFSLYPGDLVRIQSRKGIKLNLAKGGTGEKEIVRQEGMYYYRAAGITVGAIQIETHDRRYLQPSLGIKTLQSIEKYQVDVLGNYYKVDLPEKRMTFSKEG

SEQ ID NO: 1541 - protein, 1103 aa, unidentified
  REGION 1..1103: note = Description of Unknown: uncultivated organism
  REGION 1..1103: note = MG21-31 effector
MKKGQKHCHYTLGLDIGIASIGWAVLGNDEDGTPNRIIDLGVRIFDKAEVENTGESLAAPRRDARSARRRLRRHRHRLERIRYLLVQQGVLTQEEMTHLYDKSDMVSPYQLRTEGLDRLLNAREFSKVLIHLAQRRGYQSNSTAEEVKNEKENGIIKSAILENQQRMEQGGYRTIGEMMYRDAAFWETINGIRYHCTRNKAGDYRFTVDRASILAEVSIFFEAQRRLGSPWASVEMEDAYTGILSSQRSFDEGPGNDSHGNESPFRKAMSHNVGNCTLIPTELRAARADYTAEYFKLLQDLNHMRLVDNSGSHPLTQQQRAILEEMAFRSANLTYGQLRKKLGLSDEVRFAGLYYGEDTIEKAEKRKWPQMQSYHKIRTALDKVSKNAIQTLTQDQLDAIGEILAGGVSDAKRINSFCLEGIPEEYHKALLPLSISKRAKLSIAAMRKLIPFLQQGMRYDEACKAAGLDFHGADGKVEKLSDFLNEITNPVVRRAVSQTIKVVNAVVRIYGKPDAVRIELAREMHHSIKERNRMKKRQEENREKNEQVKAQILETKPGTRVTGLDIVKFKLYQEQDGICLYSGKPLEIERLYEPGYAEVDHIIPYSRCFDDSYSNKVLVLAEENQQKGNCTPYEYFGADEQRWHEFSVRVGASVRDFKKRQKLLNTSFGEEQGKDFIQRNLNDTQHITRVVYNYLRNNLEFADSAYAKAPVQAVNGAVTAMLRGRWGIEKMRGNGDLHHCKDAVVIAATSDSMIKDLTKYYQEEEQRFMGKTHFVDPATGEVLTRKEFPQPWPRFREELEARLDPTNPKEALMALNLSTYEFDPEEEIPPVFVSHMPKHTVTGAAHEETIRGKTETGTVVKTALTSLKLDKNGEIEGYYNPQTDPRLYQALVERLRQFDGKGEKAFAEPFYKPKKDGTPGPRVDKVKIERKSSLSVSTGRGVAKNGDMIRMDVFRIPNERKPDDSYYFVPIYVADTKKRILPSRAVVRGKLPEEWKQMKPEHFLFSLFKGDLIYVESKKEISLALAKEAVGEKTIQVKSGLFYFCGANISNGSIEIETHDRRYGKEGLGIKKLKVFEKRQVEVLGEVRKVKLPEKRLEFRGRK

SEQ ID NO: 1542 - protein, 1100 aa, unidentified
  REGION 1..1100: note = Description of Unknown: uncultivated organism with predicted taxonomy: Ruminococcaceae bacterium TF06-43
  REGION 1..1100: note = MG21-32 effector
MSEFHYALGLDIGIGSVGWAVLRNQPNGEPDRIQDLGVRIFDKAEQPKTGASLAAPRRDARSARRRLRRHRHRLERIRYLMEQRGMMSVSDIQAMYAAGGFQKSPYQLRAEALDRPLSKEEAVQVLIHLAQRRGYKSNSTAEAAKDEKETGKVKTAIEENRRCMAEHGYRTVGEMMYRDERFWQSNPDGTRYQQTRNKTDDYRFTVERSAIVDEAKQIFAAQRKLGADWSSEDLEAAYLSILEGQRSFDEGPGGESPFRGGIGDKVGFCTFEPDQQRAAKATYTFEYFKLLQDLNRMRLTGMGMPPEPLDDEQREVLKSAALRSASLSYGQIRKKLNLDDDVFFNDLYYGEKTKEEAEKRKWPQMQSYHKMRTALDKVGKDTIGTLTEEQLNAIATILTECKSDAKRIAALRMAGIPVQFDEALLPLSFSKYGSLSVQAMQKLIPLLEQGMRYDEACTQIYGDHRGLHSEQRKNRLSLTDMDEITNPVVRRAVSQTIKVINAIVRTYGPPDVVRIELAREMSRNFDERRKAEKRQDENRAANERAKEQIAEYKGDHATGLDIVKFKLYQEQDGVCLYSGKNLDPSRLFEPGYADVDHIVPYSRCFDDSYQNKVLVLASENRQKGNLLPYEYFGYDEVRWHEYEVRVENLIRNYRKRQKLLKRQLSEEESAGFIDRNLKDTQYITRSIYNLIRNNLVFAESNYKKRPVQTVNGAVTSMLRNRWGVQKIREDGDLHHCLDAAVIAATTPGLVQRLTEHSKRRETLEKAPASYVDPATGDLLELPQEARRDLFPKPWERFRQELEARLNPIDPRHQIDLLKLSTYESDEEIKPVFVSRMPNHKVTGAAHAETIRSRKGGDGFTVTKTPLTNLKLNKFGEIEGYYNPASDTLLYNALLSRLKDFGGDGAKAFAKPFYKPKKDGTPGPRVDKVKICEKATIGLPVRNGIAANGSMIRIDVFYVEDDGYYFVPIYVADTKKERLPNKAVVAYKAYSEWKEMKDENFIFSLYPGDLVRIQSRKGIKLTLTKGGTGEPEIVRQQGMYYYQTANISSGAVTISTHDRRYSQSSLGIKTLQSIEKYQVDVLGNYYKVDLPEKRMTFSKEG

SEQ ID NO: 1543 - protein, 1097 aa, unidentified
  REGION 1..1097: note = Description of Unknown: uncultivated organism with predicted taxonomy: Clostridiales
  REGION 1..1097: note = MG21-33 effector
LSLRYTLGLDIGIASVGWAVLENNIDGEPIKIERLGVRIFDKAEQPKTGASLAEPRREARGQRRTIRRRRHRKDRIKQLIQQNDIMTRVEMAEMFEHSQFETSVYELRVQALERALTKQEFVRVLIHLAQRRGYKSNSKSEEAKDKENGKVKSAISENKKCMEENGYRTIGEMLLNDDRFWEYNPDGTKIFVPHNHPDDYRTTVERSMVEDEIRLIFSRQHALGVPYATSEFEEAYLEIWGSQRNFDEGPGGKSPYGGNMIEKMLGHCTFEKDEPRAAKGSYSAEYFRLLQDVNHLRLVKNNGESCALTREQKQIYIDLVMKSAAASYAQLRKKLGLSNDISFNMLRYGSDEIGKVERKKLGHMKFYHEMRKALNTVQKDAISTVSWEQRDEIARILLCYKSDDKRKAQLEKLDIPREFIPALLTLSTSKTAHLSAKALRKLIPHLEKGMTYAEACKEVYGEQKSSITKKNKLSLFDIEPINNPVVRRAVSQTIRVINAVVREYGAPEVVRVELAREMGKPYDVRTQMTKKQEANAKRNEELRQQIKKIKGAEPTGQDIVKFKLFQDQNGVCLYSGQNLDITRLFEAGYVDVDHIIPYSISFDDSYTNKVLVRSPENRQKGNRIPADYFKSDPARWQRFETLVNTQVHNWKKKRNLLTQALSEEQKNGFKQRNLVDTQYIARVIYNLINDHLQFAETGKYDKKRRTQAVNGAITAHVRKRLGIQKIREDGDLHHAVDAAVVACVSPSMIQKITQYTKHRECIRKTKEGYLDTETGELMTREAYDAKYSPRFPAPWERFRQELEARLSDNPAEEIARLHLATYDSEEEIKPVFVSRKQTHKISGAAHEATLHRKADGGYINKVSLTKLTLDKKTGEIKNYYAPESDRLLYEALKKRLKEFDGNAKEAFAEPFYKPKRDGTRGPLVKKVKLYEKKTITVPVGGGNADNGSMIRVDVFYIEDDGYYYVPIYTADVIKGALPNRAVVADKSHGEWKVMNDKDFLFSMYPNDLLYIESRKGIKLKTKKGSSKQEQIVRKTGLYYFKGLNISSNALSIITHDHSYEQSSLGGKTLSCLKKYTVDALGNYSEVSLPEKRKPLRG

SEQ ID NO: 1544 - protein, 1100 aa, unidentified
  REGION 1..1100: note = Description of Unknown: uncultivated organism with predicted taxonomy: Clostridiales
  REGION 1..1100: note = MG21-34 effector
MSEFHYALGLDIGIGSVGWAVLRNQPNGEPDRIQDLGVRIFDKAEQPKTGASLAAPRRDARSARRRLRRHRHRLERIRYLMEQRGMMSVSDIQAMYAAGGFQKSPYQLRAEALDRPLSKEEAVRVLIHLAQRRGYKSNSTAEAAKDEKETGKVKTAIEENRRCMAEHDYRTVGEMMYRDERFWQSNPDGTRYQQTRNKTDDYRFTVERSAIVDEAKQIFAAQRKLGADWSSEDLEAAYLSILEGQRSFDEGPGGESPFRGGIGDKVGFCTFEPDQQRAAKATYTFEYFKLLQDLNHMRLAGRGMSPQPLNAQQREILKETALRSASLSYGQLRKKLALADDTFFSGLYYGDKSREEAEKRKWPQMQSYHKIRTALDKVGKGTISSLTEEQLNAIASILTQYKSDAKRIEALRMAGIPVQFDEALLPLSFSKYGSLSVQAMQKLIPLLEQGMRYDEACTQIYGDHRGLHSEQRKNRLSLTDMDEITNPVVRRAVSQTIKVINAIVRTYGPPDVVRIELAREMSRNFDERRKAEKRQDENRAANERAKEQIAEYKGDHATGLDIVKFKLYQEQDGVCLYSGKNLDPSRLFEPGYADVDHIVPYSRCFDDSYQNKVLVLASENRQKGNRLPYEYFGYDEVRWHEYEVRVENLIRNYRKRQKLLKRQLSEEESAEFIDRNLKDTQYITRTVYNLIRDHLAFAESAYRKKPVQAVNGAVTSMLRNRWGVQKIREDGDLHHCLDAAVIAATTPGLVQRLTAYSKHRETWERPPAGYVDPATGELIELPQEARRDPFPKPWERFRQELEARLDPIDPRHQIDLLKLETYESDEEIKPVFVSRMPNHKVTGAAHAETIRSSKGGDGFTVTKTPLTNLKLNKFGEIEGYYNPASDTLLYDALLARLKDFGGDGAKAFAQPFYKPKKDGTPGPRVDKVKICEKATVGLPVRDGIAANGSMVRIDVFYVEDDGYYFVPIYVADTKKESLPNKAVVAYKAYSEWKEMKDENFIFSLYPGDLVCIQSRKGIKLNLAKGGTGEKEIVRQEGMYYYRAAGITVGAIQIETHDRRYLQPSLGIKTLQSIEKYQVDVLGNYQKVDLPEKRMTFSKEG

SEQ ID NO: 1545 - protein, 1100 aa, unidentified
  REGION 1..1100: note = Description of Unknown: uncultivated organism with predicted taxonomy: Clostridiales
  REGION 1..1100: note = MG21-35 effector
MSEFHYALGLDIGIGSVGWAVLRNQPNGEPDRIQDLGVRIFDKAEQPKTGASLAAPRRDARSARRRLRRHRHRLERIRYLMEQRGIMPVADIQAMYAAGGFQKSPYQLRAEALDRPLTKEEAVRVLIHLAQRRGYKSNSTAEAAKDEKETGKVKTAIEENRRCMAEHGYRTVGEMMYRDERFWQKHPDGTRYHQTRNKAEDYRFTVERAAIVDEVRQIFAAQRRLGTVWMDEDMETAYLSILESQRSFDEGPGGDSPFSGGIGERVGACTFEPDEKRAAKATYTFEYFKLLQDLNRMRLTGMGMPPEPLDDEQREVLKSAALRSASLSYGQIRKKLNLDDDVFFNDLYYGEKTKEEAEKRKWPQMQSYHKLRTALDKVGKGAIGTLTEEQLNAVATILTECKSDAKRIAALREAGIPPQFDEALLPLSFSKYGSLSVRAMQKLIPLLEEGLRYDEACTRVYGDHRGLRPEQRTNRLSLNDMDEITNPVVRRAVSQTIKVINAVVRTYGPPDVVRIELAREMSRTFDERRKMEKRQDDNRAANERAKNQIAEYKGDHATGLDIVKFKLYREQDGVCLYSGQNLDIARLFEPGYADVDHIIPYSRCFDDSYQNKVLVLASENRQKGNRLPYEYFGQDEARWHGYEVRVENLIHNYRKRQKLLKRRLTEEESTGFIDRNLKDTQYITRAVYNLIRDHLAFAESNYRKKPVQAVNGAVTAMLRGRWGVQKIREDGDLHHCLDAAVIAATTPGLVQRLTAYNKHRETWERPPAGYVDPATGELIELPQEARRDPFPKPWERFRQELEARLDPIDPRHQIDLLKLETYESDEEIKPVFVSRMPNHKVTGAAHAETIRSSKGGDGFTVTKTPLTNLKLNKFGEIEGYYNPASDTLLYDALLARLKDFGGDGAKAFVQPFYKPKKDGSPGPRVDKVKICEKATVGLPVRDGIAANGSMVRIDVFYVEDDGYYFVPIYVADTKKESLPNKAAVAMKPYNLWKKMKDENFVFSLYPGDLVRIQSRKGIKLNLAKGGTGEKEIVRQEGMYYYRSAGIAVAQISVETHDRRYLQPSLGIKTLQSIEKYQVDVLGNYYKVDLPEKRMTFSKEG

SEQ ID NO: 1546 - protein, 1127 aa, unidentified
  REGION 1..1127: note = Description of Unknown: uncultivated organism
  REGION 1..1127: note = MG21-36 effector
MNYRIGLDLGIASVGWAVLEDDYMGKPKRIVKLGARIFDSAENPKDGSSLALNRREARETRRRLRRRNHRIKRTKNLLEKYNIMTTKEIEDMYATYKFQFNPYELRVKGLDEKLTNSELSRILISFVKRRGYKSNSKSEETNDKEMGKLLTATKENELLMKEKGYRTVGEMYLKDEKFKMQMPDGRILLKVRNTTDDYKNTPLRKLLLDEIKQILNKQKELNVNITSDFIDEYINIFTSQRNFDDGPGQPSIYAGNQIEKMLGKCTFEKEENRAAKATYTFEYFKLLQDINHIKIEKHIINETGKKEVLKRPLTEDERNIIINLAKTKVTLTYASLRIALNLAGNERFNMIHYKATNVFSDEINKEAEKERKFKEFESYHKMRVSMDKAEKNYILKLSTDELDVIGTVLTLYKNDNKRIEKLAQLNLPENIINEMLKLSFSKVGNLSIKAMKKIIPYLEKGYTYDKAVNEVYEDFRGVVNTEKKKKIALRDLEQELSNPVVKRSVSQAIKVLNAITRTYGEPDVINVELARELSKNFADRQNIKKNQENNMQSNEKAKEDILKLGKSNPTGQDIVKYKLWKEQDGTCVYSGKHISIEDLFTEAVDVDHIIPYSMCFDDTYKNKVLVLSSENRQKGNKIPYQYMQEKGRDLDEYEIRVNNIIKNYSKKQRLLKQKFTREDANEWKDRNIQDTQYISRLMYNLIKNHVQFSNNENFERKVFTVNGQITSHIRKRLGINKIRENGDEHHAIDAAIIATVSQGMIQRITKYYQYIDGRYEKNSGEYIDIETGEIITKEQYEAENGSNFPEPWPKFRKELDIRTTCKTKARMEECLLTEKIFYDDYDDVKPIFISRMPRRKITGQAHLDTIRGLRKSDEGLKTLTKTELTKLKLDKNGEIERYPESQKQDDKLLYNALVEQLRKFGGNGTEAFKKPFYKPKSDGTPGPLVKKVKLEDKTTLAVELNNGKAIAANGDMIRIDVFKVEGEGYYFVPIYVSDTIKNKLPNKASVASKPYAEWKEMQDKDFIFSLYPRDLFYVKSKNKIKLTSINKQDKESLDTNELFAYYVNADISTAAIACINHNGEYERRGLGIKRLQEFKKYEVDVLGNYHEVKLPEKRQDFSNLKKGGSLK

SEQ ID NO: 1547 - protein, 1100 aa, unidentified
  REGION 1..1100: note = Description of Unknown: uncultivated organism with predicted taxonomy: Clostridiales
  REGION 1..1100: note = MG21-37 effector
MSEFHYALGLDIGIGSVGWAVLRNQPNGEPDRIQDLGVRIFDKAEQPKTGASLAAPRRDARSARRRLRRHRHRLERIRYLMEQRGIMPVADIQAMYAAGGFQKSPYQLRAEALDRPLIKEEAVRVLIHLAQRRGYKSNSTAEAAKDEKETGKVKTAIEENRRCMAEYGYRTVGEMMYRDERFWQKHPDGTRYHQTRNKAEDYRFTVERAAIVDEVRQIFAAQRRLGVVWMDEDMETAYLSVLESQRSFDEGPGGDSPFSGGIGERVGACTFEPDEKRAAKATYTFEYFKLLQDLNRMRLTGMGMPPEPLDDEQREVLKSAALRSASLSYGQIRKKLNLDDDVFFNDLYYGEKTKEEAEKRKWPQMQSYHKLRMALDKVGKGAIGTLTEEQLNAIATILTECKSDAKRIAALREAGIPPQFDEALLPLSFSKYGSLSVRAMQKLIPLLEEGLRYDEACTRVYGDHRGLRSEQRTNRLSLNDMEEITNPVVRRAVSQTIKVINAVVRTYGPPDVVRIELAREMSRTFDERRKMEKRQDDNRAANEQAKDQIAEYKGDHATGLDIVKFKLYREQDGVCLYSGQNLDIARLFEPGYADVDHIIPYSRCFDDSYQNKVLVLASENRQKGNRLPYEYFGQDEARWHGYEVRVENLIHNYRKRQKLLKRRLTEEESTGFIDRNLKDTQYITRAVYNLIRDHLAFAESNYRKKPVQAVNGAVTAMLRGRWGVQKIREDGDLHHCLDAAVIAATTPGLVQRLTAYNKHRETWERPPAGYVDPATGELIELPQEARHDQFPKPWERFRQELEARLDPIDPRHQIDLLKLETYESDEEIQPVFVSRMPNHKVTGAAHAETIRSSKGGDGFTVTKTPLTNLKLNKFGEIEGYYNPESDKLLYDALLARLKAFGGDGAKAFDQPFYKPKKDGTPGPRVDKVKICEKATVGLPVRDGIAANGSMVRIDVFYVEDDGYYFVPIYVADTKKESLPNKAVVAYKAYSEWKEMKDENFIFSLYPGDLVRIQSRKGIKLNLAKGGTGEKEIVRQEGMYYYRAAGITVGAIQIETHDRRYLQPSLGIKTLQSIEKYQVDVLGNYYKVDLPEKRMTFSKEG

SEQ ID NO: 1548 - protein, 1100 aa, unidentified
  REGION 1..1100: note = Description of Unknown: uncultivated organism with predicted taxonomy: Clostridiales bacterium 42_27
  REGION 1..1100: note = MG21-38 effector
MSEFHYALGLDIGIGSVGWAVLRNQPNGEPDRIQDLGVRIFDKAEQPKTGASLAAPRRDARSARRRLRRHRHRLERIRYLMEQRGIMPVADIQAMYAAGGFQKSPYQLRAEALDRPLTKEEAVRVLIHLAQRRGYKSNSTAEAAKDEKETGKVKTAIEENRRCMAEHGYRTVGEMMYRDERFWQKHPDGTRYHQTRNKAEDYRFTVERAAIVDEVRQIFAAQRRLGTAWMDEDMETAYLSILESQRSFDEGPGGDSPFFGGIGERVGACTFEPDEKRAAKATYTFEYFKLLQDLSRMRLTGMGMPPEPLDAAQREVLKSAALRSASLSYGQIRKKLNLDDDVFFHGLYYGEKTKEEAEKRKWPQMQSYHKMRTALDKVGKGAIGTLTEEQLNAVATILTECKSDAKRIAALREAGIPPQFDEALLPLSFSKYGSLSVQAMQKLIPLLEEGLRYDEACTRVYGDHRGLHPEQRKNRLSLTDMDEITNPVVRRAVSQTIKVINAVVRTYGPPDVVRIELAREMSRTFDERRKMEKRQDDNRAANERAKDQIAEYKGDHATGLDIVKFKLYREQDGVCLYSGQNLDIARLFEPGYADVDHIIPYSRCFDDSYQNKVLVLASENRQKGNRLPYEYFGQDEARWHGYEVRVENLIHNYRKRQKLLKRRLTEEESSGFIDRNLKDTQYITRAVYNLIRDHLAFAESNYRKKPVQAVNGAVTAMLRGRWGVQKIREDGDLHHCLDAAVIAATTPGLVQRLTAYNKHRETWERSPAGYVDPATGEMIELPQEARRDPFPKPWERFRQELEARLDPIDPRHQIDLLKLETYESDEEIKPVFVSRMPNHKVTGAAHAETIRSSKGGDGFTVTKTPLTNLKLNKFGEIEGYYNPASDTLLYDALLARLKDFGGDGAKAFAQPFYKPKKDGSPGPRVDKVKICEKATVGLPVRDGIAANGSMVRIDVFYVEGDGYYFVPIYVADTKKESLPNKAAVAMKPYNLWKKMKDENFVFSLYPGDLVRIQSRKGIKLNLAKGGTGEKEIVRQEGMYYYRSAGIAVAQISVETHDRRYLQPSLGIKTLQSIEKYQVDVLGNYYKVDLPEKRMTFSKEG

SEQ ID NO: 1549 - protein, 1100 aa, unidentified
  REGION 1..1100: note = Description of Unknown: uncultivated organism with predicted taxonomy: Clostridiales
  REGION 1..1100: note = MG21-39 effector
MSEFHYALGLDIGIGSVGWAVLRNQTNGEPDRIQDLGVRIFDKAEQPKTGASLAAPRRDARSARRRLRRHRHRLERIRYLMEQRGMMSVSDIQAMYAAGGFQKSPYQLRAEALDRPLSKEEAVRVLIHLAQRRGYKSNSTAEAAKDEKETGKVKTAIEENRRCMAEHGYRTVGEMMYRDERFWQSNPDGTRYQQTRNKTDDYRFTVERSAIVDEAKQIFAAQRKLGADWSSEDLEAAYLSILEGQRSFDEGPGGESPFRGGIGDKVGFCTFEPDQQRAAKATYTFEYFKLLQDLNRMRLTGMGMPPEPLDDEQREVLKSAALRSASLSYGQIRKKLNLDDDVFFNDLYYGEKTKEEAEKRKWPQMQSYHKMRTALDKVGKDTIGTLSEEQLNAIATILTECKSDAKRIAALRMAGIPVQFDEALLPLSFSKYGSLSVQAMQKLIPLLEQGMRYDEACTQIYGDHRGLHSEQRKNRLSLTDMDEITNPVVRRAVSQTIKVINAIVRTYGPPDVVRIELAREMSRNFDERRKAEKRQDENRAANERAKEQIAEYKGDHATGLDIVKFKLYQEQDGVCLYSGKNLDPSRLFEPGYADVDHIVPYSRCFDDSYQNKVLVLASENRQKGNRLPYEYFGYDEVRWHEYEVRVENLIRNYRKRQKLLKRQLSEEESAGFIDRNLKDTQYITRSIYNLIRNNLVFAESNYKKRPVQTVNGAVTSMLRNRWGVQKIREDGDLHHCLDAAVIAATTPGLVQRLTEHSKRRETLEKAPAGYVDPATGELLELPQEARRDLFPKPWERFRQELEARLNPIDPRHQIDLLKLSTYESDEEIKPVFVSRMPNHKVTGAAHAETIRSRKGGDGFTVTKTPLTNLKLNKFGEIEGYYNPASDTLLYNALLSRLKDFGGDGAKAFAKPFYKPKKDGTPGPRVDKVKICEKATIGLPVRNGIAANGSMIRIDVFYVEDDGYYFVPIYVADTKREKLPNKAAVAMKPYNLWKEMKDENFVFSLYPGDLVRIQSRKGIKLNLAKGGTGEKEIVRQDGMYYYRSAGIAVAQIFVETHDRRYLQPSLGIKTLQSIEKYQVDVLGNYQKVDLPEKRMTFSKEG

SEQ ID NO: 1550 - protein, 1100 aa, unidentified
  REGION 1..1100: note = Description of Unknown: uncultivated organism with predicted taxonomy: Clostridiales
  REGION 1..1100: note = MG21-40 effector
MSDFHYALGLDIGIGSVGWAVLRNRPDGEPDRIQDLGVRIFDKAEQPKTGASLAAPRREARSARRRLRRHRHRLERIRYLMEQHGIMPISDIQAMYAAGGFEKSPYQLRAEALDRPLSREELVRVLIHLAQRRGYRSNSTAEAAKNEKETGKVKSAIEENRACMEQHGYRTVGEMMFRDERFWQNNPDGTRCHQTRNKAEDYRFTVERTAIVDEAKQIFTAQRRFGADWMDDGLEAAYLAVLESQRSFDEGPGGDSPFHGGIGERVGFCTFEPDEQRAAKATYTFEYFKLLQDLNHMRLAGNGTAPQPLNAQQREILKAAALQSASLSYGQIRKKLALDENVFFHHLYYGDKPKEEAEKRKWPQMQSYHKMRTALDKVGKGTINTLTETQLNAIATILTQYKSDARRIEALREAGIPAQFDDALLPLSFSKYGNLSVTAMQKLIPLLEQGMRYDEACTQIYGDHRGLHPEQRKNRLSLRDMREITNPVVRRAVSQTIKVVNAVVRTYGPPDVVRIELAREMSQNFEKRRKTEKRQDENRTANEKAKEQIAEYKGDRATGLDIVKFKLYREQDGVCLYSGRNLDLSRLFEPGYVDVDHIIPYSRCFDDSYQNKVLVLASENRQKGNRLPYEYFGQDEARWHGYEVRVENLIRNYRKRQKLLKKRLTEEESAGFIDRNLKDTQYITRSIYNLLRDNLAFAESDYRKKPVQTVNGAVTSMLRGRWGVQKIREDGDLHHCMDAAVIAAASPGLVQRLTEYSKRREAFEEVSRGYVDPATGELVELPEQLRRDPFPKPWERFRQELEARLDPIDPQHQIDLLKLATYESDEEIRPVFVSRMPNHKVTGAAHAETIRSSKGGDGFTVTKTPLANLKLNKFGEIEGYYNPASDTLLYNALLARLKDFGGDGAKAFAQPFYKPKKDGTPGPRVDKVKICEKATIGLPVRNGIAANGSMIRIDVFYVEDDGYYFVPIYVADTKKAELPNKAVVAYKAYSDWKEMIDENFLFSLYPGDLVRIQSRKGIKLNIAKGGTGEKEIVRQDGLYYYQGANIATGAIALATHDRRYLQSGLGLKTLQSIEKYQVDVLGNYYKVDLPEKRMKFSKEG

SEQ ID NO: 1551 - protein, 1102 aa, unidentified
  REGION 1..1102: note = Description of Unknown: uncultivated organism with predicted taxonomy: Firmicutes
  REGION 1..1102: note = MG21-41 effector
MKKGQKHCHYTLGLDIGIASIGWAVLGNDEDGTPNRIIDLGVRIFESAEVQKTGESLAAPRRDARSARRRLRRHRHRLERIRYLLVQQGVLTQEEMTHLYDKSDTVSPYQLRTEGLDRLLNAREFSKVLIHLAQRRGYQSNSTAEEAKNEKENGIIKSAILENQQRMERGGYRTIGEMMYRDAAFWETINGIRYHCTRNKAGDYRFTVDRASILAEVSILFEAQRRLGAPWASVEMEDAYTAILSGQRSFDEGPGGDSPFRKGISDRVGYCTLEPTEQRAAKADATFEYFKLLQDLNHMRLVDNSGSHPLTQQQRALLEEMAFRSANLTYGQLRKKLGLLDEVRFAGLYYGEDTIEKAEKRKWAQMQSYHKIRTALDKVSKDAISMFDKDQLDAIGEILTAYKADAARIEHLQTAGIQKEYHKALLSLSFSKYGKLSCCAMRKLIPFLQQGMRYDEACREVYQDHRTKEASEKKQRLSLNDIDEITNPVVRRAVSQTIKVVNAVVRTYGNPDAVRIELAREMSHSFDERNKMKKRQEDGWQKNEQVKAQILETKTGTRVTGLDIVKFKLYQEQDGICLYSGTPMEIERLYEPGYADVDHIIPYSRCFDDSYSNKVLVLASENRQKGNRTPYEYFGANEQRWHEFSVRVGASVRDFKKRQKLLNTSFGEEQGKEFIQRNLNDTQHITRVVYNYLRNNLEFADSAYAKAPVQAVNGAVTAMLRGRWGIEKMRGDGDLHHCKDAVVIAATSRSMVQRLTNYYKEEERLFMGKTHFVDPATGEVLTRKEFQQRFAPKFPQPWDRFREELEARLDPIDPMEAVMALHLSTYEPEEEIAPVFVSHMPKHTVTGAAHEETIRSRTETGTVVKTALTSLKLDKNGEIEGYYNPQTDPRLYQALVERLKKFGGDGAKAFAEPFYKPKKDGTPGPRVDKVKIERKSSLSVSTGRGVADNGRMVRIDVFRIPDDGYYFVPIYVADTKKATLPSKAVVAGKSPEAWKQMKPEHFLFSLFKGDLIYVESRKGISLALAEKATGEKTIQVKSGLFYFCGADISTGSIGMEIHDRRYTKRGLGIKTLTLIEKCQVDVLGNVSKVRLPETRLEFRGRK

SEQ ID NO: 1552 - protein, 818 aa, unidentified
  REGION 1..818: note = Description of Unknown: uncultivated organism with predicted taxonomy: Clostridiales
  REGION 1..818: note = MG21-42 effector
EKRELTSEEKEKLKELVFSKVTVTYSDVRKTLQLESNQRFNMFTYRDLLNYTEETNKEIEKEKKLKEFESYKKIKTALNHIEKNYITKLTTDDLDEIGYALTVYKSNDKRKEYLEKHTPNLSKEAIEELLKLSFSKVGNLSLKAMKKIIPELEKEVTYDKAVDKVYEDFRGTVDTQKKRKLSLKDFEQEISNPVVRRGLSQAIKVLNAITLRYNEKFGKPDVVVVELARELGKNFADRRTIEKRQSDNTQTNEKAKESIIALGKNNPTGKDIVKFKLWQDQDCKCIYSGKTIPVEELFTDLVDVDHIIPYSQCFDDSYNNKVLVLASENRQKGNRVPYKYLKESGKNLEEYEIRVNTLIRNSKKKQNLLRQDFTREDAEDWKERNLNDTKYICKYMYNLIRNHLEFSDNANFVRKVWTVNGALTAHIRKRLGIEKVRDGDTHHAVDATVIAITTQGMVNKLTKYYQYVDGRYMNNKGEYIDTYTGEIINAKEYEEKYGIYFPEPWPKFRKELDIRTNCKTRERMIECLESEKIYTYEDYDDVEPIFVSRMPRRKVTGPAHVATIRGIKEKDGELKTITKTELTKLKLKDGEIEGYPENCRRDDRLLYEALKNRLIEFNGDAVKAFSEPFYKPKSDGTRGPIVNKVKIEANTTMGVTLNDKKAFAANGDCVRLDIFYVENEGYYFIPIYVSDTVKKELPNKACVSGKKYADWKEMKDENFIFSIYPKDLIYIQGKNKIKLNPVIKDKDSIEVEDIFAYYIKAGISSAVITIQTNEGKYVQPSLGIKSLKKLEKYEVDILGNYHKVKLPEKRLPFNINKK

SEQ ID NO: 1553 - protein, 843 aa, unidentified
  REGION 1..843: note = Description of Unknown: uncultivated organism with predicted taxonomy: Clostridiales bacterium 42_27
  REGION 1..843: note = MG21-43 effector
FSGGIGERVGACTFEPDEKRAAKATYTFEYFKLLQDLSRMRLTGMGMPPEPLDAAQREALKSAALRSASLSYGQIRKKLNLDDDVFFHGLYYGEKTKEETEKRKWPQMQSYHKMRTALDKVGKGAIGTLTEEQLNAVATILTECKSDAKRIAALREAGIPPQFDEALLPLSFSKYGSLSVQAMQKLIPLLEEGLRYDEACTRVYGDHRGLHPEQRKNRLSLTDMDEITNPVVRRAVSQTIKVINAVVRTYGPPDVVRIELAREMSRTFDERRKMEKRQDDNRAANKRAKDQIAEYKGDHATGLDIVKFKLYQEQDGVCLYSGQNLDIARLFEPGYADVDHIIPYSRCFDDSYQNKVLVLASENRQKGNRLPYEYFGQDEARWHGYEVRVENLIHNYRKRQKLLKRRLTEEESSGFIDRNLKDTQYITRAVYNLIRDHLAFAESNYRKKPVQAVNGAVTAMLRGRWGVQKIREDGDLHPCLDAAVIAATTPGLVQRLTAYNKHRETWERSPAGYVDPATGEMLELPQEARRDPFPKPWERFRQELEARLDPIDPRHQIDLLKLETYESDEEIKPVFVSRMPNHKVTGAAHAETIRSSKGGDGFTVTKTPLTNLKLNKFGEIEGYYNPASDTLLYDALLARLKDFGGDGAKAFAQPFYKPKKDGTPGPRVDKVKICEKATVGLPVRDGIAANGSMVRIDVFYVEDDGYYFVPIYVADTKKESLPNKAVVAYKAYSEWKEMKDENFIFSLYPGDLVRIQSRKGIKLNLAKGGTGEKEIVRQEGMYYYRGSDISTGAISVSSHDRRYESRGIGVKTLQSIEKYQVDVLGNYYKVDLPEKRMTFSKEG

SEQ ID NO: 1554 - protein, 1128 aa, unidentified
  REGION 1..1128: note = Description of Unknown: uncultivated organism with predicted taxonomy: Clostridiales
  REGION 1..1128: note = MG21-44 effector
MNYRIGLDLGIASVGWAILEDDNKGNPKRIVKLGSRIFDAAENPKDGSSLALNRREARNTRRRLRRRNHRIKRTKNLLEKYNIITIKEIENMYATYKFQFNPYELRVKGLDEKLTNSELARVLISFVKRRGYKSNSKAEETSNKEMGKLLVATKENEILMKEKNYRTIGEMYLKDEKFKIQMPDGRVLLKVRNTTDEYKNTPLRKLLLDEIKQILEKQKELNSNITDSFIDEYINIFTSQRNFDDGPSQPSIYAGNQIEKMLGKCTFEKEENRSAKATYTFEYFKLLQDINHIKIEEYHLKENGTREVIKRTLTEEERNIIINLAKTKVTLTYDSLRTALKLTTNERFNMINYKRTDIFNDEENKKVEKDRRIKEFESYHKIRVAMDRIEKNYINKLNSDDLDTIGTVLTLYKNDNKRIEKLKEINLPEDIVNELLKLSFSKVGNLSIKAMKKIIPYLEQGYTYDKAVNEVYEDFRGIINTKKKKKIALRDLEQELSNPVVKRAVSQAIKVLNAITTTYGKPDIINIELARQLSKKFADRQNIKKKQEQNMQNNDKAREEILKLGKNNPTGQDIVKYKLWQEQDGICVYSGKHISIEDLFTEAVDVDHIIPYSMCFDDTYKNKVLVLASENRQKGNRIPYQYLKEKGRNLEEYEVRVNNIIKNYYKKKRLLRQNFTREDATEWKDRNIQDTQYISRLMYNLIKNHVQFSDNENFDRKVFTVNGQITSHVRKRLGINKIRENGDEHHAVDAAVIAIISQGMIQKITKYYQYIDGRYEKNSGEYIDLETGEILTKEQYEKENGINFPEPWPKFRTELDIRTTCQTKERMEECLVAEKIYYENYDDVKPVFISRMPRRKVTGQAHLDTIRGIRKNEEGIKTLTKTELTKLKLDKNGEIEKYPDSQKQDDKLLYKALVDQLRKFGGNGEEAFKRPFYKPKSDGTPGPLVKKVKLEDKTTLAVELNNGKAIAANGDMIRIDVFKVDGEGYYFVPIYVSDTIKSKLPNKACVAAKQYSEWKDMKDENFIFSLYPRDLIYIKSKNKIKLTSINKENKETKEISEMFAYYIKSGISTAAISIINHNGEYEQNSLGIKTLKEFKKFEVDVLGNYHEVKLPEKRQSFKNLKKKGGSLK

SEQ ID NO: 1555 - protein, 1100 aa, unidentified
  REGION 1..1100: note = Description of Unknown: uncultivated organism with predicted taxonomy: Clostridiales
  REGION 1..1100: note = MG21-45 effector
MSEFHYALGLDIGIGSVGWAVLRNQPYGEPDRIQDLGVRIFDKAEQPKTGASLAAPRRDARSARRRLRRHRHRLERIRYLMEQRGIMPVADIQAMYAAGGFQKSPYQLRAEALDRPLIKEEAVRVLIHLAQRRGYKSNSTAEAAKDEKETGKVKTAIEENRRCMAEYGYRTVGEMMYRDERFWQKHPDGTRYHQTRNKAEDYRFTVERAAIVDEVRQIFAAQRRLGVVWMDEDMETAYLSVLESQRSFDEGPGGDSPFSGGIGKRVGACTFEPDEKRAAKATYTFEYFKLLQDLNRMRLTGMGMPPEPLDDEQREVLKSAALRSASLSYGQIRKKLNLDDDVFFNDLYYGEKTKEEAEKRKWPQMQSYHKLRMALDKVGKGAIGTLTEEQLNAIATILTECKSDAKRIAALREAGIPPQFDEALLPLSFSKYGSLSVRAMQKLIPLLEEGLRYDEACTRVYGDHRGLRSEQRTNRLSLNDMEEITNPVVRRAVSQTIKVINAVARTYGPPDVVRIELAREMSRTFDERRKMEKRQDDNRAANEQAKDQIAEYKGDHATGLDIVKFKLYREQDGVCLYSGQNLDIARLFEPGYADVDHIIPYSRCFDDSYQNKVLVLASENRQKGNRLPYEYFGQDEARWHGYEVRVENLIHNYRKRQKLLKRRLTEEESSGFIDRNLKDTQYITRAVYNLIRDHLAFAESNYRKKPVQAVNGAVTSMLRGRWGVQKIREDGDLHHCLDAAVIAATTPGLVQRLTAYNKHRETWERPPAGYVDPATGELIELPQEARRDPFPKPWERFRQELEARLDPIDPRHQIDLLKLETYESDEEIKPVFVSRMPNHKVTGAAHAETIRSSKGGDGFTVTKTPLTNLKLNKFGEIEGYYNPASDTLLYDALLARLKDFGGDGAKAFAQPFYKPKKDGSPGPRVDKVKICEKATVGLPVRDGIAANGSMIRIDVFYVEDDGYYFVPIYVADTKKESLPNKAVVAYKAYSEWKEMKDENFIFSLYPGDLVRIQSRKGIKLNLAKGGTGEKEIVRQEGMYYYRAAGITVGAIQIETHDRRYLQPSLGIKTLQSIEKYQVDVLGNYYKVDLPEKRMTFSKEG

SEQ ID NO: 1556 - protein, 818 aa, unidentified; identical to SEQ ID NO: 1552
  REGION 1..818: note = Description of Unknown: uncultivated organism with predicted taxonomy: Clostridiales
  REGION 1..818: note = MG21-46 effector

SEQ ID NO: 1557 - protein, 1098 aa, unidentified; identical to SEQ ID NO: 1537
  REGION 1..1098: note = Description of Unknown: uncultivated organism with predicted taxonomy: Clostridiales
  REGION 1..1098: note = MG21-47 effector

SEQ ID NO: 1558 - protein, 848 aa, unidentified
  REGION 1..848: note = Description of Unknown: uncultivated organism with predicted taxonomy: Clostridiales bacterium 42_27
  REGION 1..848: note = MG21-48 effector
LMEQRGIMPVADIQAMYAAGGFQKSPYQLRAEALDRPLIKEEAVRVLIHLAQRRGYKSNSTAEAAKDEKETGKVKTAIEENRRCMAEHGYRTVGEMMFRDERVWQKHPDGTRYHQTRNKAEDYRFTVERAAIVDEVRQIFAAQRRLGVVWMDEDMETAYLSVLESQRSFDEGPGGDSPFSGGIGERVGACTFEPDEKRAAKATYTFEYFKLLQDLNRMRLTGMGMPPEPLDDEQREVLKSAALRSASLSYGQIRKKLNLDDDVFFNDLYYGEKTKEEAEKRKWPQMQSYHKLRMALDKVGKGAIGTLTEEQLNAIATILTECKSDAKRIAALREAGIPPQFDEALLPLSFSKYGSLSVRAMQKLIPLLEEGLRYDEACTRVYGDHRGLRSEQRTNRLSLNDMEEITNPVVRRAVSQTIKVINAVVRTYGPPDVVRIELAREMSRTFDERRKMEKRQDDNRAANEQAKDQIAEYKGDHATGLDIVKFKLYREQDGVCLYSGQNLDIARLFEPGYADVDHIIPYSRCFDDSYQNKVLVLASENRQKGNRLPYEYFGQDEARWHGYEVRVENLIHNYRKRQKLLKRRLTEEESTGFIDRNLKDTQYITRAVYNLIRDHLAFAESNYRKKPVQAVNGAVTAMLRGRWGVQKIREDGDLHHCLDAAVIAATTPGLVQRLTAYNKHRETWERPPAGYVDPATGELIELPQEARHDQFPKPWERFRQELEARLDPIDPRHQIDLLKLETYESDEEIQPVFVSRMPNHKVTGAAHAETIRSSKGGDGFTVTKTPLTNLKLNKFGEIEGYYNPESDKLLYDALLARLKAFGGDGAKAFDQPFYKPKKDGTPGPRVDK

SEQ ID NO: 1559 - protein, 1100 aa, unidentified
  REGION 1..1100: note = Description of Unknown: uncultivated organism with predicted taxonomy: Clostridiales bacterium 42_27
  REGION 1..1100: note = MG21-49 effector
MSEFHYALGLDIGIGSVGWAVLRNQPNGEPDRIQDLGVRIFDKAEQPKTGASLAAPRRDARSARRRLRRHRHRLERIRYLMEQRGIMPVADIQAMYAAGGFPKSPYQLRAEALDRPLTKEEAVRVLIHLAQRRGYKSNSTAEAAKDEKETGKVKTAIEENRRCMAEYGYRTVGEMMYRDERFWQKHPDGTHYHQTRNKAEDYRFTVERAAIVDEVRQIFAAQRRLGTVWMDEDMETAYLSILESQRSFDEGPGGDSPFSGGIGERVGACTFEPDEKRAAKATYTFEYFKLLQDLSRMRLTGMGMPPEPLDAAQREALKSAALRSASLSYGQIRKKLNLDDDVFFHGLYYGEKTKEEAEKRKWPQMQSYHKMRTALDKVGKGAIGTLTEEQLNAVATILTECKSDAKRIAALREAGIPPQFDEALLPLSFSKYGSLSVQAMQKLIPLLEEGLRYDEACTRVYGDHRGLHPEQRKNRLSLTDMDEITNPVVRRAVSQTIKVINAVVRTYGPPDVVRIELAREMSRTFDERRKMEKRQDDNRAANERAKDQIAEYKGDHATGLDIVKFKLYQEQDGVCLYSGQNLDIARLFEPGYADVDHIIPYSRCFDDSYQNKVLVLASENRQKGNRLPYEYFGQDEARWHGYEVRVENLIHNYRKRQKLLKRRLTEEESSGFIDRNLKDTQYITRAVYNLIRDHLAFAESNYRKKPVQAVNGAVTAMLRGRWGVQKIREDGDLHHCLDAAVIAATTPGLVQRLTAYNKHRETWERSPAGYVDPATGEMLELPQEARRDPFPKPWERFRQELEARLDPIDPRHQIDLLKLETYESDEEIKPVFVSRMPNHKVTGAAHAETIRSSKGGDGFTVTKTPLTNLKLNKFGEIEGYYNPASDTLLYDALLARLKDFGGDGAKAFAQPFYKPKKDGSPGPRVDKVKICEKATVGLPVRDGIAANGSMVRIDVFYVEGDGYYFVPIYVADTKKESLPNKAAVAMKPYNLWKKMKDENFVFSLYPGDLVRIQSRKGIKLNLAKGGTGEKEIVRQEGMYYYRSAGIAVAQISVETHDRRYLQPSLGIKTLQSIEKYQVDVLGNYYKVDLPEKRMTFSKEG

SEQ ID NO: 1560 - protein, 1100 aa, unidentified; identical to SEQ ID NO: 1538
  REGION 1..1100: note = Description of Unknown: uncultivated organism with predicted taxonomy: Clostridiales bacterium 42_27
  REGION 1..1100: note = MG21-50 effector

SEQ ID NO: 1561 - protein, 983 aa, unidentified
  REGION 1..983: note = Description of Unknown: uncultivated organism with predicted taxonomy: Clostridiales bacterium 42_27
  REGION 1..983: note = MG21-51 effector
MSEFHYALGLDIGIGSVGWAVLRNQPNGEPDRIQDLGVRIFDKAEQPKTGASLAAPRRDARSARRRLRRHRHRLERIRYLMEQRGIMSVSDIQAMYAAGGFQKSPYQLRAEALDRPLSKEEAVRVLIHLAQRRGYKSNSTAEAAKDEKETGKVKTAIEENHRCMAEHGYRTVGEMMYRDERFWQKHPDGTRYHQTRNKAEDYRFTVERAAIVDEVRQIFAAQRRLGTAWMDEDMETAYLSILESQRSFDEGPGGDSPFSGGIGERVGACTFEPDEKRAAKATYTFEYFKLLQDLSRMRLTGMGMPPEPLDDEQREVLKSAALRSASLSYGQIRKKLNLDDDVFFHGLYYGEKTKEEAEKRKWPQMQSYHKLRTALDKVGKGAIGTLTEEQLNAVATILTECKSDAKRIAALREAGIPPQFDEALLPLSFSKYGSLSVRAMQKLIPLLEEGLRYDVACTRVYGDHRGLRPGQRTNRLSLKDMDEITNPVVRRAVSQTIKVINAVVRTYGPPDVVRIELAREMSRTFDERRKMEKRQDDNRAANERAKDQIAEYKGDHATGLDIVKFKLYREQDGVCLYSGQNLDIARLFEPGYADVDHIIPYSRCFDDSYQNKVLVLASENRQKGNRLPYEYFGQDEARWHGYEVRVENLIHNYRKRQKLLKRRLTEEESSGFIDRNLKDTQYITRAVYNLIREHLVFAESAYRKKPVQTVNGAVTSMLRGRWGVQKIREDGDLHHCLDAAVIAATTPGLVQRLTAYNKRRESWERSPAGYVDPATGELIVLPQEARRDPFPKPWERFRQELEARLDPIDPRHQIDLLKLETYESDEEIKPVFVSRMPNHKVTGAAHAETIRSSKGGDGFTVTKTPLTNLKLNKFGEIEGYYNPASDTLLYDALLARLKAFGGDGAKAFAQPFYKPKKDGTPGPRVDKVKICEKATVGLPVRDGIAANGSMVRIDVFYVEDDGYYFVPIYVADTKKESLPNKAA

SEQ ID NO: 1562 - protein, 1026 aa, unidentified
  REGION 1..1026: note = Description of Unknown: uncultivated organism with predicted taxonomy: Clostridiales bacterium 42_27
  REGION 1..1026: note = MG21-52 effector
ERIRYLMEQRGIMPVADIQAMYAAGGFQKSPYQLRAEALDRPLTKEEAVRVLIHLAQRRGYKSNSTAETAKDEKETGKVKTAIEENRRCMAEHSYRTVGEMMYRDERFWQKHPDGTRYHQTRNKAEDYRFTVERAAIVDEARQIFAAQRRLGTVWMDEDMETAYLSILESQRSFDEGPGGDSPFSGGIGERVGACTFEPDEKRAAKATYTFEYFKLLQDLNRMRLTGMGMPPEPLDAAQREVLKSAALRSASLSYGQIRKKLNLDDDVFFHGLYYGEKTKEEAEKRKWPQMQSYHKMRTALDKVGKGAIGTLTEEQLNAVATILTECKSDAKRIAALREAGIPPQFDEALLPLSFSKYGSLSVRAMQKLIPLLEEGLRYDEACTRVYGDHRGLRPEQRTNRLSLNDMEEITNPVVRRAVSQTIKVINAVVRTYGPPDVVRIELAREMSRTFDERRKMEKRQDDNRAANERAKDQIAEYKGDHATGLDIVKFKLYREQDGVCLYSGQNLDIARLFEPGYADVDHIIPYSRCFDDSYQNKVLVLASENRQKGNRLPYEYFGQDEARWHGYEVRVENLIHNYRKRQKLLKRRLTEEESTGFIDRNLKDTQYITRAVYNLIRDHLAFAESNYRKKPVQAVNGAVTAMLRGRWGVQKIREDGDLHHCLDAAVIAATTPGLVQRLTAYNKHRETWERSPAGYVDPATGEMIELPQEARRDPFPKPWERFRQELEARLDPIDPRHQIDLLKLETYESDEEIQPVFVSRMPNHKVTGAAHAETIRSSKGGDGFTVTKTPLTNLKLNKFGEIEGYYNPASDTLLYDALLARLKDFGGDGAKAFAQPFYKPKKDGTPGPRVDKVKICEKATVGLPVRDGIAANGNMVRIDVFYVEDDGYYFVPIYVADTKKESLPNKAAVAMKPYNLWKKMKDENFVFSLYPGDLVRIQSRKGIKLNLAKGGTGEKEIVRQEGMYYYRSAGIAVAQISVETHDRRYLQPSLGIKTLQSIEKYQVDVLGNYYKVDLPEKRMTFSKEG

SEQ ID NO: 1563 - protein, 1097 aa, unidentified
  REGION 1..1097: note = Description of Unknown: uncultivated organism with predicted taxonomy: Clostridiales
  REGION 1..1097: note = MG21-53 effector
LSLRYTLGLDIGIASVGWAVLENNIDGEPIKIERLGVRIFDKAEETDGSPLAKHRREARGQRRTIRRKRHRKDRIKQLIQQNGIMTRVEMSEMFEHSQFETSVYELRVQALERTLTKQEFVRVLIHLAQRRGYKSNSKSEEAKDKENGKVKSAISENKQCMEENGYRTIGEMLLNDDRFWECNPDGTKIFVPHNHLDDYRTTVERSMVEDEIRLIFSQQRALGVSYATAEFEEAYLEIWGSQRNFDEGPGGKSPYGGNMIEKMLGHCTFEKDEPRAAKGSYSAEYFRLLQDVNHLRLVKNNGESSALTAEQKQIYIDLVMKSAAASYAQLRKKLELSNDISFNMLRYGSDEIGKVERKKLGHMKFYHEMRKALNTVQKDAISTVSWEQRDEIARILLCYKSDDKRKAQLEKLDIPREFIPALLTLSTSKTAHLSAKSLRKLIPYLEKGMTYAEACKEVYGEHKSSITKKNKLSLFDIELINNPVVRRAVSQTIRVINAVVREYGAPEVVRVELAREMGKPYDVRTQITKKQEANAKKNEELRQQIKKIKGAEPTGQDIVKFKLFQEQKGVCLYSGQNLDITRLFEAGYVDVDHIVPYSISFDDSYTNKVLVRSPENRQKGNRIPADYFKSDPARWQRFETLVNTRVHNWKKKRNLLTQALSEEQKNGFKQRNLVDTQYIARVIYNLINDHLQFAETGKYDKKRRTQAVNGAITAHVRKRLGIQKIREDGDLHHAVDAAVVACVSPGMIQKVTQYTKHRECIRKTKEGYLDTETGELMTREAYDAKYSPRFPAPWERFRQELEARLSDNPAEEIARLHLATYDSEEEIKPVFVSRKPERKTTGAAHEATIRSAKKPGGSISKKPLTSLSLNKKTGEIEKYYAPESDRLLYEALKKRLEEFDGNAKEAFAKPFYKPKRDGTRGPLVKKVKLYEKKTITVPVNGGNADNGRMIRVDVFYMEDDGYYYVPIYITDVVKDELPNKAVVQKKLPEDWKEMDDRDFLFSMYPNDLIYVERKEVFELTAPKGSSLDPTISKTKGFFYYRSFDSNTGSFKIYTHDSSYSKKSLGGKTLSCLKKYTVDVLGNYSEVSLPEKRKPLRG

SEQ ID NO: 1564 - protein, 1100 aa, unidentified
  REGION 1..1100: note = Description of Unknown: uncultivated organism with predicted taxonomy: Clostridiales
  REGION 1..1100: note = MG21-54 effector
MSEFHYALGLDIGIGSVGWAVLRNQPNGEPDRIQDLGVRIFDKAEQPKTGASLAAPRRDARSARRRLRRHRHRLERIRYLMEQRGMMSVSDIQAMYAAGGFQKSPYQLRAEALDHPLSKEEAVRVLIHLAQRRGYKSNSTAEAAKDEKETGKVKTAIEENRRCMAEHGYRTVGEMMFRDERFWQKHPDGTRYHQTRNKAEDYRFTVERAAIVDEVRQIFAAQRRLGVVWMDEDMEIAYLSVLESQRSFDEGPGGDSPFSGGIGERVGACTFEPDEKRAAKATYTFEYFKLLQDLNRMRLTGMGMPPEPLDDEQREVLKSAALRSASLSYGQIRKKLNLDDDVFFNNLYYGEKTKEEAEKRKWPQMQSYHKLRTALDKVGKGAIGTLTEEQLNAVATILTEYKSDAKRIAALREAGIPPQFDEALLPLSFSKYGSLSVRAMQKLIPLLEEGLRYDGACTRVYGDHRGLRPGQRTNRLSLKDMEEITNPVVRRAVSQTIKVINAVVRTYGPPDVVRIELAREMSRTFDERRKMEKRQDDNRAANERAKDQISEYKGDHATGLDIVKFKLYREQDGVCLYSGQNLDIARLFEPGYADVDHIIPYSRCFDDSYQNKVLVLASENRQKGNRLPYEYFGQDEARWHGYEVRVENLIHNYRKRQKLLKRRLTEEESTGFIDRNLKDTQYITRTVYNLIRDHLAFAESAYRKKPVQAVNGAVTAMLRGRWGVQKIREDGDLHHCLDAAVIAATTPGLVQRLTAYNKHRETWERPPAGYVDPVTGELIELPQEARRDPFPKPWERFRQELEARLDPIDPRHQIDLLKLETYESDEEIKPVFVSRMPNHKVTGAAHAETIRSSKGGDGFTVTKTPLTNLKLNKFGEIEGYYNPASDTLLYDALLARLKDFGGDGAKAFAQPFYKPKKDGSPGPRVDKVKIREKATVGLPVRNGIAANGSMVRIDIFYVEDDGYYFVPIYVADTKKDRLPSKAPVAHKAYSAWKEMRNENFIFSLYPGDLVRIQSRAGIKLSLAKDGTGEKEIVRQNGLYYYRSADIEGGKIDIEAHDRRYSKHGLGLKTLQSIEKYQVDVLGNYYKVDLPEKRMTFSKEG

SEQ ID NO: 1565 - protein, 986 aa, unidentified
  REGION 1..986: note = Description of Unknown: uncultivated organism with predicted taxonomy: Ruminococcaceae bacterium TF06-43
  REGION 1..986: note = MG21-55 effector
LLNAREFSKVLIHLAQRRGYQSNSTAEEAKNEKENGIIKSAILENQQRMEQGGYRTIGEMMYRDAAFWETINGIRYHCTRNKAGDYRFTVDRASILSEVSLLFEAQRRLGSPWASVEMEDAYTAILASQRSFDEGPGNDSHGNESPFRKAMSHNVGNCTLIPTEPRAARADYTAEYFKLLQDLNHMRLVDNSGSHPLTQQQRAILEEMAFRSANLTYGQLRKKLGISDEVRFAGLYYGQDTIEKAEKRKWPQMQSYHKIRTALDKVSKDAIRTLTQDQLDAIGEILAGGVSDAKRINSFCLEGIPEEYHKALLPLSISKRAKLSIAAMRKLIPFLQQGMRYDEACKAAGLDFHGADGKVEKLSDFLNEITNPVVRRAVSQTIKVVNAVVREYGNPDAVRIELAREMHHSIKERNRMKKRQEENREKNEQVKAQILETKPGTRVTGLDIVKFKLYQEQDGICLYSGKPMEIERLYEPGYAEVDHIIPYSRCFDDSYSNKVLVLAKENQQKGNCTPYEYFGADEQRWHEFSARVRASVRDFKKRQKLLNTSFGEEQGKEFIQRNLNDTQHITRVVYNFLRNNLEFADSAYAKAPVQAVNGAVTAMLRGRWGIEKMRGNGDLHHCKDAVVIAATSDSMIEDLTDYYKEEERLFMGKTHFVDPATGEALTRKEFQQRFAPQFPQPWPRFREELEARLDPIDPMEAVMALHLSTYEPDEEIAPVFVSHMPKHTVTGAAHEETIRGKTETGTVVKTALTSLKLDKNGEIDGYYNPQTDPRLYQALVERLKKFGGDGARAFAEPFYKPKKDGTPGPRVDKVKIKSKSSLSVPTGRGVAKNGDMIRMDVFHVPDDGYYFVPIYVADTKKAILPSKAVVAGKSPEAWKQMKPEHFLFSVFKGDLIYVESKTEISLALAKNAVGEKTIQVKSDLFYFCGADISNGSIKIKTHDRRYEQKKLGIKKLEVLEKYQVDVLGNVSKVKLPETRLEFRGRK

SEQ ID NO: 1566 - protein, 1046 aa, unidentified
  REGION 1..1046: note = Description of Unknown: uncultivated organism with predicted taxonomy: Clostridiales bacterium 42_27
  REGION 1..1046: note = MG21-56 effector
PPRRDARSARRRLRRHRHRLERIRYLMEQRGIMPVADIQAMYAAGGFQKSPYQLRAEALDRPLTKEEAVRVLIHLAQRRGYKSNSTAEAAKDEKETGKVKTAIEENRRCMAEHGYRTVGEMMYRDERFWQKHPDGTRYHQTRNKAEDYRFTVERAAIVDEVRQIFAAQRRLGTAWMDEYMETAYLSILESQRSFDEGPGGDSPFSGGIGERVGACTFEPDEKRAAKATYTFEYFKLLQDLSRMRLTGMGMPPEPLDAAQREVLKSAALRSASLSYGQIRKKLNLDDDVFFHGLYYGEKTKEEAEKRKWPQMQSYHKMRTALDKVGKGAIGTLTEEQLNAVATILTECKSDAKRIAALREAGIPPQFDEALLPLSFSKYGSLSVQAMQKLIPLLEEGLRYDEACTRVYGDHRGLHPEQRKNRLSLTDMDEITNPVVRRAVSQTIKVINAVVRTYGPPDVVRIELAREMSRTFDERRKMEKRQDDNRAANERAKDQIAEYKGDHATGLDIVKFKLYREQDGVCLYSGQNLDIARLFEPGYADVDHIIPYSRCFDDSYQNKVLVLASENRQKGNRLPYEYFGQDEARWHGYEVRVENLIHNYRKRQKLLKRRLTEEESSGFIDRNLKDTQYITRAVYNLIRDHLAFAESNYRKKPVQAVNGAVTAMLRGRWGVQKIREDGDLHHCLDAAVIAATTPGLVQRLTAYNKHRETWERSPAGYVDPATGEMIELPQEARRDPFPKPWERFRQELEARLDPIDPRHQIDPLTAETYESDEEIKPVFVSRMPNHKVTGAAHAETIRSSKGGDGFTVTKTPLTNLKLNKFGEIEGYYNPASDTLLYDALLARLKDFGGDGAKAFAQPFYKPKKDGSPGPRVDKVKICEKATVGLPVRDGIAANGSMVRIDVFYVEGDGYYFVPIYVADTKKESLPNKAAVAMKPYNLWKKMKDENFVFSLYPGDLVRIQSRKGIKLNLAKGGTGEKEIVRQEGMYYYRSAGIAVAQISVETHDRRYLQPSLGIKTLQSIEKYQVDVLGNYYKVDLPEKRMTFSKEG

SEQ ID NO: 1567 - protein, 1098 aa, unidentified
  REGION 1..1098: note = Description of Unknown: uncultivated organism
  REGION 1..1098: note = MG21-57 effector
MTSQAIRYTLGLDIGIASVGWAVLKNGSDGEPYKIENLGVRIFDKAEVPKTGASLAAPRREARSSRRVVRRRRHRKERIKYLIEQEGIMTQTEMMQLFQNSSFEKSVYEIRVEALDRLLTREEAVRLLIHFAQRRGYKSNSKAEEAKDNENGVIKQAISQNKQVMKAHGYRTFGEMLLMDDRFYYTQPDGARIFIPHNKASDYKVTAERGMLADELHMIFAAQRSLGSLWFSDTFETAYMEVWSSQRSFDEGPGGNSQYGGNQIEKMLGKCFDGELRAPKASYSAEYFRLLQDINHLRIVSLDGASSPLTQEQRDIVVAASKKSGTLTYTQLRKKLALADDQYFNALYYGDKTTAEIEKKKFGHLQFYHQLRTVLDKVEKGAADTLTWEQRDEIARILTVYKADDRRTDELQKAGIPEKYIDALLPLSPTKAMHLSITAIKKIIPYLEAGMPYSDALSKAYGNQTNASTSSKKHKLSLSDIEEITNPVVRRAVSQSIKVINAIVRQYGAPERVRIELAREMGKNFKDRRMIETRQTDNAAKNERIKAQISEYKSDHITGQDIVKFKLFKEQDGICLYSGKSLNIARLFEPGYVDIDHIIPYSISFDDSYNNKVLVLSSENRQKGNRIPYAYFGQNSDRWEKYETLVNNTVRSYRKRKNLLLKSLSEAQIDGFKQRNLQDTQYLSKVVFRLIEDHLQFAETAPGKKHTQPVNGAITAQVRKRLGIEKIREDGDLHHAMDAAVIACITPGMIQRITKYAQNHERFYATAKGYADIKTGEVLTRAQYEAMDDIRFPEPWAGFRLELEARVSDHPQEAIAQLKLPHYENSEEIRPIFVSRMPNHKVTGAAHLETIRSKKGGAGSTVTKTALTELKLGKDGEIAGYCRKEDDPLLYEALKARLKAFGGDGKKAFAEPFHKPKHNGEPGPIVNKVKIQESATLTVPVNHGVAANGSMVRLDVFYVDGDGYYFVPIYTADIVKPKLPNRAVVAGKKASEWKMIDDNHFVFSLYPKDLLRIRSNKGIKLKAVNKNADLQEYSANDCLCYYVGFDIATGAFTVESHDRRFNRRGLGGKTLLSIEKYQVDVLGNYFPVALPEKRMKFR

SEQ ID NO: 1568 - protein, 1100 aa, unidentified
  REGION 1..1100: note = Description of Unknown: uncultivated organism with predicted taxonomy: Oscillibacter sp. CAG:241_62_21
  REGION 1..1100: note = MG21-58 effector
MLEFHYALGLDIGIGSVGWAVLRNQENGEPDRIQDLGVRIFDKAEQSKTGASLAAPRRDARSARRRLRRHSHRLERIRFLMEQSGILSVADIQEMYSTGGFQKSPYQLRAEALDRLLTKEEAVRVLIHLAQRRGYKSNSTAEAAKDEKETGKVKTAIEENRRCMEEHGYRTVGEMMFRDERFWQKNPDGSRYHQTRNKADNYRFTVERAAIVDEAKRIFAAQRSFGAAWMGEAVEASYLSILESQRSFDEGPGGSSPFRGGIGERVGFCTFEPEERRAPKASYTFEYFKLLQDLNRMRLAGMGLPPQPLNAEQRELLKTAALRSASLNYGQIRKKLNLDDGIYFNELYYGDHSREDAEKRKWPQMQSYHKIRTALDRVGKGTISTLTEEQLNAIAEILTRYKSDAKRIAALREAGIPPQLDGALLPLSFSKYGSLSVKAMQKLIPLLEKGQRYDQACTQIYRDHRGLRTDQRTTRLSLHDMDEITNPVVRRAVSQTIKVVNAVVRTYGPPDVVRIELAREMSQNFDERRKAEKRREENRAANERAKEQILEYKGDRVTGLDIVKFKLFREQDGVCLYSGKNLDISRLFEPGYADVDHIIPYSRCFDDSYQNKVLVLASENRQKGNRLPYEYFGQDAARWHGYEVRVENLIRNYRKRQKLLKHHLTEEESAGFIARNLKDTQYITRTIYNLLREHLLFADSRYSKKPVQAVNGAVTAMLRSRWGVHKIREDGDLHHCMDAAVLAATTPGLVQRLTEYSKHRETLIETPAGFVNRLTGELVEEAGDAQRDRFPEPWDRFRQELEARLDPIDPRHQIDRLKLATYESDEELKPVFVSRMPNHKVTGAAHAETIRSSKAGNGFTVTKTPLASLKLNKQGEIDGYYNPESDKLLYDALLARLKAFGGDGAKAFAEPFYKPKKDGTPGPRVDKVKIREKGTTGLPVRDGIAANGSMIRIDVFREEDDGYYFVPIYVADTKKERLPNKAVVAYRPYEDWKEMQDENFVCSLYPGDLVRIQSRKGIKLNLAKGGTGEREIVRQDGLFYYRGADIAGGKIKIETHDRRYSQPSLGVKTLRSIEKYQVDVLGNYYKVKLPEKRMTFSEEG

SEQ ID NO: 1569 - protein, 1100 aa, unidentified
  REGION 1..1100: note = Description of Unknown: uncultivated organism with predicted taxonomy: Clostridiales
  REGION 1..1100: note = MG21-59 effector
MLEFHYALGLDIGIGSVVWAVLRNQENGEPDRIQDLGVRIFDKAEQPKTGASLAAPRRDARSARRRLRRHSHRLERIRFLMEQSGILSVADIQEMYSTGGFQKSPYQLRAEALDRLLTKEEAVRVLIHLAQRRGYKSNSTAEAAKDEKETGKVKTAIEENRRCMEEHGYRTVGEMMFRDERFWQKNPDGSRYHQTRNKADDYRFTVERAAIVDEAKRIFAAQSSFGAAWMGEAVEASYLSILESQRSFDEGPGGSSPFRGGIGERVGFCTFEPEERRAPKASYTFEYFKLLQDLNRMRLAGMGLPPQPLNAEQRELLKTAALRSASLNYGQIRKKLNLDDGIYFNELYYGDHSREDAEKRKWPQMQSYHKIRTALDRVGKGTISTLTEEQLNAIAEILTRYKSDAKRIAALREAGIPPQLDGALLPLSFSKYGSLSVKAMQKLIPLLEKGQRYDQACTQIYRDHRGLRTDQRTTRLSLHDMDEITNPVVRRAVSQTIKVVNAVVRTYGPPDVVRIELAREMSQNFDERRKAEKRREENRAANERAKEQILEYKGDRVTGLDIVKFKLFREQDGVCLYSGKNLDISRLFEPGYADVDHIIPYSRCFDDSYQNKVLVLASENRQKGNRLPYEYFGQDAARWHGYEVRVENLIRNYRKRQKLLKHHLTEEESAGFIARNLKDTQYITRTIYNLLREHLLFADSRYSKKPVQAVNGAVTAMLRSRWGVHKIREDGDLHHCMDAAVLAATTPGLVQRLTEYSKHRETLIETPAGFVNRLTGELVEEAGDAQRDRFPEPWDRFRQELEARLDPIDPRHQIDRLKLATYESDEELKPVFVSRMPNHKVTGAAHAETIRSSKAGNGFTVTKTPLASLKLNKQGEIDGYYNPESDKLLYDALLARLKAFGGDGAKAFAEPFYKPKKDGTPGPRVDKVKIREKGTTGLPVRDGIAANGSMIRIDVFREEDDGYYFVPIYVADTKKERLPNKAVVAYRPYEDWKEMQDENFVCSLYPGDLVRIQSRKGIKLNLAKGGTGEREIVRQDGLFYYRGADIAGGKIKIETHDRRYSQPSLGVKTLRSIEKYQVDVLGNYYKVKLPENRMTFSKEG

SEQ ID NO: 1570 - protein, 1100 aa, unidentified; identical to SEQ ID NO: 1538
  REGION 1..1100: note = Description of Unknown: uncultivated organism with predicted taxonomy: Firmicutes
  REGION 1..1100: note = MG21-60 effector

SEQ ID NO: 1571 - protein, 1100 aa, unidentified; identical to SEQ ID NO: 1544
  REGION 1..1100: note = Description of Unknown: uncultivated organism with predicted taxonomy: Clostridiales
  REGION 1..1100: note = MG21-61 effector

SEQ ID NO: 1572 - protein, 1100 aa, unidentified
  REGION 1..1100: note = Description of Unknown: uncultivated organism with predicted taxonomy: Firmicutes bacterium CAG:129
  REGION 1..1100: note = MG21-62 effector
MSEFHYALGLDIGIGSVGWAVLRNQPNGEPDRIQDLGVRIFDKAEQPKTGASLAAPRRDARSARRRLRRHRHRLERIRYLMEQRGIMPVADIQAMYAAGGFQKSPYQLRAEALDRPLIKEEAVRVLIHLAQRRGYKSNSTAEAAKDEKETGKVKTAIEENRRCMAEYGYRTVGEMMYRDERFWQKHPDGTRYHQTRNKAEDYRFTVERAAIVDEVRQIFAAQRRLGVVWMDEDMETAYLSVLESQRSFDEGPGGDSPFSGGIGERVGACTFEPDEKRAAKATYTFEYFKLLQDLNRMRLTGMGMPPEPLDDEQREVLKSAALRSASLSYGQIRKKLNLDDDVFFNDLYYGEKTKEEAEKRKWPQMQSYHKLRMALDKVGKGAIGTLTEEQLNAIATILTECKSDAKRIAALMEAGIPPQFDEALLPLSFSKYGSLSVRAMQKLIPLLEEGLRYDEACTRVYGDHRGLRSEQRTNRLSLNDMEEITNPVVRRAVSQTIKVINAVVRTYGPPDVVRIELAREMSRTFDERRKMEKRQDDNRAANEQAKDQIAEYKGDHATGLDIVKFKLYREQDGVCLYSGQNLDIARLFEPGYADVDHIIPYSRCFDDSYQNKVLVLASENRQKGNRLPYEYFGQDEARWHGYEVRVENLIHNYRKRQKLLKRRLTEEESTGFIDRNLKDTQYITRAVYNLIRDHLAFAESNYRKKPVQAVNGAVTAMLRGRWGVQKIREDGDLHHCLDAAVIAATTPGLVQRLTAYNKHRETWERPPAGYVDPATGELIELPQEARHDQFPKPWERFRQELEARLDPIDPRHQIDLLKLETYESDEEIQPVFVSRMPNHKVTGAAHAETIRSSKGGDGFTVTKTPLTNLKLNKFGEIEGYYNPESDKLLYDALLARLKAFGGDGAKAFDQPFYKPKKDGTPGPRVDKVKICEKATVGLPVRDGIAANGSMVRIDVFYVEDDGYYFVPIYVADTKKESLPNKAVVAYKAYSEWKEMKDENFIFSLYPGDLVRIQSRKGIKLNLAKGGTGEKEIVRQEGMYYYRAAGITVGAIQIETHDRRYLQPSLGIKTLQSIEKYQVDVLGNYYKVDLPEKRMTFSKEG

SEQ ID NO: 1573 - protein, 1100 aa, unidentified
  REGION 1..1100: note = Description of Unknown: uncultivated organism with predicted taxonomy: Clostridiales
  REGION 1..1100: note = MG21-63 effector
MSEFHYALGLDIGIGSVGWAVLRNQPNGEPDRIQDLGVRIFDKAEQPKTGASLAAPRRDARSARRRLRRHRHRLERIRYLMEQRGMMSVSDIQAMYAAGGFQKSPYQLRAEALDRPLSKEEAVRVLIHLAQRRGYKSNSTAEAAKDEKETGKVKTAIEENRRCMAEHGYRTVGEMMYRDERFWQSNPDGTRYQQTRNKTDDYRFTVERSAIVDEAKQIFAAQRKLGADWSSEDLEAAYLSILEGQRSFDEGPGGESPFRGGIGDKVGFCTFEPDQQRAAKATYTFEYFKLLQDLNRMRLTGMGMPPEPLDDEQREVLKSAALRSASLSYGQIRKKLNLDDDVFFNDLYYGEKTKEEAEKRKWPQMQSYHKMRTALDKVGKDTIGTLTEEQLNAIATILTECKSDAKRIAALRMAGIPVQFDEALLPLSFSKYGSLSVQAMQKLIPLLEQGMRYDEACTQIYGDHRGLHSEQRKNRLSLTDMDEITNPVVRRAVSQTIKVINAIVRTYGPPDVVRIELAREMSRNFDERRKAEKRQDENRAANERAKEQIAEYKGDHATGLDIVKFKLYQEQDGVCLYSGKNLDPSRLFEPGYADVDHIVPYSRCFDDSYQNKVLVLASENRQKGNRLPYEYFGYDEVRWHEYEVRVENLIRNYRKRQKLLKRQLSEEESAGFIDRNLKDTQYITRSIYNLIRNNLVFAESNYKKRPVQTVNGAVTSMLRNRWGVQKIREDGDLHHCLDAAVIAATTPGLVQRLTEHSKRRETLEKAPAGYVDPATGELLELPQEARRDLFPKPWERFRQELEARLDPIDPRHQIDLLELETYESDEEIKPVFASRMPNHKVTGAAHAETIRSSKGGDGFTVTKTPLTNLKLNKFGEIEGYYNPASDTLLYNALLSRLKDFGGDGAKAFAQPFYKPKKDGTPGPRVDKVKICEKATIGLPVRNGIAANGSMIRIDVFYVEDDGYYFVPIYVADTKREKLPNKAAVAMKPYNLWKEMKDENFVFSLYPGDLVRIQSRKGIKLNLAKGGTGEKEIVRQDGMYYYRSAGIAVAQIFVETHDRRYLQPSLGIKTLQSIEKYQVDVLGNYQKVDLPEKRMTFSKEG

SEQ ID NO: 1574 - protein, 1100 aa, unidentified
  REGION 1..1100: note = Description of Unknown: uncultivated organism with predicted taxonomy: Clostridiales
  REGION 1..1100: note = MG21-64 effector
MSEFHYALGLDIGIGSVGWAVLRNQPNGEPDRIQDLGVRIFDKAEQPKTGASLAAPRRDARSARRRLRRHRHRLERIRYLMEQRGMMSVSDIQAMYAAGGFQKSPYQLRAEALDRPLSKEEAVRVLIHLAQRRGYKSNSTAEAAKDEKETGKVKTAIEENRRCMAEHGYRTVGEMMYRDERFWQSNPDGTRYQQTRNKTDDYRFTVERSAIVDEAKQIFAAQRKLGADWSSEDLEAAYLSILEGQRSFDEGPGGESPFRGGIGDKVGFCTFEPDQQRAAKATYTFEYFKLLQDLNRMRLTGMGMPPEPLDDEQREVLKSAALRSASLSYGQIRKKLNLDDDVFFNDLYYGEKTKEEAEKRKWPQMQSYHKMRTALDKVGKDTIGTLTEEQLNAIATILTECKSDAKRIAALRMAGIPVQFDEALLPLSFSKYGSLSVQAMQKLIPLLEQGMRYDEACTQIYGDHRGLHSEQRKNRLSLTDMDEITNPVVRRAVSQTIKVINAIVRTYGPPDVVRIELAREMSRNFDERRKAEKRQDENRAANERAKEQIAEYKGDHATGLDIVKFKLYQEQDGVCLYSGKNLDPSRLFEPGYADVDHIVPYSRCFDDSYQNKVLVLASENRQKGNRLPYEYFGYDEVRWHEYEVRVENLIRNYRKRQKLLKRQLSEEESAGFIDRNLKDTQYITRSIYNLIRNNLVFAESNYKKRPVQTVNGAVTSMLRNRWGVQKIREDGDLHHCLDAAVIAATTPGLVQRLTEHSKRRETLEKAPAGYVDPATGELLELPQEARRDLFPKPWERFRQELEARLDPIDPRHQIDLLKLETYESDEEIKPVFASRMPNHKVTGAAHAETIRSSKGGDGFTVTKTPLTNLKLNKFGEIEGYYNPASDTLLYNALLSRLKDFGGDGAKAFAQPFYKPKKDGTPGPRVDKVKICEKATIGLPVRNGIAANGSMIRIDVFYVEDDGYYFVPIYVADTKREKLPNKAAVAMKPYNLWKEMKDENFVFSLYPGDLVRIQSRKGIKLNLAKGGTGEKEIVRQDGMYYYRSAGIAVAQIFVETHDRRYLQPSLGIKTLQSIEKYQVDVLGNYQKVDLPEKRMTFSKEG

SEQ ID NO: 1575 - protein, 833 aa, unidentified
  REGION 1..833: note = Description of Unknown: uncultivated organism with predicted taxonomy: Clostridiales bacterium 42_27
  REGION 1..833: note = MG21-65 effector
LSLRYTLGLDIGIASVGWAVLENNIDGEPIKIERLGVRIFDKAEETDGSPLAKHRREARGQRRTIRRKRHRKDRIKQLIQQNGIMTRVEMSEMFEHSQFETSVYELRVQALERALTKQEFVRVLIHLAQRRGYKSNSKSEEAKDKENGKVKSAISENKQCMEENGYRTIGEMLLNDDRFWECNPDGTKIFVPHNHLDDYRTTVERSMVEDEIRLIFSQQRALGVSYVTAEFEEAYLEIWGSQRNFDEGPGGKSPYGGNMIEKMLGHCTFEKDEPRAAKGSYSAEYFRLLQDVNHLRLVKNNGESSALTAEQKQIYIDLVMKSATASYAQLRKKLELSNDISFNMLRYGSDEIGKVERKKLGHMKFYHEMRKALNTVQKDAISTVSWEQRDEIARILLCYKSDDKRKAQLEKLDIPHEFIPALLTLSTSKTAHLSAKALRKLIPYLEKDMTYAEACKEVYGEHKSSITKKNKLSLFDIELINNPVVRRAVSQTIRVINAVVREYGAPEVVRVELAREMGKPYDVRTQITKKQEANAKKNEELRQQIKKIKGAEPTGQDIVKFKLFQDQNGVCLYSGQNLDITRLFEAGYVDVDHIIPYSISFDDSYTNKVLVRSPENRQKGNRIPADYFKSDPARWQRFETLVNTRVHNWKKKRNLLTQALSEEQKNGFKQRNLVDTQYIARVIYNLINDHLQFAETGKYDKKRRTQAVNGAITAHVRKRLGIQKIREDGDLHHAVDAAVVACVSPGMIQKVTQYTKHRECIRKTKEGYLDTETGELMTREAYDAKYSPRFPAPWERFRQELEARLSDNPAEEIARLHLATYDSEEEIKPVFVS

SEQ ID NO: 1576 - protein, 1100 aa, unidentified; identical to SEQ ID NO: 1574
  REGION 1..1100: note = Description of Unknown: uncultivated organism with predicted taxonomy: Clostridiales
  REGION 1..1100: note = MG21-66 effector

SEQ ID NO: 1577 - protein, 1100 aa, unidentified; identical to SEQ ID NO: 1539
  REGION 1..1100: note = Description of Unknown: uncultivated organism with predicted taxonomy: Clostridia
  REGION 1..1100: note = MG21-67 effector

SEQ ID NO: 1578 - protein, 1100 aa, unidentified
  REGION 1..1100: note = Description of Unknown: uncultivated organism with predicted taxonomy: Clostridiales
  REGION 1..1100: note = MG21-68 effector
MSEFHYALGLDIGIGSVGWAVLRNQPNGEPDRIQDLGVRIFDKAEQPKTGASLAAPRRDARSARRRLRRHRHRLERIRYLMEQRGIMPVADIQAMYAAGGFPKSPYQLRAEALDRPLTKEEAVRVLIHLAQRRGYKSNSTAEAAKDEKETGKVKTAIEENRRCMAEYGYRTVGEMMYRDERFWQKHPDGTHYHQTRNKAEDYRFTVERAAIVDEVRQIFAAQRRLGTVWMDEDMETAYLSILESQRSFDEGPGGDSPFSGGIGERVGACTFEPDEKRAAKATYTFEYFKLLQDLSRMRLTGMGMPPEPLDAAQREALKSAALRSASLSYGQIRKKLNLDDDVFFHGLYYGEKTKEEAEKRKWPQMQSYHKMRTALDKVGKGAIGTLTEEQLNAVATILTECKSDAKRIAALREAGIPPQFDEALLPLSFSKYGSLSVQAMQKLIPLLEEGLRYDEACTRVYGDHRGLHPEQRKNRLSLTDMDEITNPVVRRAVSQTIKVINAVVRTYGPPDVVRIELAREMSRTFDERRKMEKRQDDNRAANERAKDQIAEYKGDHATGLDIVKFKLYQEQDGVCLYSGQNLDIARLFEPGYADVDHIIPYSRCFDDSYQNKVLVLASENRQKGNRLPYEYFGQDEARWHGYEVRVENLIHNYRKRQKLLKRRLTEEESSGFIDRNLKDTQYITRAVYNLIRDHLAFAESNYRKKPVQAVNGAVTAMLRGRWGVQKIREDGDLHHCLDAAVIAATTPGLVQRLTAYNKHRETWERSPAGYVDPATGEMLELPQEARRDPFPKPWERFRQELEARLDPIDPRHQIDLLKLETYESDEEIKPVFVSRMPNHKVTGAAHAETIRSSKGGYGFTVTKTPLTNLKLNKFGEIEGYYNPASDTLLYDALLARLKDFGGDGAKAFAQPFYKPKKDGSPGPRVDKVKICEKATVGLPVRDGIAANGSMVRIDVFYVEGDGYYFVPIYVADTKKESLPNKAAVAMKPYNLWKKMKDENFVFSLYPGDLVRIQSRKGIKLNLAKGGTGEKEIVRQEGMYYYRSAGIAVAQISVETHDRRYLQPSLGIKTLQSIEKYQVDVLGNYYKVDLPEKRMTFSKEG

SEQ ID NO: 1579 - protein, 1109 aa, unidentified
  REGION 1..1109: note = Description of Unknown: uncultivated organism with predicted taxonomy: Firmicutes
  REGION 1..1109: note = MG21-69 effector
MKKGQKHCHYTLGLDIGIASIGWAVLGNDEDGTPNRIIDLGVRIFESAEVQKTGESLAAPRRDARSARRRLRRHRHRLERIRYLLVQQGVLTQEEMTHLYDKSDMVSPYQLRTEGLDRLLNAQEFSKVLIHLAQRRGYQSNSTAEEAKNEKENGIIKTAILENQQRMERGGYRTIGEMMYRDAAFWETINGIRYHCTRNKAGDYRFTVDRASILAEVSILFEAQRRLGSPWASVEMEDAYTAILSGQRSFDEGPGNDSHGNESPFRKAMSHNVGNCTLIPTELRAARADYTAEYFKLLQDLNHMRLMDNSGSHPLTQQQRAILEEMAFRSANLTYGQLRKKLGLSDEVRFAGLYYGEDTIEKAEKRKWAQMQSYHKIRTALDKVSKNAIQTLTQDQLDAIGEILAGGVSDAKRINSFCLEGIPEEYHKALLPLSISKRAKLSIAAMRKLIPFLQQGMRYDEACKAAGLDFHGADGKVEKLSDFLNEITNPVVRRAVSQTIKVVKAVVDNYSNRKEMKLDAVRIELAREMHHSIKERNRMKKRQEENREKNEQVKAQILETKPGTRVTGLDIVKFKLHQEQKGFCPYSGVEIKKERLYEPGYAEVDHIIPYSRCFDDSYSNKVLVLAEENRQKGNRTPYEYFGADEQRWHEFSARVRASVQDFKKRQKLLNTSFGEEQKNEFTQRNLNDTQHITRVVYNYLRNNLEFADSAYAKAPVRAVNGAVTAMLRGRWGIEKMRGNGDLHHCKDAVVIAATSRSMVQRLTNYYKEEERLFMGKTNFVDPATGEVLTRKEFQQRFAPKFPQPWDRFREELEARLDPIDPMEAVTALYLSTYEPEEEIAPVFVSHMPKHTVTGAAHEETIRSRTETGTVVKTALTSLKLDKNGEIDGYYNPQTDPRLYQALVERLRQFDGEGKKAFAEPFYKPKKDGTPGPRVDKVKIERKSSLSVSTGRGVADNGRMVRIDVFRVPDDGYYFVPIYVADTKKGILPSKAVVAGKSPEAWKQMKPEHFLFSLFKGDLIYVESRKGISLALAEKATGEKTIQVKSGLFYFCGADISTGSIGMEIHDRRYTKRGLGIKTLTLIEKCQVDVLGNVSKVRLPETRLEFRGRK

SEQ ID NO: 1580 - protein, 1117 aa, unidentified
  REGION 1..1117: note = Description of Unknown: uncultivated organism with predicted taxonomy: Firmicutes
  REGION 1..1117: note = MG21-70 effector
MKKRKKKKKDKKDCHYTLGLDIGIASIGWAVLGNDEDGKPNRIIDLGVRIFDKAEVENTGESLAAPRRDARSARRRLRRHRHRLERIRYLLVQQGVLTQEEMTHLYDKNDMVSPYQLRTEGLDRLLNAREFSKVLIHLAQRRGYQSNSTAEEAKNEKENGIIKSAILENQQRMERGGYRTIGEMMYRDAAFWETINGIRYHCTRNKAGDYRFTVDRASILSEVSILFEAQRRLGSPWASVEMEDAYTAILSSQRSFDEGPGNDSHGNESPFRKAMSHNVGNCTLIPTELRAARADYTAEYFKLLQDLNHMRLVDNSGSHPLTQQQRAILEEMAFRSANLTYGQLRKKLGLSDEVRFAGLYYGQDTIEKAEKRKWAQMQSYHKIRTALDKVSKDAIQTLTQDQLDAIGEILAGGVSDAKRINSFCLEGIPEEYHKALLPLSISKRAKLSIAAMRKLIPFLQQGMRYDEACKAAGLDFHGADGKVEKLSDFLNEITNPVVRRAVSQTIKVVNAVVRIYGKPDAVRIELAREMSHSFDERNKMKKRQEDGWRKNEQVKAQILETKTGNRVTGLDIVKFKLYQEQKGFCPYSGVEIKKERLYEPGYAEVDHIIPYSRCFDDSYSNKVLVLAEENRQKGNRTPYEYFGADEQRWHEFSARVRASVRDFKKRQKLLNTSFGEEQGKDFIQRNLNDTQHITRVVYNYLRNNLEFADSAYAKAPVRAVNGAVTAMLRGRWGIEKMRGDGDLHHCKDAVVIAATSDSMIKDLTKYYQEEEQLFMGKTNFVDPATGEVLTRKEFQQRFAPKFPQPWPRFREELEARLDPTNPKEALMALNLSTYEFDPEEEIPPVFVSHMPKHTVTGAAHKETIRGKTETGTVVKTALTSLKLDKNGEIDGYYSPQTDPRIYQALVERLRQFNGKGEKAFAEPFYKPKKDGTPGPRVDKVKIERKSSLSVSTGRGVADNGRMVRMDVFRVPNERKPDDSYYFVPIYVADTKKGILPSKAVVAHKSPENWKQMKPEHFLFSLFKGDLIYVENSKGISLALAKEAVGEKTIQVKSGLFYFCGADISDGSIKIETHDRCYYKKSLGLKELDTVEKRQVEVLGEVRKVKLPEKRLEFRGRK

SEQ ID NO: 1581 - protein, 1107 aa, unidentified; identical to SEQ ID NO: 1534
  REGION 1..1107: note = Description of Unknown: uncultivated organism with predicted taxonomy: Clostridiales
  REGION 1..1107: note = MG21-71 effector

SEQ ID NO: 1582 - protein, 977 aa, unidentified
  REGION 1..977: note = Description of Unknown: uncultivated organism
  REGION 1..977: note = MG21-72 effector
VLIHLAQRRGYQSNSTAEEAKNEKENGIIKSAILENQQRMERGGYRTIGEMMYRDAAFWETINGIRYHCTRNKAGDYRFTVDRASILSEVSILFEAQRRLGSPWASVEMEDAYTAILSGQRSFDEGPGNDSHGNESPFRKAMSHNVGNCTLIPTELRAARADYTAEYFKLLQDLNHMRLVDNSGSHPLTQQQRAILEEMAFRSANLTYGQLRKKLGLSDEVRFAGLYYGEDTIEKAEKRKWPQMQSYHKIRTALDKVSKNAIRTLTQDQLDAIGEILAGGVSDAKRINSFCLEGIPEEYHKALLPLSISKRAKLSIAAMRKLIPFLQQGMRYDEACKAAGLDFHGADGKVEKLSDFLNEITNPVVRRAVSQTIKVVKAVVDTYSKREEMKLDAVRIELAREMHHSIKERNRMKKRQEENREKNEQVKAQILETKPGTRVTGLDIVKFKLYQEQKGFCPYSGVEIKKERLYEPGYAEVDHIIPYSRCFDDSYSNKVLVLAEENRQKGNRTPYEYFGADEQRWHEFSARVRASVRDFKKRQKLLNTSFGEEQGKDFIQRNLNDTQHITRVVYNYLRNNLEFADSAYAKAPVQAVNGAVTAMLRGRWGIEKMRGDGDLHHCKDAVVIAATSDSMIKDLTKYYQEEEQLFMGKTNFVDPATGEVLTRKEFQQRFAPKFPQPWPRFREELEARLDPTNPKEALMALNLSTYEFDPEEEIPPVFVSHMPKHTVTGAAHKETIRGKTETGTVVKTALTSLKLDKNGEIDGYYNPQTDPRLYQALVERLRQFDGEGKKAFAEPFYKPKKDGTPGPRVDKVKIAEKASLSVSTGRGVADNGEMIRMDVFRVPNERKPDDSYYFVPIYVADTKKGILPWKQMKPEHFLFSIFKGDLIYVESKKEISLALAKEAVGEKTIQVKSGLFYFCGANISNGSIEIETHDRRYGKEGLGIKKLKVFEKRQVEVLGEVKKVKLPEKRLEFRGRK

SEQ ID NO: 1583 - protein, 1100 aa, unidentified
  REGION 1..1100: note = Description of Unknown: uncultivated organism with predicted taxonomy: Clostridiales
  REGION 1..1100: note = MG21-73 effector
MSEFHYALGLDIGIGSVGWAVLRNQPNGEPDRIQDLGVRIFDKAEQPKTGASLAAPRRDARSARRRLRRHRHRLERIRYLMEQRGMMSVSDIQAMYAAGGFQKSPYQLRAEALDRPLSKEEAVRVLIHLAQRRGYKSNSTAEAAKDEKETGKVKTAIEENRRCMAEHGYRTVGEMMYRDERFWQSNPDGTRYQQTRNKTDDYRFTVERSAIVDEAKQIFAAQRKLGADWSSEDLEAAYLSILEGQRSFDEGPGGESPFRGGIGDKVGFCTFEPDQQRAAKATYTFEYFKLLQDLNRMRLTGMGMPPEPLDDEQREVLKSAALRSASLSYGQIRKKLNLDDDVFFNDLYYGEKTKEEAEKRKWPQMQSYHKMRTALDKVGKDTIGTLTEEQLNAIATILTECKSDAKRIASLRMAGIPVQFDEALLPLSFSKYGSLSVQAMQKLIPLLEQGMRYDEACTQIYGDHRGLHSEQRKNRLSLTDMDEITNPVVRRAVSQTIKVINAIVRTYGPPDVVRIELAREMSRNFDERRKAEKRQDENRAANERAKEQIAEYKGDHATGLDIVKFKLYQEQDGVCLYSGKNLDPSRLFEPGYADVDHIVPYSRCFDDSYQNKVLVLASENRQKGNLLPYEYFGYDEVRWHEYEVRVENLIRNYRKRQKLLKRQLSEEESAGFIDRNLKDTQYITRSIYNLIRNNLVFAESNYKKRPVQTVNGAVTSMLRNRWGVQKIREDGDLHHCLDAAVIAATTPGLVQRLTEHSKRRETLEKAPAGYVDPATGELLELPQEARRDLFPKPWERFRQELEARLDPIDPRHQIDLLKLETYESDEEIKPVFASRMPNHKVTGAAHAETIRSSKGGDGFTVTKTPLTNLKLNKFGEIEGYYNPASDTLLYNALLSRLKDFGGDGAKAFAQPFYKPKKDGTPGPRVDKVKICEKATIGLPVRNGIAANGSMIRIDVFYVEDDGYYFVPIYVADTKREKLPNKAAVAMKPYNLWKEMKDENFVFSLYPGDLVRIQSRKGIKLNLAKGGTGEKEIVRQDGMYYYRSAGIAVAQIFVETHDRRYLQPSLGIKTLQSIEKYQVDVLGNYQKVDLPEKRMTFSKEG

SEQ ID NO: 1584 - protein, 1097 aa, unidentified
  REGION 1..1097: note = Description of Unknown: uncultivated organism with predicted taxonomy: Firmicutes
  REGION 1..1097: note = MG21-74 effector
MNMESKHYTLGLDIGIASIGWAVLNNNVDGTPDRIIDLGVRLFESAEVQNTGESLAAPRRNARSARRRLRRHRHRLERIRYLLVQQGVLTQEEMTHLYDKCSMLSPYQLRTEGLDRILNAQEFSRVLIHLGQRRGYLSNSTAEEAKNEKENGVIKSAILENQQRMEHGGYRTIGEMMYRDAAFWETINGIRYHCTRNKAGNYHFTVDRASILSEVHILFEAQRRLGSPWASQETEDTYAAILSSQRSFDEGPGGDSPFRKGISERVGNCTLIPTELRAAKADETFEYFKLLQDLNHMRLVDSNGSHPLTQQQRALLEAAAFRTANLTYGQLRKKLGISDEVRFAGLYYGQDSIEKAEKRKWAQMQSYHKIRTALDKVSKDAISMLTQDQLDAIGEIVTAYKADAARIEHLQAAGIPKEYHNALLSLSFSKYGKLSCCAMRKLIPFLQQGMRYDEACKAAGMNFHGANGNVEKLSDFLDEITNPVVRRAVSQTIKVVNAVVRTYGNPDAVRIELAREMSHSFDERNKIKKRQEDGRRKNEQIKAQILETKAGHRVTGLDIVKFKLFQEQDGVCPYSGKALDVQRLYEPGYADVDHIIPYSRCFDDSYSNKVLVLASENRQKGNCTPYEYFGADERRWHEFSVRVGASVRDFKKRQKLLNTSFGEEQGKEFIQRNLNDTQHITRVVYNYLRNNLSFADSTYANAPVQAVSGTVTATLRGRWGIEKMREDGDLHHCKDAVVIAATSPSMIQRLSNYYKEEERLFMGKTHFVDPETGEVLTRKAFQQRFAPKFPQPWDRFREELEARLDPVNPMDAVMALHLSTYEPDEDITPVFVSHMPKHTVTGAAHEETIRGKTETGTVAKTALTALKLDKHGEIEGYYNPQTDPRLYQALVERLKQFGGDGAKAFVEPFYKPKKDGTPGPRVDKVKIAKKASLSVSTGRGVADNGNMVRIDVFHVPDDGYYFVPIYVADTKKAALPSKAVVAHKLPEAWKQMKPEHFLFSLFKGDLIQLENRKGISLLLTKEAIGEKTIQVKSGLFYFCGADISNGSIEIETHDRRYGKKSLGLKTLTAIEKYQVDVLGNVNKVKLPEKRLEFRGRK

SEQ ID NO: 1585 - protein, 1127 aa, unidentified
  REGION 1..1127: note = Description of Unknown: uncultivated organism with predicted taxonomy: Clostridiales
  REGION 1..1127: note = MG21-75 effector
MNYRIGLDLGIASVGWAVLEDDYTGKPKRIVKLGARIFDSAENPKDGSSLALNRRETRETRRRLRRRNHRIKRTKNLLEKYNIMTTKEIENMYATYKFQFNPYELRVKGLDEKLTNSELSRILISFVKRRGYKSNSKSEETNDKEMGKLLTATKENELLMKEKGYRTVGEMYLKDEKFKMQMPDGRVLLKVRNTTDDYKNTPLRKLLLDETKQILNKQKELNVNITSDFIDEYINIFTSQRNFDDGPGQPSIYAGNQIEKMLGKCTFEKEENRAAKATYTFEYFKLLQDINHIKIEKHIINETGKKEVLKRPLTEDERNIIINLAKAKVTLTYASLRTALNLEGNERFNMIHYKATNVFSDEINKKAEKERKFKEFESYHKMRVAMDKAEKNYILKLSTDELDVIGTVLTLYKNDNKRIEKLAQLNLPENIINEILKLSFSKVGNLSIKAMKKIIPYLEKGYTYDKAVNEVYEDFRGVVNTEKKKKIALRDLEQELSNPVVKRSVSQAIKVLNAITRTYGEPDVINVELARELSKNFADRQNIKKNQENNMQSNEKAKEDILKLGKSNPTGQDIVKYKLWKEQDGICVYSGKRISIEDLFTEAVDVDHIIPYSMCFDDTYKNKVLVLSSENRQKGNRIPYQYMQEKGRDLDEYEIRVNNIIKNYSKKQRLLKQKFTREDANEWKDRNICDTQYISRLMYNLIKNHVQFSNNENFERKVFTVNGQITSHIRKRLGINKIRENGDEHHAIDAAIIATVSQGMIQRITKYYQYIDGRYEKNSGEYIDIETGEIITKEQYEAENGSNFPEPWPKFRKELDIRTTCKTKARMEECLLTEKIFYDDYDDVKPIFISRMPRRKITGQAHLDTIRGLRKSDEGLKTLTKTELTKLKLDKNGEIERYPESQKQDDKLLYNALVEQLRKFGGNGTEAFKKPFYKPKSDGTPGPLVKKVKLEDKTTLAVELNNGKAIAANGDMIRIDVFKVEGEGYYFVPIYVSDTIKNKLPNKASVASKTYAEWKEMQDKDFIFSLYPRDLFYVKSKNKIKLTSINKQDKESLDTNELFAYYVNADISTAAIACINHNGEYERRGLGIKRLQEFKKYEVDVLGNYHEVKLPEKRQDFSNLKKGGSLK

SEQ ID NO: 1586 - protein, 1100 aa, unidentified
  REGION 1..1100: note = Description of Unknown: uncultivated organism with predicted taxonomy: Clostridiales bacterium 42_27
  REGION 1..1100: note = MG21-76 effector
MSEFHYALGLDIGIGSVGWAVLRNQPNGEPDRIQDLGVRIFDKAEQPKTGASLAAPRRDARSARRRLRRHRHRLERIRYLMEQRGIMPVADIQAMYAAGGFPKSPYQLRAEALDRPLTKEEAVRVLIHLAQRRGYKSNSTAEAAKDEKETGKVKTAIEENRRCMAEYGYRTVGEMMYRDERFWQKHPDGTHYHQTRNKAEEYRFTVERAAIVDEVRQIFAAQRRLGTVWMDEDMETAYLSILESQRSFDEGPGGDSPFSGGIGERVGACTFEPDEKRAAKATYTFEYFKLLQDLSRMRLTGMGMPPEPLDAAQREALKSAALRSASLSYGQIRKKLNLDDDVFFHGLYYGEKTKEEAEKRKWPQMQSYHKMRTALDKVGKGAIGTLTEEQLNAVATILTECKSDAKRIAALREAGIPPQFDEALLPLSFSKYGSLSVQAMQKLIPLLEEGLRYDEACTRVYGDHRGLHPEQRKNRLSLTDMDEITNPVVRRAVSQTIKVINAVVRTYGPPDVVRIELAREMSRTFDERRKMEKRQDDNRAANERAKDQIAEYKGDHATGLDIVKFKLYQEQDGVCLYSGQNLDIARLFEPGYADVDHIIPYSRCFDDSYQNKVLVLASENRQKGNRLPYEYFGQDEARWHGYEVRVENLIHNYRKRQKLLKRRLTEEESSGFIDRNLKDTQYITRAVYNLIRDHLAFAESNYRKKPVQAVNGAVTAMLRGRWGVQKIREDGDLHHCLDAAVIAATTPGLVQRLTAYNKHRETWERSPAGYVDPATGEMLELPQEARRDPFPKPWERFRQELEARLDPIDPRHQIDLLKLETYESDEEIKPVFVSRMPNHKVTGAAHAETIRSSKGGYGFTVTKTPLTNLKLNKFGEIEGYYNPASDTLLYDALLARLKDFGGDGAKAFAQPFYKPKKDGSPGPRVDKVKICEKATVGLPVRDGIAANGSMVRIDVFYVEGDGYYFVPIYVADTKKESLPNKAAVAMKPYNLWKKMKDENFVFSLYPGDLVRIQSRKGIKLNLAKGGTGEKEIVRQEGMYYYRSAGIAVAQISVETHDRRYLQPSLGIKTLQSIEKYQVDVLGNYYKVDLPEKRMTFSKEG

SEQ ID NO: 1587 - protein, 1098 aa, unidentified
  REGION 1..1098: note = Description of Unknown: uncultivated organism with predicted taxonomy: Clostridiales
  REGION 1..1098: note = MG21-77 effector
LSLRYTLGLDIGIASVGWAVLEDNIDGEPIKIERLGVRIFDKAEQPKTGASLAEPRREARGQRRTIRRRRHRKDRIKQLIQQNGIMTRVEMAEMFEHSQFETSVYELRVQALERALTKQEFVRVLIHLAQRRGYKSNSKSEEAKDKENGKVKIAISENKQCMEENGYRTIGEMLLKDDRFWECNPDGTKIFVPHNHPDDYRTTVERSMVEDEIRLIFSRQHALGVSYATSEFEEAYLEIWGSQRNFDEGPGAKSPYGGNMIEKMLGHCTFEKDEPRAAKGSYSAEYFRLLQDVNHLRLVKNNGESNALTAEQKQIYIDLVMKSATASYAQLRKKLELSNDVSFNMLRYGSDEIGKVERKKLGHMKFYHEMRKALNTVQKDAISTVSWEQRDEIARILLCYKSDDKRKAQLEKLDIPHEFIPALLTLSTSKTAHLSAKALRKLIPYLEKDMTYAEACKEVYGEHKSSITKKNKLSLFDIEPINNPVVRRAVSQTIRVINAVVREYGAPEVVRVELAREMGKPYDVRTQITKKQEANAKKNEEVKQKIREIKGLEPTGQDIVKFKLFQDQNGVCLYSGQSLDITRLFEAGYVDVDHIIPYSISFDDSYTNKVLVRSPENRQKGNRIPADYFKSDPARWQRFETLVNTRVHNWKKKRNLLTQALSEEQKNGFKQRNLVDTQYIARVIYNLINDHLQFAETGKYDKKRRTQAVNGAITAHVRKRLGIQKIREDGDLHHAVDAAVVACVSPGMIQKITQYTKHRECIRKTKEGYLDTETGELMTREAYDAKYSPRFPAPWERFRQELEARLSDNPAEEIARLHLATYDSEEEIKQVFVSRKQTHKISGAAHEATIRSAKKPGGSISKKPLTSLSLNKKTGEIEKYYAPESDRLLYEALKKRLKEFDGNAEKAFAEPFYKPKRDGTRGPLVKKVKIYEKKTITVPVGGGNADNGSMIRVDVFYIEGDGYYYVPIYITDVVKDELPNRAVVTQKSHGEWKVMDDKDFLFSMYPHDLIYVERKEAFTLDAPKNSSLDPTISKTKGFFYYRSFDSGTGSFKIYTHDRSYSKKSLGGKTLSCLKKYTVDVLGNYSEVSLPEKRKPLRG

SEQ ID NO: 1588 - protein, 1100 aa, unidentified
  REGION 1..1100: note = Description of Unknown: uncultivated organism with predicted taxonomy: Clostridiales bacterium 42_27
  REGION 1..1100: note = MG21-78 effector
MSEFHYALGLDIGIGSVGWAVLRNQPNGEPDRIQDLGVRIFDKAEQPKTGASLAAPRRDARSARRRLRRHRHRLERIRYLMEQRGIMPVADIQAMYAAGGFQKSPYQLRAEALDRPLTKEEAVRVLIHLAQRRGYKSNSTAEAAKDEKETGKVKTAIEENRRCMAEYGYRTVGEMMYRDERFWQKHPDGTHYHQTRNKAEEYRFTVERAAIVDEVRQIFAAQRRLGTVWMDEDMETAYLSILESQRSFDEGPGGDSPFSGGIGERVGACTFEPDEKRAAKATYTFEYFKLLQDLSRMRLTGMGMPPEPLDAAQREVLKSAALRSASLSYGQIRKKLNLDDDVFFHGLYYGEKTKEEAEKRKWPQMQSYHKMRTALDKVGKGAIGTLTEEQLNAVATILTECKSDAKRIAALREAGIPPQFDEALLPLSFSKYGSLSVQAMQKLIPLLEEGLRYDEACTRVYGDHRGLHPEQRKNRLSLTDMDEITNPVVRRAVSQTIKVINAVVRTYGPPDVVRIELAREMSRTFDERRKMEKRQDDNRAANERAKDQIAEYKGDHATGLDIVKFKLYQEQDGVCLYSGQNLDIARLFEPGYADVDHIIPYSRCFDDSYQNKVLVLASENRQKGNRLPYEYFGQDEARWHGYEVRVENLIHNYRKRQKLLKRRLTEEESSGFIDRNLKDTQYITRAVYNLIRDHLAFAESNYRKKPVQAVNGAVTAMLRGRWGVQKIREDGDLHHCLDAAVIAATTPGLVQRLTAYNKHRETWERSPAGYVDPATGEMLELPQEARRDPFPKPWERFRQELEARLDPIDPRHQIDLLKLETYESDEEIKPVFVSRMPNHKVTGAAHAETIRSSKGGYGFTVTKTPLTNLKLNKFGEIEGYYNPASDTLLYDALLARLKDFGGDGAKAFAQPFYKPKKDGSPGPRVDKVKICEKATVGLPVRDGIAANGSMVRIDVFYVEGDGYYFVPIYVADTKKESLPNKAAVAMKPYNLWKKMKDENFVFSLYPGDLVRIQSRKGIKLNLAKGGTGEKEIVRQEGMYYYRSAGIAVAQISVETHDRRYLQPSLGIKTLQSIEKYQVDVLGNYYKVDLPEKRMTFSKEG

SEQ ID NO: 1589 - protein, 1100 aa, unidentified
  REGION 1..1100: note = Description of Unknown: uncultivated organism with predicted taxonomy: Clostridiales
  REGION 1..1100: note = MG21-79 effector
MSEFHYALGLDIGIGSVGWAVLRNQPNGEPDRIQDLGVRIFDKAEQPKTGASLAAPRRDARSARRRLRRHRHRLERIRYLMEQRGMMSVSDIQAMYAAGGFQKSPYQLRAEALDRPLSKEEAVRVLIHLAQRRGYKSNSTAEAAKDEKETGKVKTAIEENRRCMAEHGYRTVGEMMFRDERFWQKHPDGTRYHQTRNKAEDYRFTVERAAIVDEVRQIFAAQRRLGVVWMDEDMETAYLSVLESQRSFDEGPGGDSPFSGGIGERVGACTFEPDEKRAAKATYTFEYFKLLQDLNRMRLTGMGMPPEPLDDEQREVLKSAALRSASLSYGQIRKKLNLDDDVFFNNLYYGEKTKEEAEKRKWPQMQSYHKLRTALDKVGKGAIGTLTEEQLNAVATILTECKSDAKRIAALREAGIPPQFDEALLPLSFSKYGSLSVRAMQKLIPLLEEGLRYDEACTRVYGDHRGLRSGQRTNRLSLKDMEEITNPVVRRAVSQTIKVINAVVRTYGPPDVVRIELAREMSRTFDERRKMEKRQDDNRAANERAKDQISEYKGDHATGLDIVKFKLYREQDGVCLYSGQNLDIARLFEPGYADVDHIIPYSRCFDDSYQNKVLVLASENRQKGNRLPYEYFGQDEARWHGYEVRVENLIHNYRKRQKLLKRRLTEEESTGFIDRNLKDTQYITRTVYNLIRNHLAFAESAYRKKPVQAVNGAVTAMLRGRWGVQKIREDSDLHHCLDAAVIAATTPGLVQRLTAYNKHRETWERPPAGYVDPATGELIELPQEARRDPFPKPWERFRQELEARLDPIDPRHQIDLLKLETYESDEEIKPVFVSRMPNHKVTGAAHAETIRSSKGGDGFTVTKTPLTNLKLNKFGEIEGYYNPASDTLLYDALLARLKDFGGDGAKAFAQPFYKPKKDGSPGPRVDKVKIREKATVGLPVRDGIAANGSMVRIDVFYVEDDGYYFVPIYVADTKKESLPNKAVVAYKAYSEWKEMKDENFIFSLYPRDLVCIQSRKGIKLNLAKGGTGEKEIVRQEGMYYYRAAGITVGAIQIETHDRRYLQPSLGIKTLQSIEKYQVDVLGNYYKVDLPEKRMTFSKEG

SEQ ID NO: 1590 - protein, 1100 aa, unidentified
  REGION 1..1100: note = Description of Unknown: uncultivated organism with predicted taxonomy: Clostridiales
  REGION 1..1100: note = MG21-80 effector
MTLQSIRYTLGLDIGIASVGWAVLRNGLDGEPYKIENLGVRIFDKAEVPKTGASLAAPRREARSSRRVVRRRRHRKERIKYLIEQEGIMTQTEMMQLFQNSSFEKSVYEIRVEALDRLLTREEAVRLLIHFAQRRGYKSNSKAEEAKDNENGVIKQAISQNQQSMKEHGYRTFGEMLLMDDRFYYTQPDGARIFIPHNKASDYKVTAERGMLADELHMIFAAQRSLGSLWFSDPFEIAYMDIWSSQRSFDKGPGGDSPYSGNQVEKNWGKCTFEKDKLRAPKASYSAEYFRLLQDVNHLRIVSLDGASFPLNQEQRDTVVVAARKSSSLTYAQLRKKLKLSDDQYFNALYYGDKTTAEVEKKKFGHLQFYRQLRTALDKVEKGAADTLTWEQRDEIARILTVYKADDRRTDELQKAGIPEKYIDALLPLSPTKAMHLSVTAIKKIIPYLEAGMPYSDALSKAYGNQTNASTSSKKHKLSLNDIEEITNPVVRRAVSQSIKVINAIVRQYGAPERVRIELAREMGKNFKDRRMIETRQTDNAAKNERIKAQISEYKSDHITGQDIVKFKLFKEQDGICLYSGKSLDIARLFEPGYVDIDHIIPYSISFDDSYNNKVLVQSSENRQKGNRIPYAYFGQNSDRWEKYETLVNNTVRSYRKRKNLLLKSLSEAQIDGFKQRNLQDTQYLSKVVFRLIEDHLQFAKTAPGKKHTQPVNGAITAQVRKRLGIEKIREDGDLHHAMDAAVIACITPGMIQRITKYAQNHERFYATAKGYVDIKTGEVLTRAQYEAMDDIRFPEPWAGFRLELEARVSDHPQEAIAQLKLPHYENSEEIRPIFVSRMPNHKVTGAAHLETIRSKKGGAGSTVTKTALTELKLGKDGEIAGYCRKEDDPLLYEALKARLKAFGGDGKKAFAEPFHKPKHNGEPGPIVNKVKIQESATLTVPVNHGVAANGSMVRLDVFYVDGDGYYFVPIYTADIVKPKLPNRAVVAGKKASEWKMIDDNHFVFSLYPKDLLRIRSNKGIKLKAVNKNADLQEYSANDCLCYYVGFDIATGAFTVESHDRRLNRRGLGGKTLLSIEKYQVDVLGNYFPVALPEKRMKFR

SEQ ID NO: 1591 - protein, 1100 aa, unidentified
  REGION 1..1100: note = Description of Unknown: uncultivated organism with predicted taxonomy: Clostridiales
  REGION 1..1100: note = MG21-81 effector
MSDFHYALGLDIGIGSVGWAVLRNQPNGEPDRIQDLGVRIFDKAEQPKTGASLAAPRRDARSARRRLRRHRHRLERIRYLMEQHDIMPVSDIQAMYAAGGFEKSPYQLRAEALDRPLSKEELVRVLIHLAQRRGYRSNSTAEAAKNEKETGKVKSAIEENRACMEQHGYRTVGEMMFRDERFWQKHPDGTRCHQTRNKAEDYRFTVERTAIVDEAKQIFTAQRRFGAGWMDDGLEAAYLAVLESQRSFDEGPGGDSPFHGGIGERVGFCTFEPDEQRAAKATYTFEYFKLLQDLNHMRLAGNGTAPQPLNAQQREILKAAALQSASLSYGQIRKKLALDENVFFHHLYYGDKPKEEAEKRKWPQMQSYHKMRTALDKVGKGTINTLTETQLNAIATILTQYKSDARRIEALREAGIPAQFDDALLPLSFSKYGNLSVTAMQKLIPLLEQGMRYDEACTQIYGDHRGLHPEQRKNRLSLRDMREITNPVVRRAVSQTIKVVNAVVRTYGPPDVVRIELAREMSQNFEERRKTEKRQDENRTANEKAKEQIAEYKGDRATGLDIVKFKLYREQDGVCLYSGRNLDLSRLFEPGYVDVDHIIPYSRCFDDSYQNKVLVLASENRQKGNRLPYEYFGQDETRWHEYEVRVENLIRNYRKRQKLLKKRLTEEESAGFIDRNLKDTQYITRSIYNLLRDNLAFAESDYRKKPVQTVNGAVTSMLRGRWGVQKIREDGDLHHCMDAAVIAAASPGLVQRLTEYSKRREAFEEVSRGYVDPATGELVELPEQLRRDPFPKPWERFRQELEARLDPIDPRHQIDLLKLATYESDEKIRPVFVSRMPNHKVTGAAHAETIRSSKMGDGYTVTKTPLANLKLNKFGEIEGYYNPASDTLLYDALLARLKDFGGDGAKAFAEPFYKPKKDGTPGPRVDKVKICEKATTGLPVRDGIAANGSMVRIDVFYVEDDGYYFVPIYVADTKKAELPNKAVVAYKAYSDWKEMIDENFLFSLYPGDLVRIQSRKGIKLNIAKGGTGEKEIVRQDGMYYYQGANIATGAIALATHDRRYLQSGLGLKTLQSIEKYQVDVLGNYYKVDLPEKRMKFSEEG

SEQ ID NO: 1592 - protein, 1100 aa, unidentified
  REGION 1..1100: note = Description of Unknown: uncultivated organism with predicted taxonomy: Clostridiales bacterium 42_27
  REGION 1..1100: note = MG21-82 effector
MSEFHYALGLDIGIGSVGWAVLRNQPNGEPDRIQDLGVRIFDKAEQPKTGASLAAPRRDARSARRRLRRHRHRLERIRYLMEQHGIMPVADIQAMYAASGFQKSPYQLRAEALDRPLTKEEAVRVLIHLAQRRGYKSNSTAEAAKDEKETGKVKTAIEENRRCMAEHSYRTVGEMMYRDERFWQKHPDGTRYHQTRNKAEDYRFTVERAAIVDEVRQIFAAQRRLGTVWMDEDMETAYLSILESQRSFDEGPGGDSPFSGGIGERVGACTFEPDEKRAAKATYTFEYFKLLQDLNRMRLTGMGMPPEPLDDEQREVLKSAALRSASLSYGQIRKKLNLDDDVFFHGLYYGEKTKEEAEKRKWPQMQSYHKMRTALDKVGKGAIGTLTEEQLNAVATILTECKSDAKRIAALREAGIPPQFDEALLPLSFSKYGSLSVQAMQKLIPLLEEGLRYDEACTRVYGDHRGLHPEQRKNRLSLTDMDEITNPVVRRAVSQTIKVINAVVRTYGPPDVVRIELAREMSRTFDERRKMEKRQDDNRAANERAKDQIAEYKGDHATGLDIVKFKLYQEQDGVCLYSGQNLDIARLFEPGYADVDHIIPYSRCFDDSYQNKVLVLASENRQKGNRLPYEYFGQDEARWHGYEVRVENLIHNYRKRQKLLKRRLTEEESSGFIDRNLKDTQYITRAVYNLIRDHLAFAESNYRKKPVQAVNGAVTAMLRGRWGVQKIREDGDLHHCLDAAVIAATTPGLVQRLTAYNKHRETWERSPAGYVDPATGEMLELPQEARRDPFPKPWERFRQELEARLDPIDPRHQIDLLKLETYESDEEIKPVFVSRMPNHKVTGAAHAETIRSSKGGYGFTVTKTPLTNLKLNKFGEIEGYYNPASDTLLYDALLARLKDFGGDGAKAFAQPFYKPKKDGSPGPRVDKVKICEKATVGLPVRDGIAANGSMVRIDVFYVEGDGYYFVPIYVADTKKESLPNKAAVAMKPYNLWKKMKDENFVFSLYPGDLVRIQSRKGIKLNLAKGGTGEKEIVRQEGMYYYRSAGIAVAQISVETHDRRYLQPSLGIKTLQSIEKYQVDVLGNYYKVDLPEKRMTFSKEG

SEQ ID NO: 1593 - protein, 878 aa, unidentified
  REGION 1..878: note = Description of Unknown: uncultivated organism with predicted taxonomy: Clostridiales bacterium 42_27
  REGION 1..878: note = MG21-83 effector
MSEFHYALGLDIGIGSVGWAVLRNQPNGEPDRIQDLGVRIFDKAEQPKTGASLAAPRRDARSARRRLRRHRHRLERIRYLMEQRGIMPVADIQAMYAAGGFPKSPYQLRAEALDRPLTKEEAVRVLIHLAQRRGYKSNSTAEAAKDEKETGKVKTAIEENRRCMAEYGYRTVGEMMYRDERFWQKHPDGTHYHQTRNKAEDYQFTVERAAIVDEVRQIFAAQRRLGTVWMDEDMETAYLSILESQRSFDEGPGGDSPFSGGIGERVGACTFEPDEKRAAKATYTFEYFKLLQDLSRMRLTGMGMPPEPLDAAQREALKSAALRSASLSYGQIRKKLNLDDDVFFHGLYYGEKTKEEAEKRKWPQMQSYHKMRTALDKVGKGAIGTLTEEQLNAVATILTECKSDAKRIAALREAGIPPQFDEALLPLSFSKYGSLSVQAMQKLIPLLEEGLRYDEACTRVYGDHRGLHPEQRKNRLSLTDMDEITNPVVRRAVSQTIKVINAVVRTYGPPDVVRIELAREMSRTFDERRKMEKRQDDNRAANERAKDQIAEYKGDHATGLDIVKFKLYQEQDGVCLYSGQNLDIARLFEPGYADVDHIIPYSRCFDDSYQNKVLVLASENRQKGNRLPYEYFGQDEARWHGYEVRVENLIHNYRKRQKLLKRRLTEEESSGFIDRNLKDTQYITRAVYNLIRDHLAFAESNYRKKPVQAVNGAVTAMLRGRWGVQKIREDGDLHHCLDAAVIAATTPGLVQRLTAYNKHRETWERSPAGYVDPATGEMLELPQEARRDPFPKPWERFRQELEARLDPIDPRHQIDLLKLETYESDEEIKPVFVSRMPNHKVTGAAHAETIRSSKGGYGFTVTKTPLTNLKLNKFGEIE

SEQ ID NO: 1594 - protein, 1100 aa, unidentified
  REGION 1..1100: note = Description of Unknown: uncultivated organism with predicted taxonomy: Clostridiales
  REGION 1..1100: note = MG21-84 effector
MSEFHYALGLDIGIGSVGWAVLRNQPNGEPDRIQDLGVRIFDKAEQPKTGASLAAPRRDARSARRRLRRHRHRLERIRYMMEQRGMMSVSDIQAMYAAGGFQKSPYQLRAEALDRPLSKEEAVRVLIHLAQRRGYKSNSTAEAAKDEKETGKVKTAIEENRRCMAEHGYRTVGEMMYRDERFWQSNPDGTRYQQTRNKTDDYRFTVERSAIVDEAKQIFAAQRKLGADWSSEDLEAAYLSILEGQRSFDEGPGGESPFRGGIGDKVGFCTFEPDQQRAAKATYTFEYFKLLQDLNRMRLTGMGMPPEPLDDEQREVLKSAALRSASLSYGQIRKKLNLDDDVFFNDLYYGEKTKEEAEKRKWPQMQSYHKMRTALDKVGKDTIGTLSEEQLNAIATILTECKSDAKRIAALRMAGIPVQFDEALLPLSFSKYGSLSVQAMQKLIPLLEQGMRYDEACTQIYGDHRGLHSEQRKNRLSLTDMDEITNPVVRRAVSQTIKVINAIVRTYGPPDVVRIELAREMSRNFDERRKAEKRQDENRAANERAKEQIAEYKGDHATGLDIVKFKLYQEQDGVCLYSGKNLDPSRLFEPGYADVDHIVPYSRCFDDSYQNKVLVLASENRQKGNRLPYEYFGYDEVRWHEYEVRVENLIRNYRKRQKLLKRQLSEEESAGFIDRNLKDTQYITRSIYNLIRNNLVFAESNYKKRPVQTVNGAVTSMLRNRWGVQKIREDGDLHHCLDAAVIAATTPGLVQRLTEHSKRRETLEKAPAGYVDPATGELLELPQEARRDLFPKPWERFRQELEARLDPIDPRHQIDLLKLSTYESDEEIKPVFASRMPNHKVTGAAHAETIRSSKGGDGFTVTKTPLTNLKLNKFGEIEGYYNPASDTLLYNALLSRLKDFGGDGAKAFAQPFYKPKKDGTPGPRVDKVKICEKATIGLPVRNGIAANGSMIRIDVFYVEDDGYYFVPIYVADTKREKLPNKAAVAMKPYNLWKEMKDENFVFSLYPGDLVRIQSRKGIKLNLAKGGTGEKEIVRQDGMYYYRSAGIAVAQIFVETHDRRYLQPSLGIKTLQSIEKYQVDVLGNYQKVDLPEKRMTFSKEG

SEQ ID NO: 1595 - protein, 1138 aa, unidentified
  REGION 1..1138: note = Description of Unknown: uncultivated organism with predicted taxonomy: Clostridiales
  REGION 1..1138: note = MG21-85 effector
LSLRYTLGLDIGIASVGWAVLKNDINGVPIKIEDLGAVAFSAAEPTGKVQKKKSGSKTPAPTLASNLRKIRCPRRTIRRKRHRKDRIKQLIQQNGIMTRVEMAEMFEHSQFETSVYELRVQALERALTKQEFVRVLIHLAQRRGYKSNSESEEAKDKENGKVKIAISENKQCMEKNGYRTIGEMLLNDDRFWEDNHDGTKIFVPHNHPDDYRTTVERSMVEDEIRLIFSRQRALGVPYATSEFEEAYLKIWGGQRNFDDGPGYEIPPKDDGTGGKYSRYGGNMIEKMLGHCTFEKDEPRAAKGSYSAEYFRLLQDVNHLRLVKNNGESSALTAEQKQIYIDLVMESEAASYEEAASYEELREKLGLSNDILFNMLRYGSDEIGKVERKKLGHMKFYHEMRKALNMVQKDAISTVSWEQRDEIARILLCYKSDDKRKAQLEKLDIPQEFILKLLTLSTSKTAHLSVKALRKLIPYLEEGMTYAEACKEVYGEQKISVTKKNKLSLFDIEPINNPVVRRAVAKTIRVINAVVRKYGPPEVVRVELAREMGKSKADRDKIDAEQKANAKRNEELRQQIKKIKGAEPTGQDIVKFKLFQDQNGVCLYSGQNLDITRLFEAGYVEIDHIIPYSISLDNSYANKVLVLKEENQNKGRRTPYEYFGADSKRWQRFETLVNTQVHNWKKKRNLLTQALSEEQKNGFKQRNLVDTQYIARVIYNLINDHLQFAETGKYDKKRRTQAVNGAITAHVRKRLGIQKIREDGDLHHAADAAVVACVSPSMIQKITQYTKHRECIRETPKGYLDTETGELMTREAYDAKYPPRFPAPWERFRQELEARLSDNPAEEIARLHLATYDSEEEIKPVFVSRKPERKTTGAAHKDTIYRKADGGYIDKVPLTKLTLDKKTGEIEKYYAPESDRLLYEALKKRLKEFDGNAKEAFAEPFYKPKRDGTSGPLVKKVKLYEKYNNTVEVKRGDARASNKHIGCARNDSNSMIRVDVFYIEGDGYYYVPIYITDVVKDELPNRAVVTQKSHGEWKVMDDKDFLFSMYPHDLIYVERKEAFTLDALKNSSLDPTISKTKGFFYYRSFDSGTGSFKIYTHDSSYSKKSLGGKTLSCLKKYTVDILGNYSEVSLPEKRKPLRG

SEQ ID NO: 1596 - protein, 1100 aa, unidentified
  REGION 1..1100: note = Description of Unknown: uncultivated organism with predicted taxonomy: Firmicutes
  REGION 1..1100: note = MG21-86 effector
MSDFHYALGLDIGIGSVGWAVLRNRPDGEPDRIQDLGVRIFDKAEQPKTGASLAAPRRDARSARRRLRRHRHRLERIRYLMEQHGIMPVSDIQAMYAAGGFEKSPYQLRAEALDRPLSREELVRVLIHLAQRRGYRSNSTAEAAKNEKETGKVKSAIEENRACMEQHGYRTVGEMMLRDERFWQKHPDGTRCHQTRNKAEDYRFTVERTAIVDEAKQIFTAQRRFGADWMDDGLEAAYLAVLESQRSFDEGPGGDSPFHGGIGERVGFCTFEPDEQRAAKATYTFEYFKLLQDLNHMRLAGNGTAPQPLNAQQREILKAAALQSASLSYGQIRKKLALDENVFFNHLYYGDKPKEEAEKRKWPQMQSYHKMRTALDKVGKGTINTLTETQLNAIATILTQYKSDARRIEALREAGIPAQFDDALLPLSFSKYGNLSVTAMQKLIPLLEQGMRYDEACTQIYGDHRGLHPEQRKNRLSLRDMREITNPVVRRAVSQTIKVVNAVVRTYGPPDVVRIELAREMSQNFEERRKTEKRQDENRTANEKAKEQIAEYKGDRATGLDIVKFKLYREQDGVCLYSGRNLDLSRLFEPGYVDVDHIIPYSRCFDDSYQNKVLVLASENRQKGNRLPYEYFGQDETRWHEYEVRVENLIRNYRKRQKLLKKRLTEEESAGFIDRNLKDTQYITRSIYNLLRDNLAFAESDYRKKPVQTVNGAVTSMLRGRWGVQKIREDGDLHHCMDAAVIAAASPGLVQRLTEYSKRREAFEEVSRGYVDPATGELVELPEQLRRDPFPKPWERFRQELEARLDPIDPRHQIDLLKLATYESDEKIRPVFVSRMPNHKVTGAAHAETIRSSKMGDGYTVTKTPLANLKLNKFGEIEGYYNPASDTLLYDALLARLKDFGGDGAKAFAQPFYKPKKDGTPGPRVDKVKICEKATVGLPVRDGIAANGSMVRIDVFYVEDDGYYFVPIYVADTKKAELPNKAVVAYKAYSDWKEMIDENFLFSLYPGDLVRIQSRKGIKLNIAKGGTGEKEIVRQDGMYYYQGANIATGAIALATHDRRYLQSGLGLKTLQSIEKYQVDVLGNYYKVDLPEKRMKFSEEG

SEQ ID NO: 1597 - protein, 980 aa, unidentified
  REGION 1..980: note = Description of Unknown: uncultivated organism with predicted taxonomy: Clostridiales
  REGION 1..980: note = MG21-87 effector
EAVRVLIHLAQRRGYKSNSTAEAAKDEKETGKVKTAIEENRRCMAEHDYRTVGEMMYRDERFWQSNPDGTRYQQTRNKTDDYRFTVERSAIVDEAKQIFAAQRKLGADWSSEDLEAAYLSILEGQRSFDEGPGGESPFRGGIGDKVGFCTFEPDQQRAAKATYTFEYFKLLQDLNHMRLAGRGMSPQPLNAQQREILKETALRSASLSYGQLRKKLALADDTFFSGLYYGDKSREEAEKRKWPQMQSYHKIRTALDKVGKGTISSLTEEQLNAIASILTQYKSDAKRIEALRMAGIPVQFDEALLPLSFSKYGSLSVQAMQKLIPLLEQGMRYDEACTQIYGDHRGLHSEQRKNRLSLTDMDEITNPVVRRAVSQTIKVINAIVRTYGPPDVVRIELAREMSRNFDERRKAEKRQDENRAANERAKEQIAEYKGDHATGLDIVKFKLYQEQDGVCLYSGKNLDPSRLFEPGYADVDHIVPYSRCFDDSYQNKVLVLASENRQKGNRLPYEYFGYDEVRWHEYEVRVENLIRNYRKRQKLLKRQLSEEESAEFIDRNLKDTQYITRTVYNLIRDHLAFAESAYRKKPVQAVNGAVTSMLRNRWGVQKIREDGDLHHCLDAAVIAATTPGLVQRLTAYSKHRETWERPPAGYVDPATGELIELPQEARRDPFPKPWERFRQELEARLDPIDPRHQIDLLKLETYESDEEIKPVFVSRMPNHKVTGAAHAETIRSSKGGDGFTVTKTPLTNLKLNKFGEIEGYYNPASDTLLYDALLARLKDFGGDGAKAFVQPFYKPKKDGTPGPRVDKVKICEKATVGLPVRDGIAANGSMVRIDVFYVEDDGYYFVPIYVADTKKESLPNKAVVAYKAYSEWKEMKDENFIFSLYPGDLVRIQSRKGIKLNLAKGGTGEKEIVRQEGMYYYRASGITVGAIQIETHDRRYLQPSLGIKTLQSIEKYQVDVLGNYYKVDLPEKRMTFSKEG

SEQ ID NO: 1598 - protein, 1098 aa, unidentified
  REGION 1..1098: note = Description of Unknown: uncultivated organism with predicted taxonomy: Clostridiales
  REGION 1..1098: note = MG21-88 effector
LSLRYTLGLDIGIASVGWAVLENNIDGEPIKIERLGVRIFDKAEQPKTGASLAEPRREARGQRRTIRRRRHRKDRIKQLIQQNGIMTRVEMAEMFEHSQFETSVYELRVQALERALTKQEFVRVLIHLAQRRGYKSNSKSEEAKDKENGKVKIAISENKQCMEENGYRTIGEMLLKDDRFWECNPDGTKIFVPHNHPDDYRTTVERSMVEDEIRLIFSRQHALGVSYATSEFEEAYLEIWGSQRNFDEGPGGKSPYGGNMIEKMLGHCTFEKDEPRAAKGSYSAEYFRLLQDVNHLRLVKNNGESCALTREQKQIYIDLVMKSAAASYAQLRKKLELSNDISFNMLRYGSDEIGKVERKKLGHMKFYHEMRKALNTVQKDAISTVSWEQRDEIARILLCYKSDDKRKAQLEKLDIPHEFIPALLTLSTSKTAHLSAKALRKLIPHLEKGMTYAEACKEVYGEQKSSITKKNKLSLFDIEPINNPVVRRAVSQTIRVINAVVREYGAPEVVRVELAREMGKPYDVRTQMTKKQEANAKRNEELRQQIKKIKGAEPTGQDIVKFKLFQDQNGVCLYSGQNLDITRLFEAGYVDVDHIIPYSISFDDSYTNKVLVRSPENRQKGNRIPADYFKSDPARWQRFETLVNTQVHNWKKKRNLLTQALSEEQKNGFKQRNLVDTQYIARVIYNLINDHLQFAETGKYDKKRRTQAVNGAITAHVRKRLGIQKIREDGDLHHAVDAAVVACVSPGMIQKITQYTKHRECIRKTKEGYLDTETGELMTREAYDAKYSPRFPAPWERFRQELEARLSDNPAEEIARLHLATYDSEEEIKPVFVSRKQTHKISGAAHEATIRSAKKPGGSISKKPLTSLSLNKKTGEIEGYYAPESDRLLYEALKKRLEEFDGNAEKAFAEPFYKPKRDGTRGPLVKKVKIYEKKTITVPVGGGNADNGSMIRVDVFYVEDDGYYYVPIYTADVIKGALPNRAVVAHKSHGEWKVMDDKDFLFSMYPNELLYIESRKGIKLKTKKGSSRQEEIIRKAGLYYFKWLNIAANALFIITHDNGYEQPSLGGKTLSCLKKYTVDALGNYSEVSLPEKRKPLRG

SEQ ID NO: 1599 - protein, 1100 aa, unidentified; identical to SEQ ID NO: 1544
  REGION 1..1100: note = Description of Unknown: uncultivated organism with predicted taxonomy: Clostridiales
  REGION 1..1100: note = MG21-89 effector

SEQ ID NO: 1600 - protein, 1100 aa, unidentified; identical to SEQ ID NO: 1578
  REGION 1..1100: note = Description of Unknown: uncultivated organism with predicted taxonomy: Clostridiales bacterium 42_27
  REGION 1..1100: note = MG21-90 effector

SEQ ID NO: 1601 - protein, 1100 aa, unidentified; identical to SEQ ID NO: 1578
  REGION 1..1100: note = Description of Unknown: uncultivated organism with predicted taxonomy: Clostridiales bacterium 42_27
  REGION 1..1100: note = MG21-91 effector

SEQ ID NO: 1602 - protein, 919 aa, unidentified
  REGION 1..919: note = Description of Unknown: uncultivated organism with predicted taxonomy: Ruminococcaceae bacterium TF06-43
  REGION 1..919: note = MG21-92 effector
MSEFHYALGLDIGIGSVGWAVLRNQPNGEPDRIQDLGVRIFDKAEQPKTGASLAAPRRDARSARRRLRRHRHRLERIRYLMEQRGMMSVSDIQAMYAAGGFQKSPYQLRAEALDRPLSKEEAVRVLIHLAQRRGYKSNSTAEAAKDEKETGKVKTAIEENRRCMAEHGYRTVGEMMYRDERFWQSNPDGTRYQQTRNKTDDYRFTVERSAIVDEAKQIFAAQRKLGADWSSEDLEAAYLSILEGQRSFDEGPGGESPFRGGIGDKVGFCTFEPDQQRAAKATYTFEYFKLLQDLNHMRLAGRGMSPQPLNAQQREILKETALRSASLSYGQLRKKLALADDTFFSGLYYGDKSREEAEKRKWPQMQSYHKIRTALDKVGKGTISSLTEEQLNAIASILTQYKSDAKRIEALRMAGIPVQFDEALLPLSFSKYGSLSVQAMQKLIPLLEQGMRYDEACTQIYGDHRGLHSEQRKNRLSLTDMDEITNPVVRRAVSQTIKVINAIVRTYGPPDVVRIELAREMSRNFDERRKAEKRQDENRAANERAKEQIAEYKGDHATGLDIVKFKLYQEQDGVCLYSGKNLDPSRLFEPGYADVDHIVPYSRCFDDSYQNKVLVLASENRQKGNRLPYEYFGYDEVRWHEYEVRVENLIRNYRKRQKLLKRQLSEEESAEFIDRNLKDTQYITRTVYNLIRDHLAFAESAYRKKPVQAVNGAVTSMLRNRWGVQKIREDGDLHHCLDAAVIAATTPGLVQRLTAYSKHRETWERPPAGYVDPATGELIELPQEARRDPFPKPWERFRQELEARLNPIDPRHQIDLLKLETYESDEEIKPVFASRMPNHKVTGAAHAETIRSSKGGDGFTVTKTPLTNLKLNKFGEIEGYYNPASDTLLYNALLSRLKDFGGDGAKAFAQPFYKPKKDG

SEQ ID NO: 1603 - protein, 1100 aa, unidentified; identical to SEQ ID NO: 1544
  REGION 1..1100: note = Description of Unknown: uncultivated organism with predicted taxonomy: Ruminococcaceae bacterium TF06-43
  REGION 1..1100: note = MG21-93 effector

SEQ ID NO: 1604 - protein, 1100 aa, unidentified
  REGION 1..1100: note = Description of Unknown: uncultivated organism with predicted taxonomy: Clostridiales
  REGION 1..1100: note = MG21-94 effector
MSEFHYALGLDIGIGSVGWAVLRNQPNGEPDRIQDLGVRIFDKAEQPKTGASLAAPRRDARSARRRLRRHRHRLERIRYLMEQRGMMSVSDIQAMYAAGGFQKSPYQLRAEALDRPLSKEEAVRVLIHLAQRRGYKSNSTAEAAKDEKETGKVKTAIEENRRCMAEHGYRTVGEMMYRDERFWQSNPDGTRYQQTRNKTDDYRFTVERSAIVDEAKQIFAAQRKLGADWSSEDLEAAYLSILEGQRSFDEGPGGESPFRGGIGDKVGFCTFEPDQQRAAKATYTFEYFKLLQDLNRMRLTGMGMPPEPLDDEQREVLKSAALRSASLSYGQIRKKLNLDDDVFFNDLYYGEKTKEEAEKRKWPQMQSYHKMRTALDKVGKDTIGTLTEEQLNAIATILTECKSDAKRIAALRMAGIPVQFDEALLPLSFSKYGSLSVQAMQKLIPLLEQGMRYDEACTQIYGDHRGLHSEQRKNRLSLTDMDEITNPVVRRAVSQTIKVINAIVRTYGPPDVVRIELAREMSRNFDERRKAEKRQDENRAANERAKEQIAEYKGDHATGLDIVKFKLYQEQDGVCLYSGKNLDPSRLFEPGYADVDHIVPYSRCFDDSYQNKVLVLASENRQKGNRLPYEYFGYDEVRWHEYEVRVENLIRNYRKRQKLLKRQLSEEESAGFIDRNLKDTQYITRSIYNLIRNNLVFAESNYKKRPVQTVNGAVTSMLRNRWGVQKIREDGDLHHCLDAAVIAATTPGLVQRLTEHSKRRETLEKAPAGYVDPATGELLELPQEARRDLFPKPWERFRQELEARLDPIDPRHQIDLLKLSTYESDEEIKPVFASRMPNHKVTGAAHAETIRSSKGGDGFTVTKTPLTNLKLNKFGEIEGYYNPASDTLLYNALLSRLKDFGGDGAKAFAQPFYKPKKDGTPGPRVDKVKICEKATIGLPVRNGIAANGSMIRIDVFYVEDDGYYFVPIYVADTKREKLPNKAAVAMKPYNLWKEMKDENFVFSLYPGDLVRIQSRKGIKLNLAKGGTGEKEIVRQDGMYYYRSAGIAVAQIFVETHDRRYLQPSLGIKTLQSIEKYQVDVLGNYQKVDLPEKRMTFSKEG

SEQ ID NO: 1605 - protein, 1036 aa, unidentified
  REGION 1..1036: note = Description of Unknown: uncultivated organism with predicted taxonomy: Clostridiales bacterium 42_27
  REGION 1..1036: note = MG21-95 effector
RRLRRHRHRLERIRYLMEQRGIMPVADIQAMYAAGGFQKSPYQLRAEALDRPLTKEEAVRVLIHLAQRRGYKSNSTAEAAKDEKETGKVKTAIEENRRCMAEHGYRTVGEMMYRDERFWQKHPDGTHYHQTRNKAEDYRFTVERAAIVDEVRQIFAAQRRLGTAWMDEYMETAYLSILESQRSFDEGPGGDSPFSGGIGERVGACTFEPDEKRAAKATYTFEYFKLLQDLSRMRLTGMGMPPEPLDAAQREVLKSAALRSASLSYGQIRKKLNLDDDVFFHGLYYGEKTKEEAEKRKWPQMQSYHKMRTALDKVGKGAIGTLTEEQLNAVATILTECKSDAKRIAALREAGIPPQFDEALLPLSFSKYGSLSVQAMQKLIPLLEEGLRYDEACTRVYGDHRGLHPEQRKNRLSLTDMDEITNPVVRRAVSQTIKVINAVVRTYGPPDVVRIELAREMSRTFDERRKMEKRQDDNRAANERAKDQIAEYKGDHATGLDIVKFKLYQEQDGVCLYSGQNLDIARLFEPGYADVDHIIPYSRCFDDSYQNKVLVLASENRQKGNRLPYEYFGQDEARWHGYEVRVENLIHNYRKRQKLLKRRLTEEESSGFIDRNLKDTQYITRAVYNLIRDHLAFAESNYRKKPVQAVNGAVTAMLRGRWGVQKIREDGDLHHCLDAAVIAATTPGLVQRLTAYNKHRETWERSPAGYVDPATGEMIELPQEARRDPFPKPWERFRQELEARLDPIDPRHQIDLLKLETYESDEEIKPVFVSRMPNHKVTGAAHAETIRSSKGGDGFTVTKTPLTNLKLNKFGEIEGYYNPASDTLLYDALLARLKDFGGDGAKAFAQPFYKPKKDGSPGPRVDKVKICEKATVGLPVRDGIAANGSMVRIDVFYVEGDGYYFVPIYVADTKKESLPNKAAVAMKPYNLWKKMKDENFVFSLYPGDLVRIQSRKGIKLNLAKGGTGEKEIVRQEGMYYYRSAGIAVAQISVETHDRRYLQPSLGIKTLQSIEKYQVDVLGNYYKVDLPEKRMTFSKEG

SEQ ID NO: 1606 - protein, 1100 aa, unidentified; identical to SEQ ID NO: 1578
  REGION 1..1100: note = Description of Unknown: uncultivated organism with predicted taxonomy: Clostridiales bacterium 42_27
  REGION 1..1100: note = MG21-96 effector

SEQ ID NO: 1607 - protein, 1128 aa, unidentified
  REGION 1..1128: note = Description of Unknown: uncultivated organism with predicted taxonomy: Clostridium
  REGION 1..1128: note = MG21-97 effector
MNYRIGLDLGIASVGWAILEDDNKGNPKRIVKLGSRIFDAAENPKDGSSLALNRREARNTRRRLRRRNHRIKRTKNLLEKYNIITIKEIENMYATYKFQFNPYELRVKGLDEKLTNSELARVLISFVKRRGYKSNSKAEETSNKEMGKLLVATKENEILMKEKNYRTIGEMYLKDEKFKIQMPDGRVLFKVRNTTDEYKNTPLRKLLLDEIKQILEKQKELNSNITDSFIDEYINIFTSQRNFDDGPSQPSIYAGNQIEKMLGKCTFEKEENRSAKATYTFEYFKLLQDINHIKIEEYHLKENGTREVIKRTLTEEERNIIINLAKTKVTLTYDSLRTALKLTTNERFNMINYKRTDIFNDEENKKVEKDRRIKEFESYHKIRVAMDRIEKNYINKLNSDDLDTIGTVLTLYKNDNKRIEKLKEINLPEDIVNELLKLSFSKVGNLSIKAMKKIIPYLEQGYTYDKAVNEVYEDFRGIINTKKKKKIALRDLEQELSNPVVKRAVSQAIKVLNAITTTYGKPDIINIELARQLSKKFADRQNIKKKQEQNMQNNDKAREEILKLGKNNPTGQDIVKYKLWQEQDGICVYSGKHISIEDLFTEAVDVDHIIPYSMCFDDTYKNKVLVLASENRQKGNRIPYQYLKEKGRNLEEYEVRVNNIIKNYYKKKRLLRQNFTREDATEWKDRNIQDTQYISRLMYNLIKNHVQFSDNENFDRKVFTVNGQITSHVRKRLGINKIRENGDEHHAVDAAVIAIISQGMIQKITKYYQYIDGRYEKNSGEYIDLETGEILTKEQYEKENGINFPEPWPKFRTELDIRTTCQTKERMEECLVAVKIYYENYDDVKPVFISRMPRRKVTGQAHLDTIRGIRKNEEGIKTLTKTELTKLKLDKNGEIEKYPDSQKQDDKLLYKALVDQLRKFGGNGEEAFKRPFYKPKSDGTPGPLVKKVKLEDKTTLAVELNNGKAIAANGDMIRIDVFKVDGEGYYFVPIYVSDTIKSKLPNKACVAAKQYSEWKDMKDENFIFSLYPRDLIYIKSKNKIKLTSINKENKETKEISEMFAYYIKSGISTAAISIINHNGEYEQNSLGIKTLKEFKKFEVDVLGNYHEVKLPEKRQSFKNLKKKGGSLK

SEQ ID NO: 1608 - protein, 1134 aa, unidentified
  REGION 1..1134: note = Description of Unknown: uncultivated organism with predicted taxonomy: Clostridiales
  REGION 1..1134: note = MG21-98 effector
LSLRYTLGLDIGIASVGWAVLKNDINGVPIKIEDLGAVAFSAAEPTGKVQKKKSNSKTPAPTLASNLRKIRCPRRTIRRKRHRKDRIKQLIQQNGIMTRVEMAEMFEHSQFETSVYELRVQALERALTKQELVRVLIHLAQRRGYKSNSKSEEAKDKENGKVKIAISENKQCMEENGYRTIGEMLLNDDRFWEDNHDGTKNFVPHNHPDDYRTTVERSMVEDEIRLIFSRQRALGVPYATSEFEEAYLKIWGGQRNFDDGPGYEIPPKDDGTEGKYSRYGGNMIEKMLGHCTFEKDEPRAAKGSYSAEYFRLLQDVNHLRLVKNNGESSALTAEQKQIYIDLVMKSATASYAKLRKKLDLSNDISFNMLRYGSDEIGKVERKKLGHMKFYHEMRKALNTVQKDAISTVSWEQRDEIARILLCYKSDDKRKAQLEKLDIPREFIPALLTLSTSKTAHLSVKALRKLIPHLEKGMTYAEACKEVYGEQKISVTKKNKLSLFDIEPINNPVVRRAVAKTIRVINAVVRKYGPPEVVRVELAREMGKSKADRDKIDAEQKANAKRNEELRQQIKKIKGAEPTGQDIVKFKLFQEQKGVCLYSGKNIEIDRLFKPEAGYVEIDHIIPYSISLDNSYANKVLVLKEENQNKGRRTPYEYFGADSKRWQRFETLVNTQVHNWKKKRNLLTQALSEEQKNGFKQRNLVDTQYIARVIYNLINDHLQFAETGKYDKKRRTQAVNGAITAHVRKRLGIQKIREDGDLHHAADAAVVACVSPSMIQKITQYTKHRECIRETPKGYLDTETGELMTREAYDAKYSPRFPAPWERFRQELEARLSDNPAEEIARLHLATYDSEEEIKPVFVSRKPKRKTTGAAHKDTIYRKTDGGYIDKVPLTKLTLDKKTGEIEKYYAPESDRLLYEALKKRLEEFDGNAKEAFAEPFYKPKRDGTRGPLVKKVKLYETYNNTVEVKRGDARASNKHIGCARNDSNSMIRVDVFYIEDDGYYYVPIYITDVVKDELPNKAVVQKKLPKDWKEMDDRDFLFSMYPNELLYIESRKGIKLKTKKGSSRQEEIIRKAGLYYFKRLDIASGNLFIITHDHSYEQPSLGGKTLSCLKKYTIDVLGNYSEVSLPEKRKPLRG

SEQ ID NO: 1609 - protein, 1100 aa, unidentified; identical to SEQ ID NO: 1538
  REGION 1..1100: note = Description of Unknown: uncultivated organism with predicted taxonomy: Clostridiales bacterium 42_27
  REGION 1..1100: note = MG21-99 effector

SEQ ID NO: 1610 - protein, 1100 aa, unidentified
  REGION 1..1100: note = Description of Unknown: uncultivated organism with predicted taxonomy: Clostridiales
  REGION 1..1100: note = MG21-100 effector
MSEFHYALGLDIGIGSVGWAVLRNQPNGEPDRIQDLGVRIFDKAEQPKTGASLAAPRRDARSARRRLRRHRHRLERIRYLMEQRGMMSVSDIQAMYAAGGFQKSPYQLRAEALDRPLSKEEAVRVLIHLAQRRGYKSNSTAEAAKDEKETGKVKTAIEENRRCMAEHDYRTVGEMMYRDERFWQSNPDGTRYQQTRNKTDDYRFTVERSAIVDEAKQIFAAQRKLGADWSSEDLEAAYLSILEGQRSFDEGPGGESPFRGGIGDKVGFCTFEPDQQRAAKATYTFEYFKLLQDLNHMRLAGRGMSPQPLNAQQREILKETALRSASLSYGQLRKKLALADDTFFSGLYYGDKSREEAEKRKWPQMQSYHKIRTALDKVGKGTISSLTEEQLNAIASILTQYKSDAKRIEALRMAGIPVQFDEALLPLSFSKYGSLSVQAMQKLIPLLEQGMRYDEACTQIYGDHRGLHSEQRKNRLSLTDMDEITNPVVRRAVSQTIKVINAIVRTYGPPDVVRIELAREMSRNFDERRKAEKRQDENRAANERAKEQIAEYKGDHATGLDIVKFKLYQEQDGVYLYSGKNLDPSRLFEPGYADVDHIVPYSRCFDDSYQNKVLVLASENRQKGNRLPYEYFGYDEVRWHEYEVRVENLIRNYRKRQKLLKRQLSEEESAEFIDRNLKDTQYITRTVYNLIRDHLAFAESAYRKKPVQAVNGAVTSMLRNRWGVQKIREDGDLHHCLDAAVIAATTPGLVQRLTAYSKHRETWERPPAGYVDPATGELIELPQEARRDPFPKPWERFRQELEARLDPIDPRHQIDLLKLETYESDEEIKPVFVSRMPNHKVTGAAHAETIRSSKGGDGFTVTKTPLTNLKLNKFGEIEGYYNPASDTLLYDALLARLKDFGGDGAKAFAQPFYKPKKDGTPGPRVDKVKICEKATVGLPVRDGIAANGSMVRIDVFYVEDDGYYFVPIYVADTKKESLPNKAVVAYKAYSEWKEMKDENFIFSLYPGDLVCIQSRKGIKLNLAKGGTGEKEIVRQEGMYYYRAAGITVGAIQIETHDRRYLQPSLGIKTLQSIEKYQVDVLGNYQKVDLPEKRMTFSKEG

SEQ ID NO: 1611 - protein, 1127 aa, unidentified
  REGION 1..1127: note = Description of Unknown: uncultivated organism with predicted taxonomy: Clostridiales
  REGION 1..1127: note = MG21-101 effector
MNYRIGLDLGIASVGWAVLEDDYMGKPKRIVKLGARIFDSAENPKDGSSLALNRREARETRRRLRRRNHRIKRTKNLLEKYNIMTTKEIEDMYATYKFQFNPYELRVKGLDEKLTNSELSRILISFVKRRGYKSNSKSEETNDKEMGKLLTATKENELLMKEKGYRTVGEMYLKDEKFKMQMPDGRILLKVRNTTDDYKNTPLRKLLLDEIKQILNKQKELNVNITSDFIDEYINIFTSQRNFDDGPGQPSIYAGNQIEKMLGKCTFEKEENRAAKATYTFEYFKLLQDINHIKIEKHIINETGKKEVLKRPLTEDERNIIINLAKTKVTLTYASLRIALNLAGNERFNMIHYKATNVFSDEINKEAEKERKFKEFESYHKMRVSMDKAEKNYILKLSTDELDVIGTVLTLYKNDNKRIEKLAQLNLPENIINEMLKLSFSKVGNLSIKAMKKIIPYLEKGYTYDKAVNEVYEDFRGVVNTEKKKKIALRDLEQELSNPVVKRSVSQAIKVLNAITRTYGEPDVINVELARELSKNFADRQNIKKNQENNMQSNEKAKEDILKLGKSNPTGQDIVKYKLWKEQDGTCVYSGKHISIEDLFTEAVDVDHIIPYSMCFDDTYKNKVLVLSSENRQKGNRIPYQYMQEKGRDLDEYEIRVNNIIKNYSKKQRLLKQKFTREDANEWKDRNIQDTQYISRLMYNLIKNHVQFSNNENFERKVFTVNGQITSHIGKRLGINKIRENGDEHHATDAVIIATVSQGMIQRITKYYQYIDGRYEKNSGEYIDMETGEIITKEQYEAKNGSNFPEPWPKFRKELDIRTTCKTKARMEECLLTEKIFYDDYDDVKPIFISRMPKRKITGQAHLDTIRGLRKSDEGLKTLTKTELTKLKLDKNGEIERYPESQKQDDKLLYNALVEQLRKFGGNGTEAFKKPFYKPKSDGTPGPLVKKVKLEDKTTLAVELNNGKAIAANGDMIRIDVFKVEGEGYYFVPIYVSDTIKNKLPNKASVASKLYAEWKEMQDKDFIFSLYPRDLFYVKSKNKIKLTSINKQDKESLETNELFAYYVKAGISTAAIACINHNGEYEQNSLGIKRLQEFKKYEVDVLGNYHEVKLPEKRQDFSNLKKGGSLK

SEQ ID NO: 1612 - protein, 1128 aa, unidentified; identical to SEQ ID NO: 1554
  REGION 1..1128: note = Description of Unknown: uncultivated organism with predicted taxonomy: Clostridium
  REGION 1..1128: note = MG21-102 effector

SEQ ID NO: 1613 - protein, 1100 aa, unidentified
  REGION 1..1100: note = Description of Unknown: uncultivated organism with predicted taxonomy: Clostridiales
  REGION 1..1100: note = MG21-103 effector
MSEFHYALGLDIGIGSVGWAVLRNQPNGEPDRIQDLGVRIFDKAEQPKTGASLAAPRRDARSARRRLRRHRHRLERIRYLVEQRGMMSVSDIQAMYAAGGFQKSPYQLRAEALDRPLSKEEAVRVLIHLAQRRGYKSNSTAEAAKDEKETGKVKTAIEENRRCMAEHGYRTVGEMMYRDERFWQSNPDGTRYQQTRNKTDDYRFTVERSAIVDEAKQIFAAQRKLGADWSSEDLEAAYLSILEGQRSFDEGPGGESPFRGGIGDKVSFCTFEPDQQRAAKATYTFEYFKLLQDLNHMRLAGRGMSPQPLNAQQREILKETALRSASLSYGQLRKKLALADDTFFSGLYYGDKSREEAEKRKCPQMQSYHKIRTALDKVGKGTISSLTEEQLNAIASILTQYKSDAKRIEALRLAGIPMQFDEALLPLSFSKYGSLSVQAMQKLIPLLEQGMRYDEACTQIYGDHRGLHSEQRKNRLSLTDMDEITNPVVRRAVSQTIKVINAIVRTYGPPDVVRIELAREMSRNFDERRKAEKRQDENRAANERAKEQIAEYKGDHATGLDIVKFKLYQEQDGVCLYSGKNLDPSRLFEPGYADVDHIVPYSRCFDDSYQNKVLVLASENRQKGNRLPYEYFGQDEARWHGYEVRVENLIRNYRKRQKLLKRQLSEEESAGFIDRNLKDTQYITRSIYNLIRNNLVFAESNYKKRPVQTVNGAVTSMLRNRWGVQKIREDGDLHHCLDAAVIAATTPGLVQRLTEHSKRRETLEKAPAGYVDPATGELLELPQEARRDLFPKPWERFRQELEARLDPIDPRHQIDLLKLSTYESDEEIKPVFVSRMPNHKVTGAAHAETIRSSKGGDGFTVTKTPLTNLKLNKFGEIEGYYNPASDTLLYDSLLARLKDFGGDGAKAFAQPFYKPKKDGTPGPRVDKVKICEKATIGLPVRNGIAANGSMIRIDVFYVEDDGYYFVPIYVADTKKERLPNKAVVAYKAYSEWKEMKDENFVFSLYPGDLVCIQSRKGIKLNLAKGGTGEKEIVRQKGMYYYRAAGITVGAIQIETHDRRYLQPSLGIKTLQSIEKYQVDVLGNYHKVDLPEKRMTFSKEG

SEQ ID NO: 1614 - protein, 1100 aa, unidentified
  REGION 1..1100: note = Description of Unknown: uncultivated organism with predicted taxonomy: Clostridiales bacterium 42_27
  REGION 1..1100: note = MG21-104 effector
MSEFHYALGLDIGIGSVGWAVLRNQPNGEPDRIQDLGVRIFDKAEQPKTGASLAAPRRDARSARRRLRRHRHRLERIRYLMEQRGIMPVADIQAMYAAGGFPKSPYQLRAEALDRPLTKEEAVRVLIHLAQRRGYKSNSTAEAAKDEKETGKVKTAIEENRRCMAEYGYRTVGEMMYRDERFWQKHPDGTHYHQTRNKAEDYRFTVERAAIVDEVRQIFAAQRRLGTVWMDEDMETAYLSILESQRSFDEGPGGDSPFSGGIGERVGACTFEPDEKRAAKATYTFEYFKLLQDLSRMRLTGMGMPPEPLDAAQREALKSAALRSASLSYGQIRKKLNLDDDVFFHGLYYGEKTKEETEKRKWPQMQSYHKMRTALDKVGKGAIGTLTEEQLNAVATILTECKSDAKRIAALREAGIPPQFDEALLPLSFSKYGSLSVQAMQKLIPLLEEGLRYDEACTRVYGDHRGLHPEQRKNRLSLTDMDEITNPVVRRAVSQTIKVINAVVRTYGPPDVVRIELAREMSRTFDERRKMEKRQDDNRAANERAKDQIAEYKGDHATGLDIVKFKLYQEQDGVCLYSGQNLDIARLFEPGYADVDHIIPYSRCFDDSYQNKVLVLASENRQKGNRLPYEYFGQDEARWHGYEVRVENLIHNYRKRQKLLKRRLTEEESSGFIDRNLKDTQYITRAVYNLIRDHLAFAESNYRKKPVQAVNGAVTAMLRGRWGVQKIREDGDLHHCLDAAVIAATTPGLVQRLTAYNKHRETWERSPAGYVDPATGEMLELPQEARRDPFPKPWERFRQELEARLDPIDPRHQIDLLKLETYESDEEIKPVFVSRMPNHKVTGAAHAETIRSSKGGYGFTVTKTPLTNLKLNKFGEIEGYYNPASDTLLYDALLARLKDFGGDGAKAFAQPFYKPKKDGSPGPRVDKVKICEKATVGLPVRDGIAANGSMVRIDVFYVEGDGYYFVPIYVADTKKESLPNKAAVAMKPYNLWKKMKDENFVFSLYPGDLVRIQSRKGIKLNLAKGGTGEKEIVRQEGMYYYRSAGIAVAQISVETHDRRYLQPSLGIKTLQSIEKYQVDVLGNYYKVDLPEKRMTFSKEG

SEQ ID NO: 1615 - protein, 1100 aa, unidentified
  REGION 1..1100: note = Description of Unknown: uncultivated organism with predicted taxonomy: Clostridiales bacterium 42_27
  REGION 1..1100: note = MG21-105 effector
MSEFHYALGLDIGIGSVGWAVLRNQPTGEPDRIQDLGVRIFDKAEQPKTGASLAAPRRDARSARRRLRRHRHRLERIRYLMEQRGIMPVADIQAMYAAGGFPKSPYQLRAEALDRPLTKEEAVRVLIHLAQRRGYKSNSTAEAAKDEKETGKVKTAIEENRRCMAEYGYRTVGEMMYRDERFWQKHPDGTHYHQTRNKAEDYRFTVERAAIVDEVRQIFAAQRRLGTVWMDEDMETAYLSILESQRSFDEGPGGDSPFSGGIGERVGACTFEPDEKRAAKATYTFEYFKLLQDLNRMRLTGMGMPPEPLDDEQREVLKSAALRSASLSYGQIRKKLNLDDDVFFHGLYYGEKTKEEAEKRKWPQMQSYHKMRTALDKVGKGAIGTLTEEQLNAVATILTECKSDAKRIAALREAGIPPQFDEALLPLSFSKYGSLSVRAMQKLIPLLEEGLRYDEACTRVYGDHRGLRPEQRTNRLSLNDMEEITNPVVRRAVSQTIKVINAVVRTYGPPDVVRIELAREMSRTFDERRKMEKRQDDNRAANERAKDQIAEYKGDHATGLDIVKFKLYREQDGVCLYSGQNLDIARLFEPGYADVDHIIPYSRCFDDSYQNKVLVLASENRQKGNRLPYEYFGQDEARWHGYEVRVENLIHNYRKRQKLLKRRLTEEESTGFIDRNLKDTQYITRAVYNLIRDHLAFAESNYRKKPVQAVNGAVTAMLRGRWGVQKIREDGDLHHCLDAAVIAATTPGLVQRLTAYNKHRETWERSPAGYVDPATGELIELPQEARRDPFPKPWERFRQELEARLDPIDPRHQIDLLKLETYESDEEIKPVFVSRMPNHKVTGAAHAETIRSSKGGDGFTVTKTPLANLKLNKFGEIEGYYNPASDTLLYDALLARLKAFGGDGAKAFAQPFYKPKKDGTPGPRVDKVKICEKATVGLPVRDGIAANGSMVRIDVFYVEDDGYYFVPIYVADTKKESLPNKAAVAMKPYNLWKEMNDENFAFSLYPGDLVRIQSRKGIKLNLAKGGTGEKEIVRQEGMYYYRSAGIAVAQISVETHDRRYLQPSLGIKTLQSIEKYQVDVLGNYYKVDLPEKRMTFSKEG

SEQ ID NO: 1616 - protein, 786 aa, unidentified
  REGION 1..786: note = Description of Unknown: uncultivated organism with predicted taxonomy: Oscillibacter sp. CAG:241_62_21
  REGION 1..786: note = MG21-106 effector
MLEFHYALGLDIGIGSVGWAVLRNQENGEPDRIQDLGVRIFDKAEQPKTGASLAAPRRDARSARRRLRRHSHRLERIRFLMEQSGILSVADIQEMYSTGGFQKSPYQLRAEALDRLLTKEEAVRVLIHLAQRRGYKSNSTAEAAKDEKETGKVKTAIEENRRCMEEHGYRTVGEMMFRDERFWQKNPDGSRYHQTRNKADNYRFTVERAAIVDEAKRIFAAQRSFGAAWMGEAVEASYLSILESQRSFDEGPGGSSPFRGGIGERVGFCTFEPEERRAPKASYTFEYFKLLQDLNRMRLAGMGLPPQPLNAEQRELLKTAALRSASLNYGQIRKKLNLDDGIYFNELYYGDHSREDAEKRKWPQMQSYHKIRTALDRVGKGTISTLTEEQLNAIAEILTRYKSDAKRIAALREAGIPPQLDGALLPLSFSKYGSLSVKAMQKLIPLLEKGQRYDQACTQIYRDHRGLRTDQRTTRLSLHDMDEITNPVVRRAVSQTIKVVNAVVRTYGPPDVVRIELAREMSQNFDERRKAEKRREENRAANERAKEQILEYKGDRVTGLDIVKFKLFREQDGVCLYSGKNLDISRLFEPGYADVDHIIPYSRCFDDSYQNKVLVLASENRQKGNRLPYEYFGQDAARWHGYEVRVENLIRNYRKRQKLLKHHLTEEESAGFIARNLKDTQYITRTIYNLLREHLLFADSRYSKKPVQAVNGAVTAMLRSRWGVHKIREDGDLHHCMDAAVLAATTPGLVQRLTEYSKHRETLIETPAGFVNRLTGELVEEAGDAQ

SEQ ID NO: 1617 - protein, 1128 aa, unidentified
  REGION 1..1128: note = Description of Unknown: uncultivated organism with predicted taxonomy: Clostridium
  REGION 1..1128: note = MG21-107 effector
MNYRIGLDLGIASVGWAILEDDNKGNPKRIVKLGSRIFDAAENPKDGSSLALNRREARNTRRRLRRRNHRIKRTKNLLEKYNIITIKEIENMYATYKFQFNPYELRVKGLDEKLTNSELARVLISFVKRRGYKSNSKAEETSNKEMGKLLVATKENEILMKEKNYRTIGEMYLKDEKFKIQMPDGRVLFKVRNTTDEYKNTPLRKLLLDEIKQILEKQKELNSNITDSFIDEYINIFTSQRNFDDGPSQPSIYAGNQIEKMLGKCTFEKEENRSAKATYTFEYFKLLQDINHIKIEEYHLKENGTREVIKRTLTEEERNIIINLAKTKVTLTYDSLRTALKLTTNERFNMINYKRTDIFNDEENKKVEKDRRIKEFESYHKIRVAMDRIEKNYINKLNSDDLDTIGTVLTLYKNDNKRIEKLKEINLPEDIVNELLKLSFSKVGNLSIKAMKKIIPYLEQGYTYDKAVNEVYEDFRGIINTKKKKKIALRDLEQELSNPVVKRAVSQAIKVLNAITTTYGKPDIINIELARQLSKKFADRQNIKKKQEQNMQNNDKAREEILKLGKNNPTGQDIVKYKLWQEQDGICVYSGKHISIEDLFTEAVDVDHIIPYSMCFDDTYKNKVLVLASENRQKGNRIPYQYLKEKGRNLEEYEVRVNNIIKNYYKKKRLLRQNFTREDATEWKDRNIQDTQYISRLMYNLIKNHVQFSDNENFDRKVFTVNGQITSHVRKRLGINKIRENGDEHHAVDAAVIAIISQGMIQKITKYYQYIDGRYEKNSGEYIDLETGEILTKEQYEKENGINFPEPWPKFRTELDIRTTCQTKERMEECLVAEKIYYENYDDVKPVFISRMPRRKVTGQAHLDTIRGIRKNEEGIKTLTKTELTKLKLDKNGEIEKYPDSQKQDDKLLYKALVDQLRKFGGNGEEAFKRPFYKPKSDGTPGPLVKKVKLEDKTTLAVELNNGKAIVANGDMIRIDVFKVDGEGYYFVPIYVSDTIKSKLPNKACVAAKQYSEWKDMKDENFIFSLYPRDLIYIKSKNKIKLTSINKENKENKEISEMFAYYIKSGISTATISIINHNGEYEQNSLGIKTLKEFKKFEVDVLGNYHEVKLPEKRQSFKNLKKKGGSLK

SEQ ID NO: 1618 - protein, 1100 aa, unidentified; identical to SEQ ID NO: 1544
  REGION 1..1100: note = Description of Unknown: uncultivated organism with predicted taxonomy: Clostridiales
  REGION 1..1100: note = MG21-108 effector

SEQ ID NO: 1619 - protein, 1045 aa, unidentified
  REGION 1..1045: note = Description of Unknown: uncultivated organism with predicted taxonomy: Clostridiales bacterium 42_27
  REGION 1..1045: note = MG21-109 effector
MSEFHYALGLDIGIGSVGWAVLRNQPNGEPDRIQDLGVRIFDKAEQPKTGASLAAPRRDARSARRRLRRHRHRLERIRYLMEQRGIMPVADIQAMYAAGGFQKSPYQLRAEALDRPLTKEEAVRVLIHLAQRRGYKSNSTAEAAKDEKETGKVKTAIEENRRCMAEHGYRTVGEMMYRDERFWQKHPDGTRYHQTRNKAEDYRFTVERAAIVDEVRQIFAAQRRLGTAWMDEYMETAYLSILESQRSFDEGPGGDSPFSGGIGERVGACTFEPDEKRAAKATYTFEYFKLLQDLSRMRLTGMGMPPEPLDAAQREVLKSAALRSASLSYGQIRKKLNLDDDVFFHGLYYGEKTKEEAEKRKWPQMQSYHKMRTALDKVGKGAIGTLTEEQLNAVATILTECKSDAKRIAALREAGIPPQFDEALLPLSFSKYGSLSVQAMQKLIPLLEEGLRYDEACTRVYGDHRGLHPEQRKNRLSLTDMDEITNPVVRRAVSQTIKVINAVVRTYGPPDVVRIELAREMSRTFDERRKMEKRQDDNRAANERAKDQIAEYKGDHATGLDIVKFKLYREQDGVCLYSGQNLDIARLFEPGYADVDHIIPYSRCFDDSYQNKVLVLASENRQKGNRLPYEYFGQDEARWHGYEVRVENLIHNYRKRQKLLKRRLTEEESTGFIDRNLKDTQYITRAVYNLIRDHLAFAESNYRKKPVQAVNGAVTAMLRGRWGVQKIREDGDLHHCLDAAVIAATTPGLVQRLTAYNKHRETWERSPAGYVDPATGEMIELPQEARRDPFPKPWERFRQELEARLDPIDPRHQIDLLKLETYESDEEIKPVFVSRMPNHKVTGAAHAETIRSSKGGDGFTVTKTPLTNLKLNKFGEIEGYYNPASDTLLYDALLARLKDFGGDGAKAFAQPFYKPKKDGSPGPRVDKVKICEKATVGLPVRDGIAANGSMVRIDVFYVEGDGYYFVPIYVADTKKESLPNKAAVAMKPYNLWKKMKDENFVFSLYPGDLVRIQSRKGIKLNLAKGGTGEKEIVRQEGMYYYRSAG

SEQ ID NO: 1620 - protein, 1100 aa, unidentified
  REGION 1..1100: note = Description of Unknown: uncultivated organism with predicted taxonomy: Oscillibacter sp. CAG:241_62_21
  REGION 1..1100: note = MG21-110 effector
MLEFHYALGLDIGIGSVGWAVLRNQENGEPDRIQDLGVRIFDKAEQSKTGASLAAPRRDARSARRRLRRHSHRLERIRFLMEQSGILSVADIQEMYSTGGFQKSPYQLRAEALDRLLTKEEAVRVLIHLAQRRGYKSNSTAEAAKDEKETGKVKTAIEENRRCMEEHGYRTVGEMMFRDERFWQKNPDGSRYHQTRNKADNYRFTVERAAIVDEAKRIFAAQRSFGAAWMGEAVEASYLSILESQRSFDEGPGGSSPFRGGIGERVGFCTFEPEERRAPKASYTFEYFKLLQDLNRMRLAGMGLPPQPLNAEQRELLKTAALRSASLNYGQIRKKLNLDDGIYFNELCYGDHSREDAEKRKWPQMQSYHKIRTALDKVGKGTISTLTEEQLNAIAEILTRYKSDAKRIAALREAGIPPQLDGALLPLSFSKYGSLSVKAMQKLIPLLEKGQRYDQACTQIYGDHRGLRTDQRTTRLSLHDMDEITNPVVRRAVSQTIKVVNAVVRTYGPPDVVRIELAREMSQNFDERRKAEKRREENRAANERAKEQILEYKGDRVTGLDIVKFKLFREQDGVCLYSGKNLDISRLFEPGYADVDHIIPYSRCFDDSYQNKVLVLASENRQKGNRLPYEYFGQDAARWHGYEVRVENLIRNYRKRQKLLKHHLTEEESAGFIARNLKDTQYITRTIYNLLREHLLFADSRYSKKPVQAVNGAVTAMLRSRWGVHKIREDGDLHHCMDAAVLAATTPGLVQRLTEYSKHRETLIETPAGFVNRLTGELVEEAGDAQRDRFPEPWDRFRQELEARLDPIDPRHQIDRLKLATYESDEELKPVFVSRMPNHKVTGAAHAETIRSSKAGNGFTVTKTPLASLKLNKQGEIDGYYNPESDKLLYDALLARLKAFGGDGAKAFAEPFYKPKKDGTPGPRVDKVKIREKGTTGLPVRDGIAANGSMIRIDVFREEDDGYYFVPIYVADTKKERLPNKAVVAYRPYEDWKEMQDENFVCSLYPGDLVRIQSRKGIKLNLAKGGTGEREIVRQDGLFYYRGADIAGGKIKIETHDRRYSQPSLGVKTLRSIEKYQVDVLGNYYKVKLPENRMTFSKEG

SEQ ID NO: 1621 - protein, 1100 aa, unidentified
  REGION 1..1100: note = Description of Unknown: uncultivated organism with predicted taxonomy: Clostridiales
  REGION 1..1100: note = MG21-111 effector
MSEFHYALGLDIGIGSVGWAVLRNQPNGEPDRIQDLGVRIFDKAEQPKTGASLAAPRRDARSARRRLRRHRHRLERIRYLVEQRGMMSVSDIQAMYAAGGFQKSPYQLRAEALDRPLSKEEAVRVLIHLAQRRGYKSNSTAEAAKDEKETGKVKTAIEENRRCMAEHGYRTVGEMMYRDERFWQSNPDGTRYQQTRNKTDDYRFTVERSAIVDEAKQIFAAQRKLGADWSSEDLEAAYLSILEGQRSFDEGPGGESPFRGGIGDKVSFCTFEPDQQRAAKATYTFEYFKLLQDLNHMRLAGRGMSPQPLNAQQREILKETALRSASLSYGQLRKKLALADDTFFSGLYYGDKSREEAEKRKWPQMQSYHKIRTALDKVGKGTISSLTEEQLNAIASILTQYKSDAKRIEALRLAGIPMQFDEALLPLSFSKYGSLSVQAMQKLIPLLEQGMRYDEACTQIYGDHRGLHSEQRKNRLSLTDMDEITNPVVRRAVSQTIKVINAIVRTYGPPDVVRIELAREMSRNFDERRKAEKRQDENRAANERAKEQIAEYKGDHATGLDIVKFKLYQEQDGVCLYSGKNLDPSRLFEPGYADVDHIVPYSRCFDDSYQNKVLVLASENRQKGNRLPYEYFGQDEARWHGYEVRVENLIRNYRKRQKLLKRQLSEEESAGFIDRNLKDTQYITRSIYNLIRNNLVFAESNYKKRPVQTVNGAVTSMLRNRWGVQKIREDGDLHHCLDAAVIAATTPGLVQRLTEHSKRRETLEKAPAGYVDPATGELLELPQEARRDLFPKPWERFRQELEARLDPIDPRHQIDLLKLSTYESDEEIKPVFVSRMPNHKVTGAAHAETIRRSKGGDGFTVTKTPLTNLKLNKFGEIEGYYNPASDTLLYDSLLARLKDFGGDGAKAFAQPFYKPKKDGTPGPRVDKVKICEKATIGLPVRNGIAANGSMIRIDVFYVEDDGYYFVPIYVADTKKERLPNKAVVAYKAYSEWKEMKDENFVFSLYPGDLVCIQSRKGIKLNLAKGGTGEKEIVRQKGMYYYRAAGITVGAIQIETHDRRYLQPSLGIKTLQSIEKYQVDVLGNYHKVDLPEKRMTFSKEG

SEQ ID NO: 1622 - protein, 1100 aa, unidentified; identical to SEQ ID NO: 1538
  REGION 1..1100: note = Description of Unknown: uncultivated organism with predicted taxonomy: Clostridiales bacterium 42_27
  REGION 1..1100: note = MG21-112 effector

SEQ ID NO: 1623 - protein, 1100 aa, unidentified; identical to SEQ ID NO: 1614
  REGION 1..1100: note = Description of Unknown: uncultivated organism with predicted taxonomy: Clostridiales bacterium 42_27
  REGION 1..1100: note = MG21-113 effector

SEQ ID NO: 1624 - protein, 1028 aa, unidentified
  REGION 1..1028: note = Description of Unknown: uncultivated organism with predicted taxonomy: Clostridiales bacterium 42_27
  REGION 1..1028: note = MG21-114 effector
MSEFHYALGLDIGIGSVGWAVLRNQPNGEPDRIQDLGVRIFDKAEQPKTGASLAAPRRDARSARRRLRRHRHRLERIRYLMEQRGIMPVADIQAMYAAGGFQKSPYQLRAEALDRPLTKEEAVRVLIHLAQRRGYKSNSTAEAAKDEKETGKVKIAIEENRRCMAEHGYRTVGEMMYRDERFWQKHPDGTRYHQTRNKAEDYRFTVERAAIVDEVRQIFAAQRRLGTAWMDEDMETAYLSILESQRSFDEGPGGDSPFSGGIGERVGACTFEPDEKRAAKATYTFEYFKLLQDLSRMRLTGMGMPPEPLDAAQREVLKSAALRSASLSYGQIRKKLNLDDDVFFHGLYYGEKTKEEAEKRKWPQMQSYHKMRTALDKVSKGAIGTLTEEQLNAVATILTECKSDAKRIAALREAGIPPQFDEALLPLSFSKYGSLSVRAMQKLIPLLEEGLRYDEACTRVYGDHRGLRPEQRTNRLSLNDMEEITNPVVRRAVSQTIKVINAVVRTYGPPDVVRIELAREMSRTFDERRKMEKRQDDNRAANERAKDQIAEYKGDHATGLDIVKFKLYREQDGVCLYSGQNLDIARLFEPGYADVDHIIPYSRCFDDSYQNKVLVLASENRQKGNRLPYEYFGQDEARWHGYEVRVENLIHNYRKRQKLLKRRLTEEESTGFIDRNLKDTQYITRAVYNLIRDHLTFAESNYRKKPVQAVNGAVTAMLRGRWGVQKIREDGDLHHCLDAAVIAATTPGLVQRLTAYNKHRETWERPPAGYVDPATGELIELPQEARRDPFPKPWERFRQELEARLDPIDPRHQIDLLKLETYESDEEIKPVFVSRMPNHKVTGAAHAETIRSSKGGDGFTVTKTPLTNLKLNKFGEIEGYYNPASDTLLYDALLARLKDFGGDGAKAFAQPFYKPKKDGSPGPRVDKVKICEKATVGLPVRDGIAANGSMVRIDVFYVEGDGYYFVPIYVADTKKESLPNKAAVAMKPYNLWKKMKDENFVFSLYPGDLVRIQSRKGIKLNLAKGGTG

SEQ ID NO: 1625 - protein, 1107 aa, unidentified
  REGION 1..1107: note = Description of Unknown: uncultivated organism with predicted taxonomy: Clostridiales
  REGION 1..1107: note = MG21-115 effector
LSLRYTLGLDIGIASVGWAVLENNIDGEPIKIERLGVRIFDKAEQPKTGASLAEPRREARGQRRTIRRRRHRKDRIKQLIQQNGIMTRVEMTEMFEHSQFETSVYELRVQALERALTKQEFVRVLIHLAQRRGYKSNSKSEEAKDKENGKVKSAISENKKCMEENGYRTIGEMLLNDDRFWEYNPDGTKIFVPHNHPDDYRTTVERSMVEDEIRLIFSRQHALGVPYATSEFEEAYLEIWGRQRNFDEGPGGKSPYGGNMIEKMLGHCTFEKDEPRAAKGSYSAEYFRLLQDVNHLRLVKNNGESCALTREQKQIYIDLVMKSAAASYAQLRKKLELSNDISFNMLRYGSDEIGKVERKKLGHMKFYHEMRKALNTVQKDAIATVSWEQRDEIARILLCYKSDDKRKAQLEKLDIPREFIPALLTLSTSKTAHLSAKALRKLIPHLEKGMTYAEACKEVYGEQKSSITKKNKLSLFDIEPINNPVVRRAVSQTIRVINAVVREYGAPEVVRVELAREMGKPYDVRTQMTKKQETNAKRNEELRQQIKKIKGAEPTGQDIVKFKLFQDQNGVCLYSGQNLDITRLFEAGYVDVDHIIPYSISFDDSYTNKVLVRSPENRQKGNRIPADYFKSDPARWQRFETLVNTQVHNWKKKRNLLTQVLSEEQKNGFKQRNLVDTQYIARVIYNLINDHLQFAETGKYDKKRRTQAVNGAITAHVRKRLGIQKIREDGDLHHAVDAAVVACVSPGMIQKITQYTKHRECIRKTKEGYLDTETGELMTREAYDAKYSPRFPAPWERFRQELEARLSDNPAEEIARLHLATYDSEEEIKQVFVSRKQTHKISGAAHKDTIYRKADGGYIDKVPLTRLTLDKQTGEIKNYYAPESDRLLYEALKKRLEEFDGNAEKAFAEPFYKPRRDGTRGPLVKKVKLYETYNNTVEVKRGDARASNKHIGCAKNDSMIRVDVFYMEDDGYYYVPIYTADVIKGVLPNKAVVRNKLPEDWKEMDDRDFLFSMYPNDLLYIESRRGIKLKTKKGSSRQEEIVRKTGLYYFKGLNIATNALFIITHDNGYEQPSLGGKTLSCLKKYTVDALGNYSEVSLPEKRKPLRG

SEQ ID NO: 1626 - protein, 1100 aa, unidentified; identical to SEQ ID NO: 1544
  REGION 1..1100: note = Description of Unknown: uncultivated organism with predicted taxonomy: Clostridiales
  REGION 1..1100: note = MG21-116 effector

SEQ ID NO: 1627 - protein, 1100 aa, unidentified; identical to SEQ ID NO: 1548
  REGION 1..1100: note = Description of Unknown: uncultivated organism with predicted taxonomy: Clostridiales bacterium 42_27
  REGION 1..1100: note = MG21-117 effector

SEQ ID NO: 1628 - protein, 897 aa, unidentified
  REGION 1..897: note = Description of Unknown: uncultivated organism with predicted taxonomy: Clostridiales bacterium 42_27
  REGION 1..897: note = MG21-118 effector
FTVERAAIVDEVRQIFAAQRRLGVVWMDEDMETAYLSVLESQRSFDEGPGGDSPFSGGIGKRVGACTFEPDEKRAAKATYTFEYFKLLQDLNRMRLTGMGMPPEPLDDEQREVLKSAALRSASLSYGQIRKKLNLDDDVFFNDLYYGEKTKEEAEKRKWPQMQSYHKLRMALDKVGKGAIGTLTEEQLNAIATILTECKSDAKRIAALREAGIPPQFDEALLPLSFSKYGSLSVRAMQKLIPLLEEGLRYDEACTRVYGDHRGLRSEQRTNRLSLNDMEEITNPVVRRAVSQTIKVINAVARTYGPPDVVRIELAREMSRTFDERRKMEKRQDDNRAANEQAKDQIAEYKGDHATGLDIVKFKLYREQDGVCLYSGQNLDIARLFEPGYADVDHIIPYSRCFDDSYQNKVLVLASENRQKGNRLPYEYFGQDEARWHGYEVRVENLIHNYRKRQKLLKRRLTEEESSGFIDRNLKDTQYITRAVYNLIRDHLAFAESNYRKKPVQAVNGAVTSMLRGRWGVQKIREDGDLHHCLDAAVIAATTPGLVQRLTAYNKHRETWERPPAGYVDPATGELIELPQEARRDPFPKPWERFRQELEARLDPIDPRHQIDLLKLETYESDEEIKPVFVSRMPNHKVTGAAHAETIRSSKGGDGFTVTKTPLTNLKLNKFGEIEGYYNPASDTLLYDALLARLKDFGGDGAKAFAQPFYKPKKDGSPGPRVDKVKICEKATVGLPVRDGIAANGSMIRIDVFYVEDDGYYFVPIYVADTKKESLPNKAVVAYKAYSEWKEMKDENFIFSLYPGDLVRIQSRKGIKLNLAKGGTGEKEIVRQEGMYYYRAAGITVGAIQIETHDRRYLQPSLGIKTLQSIEKYQVDVLGNYYKVDLPEKRMTFSKEG

SEQ ID NO: 1629 - protein, 1100 aa, unidentified; identical to SEQ ID NO: 1578
  REGION 1..1100: note = Description of Unknown: uncultivated organism with predicted taxonomy: Clostridiales bacterium 42_27
  REGION 1..1100: note = MG21-119 effector

SEQ ID NO: 1630 - protein, 1100 aa, unidentified
  REGION 1..1100: note = Description of Unknown: uncultivated organism with predicted taxonomy: Ruminococcaceae bacterium TF06-43
  REGION 1..1100: note = MG21-120 effector
MSEFHYALGLDIGIGSVGWAVLRNQPNGEPDRIQDLGVRIFDKAEQPKTGASLAAPRRDARSARRRLRRHRHRLERIRYLMEQRGMMSVSDIQAMYAAGGFQKSPYQLRAEALDRPLSKEEAVRVLIHLAQRRGYKSNSTAEAAKDEKETGKVKTAIEENRRCMAEHDYRTVGEMMYRDERFWQSNPDGTRYQQTRNKTDDYRFTVERSAIVDEAKQIFAAQRKLGADWSSEDLEAAYLSILEGQRSFDEGPGGESPFRGGIGDKVGFCTFEPDQQRAAKATYTFEYFKLLQDLNHMRLAGRGMSPQPLNAQQREILKETALRSASLSYGQLRKKLALADDTFFSGLYYGDKSREEAEKRKWPQMQSYHKIRTALDKVGKGTISSLTEEQLNAIASILTQYKSDAKRIEALRMAGIPVQFDEALLPLSFSKYGSLSVQAMQKLIPLLEQGMRYDEACTQIYGDHRGLHSEQRKNRLSLTDMDEITNPVVRRAVSQTIKVINAIVRTYGPPDVVRIELAREMSRNFDERRKAEKRQDENRAANERAKEQIAEYKGDHATGLDIVKFKLYQEQDGVCLYSGKNLDPSRLFEPGYADVDHIVPYSRCFDDSYQNKVLVLASENRQKGNRLPYEYFGYDEVRWHEYEVRVENLIRNYRKRQKLLKRQLSEEESAEFIDRNLKDTQYITRTVYNLIRDHLAFAESAYRKKPVQAVNGAVTSMLRNRWGVQKIREDGDLHHCLDAAVIAATTPGLVQRLTAYSKHRETWERPPAGYVDPATGELIELPQEARRDPFPKPWERFRQELEARLDPIDPRHQIDLLKLETYESDEEIKPVFVSRMPNHKVTGAAHAETIRSSKGGDGFTVTKTPLMNLKLNKFGEIEGYYNPASDTLLYDALLARLKDFGGDGAKAFAQPFYKPKKDGTPGPRVDKVKICEKATVGLPVRDGIAANGSMVRIDVFYVEDDGYYFVPIYVADTKKESLPNKAVVAYKAYSEWKEMKDENFIFSLYPGDLVCIQSRKGIKLNLAKGGTGEKEIVRQEGMYYYRAAGITVGAIQIETHDRRYLQPSLGIKTLQSIEKYQVDVLGNYQKVDLPEKRMTFSKEG

SEQ ID NO: 1631 - protein, 1100 aa, unidentified
  REGION 1..1100: note = Description of Unknown: uncultivated organism with predicted taxonomy: Clostridiales
  REGION 1..1100: note = MG21-121 effector
MSEFHYALGLDIGIGSVGWAVLRNQPNGEPDRIQDLGVRIFDKAEQPKTGASLAAPRRDARSARRRLRRHRHRLERIRYLVEQRGMMSVSDIQAMYAAGGFQKSPYQLRAEALDRPLSKEEAVRVLIHLAQRRGYKSNSTAEAAKDEKETGKVKTAIEENRRCMAEHGYRTVGEMMYRDERFWQSNPDGTRYQQTRNKTDDYRFTVERSAIVDEAKQIFAAQRKLGADWSSEDLEAAYLSILEGQRSFDEGPGGESPFRGGIGDKVSFCTFEPDQQRAAKATYTFEYFKLLQDLNHMRLAGRGMSPQPLNAQQREILKETALRSASLSYGQLRKKLALADDTFFSGLYYGDKSREEAEKRKWPQMQSYHKIRTALDKVGKGTISSLTEEQLNAIASILTQYKSDAKRIEALRLAGIPMQFDEALLPLSFSKYGSLSVQAMQKLIPLLEQGMRYDEACTQIYGDHRGLHSEQRKNRLSLTDMDEITNPVVRRAVSQTIKVINAIVRTYGPPDVVRIELAREMSRNFDERRKAEKRQDENRAANERAKEQIAEYKGDHATGLDIVKFKLYQEQDGVCLYSGKNLDPSRLFEPGYADVDHIVPYSRCFDDSYQNKVLVLASENRQKGNRLPYEYFGQDEARWHGYEVRVENLIRNYRKRQKLLKRQLSEEESAGFIDRNLKDTQYITRSIYNLIRNNLVFAESNYKKRPVQTVNGAVTSMLRNRWGVQKIREDGDLHHCLDAAVIAATTPGLVQRLTEHSKRRETLEKAPAGYVDPATGELLELPQEARRDLFPKPWERFRQELEARLDPIDPRHQIDLLKLSTYESDEEIKPVFVSRMPNHKVTGAAHAETIRSSKGGDGFTVTKTPLTNLKLNKFGEIEGYYNPASDTLLYDALLARLKDFGGDGAKAFAQPFYKPKKDGTPGPRVDKVKICEKATIGLPVRNGIAANGSMIRIDVFYVEDDGYYFVPIYVVDTKKENLPNKAVVAYKAYSDWKEMRDEDFVFSLYPGDLVCIQSRKGIKLNLAKGGTGEKEIVRQKGMYYYRAAGITVGAIQIETHDRRYLQPSLGIKTLQSIEKYQVDVLGNYHKVDLPEKRMTFSKEG

SEQ ID NO: 1632 - protein, 1109 aa, unidentified; identical to SEQ ID NO: 1579
  REGION 1..1109: note = Description of Unknown: uncultivated organism
  REGION 1..1109: note = MG21-122 effector

SEQ ID NO: 1633 - protein, 1100 aa, unidentified; identical to SEQ ID NO: 1538
  REGION 1..1100: note = Description of Unknown: uncultivated organism with predicted taxonomy: Clostridiales
  REGION 1..1100: note = MG21-123 effector

SEQ ID NO: 1634 - protein, 943 aa, unidentified
  REGION 1..943: note = Description of Unknown: uncultivated organism with predicted taxonomy: Clostridiales bacterium 42_27
  REGION 1..943: note = MG21-124 effector
EENRRCMAEHGYRTVGEMMYRDERFWQKHPAGPRYRQTRNKAEDYRFTVERAAIVDEVRQIFAAQRRLGTAWMDEYMETAYLSILESQRSFDEGPGGDSPFSGGIGERVGACTFEPDEKRAAKATYTFEYFKLLQDLSRMRLTGMGMPPEPLDAAQREVLKSAALRSASLSYGQIRKKLNLDDDVFFHGLYYGEKTKEEAEKRKWPQMQSYHKMRTALDKVGKGAIGTLTEEQLNAVATILTECKSDAKRIAALREAGIPPQFDEALLPLSFSKYGSLSVQAMQKLIPLLEEGLRYDEACTRVYGDHRGLHPEQRKNRLSLTDMDEITNPVVRRAVSQTIKVINAVVRTYGPPDVVRIELAREMSRTFDERRKMEKRQDDNRAANERAKDQIAEYKGDHATGLDIVKFKLYREQDGVCLYSGQNLDIARLFEPGYADVDHIIPYSRCFDDSYQNKVLVLASENRQKGNRLPYEYFGQDEARWHGYEVRVENLIHNYRKRQKLLKRRLTEEESSGFIDRNLKDTQYITRAVYNLIRDHLAFAESNYRKKPVQAVNGAVTAMLRGRWGVQKIREDGDLHHCLDAAVIAATTPGLVQRLTAYNKHRETWERSPAGYVDPATGEMIELPQEARRDPFPKPWERFRQELEARLDPIDPRHQIDLLKLETYESDEEIKPVFVSRMPNHKVTGAAHAETIRSSKGGDGFTVTKTPLTNLKLNKFGEIEGYYNPASDTLLYDALLARLKDFGGDGAKAFAQPFYKPKKDGSPGPRVDKVKICEKATVGLPVRDGIAANGSMVRIDVFYVEGDGYYFVPIYVADTKKESLPNKAAVAMKPYNLWKKMKDENFVFSLYPGDLVRIQSRKGIKLNLAKGGTGEKEIVRQEGMYYYRSAGIAVAQISVETHDRRYLQPSLGIKTLQSIEKYQVDVLGNYYKVDLPEKRMTFSKEG

SEQ ID NO: 1635 - protein, 1100 aa, unidentified; identical to SEQ ID NO: 1538
  REGION 1..1100: note = Description of Unknown: uncultivated organism with predicted taxonomy: Clostridiales bacterium 42_27
  REGION 1..1100: note = MG21-125 effector

SEQ ID NO: 1636 - protein, 772 aa, unidentified
  REGION 1..772: note = Description of Unknown: uncultivated organism with predicted taxonomy: Clostridiales bacterium 42_27
  REGION 1..772: note = MG21-126 effector
MSEFHYALGLDIGIGSVGWAVLRNQPNGEPDRIQDLGVRIFDKAEQPKTGASLAAPRRDARSARRRLRRHRHRLERIRYLMEQRGIMPVADIQAMYAAGGFPKSPYQLRAEALDRPLTKEEAVRVLIHLAQRRGYKSNSTAEAAKDEKETGKVKTAIEENRRCMAEYGYRTVGEMMYRDERFWQKHPDGTHYHQTRNKAEDYRFTVERAAIVDEVRQIFAAQRRLGTVWMDEDMETAYLSILESQRSFDEGPGGDSPFSGGIGERVGACTFEPDEKRAAKATYTFEYFKLLQDLSRMRLTGMGMPPEPLDAAQREALKSAALRSASLSYGQIRKKLNLDDDVFFHGLYYGEKTKEETEKRKWPQMQSYHKMRTALDKVGKGAIGTLTEEQLNAVATILTECKSDAKRIAALREAGIPPQFDEALLPLSFSKYGSLSVQAMQKLIPLLEEGLRYDEACTRVYGDHRGLHPEQRKNRLSLTDMDEITNPVVRRAVSQTIKVINAVVRTYGPPDVVRIELAREMSRTFDERRKMEKRQDDNRAANERAKDQIAEYKGDHATGLDIVKFKLYQEQDGVCLYSGQNLDIARLFEPGYADVDHIIPYSRCFDDSYQNKVLVLASENRQKGNRLPYEYFGQDEARWHGYEVRVENLIHNYRKRQKLLKRRLTEEESSGFIDRNLKDTQYITRAVYNLIRDHLAFAESNYRKKPVQAVNGAVAAMLRGRWGVQKIREDGDLHHCLDAAVIAATTPGLVQRLTAYNKHRETWERSPAGYVD

SEQ ID NO: 1637 - protein, 970 aa, unidentified
  REGION 1..970: note = Description of Unknown: uncultivated organism with predicted taxonomy: Clostridiales bacterium 42_27
  REGION 1..970: note = MG21-127 effector
QRRGYKSNSTAEAAKDEKETGKVKTAIEENRRCMAEHGYRTVGEMMYRDERFWQIHPDGTRYHQTRNKAEDYRFTVERAAIVDEVRQIFAAQRRLGTAWMDEYMETAYLSILESQRSFDEGPGGDSPFSGGIGERVGACTFEPDEKRAAKATYTFEYFKLLQDLSRMRLTGMGMPPEPLDAAQREVLKSAALRSASLSYGQIRKKLNLDDDVFFHGLYYGEKTKEEAEKRKWPQMQSYHKMRTALDKVGKGAIGTLTEEQLNAVATILTECKSDAKRIAALREAGIPPQFDEALLPLSFSKYGSLSVRAMQKLIPLLEEGLRYDEACTRVYGDHRGLRPEQRTNRLSLNDMEEITNPVVRRAVSQTIKVINAVVRTYGPPDVVRIELAREMSRTFDERRKMEKRQDDNRAANERAKDQIAEYKGDHATGLDIVKFKLYREQDGVCLYSGQNLDIARLFEPGYADVDHIIPYSRCFDDSYQNKVLVLASENRQKGNRLPYEYFGQDEARWHGYEVRVENLIHNYRKRQKLLKRRLNEEESTGFIDRNLKDTQYITRAVYNLIRDHLAFAESNYRKKPVQAVNGAVTAMLRGRWGVQKIREDGDLHHCLDAAVIAATTPGLVQRLTAYNKHRETWERSPAGYVDPATGELIELPQEARRDPFPKPWERFRQELEARLNPIDPRHQIDLLKLETYESDEEIKPVFVSRMPNHKVTGAAHAETIRSSKGGDGFTVTKTPLANLKLNKFGEIEGYYNPASDTLLYDALLARLKAFGGDGAKAFAQPFYKPKKDGTPGPRVDKVKICEKATVGLPVRDGIAANGSMVRIDVFYVEDDGYYFVPIYVADTKKESLPNKAAVAMKPYNLWKEMNDENFAFSLYPGDLVRIQSRKGIKLNLAKGGTGEKEIVRQEGMYYYRSAGIAVAQISVETHDRRYLQPSLGIKTLQSIEKYQVDVLGNYYKVDLPEKRMTFSKEG

SEQ ID NO: 1638 - protein, 964 aa, unidentified
  REGION 1..964: note = Description of Unknown: uncultivated organism with predicted taxonomy: Clostridiales bacterium 42_27
  REGION 1..964: note = MG21-128 effector
MSEFHYALGLDIGIGSVGWAVLRNQPNGEPDRIQDLGVRIFDKAEQPKTGASLAAPRRDARSARRRLRRHRHRLERIRYLMEQRGIMPVADIQAMYAAGGFPKSPYQLRAEALDRPLTKEEAVRVLIHLAQRRGYKSNSTAEAAKDEKETGKVKTAIEENRRCMAEYGYRTVGEMMYRDERFWQKHPDGTHYHQTRNKAEDYRFTVERAAIVDEVRQIFAAQRRLGTVWMDEDMETAYLSILESQRSFDEGPGGDSPFSGGIGERVGACTFEPDEKRAAKATYTFEYFKLLQDLSRMRLTGMGMPPEPLDAAQREALKSAALRSASLSYGQIRKKLNLDDDVFFHGLYYGEKTKEETEKRKWPQMQSYHKMRTALDKVGKGAIGTLTEEQLNAVATILTECKSDAKRIAALREAGIPPQFDEALLPLSFSKYGSLSVQAMQKLIPLLEEGLRYDEACTRVYGDHRGLHPEQRKNRLSLTDMDEITNPVVRRAVSQTIKVINAVVRTYGPPDVVRIELAREMSRTFDERRKMEKRQDDNRAANERAKDQIAEYKGDHATGLDIVKFKLYQEQDGVCLYSGQNLDIARLFEPGYADVDHIIPYSRCFDDSYQNKVLVLASENRQKGNRLPYEYFGQDEARWHGYEVRVENLIHNYRKRQKLLKRRLTEEESSGFIDRNLKDTQYITRAVYNLIRDHLAFAESNYRKKPVQAVNGAVTAMLRGRWGVQKIREDGDLHHCLDAAVIAATTPGLVQRLTAYNKHRETWERSPAGYVDPATGEMLELPQEARRDPFPKPWERFRQELEARLDPIDPRHQIDLLKLETYESDEEIKPVFVSRMPNHKVTGAAHAETIRSSKGGYGFTVTKTPLTNLKLNKFGEIEGYYNPASDTLLYDALLARLKDFGGDGAKAFAQPFYKPKKDGSPGPRVDKVKICEKATVGLPVRDGIAANGSMVRIDVFYVEGDGYY

SEQ ID NO: 1639 - protein, 820 aa, unidentified
  REGION 1..820: note = Description of Unknown: uncultivated organism with predicted taxonomy: Clostridiales bacterium 42_27
  REGION 1..820: note = MG21-129 effector
MYRDERFWQKHPDGTRYHQTRNKAEDYRFTVERAAIVDEVRQIFAAQRRLGTVWMDEDMETAYLSILESQRSFDEGPGGDSPFFGGIGERVGACTFEPDEKRAAKATYTFEYFKLLQDLNRMRLTGMGMPPEPLDAAQREVLKSAALRSASLSYGQIRKKLNLDDDVFFHGLYYGEKTKEEAEKRKWPQMQSYHKMRTALDKVGKGAIGTLTEEQLNAVATILTECKSDAKRIAALREAGIPPQFDEALLPLSFSKYGSLSVQAMQKLIPLLEEGLRYDEACTRVYGDHRGLRPEQRTNRLSLNDMDEITNPVVRRAVSQTIKVINAVVRTYGPPDVVRIELAREMSRTFDERRKMEKRQDDNRAANERAKDQIAEYKGDHATGLDIVKFKLYREQDGVCLYSGQNLDIARLFEPGYADVDHIIPYSRCFDDSYQNKVLVLASENRQKGNRLPYEYFGQDEARWHGYEVRVENLIHNYRKRQKLLKRRLTEEESSGFIARNLKDTQYITRAVYNLIRDHLAFAESNYRKKPVQAVNGAVTAMLRGRWGVQKIREDGDLHHCLDAAVIAATTPGLVQRLTAYNKHRETWERSPAGYVDPATGELIELPQEARRDPFPKPWERFRQELEARLDPIDPRHQIDLLKLETYESDEEIKPVFVSRMPNHKVTGAAHAETIRSSKGGDGFTVTKTPLTNLKLNKFGEIEGYYNPASDTLLYDALLARLKDFGGDGAKAFAQPFYKPKKDGTPGPRVDKVKICEKATVGLPVRDGIAANGSMVRIDVFYVEGDGYYFVPIYVADTKKESLPNKAVVAYKAYSEWKEM

SEQ ID NO: 1640 - protein, 889 aa, unidentified
  REGION 1..889: note = Description of Unknown: uncultivated organism with predicted taxonomy: Clostridiales bacterium 42_27
  REGION 1..889: note = MG21-130 effector
VDEVRQIFAAQRRLGTVWMDEDMETAYLSILESQRSFDEGPGGDSPFSGGIGERVGACTFEPDEKRAAKATYTFEYFKLLQDLSRMRLTGMGMPPEPLDAAQREALKSAALRSASLSYGQIRKKLNLDDDVFFHGLYYGEKTKEETEKRKWPQMQSYHKMRTALDKVGKGAIGTLTEEQLNAVATILTECKSDAKRIAALREAGIPPQFDEALLPLSFSKYGSLSVQAMQKLIPLLEEGLRYDEACTRVYGDHRGLHPEQRKNRLSLTDMDEITNPVVRRAVSQTIKVINAVVRTYGPPDVVRIELAREMSRTFDERRKMEKRQDDNRAANERAKDQIAEYKGAHATGLDIVKFKLYQEQDGVCLYSGQNLDIARLFEPGYADVDHIIPYSRCFDDSYQNKVLVLASENRQKGNRLPYEYFGQDEARWHGYEVRVENLIHNYRKRQKLLKRRLTEEESSGFIDRNLKDTQYITRAVYNLIRDHLAFAESNYRKKPVQAVNGAVTAMLRGRWGVQKIREDGDLHHCLDAAVIAATTPGLVQRLTAYNKHRETWERSPAGYVDPATGEMLELPQEARRDPFPKPWERFRQELEARLDPIDPRHQIDLLKLETYESDEEIKPVFVSRMPNHKVTGAAHAETIRSSKGGYGFTVTKTPLTNLKLNKFGEIEGYYNPASDTLLYDALLARLKDFGGDGAKAFAQPFYKPKKDGSPGPRVDKVKICEKATVGLPVRDGIAANGSMVRIDVFYVEGDGYYFVPIYVADTKKESLPNKAAVAMKPYNLWKKMKDENFVFSLYPGDLVRIQSRKGIKLNLAKGGTGEKEIVRQEGMYYYRSAGIAVAQISVETHDRRYLQPSLGIKTLQSIEKYQVDVLGNYYKVDLPEKRMTFSKEG

SEQ ID NO: 1641 - protein, 1100 aa, unidentified; identical to SEQ ID NO: 1614
  REGION 1..1100: note = Description of Unknown: uncultivated organism with predicted taxonomy: Clostridiales bacterium 42_27
  REGION 1..1100: note = MG21-131 effector

SEQ ID NO: 1642 - protein, 1100 aa, unidentified
  REGION 1..1100: note = Description of Unknown: uncultivated organism with predicted taxonomy: Clostridiales bacterium 42_27
  REGION 1..1100: note = MG21-132 effector
MSEFHYALGLDIGIGSVGWAVLRNQPNGEPDRIQDLGVRIFDKAEQPKTGASLAAPRRDARSARRRLRRHRHRLERIRYLMEQRGIMPVADIQAMYAAGGFPKSPYQLRAEALDRPLTKEEAVRVLIHLAQRRGYKSNSTAEAAKDEKETGKVKTAIEENRRCMAEYGYRTVGEMMYRDERFWQKHPDGTHYHQTRNKAEDYRFTVERAAIVDEVRQIFAAQRRLGTVWMDEDMETAYLSILESQRSFDEGPGGDSPFSGGIGERVGACTFEPDEKRAAKATYTFEYFKLLQDLSRMRLTGMGMPPEPLDAAQREALKSAALRSASLSYGQIRKKLNLDDDVFFHGLYYGEKTKEETEKRKWPQMQSYHKMRTALDKVGKGAIGTLTEEQLNAVATILTECKSDAKRIAALREAGIPPQFDEALLPLSFSKYGSLSVQAMQKLIPLLEEGLRYDEACTRVYGDHRGLHPEQRKNRLSLTDMDEITNPVVRRAVSQTIKVINAVVRTYGPPDVVRIELAREMSRTFDERRKMEKRQDDNRAANERAKDQIAEYKGDHATGLDIVKFKLYREQDGVCLYSGQNLDIARLFEPGYADVDHIIPYSRCFDDSYQNKVLVLASENRQKGNRLPYEYFGQDEARWHGYEVRVENLIHNYRKRQKLLKRRLTEEESSGFIDRNLKDTQYITRAVYNLIRDHLAFAESNYRKKPVQAVNGAVTAMLRGRWGVQKIREDGDLHHCLDAAVIAATTPGLVQRLTAYNKHRETWERSPAGYVDPATGEMLELPQEARRDPFPKPWERFRQELEARLDPIDPRHQIDLLKLETYESDEEIKPVFVSRMPNHKVTGAAHAETIRSSKGGYGFTVTKTPLTNLKLNKFGEIEGYYNPASDTLLYDALLARLKDFGGDGAKAFAQPFYKPKKDGSPGPRVDKVKICEKATVGLPVRDGIAANGSMVRIDVFYVEGDGYYFVPIYVADTKKESLPNKAAVAMKPYNLWKKMKDENFVFSLYPGDLVRIQSRKGIKLNLAKGGTGEKEIVRQEGMYYYRSAGIAVAQISVETHDRRYLQPSLGIKTLQSIEKYQVDVLGNYYKVDLPEKRMTFSKEG

SEQ ID NO: 1643 - protein, 1100 aa, unidentified
  REGION 1..1100: note = Description of Unknown: uncultivated organism with predicted taxonomy: Clostridiales
  REGION 1..1100: note = MG21-133 effector
MLEFHYALGLDIGIGSVVWAVLRNQENGEPDRIQDLGVRIFDKAEQPKTGASLAAPRRDARSARRRLRRHSHRLERIRFLMEQSGILSVADIQEMYSTGGFQKSPYQLRAEALDRLLTKEEAVRVLIHLAQRRGYKSNSTAEAAKDEKETGKVKTAIEENRRCMEEHGYRTVGEMMFRDERFWQKNPDGSRYHQTRNKADDYRFTVERAAIVDEAKRIFAAQRSFGAAWMGEAVEASYLSILESQRSFDEGPGGSSPFRGGIGERVGFCTFEPEERRAPKASYTFEYFKLLQDLNRMRLAGMGLPPQPLNAEQRELLKTAALRSASLNYGQIRKKLNLDDGIYFNELYYGDHSREDAEKRKWPQMQSYHKIRTALDRVGKGTISTLTEEQLNAIAEILTRYKSDAKRIAALREAGIPPQLDGALLPLSFSKYGSLSVKAMQKLIPLLEKGQRYDQACTQIYRDHRGLRTDQRTTRLSLHDMDEITNPVVRRAVSQTIKVVNAVVRTYGPPDVVRIELAREMSQNFDERRKAEKRREENRAANERAKEQILEYKGDRVTGLDIVKFKLFREQDGVCLYSGKNLDISRLFEPGYADVDHIIPYSRCFDDSYQNKVLVLASENRQKGNRLPYEYFGQDAARWHGYEVRVENLIRNYRKRQKLLKHHLTEEESAGFIARNLKDTQYITRTIYNLLREHLLFADSRYSKKPVQAVNGAVTAMLRSRWGVHKIREDGDLHHCMDAAVLAATTPGLVQRLTEYSKHRETLIETPAGFVNRLTGELVEEAGDAQRDRFPEPWDRFRQELEARLDPIDPRHQIDRLKLATYESDEELKPVFVSRMPNHKVTGAAHAETIRSSKAGNGFTVTKTPLASLKLNKQGEIDGYYNPESDKLLYDALLARLKAFGGDGAKAFAEPFYKPKKDGTPGPRVDKVKIREKGTTGLPVRDGIAANGSMIRIDVFREEDDGYYFVPIYVADTKKERLPNKAVVAYRPYEDWKEMQDENFVCSLYPGDLVRIQSRKGIKLNLAKGGTGEREIVRQDGLFYYRGADIAGGKIKIETHDRRYSQPSLGVKTLRSIEKYQVDVLGNYYKVKLPENRMTFSKEG

SEQ ID NO: 1644 - protein, 1100 aa, unidentified; identical to SEQ ID NO: 1614
  REGION 1..1100: note = Description of Unknown: uncultivated organism with predicted taxonomy: Clostridiales bacterium 42_27
  REGION 1..1100: note = MG21-134 effector

SEQ ID NO: 1645 - protein, 1100 aa, unidentified; identical to SEQ ID NO: 1538
  REGION 1..1100: note = Description of Unknown: uncultivated organism with predicted taxonomy: Clostridiales
  REGION 1..1100: note = MG21-135 effector

SEQ ID NO: 1646 - protein, 1018 aa, unidentified
  REGION 1..1018: note = Description of Unknown: uncultivated organism with predicted taxonomy: Clostridiales
  REGION 1..1018: note = MG21-136 effector
LYDKSDMVSPYQLRTEGLDRLLNAREFSKVLIHLAQRRGYQSNSTAEEAKNEKENGIIKTAILENQQRMGRGGYRTIGEMMYRDAAFWETINGIRYHCTRNKAGDYRFTVDRASILAEVSILFEAQRRLGAPWASVEMEDAYTAILSGQRSFDEGPGNDSHGNESPFRKAMSHNVGNCTLIPTELRAARADYTAEYFKLLQDLNHMRLVDNSGSHPLTQQQRAILEEMAFRSANLTYGQLRKKLGISDEVRFAGLYYGEDTIEKAEKRKWPQMQSYHKIRTALDKVSKDAIQTLTQDQLDAIGEILAGGVSDAKRINSFCLAGIPEEYHKALLPLSISKRAKLSIAAMRKLIPFLQQGMRYDEACKAAGLDFHGADGKVEKLSDFLNEITNPVVRRAVSQTIKVVKAVVDTYSNRKEMKLDAVRIELAREMHHSIKERNRMKKRQEENREKNEQVKAQILETKPGTRVTGLDIVKFKLYQEQDGICPYSGKPLLIERLYEPGYAEVDHIIPYSRCFDDSYSNKVLVLAEENQQKGNRTPYEYFGANEQRWHEFSARVRASVRDFKKRQKLLNTSFGEEQGKDFIQRNLNDTQHITRVVYNYLRNNLKFADSAYAKAPVRAVNGAVTAMLRGRWGIEKMRGNGDLHHCKDAVVIAATSDSMIKDLTKYYQEEEQLFMGKTHFVDPATGEVLTRKEFQQRFAPKFPQPWDRFREELEVRLDPTNPKEALMALNLSTYEFDPEEEIPPVFVSHMPKHTVTGAAHKETIRGKTETGTAVKTALTSLKLDKNGEIDGYYNPQTDPRLYQALVERLKKFGGDGAKAFAEPFYKPKRDGTPGPRVDKVKIAEKASLSVPTGRGEADNGEMIRIDVFRVPNERKPDDNYYFVPIYVADTKKAILPSKAVVGKKPPEAWKQMKPEHFLFSIFKGDLIYVESKKGISLALAKEAVGEKTIQVKSGLFYFCGADISDGSIKIETHDRRYYKKSLGIKELKAFEKRQVEVLGEVRKVKLPEKRLEFRGRK

SEQ ID NO: 1647 - protein, 1127 aa, unidentified
  REGION 1..1127: note = Description of Unknown: uncultivated organism with predicted taxonomy: Clostridiales
  REGION 1..1127: note = MG21-137 effector
MNYRIGLDLGIASVGWAVLEDDYTGKPKRIVKLGARIFDSAENPKDGSSLALNRREARETRRRLRRRNHRIKRTKNLLEKYNIMTTKEIENMYATYKFQFNPYELRVKGLDEKLTNSELSRILISFVKRRGYKSNSKSEETNDKEMGKLLTATKENELLMKEKGYRTVGEMYLKDEKFKMQMPDGRILLKVRNTTDDYKNTPLRKLLLDEIKQILNKQKELNVNITSDFIDEYINIFTSQRNFDDGPGQPSIYAGNQIEKMLGKCTFEKEENRAAKATYTFEYFKLLQDINHIKIEKHIINETGKKEVLKRPLTEDERNIIINLAKAKVTLTYASLRTALNLESNERFNMIHYKATNVFSDDINKEAEKERKFKEFESYHKMRVAMDKTEKNYILKLSTDELDVIGTVLTLYKNDNKRIEKLAQLNLPENIINEMLKLSFSKVGNLSIKAMKKIILYLEKGYTYDKAVNEVYEDFRGVVNTEKKKKIALRDLEQELSNPVVKRSVSQAIKVLNAITRTYGEPDVINVELARELSKNFADRQNIKKNQENNMQSNEKAKEDILKLGKSNPTGQDIVKYKLWKEQDGTCVYSGKHISIEDLFTEAVDVDHIIPYSMCFDDTYKNKVLVLSSENRQKGNRIPYQYMQEKGRDLDEYEIRVNNIIKNYSKKQRLLKQKFTREDANEWKDRNIQDTQYISRLMYNLIKDHVQFSNNENFERKVFTVNGQITSHIRKRLGINKIRENGDEHHAIDAAIIATVSQGMIQRITKYYQYIDGRYEKNSGEYIDIETGEIITKEQYEAENGSNFPEPWPKFRKELDIRTTCKTKARMEECLLTEKIFYDDYDDVKPIFISRMPRRKITGQAHLDTIRGLRKSDEGLKTLTKTELTKLKLDKNGEIERYPESQKQDDKLLYNALVEQLRKFGGNGTEAFKKPFYKPKSDGTPGPLVKKVKLEDKTTLAVELNNGKAIAANGDMIRIDVFKVEGEGYYFVPIYVSDTIKNKLPNKASVASKTYAEWKKMQDKDFIFSLYPRDLFYVKSKNKIKLTSINKQDKESLDTNELFAYYVNADISTAAIACINHNGEYERRGLGIKRLQEFKKYEVDVLGNYHEVKLPEKRQDFSNLKKGGSLK

SEQ ID NO: 1648 - protein, 1100 aa, unidentified
  REGION 1..1100: note = Description of Unknown: uncultivated organism with predicted taxonomy: Clostridiales bacterium 42_27
  REGION 1..1100: note = MG21-138 effector
MSEFHYALGLDIGIGSVGWAVLRNQPNGEPDRIQDLGVRIFDKAEQPKTGASLAAPRGDARSARRRLRRHRHRLERIRYLMEQRGIMPVADIQAMYAAGGFQKSPYQLRAEALDRPLTKEEAVRVLIHLAQRRGYKSNSTAEAAKDEKETGKVKTAIEENRRCMAEHGYRTVGEMMYRDERFWQKHPDGTRYHQTRNKAEDYRFTVERAAIVDEVRQIFAAQRRLGTAWMDEYMETAYLSILESQRSFDEGPGGDSPFSGGIGERVGACTFEPDEKRAAKATYTFEYFKLLQDLSRMRLTGMGMPPEPLDAAQREVLKSAALRSASLSYGQIRKKLNLDDDVFFHGLYYGEKTKEEAEKRKWPQMQSYHKMRTALDKVGKGAIGTLTEEQLNAVATILTECKSDAKRIAALREAGIPPQFDEALLPLSFSKYGSLSVQAMQKLIPLLEEGLRYDEACTRVYGDHRGLHPEQRKNRLSLTDMDEITNPVVRRAVSQTIKVINAVVRTYGPPDVVRIELAREMSRTFDERRKMEKRQDDNRAANERAKDQIAEYKGDHATGLDIVKFKLYREQDGVCLYSGQNLDIARLFEPGYADVDHIIPYSRCFDDSYQNKVLVLASENRQKGNRLPYEYFGQDEARWHGYEVRVENLIHNYRKRQKLLKRRLTEEESSGFIDRNLKDTQYITRAVYNLIRDHLAFAESNYRKKPVQAVNGAVTAMLRGRWGVQKIREDGDLHHCLDAAVIAATTPGLVQRLTAYNKHRETWERSPAGYVDPATGEMIELPQEARRDPFPKPWERFRQELEARLDPIDPRHQIDLLKLETYESDEEIKPVFVSRMPNHKVTGAAHAETIRSSKGGDGFTVTKTPLTNLKLNKFGEIEGYYNPASDTLLYDALLARLKDFGGDGAKAFAQPFYKPKKDGSPGPRVDKVKICEKATVGLPVRDGIAANGSMVRIDVFYVEGDGYYFVPIYVADTKKESLPNKAAVAMKPYNLWKKMKDENFVFSLYPGDLVRIQSRKGIKLNLAKGGTGEKEIVRQEGMYYYRSAGIAVAQISVETHDRRYLQPSLGIKTLQSIEKYQVDVLGNYYKVDLPEKRMTFSKEG

SEQ ID NO: 1649 - protein, 934 aa, unidentified
  REGION 1..934: note = Description of Unknown: uncultivated organism with predicted taxonomy: Clostridiales
  REGION 1..934: note = MG21-139 effector
MSEFHYALGLDIGIGSVGWAVLRNQPNGEPDRIQDLGVRIFDKAEQPKTGASLAAPRRDARSARRRLRRHRHRLERIRYLMEQRGIMPVADIQAMYAAGGFQKSPYQLRAEALDRPLTKEEAVRVLIHLAQRRGYKSNSTAEAAKDEKETGKVKTAIEENRRCMAEHGYRTVGEMMYRDERFWQKHPDGTRYHQTRNKAEDYRFTVERAAIVDEVRQIFAAQRRLGTAWMDEYMETAYLSILESQRSFDEGPGGDSPFSGGIGERVGACTFEPDEKRAAKATYTFEYFKLLQDLSRMRLTGMGMPPEPLDAAQREVLKSAALRSASLSYGQIRKKLNLDDDVFFHGLYYGEKTKEEAEKRKWPQMQSYHKMRTALDKVGKGAIGTLTEEQLNAVATILTECKSDAKRIAALREAGIPPQFDEALLPLSFSKYGSLSVQAMQKLIPLLEEGLRYDEACTRVYGDHRGLHPEQRKNRLSLTDMDEITNPVVRRAVSQTIKVINAVVRTYGPPDVVRIELAREMSRTFDERRKMEKRQDDNRAANERAKDQIAEYKGDHATGLDIVKFKLYREQDGVCLYSGQNLDIARLFEPGYADVDHIIPYSRCFDDSYQNKVLVLASENRQKGNRLPYEYFGQDEARWHGYEVRVENLIHNYRKRQKLLKRRLTEEESSGFIDRNLKDTQYITRAVYNLIRDHLAFAESNYRKKPVQAVNGAVTAMLRGRWGVQKIREDGDLHHCLDAAVIAATTPGLVQRLTAYNKHRETWERSPAGYVDPATGEMIELPQEARRDPFPKPWERFRQELEARLDPIDPRHQIDLLKLETYESDEEIKPVFVSRMPNHKVTGAAHAETIRSSKGGDGFTVTKTPLTNLKLNKFGEIEGYYNPASDTLLYDALLARLKDFGGDGAKAFAQPFYKPKKDGSPGPRVDKVKICEKA

SEQ ID NO: 1650 - protein, 1100 aa, unidentified
  REGION 1..1100: note = Description of Unknown: uncultivated organism with predicted taxonomy: Clostridiales bacterium 42_27
  REGION 1..1100: note = MG21-140 effector
MSEFHYALGLDIGIGSVGWAVLRNQPNGEPDRIQDLGVRIFDKAEQPKTGASLAAPRRDARSARRRLRRHRHRLERIRYLMEQRGIMPVADIQAMYAAGGFQKSPYQLRAEALDRPLTKEEAVRVLIHLAQRRGYKSNSTAEAAKDEKETGKVKTAIEENRRCMAEHGYRTVGEMMYRDERFWQKHPDGTRYHQTRNKAEDYRFTVERAAIVDEVRQIFAAQRRLGTAWMDEYMETAYLSILESQRSFDEGPGGDSPFSGGIGERVGACTFEPDEKRAAKATYTFEYFKFLQDLSRMRLTGMGMPPEPLDAAQREVLKSAALRSASLSYGQIRKKLNLDDDVFFHGLYYGEKTKEEAEKRKWPQMQSYHKMRTALDKVGKGAIGTLTEEQLNAVATILTECKSDAKRIAALREAGIPPQFDEALLPLSFSKYGSLSVQAMQKLIPLLEEGLRYDEACTRVYGDHRGLHPEQRKNRLSLTDMDEITNPVVRRAVSQTIKVINAVVRTYGPPDVVRIELAREMSRTFDERRKMEKRQDDNRAANERAKDQIAEYKGDHATGLDIVKFKLYQEQDGVCLYSGQNLDIARLFEPGYADVDHIIPYSRCFDDSYQNKVLVLASENRQKGNRLPYEYFGQDEARWHGYEVRVENLIHNYRKRQKLLKRRLTEEESSGFIDRNLKDTQYITRAVYNLIRDHLAFAESNYRKKPVQAVNGAVTAMLRGRWGVQKIREDGDLHHCLDAAVIAATTPGLVQRLTAYNKHRETWERSPAGYVDPATGEMLELPQEARRDPFPKPWERFRQELEARLDPIDPRHQIDLLKLETYESDEEIKPVFVSRMPNHKVTGAAHAETIRSSKGGYGFTVTKTPLTNLKLNKFGEIEGYYNPASDTLLYDALLARLKDFGGDGAKAFAQPFYKPKKDGSPGPRVDKVKICEKATVGLPVRDGIAANGSMVRIDVFYVEGDGYYFVPIYVADTKKESLPNKAAVAMKPYNLWKKMKDENFVFSLYPGDLVRIQSRKGIKLNLAKGGTGEKEIVRQEGMYYYRSAGIAVAQISVETHDRRYLQPSLGIKTLQSIEKYQVDVLGNYYKVDLPEKRMTFSKEG

SEQ ID NO: 1651 - protein, 1113 aa, unidentified
  REGION 1..1113: note = Description of Unknown: uncultivated organism with predicted taxonomy: Firmicutes
  REGION 1..1113: note = MG21-141 effector
MKKRKKKKKDKKDCHYTLGLDIGIASIGWAVLGNDEEGKPNRIIDLGVRIFDKAEVENTGESLAAPRRDARSARRRLRRHRHRLERIRYLLVQQGVLTQEEMTHLYDKSDMVSPYQLRTEGLDRLLNAQEFSKVLIHLAQRRGYQSNSTAEEAKNEKENGVIKSAILENQQRMERGGYRTIGEMMYRDAAFWETINGIRYHCTRNKAGDYRFTVDRASILLEVSLLFEAQRRLGSPWASQEMEDAYTAILSSQRSFDEGPGGDSPFRKGIADRVGNCTLEPTEQRAAKADVTFERFKLLQDLNHMRLVDNNGSHPLTQQQRDDLEAAAFHTANLTYGQLRKKLGLSEEVRFAGLYYGTDPIEKAEKRKWAQMQSYHKIRMALDKVSKDAILTLTQDQRDAIGEILTAYKADAARIEHLQSAGIPKEYHNALLSLSFSKYGKLSCCAMRKLIPLLQQGMRYDEACREVYQDHRTKEASEKKQRLSLNDIDEITNPVVRRAVSQTIKVVNAVVRIYGNPDAVRIELAREMSHSFDERNKMKKRQEDGRQENEQVKAQILETKAGDRVTGLDIVKFKLYREQDGVCLYSGKGLDLQRLYEPGYADVDHIIPYSRCFDDSYSNKVLVLASENRQKGNCTPYEYFGENEQRWHEFSVRVGASVRDFKKRQKLLNTSFGEEQGKNFIQRNLNDTQHITRVVYNYLRNNLEFADSAYAKAPVQAVNGAVTAMLRGRWGIEKMRGDGDLHHCKDAVVIAATSPSMIQRLSNYYKEEERLFMGKTHFVDPGTGEVLTRKEFQQRFAPQFPQPWPRFREELEARLDPVNPTEALMALHLSTYEPEEEIKPVFVSHMPKRTVTGAAHEETIRSRTETGTVTKTALTALKLDKNGEIDGYYSPQTDPRLYRALVERLKQFGGEGTKAFAEPFYKPKKDGTPGPRVDKVKIERKSSLSVPTARGVAKNGDMIRMDVFRVPNERKSDDSYYFVPIYVADTKKATLPSKAVVKGKAPEAWKQMKPEHFLFSVFKGDLIYVESKKGISLALAKEAVGEKIIQVKSGLFYFCGADISDGSIKIETHDGRYYKKSLGIKELKAFEKRQVDVLGNVSKVRLPETRLEFRGRK

SEQ ID NO: 1652 - protein, 1061 aa, unidentified
  REGION 1..1061: note = Description of Unknown: uncultivated organism with predicted taxonomy: Clostridiales bacterium 42_27
  REGION 1..1061: note = MG21-142 effector
NYALLYQLDLNEWVWRKERDARSARRRLRRHRHRLERIRYLMEQRGIMPVADIQAMYAAGGFQKSPYQLRAEALDRPLTKEEAVRVLIHLAQRRGYKSNSTAEAAKDEKETGKVKTAIEENRRCMAEHGYRTVGEMMYRDERFWQKHPDGTRYHQTRNKAEDYRFTVERAAIVDEVRQIFAAQRRLGTAWMDEYMETAYLSILESQRSFDEGPGGDSPFSGGIGERVGACTFEPDEKRAAKATYTFEYFKLLQDLSRMRLTGMGMPPEPLDAAQREVLKSAALRSASLSYGQIRKKLNLDDDVFFHGLYYGEKTKEEAEKRKWPQMQSYHKMRTALDKVGKGAIGTLTEEQLNAVATILTECKSDAKRIAALREAGIPPQFDEALLPLSFSKYGSLSVQAMQKLIPLLEEGLRYDEACTRVYGDHRGLHPEQRKNRLSLTDMDEITNPVVRRAVSQTIKVINAVVRTYGPPDVVRIELAREMSRTFDERRKMEKRQDDNRAANERAKDQIAEYKGDHATGLDIVKFKLYREQDGVCLYSGQNLDIARLFEPGYADVDHIIPYSRCFDDSYQNKVLVLASENRQKGNRLPYEYFGQDEARWHGYEVRVENLIHNYRKRQKLLKRRLTEEESSGFIDRNLKDTQYITRAVYNLIRDHLAFAESNYRKKPVQAVNGAVTAMLRGRWGVQKIREDGDLHHCLDAAVIAATTPGLVQRLTAYNKHRETWERSPAGYVDPATGEMIELPQEARRDPFPKPWERFRQELEARLDPIDPRHQIDLLKLETYESDEEIKPVFVSRMPNHKVTGAAHAETIRSSKGGDGFTVTKTPLTNLKLNKFGEIEGYYNPASDTLLYDALLARLKDFGGDGAKAFAQPFYKPKKDGSPGPRVDKVKICEKATVGLPVRDGIAANGSMVRIDVFYVEGDGYYFVPIYVADTKKESLPNKAAVAMKPYNLWKKMKDENFVFSLYPGDLVRIQSRKGIKLNLAKGGTGEKEIVRQEGMYYYRSAGIAVAQISVETHDRRYLQPSLGIKTLQSIEKYQVDVLGNYYKVDLPEKRMTFSKEG

SEQ ID NO: 1653 - protein, 1040 aa, unidentified
  REGION 1..1040: note = Description of Unknown: uncultivated organism with predicted taxonomy: Clostridiales bacterium 42_27
  REGION 1..1040: note = MG21-143 effector
RSARRRLRRHRHRLERIRYLMEQRGIMPVADIQAMYAAGGFQKSPYQLRAEALDRPLTKEEAVRVLIHLAQRRGYKSNSTAEAAKDEKETGKVKTAIEENRRCMAEHGYRTVGEMMYWDERFWQKHPDGTRYHQTRNKAEDYRFTVERAAIVDEVRQIFAAQRRLGTVWMDEDMETDYLSILESQRSFDEGPGGDSPFSGGIGERVGACTFEPDEKRAAKATYTFEYFKLLQDLSRMRLTGMGMPPEPLDAAQREVLKSAALRSASLSYGQIRKKLNLDDDVFFHGLYYGEKTKEEAEKRKWPQMQSYHKLRTALDKVGKGAIGTLTEEQLNAVATILTECKSDAKRIAALREAGIPPQFDEALLPLSFSKYGSLSVRAMQKLIPLLEEGLRYDEACTRVYGDHRGLRPEQRKNRLSLTDMEEITNPVVRRAVSQTIKVINAVVRTYGPPDVVRIELAREMSRTFDERRKMEKRQDDNRAANERAKDQIAEYKGDHATGLDIVKFKLYREQDGVCLYSGQNLDIARLFEPGYADVDHIIPYSRCFDDSYQNKVLVLASENRQKGNRLPYEYFGQDEARWHGYEVRVENLIHNYRKRQKLLKRRLTEEESTGFIDRNLKDTQYITRAVYNLIRDHLAFAESNYRKKPVQAVNGAVTAMLRGRWGVQKIREDGDLHHCLDAAVIAATTPGLVQRLTAYNKHRETWERSPAGYVDPATGELIELPQEARRDPFPKPWERFRQELEARLDPIDPRHQIDLLKLETYESDEEIKPVFVSRMPNHKVTGAAHAETIRSSKGGDGFTVTKTPLTNLKLNKFGEIEGYYNPASDTLLYDALLARLKDFGGDGAKAFVQPFYKPKKDGSPGPRVDKVKICEKATVGLPVRDGIAANGSMVRIDVFYVEDDGYYFVPIYVADTKKESLPNKAVVAYKAYSEWKEMKDENFIFSLYPGDLVRIQSRKGIKLNLAKGGTGEKEIVRQEGMYYYRASGITVGAIQIETHDRRYLQPSLGIKTLQSIEKYQVDVLGNYYKVDLPEKRMTFSKEG

SEQ ID NO: 1654 - protein, 1098 aa, unidentified
  REGION 1..1098: note = Description of Unknown: uncultivated organism with predicted taxonomy: Clostridiales
  REGION 1..1098: note = MG21-144 effector
LSLRYTLGLDIGIASVGWAVLENNIDGEPIKIERLGVRIFDKAEQPKTGASLAEPRREARGQRRTIRRRRHRKDRIKQLIQQNGIMTRVEMAEMFEHLQFETSVYELRVQALERALTKQEFVRVLIHLAQRRGYKSNSKSEEAKDKENGKVKSAISENKKCMEENGYRTIGEMLLNDDRFWECNPDGIKIFVPHNHPDDYRTTVERSMVEDEIQLIFSRQRALGVPYATSEFEEAYLEIWGSQRNFDEGPGGKSPYGGNMIEKMLGHCTFEKDEPRAAKGSYSAEYFRLLQDVNHLRLVKNNGESCALTREQKQIYIDLVMKSAAASYAQLRKKLELSNDISFNMLRYGSDEIGKVERKKLGHMKFYHEMRKALNTVQKDAISTVSWEQRDEIARILLCYKSDDKRKAQLEKLDIPREFIPALLTLSTSKTAHLSVKALRKLIPYLEKGMTYAEACKEVYGEQKSSITKKNKLSLFDIEPINNPVVRRAVSQTIRVINAVVREYGAPEVVRVELAREMGKPYDVRTQMTKKQEANAKRNEELRQQIKKIKGAEPTGQDIVKFKLFQDQNGVCLYSGQNLDITRLFEAGYVDVDHIIPYSISFDDSYTNKVLVRSPENRQKGNRIPADYFKSDPARWKRFETLVNTQVHNWKKKRNLLTQVLSEEQKNGFKQRNLVDTQYIARVIYNLINDHLQFAETGKYDKKRRTQAVNGAITAHVRKRLGIQKIREDGDLHHAVDAAVVACVSPGMIQKITQYTKHRECIRKTKEGYLDTETGELMTREAYDAKYSPRFPAPWERFRQELEARLSDNPAEEIARLHLATYDSEEEIKQVFVSRKQTHKISGAAHEATIRSAKKPGGSISKKPLTSLSLNKKTGEIKDYYAPESDRLLYEALKKRLEEFDGNAEKAFAEPFYKPKHDGTRGPLVKKVKIYEKKTITVPVGGGNADNGSMIRVDVFYMEDDGYYYVPIYTADVIKDELPNKAVVQKKLPEDWKEMDDKDFLFSMYPNELLYIEHRKGIKLKTKKGSSRQEQIVRKAGFYYFKGLNIAANALFIITHDNGYEQPSLGGKTLSCLKKYTVDALGNYSEVSLPEKRKPLRG

SEQ ID NO: 1655 - protein, 1096 aa, unidentified
  REGION 1..1096: note = Description of Unknown: uncultivated organism with predicted taxonomy: Clostridiales
  REGION 1..1096: note = MG21-145 effector
MEGFRYSLGLDIGIASVGFAVIQNDRNGEPIKIERLGVRVFDRAEQPKTGASLALPRRQARGSRRVIRRRRHRKERIKWLIEDSGLMSRPEQDALLGSGAFDKSVYELRVDALDRRLADDEAVRLLIHFAQRRGYKSNSKAEEAKEAAESGKVKSAISANRQRMEENGYRTVGEMLWRDPLFKRTEPDGRQILVVHNQPGEYKVTVERSMLLEELALIFVRQRELGAPWASEQFEVAYTDIWSSQRNFDDGPGGDSPYGGSQISRMLGKCIFEKELDRAPRASFSAEYFRLLQTANNLKIVGRGQPSEFLDEEQRKLFVELAFSSAAATYTQLRKKLDLPDDLYFNHLYYGEKSKEEIEKKKLGMLPFYHRLRTALNKVEKGAIDQLTAAQRDDIAMILLLYKSDDNRTLRLRDAGIPEEYIPAILELSTAKAAHLSLKAMRKLLPYLEQGYTYDKACKEVYGSHDGKKETERTGRLRLDMTDEITNPVVRRAVSQSIKVINAVVRVYGPPETVRIELARELGKTFDERSKQEKRINENAARNEQAREQIREYKSGDSTGLDIVKFKLFQEQNGVCLYSGKNLDISRLFEAGYVDVDHIIPYSISFDDSYSNKVLVLAGENRQKGNRIPYQYFGNDRERWNRFETLVGTQIRSFKKRKNLLIRSLGEAQIEGFRQRNLVDTQYLSRVIFRLIDENMAFAETGNYKRKTQTVSGAITAQVRKRLGIDKIRENGDLHHAADAAVIACISPGMVHKVTNYAKRCELYRDGQGYIDYETGEVMTKEAFDEKYAPRFPEPWPMFRKELEARLSADPRAEIEHLNLPAYDSSDELRPVFVSRMPRHKVTGAAHMETVRSGKLEGKTVTKTALTDLKLVKGEIKGYYRPEDDPLLYDALKARLQAFGGDAKKAFAEPFHKPKHDGAPGPLVKKVKIMDASSLNVPVNGGIAANGSMVRVDVFRVEDDGYYFVPVYVSDTIRTRLPDRAVVANKPYSEWKVMRDEDFVFSLFPGDLIRIKNSRRIKLNAAKGSTGEPVKYVKDALFYFSGLNISTGALGIQLHDRSYGQTGLGGKTLSLIEKYQVDVLGNYAPVHLPEKRMGFR

SEQ ID NO: 1656 - protein, 1521 aa, unidentified
  REGION 1..1521: note = Description of Unknown: uncultivated organism with predicted taxonomy: Bacteroidales
  REGION 1..1521: note = MG22-1 effector
MTKNTRNIIGLDLGTNSIGWSWIQQLISPTPTQPSEYLFDGTPIIRMSGSRIIPMPGDVTGSFERGETISKTKDRTAKRMARRMNERFQLRRERLNRVLNIMGFLPEHYARALDRYGKLNEESNTTIAWRSKEDGKNEFIFYPSFLEMASIFKEHHPDIQRIPLDWTLYYLRSKALHQAITKEELSWVLHSFNQKRGYYQSREDITEEDKTKKVEYIKGVVNSVEDTGEKAKGKKIYKVTFADGTEFTSTKSEAPLWIGRTREIIVTTSLDTSGKPKLDKEGKIIQSAKTPDEKDWTLIKIRTEATIDDSKLTVGEYIFHALLKNPETKIKGAHVSTIDRRFYINEINAILKEQEKYHEELRDKSLYEQCTQALYAQNEVRRNIIAPWSMSDLLIKDILFYHRPLKSKKSQISECSLEFHTYTDKDGATHRQGIKCIPTSHPLFQEYRIWQFIANLRIYERERFDNGKHFINEDRTSDFLTTKKKEELYEWLAEKDSVSQKTLLGHLGLKVERYHWNFPEEKTYPCGETRHLIQSRMKKANLQKAFHSLISDEQKDCFERGLWHILYSVSDYNELCKALKTFARKTGFTLEEQSLFVEAFSSCPPFKKDYGAYSKRAITKLLPLMRIGKFWHEESIDSTTKTRIEHLISGEECSGIDVRVREKVTKAGLCESIEQYQGLPQWLANYVVYNRHSEASEITKWESPDELDNYIRSFKQYSLRNPIVEQVSLETLRVVRDLWTELQKEGQTIDEIHLEMGRDLKNTAEERSRIFRRNSENEDTIFRIKLLLEEFYANEKDIKDVRPYSPSQQELLRIYEEGVWQQEKDIPQDIKDIKKRISNDKDIKDITPNDIQRYRIWMDQKYCSPYTGKTIPLSRLFTTDYEIEHVIPRSRYFDDSYNNKVICEAAVNKDKNNRLGMEYIMAAGGKTIELGNGKNVQILKEEEYVELVDKIFGSNTRKRNIMLADEITEEFSHRQLNDTRYIARFMKGILSNIVREKNAEGTLEPEETSKNLIVCSGRITDRVKQDWGLNDIWNHIITPRFERLNKKTSSNDFGEYVCKEGKRYFQTRVPLNLQKGFNKKRIDHRHHAMDAIAIACINRSIVNYLNNAAANQTEREDLRRAVCIPERNGQTKRQLRSPWHCFARDAENALRQIVVSFKQNLRVATKATNSYECFDTASGKKIRKHQSNREHYAIRKPLHKDSVYGEVILTSIASVNLKKALLKAERILDKRLKEKIFELRKLYNYSNKQIEEHLTKVCINCPEWKNYDFKKIAVRILSNDADATHIVAIRKPLDESFDEVKINTITDTGIQKILLNHLSRYADDPKKAFSPEGIEDMNANIASLNGGKQHLPIYKVRVSEKDNGGYFPIGQKGNRPKKYVTTAKDTNLFFAVYADSKGKRSYKTIDLRTAIECRKQGLSVAPSINEKGDKLLFTLSPNDLVYMPSEGEEANGFAIDNNLNKDQIYKMVSANNKQCFFIPHTVADFISRGEEYNSHNKIELTEDRRSIKEHCVPLKVNRLGK

SEQ ID NO: 1657 - protein, 1542 aa, unidentified
  REGION 1..1542: note = Description of Unknown: uncultivated organism with predicted taxonomy: Bacteroidales
  REGION 1..1542: note = MG22-3 effector
MKNILGLDLGTNSIGWAWIQSKVPQQTDDCPSSSEYLMPDCATIRMAGSRVLPMDGKMLSGFESGLAVSKTKERTTYRMARRVNERFQLRRERLNRVLRILGFLPAHYEACLDRYGKIDEEKNVTIPWVPTADGKRKFLFYASFLEMKERFHEHHPNLEKIPLDWTLYYLRTKALQQAITKEELAWVLHSFNQKRGYNQSRDEVKDEDASQKEEYVKVKVVSVVDSGEKKKGKTSYIVTTESNLQFTTENAAAPSWLDKEREFIVTTKLNPTGLPKMNQEGRIDCTVRIPKEEDWELKKKRTEALIADSHMTVGEYIFHSLLDNPDAKIKGAKVGTIDRHFYKEELIAILKKQAAFHPELKDAERYAECVSALYASNEMHRNILSAWDMPRLIVNDIIFYQRPLKSKKSDIAECPFESRYFMDKEKKLQKQGIKCIPTSHPHFQEYRIWQFLSNLRVLRREVRENGRYMTDVDVSAHYLTDKVKVELYEWLAGKANVKQKELLSKLRMSEKEFRWNYVEDNIYPCGETRSLLSTRLKKAKLPLSLLDSPSSDGSHTFEFELWHILYSVSDLAELRKALRRFARKHDFTAEQQEAFVETFVKCPPFKKDYGAYSDKALVKLLSLMRIGKYWNADRIDTNTRRRIACLLDGEACDSISLRTREKVAERGLQQSIEQFQGLPQSLACYVVYDRHAEASEVVRWESPADLQQFTRQFKQYSLRNPIVEQVVLETLRVVHDLWEEIQKDGGTIDEIHLEMGRDLKNTAEQRARIMRRNRENEMTNFRIKLLLQELHDCQPDIEGIRPYSPSQQELLRLYEETVWESESGKLGGKEASKDIPDDIKKIRDLLSKPSDKPIPQSAIQRYRLWLDQKYLSPYTGRPIPLARLFTADYEIEHIIPRSIFFDDSYANKVICESAVNKLKNNRLGMQFIREMDGRVETVKLGEGRETSILSVDGYVDLVNDLFRNNPRKRNNLLAEEITEDFCHRQLSDTRYIARYIKGILSNIVRQRAADGTLEQEATSKNLIVCTGQITDRVKQDWGLNDVWNHIITPRFERLNRMTGSNDYGEWCCKEGKRYFQTRVPLHLQIGFNKKRIDHRHHAMDAIAIACVNRNVVNYLNNAAAHATDRMDLRMRICRPSGNGQTKKEIRSPWKNFAHDAECALQAITVSFKQNVRIITKATNTYEGYDASGKKVRRCQTSSDHYSIRKPLHKDTVYGEVVLPVVNQVPLKKALLRVNRIVNGKLRKKIQEMQSSGLTDKQIVDFFMKTCADSPEWNSINFKKIEVRAYSNEEGQTRMAAIRTAIDESFSEKVIGSITDVSIQRILLNHLRECNGDSEEAFSPEGIETMNRNIVRLNGGKPHLPIYKVRLGEAMGKKFAVGQRGNKGKKFVITAKNTNLFFAVYANDEGKRSFETIDLHCALEMQKQGSSVAPPINENGDKLLFVLSPNDLVYVPSESELQHDIDSEDLKLDHVFKVVSFSENRCCFVPHSMSSPIAAGFEFNSPNKIEVVSRLGLFEQDKETVSIKNICLPIKMDRLGHLHLVKI

SEQ ID NO: 1658 - protein, 1542 aa, unidentified; identical to SEQ ID NO: 1657
  REGION 1..1542: note = Description of Unknown: uncultivated organism with predicted taxonomy: Bacteroidales
  REGION 1..1542: note = MG22-4 effector

SEQ ID NO: 1659 - protein, 1521 aa, unidentified
  REGION 1..1521: note = Description of Unknown: uncultivated organism with predicted taxonomy: Bacteroidales
  REGION 1..1521: note = MG22-5 effector
MTKSTRNIIGLDLGTNSIGWSWIQQLISPTPTQPSEYIFDGTPIIRMSGSRIIPMPGDVTGSFERGETISKTKDRTANRMARRMNERFQLRRERLNRVLNIMGFLPEHYARALDRYGKLNEESNTTIAWRSKEDGKNEFIFYPSFLEMASIFKEHHPDIQRIPLDWTLYYLRSKALHQAITKEELSWVLHSFNQKRGYYQSREDITEEDKTKKVEYIKGVVNSVEDTGEKAKGKKIYKVTFADGTEFTSTKSEAPLWIGRTREIIVTTSLDTSGKPKLDKEGKIIQSAKTPDEKDWTLIKIRTEATIDDSKLTVGEYIFHALLKNPETKIKGAHVSTIDRRFYINEINAILKEQEKYHEELRDKSLYEQCIKALYAQNEVRRNIIAPWSMKDLLTKDILFYHRPLKSKKSQISECPLEFHCYTDKDGETHRQGIKCIPVSHPLFQEYRIWQFISNLRIYEREHFDNGKHFTNVDKTSEFLTNEKKEELYEWLAEKDSVSQKTLLGHLGLKVERYHWNFPEEKTYPCGETRHLIQSRLKKANLQKAFHSLISDEQKDCFERGLWHILYSVSDYNELCKALKTFARKIGFTLEEQLLFVEAFSSCPPFKKDYGAYSKRAITKLLPLMRIGKFWHEESIDSTTKNRIEHLISGEECSGIDVRVREKVAKAGLCESIEQYQGLQQWLANYVVYNRHSEASEITKWESPDELDNYIRSFKQYSLRNPIVEQVSLETLRVVRDLWAELQKEGQTIDEIHLEMGRDLKNTAEERSRIFRRNSENEDTNFRIKLLLEEFYANEKDIIDVRPYSPSQQELLRIYEEGVWQQEKDIPQDIKDIKKRISNDKDIKDITPNDIQRYRIWMDQKYCSPYTGKTIPLSRLFTTDYEIEHVIPRSRYFDDSYNNKVICEAAVNKDKNNRLGMEYIMAAGGKTIELGNGKNVQILKEEEYVELVDKIFGNNTRKRNIMLADEITEEFSHRQLNDTRYIARFMKGILSNIVREKNADGTLEPEETSKNLIVCSGRITDRVKQDWGLNDIWNHIITPRFERLNTKTSSNDFGEYVCKDGKRYFQTRVPLNLQKGFNKKRIDHRHHAMDAIAIACVNRSIVNYLNNAAANQTEREDLRRAVCIPERNGQTKRQLRSPWHCFARDAENALRQIVVSFKQNLRVATKATNSYECFDTASGKKIRKHQSNREHYAIRKPLHKDSVYGEVILPSIASVNLKKALLKADRILDKRLKDKIFELRKLYNYSNKQIEEHLTKVCINRPEWKNYDFKKIAVRILSNDADATHIVAIRKPLDETFDEEKIKAITDTGIQKILLNHLRQNDNDPKKAFTPEGIENMNANIVLLNGGKQHLPIYKVRISEKNNGGYFPIGQKGNRSQKYVTTAKDTNLFFAVYADSKGKRSFNMIDLRTAIECRKQGLSVAPSINEKGEKLLFTLSPNDLVYMPSEEEEANGFSIKGNLIKEHIYKMVSATNRQCFFIPHTVADFISRGQEYNVLNKIELAEDGRSIKEHCVPIKVNRLGK

SEQ ID NO: 1660 - protein, 1467 aa, unidentified
  REGION 1..1467: note = Description of Unknown: uncultivated organism with predicted taxonomy: Bacteroidales
  REGION 1..1467: note = MG22-6 effector
MTKNTRNIIGLDLGTNSIGWSWIQQLISPTPTQPSEYIFDGTPIIRMSGSRIIPMPGDVTGSFERGETISKTKDRTAKRMARRMNERFQLRRERLNRVLNIMGFLPEHYARALDRYGKLNEESDTTIAWRSKEDGKNEFIFYPSFLEMASIFKEHHPDIQRIPLDWTLYYLRSKALHQAITKEELSWVLHSFNQKRGYYQSREDITEEEIIVTTSLDTSGKPKLDKEGKIIQSAKTPDEKDRTLIKIRTEATIDDSKLTVGEYIFHALLKNPETKIKGAHVSTIDRRFYINEINAILKEQEKYHKELRDKSLYEQCIKALYAQNEVRRNIIAPWSMSDLLIKDILFYHRPLKSKKSQISECPLEFHTYTDKNGATHRQGIKCIPTSHPLFQEYRIWQFIANLRIYERERFDNGKHLINEDKTSDFLTTKKKEELYEWLAERDSVSQKTLLGKIGLKVEDYHWNFPEEKTYPCGETRHLIQSRLKKANLQKAFHSLISDEQKDCFERGLWHILYSVSDYNELCKALKTFARKTGFTLEEQLLFVEAFSSCPPFKKDYGAYSKRAITKLLPLMRIGKFWHEESIDSTTKNRIEHLISGEECSDIDVRVREKVAKAELCESIGQYQGLQQWLANYVVYNRHSEASEITKWESPDELDNYIRSFKQYSLRNPIVEQVSLETLRVVRDLWTELQKEGQTIDEIHLEMGRDLKNTAEERSRIFRRNSENEDTNFRIKLLLEEFYANEKDIKDVRPYSPSQQELLRIYEEGVWLQEKDIPQDIKDIKKRISNDKDIKDITPNDIQRYRIWMDQKYCSPYTGKTIPLSRLFTTDYEIEHVIPRSRYFDDSYNNKVICEAAVNKDKNNRLGMEYIMAAGGKTIELGNGKNVQILKEEEYVELVDKIFGNNTRKRNIMLTDEITEDFSHRQLNDTRYIARFMKGILSNIVRKKNADGTLEPEETSKNLIVCSGRITDRVKQDWGLNDIWNHIITPRFERLNKKTSSNDFGEYVCKDGKRYFQTRVPLNLQKGFNKKRIDHRHHAMDAIAIACVNRSIVNYLNNAAANQTEREDLRRAVCIPERNGQTKRQLRSPWHCFARDAENALRQIVVSFKQNLRVATKATNSYECFDTASGKKIRKHQSNREHYAIRKPLHKDSVYGEVILTSIASVNLKKALLKADRILDKRLKEKIFELRKLYNYSNKQIEEHLTKVCINCPEWKNYDFKKIAVRILSNDADATHIVAIRKPLDESFDEVKINTITDTGIQKILLNHLSRYADDPKKAFSPEGIEDMNANIASLNGGKQHLPVYKVRVSEKDNGGYFPIGQKGNRPKKYVTTAKDTNLFFAVYADSKGKRSYKTIDLRTAIECRKQGLSVAPSINEKGDKLLFTLSPNDLVYMPSEGEEANGFAIDNNLNKDQIYKMVSANNKQCFFIPHTVADFISRGEEYNSHNKIELTEDRRSIKEHCVPLKVNRLGK

SEQ ID NO: 1661 - protein, 1521 aa, unidentified; identical to SEQ ID NO: 1659
  REGION 1..1521: note = Description of Unknown: uncultivated organism with predicted taxonomy: Prevotella
  REGION 1..1521: note = MG22-7 effector

SEQ ID NO: 1662 - protein, 1521 aa, unidentified
  REGION 1..1521: note = Description of Unknown: uncultivated organism with predicted taxonomy: Bacteroidales
  REGION 1..1521: note = MG22-8 effector
MTKNTRNIIGLDLGTNSIGWSWIQQLISPTPTQPSEYIFDGTPIIRMSGSRIIPMPGDVTGSFERGETISKTKDRTAKRMARRMNERFQLRRERLNRVLNIMGFLPEHYARALDRYGKLNEESDTTIAWRSKEDGKNEFIFYPSFLEMASIFKEHHPDIQRIPLDWTLYYLRSKALHQAITKEELSWVLHSFNQKRGYYQSREDITEEDKTKKVEYIKGVVNSVEDTGEKAKGKKIYKVTFANGTEFTSTKSEAPLWIGRTREIIVTTSLDTSGKPKLDKEGKIIQSAKTPDEKDWTLIKIRTEATIDDSKLTVGEYIFHALLKNPETKIKGAHVSTIDRRFYINEINAILKEQEKYHKELRDKSLYEQCIKALYAQNEVRRNIIAPWSMSDLLIKDILFYHRPLKSKKSQISECPLEFHTYTDKNGATHRQGIKCIPTSHPLFQEYRIWQFIANLRIYERERFDNGKHLINEDKTSDFLTTKKKEELYEWLAERDSVSQKTLLGKIGLKVEDYHWNFPEEKTYPCGETRHLIQSRLKKANLQKAFHSLISDEQKDCFERGLWHILYSVSDYNELCKALKTFARKTGFTLEEQLLFVEAFSSCPPFKKDYGAYSKRAITKLLPLMRIGKFWHEESIDSTTKNRIEHLISGEECSDIDVRVREKVAKAELCESIGQYQGLQQWLANYVVYNRHSEASEITKWESPDELDNYIRSFKQYSLRNPIVEQVSLETLRVVRDLWTELQKEGQTIDEIHLEMGRDLKNTAEERSRIFRRNSENEDTNFRIKLLLEEFYANEKDIKDVRPYSPSQQELLRIYEEGVWLQEKDIPQDIKDIKKRISNDKDIKDITPNDIQRYRIWMDQKYCSPYTGKTIPLSRLFTTDYEIEHVIPRSRYFDDSYNNKVICEAAVNKDKNNRLGMEYIMAAGGKTIELGNGKNVQILKEEEYVELVDKIFGNNTRKRNIMLTDEITEDFSHRQLNDTRYIARFMKGILSNIVRKKNADGTLEPEETSKNLIVCSGRITDRVKQDWGLNDIWNHIITPRFERLNKKTSSNDFGEYVCKDGKRYFQTRVPLNLQKGFNKKRIDHRHHAMDAIAIACVNRSIVNYLNNAAANQTEREDLRRAVCIPERNGQTKRQLRSPWHCFARDAENALRQIVVSFKQNLRVATKATNSYECFDTASGKKIRKHQSNREHYAIRKPLHKDSVYGEVILTSIASVNLKKALLKADRILDKRLKEKIFELRKLYNYSNKQIEEHLTKVCINCPEWKNYDFKKIAVRILSNDADATHIVAIRKPLDESFDEVKINTITDTGIQKILLNHLSRYADDPKKAFSPEGIEDMNANIASLNGGKQHLPVYKVRVSEKDNGGYFPIGQKGNRPKKYVTTAKDTNLFFAVYADSKGKRSYKTIDLRTAIECRKQGLSVAPSINEKGDKLLFTLSPNDLVYMPSEGEEANGFAIDNNLNKDQIYKMVSANNKQCFFIPHTVADFISRGEEYNSHNKIELTEDRRSIKEHCVPLKVNRLGK

SEQ ID NO: 1663 - protein, 1524 aa, unidentified
  REGION 1..1524: note = Description of Unknown: uncultivated organism with predicted taxonomy: Bacteroidales
  REGION 1..1524: note = MG22-9 effector
MTKNTRNIIGLDLGTNSIGWSWIQQLISPIPTQPSEYLFDGTPIIRMSGSRIIPMPGDVTGSFERGETISKTKDRTAKRMARRMNERFQLRRERLNRVLNIMGFLPEHYARALDRYGKLNEESNTTIAWRSKEDGKNEFIFYPSFLEMASIFKERHPDIQRIPLDWTLYYLRSKALHQAITKEELSWVLHSFNQKRGYYQPRKDITEKEKTKKIEYIKDIVRSVEDTGEKTKGKKAYKVTFDNGFKFISTEAEAPLWVGRTREVIVTTSLDATGAPKRDKEGNIIQSVKAPEEKDWTLKKIRTENHIDKSKLTVGEYILQTLLEKPNTKIKGAHVSTIDRRFYIHEINAILKVQEKYHKELRDKSLYEQCTQALYTQNEVRRNIIAPWSMSDLLIKDILFYHRPLKSKKSQISECPFEFHNYTDKNGASHRQGIKCIPTSHPLFQEYRIWQFIANLRIYERERFDNGKHLINENKTSEFLTSEKKEELFEWLAEKDSVSQKTLLGHIGLKVEHYHWNFPEEKTYPCGETRHLIQSRLKKANLLKSFCSLVPENQKKEFELKLWHILYSVSDYNELRKALETFARKTGFTREEQDLFVEFFSSCPPFKKVYGAYSKRAIARLLPLMRLGKYWHEEHIDSATMNRIEHLISGEECNGIDVRVRENIAKFGLNESIEQYQGLPQWLACYVVYNRHSEASEVTKWESPEELDNYIKAFKQYSLRNPIVEQISLETLRVVHDLWAEIQKEGQTIDEIHLEMGRDLKNTAEERSRIFRRNSENEDTNFRIKLLLEEFYTNEEDMEGIRPYSPSQQELLRIYEEGVWQQEKEIPQDIKDIKKKLSSDKDINEITHSDVQRYRIWMDQKYCSPYTGNPIPLSRLFTPDYEIEHVIPRSRYFDDSYNNKVICEAAVNKDKNNRLGMEYIMEAGGKTIELGNGKNVQVLKEREYVELVNEVFKNNTRKRNILLADEIPEDFSHRQLNDTRYIARFMKGFLSNIVREKNADGTLELEETSKNLIVCSGRITDRIKQDWGLNDVWNHIITPRFERLNQKTSSDNFGEYVCKEGKRYFQTRVPLNLQKGFNKKRIDHRHHAMDAIAIACVNRSIVNYLNNAAANQTEREDLRRAVCIPERNGQTKRQLRSPWRNFAKDAENALRQIVVSFKQNLRILTKATNSYECFDTTSGKKIRRHQVNEEHYTVRKPLHEDFVYGEVILSSIASVNFKKALQKANRILDKRLKDKIFELRKLYSYSNKQIEEHLTKVCINTPEWKDYDFKKINIRILSNDEGATHIVAIRKPLDESFDKVKINTITDTGIQKILLNHLSRYAEDPKKAFSLEGIEDMNANITSLNGGKQHLPIYKVRVSEKDNGGYYPIGQKGNRSKKYVTTAKDTNLFFAVYADSNGKRSFKTIDLRTAIECKKQGLSVAPSVNEKGEQLLFTLSPNDLVYMPSEEEEANGFAIDNNLNKEHIYKMVSTDSNRCFFIPHTVADFISRGEEYNRHNKIELTEDRRSIKEHCVPLKVNRLGKKTL

SEQ ID NO: 1664 - protein, 1521 aa, unidentified
  REGION 1..1521: note = Description of Unknown: uncultivated organism with predicted taxonomy: Bacteroidales
  REGION 1..1521: note = MG22-10 effector
MTKNTRNIIGLDLGTNSIGWSWIQQLISPTPTQPSEYLFNGTPIIRMSGSRIIPMPGDVTGSFERGETISKTKDRTAKRMARRMNERFQLRRERLNRVLNIMGFLPEHYARALDRYGKLNEESNTTIAWRSKEDGKNEFIFYPSFLEMASIFKERHPDIQRIPLDWTLYYLRSKALHQAITKEELSWVLHSFNQKRGYYQSREDITEEDKTKKVEYIKGVVNSVEDTGEKAKGKKIYKVTFADGTEFTSTKSEAPLWIGRTREIIVTTSLDTSGKPKLDKEGKIIQSAKTPDEKDWTLIKIRTEATIDDSKLTVGEYIFHALLKNPETKIKGAHVSTIDRRFYINEINAILKEQEKYHEELRDKSLYEQCIKALYAQNEVRRNIIAPWSMKDLLTKDILFYHRPLKSKKSQISECPLEFHCYTDKAGETHRQGIKCIPVSHPLFQEYRIWQFISNLRIYEREHFDNGKHFSNVDKTSEFLTSEKKEELYEWLAEKDSVSQKTLLGKIGLKVEDYHWNFPEEKTYPCGETRHLIQSRLKKANLQKAFHSLISDEQKDCFERGLWHILYSVSDYNELCKALKTFARKTGFTLEEQLLFVEAFSSCPPFKKDYGAYSKRAITKLLPLMRIGKFWHEESIDSTTKNRIEHLISGEECSGIDVRVREKVAKAGLCESIEQYQGLQQWLANYVVYNRHSEASEITKWESPDELDNYIRAFKQYSLRNPIVEQVSLETLRVVRDLWAELQKECQTIDEIHLEMGRDLKNTAEERSRIFRRNSENEDTNFRIKLLLEEFYANEKDIKDVRPYSPSQQELLRIYEEGVWQQEKDIPQDIKDIKKRISNDKDIKDITPNDIQRYRIWMDQKYCSPYTGKTIPLSRLFTTDYEIEHVIPRSRYFDDSYNNKVICEAAVNKDKNNRLGMEYIMAAGGKTIELGNGKNVQILKEEEYVELVDKIFGNNTRKRNIMLADEITEEFSHRQLNDTRYIARFMKGILSNIVREKNADGTLEPEETSKNLIVCSGRITDRVKQDWGLNDIWNHIITPRFERLNTKTSSNDFGEYVCKEGKRYFQTRVPLNLQKGFNKKRIDHRHHAMDAIAIACVNRSIVNYLNNAAANQTEREDLRRAVCIPERNGQTKRQLRSPWHCFARDAENALRQIVVSFKQNLRIATKATNSYECFDTASGKKIRKHQSNREHYAIRKPLHKDSVYGEVILPSIASVNLKKALLKADRILDKRLKDIIFELRKLYNYSNKQIEEHLTKVCINRPEWKNYDFKKIAVRILSNDADATHIVAIRKPLDESFDEVKINTITDTGIQKILLNHLSRYADDPKKAFSPEGIEDMNANIASLNGGKQHLPIYKVRVSEKDNGGYFPIGQKGNRPKKYVTTAKDTNLFFAVYADSKGKRSYKTIDLRTAIECRKQGLSVAPSINEKGDKLLFTLSPNDLVYMPSEGEEANGFAIDNDLNKEQIYKMVSATNNRCFFIPHTVADFISRGQEYNSVNKIELTEDGRSIKEHCVPLKVNRLGK

SEQ ID NO: 1665 - protein, 933 aa, unidentified
  REGION 1..933: note = Description of Unknown: uncultivated organism with predicted taxonomy: Prevotella
  REGION 1..933: note = MG22-11 effector
MKKKNILGLDLGTNSIGWAWLQQDDTEQTIQTEYLLQNNPTIRMSGSRIIPTSGDVINDFEAGKAVSKTKDRTTFRMTRRMNERFKLRRERLNRVLRILGMLPAHYAQHVDRYGKPDEEKQPKIAWEVAPDGKSNFLFHQSFLEMVKLFGVHQPQLQRIPLDWTLYYLRHKALTQPISKAELAWILHSFNQKRGYNQTRDELTEVNEKEKLEYTNSKVVSVELIEQKKSPLYLVTFENGVAVETSKVDAPQWVGQMRYAIITTKLNDLGQPLHKKDGSIDQKVSLPNDDDWALNKLRTETQIDQSHTTVGNYIFQTLLKNPETKIKGAHVCTIDRRFYEDELNAILLKQAEFHPELTNRNLYEACLMALYANNEAHRYNLATQNTCNLITKDIIFYQRPLKSKKSLIAECPFEKRIFCDAEGNVQMQGIKCIPVSHPHFQEYRLWQFLNNLRIFQREVVEDGKFTMNVDVTDKYINENSLTLLFEWLQDKITIKQKELLAKLRLKESDFRWNYVEDKAYPCGETRHVLASKLKKLKGITNDFLAQPSLNGKTTVECELWHILYSVTNLAELRKALYTFARRHNFSVVDAEAFVKVFIACPPFKKDYGAYSDKAICKLLSVMRVGKYWSAENIDSTTLLRIEHLITGEEDEHINERTRKHITEKGLQQSVNQYQGLQQWLACYVVYGRHAEVAEIVRWESPTELEQYINNFKQYSLRNPIVEQVSLETLRVVRDLWQTVAKEGGRIDEIHLEMGRDLKNSAAERAKISNRNKQNEGTNFRIKLLLQEFSQYEKDIEGIRPYSPSQQELLRIYEEGVCEQTEMPKDIAKIRRELSSSSEKDVKRSDIQRYRLWLDQKYCSPYTGQPIPLARLFTTDYEIEHVIPRSKYFDDSYNNKVICEAAVNKAKSNRLGMAFIQESGGQIIPLGNGRNVQVL

SEQ ID NO: 1666 - protein, 1102 aa, unidentified
  REGION 1..1102: note = Description of Unknown: uncultivated organism with predicted taxonomy: Prevotella sp. MGM2
  REGION 1..1102: note = MG22-12 effector
LYSSHHVAANSTYPFKTGHNRTPLNPFTTHKTQPYNIMTKNTRNIIGLDLGTNSIGWSWIQQLISPIPTQPSEYLFDGTPIIRMSGSRIIPMPGDVTGSFERGETISKTKDRTAKRMARRMNERFQLRRERLNRVLNIMGFLPEHYARALDRYGKLNEESNTTIAWRSKEDGKNEFIFYPSFLEMASIFKEHHPDIQRIPLDWTLYYLRSKALHQAITKEELSWVLHSFNQKRGYYQSREDITEEDKTKKVEYIKGVVNSVEDTGEKAKGKKIYKVTFADGTEFTSTKSEAPLWIGRTREIIVTTSLDTSGKPKLDKEGKIIQSAKTPDEKDWTLIKIRTEATIDDSKLTVGEYIFHALLKNPETKIKGAHVSTIDRRFYINEINAILKEQEKYHEELRDKSLYEQCIKALYAQNEVRRNIIAPWSMKDLLTKDILFYHRPLKSKKSQISECPLEFHCYTDKDGETHRQGIKCIPVSHPLFQEYRIWQFISNLRIYEREHFDNGKHFTNVDKTSEFLTNEKKEELYEWLAEKDSVSQKTLLGHLGLKVERYHWNFPEEKTYPCGETRHLIQSRLKKANLQKAFHSLISDEQKDCFERGLWHILYSVSDYNELCKALKTFARKTGFTLEEQLLFVEAFSSCPPFKKDYGAYSKRAITKLLPLMRIGKFWHEESIDSTTKNRIEHLISGEECSGIDVRVREKVAKAGLCESIEQYQGLQQWLANYVVYNRHSEASEITKWESPDELNNYIRSFKQYSLRNPIVEQVSLETLRVVRDLWAELQKEGQTIDEIHLEMGRDLKNTAEERSRIFRRNSENEDTNFRIKLLLEEFYANEKDIKDVRPYSPSQQELLRIYEEGVWQQEKDIPQDIKDIKKRISNDKDIKDITPNDIQRYRIWMDQKYCSPYTGKTIPLSRLFTTDYEIEHVIPRSRYFDDSYNNKVICEAAVNKDKNNRLGMEYIMAAGGKTIELGNGKNVQILKEEEYVELVDKIFGNNTRKRNIMLADEITEEFSHRQLNDTRYIARFMKGILSNIVREKNADGTLEPEETSKNLIVCSGRITDRVKQDWGLNDIWNHIITPRFERLNTKTSSDKFGEYVCKEGKRYF

SEQ ID NO: 1667 - protein, 1558 aa, unidentified
  REGION 1..1558: note = Description of Unknown: uncultivated organism with predicted taxonomy: Prevotella
  REGION 1..1558: note = MG22-13 effector
LYSSHHVAANSTYPFKTGQNRTPLNPFTTHKTQPYNIMTKNTRNIIGLDLGTNSIGWSWIQQLISPIPTQPSEYLFDGTPIIRMSGSRIIPMPGDVTGSFERGETISKTKDRTAKRMARRMNERFQLRRERLNRVLNIMGFLPEHYARALDRYGKLNEESNTTIAWRSKEDGKNEFIFYPSFLEMASIFKERHPDIQRIPLDWTLYYLRSKALHQAITKEELSWVLHSFNQKRGYYQSREDITEEDKTKKVEYIKGVVNSVEDTGEKAKGKKIYKVTFADGTEFTSTKSEAPLWIGRTREIIVTTSLDTSGKPKLDKEGKIIQSAKTPDEKDWTLIKIRTEATIDDSKLTVGEYIFHALLKNPETKIKGAYVSTIDRRFYINEINAILKEQEKYHEELRDKSLYEQCIKALYAQNEVRRNIIAPWSMSDLLIKDILFYHRPLKSKKSQISECPLEFHCYTDKDGETHRQGIKCIPVSHPLFQEYRIWQFISNLRIYEREHFDNGKHFTNVDKTSDFLTSEKKEELYEWLAEKDSVSQKTLLGHLGLKVERYHWNFPEEKTYPCGETRHLIQSRLKKANLQKAFHSLISDEQKECFERGLWHILYSVSDYNELCKALKTFARKTGFTLEEQLLFVEAFSSCPPFKKDYGAYSKRAITKLLPLMRIGKFWHEESIDSTTKNRIEHLISGEECSGIDVRVREKVAKAGLCESIEQYQGLPQWLANYVVYNRHSEASEIIKWESPDELDNYIRSFKQYSLRNPIVEQVSLETLRVVRDLWAELQKEGQTIDEIHLEMGRDLENTAEERSRIFRRNSENEDTNFRIKLLLEEFYANEKDIKDVRPYSPSQQELLRIYEEGVWQQEKDIPQDIKDIKKRISNDKDIKDITPNDIQRYRIWMDQKYCSPYTGKTIPLSRLFTTDYEIEHVIPRSRYFDDSYNNKVICEAAVNKDKNNRLGMEYIMAAGGKTIELGNGKNVQILKKEEYVELVDKIFGNNTRKRNIMLADEITEDFSHRQLNDTRYIARFMKGILSNIVREKNADGTLEPEETSKNLIVCSGRITDRVKQDWGLNDIWNHIITPRFERLNKKTSSNDFGEYVCKEGKRYFQTRVPLSLQKGFNKKRIDHRHHAMDAIAIACVNRSIVNYLNNAAANQTEREDLRRAVCIPERNGQTKRQLRSPWLCFARDTENALRQIVVSFKQNLRVATKATNSYECFDTTSGKKIRKHQSNREHYAIRKPLHKDSVYGEVILTSIASVNLKKALLKAERILDKRLKEKIFELRKLYNYSNKQIEEHLTKVCINRPEWKNYDFKKIAVRILSNDADATHIVAIRKPLDESFDKVKINTITDTGIQKILLNHLSRYADDPKKAFSPEGIEDMNANIASLNGGKQHLPIYKVRVSEKDNGGYFPIGQKGNRSKKYVTTAKDTNLFFAVYANSNGKRCFKTIDLRTAIECKKQGLSVAPSVNEKGDKLLFTLSPNDLVYMPSEEEEANGFSIKGNLIKEHIYKMVSANDNRCFFIPHTVVDFISNGEEYNRHNKIELTEDRRSIKEHCVPLKVNRLGK

SEQ ID NO: 1668 - protein, 781 aa, unidentified
  REGION 1..781: note = Description of Unknown: uncultivated organism with predicted taxonomy: Bacteroides ndongoniae
  REGION 1..781: note = MG22-14 effector
MTKNTRNIIGLDLGTNSIGWSWIQQLISPTPTQPSEYLFDGTPIIRMSGSRIIPMPGDVTGSFERGETISKTKDRTAKRMARRMNERFQLRRERLNRVLNIMGFLPEHYARALDRYGKLNEESNTTIAWRSKEDGKNEFIFYPSFLEMASIFKERHPDIQRIPLDWTLYYLRSKALHQAITKEELSWVLHSFNQKRGYYQSREDITEEDKTKKVEYIKGVVNSVEDTGEKAKGKKIYKVTFADGTEFTSTKSEAPLWIGRTREIIVTTSLDTSGKPKLNKEGKIIQSAKTPDEKDWTLIKIRTEATIDDSKLTVGEYIFHALLKNPETKIKGAHVSTIDRRFYINEINAILKEQEKYHKELRDKSLYEQCIKALYAQNEVRRNIIAPWSMKDLLTKDILFYHRPLKSKKSQISECPLEFHCYTDKDGETHRQGIKCIPVSHPLFQEYRIWQFISNLRIYEREHFDNGKHFTNVDKTSEFLTNEKKEELYEWLAERDSVSQKTLLGKIGLKVERYHWNFPEEKTYPCGETRHLIQSRLKKANLQKAFHSLISDEQKDCFERGLWHILYSVSDYNELCKALKTFARKTGFTLEEQLLFVEAFSSCPPFKKDYGAYSKRAITKLLPLMRIGKFWHEESIDSTTKNRIEHLISGEECSGIDVRVREKVAKAGLCESIEQYQGLQQWLANYVVYNRHSEASEITKWESPDELDNYIRSFKQYSLRNPIVEQVSLETLRVVRDLWAELQKEGQTIDEIHLEMGRDLKNTAEERSRIFRRNSENEDTN

SEQ ID NO: 1669 - protein, 822 aa, unidentified
  REGION 1..822: note = Description of Unknown: uncultivated organism with predicted taxonomy: Prevotella sp. MGM2
  REGION 1..822: note = MG22-15 effector
KWESPDELDNYIRSFKQYSLRNPIVEQVSLETLRVVRDLWAELQKEGQTIDEIHLEMGRDLKNTAEERSRIFRRNSENEDTNFRIKLLLEEFYANEKDIKDVRPYSPSQQELLRIYEEGVWQQEKDIPQDIKDIKKRISNDKDIKDITPNDIQRYRIWMDQKYCSPYTGKTIPLSRLFTTDYEIEHVIPRSRYFDDSYNNKVICEAAVNKDKNNRLGMEYIIAAGGKTIELGNGKNVQILKEEEYVELVDKIFGNNTRKRNIMLADEITEEFSHRQLNDTRYIARFMKGILSNIVREKNADGTLEPEETSKNLIVCSGRITDRVKQDWGLNDIWNHIITPRFERLNTKTSSNDFGEYVCKDGKRYFQTRVPLNLQKGFNKKRIDHRHHAMDAIAIACVNRSIVNYLNNAAANQTEREDLRRAVCIPERNGQTKRQLRSPWHCFARDAENALRQIVVSFKQNLRVATKATNSYECFDTASGKKIRKHQSNREHYAIRKPLHKDSVYGEVILTSIASVNLKKALLKAERILDKRLKEKIFELRKLYNYSNKQIEEHLTKVCINCPEWKNYDFKKIAVRILSNDADATHIVAIRKPLDESFDEVKINTITDTGIQKILLNHLSRYADDPKKAFSPEGIEDMNANIASLNGGKQHLPVYKVRVSEKDNGGYFPIGQKGNRQKKYVTTAKDTNLFFAVYADSKGKRSYKTIDLRTAIECRKQGLSVAPSVNEKGDKLLFTLSPNDLVYMPSEGEEANGFAIDNNLNKEQIYKMVSATNNRCFFIPHTVADFISRGQEYNSVNKIELTEDGRSIKEHCVPLKVNRLGK

SEQ ID NO: 1670 - protein, 1521 aa, unidentified
  REGION 1..1521: note = Description of Unknown: uncultivated organism with predicted taxonomy: Prevotella sp. MGM2
  REGION 1..1521: note = MG22-16 effector
MTKNTRNIIGLDLGTNSIGWSWIQQLISPTPTQPSEYLFDGTPIIRMSGSRIIPMPGDVTGSFERGETISKTKDRTAKRMARRMNERFQLRRERLNRVLNIMGFLPEHYARALDRYGKLNEESNTTIAWRSKEDGKNEFIFYPSFLEMASIFKEHHPDIQRIPLDWTLYYLRSKALHQAITKEELSWVLHSFNQKRGYYQSREDITEEDKTKKVEYIKGVVNSVEDTGEKAKGKKIYKVTFADGTEFTSTKSEAPLWIGRTREIIVTTSLDTSGKPKLDKEGKIIQSAKTPDEKDWTLIKIRTEATIDDSKLTVGEYIFHALLKNPETKIKGAHVSTIDRRFYINEINAILKEQEKYHEELRDKSLYEQCIKALYAQNEVRRNIIAPWSMKDLLTKDILFYHRPLKSKKSQISECPLEFHCYTDKDGETHRQGIKCIPVSHPLFQEYRIWQFISNLRIYEREHFDNGKHFTNVDKTSEFLTSEKKEELYEWLAERDSVSQKTLLGKIGLKVEDYHWNFPEEKTYPCGETRHLIQSRLKKANLQKAFHSLISDEQKECFERGLWHILYSVSDYNELCKALKTFARKTGFTLEEQLLFVEAFSSCPPFKKDYGAYCKRAITKLLPLMRIGKFWHEESIDTTTKTRIEHLISGEECSGIDVRVREKVAKAGLCESIEQYQGLQQWLANYVVYNRHSEASEIIKWESPDELDNYIRSFKQYSLRNPIVEQVSLETLRVVRDLWAELQKEGQTIDEIHLEMGRDLKNTAEERSKIFRRNSENEDTNFRIKLLLEEFYANEKDIKDVRPYSPSQQELLRIYEEGVWQQEKDIPQDIKDIKKRISNDKDIKDITPNDIQRYRIWMDQKYCSPYTGKTIPLSRLFTTDYEIEHVIPRSRYFDDSYNNKVICEAAVNKDKNNRLGMEYIIAAGGKTIELGNGKNVQILKEEEYVELVDKIFGNNTRKRNIMLADEITEEFSHRQLNDTRYIARFMKGILSNIVREKNADGTLEPEETSKNLIVCSGRITDRVKQDWGLNDIWSHIVTPRFERLNTKTSSNDFGEYVCKDGKRYFQTRVPLNLQKGFNKKRIDHRHHAMDAIAIACVNRSIVNYLNNAAANQTEREDLRRAVCIPERNGQTKRQLRSPWHCFAREAENALRQIVVSFKQNLRVATKATNSYECFDTASGKKIRKHQSNREHYAIRKPLHKDSVYGEVILTSIASVNLKKALLKAERILDKRLKEKIFELRKLYNYSNKQIEEHLTKVCINCPEWKNYDFKKIAVRILSNDADATHIVAIRKPLDESFDEVKINTITDTGIQKILKNHLSRYADDPKKAFSPEGIEDMNANIASLNGGKQHLPIYKVRVSEKNNGGYFPIGQKGNRHKKYVTTAQDTNLFFAIYADSKGKRSYKTIDLRTAIECRKQGLSVAPSINEKGDKLLFTLSPNDLVYMPSEGEETNGFAIDNNLNKEQIYKMVSATNNRCFFIPHTVADFISRGQEYNSVNKIELTEDGRSIKEHCVPLKVNRLGK

SEQ ID NO: 1671 - protein, 1187 aa, unidentified
  REGION 1..1187: note = Description of Unknown: uncultivated organism with predicted taxonomy: Prevotella
  REGION 1..1187: note = MG22-17 effector
VSTIDRRFYINEINAILKEQEKYHEELRDKSLYEQCIKALYAQNEVRRNIIAPWSMSDMLIKDILFYHRPLKSKKSHISECSLEFHTYTDKDGATHRQGIKCIPTSHPLFQEYRIWQFIANLRIYERERFDNGKHFINEDKTSDFLTTKKKEELYEWLAEKDSVSQKTLLGHLGLKVERYHWNFPEEKTYPCGETKHLIQSRLKKANLQKAFHSLISDEQKDCFERGLWHILYSVSDYNELCKALKTFARKTEFTLEEQFLFVEAFSSCPPFKKDYGAYSKRAITKLLPLMRIGKFWHEESIDSTTKNRIEHLISGEECSGIDVRVREKVAKAGLCESIEQYQGLQQWLANYVVYNRHSEASEITKWESPDELDNYIRSFKQYSLRNPIVEQVSLETLRVVRDLWAELQKEGQTIDEIHLEMGRDLKNTAEERSRIFRRNSENEDTNFRIKLLLEEFYANEKDIKDVRPYSPSQQELLRIYEEGVWQQEKDIPQDIKDIKKRISNDKDIKDITPNDIQRYRIWMDQKYCSPYTGKTIPLSRLFTTDYEIEHVIPRSRYFDDSYNNKVICEAAVNKDKNNRLGMEYIIAAGGKTIELGNGKNVQILKEEEYVELVDKIFGNNTRKRNIMLADEITEEFSHRQLNDTRYIARFMKGILSNIVREKNTDGILEPEETSKNLIVCSGRITDRVKQDWGLNDIWNHIVTPRFERLNTKTSSNDFGEYVCKDGKRYFQTRVPLNLQKGFNKKRIDHRHHAMDAIAIACVNRSIVNYLNNAAANQTEREDLRRAVCIPERNGQTKRQLRSPWHCFARDAENALRQIVVSFKQNLRVATKATNSYECFDTTSGKKIRKHQSNREHYAIRKPLHKDSVYGEVILTSIASVNLKKALLKAERILDKRLKEKIFELRKLYNYSNKQIEEHLTKVCINCPEWKNYDFKKIAVRILSNDADATHIVAIRKPLDESFDEEKIKTITDTGIQKILLNHLSRYADDPKKAFSPEGIEDMNANIASLNGGKQHLPIYKVRVSEKDNGGYFPIGQKGNRPKKYVTTAKDTNLFFAVYADSKGKRSYKTIDLRTAIECKKQGLSVAPSVNEKGDKLLFTLSPNDLVYMPSEEEEANGFSIKGNLIKEHIYKMVSANNRQCFFIPHSVADFISKGEEYNAHNKIELAEDGRSIKVHCVPLKVNRLGK

SEQ ID NO: 1672 - protein, 1283 aa, unidentified
  REGION 1..1283: note = Description of Unknown: uncultivated organism with predicted taxonomy: Bacteroidales
  REGION 1..1283: note = MG22-18 effector
VTFADGTEFTSTKSEAPLWIGRTREIIVTTSLDTSGKPKLDKEGKIIQSAKTPDEKDWTLIKIRTEATIDDSKLTVGEYIFHALLKNPETKIKGAHVSTIDRRFYINEINAILKEQEKYHEELRDKSLYEQCIKALYAQNEVRRNIIAPWSMKDLLTKDILFYHRPLKSKKSQISECPLEFHCYTDKDGETHRQGIKCIPVSHPLFQEYRIWQFISNLRIYEREHFDNGKHFTNVDKTSEFLTSEKKEELYEWLAERDSVSQKTLLGKIGLKVEDYHWNFPEEKTYPCGETRHLIQSRLKKANLQKAFHSLISDEQKECFERGLWHILYSVSDYNELCKALKTFARKTGFTLEEQLLFVEAFSSCPPFKKDYGAYCKRAITKLLPLMRIGKFWHEESIDTTTKTRIEHLISGEECSGIDVRVREKVAKAGLCESIEQYQGLQQWLANYVVYNRHSEASEIIKWESPDELDNYIRSFKQYSLRNPIVEQVSLETLRVVRDLWAELQKEGQTIDEIHLEMGRDLKNTAEERSKIFRRNSENEDTNFRIKLLLEEFYANEKDIKDVRPYSPSQQELLRIYEEGVWQQEKDIPQDIKDIKKRISNDKDIKDITPNDIQRYRIWMDQKYCSPYTGKTIPLSRLFTTDYEIEHVIPRSRYFDDSYNNKVICEAAVNKDKNNRLGMEYIIAAGGKTIELGNGKNVQILKEEEYVELVDKIFGNNTRKRNIMLADEITEEFSHRQLNDTRYIARFMKGILSNIVREKNADGTLEPEETSKNLIVCSGRITDRVKQDWGLNDIWSHIVTPRFERLNTKTSSNDFGEYVCKDGKRYFQTRVPLNLQKGFNKKRIDHRHHAMDAIAIACVNRSIVNYLNNAAANQTEREDLRRAVCIPERNGQTKRQLRSPWHCFAREAENALRQIVVSFKQNLRVATKATNSYECFDTASGKKIRKHQSNREHYAIRKPLHKDSVYGEVILTSIASVNLKKALLKAERILDKRLKEKIFELRKLYNYSNKQIEEHLTKVCINCPEWKNYDFKKIAVRILSNDADATHIVAIRKPLDESFDEVKINTITDTGIQKILKNHLSRYADDPKKAFSPEGIEDMNANIASLNGGKQHLPIYKVRVSEKNNGGYFPIGQKGNRHKKYVTTAQDTNLFFAIYADSKGKRSYKTIDLRTAIECRKQGLSVAPSINEKGDKLLFTLSPNDLVYMPSEGEETNGFAIDNNLNKEQIYKMVSATNNRCFFIPHTVADFISRGQEYNSVNKIELTEDGRSIKEHCVPLKVNRLGK

SEQ ID NO: 1673 - protein, 1521 aa, unidentified
  REGION 1..1521: note = Description of Unknown: uncultivated organism with predicted taxonomy: Prevotella
  REGION 1..1521: note = MG22-19 effector
MTKNTRNIIGLDLGTNSIGWSWIQQLISPTSTQPSEYLFDGTPIIRMSGSRIIPMPGDVTGSFERGETISKTKDRTAKRMARRMNERFQLRRERLNRVLNIMGFLPEHYARALDRYGKLNEESNTTIAWRSKEDGKNEFIFYPSFLEMASIFKERHPDIQRIPLDWTLYYLRSKALHQAITKEELSWVLHSFNQKRGYYQSREDITEEDKTKKVEYIKGVVNSVEDTGEKAKGKKIYKVTFADGTEFTSTKSEAPLWIGRTREIIVTTSLDTSGKPKLDKEGKIIQSAKTPDEKDWTLIKIRTEATIDDSKLTVGKYIFHALLKNPETKIKGAHVSTIDRRFYINEINAILKEQEKYHKELRDKSLYEQCTQALYAQNEVRRNIIAPWSMSDLLIKDILFYHRPLKSKKSQISECPLEFHTYTDKDGATHRQGIKCIPTSHPLFQEYRIWQFIANLRIYERERFDNGKHFINEDKTSDFLTTKKKEKLYEWLAEKDSVSQKTLLGRLGLKVERYHWNFPEEKTYPCGETRHLIQSRLKKANLQKAFHSLISDEQKDCFERGLWHILYSVSDYNELCKALKTFARKTGFTLEEQSLFVEAFSSCPPFKKDYGAYSKRAITKLLPLMRIGKFWHEESIDSTTKTRIEHLISGEECSGIDVRVREKVAKAGLCESIEQYQGLPQWLANYVVYNRHSEASEITKWESPDELDNYIRSFKQYSLRNPIVEQVSLETLRVVRDLWTELQKEGQTIDEIHLEMGRDLKNTAEERSRIFRRNSENEDTNFRIKLLLEEFYANEKDIKDVRPYSPSQQELLRIYEEGVWQQEKDIPQDIKDIKKRISNDKDIKDITPNDIQRYRIWMDQKYCSPYTGKTIPLSRLFTTDYEIEHVIPRSRYFDDSYNNKVICEAAVNKDKNNRLGMEYIMAAGGKTIELGNGKNVQILKEEEYVELVDKIFGNNTRKRNIMLADEITEEFSHRQLNDTRYIARFMKGILSNIVREKNADGTLEPEETSKNLIVCSGRITDRVKQDWGLNDIWNHIITPRFERLNKKTSSNDFGEYVCKEGKRYFQTRVPLNLQKGFNKKRIDHRHHAMDAIAIACVNRSIVNYLNNAAANQTEREDLRRAVCIPERNGQTKRQLRSPWPCFARDAENALRQIVVSFKQNLRVATKATNSYECFDTASGKKIRRHQSNREHYAIRKPLHKDSVYGEVILTSIASVNLKKTLLKAERILDKRLKDKIFELRKLYNYSNKQIEEHLTKVCINRPEWKNYDFKKIAVRILSNDADATHIVAIRKPLDETFDKEKIKTITDTGIQKILKNHLSRYANDPKKAFSPEGIEDMNANIASLNGGKQHLPIYKVRVSEKDNGGYFPIGQKGNRQKKYVTTAKDTNLFFAVYADSKGKRSYKTIDLRTAIECRKQGLSVAPSINEKGDKLLFTLSPNDLVYMPSEGEEANGFAIDNNLNKEQIYKMVSATNNRCFFIPHTVADFISRGQEYNSVNKIELTEDGRSIKEHCVPLKVNRLGK

SEQ ID NO: 1674 - protein, 921 aa, unidentified
  REGION 1..921: note = Description of Unknown: uncultivated organism with predicted taxonomy: Prevotella sp. MGM2
  REGION 1..921: note = MG22-20 effector
MTKNTRNIIGLDLGTNSIGWSWIQQLISPTPTQPSEYLFNGTPIIRMSGSRIIPMPGDVTGSFERGETISKTKDRTAKRMARRMNERFQLRRERLNRVLNIMGFLPEHYARALDRYGKLNEESNTTIAWRSKEDGKNEFIFYPSFLEMASIFKERHPDIQRIPLDWTLYYLRSKALHQAITKEELSWVLHSFNQKRGYYQSREDITEEDKTKKVEYIKGVVNSVEDTGEKAKGKKIYKVTFADGTEFTSTKSEAPLWIGRTREIIVTTSLDTSGKPKLDKEGKIIQSAKTPDEKDWTLIKIRTEATIDDSKLRVGEYIFHALLKNPETKIKGAHVSTIDRRFYINEINAILKEQEKYHEELRDKSIYEQCTQALYAQNEVRRNIIAPWSMKDLLTKDILFYHRPLKSKKSQISECPLEFHTYTDKDGATHRQGIKCIPTSHPLFQEYRIWQFIANLRIYERERFDNGKHLINEDKTSDFLTTKKKEELFEWLAEKDSVSQKTLLGHLGLKVERYHWNFPEEKTYPCGETRHLIQSRLKKANLQKAFHSLIPDEQKDCFERGLWHILYSVSDYNELCKALKTFARKTGFTLEEQLLFVEAFSSCPPFKKDYGAYSKRAITKLLPLMRIGKFWHEESIDSTTKNRIEHLISGEECSGIDVRVREKVAKAGLCESIEQYQGLQQWLANYVVYNRHSEASEITKWESPDELDNYIRSFKQYSLRNPIVEQVSLETLRVVRDLWAELQKEGQTIDEIHLEMGRDLKNTAEERSRIFRRNSENEDTNFRIKLLLEEFYANEKDIKDVRPYSPSQQELLRIYEEGVWQQEKDIPQDIKDIKKRISNDKDIKDITPNDIQRYRIWMDQKYCSPYTGKTIPLSRLFTTDYEIEHVIPRSRYFDDSYNNKVICEAAVNKDKNNRLGMEYIM

SEQ ID NO: 1675 - protein, 1521 aa, unidentified
  REGION 1..1521: note = Description of Unknown: uncultivated organism with predicted taxonomy: Bacteroidales
  REGION 1..1521: note = MG22-21 effector
MTKNTRNIIGLDLGTNSIGWSWIQQLISPTPTQPSEYLFDGTPIIRMSGSRIIPMPGDVTGSFERGETISKTKDRTAKRMARRMNERFQLRRERLNRVLNIMGFLPEHYARALDRYGKLNEESNTTIAWRSKEDGKNEFIFYPSFLEMASIFKERHPDIQRIPLDWTLYYLRSKALHQAITKEELSWVLHSFNQKRGYYQSREDITEEDKTKKVEYIKGVVNSVEDTGEKAKGKKIYKVTFADGTEFTSTKSEAPLWIGRTREIIVTTSLDSSGKPKLDKEGKIIQSAKTPDEKDWTLIKIRTEATIDDSKLTVGEYIFHALLKNPETKIKGAHVSTIDRRFYINEINAILKEQEKYHEELRDKTIYEQCIKALYAQNEVRRNIIAPWSMKDLLTKDILFYHRPLKSKKSQISECPLEFHCYTDKAGETHRQGIKCIPVSHPLFQEYRIWQFISNLRIYEREHFDNGKHFSNVDKTSEFLTSEKKEELYEWLAEKDSVSQKTLLGKIGLKVEDYHWNFPEEKTYPCGETRHLIQSRLKKANLQKAFHSLISDEQKDCFERGLWHILYSVSDYNELCKALKTFARKTGFTLEEQLLFVEAFSSCPPFKKDYGAYSKRAITKLLPLMRIGKFWHEESIDSTTKNRIEHLISGEECSGIDVRVREKVAKAELCESIEQYQGLPQWLANYVVYNRHSEASEITKWESPDELDKYIRSFKQYSLRNPIVEQVSLETLRVVRDLWAELQKEGQTIDEIHLEMGRDLKNTAEERSRIFRRNSENEDTNFRIKLLLEEFYANEKDIKDVRPYSPSQQELLRIYEEGVWQQEKDIPQDIKDIKKRISNDKDIKDITPNDIQRYRIWMDQKYCSPYTGKTIPLSRLFTTDYEIEHVIPRSRYFDDSYNNKVICEAAVNKDKNNRLGMEYIMAAGGKTIELGNGKNVQILKEEEYVELVDKIFGNNTRKRNIMLADEITEEFSHRQLNDTRYIARFMKGILSNIVREKNADGTLEPEETSKNLIVCSGRITDRVKQDWGLNDIWNHIITPRFERLNKKTSSNDFGEYVCKDGKRYFQTRVPLNLQKGFNKKRIDHRHHAMDAIAIACVNRSIVNYLNNAAANQTEREDLRRAVCIPERNGQTKRQLRSPWHCFARDAENALRQIVVSFKQNLRVATKATNSYECFDTASGKKIRKHQSNREHYAIRKPLHKDSVYGEVILTGIASVNLKKALLKADRILDKRLKEKIFELRKLYNYSNKQIEEHLTKVCINCPEWKNYDFKKIAVRILSNDADATHIVAIRKPLDESFDEVKINTITDTGIQKILKNHLSRYAKNPKKAFSPEGIEDMNANIASLNGGKQHLPIYKVRVSEKDNGGYFPIGQKGNRSKKYVTTAKETNLFFAVYADSNGKRSFKTIDLRTAIECKKQGLSVAPSVNEKGDKLLFTLSPNDLVYMPSEEEEANGFSIDNNLNKEQIYKMVSATYKQCFFIPHTVADFIYKNKEFNVLNKIELTEDRRSIKEHCVPLKVNRLGK

SEQ ID NO: 1676 - protein, 1420 aa, unidentified
  REGION 1..1420: note = Description of Unknown: uncultivated organism with predicted taxonomy: Bacteroidales
  REGION 1..1420: note = MG22-22 effector
MGFLPEHYARALDRYGKLNEESNTTIAWRSKEDGKNEFIFYPSFLEMASIFKEHHPDIQRIPLDWTLYYLRSKALHQAITKEELSWVLHSFNQKRGYYQSREDITEEDKTKKVEYIKGVVNSVEDTGEKAKGKKIYKVTFADGTEFTSTKSEAPLWIGRTREIIVTTSLDTSGKPKLDKEGKIIQSAKTPDEKDWTLIKIRTEATIDDSKLTVGEYIFHALLKNPETKIKGAHVSTIDRRFYINEITAILKEQEKYHEELRNKSLYEQCTQALYAQNEVRRNIIAPWSMKDLLTKDILFYHRPLKSKKSQISECPLEFHCYTDKDGETHRQGIKCIPVSHPLFQEYRIWQFISNLRIYEREHFDNGKHFTNVDKTSEFLTSEKKEELYEWLAEKDSVSQKTLLGHLGLKVERYHWNFPEEKTYPCGETRHLIQSRLKKANLQKAFHSLISDEQKECFERGLWHILYSISDYNELCKALKTFARKTGFTLEEQLLFVEAFSSCPPFKKDYGAYSKRAITKLLPLMRIGKFWHEESIDSTTKNRIEHLISGEECSGIDVRVREKVAKAGLCESIEQYQGLQQWLANYVVYNRHSEASEIIKWESPDELDNYIRSFKQYSLRNPIVEQVSLETLRVVRDLWAELQKEGQTIDEIHLEMGRDLENTAEERSRIFRRNSENEDTNFRIKLLLEEFYANEKDIKDVRPYSPSQQELLRIYEEGVWQQEKDIPQDIKDIKKRISNDKDIKDITPNDIQRYRIWMDQKYCSPYTGKTIPLSRLFTTDYEIEHVIPRSRYFDDSYNNKVICEAAVNKDKNNRLGMEYIMAAGGKTIELGNGKNVQILKKEEYVELVDKIFGNNTRKRNIMLADEITEDFSHRQLNDTRYIARFMKGILSNIVREKNADGTLEPEETSKNLIVCSGRITDRVKQDWGLNDIWNHIITPRFERLNKKTSSNDFGEYVCKDGKRYFQTRVPLNLQKGFNKKRIDHRHHAMDAIAIACVNRSIVNYLNNAAANQTEREDLRRAVCIPERNGQTKRQLRSPWPCFARDAENALQQIVVSFKQNLRVATKATNSYECFDTASGKRIRKHQSNREHYAIRKPLHKDSVYGEVILTSIASVNLKKALLKAERILDKRLKEKIFELRKLYNYSNKQIEEHLTKVCINCPEWKNYDFKKIAVRILSNDADATHIVAIRKPLDETFDKEKIKTITDTGIQKILKNHLSQNDNDPKKAFTPEGIENMNANIVLLNGGKQHLPIYKVRISEKNNGGYFPIGQKGNRHKKYVTTAQDTNLFFAVYVDSKGKRSFNMIDLRTAIECWKQGVSVAPSINEKGDKLLFTLSPNDLVYMPSEEEEANGFSIKGNLIKEHIYKMVSATNRQCFFIPHTVADFISRGQEYNVLNKIELAEDGRSIKEHCVPLKVNRLGK

SEQ ID NO: 1677 - protein, 1533 aa, unidentified
  REGION 1..1533: note = Description of Unknown: uncultivated organism with predicted taxonomy: Bacteroidales
  REGION 1..1533: note = MG22-23 effector
MKKKNILGLDLGTNSIGWAWLQQDDTEQTIQTEYLLQNNPTIRMSGSRIIPTSGDVINDFEAGKAVSKTKDRTTFRMTRRMNERFKLRRERLNRVLRILGMLPAHYAQHVDRYGKPDEEKQPKIAWEVAPDGKSNFLFHQSFLEMVKLFGVHQPQLQRIPLDWTLYYLRHKALTQPISKAELAWILHSFNQKRGYNQTRDELTEVNEKEKLEYTNSKVVSVELIEQKKSPLYLVTFENGVAVETSKVDAPQWVGQMRYAIITTKLNDLGQPLHKKDGSIDQKVSLPNDDDWALNKLRTETQIDQSHTTVGNYIFQTLLKNPETKIKGAHVCTIDRRFYENELNAILLKQAEFHPELTNRNLYEACLMALYANNEAHRYNLATQNTCNLITKDIIFYQRPLKSKKSLIAECPFEKRIFCDTEGNVQMQGIKCIPVSHPHFQEYRLWQFLNNLRIFQREVVEDGKFTMNVDVTDKYINENSLTLLFEWLQDKITIKQKELLAKLRLKESDFRWNYVEDKAYPCSETRHVLASRLKKLKGITNDFLAQPSLNGKTTVECELWHILYSVTNLAELRKALYTFARKHNFSVVDAEAFVKVFIACPPFKKDYGAYSDKAICKLLSVMRVGKYWSAENIDSTTLLRIEHLITGEEDEHINERTRKHITEKGLQQSVNQYQGLQQWLACYVVYGRHAEVAEVVRWESPTELEQYINNFKQYSLRNPIVEQVSLETLRVVRDLWQTVAKEGGRIDEIHLEMGRDLKNSAAERAKISNRNKQNEGTNFRIKLLLQEFSQYEKDIEGIRPYSPSQQELLRIYEKGVCEQTEMPKDIAKIRRELSSSSSEKDVKRSDIQRYRLWLDQKYCSPYTGQPIPLARLFTTDYEIEHVIPRSKYFDDSYNNKVICEAAVNKAKSNRLGMAFIQESGGQIIPLGNGRNVQVLNESAYVEFINKTFKHNARKRSLMLADEITEEFCHRQLTDTRYIARFMMGVLSNIVRQNDNGVLESEAISKNLIVCNGKITDRVKQDWGLNDVWNHIVTPRFKRLNQITNSSDFGEWCNKEGKRYFQTRIPLELQKGANKKRIDHRHHAMDAIAIACTTRSLVNYLNNQSAHTKAREDYRQRLCRTDGHGQTKRLLRAPWKDFAKDAESALQQIVVSFKQNTRILTHATNSYECFDAKAGKKIIKRQISQNHYAIRKPLHKDTVYGEVVLPSIKLISLNKALSNPRRIIDKQLRSKILELQQRDKLTKKQVCDFFKKTCANSTEWRNYDFAKVAVRVWSNDEEGSRMVSVRKAIDESFDMKQIEKVYDPIVRNILTRHLKACNGDSKIAFSPQGVEEMNQHLAELNNGNAHLPIYKVKLGESKGEKFAIGQKGCKATKFVVTAKDTNLFFAVYANEEGKRSYQSVDLRTAIELKKQGCPVAPETNEKGDKLLFILSPNSLVYMPTEEEMERGNIDVQNLNLNQIFKMVSSTGNECYFVPNTLSQVIFPNKEYESMNKVGTVKEWDGYSISESKNNKKFLSIKACCIPICIDRLGRIQLKK

SEQ ID NO: 1678 - protein, 1521 aa, unidentified
  REGION 1..1521: note = Description of Unknown: uncultivated organism with predicted taxonomy: Bacteroidales
  REGION 1..1521: note = MG22-24 effector
MTKNTRNIIGLDLGTNSIGWSWIQQLISPTPTQPSEYLFNGTPIIRMSGSRIIPMPGDVTGSFERGETISKTKDRTAKRMARRMNERFQLRRERLNRVLNIMGFLPEHYARALDRYGKLNEESNTTIAWRSKEDGKNEFIFYPSFLEMASIFKERHPDIQRIPLDWTLYYLRSKALHQAITKEELSWVLHSFNQKRGYYQSREDITEEDKTKKVEYIKGVVNSVEDTGEKAKGKKIYKVTFADGTEFTSTKSEAPLWIGRTREIIVTTSLDTSGKPKLDKEGKIIQSAKTPDEKDWTLIKIRTEATIDDSKLTVGEYIFHALLKNPETKIKGAHVSTIDRRFYINEINAILKEQEKYHKELRDKSLYEQCIKALYAQNEVRRNIIAPWSMSDLLIKDILFYHRPLKSKKSQISECPLEFHTYTDKNGATHRQGIKCIPTSHPLFQEYRIWQFIANLRIYERERFDNGKHFINEDKTSDFLTTKKKEELYEWLAEKDSVSQKTLLGRLGLKVERYHWNFPEEKTYPCGETRHLIQSRLKKANLQKAFHSLISDEQKDCFERGLWHILYSVSDYNELCKALKTFARKTGFTLEEQLLFVEAFSSCPPFKKDYGAYSKRAITKLLPLMRIGKFWHEESIDSTTKNRIEHLISGEECSGIDVRVREKIAKAGLCESIEQYQGLQQWLANYVVYNRHSEASEITKWESPDELDNYIRSFKQYSLRNPIVEQVSLETLRVVRDLWAELQKEGQTIDEIHLEMGRDLKNTAEERSRIFRRNSENEDTNFRIKLLLEEFNANEKDIKDVRPYSPSQQELLRIYEEGVWQQEKDIPQDIKDIKKRISNDKDIKDITPNDIQRYRIWMDQKYCSPYTGKTIPLSRLFTTDYEIEHVIPRSRYFDDSYNNKVICEAAVNKDKNNRLGMEYIMAAGGKTIELGNGKNVQILKEEEYVELVDKIFGNNTRKRNIMLANEITEEFSHRQLNDTRYIARFMKGILSNIVREKNADGTLEPEETSKNLIVCSGRITDRVKQDWGLNDIWNHIITSRFERLNTKTSSNDFGEYVCKEGKRYFQTRVPLNLQKGFNKKRIDHRHHAMDAIAIACVNRSIVNYLNNAAANQTEREDLRRAVCIPERNGQTKRQLRSPWHCFARDAENALRQIVVSFKQNLRVATKATNSYECFDTASGKKIRKHQSNREHYAIRKPLHKDSVYGEVILTSIASVNLKKALLKADRILDKRLKDKIFELRKLYNYSNKQIEEHLTKVCINCLEWKNYDFKKIAVRILSNDADATHIVAIRKPLDESFDEVKINTITDTGIQKILKNHLSRYADDPKKAFSPEGIEDMNANIASLNGGKQHLPIYKVRVSEKDNGGYFPIGQKGNRPKKYVTTAKDTNLFFAVYADSKGKRSFNMIDLRTAIECWKQGVSVAPSINEKGDKLLFTLSPNDLVYMPSEEEEANGFSIKGNLIKEHIYKMVSATNRQCFFIPHTVADFISRGQEYNVLNKIELAEDGRSIKEHCVPLKVNRLGK

SEQ ID NO: 1679 - protein, 821 aa, unidentified
  REGION 1..821: note = Description of Unknown: uncultivated organism with predicted taxonomy: Prevotella sp. MGM2
  REGION 1..821: note = MG22-25 effector
AGLCESIEQYQGLPQWLANYVVYNRHSEASEIIKWESPDELDNYIRSFKQYSLRNPIVEQVSLETLRVVRDLWTELQKEGQTIDEIHLEMGRDLKNTAEERSRIFRRNSENEDTNFRIKLLLEEFYANEKDIKDVRPYSPSQQELLRIYEEGVWQQEKDIPQDIKDIKKRISNDKDIKDITPNDIQRYRIWMDQKYCSPYTGKTIPLSRLFTTDYEIEHVIPRSRYFDDSYNNKVICEAAVNKDKNNRLGMEYIMAAGGKTIELGNGKNVQILKEEEYVELVDKIFGNNTRKRNIMLADEITEEFSHRQLNDTRYIARFMKGILSNIVREKNADGTLEPEETSKNLIVCSGRITDRVKQDWGLNDIWNHIITPRFERLNTKTSSNDFGEYVCKDGKRYFQTRVPLNLQKGFNKKRIDHRHHAMDAIAIACVNRSIVNYLNNAAANPTEREDLRRAVCIPERNGQTKRQLRSPWHCFARDAENALRQIVVSFKQNLRVATKATNSYECFDTASGKKIRKHQSNREHYAIRKPLHKDSVYGEVILTSIASVNLKKALLKAERILDKRLKEKIFELRKLYNYSNKQIEEHLTKVCINCPEWKNYDFKKIAVRILSNDADATHIVAIRKPLDETFDKEKIKTITDTGIQKILKNHLSRYADDPKKAFSPEGIEDMNANIASLNGGKQHLPIYKVRVSEKDNGGYFPIGQKGNRPKKYVTTAKDTNLFFAVYADSKGKRSYKTIDLRTAIECRKQGLSVAPSINEKGDKLLFTLSPNDLVYMPSEGEEANGFAIDNNLNKEQIYKMVSATNNRCFFIPHTVADFIS

SEQ ID NO: 1680 - protein, 1521 aa, unidentified
  REGION 1..1521: note = Description of Unknown: uncultivated organism with predicted taxonomy: Bacteroidales
  REGION 1..1521: note = MG22-26 effector
MTKNTRNIIGLDLGTNSIGWSWIQQLISPTPTQPSEYLFNGTPIIRMSGSRIIPMPGDVTGSFERGETISKTKDRTAKRMARRMNERFQLRRERLNRVLNIMGFLPEHYARALDRYGKLNEESNTTIAWRSKEDGKNEFIFYPSFLEMASIFKERHPDIQRIPLDWTLYYLRSKALHQAITKEELSWVLHSFNQKRGYYQSREDITEEDKTKKVEYIKGVVNSVEDTGEKAKGKKIYKVTFADGTEFTSTKSEAPLWIGRTREIIVTTSLDSSGKPKLDKEGKIIQSAKTPDEKDWTLIKIRTEATIDDSKLTVGEYIFHALLKNPETKIKGAHVSTIDRRFYINEINAILKEQEKYHEELRDKSLYEQCIKALYAQNEVRRNIIAPWSMKDLLTKDILFYHRPLKSKKSQISECPLEFHCYTDKDGETHRQGIKCIPVSHPLFQEYRIWQFISNLRIYEREHFDNGKHFTNVDKTSEFLTSEKKEELYEWLAEKDSVSQKTLLGKIGLKVEHYHWNYPEEKTYPCGETRHLIQSRLKKANLQKAFHSLISDEQKDCFERGLWHILYSVSDYNELCKALKTFARKTGFTLEEQLLFVEVFSSCPPFKKDYGAYSKRAITKLLPLMRIGKFWHEESIDSTTKNRIEHLISGEECSGIDVRVREKVAKAGLCKSIEQYQGLQQWLANYVVYNRHSEASEITKWESPDELDNYIRSFKQYSLRNPIVEQVSLETLRVVRDLWAELQKEDQTIDEIHLEMGRDLKNTAEERSRIFRRNNENEDTNFRIKLLLEEFYANEKDIKDVRPYSPSQQELLRIYEEGVWQQEKDIPQDIKDIKKRISNDKDIKDITPNDIQRYRIWMDQKYCSPYTGKTIPLSRLFTTDYEIEHVIPRSRYFDDSYNNKVICEAAVNKDKNNRLGMEYIMAAGGKTIELGNGKNVQILKEEEYVELVDKIFGNNTRKRNIMLADEITEEFSHRQLNDTRYIARFMKGILSNIVREKNADGTLEPEETSKNLIVCSGRITDRVKQDWGLNDIWNHIITPRFERLNKKTSSNDFGEYVCKEGKRYFQTRVPLNLQKGFNKKRIDHRHHAMDAIAIACINRSIVNYLNNAAANQTEREDLRRAVCIPERNGQTKRQLRSPWHCFARDAENALRQIVVSFKQNLRVATKATNSYECFDTASGKKIRKHQSNREHYAIRKPLHKDSVYGEVILTSIASVNLKKALLKADRILDKRLKEKIFELRKLYNYSNKQIEEHLTKVCINCPEWKNYDFKKIAVRILSNDADATHIVAIRKPLDESFDKIKINTITDTGIQKILLNHLSRYADDPKKAFSPEGIEDMNANIASLNGGKQHLPIYKVRVSEKDNGGYFPIGQKGNRSKKYVTTAKDTNLFFAVYADSKGKRSYKTIDLRTAIECRKQGLSVAPSINEKGDKLLFTLSPNDLVYMPSEWEEANGFAIDNNLNKEQIYKMVSATNNRCFFIPHTVADFISRGEEYNSHNKIELTEDGRSIKEHCVPLKVNRLGK

SEQ ID NO: 1681 - protein, 1200 aa, unidentified
  REGION 1..1200: note = Description of Unknown: uncultivated organism with predicted taxonomy: Prevotella sp. MGM2
  REGION 1..1200: note = MG22-27 effector
LLKNPKTKIKGAHVSTIDRRFYINEINAILKEQEKYHEELRDKSLYEQCIKALYAQNEVRRNIIAPWSMKDLLTKDILFYHRPLKSKKSQISECPLEFHCYTDKDGETHRQGIKCIPVSHPLFQEYRIWQFISNLRIYEREHFDNGKHFTNVDKTSEFLTNEKKEELYEWLAEKDSVSQKTLLGHLGLKVERYHWNFPEEKTYPCGETRHLIQSRLKKANLQKAFHSLISDEQKDCFERGLWHILYSVSDYNELCKALKTFARKTGFTLEEQLLFVEAFSSCPPFKKDYGAYSKRAITKLLPLMRIGKFWHEESIDSTTKNRIEHLISGEECSGIDVRVREKVAKAGLCESIEQYQGLPQWLANYVVYNRHSEASEIIKWESPDELDNYIRSFKQYSLRNPIVEQVSLETLRVVRDLWAELQKEGQTIDEIHLEMGRDLKNTAEERSRIFRRNSENEDTNFRIKLLLEEFYANEKDIKDVRPYSPSQQELLRIYEEGVWQQEKDIPQDIKDIKKRISNDKDIKDITPNDIQRYRIWMDQKYCSPYTGKTIPLSRLFTTDYEIEHVIPRSRYFDDSYNNKVICEAAVNKDKNNRLGMEYIMAAGGKTIELGNGKNVQILKEEEYVELVDKIFGNNTRKRNIMLADEITEEFSHRQLNDTRYIARFMKGILSNIVREKNADGTLEPEETSKNLIVCSGRITDRVKQDWGLNDIWNHIITPRFERLNTKTSSDKFGEYVCKEGKRYFQTRVPLSLQKGFNKKRIDHRHHAMDAIAIACVNRSIVNYLNNAAANQTEREDLRRAVCIPGRNGQTKRQLRSPWHCFARDAENALRQIVVSFKQNLRVATKATNSYECFDTASGKKIRKRQSNREHYAIRKPLHKDSVYGEVILTSIASVNLKKALLKAERILDKRLKEKIFELRKLYNYSNKQIEEHLTKVCINCPEWKNYDFKKIAVRILSNDADATHIVAIRKPLDESFDKIKINTITDTGIQKILLNHLSRYADDPKKAFSPEGIEDMNANIASLNGGKQHLPVYKVRVSEKDNGGYFPIGQKGNRSKKYVTTAKDTNLFFAVYANSNGKRSYKTIDLRTAIECKKQGLSVAPSVNEKGDKLLFTLSPNDLVYMPSEEEGANGFSIKGNLIKEHIYKMVSANDNRCFFIPHTVADFISNGEEYNRHNKIELTEDRRSIKEHCVPLKVNRLGK

SEQ ID NO: 1682 - protein, 822 aa, unidentified; identical to SEQ ID NO: 1669
  REGION 1..822: note = Description of Unknown: uncultivated organism with predicted taxonomy: Bacteroidales
  REGION 1..822: note = MG22-28 effector

SEQ ID NO: 1683 - protein, 1521 aa, unidentified
  REGION 1..1521: note = Description of Unknown: uncultivated organism with predicted taxonomy: Bacteroidales
  REGION 1..1521: note = MG22-29 effector
MTKNTRNIIGLDLGTNSIGWSWIQQLISPTPTQPSEYLFNGTPIIRMSGSRIIPMPGDVTGSFERGETISKTKDRTAKRMARRMNERFQLRRERLNRVLNIMGFLPEHYARALDRYGKLNEESNTTIAWRSKEDGKNEFIFYPSFLEMASIFKELHPDIQRIPLDWTLYYLRSKALHQAITKEELSWVLHSFNQKRGYYQSREDITEEDKTKKVEYIKGVVNSVEDTGEKAKGKKIYKVTFADGTEFTSTKSEAPLWIGRTREIIVTTSLDSSGKPKLDKEGKIIQSAKTPDEKDWTLIKIRTEATIDDSKLTVGEYIFHALLKNPETKIKGAHVSTIDRRFYINEINAILKEQEKYHKELRDKSLYEQCIKALYAQNEVRRNIIAPWSMSDLLIKDILFYHSPLKSKKSQISECPLEFHTYTDKNGATHRQGIKCIPTSHPLFQEYRIWQFIANLRIYERERFDNGKHLINEDKTSDFLTTKKKEELYEWLAEKDSVSQKTLLGHLGLKVERYHWNFPEEKTYPCGETRHLIQSRLKKANLQKAFHSLISDEQKDCFERGLWHILYSVSDYNELCKALKTFARKTGFTLEEQLLFVEAFSSCPPFKKDYGAYSKRAITKLLPLMRIGKFWHKESIDSTTKNRIEHLISGEECSGIDVRVREKVAKAGLCESIEQYQGLPQWLANYVVYNRHSEASEITKWESPDELDNYIRSFKQYSLRNPIVEQVSLETLRVVRDLWAELQKEGQTIDEIHLEMGRDLKNTAEERSRIFRRNSENEDTNFRIKLLLEEFYANEKDIKDVRPYSPSQQELLRIYEEGVWQQEKDIPQDIKDIKKRISNDKDIKDITPNDIQRYRIWMDQKYCSPYTGKTIPLSRLFTTDYEIEHVIPRSRYFDDSYNNKVICEAAVNKDKNNRLGMEYIMAAGGKTIELGNGKNVQILKEEEYVELVDKIFGNNTRKRNIMLADEITEEFSHRQLNDTRYIARFMKGILSNIVREKNADGTLEPEETSKNLIVCSGRITDRVKQDWGLNDIWNHIITPRFERLNTKTSSDKFGEYVCKEGKRYFQTRVPLSLQKGFNKKRIDHRHHAMDAIAIACVNRSIVNYLNNAAANQTEREDLRRAVCIPERNGQTKRQLRSPWHCFARDAENALRQIVVSFKQNLRVATKATNSYECFDTASGKKIRRHQSNREHYAIRKPLHKDSVYGEVILPSIASVNLKKALLKAERIIDKRLKDKIFELRKLYNYSNKQIEEHLTKVCINCPEWKNYDFKKIAVRILSNDADATHIVAIRKPLDESFDEVKINTITDTGIQKILKNHLSRYADDPKKAFSPEGIEDMNANIASLNGGKQHLPIYKVRVSEKDNGGYFPIGQKGNRSKKYVTTAKETNLFFAVYADSNGKRSFKTIDLRTAIECKKQGLSVAPSVNEKGDKLLFTLSPNDLVYMPSEEEEANGFSIDNNLNKEQIYKMVSATYKQCFFIPHTVADFIYKNKEFNVLNKIELTEDRRSIKEHCVPLKVNRLGK

SEQ ID NO: 1684 - protein, 751 aa, unidentified
  REGION 1..751: note = Description of Unknown: uncultivated organism with predicted taxonomy: Prevotella sp. MGM2
  REGION 1..751: note = MG22-30 effector
FRRNSENEDTNFRIKLLLEEFYANEKDIKDVRPYSPSQQELLRIYEEGVWQQEKDIPQDIKDIKKRISNDKDIKDITPNDIQRYRIWMDQKYCSPYTGKTIPLSRLFTTDYEIEHVIPRSRYFDDSYNNKVICEAAVNKDKNNRLGMEYIMAAGGKTIELGNGKNVQILKEEEYVELVDKIFGNNTRKRNIMLTDEITEEFSHRQLNDTRYIARFMKGILSNIVREKNADGTLEPEETSKNLIVCSGRITDRVKQDWGLNDIWNHIITPRFERLNKKTSSNDFGEYVCKEGKRYFQTRVPLNLQKGFNKKRIDHRHHAMDAIAIACVNRSIVNYLNNAAANQTEREDLRRAVCIPERNGQTKRQLRSPWHCFARDAENALRQIIVSFKQNLRVATKATNSYECFDIASGKKIRKHQSNREHYAIRKPLHKDSVYGEVILPSIASVNLKKALLKADRILDKRLKEKIFELRKLYNYSNKQIEEHLTKVCINRPEWKNYDFKKIAVRILSNDADATHIVAIRKPLDETFDEDKIKTITDTGIQKILLNHLRQNDNDPKKAFTPEGIENMNANIVLLNGGKQHLPIYKVRISEKNNGGYFPIGQKGNRSQKYVTTAKDTNLFFAVYADQKGKRSFKTIDLRTAIECRKQGVSVAPSINEKGDKLLFTLSPNDLVYMPSEEEEANGFSIKGNLIKEHIYKMVNASNNRCFFIPHSVADFISKGEEYNALNKIELTEDGRSIKVHCVPLKVNRLGK

SEQ ID NO: 1685 - protein, 1521 aa, unidentified
  REGION 1..1521: note = Description of Unknown: uncultivated organism with predicted taxonomy: Bacteroidales
  REGION 1..1521: note = MG22-31 effector
MTKNTRNIIGLDLGTNSIGWSWIQQLISPTPTQASEYIFDGTPIIRMSGSRIIPMPGDVTGSFERGETISKTKDRTAKRMARRMNERFQLRRERLNRVLNIMGFLPEHYARALDRYGKLNEESNTTIAWRSKEDGKNEFIFYPSFLEMASIFKEHHPDIQRIPLDWTLYYLRSKALHQAITKEELSWVLHSFNQKRGYYQSREDITEEDKTKKVEYIKGVVNSVEDTREKAKGKKIYKVTFADGTEFTSTKSEAPLWIGRTREIIVTTSLDTSGKPKLDKEGKIIQSAKTPDEKDWTLIKIRTEATIDDSKLTVGEYIFHALLKNPETKIKGAHVSTIDRRFYINEINAILKEQEKYHKELRDKSLYEQCIKALYAQNEVRRNIIAPWSMSDLLIKDILFYHSPLKSKKSQISECPLEFHTYTDKDGATHRQGIKCIPTSHPLFQEYRIWQFIANLRIYERERFDNGKHLINEDKTSDFLTTKKKEELYEWLAEKDSVSQKTLLGRLGLKVERYHWNFPEEKTYPCGETRHLIQSRLKKANLQKAFHSLISDEQKDCFERGLWHILYSVSDYNELCKALKTFARKTGFTLEEQSLFVEAFSSCPPFKKDYGAYSKRAITKLLPLMRIGKFWHEESIDSTTKTRIEHLISGEECSGIDVRVREKVAKAGLCESIEQYQGLPQWLANYVVYNRHSEASEITKWESPDELDNYIRSFKQYSLRNPIVEQVSLETLRVVRDLWTELQKEGQTIDEIHLEMGRDLKNTAEERSRIFRRNSENEDTNFRIKLLLEEFYANEKDIKDVRPYSPSQQELLRIYEEGVWQQEKDIPQDIKDIKKRISNDKDIKDITPNDIQRYRIWMDQKYCSPYTGKTIPLSRLFTTDYEIEHVIPRSRYFDDSYNNKVICEAAVNKDKNNRLGMEYIMAAGGKTIELGNGKNVQILKEEEYVELVDKIFGNNTRKRNIMLADEITEEFSHRQLNDTRYIARFMKGILSNIVREKNADGTLEPEETSKNLIVCSGRITDRVKQDWGLNDIWNHIITPRFERLNTKTSSNDFGEYVCKDGKRYFQTRVPLNLQKGFNKKRIDHRHHAMDAIAIACVNRSIVNYLNNAAANQTEREDLRRAVCIPERNGQTKRQLRSPWHCFARDAENALRQIVVSFKQNLRVATKATNSYECFDTASGKKIRKHQSNREHYAIRKPLHKDSVYGEVILPSIASVNLKKALLKADRILDKRLKEKIFELRKLYNYSNKQIEEHLTKVCINCLEWKNYDFKKIAVRILSNDADATHIVAIRKPLDETFDKEKIKTITDTGIQKILLNHLSRYADDPKKAFSPEGIEDMNANIASLNGGKQHLPIYKVRVSEKDNGGYFPIGQKGNRPKKYVTTAKDTNLFFAVYADSKGKRSFDMIDLRTAIECWKQGVSVAPSMNEKGDKLLFTLSPKDLVYMPSEEEEANGFSIKGNLIKEHIYKMVSATNRQCFFIPHTVADFISRGQEYNVLNKIELAEDGRSIKEHCVPLKVNRLGK

SEQ ID NO: 1686 - protein, 808 aa, unidentified
  REGION 1..808: note = Description of Unknown: uncultivated organism with predicted taxonomy: Bacteroidales
  REGION 1..808: note = MG22-32 effector
MKKKNILGLDLGTNSIGWAWLQQDDTEQTIQTEYLLQNNPTIRMSGSRIIPTSGDVINDFEAGKAVSKTKDRTTFRMTRRMNERFKLRRERLNRVLRILGMLPAHYAQHVDRYGKPDEEKQPKIAWEVAPDGKSNFLFHQSFLEMVKLFGVHQPQLQRIPLDWTLYYLRHKALTQPISKAELAWILHSFNQKRGYNQTRDELTEVNEKEKLEYTNSKVVSVELIDCKKSPLYLVTFENGVAVETSKVDAPQWVGQMRYAIITTKLNDLGQPLHKKDGSIDQKVSLPNDDDWALNKLRTETQIDQSHTTVGNYIFQTLLKNPETKIKGAHVCTIDRRFYEDELNAILLKQAEFHPELTNRNLYEACLMALYANNEAHRYNLATQNTCNLITKDIIFYQRPLKSKKSLIAECPFEKRIFCDAEGNVQMQGIKCIPVSHPHFQEYRLWQFLNNLRIFQREVVEDGKFTMNVDVTDKYINENSLTLLFEWLQDKITIKQKELLAKLRLKESDFRWNYVEDKAYPCGETRHVLASRLKKLKGITNDFLAQPSLNGKTTVECELWHILYSVTNLAELRKALYTFARRHNFSVVDAEAFVKVFIACPPFKKDYGAYSDKAICKLLSVMRVGKYWSAENIDSTTLLRIEHLITGEEDEHINERTRKHITEKGLQQSVNQYQGLQQWLACYVVYGRHAEVAEIVRWESPTELEQYINNFKQYSLRNPIVEQVSLETLRVVRDLWQTVAKEGGRIDEIHLEMGRDLKNSAAERAKISNRNKQNEGTNFRIKLLLQEFSQYEKDIEGIRRALKNLSNSK

SEQ ID NO: 1687 - protein, 1521 aa, unidentified; identical to SEQ ID NO: 1685
  REGION 1..1521: note = Description of Unknown: uncultivated organism with predicted taxonomy: Bacteroidales
  REGION 1..1521: note = MG22-33 effector

SEQ ID NO: 1688 - protein, 797 aa, unidentified
  REGION 1..797: note = Description of Unknown: uncultivated organism with predicted taxonomy: Bacteroidales
  REGION 1..797: note = MG22-34 effector
QTVAKEGGRIDEIHLEMGRDLKNSAAERAKISNRNKQNEGTNFRIKLLLQEFSQYEKDIEGIRPYSPSQQELLRIYEEGVCEQTEMPKDIAKIRRELSSSSEKDVKRSDIQRYRLWLDQKYCSPYTGQPIPLARLFTTDYEIEHVIPRSKYFDDSYNNKVICEAAVNKAKSNRLGMAFIQESGGQIIPLGNGRNVQVLNESAYVEFINKTFKHNARKRSLMLADEITEEFCHRQLTDTRYIARFMMGVLSNIVRQNDNGVLESEAISKNLIVCNGKITDRVKQDWGLNDVWNHIVTPRFKRLNQITNSSDFGEWCNKEGKRYFQTRIPLELQKGVNKKRIDHRHHAMDAIAIACTTRSLVNYLNNQSAHTKAREDYRQRLCRTDGHGQTKRLLRAPWKDFAKDAESALQQIVVSFKQNTRILTHATNSYECFDAKAGKKIIKRQISQNHYAIRKPLHKDTVYGEVVLPSIKLISLNKALSNPRRIIDKQLRSKILELQQRDKLTKKQVCDFFKKTCANSTEWRNYDFAKVAVRVWSNDEEGSRMVSVRKAIDESFDMKQIEKVYDPIVRNIFTRHLKACNGDSKIAFSPQGVEEMNQHIAELNNGNAHLPIYKVKLGESKGEKFAIGQKGSKATKFVVTAKDTNLFFAVYANEEGKRSYQSVDLRTAIELKKQGCPVAPETNEKGDKLLFILSPNSLVYMPTEEEMERGNIDVQNLNLNQIFKMVSSTGNNCFFVPNTLSQVIFPGKEYESMDKVGTVKEWDGYSISESKNNKKFLSIKACCIPICIDRLGRIQLKK

SEQ ID NO: 1689 - protein, 833 aa, unidentified
  REGION 1..833: note = Description of Unknown: uncultivated organism with predicted taxonomy: Parabacteroides sp. An277
  REGION 1..833: note = MG22-35 effector
MPLRETNFQMQGIKCIPVSNPHFQEYRLWQFLNNLRIFQREVVEDGKFTMNVDVTDKYINENSLTLLFEWLQDKITIKQKELLAKLRLKESDFRWNYVEDKAYPCGETRHVLASRLKKLKGITNDFLAQPSLNGKTTVECELWHILYSVTNLAELRKALYTFARKHNFSVVDAEAFVKVFIACPPFKKDYGAYSDKAICKLLSVMRVGKYWSAENIDSTTLLRIEHLITGEEDEHSNERTRKHITEKGLQQSVNQYQGLQQWLACYVVYGRHAEVAEIVRWESPTELEQYINNFKQYSLRNPIVEQVSLETLRVVRDLWQTVAKEGGRIDEIHLEMGRDLKNSAAERAKISNRNKQNEGTNFRIKLLLQEFSQYEKDIEGIRPYSPSQQELLRIYEEGVCEQTEMPKDIAKIRRELSSSSEKDVKRSDIQRYRLWLDQKYCSPYTGQPIPLARLFTTDYEIEHVIPRSKYFDDSYNNKVICEAAVNKAKSNRLGMAFIQESGGQIIPLGNGRNVQVLNESAYVEFINKTFKHNARKRSLMLADEITEEFCHRQLTDTRYIARFMMGVLSNIVRQNDNGVLESEAISKNLIVCNGKITDRVKQDWGLNDVWNHIVTPRFKRLNQITNSSDFGEWCNKEGKRYFQTRIPLELQKGVNKKRIDHRHHAMDAIAIACTTRSLVNYLNNQSAHTKAREDYRQRLCRTDGHGQTKRLLRAPWKDFAKDAESALQQIVVSFKQNTRILTHATNSYECFDAKAGKKIIKRQISQNHYAIRKPLHKDTVYGEVVLPSIKLISLNKALSNPRRIIDKQLRSKILELQQRDKLTKKQVCDFFKK

SEQ ID NO: 1690 - protein, 1533 aa, unidentified
  REGION 1..1533: note = Description of Unknown: uncultivated organism with predicted taxonomy: Bacteroidales
  REGION 1..1533: note = MG22-36 effector
MKKKNILGLDLGTNSIGWAWLQQDDTEQTIQTEYLLQNNPTIRMSGSRIIPTSGDVINDFEAGKAVSKTKDRTTFRMTRRMNERFKLRRERLNRVLRILGMLPAHYAQHVDRYGKPDEEKQPKIAWEVAPDGKSNFLFHQSFLEMVKLFGVHQPQLQRIPLDWTLYYLRHKALTQPISKAELAWILHSFNQKRGYNQTRDELTEVNEKEKLEYTNSKVVSVELIEQKKSPLYLVTFENGVAVETSKVDAPQWVGQMRYAIITTKLNDLGQPLHKKDGSIDQKVSLPNDDDWALNKLRTETQIDQSHTTVGNYIFQTLLKNPETKIKGAHVCTIDRRFYENELNAILLKQAEFHPELTNRNLYEACLMALYANNEAHRYNLATQNTCNLITKDIIFYQRPLKSKKSLIAECPFEKRIFCDTEGNVQMQGIKCIPVSHPHFQEYRLWQFLNNLRIFQREVVEDGKFTMNVDVTDKYINENSLTLLFEWLQDKITIKQKELLAKLRLKESDFRWNYVEDKAYPCSETRHVLASRLKKLKGITNDFLAQPSLNGKTTVECELWHILYSVTNLAELRKALYTFARKHNFSVVDAEAFVKVFIACPPFKKDYGAYSDKAICKLLSVMRVGKYWSAENIDSTTLLRIEHLITGEEDEHINERTRKHITEKGLQQSVNQYQGLQQWLACYVVYGRHAEVAEVVRWESPTELEQYINNFKQYSLRNPIVEQVSLETLRVVRDLWQTVAKEGGRIDEIHLEMGRDLKNSAAERAKISNRNKQNEGTNFRIKLLLQEFSQYEKDIEGIRPYSPSQQELLRIYEKGVCEQTEMPKDIAKIRRELSSSSSEKDVKRSDIQRYRLWLDQKYCSPYTGQPIPLARLFTTDYEIEHVIPRSKYFDDSYNNKVICEAAVNKAKSNRLGMTFIQESGGQIIPLGNGRNVQVLNESAYVEFINKTFKHNARKRSLMLADEITEEFCHRQLTDTRYIARFMMGVLSNIVRQNDNGVLESEAISKNLIVCNGKITDRVKQDWGLNDVWNHIVTPRFKRLNQITNSSDFGEWCNKEGKRYFQTRIPLELQKGANKKRIDHRHHAMDAIAIACTTRSLVNYLNNQSAHTKAREDYRQRLCRTDGHGQTKRLLRAPWKDFAKDAESALQQIVVSFKQNTRILTHATNSYECFDAKAGKKIIKRQISQNHYAIRKPLHKDTVYGEVVLPSIKLISLNKALSNPRRIIDKQLRSKILELQQRDKLTKKQVCDFFKKTCANSTEWRNYDFAKVAVRVWSNDEEGSRMVSVRKAIDESFDMKQIEKVYDPIVRNILTRHLKACNGDSKIAFSPQGVEEMNQHLAELNNGNAHLPIYKVKLGESKGEKFAIGQKGCKATKFVVTAKDTNLFFAVYANEEGKRSYQSVDLRTAIELKKQGCPVAPETNEKGDKLLFILSPNSLVYMPTEEEMERGNIDVQNLNLNQIFKMVSSTGNECYFVPNTLSQVIFPNKEYESMNKVGTVKEWDGYSISESKNNKKFLSIKACCIPICIDRLGRIQLKK

SEQ ID NO: 1691 - protein, 1502 aa, unidentified
  REGION 1..1502: note = Description of Unknown: uncultivated organism with predicted taxonomy: Bacteroidales
  REGION 1..1502: note = MG22-37 effector
MTKNTRNIIGLDLGTNSIGWSWIQQLISPTPTQPSEYLFDGTPIIRMSGSRIIPMPGDVTGSFERGETISKTKDRTAKRMARRMNERFQLRRERLNRVLNIMGFLPEHYARALDRYGKLNEESDTTIAWRSKEDGKNEFIFYPSFLEMASIFKEHHPDIQRIPLDWTLYYLRSKALHQAITKEDLSWVLHSFNQKRGYYQSREDITEEDKTKKVEYIKGVVNSVEDTGEKAKGKKIYKVTFANGTEFTSTKSEAPLWIGRTREIIVTTSLDTSGKPKLDKEGKIIQSAKTPDEKDWTLIKIRTEATIDDSKLTVGEYIFHALLKNPETKIKGAYVSTIDRRFYINEINAILKEQEKYHKELRDKSLYEQCIKALYAQNEVRRNIIAPWSMSDLLIKDILFYHRPLKSKKSQISECPLEFHTYTDKNGATHRQGIKCIPTSHPLFQEYRIWQFIANLRIYERERFDNGKHLINEDKTSDFLTTKKKEELYEWLAEKDSVSQKTLLGHLGLKVERYHWNFPEEKTYPCGETRHLIQSRLKKANLQKAVHSLISDEQKECFERGLWHILYSVSDYNELCKALKTFARKTGFTLEEQSLFVEAFSSCPPFKKDYGAYSKRAITKLLPLMRIGKFWHEESIDSTTKTRIEHLISGEECSGIDVRVREKVAKAGLCESIEQYQGLPQWLANYVVYNRHSEASEITKWESPDELDNYIRSFKQYSLRNPIVEQVSLETLRVVRDLWTELQKEGQTIDEIHLEMGRDLKNTAEERSRIFRRNSENEDTNFRIKLLLEEFYANEKDIKDVRPYSPSQQELLRIYEEGVWQQEKDIPQDIKDIKKRISNDKDIKDITPNDIQRYRIWMDQKYCSPYTGKTIPLSRLFTTDYEIEHVIPRSRYFDDTYNNKVICESAVNKDKNNRLGMEYIMAAGGKTIELGNGKNVQILKEEEYVELVDKIFGNNTRKRNIMLADEITEDFSHRQLNDTRYIARFMKGILSNIVREKNADGTLEPEETSKNLIVCSGRITDRVKQDWGLNDIWNHIITPRFERLNTKTSSNDFGEYVCKDGKRYFQTRVPLNLQKGFNKKRIDHRHHAMDAIAIACVNRSIVNYLNNAAANQTEREDLRRAVCIPERNGQTKRQLRSPWHCFARDAENVLRQIVVSFKQNLRVATKATNSYECFDTTSGKKIRKHQSNREHYAIRKPLHKDSVYGEVILTSIASVNLKKALLNAERILDKRLKEKIFELRKLYNYSNKQIEEHLTKVCINCPEWKNYDFKKIAVRILSNDADATHIVAIRKPLDETFDEDKIKTITDTGIQKILLNHLRQNDNDPKKAFTTEGIENMNANIASLNGGKQHLPVYKVRVSEKDNGGYFPIGQKGNRSKKYVTTAKDTNLFFAVYANSNGKRSYKTIDLRTAIECKKQGLSVAPSVNEKGDKLLFTLSPNDLVYMPSEEEEANGFSIKGNLIKEHIYKMVSANDNRCFFIPHTVAEYCIFLYVFLRLCGQIKEH

SEQ ID NO: 1692 - protein, 1521 aa, unidentified
  REGION 1..1521: note = Description of Unknown: uncultivated organism with predicted taxonomy: Prevotella
  REGION 1..1521: note = MG22-38 effector
MTKNTRNIIGLDLGTNSIGWSWIQQLISPTPTQPSEYLFDGTPIIRMSGSRIIPMPGDVTGSFERGETISKTKDRTAKRMARRMNERFQLRRERLNRVLNIMGFLPEHYARALDRYGKLNEESNTTIAWRSKEDGKNEFIFYPSFLEMASIFKEHHPDIQRIPLDWTLYYLRSKALHQAITKEELSWVLHSFNQKRGYYQSREDITEEDKTKKVEYIKGVVNSVEDTGEKAKGKKIYKVTFADGTEFTSTKSEAPLWIGRTREIIVTTSLDTSGKPKLDKEGKIIQSAKTPDEKDWTLIKIRTEATIDDSKLTVGEYIFHALLKNPETKIKGAHVSTIDRRFYINEINAILKEQEKYHEELRDKSLYEQCTQALYAQNEVRRNIIAPWSMSDLLIKDILFYHRPLKSKKSQISECSLEFHTYTDKDGATHRQGIKCIPTSHPLFQEYRIWQFIANLRIYERERFDNGKHFINEDKTSDFLTTKKKEELYEWLAEKDSVSQKTLLGHLGLKVERYHWNFPEEKTYPCGETRHLIQSRMKKANLQKAFHSLISDEQKDCFERGLWHILYSVSDYNELCKALKTFARKTGFTLEEQLLFVEAFSSCPPFKKDYGAYSKRAITKLLPLMRIGKFWHEESIDSTTKNRIEHLISGEECSGIDVRVREKVAKAGLCESIEQYQGLPQWLANYVVYNRHSEASEITKWESPDELDNYIRSFKQYSLRNPIVEQVSLETLRVVRDLWAELQKEGQTIDEIHLEMGRDLKNTAEERSRIFRRNSENEDTNFRIKLLLEEFYANEKDIKDVRPYSPSQQELLRIYEEGVWQQEKDIPQDIKDIKKRISNDKDIKDITPNDIQRYRIWMDQKYCSPYTGKTIPLSRLFTTDYEIEHVIPRSRYFDDSYNNKVICEAAVNKDKNNRLGMEYIMAAGGKTIELGNGKNVQILKEEEYVELVDKIFGNNTRKRNIMLADEITEEFSHRQLNDTRYIARFMKGILSNIVREKNADGTLEPEETSKNLIVCSGRITDRVKQDWGLNDIWNHIVTPRFERLNTKTSSNDFGEYVCKEGKRYFQTRMPLSLQKGFNKKRIDHRHHAMDAIAIACVNRSIVNYLNNAAANQTEREDLRRAVCIPERNGQTKRQLRSPWHCFARDAENALRQIVVSFKQNLRIATKATNSYECFDTASGKKIRKHQSNREHYAIRKPLHKDSVYGEVILTSIASVNLKKALLKADRILDKRLKEKIFELRKLYNYSNKQIEEHLTKVCINCPEWKNYDFKKIAVRILSNDADATHIVAIRKPLDESFDKIKINTITDTGIQKILLNHLSRYADDPKKAFSPEGIEDMNANIASLNGGKQHLPIYKVRVSEKDNGGYFPIGQKGNRPKKYVTTAKDTNLFFAVYVDSKGKRSYKTIDLRTAIECKKQGLSVAPSVNEKGDKLLFTLSPNDLVYMPSEEEEANGFSIKGNLIKEHIYKMVSANDNRCFFIPHTVADFISNGEEYNRHNKIELTEDRRSIKEHCVPLKVDRLGK

SEQ ID NO: 1693 - protein, 1558 aa, unidentified
  REGION 1..1558: note = Description of Unknown: uncultivated organism with predicted taxonomy: Prevotella sp. MGM2
  REGION 1..1558: note = MG22-39 effector
LYSSHHVAANSTYPFKTGHNRTPLNRFTTHKTQPYNIMTKNTRNIIGLDLGTNSIGWSWIQQLISPTPTQPSEYLFDGTPIIRMSGSRIIPMPGDVTGSFERGETISKTKDRTAKRMARRMNERFQLRRERLNRVLNIMGFLPEHYARALDRYGKLNEESNTTIAWRSKEDGKNEFIFYPSFLEMASIFKERHPDIQRIPLDWTLYYLRSKALHQAITKEELSWVLHSFNQKRGYYQSREDITEEDKTKKVEYIKGVVNSVEDTGEKAKGKIIYKVTFADGTEFTSTKSEAPLWIGRTREIIVTTSLDTSGKPKLDKEGKIIQSAKTPDEKDWTLIKIRTEATIDDSKLTVGEYIFHALLKNPETKIKGAHVSTIDRRFYINEINAILKEQEKYHKELRDKSLYEQCIKALYAQNEVRRNIIAPWSMSDLLIKDILFYHRPLKSKKSQISECPLEFHTYTDKNGATHRQGIKCIPTSHPLFQEYRIWQFIANLRIYERERFDNGKHFINEDKTSDFLTTKKKEELYEWLAERDSVSQKTLLGKIGLKVEHYHWNYPEEKTYPCGETRHLIQSRLKKANLQKAFHSLISDEQKDCFERGLWHILYSVSDYNELCKALKTFARKTGFTLEEQLLFVEAFSSCPPFKKDYGAYSKRAITKLLPLMRIGKFWHEESIDSTTKTRIEHLISGEECSGIDVRVREKVAKAGLCESIEQYQGLPQWLANYVVYNRHSEASEIIKWESPDELDNYIRSFKQYSLRNPIVEQVSLETLRVVRDLWTELRKEGQTIDEIHLEMGRDLKNTAEERSRIFKRNSENEDTNFRIKLLLEEFYANEKDIKDVRPYSPSQQELLRIYEEGVWQQEKDIPQDIKDIKKRISNDKDIKDITPNDIQRYRIWMDQKYCSPYTGKTIPLSRLFTTDYEIEHVIPRSRYFDDSYNNKVICEAAVNKDKNNRLGMEYIMAAGGKTIELGNGKNVQILKEEEYVELVDKIFGNNTRKRNIMLADEITEEFSHRQLNDTRYIARFMKGILSNIVREKNADGTLEPEETSKNLIVCSGRITDRVKQDWGLNDIWNHIITPRFERLNTKTSSNDFGEYVCKDGKRYFQTRVPLNLQKGFNKKRIDHRHHAMDAIAIACVNRSIVNYLNNAAANQTEREDLRRAVCIPERNGQTKRQLRSPWHCFARDAENALRQIVVSFKQNLRVATKATNSYECFDTASGKKIRKHQSNREHYAIRKPLHKDSVYGEVILTSIASVNLKKALLKAERILDKRLKEKIFELRKLYNYSNKQIEEHLTKVCINCPEWKNYDFKKIAVRILSNDADATHIVAIRKPLDETFDEDKIKTITDTGIQKILLNHLSRYADDPKKAFSPEGIEDMNANIASLNSGKQHLPIYKVRVSEKDNGGYFPIGQKGNRPKKYVTTAKDTNLFFAVYADSKGKRSYKTIDLRTAIECRKQGLSVAPSINEKGDKLLFTLSPNDLVYMPSEGEEANGFAIDNNLNKEQIYKMVSANNKQCFFIPHTVADFISRGEEYNSHNKIELTEDRRSIKEHCVPLKVNRLGK

SEQ ID NO: 1694 - protein, 1532 aa, unidentified
  REGION 1..1532: note = Description of Unknown: uncultivated organism with predicted taxonomy: Bacteroidales
  REGION 1..1532: note = MG22-40 effector
MKKKNILGLDLGTNSIGWAWLQQDDTEQTIQTEYLLQNNPTIRMSGSRIIPTSGDVINDFEAGKAVSKTKDRTTFRMTRRMNERFKLRRERLNRVLRILGMLPAHYAQHVDRYGKPDEEKQPKIAWEVAPDGKSNFLFHQSFLEMVKLFGVHQPQLQRIPLDWTLYYLRHKALTQPISKAELAWILHSFNQKRGYNQTRDELTEVNEKEKLEYTNSKVVSVELIEQKKSPLYLVTFENGVAVETSKVDAPQWVGQMRYAIITTKLNDLGQPLHKKDGSIDQKVSLPNDDDWALNKLRTETQIDQSHTTVGNYIFQTLLKNPETKIKGAHVCTIDRRFYEDELNAILLKQAEFHPELTNRNLYEACLMALYANNEAHRYNLATQNTCNLITKDIIFYQRPLKSKKSLIAECPFEKRIFCDAEGNVQMQGIKCIPVSHPHFQEYRLWQFLNNLRIFQREVVEDGKFTMNVDVTDKYINENSLTLLFEWLQDKITIKQKELLAKLRLKESDFRWNYVEDKAYPCGETRHVLASKLKKLKGITNDFLAQPSLNGKTTVECELWHILYSVTNLAELRKALYTFARRHNFSVVDAEAFVKVFIACPPFKKDYGAYSDKAICKLLSVMRVGKYWSAENIDSTTLLRIEHLITGEEDEHINERTRKHITEKGLQQSVNQYQGLQQWLACYVVYGRHAEVAEIVRWESPTELEQYINNFKQYSLRNPIVEQVSLETLRVVRDLWQTVAKEGGRIDEIHLEMGRDLKNSAAERAKISNRNKQNEGTNFRIKLLLQEFSQYEKDIEGIRPYSPSQQELLRIYEEGVCEQTEMPKDIAKIRRELSSSSEKDVKRSDIQRYRLWLDQKYCSPYTGQPIPLARLFTTDYEIEHVIPRSKYFDDSYNNKVICEAAVNKAKSNRLGMAFIQESGGQIIPLGNGRNVQVLSESAYVEFINKTFKHNARKRSLMLADEITEEFCHRQLTDTRYIARFMMGVLSNIVRQNDNGVLESEAISKNLIVCNGKITDRVKQDWGLNDVWNHIVTPRFKRLNQITNSSDFGEWCNKEGKRYFQTRIPLELQKGVNKKRIDHRHHAMDAIAIACTTRSLVNYLNNQSAHTKAREDYRQRLCRTDGHGQTKRLLRAPWKDFAKDAESALQQIVVSFKQNTRILTHATNSYECFDAKAGKKIIKRQISQNHYAIRKPLHKDTVYGEVVLPSIKLISLNKALSNPRRIIDKQLRSKILELQQRDKLTKKQVCDFFKKTCANSTEWRNYDFAKVAVRVWSNDEEGSRMVSVRKAIDESFDMKQIEKVYDPIVRNILTRHLKACNGDSKIAFSPQGVEEMNQHIAELNNGNAHLPIYKVKLGESKGEKFAIGQKGCKATKFVVTAKDTNLFFAVYANEEGKRSYQSVDLRTAIELKKQGCPVAPETNEKGDKLLFILSPNSLVYMPTEEEMERGNIDVQNLNLNQIFKMVSSTGNECYFVPNTLSQVIFPNKEYESMNKVGTVKEWDGYSISESKNNKKFLSIKACCIPICIDRLGRIQLKK

SEQ ID NO: 1695 - protein, 1521 aa, unidentified
  REGION 1..1521: note = Description of Unknown: uncultivated organism with predicted taxonomy: Bacteroidales
  REGION 1..1521: note = MG22-41 effector
MTKNTRNIIGLDLGTNSIGWSWIQQLISPTPTQPSEYLFDGTPIIRMSGSRIIPMPGDVTGSFERGETISKTKDRTAKRMARRMNERFQLRRERLNRVLNIMGFLPEHYARALDRYGKLNEESNTTIAWRSKEDGKNEFIFYPSFLEMASIFKEHHPDIQRIPLDWTLYYLRSKALHQAITKEELSWVLHSFNQKRGYYQSREDITEEDKTKKVEYIKGVVNSVEDTGEKAKGKKIYKVTFADGTEFTSTKSEAPLWIGRTREIIVTTSLDTSGKPKLDKEGKIIQSAKTPDEKAWTLIKIRTEATIDDSKLTVGEYIFHALLKNPETKIKGAHVSTIDRRFYINEINAILKEQEKYHEELRDKSLYEQCTQALYAQNEVRRNIIAPWSMSDLLIKDILFYHRPLKSKKSQISECSLEFHTYTDKDGATHRQGIKCIPTSHPLFQEYRIWQFIANLRIYERERFDNGKHLINEDKTSDFLTTKKKEELYEWLAEKDSVSQKTLLGHLGLKVERYHWNFPEEKTYPCGETKHLIQSRLKKANLQKAFHSLISDEQKDCFERGLWHILYSVSDYNELCKALKTFARKTGFTLEEQLLFVEAFSSCPPFKKDYGAYSKRAITKLLPLMRIGKFWHEESIDSTTKNRIEHLISGEECSGIDIRVREKVAKAGLCESIEQYQGLQQWLANYVVYNRHSEASEITKWESPDELDNYIRSFKQYSLRNPIVEQVSLETLRVVRDLWAELQKEGQTIDEIHLEMGRDLKNTAEERSRIFRRNSENEDTNFRIKLLLEEFYANEKDIKDVRPYSPSQQELLRIYEEGVWQQEKDIPQDIKDIKKRISNDKDIKDITPNDIQRYRIWMDQKYCSPYTGKTIPLSRLFTTDYEIEHVIPRSRYFDDSYNNKVICEAAVNKDKNNRLGMEYIMAAGGKTIELGNGKNVQILKEEEYVELVDKIFGNNTRKRNIMLADEITEDFSHRQLNDTRYIARFMKGILSNIVREKNADGTLEPEETSKNLIVCSGRITDRVKQDWGLNDIWNHIITPRFERLNKKTSSNDFGEYVCKEGKRYFQTRVPLNLQKGFNKKRIDHRHHAMDAIAIACVNRSIVNYLNNAAANQTEREDLRRAVCIPERNGQTKRQLRSPWHCFARDAENALQQIVVSFKQNLRVATKATNSYECFDTASGKKIRKHQSNREHYAIRKALHKDSVYGEVILTSIASVYLKKALLKAERILDKRLKEKIFELRKLYNYSNKQIEEHLTKVCINCPEWKNYDFKKIAVRILSNDADATHIVAIRKPLDETFDKEKIKAITDTGIQKILLNHLSRYADDPKKAFSPEGIEDMNANIASLNGGKQHLPIYKVRVSEKDNGGYFPIGQKGNRSKKYVTTAKETNLFFAVYADSNGKRSFKTIDLRTAIECKKQGLSVAPSVNEKGDKLLFTLSPNDLVYMPSEEEEANGFSIDNNLNKEQIYKMVSATYKQCFFIPHTVADFIYKNKEFNVLNKIELTEDRRSIKEHCVPLKVNRLGK

SEQ ID NO: 1696 - protein, 1521 aa, unidentified; identical to SEQ ID NO: 1678
  REGION 1..1521: note = Description of Unknown: uncultivated organism with predicted taxonomy: Prevotella
  REGION 1..1521: note = MG22-42 effector

SEQ ID NO: 1697 - protein, 1423 aa, unidentified
  REGION 1..1423: note = Description of Unknown: uncultivated organism with predicted taxonomy: Bacteroidales
  REGION 1..1423: note = MG22-43 effector
MGFLPEHYARALDRYGKLNEESNTTIAWRSKEDGKNEFIFYPSFLEMASIFKEHHPDIQRIPLDWTLYYLRSKALHQAITKEELSWVLHSFNQKRGYYQPRKDITEKEKTKKIEYIKDIVRSVEDTGEKTKGKKAYKVTFDNGFKFISTEAEAPLWVGRTREVIVTTSLDATGAPKRDKEGDIIQSVKAPEEKDWTLKKIRTENHIDKSKLTVGEYILQTLLEKPDTKIKGAHVSTIDRRFYIHEINAILKVQEKYHKELRDKSLYEQCTQALYTQNEVRRNIIAPWSMSDLLIKDILFYHRPLKSKKSQISECPFEFHNYTDKNGASHRQGIKCIPTSHPLFQEYRIWQFIANLRIYERERFDNGKHLINENKTSEFLTSEKKEELFEWLAEKDSVSQKTLLGHIGLKVEHYHWNFPEEKTYPCGETRHLIQSRLKKANLLKSFCSLVPEKQKKEFELKLWHILYSVSDYNELRKALETFARKTGFTREEQDLFVEFFSSCPPFKKVYGAYSKRAIARLLPLMRLGKYWHEEHIDSATMNRIEHLISGEECNGIDVRVRENIAKFGLNESIEQYQGLPQWLACYVVYNRHSEASEVTKWESPEELDNYIKAFKQYSLRNPIVEQISLETLRVVRDLWTELQKEGQTIDEIHLEMGRDLKNTAEERSRIFRRNSENEDTNFRIKLLLEEFNANEKDIKDVRPYSPSQQELLRIYEEGVWQQEKDIPQDIKDIKKRISNDKDIKDITPNDIQRYRIWMDQKYCSPYTGKTIPLSRLFTTDYEIEHVIPRSRYFDDSYNNKVICEAAVNKDKNNRLGMEYIMAAGGKTIELGNGKDVQILKEEEYVELVDKIFGNNTRKRNIMLADEITEEFSHRQLNDTRYIARFMKGILSNIVREKNADGTLESEETSKNLIVCSGRITDRVKQDWGLNDIWNHIITPRFERLNTKTSSDKFGEYVCKEGKRYFQTRVPLNLQKGFNKKRIDHRHHAMDAIAIACVNRSIVNYLNNAAANQTEREDLRRAVCIPERNGQTKRQLRSPWRNFAKDAENALRQIVVSFKQNLRILTKATNSYECFDTTSGKKIRRHQVNEEHYAVRKPLHEDFVYGEVILSSIASVNFKKALQKANRILDKRLKDKIFELRKLYSYSNKQIEEHLTKVCINTPEWKDYDFKKINIRILSNDEGATHIVAIRKPLDESFDKVKINTITDTGIQKILLNHLSRYAEDPKKAFSLEGIEDMNANITSLNGGKQHLPIYKVRVSEKDNGGYYPIGQKGNRSKKYVTTAKDTNLFFAVYADSNGKRSFKTIDLRTAIECKKQGLSVAPSVNEKGEQLLFTLSPNDLVYMPSEEEEANGFAIDNNLNKEHIYKMVSTDSNRCFFIPHTVANFISRGEEYNRHNKIELTEDRRSIKEHCVPLKVNRLGKKTL

SEQ ID NO: 1698 - protein, 1521 aa, unidentified
  REGION 1..1521: note = Description of Unknown: uncultivated organism with predicted taxonomy: Bacteroidales
  REGION 1..1521: note = MG22-44 effector
MTKNTRNIIGLDLGTNSIGWSWIQQLISPTPTQPSEYLFDGTPIIRMSGSRIIPMHGDVTGSFERGETISKTKDRTAKRMARRMNERFQLRRERLNRVLNIMGFLPEHYARALDRYGKLNEESNTTIAWRSKEDGKNEFIFYPSFLEMASIFKEHHPDIQRIPLDWTLYYLRSKALHQAITKEELSWVLHSFNQKRGYYQSREDITEEDKTKKVEYIKGVVNSVEDTGEKAKGKKIYKVTFADGTEFTSTKSEAPLWIGRTREIIVTTSLDTSGKPKLDKEGKIIQSAKTPDEKDWTLIKIRTEATIDDSKLTVGEYIFHALLKNPETKIKGAHVSTIDRRFYINEINAILKEQEKYHEELRDKSLYEQCTQALYAQNEVRRNIIAPWSMSDLLIKDILFYHRPLKSKKSQISECSLEFHTYTDKDGATHRQGIKCIPTSHPLFQEYRIWQFIANLRIYERERFDNGKHFINEDKTSDFLTTKKKEELYEWLAEKDSVSQKTLLGHLGLKVERYHWNFPEEKTYPCGETRHLIQSRMKKANLQKAFHSLISDEQKDCFERGLWHILYSVSDYNELCKALKTFARKTGFTLEEQLLFVEAFSSCPPFKKDYGAYSKRAITKLLPLMRIGKFWHEESIDSTTKNRIEHLISGEECSGIDVRVREKVAKAGLCESIEQYQGLQQWLANYVVYNRHSEASEITKWESPDELDNYIRSFKQYSLRNPIVEQVSLETLRVVRDLWAELQKEGQTIDEIHLEMGRDLKNTAEERSRIFRRNSENEDTNFRIKLLLEEFYANEKDIKDVRPYSPSQQELLRIYEEGVWQQEKDIPQDIKDIKKRISNDKDIKDITPNDIQRYRIWMDQKYCSPYTGKTIPLSRLFTTDYEIEHVIPRSRYFDDSYNNKVICEAAVNKDKNNRLGMEYIMAAGGKTIELGNGKNVQILKEEEYVELVDKIFGNNTRKRNIMLADEITEEFSHRQLNDTRYIARFMKGILSNIVREKNADGTLEPEETSKNLIVCSGRITDRVKQDWGLNDIWNHIVTPRFERLNTKTSSNDFGEYVCKDGKRYFQTRVPLNLQKGFNKKRIDHRHHAMDAIAIACVNRSIVNYLNNAAANQTEREDLRRAVCIPERNGQTKRQLRSPWPCFARDTENALRQIVVSFKQNLRVATKATNSYECFDTASGKKIRKHQSNREHYAIRKPLHKDSVYGEVILTSIASVNLKKALLKAERILDKRLKEKIFELRKLYNYSNKQIEEHLTKVCINRPEWKNYDFKKIAVRILSNDADATHIVAIRKPLDESFDKIKINTITDTGIQKILLNHLSRYADDPKKAFSPEGIEDMNANIASLNGGKQHLPIYKVRVSEKNNGGYFPIGQKGNRPKKFVTTAQDTNLFFAVYADSKGKRSFKTIDLRTAIECKKQGLSVAPSVNEKGDKLLFTLSPNDLVYMPSEEEEANGFAIKGNLIKEHIYKMVNASNNRCFFIPHSVADFISKGEEYNALNKIELTEDGRSIKVHCVPLKVNRLGK

SEQ ID NO: 1699 - protein, 1521 aa, unidentified
  REGION 1..1521: note = Description of Unknown: uncultivated organism with predicted taxonomy: Bacteroidales
  REGION 1..1521: note = MG22-45 effector
MTKNTRNIIGLDLGTNSIGWSWIQQLISPTPTQPSEFLFNGTPIIRMSGSRIIPMPGDVTGSFERGETISKTKDRTAKRMARRMNERFQLRRERLNRVLNIMGFLPEHYARALDRYGKLNEESNTTIAWRSKEDGKNEFIFYPSFLEMASIFKERHPDIQRIPLDWTLYYLRSKALHQAITKEELSWVLHSFNQKRGYYQSREDITEEDKTKKVEYIKGVVNSVEDTGEKAKGKKIYKVTFADGTEFTSTKSEAPLWIGRTREIIVTTSLDTSGKPKLDKEGKIIQSAKTPDEKDWTLIKIRTEATIDDSKQTVGEYIFHALLKNPETKMKGAHVSTIDRRFYINEINAILKEQEKYHKELRDKSLYEQCIKALYAQNEVRRNIIAPWSMSDLLIKDILFYHRPLKSKKSQISECPLEFHTYTDKNGATHRQGIKCIPTSHPLFQEYRIWQFIANLRIYERERFDNGKHLINEDKTSDFLTTKKKEELYEWLAEKDSVSQKTLLGHLGLKVERYHWNFPEEKTYPCGETRHLIQSRLKKANLQKAFHSLISDEQKDCFERSLWHILYSVSDYNELCKALKTFARKTGFTLEEQSLFGEAFSSCPPFKKDYGAYSKRAITKLLPLMRIGKFWHEESIDSTTKTRIEHLISGEECSGIDVRVREKVAKAGLCESIEQYQGLPQWLANYVVYNRHSEASEITKWESPDELDNYIRSFKQYSLRNPIVEQVSLETLRVVRDLWTELQKEGQTIDEIHLEMGRDLKNTAEERSRIFRRNSENEDTNFRIKLLLEEFNANEKDIKDVRPYSPSQQELLHIYEEGVWQQEKDIPQDIKDIKKRISNDKDIKGITPNDIQRYRIWMDQKYCSPYTGKTIPLSRLFTTDYEIEHVIPRSRYFDDSYNNKVICEAAVNKDKNNRLGMEYIMAAGGKTIKLGNGKNVQILKEEEYVELVDKIFGNNTRKRNIMLADEITEEFSHRQLNDTRYIARFMKGILSNIVREKNADGTLEPEETSKNLIVCSGRITDRVKQDWGLNDIWNHIVTPRFERLNTKTSSNDFGEYVCKDGKRYFQTRVPLNLQKGFNKKRIDHRHHAMDAIAIACVNRSIVNYLNNAAANQTEREDLRRAVCIPERNGQTKRQLRSPWPCFARDTENALRQIVVSFKQNLRVATKATNSYECFDTTSGKKIRKHQSNREHYAIRKPLHKDSVYGEVILTSIASVNLKKALLKAERILDKRLKEKIFELRKLYNYSNKQIEEHLTKVCINCPEWKNYDFKKIAVRILSNDADATHIVAIRKPLDESFDEEKIKTITDTGIQKILLNHLSRYADDPKKAFSPEGIEDMNANIASLNGGKQHLPIYKVRVSEKDNGGYFPIGQKGNRPKKYVTTAQDTNLFFAVYADSKGKRSYKTIDLRTAIECRKQGLSVAPSINEKGDKLLFTLSPNDLVYMPSEGEEANGFAIDNNLNKEQIYKMVSANNKQCFFIPHTVADFISNGEEYNRHNKIELTEDRRSIKEHCVPLKVNRLGK

SEQ ID NO: 1700 - protein, 1532 aa, unidentified
  REGION 1..1532: note = Description of Unknown: uncultivated organism with predicted taxonomy: Bacteroidales
  REGION 1..1532: note = MG22-46 effector
MKKKNILGLDLGTNSIGWAWLQQDDTEQTIQTEYLLQNNPTIRMSGSRIIPTSGDVINDFEAGKAVSKTKDRTTFRMTRRMNERFKLRRERLNRVLRILGMLPAHYAQHVDRYGKPDEEKQPKIAWEVAPDGKSNFLFHQSFLEMVKLFGVHQPQLQRIPLDWTLYYLRHKALTQPISKAELAWILHSFNQKRGYNQTRDELTEVNEKEKLEYTNSKVVSVELIEQKKSPLYLVTFENGVAVETSKVDAPQWVGQMRYAIITTKLNDLGQPLHKKDGSIDQKVSLPNDDDWALNKLRTETQIDQSHTTVGNYIFQTLLKNPETKIKGAHVCTIDRRFYEDELNAILLKQAEFHPELTNRNLYEACLMALYANNEAHRYNLATQNTCNLITKDIIFYQRPLKSKKSLIAECPFEKRIFCDTEGNVQMQGIKCIPVSHPHFQEYRLWQFLNNLRIFQREVVEDGKFTMNVDVTDKYINENSLTLLFEWLQDKITIKQKELLAKLRLKESDFRWNYVEDKAYPCGETRHVLASRLKKLKGITNDFLAQPSLNGKTTVECELWHILYSVTNLAELRKALYTFARKHNFSVVDAEAFVKVFIACPPFKKDYGAYSDKAICKLLSVMRVGKYWSAENIDSTTLLRIEHLITGEEDEHINERTRKHITEKGLQQSVNQYQGLQQWLACYVVYGRHAEVAEIVRWESPTELEQYINNFKQYSLRNPIVEQVSLETLRVVRDLWQTVAKEGGRIDEIHLEMGRDLKNSAAERAKISNRNKQNEGTNFRIKLLLQEFSQYEKDIEGIRPYSPSQQELLRIYEEGVCEQTEMPKDIAKIRRELSSSSEKDVKRSDIQRYRLWLDQKYCSPYTGQPIPLARLFTTDYEIEHVIPRSKYFDDSYNNKVICEAAVNKAKSNRLGMAFIQESGGQIIPLGNGRNVQVLNESAYVEFINKTFKHNARKRSLMLADEITEEFCHRQLTDTRYIARFMMGVLSNIVRQNDNGVLESEAISKNLIVCNGKITDRVKQDWGLNDVWNHIVTPRFKRLNQITNSSDFGEWCNKEGKRYFQTRIPLELQKGVNKKRIDHRHHAMDAIAIACTTRSLVNYLNNQSAHTKAREDYRQRLCRTDGHGQTKRLLRAPWKDFAKDAESALQQIVVSFKQNTRILTHATNSYECFDAKAGKKIIKRQISQNHYAIRKPLHKDTVYGEVVLPSIKLISLNKALSNPRRIIDKQLRSKILELQQRDKLTKKQVCDFFKKTCANSTEWRNYDFTKVAVRVWSNDEEGSRMVSVRKAIDESFDMKQIEKVYDPIVRNILTRHLKACNGDSKIAFSPQGVEEMNQHIAELNNGNAHLPIYKVKLGESKGEKFAIGQKGCKATKFVVTAKDTNLFFAVYANEEGKRSYQSVDLRTAIELKKQGCPVAPETNEKGDKLLFILSPNSLVYMPTEEEMERGNIDVQNLNLNQIFKMVSSTGNECYFVPNTLSQVIFPNKEYESMNKVGTVKEWDGYSISESKNNKKFLSIKACCIPICIDRLGRIQLKK

SEQ ID NO: 1701 - protein, 1521 aa, unidentified
  REGION 1..1521: note = Description of Unknown: uncultivated organism with predicted taxonomy: Bacteroidales
  REGION 1..1521: note = MG22-47 effector
MTKNTRNIIGLDLGTNSIGWSWIQQLISPTPTQPSEYLFDGTPIIRMSGSRIIPMPGDVTGSFERGETISKTKDRTAKRMARRMNERFQLRRERLNRVLNIMGFLPEHYARALDRYGKLNEESNTTIAWRSKEDGKNEFIFYPSFLEMASIFKERHPDIQRIPLDWTLYYLRSKALHQAITKEELSWVLHSFNQKRGYYQSREDITEEDKTKKVEYIKGVVNSVEDTGEKAKGKKIYKVTFADGTEFTSTKSEAPLWIGRTREIIVTTSLDTSGKPKLDKEGKIIQSAKTPDEKDWTLIKIRTEATIDDSKLTVGEYIFHALLKNPETKIKGAHVSTIDRRFYINEINAILKEQEKYHKELRDKSLYEQCIKALYAQNEVRRNIIAPWSMSDLLIKDILFYHRPLKSKKSQISDCPLEFHTYTDKDGATHRQGIKCIPTSHPLFQEYRIWQFIANLRIYERERFDNGKHFINEDKTSDFLTTKKKEELYEWLAEKDSVSQKTLLGHLGLKVERYHWNFPEEKTYPCGETRHLIQSRLKKANLQKAFHSLISDEQKDCFERGLWHILYSVSDYNELCKALKTFARKTGFTLEEQLLFVEAFSSCPPFKKDYGAYSKRAITKLLPLMRIGKFWHEESIDSTTKNRIEHLISGEECSGIDVRVREKVAKAGLCESIEQYQGLQQWLANYVVYNRHSEASEITKWESPDELDNYIRAFKQYSLRNPIVEQVSLETLRVVRDLWAELQKEGQTIDEIHLEMGRDLKNTAEERSRIFRRNSENEDTNFRIKLLLEEFYANEKDIKDVRPYSPSQQELLRIYEEGVWQQEKDIPQDIKDIKKRISNDKDIKDITPNDIQRYRIWMDQKYCSPYTGKTIPLSRLFTTDYEIEHVIPRSRYFDDSYNNKVICEATVNKDKNNRLGMEYIMAAGGKTIELGNGKNVQILKEEEYVELVDKIFGNNTRKRNIMLADEITEEFSHRQLNDTRYIARFMKGILSNIVREKNADGTLEPEETSKNLIVCSGRITDRVKQDWGLNDIWNHIITPRFERLNTKTSSNDFGEYVCKDGKRYFQTRVPLNLQKGFNKKRIDHRHHAMDAIAIACVNRSIVNYLNNAAANQTEREDLRRAVCIPERNGQTKRQLRSPWHCFARDAENALRQIVVSFKQNLRVATKATNSYECFDTASGKKIRKHQSNREHYAIRKPLHKDSVYGEVILTSIASVNLKKALLKAERILDKRLKEKIFELRKLYNYSNKQIEEHLTKVCINCPEWKNYDFKKIAVRILSNDADATHIVAIRKPLDESFDEVKINTITDTGIQKILLNHLSRYADDPKKAFSPEGIEDMNANIASLNGGKQHLPVYKVRVSEKDNGGYFPIGQKGNRPKKYVTTAKDTNLFFAVYADSKGKRSYKTIDLRTAIECRKQGLSVAPSINEKGDKLLFTLSPNDLVYMPSEGEEANGFAIDNNLNKDQIYKMVSANNKQCFFIPHTVADFISRGEEYNSHNKIELTEDRRSIKEHCVPLKVNRLGK

SEQ ID NO: 1702 - protein, 1532 aa, unidentified; identical to SEQ ID NO: 1700
  REGION 1..1532: note = Description of Unknown: uncultivated organism with predicted taxonomy: Bacteroidales
  REGION 1..1532: note = MG22-48 effector

SEQ ID NO: 1703 - protein, 1521 aa, unidentified
  REGION 1..1521: note = Description of Unknown: uncultivated organism with predicted taxonomy: Bacteroidales
  REGION 1..1521: note = MG22-49 effector
MTKNTRNIIGLDLGTNSIGWSWIQQLISPTPTQPSEYLFDGTPIIRMSGSRIIPMPGDVTGSFERGETISKTKDRTAKRMARRMNERFQLRRERLNRVLNIMGFLPEHYARALDRYGKLNEESNTTIAWRSKEDGKNEFIFYPSFLEMASIFKERHPDIQRIPLDWTLYYLRSKALHQAITKEELSWVLHSFNQKRGYYQSREDITEEDKTKKVEYIKGVVNSVEDTGEKAKGKKIYKVTFADGTEFTSTKSEAPLWIGRTREIIVTTSLDTSGKPKLDKEGKIIQSAKTPDEKDWTLIKIRTEATIDDSKLTVGEYIFHALLKNPETKIKGAHVSTIDRRFYINEINAILKEQEKYHEELRDKSIYEQCTQALYAQNEVRRNIIAPWSMSDLLIKDILFYHRPLKSKKSQISECPLEFHTYTDKNGATHRQGIKCIPTSHPLFQEYRIWQFIANLRIYERERFDNGKHLINEDKTSDFLTTKKKEELYEWLAEKDSVSQKTLLGHLGLKVERYHWNFPEEKTYPCGETRHLIQSRLKKANLQKAFHSLISDEQKECFERGLWHILYSISDYNELCKALKTFARKTGFTLEEQLLFVEAFSSCPPFKKDYGAYSKRAITKLLPLMRIGKFWHEESIDSTTKNRIEHLISGEECSGIDVRVREKVAKAGLCKSIEQYQGLQQWLANYVVYNRHSEASEITKWESPDELDNYIRSFKQYSLRNPIVEQVSLETLRVVRDLWAELQKEGQTIDEIHLEMGRDLKNTAEERSRIFRRNSENEDTNFRIKLLLEEFYANEKDIKDVRPYSPSQQELLRIYEEGVWQQEKDIPQDIKDIKKRISNDKDIKDITPNDIQRYRIWMDQKYCSPYTGKTIPLSRLFTTDYEIEHVIPRSRYFDDSYNNKVICEAAVNKDKNNRLGMEYIMAAGGKTIELGNGKNVQILKEEEYVELVDKIFGNNTRKRNIMLADEITEEFSHRQLNDTRYIARFMKGILSNIVREKNADGTLEPEETSKNLIVCSGRITDRVKQDWGLNDIWNHIITPRFERLNTKTSSDKFGEYVCKEGKRYFQTRVPLSLQKGFNKKRIDHRHHAMDAIAIACVNRSIVNYLNNAAANQTEREDLRRAVCIPGRNGQTKRQLRSPWHCFAKDAENALRQIVVSFKQNLRVATKATNSYECFDTASGKKIRKHQSNREHYAIRKPLHKDSVYGEVILPSIASVNLKKALLKAERILDKRLKEKIFELRKLYNYSNKQIEEHLTKVCINRPEWKNYDFKKIAVRILSNDADATHIVAIRKPLDESFDEVKINTITDTGIQKILLNHLSRYADDPKKAFSPEGIEDMNANIASLNGGKQHLPVYKVRVSEKDNGGYFPIGQKGNRSKKYVTTAKDTNLFFAVYANSNGKRSYKTIDLRTAIECKKQGLSVAPSVNEKGDKLLFTLSPNDLVYMPSEEEEANGFSIKGNLIKEHIYKMVSANDNRCFFIPHTVADFISNGEEYNRHNKIELTEDRRSIKEHCVPLKVNRLGK

SEQ ID NO: 1704 - protein, 1521 aa, unidentified
  REGION 1..1521: note = Description of Unknown: uncultivated organism with predicted taxonomy: Bacteroidales
  REGION 1..1521: note = MG22-50 effector
MTKNTRNIIGLDLGTNSIGWSWIQQLISPPPTQPSEYLFDGTPIIRMSGSRIIPMPGDVTGSFERGETISKTKDRTAKRMARRMNERFQLRRERLNRVLNIMGFLPGHYARALDRYGKLNEESNTTIAWRSKEDGNNEFIFYPSFLEMASIFKEHHPDIQRIPLDWTLYYLRSKALHQAITKEELSWVLHSFNQKRGYYQSREDITEEDKTKKVEYIKGVVNSVEDTGEKAKGKKIYKVTFADGTEFTSTKSEAPLWIGRTREIIVTTSLDTSGKPKLDKEGKIIQSAKTPDEKDWTLIKIRTEATIDDSKLTVGEYIFHALLKNPKTKIKGAHVSTIDRRFYINEINAILKEQEKYHEELRDKSLYEQCIKALYAQNEVRRNIIAPWSMKDLLTKDILFYHRPLKSKKSQISECPLEFHCYTDKDGETHRQGIKCIPVSHPLFQEYRIWQFISNLRIYEREHFDNGKHFTNVDKTSEFLTNEKKEELYEWLAEKDSVSQKTLLGHLGLKVERYHWNFPEEKTYPCGETRHLIQSRLKKANLQKAFHSLISDEQKDCFERGLWHILYSVSDYNELCKALKTFARKTGFTLEEQLLFVEAFSSCPPFKKDYGAYSKRAITKLLPLMRIGKFWHEESIDSTTKNRIEHLISGEECSGIDVRVREKVAKAGLCESIEQYQGLPQWLANYVVYNRHSEASEIIKWESPDELDNYIRSFKQYSLRNPIVEQVSLETLRVVRDLWAELQKEGQTIDEIHLEMGRDLKNTAEERSRIFRRNSENEDTNFRIKLLLEEFYANEKDIKDVRPYSPSQQELLRIYEEGVWQKEKDIPQDIKDIKKRISNDKDIKDITPNDIQRYRIWMDQKYCSPYTGKTIPLSRLFTTDYEIEHVIPRSRYFDDSYNNKVICEAAVNKDKNNRLGMEYIMAAGGKTIELGNGKNVQILKEEEYVELVDKIFGNNTRKRNIMLADEITEEFSHRQLNDTRYIARFMKGILSNIVREKNADGTLEPEETSKNLIVCSGRITDRVKQDWGLNDIWNHIITPRFERLNTKTSSDKFGEYVCKEGKRYFQTRVPLSLQKGFNKKRIDHRHHAMDAIAIACVNRSIVNYLNNAAANQTEREDLRRAVCIPGRNGQTKRQLRSPWHCFARDAENALRQIVVSFKQNLRVATKATNSYECFDTASGKKIRKRQSNREHYAIRKPLHKDSVYGEVILTSIASVNLKKALLKAERILDKRLKEKIFELRKLYNYSNKQIEEHLTKVCINCPEWKNYDFKKIAVRILSNDADATHIVAIRKPLDESFDKIKINTITDTGIQKILLNHLSRYADDPKKAFSPEGIEDMNANIASLNGGKQHLPVYKVRVSEKDNGGYFPIGQKGNRSKKYVTTAKDTNLFFAVYANSNGKRSYKTIDLRTAIECKKQGLSVAPSVNEKGDKLLFTLSPNDLVYMPSEEEGANGFSIKGNLIKEHIYKMVSANDNRCFFIPHTVADFISNGEEYNRHNKIELTEDRRSIKEHCVPLKVNRLGK

SEQ ID NO: 1705 - protein, 1301 aa, unidentified
  REGION 1..1301: note = Description of Unknown: uncultivated organism with predicted taxonomy: Prevotellaceae
  REGION 1..1301: note = MG22-51 effector
LVTFENGVAVETSKVDAPQWVGQMRYAIITTKLNDLGQPLHKKDGSIDQKVSLPNDDDWALNKLRTETQIDQSHTTVGNYIFQTLLKNPETKIKGAHVCTIDRRFYEDELNAILLKQAEFHPELTNRNLYEACLMALYANNEAHRYNLATQNTCNLITKDIIFYQRPLKSKKSLIAECPFEKRIFCDAEGNVQMQGIKCIPVSHPHFQEYRLWQFLNNLRIFQREVVEDGKFTMNVDVTDKYINENSLTLLFEWLQDKITIKQKELLAKLRLKESDFRWNYVEDKAYPCGETRHVLASRLKKLKGITNDFLAQPSLNGKTTVECELWHILYSVTNLAELRKALYTFARRHNFSVVDAEAFVKVFIACPPFKKDYGAYSDKAICKLLSVMRVGKYWSAENIDSTTLLRIEHLITGEEDEHINERTRKHITEKGLQQSVNQYQGLQQWLACYVVYGRHAEVAEIVRWESPTELEQYINNFKQYSLRNPIVEQVSLETLRVVRDLWQTVAKEGGRIDEIHLEMGRDLKNSAAERAKISNRNKQNEGTNFRIKLLLQEFSQYEKDIEGIRPYSPSQQELLRIYEEGVCEQTEMPKDIAKIRRELSSSSSEKDVKRSDIQRYRLWLDQKYCSPYTGQPIPLARLFTTDYEIEHVIPRSKYFDDSYNNKVICEAAVNKAKSNRLGMAFIQESGGQIIPLGNGRNVQVLNESAYVEFINKTFKHNARKRSLMLADEITEEFCNRQLTDTRYIARFMMGVLSNIVRQNDNGVLESEAISKNLIVCNGKITDRVKQDWGLNDVWNHIVTPRFERLNQITNSSDFGEWCNKEGKRYFQTRIPLELQKRVNKKRIDHRHHAMDAIAIACTTRSLVNYLNNQSAHTKAREDYRQRLCRTDGHGQTKRLLRAPWKDFAKDAESALQQIVVSFKQNTRILTHATNSYECFDAKAGKKIIKRQISQNHYAIRKPLHKDTVYGEVVLPSIKLISLNKALSNPRRIIDKQLRSKILELQQRDKLTKKQVCDFFKKTCANSTEWRNYDFAKVAVRVWSNDEEGSRMVSVRKAVDESFDMKQIEKVYDPIVRNILTRHLKACNGDSKTAFSPQGVEEMNQHIAELNNENAHLPIYKVKLGESKGEKFAIGQKGSKATKFVVTAKDTNLFFAVYANEEGKRSYQSVDLRTAIELKKQGCPVAPETNEKGDKLLFILSPNSLVYMPTEEEMERGNIDVQNLNLNQIFKMVSSTGNNCFFVPNTLSQVIFPGKEYESMDKVGTVKEWDGYSISESKNNKKFLSIKACCIPICIDRLGRIQLKK

SEQ ID NO: 1706 - protein, 941 aa, unidentified
  REGION 1..941: note = Description of Unknown: uncultivated organism with predicted taxonomy: Prevotella sp. MGM2
  REGION 1..941: note = MG22-52 effector
MTKNTRNIIGLDLGTNSIGWSWIQQLISPPPTQPSEYLFDGTPIIRMSGSRIIPMPGDVTGSFERGETISKTKDRTAKRMARRMNERFQLRRERLNRVLNIMGFLPGHYARALDRYGKLNEESNTTIAWRSKEDGKNEFIFYPSFLEMASIFKEHHPDIQRIPLDWTLYYLRSKALHQAITKEELSWVLHSFNQKRGYYQSREDITEEDKTKKVEYIKGVVNSVEDTGEKAKGKKIYKVTFADGTEFTSTKSEAPLWIGRTREIIVTTSLDTSGKPKLDKEGKIIQSAKTPDEKDWTLIKIRTEATIDDSKLTVGEYIFHALLKNPKTKIKGAHVSTIDRRFYINEINAILKEQEKYHEELRDKSLYEQCIKALYAQNEVRRNIIAPWSMKDLLTKDILFYHRPLKSKKSQISECPLEFHCYTDKDGETHRQGIKCIPVSHPLFQEYRIWQFISNLRIYEREHFDNGKHFTNVDKTSEFLTNEKKEELYEWLAEKDSVSQKTLLGHLGLKVERYHWNFPEEKTYPCGETRHLIQSRLKKANLQKAFHSLISDEQKDCFERGLWHILYSVSDYNELCKALKTFARKTGFTLEEQLLFVEAFSSCPPFKKDYGAYSKRAITKLLPLMRIGKFWHEESIDSTTKNRIEHLISGEECSGIDVRVREKVAKAGLCESIEQYQGLPQWLANYVVYNRHSEASEIIKWESPDELDNYIRSFKQYSLRNPIVEQVSLETLRVVRDLWAELQKEGQTIDEIHLEMGRDLKNTAEERSRIFRRNSENEDTNFRIKLLLEEFYANEKDIKDVRPYSPSQQELLRIYEEGVWQQEKDIPQDIKDIKKRISNDKDIKDITPNDIQRYRIWMDQKYCSPYTGKTIPLSRLFTTDYEIEHVIPRSRYFDDSYNNKVICEAAVNKDKNNRLYNPQNEAFRLSITNRIISYSSFGFRL

SEQ ID NO: 1707 - protein, 1521 aa, unidentified
  REGION 1..1521: note = Description of Unknown: uncultivated organism with predicted taxonomy: Bacteroidales
  REGION 1..1521: note = MG22-53 effector
MTKNTRNIIGLDLGTNSIGWSWIQQLISPTPTQPSEYLFDGTPIIRMSGSRIIPMPGDVTGSFERGETISKTKDRTAKRMARRMNERFQLRRERLNRVLNIMGFLPEHYARALDRYGKLNEESNTTIAWRSKEDGKNEFIFYPSFLEMASIFKERHPDIQRIPLDWTLYYLRSKALHQAITKEELSWVLHSFNQKRGYYQSREDITEEDKTKKVEYIKGVVNSVEDTGEKAKGKKIYKVTFADGTEFTSTKSEAPLWIGRTREIIVTTSLDTSGKPKLDKEGKIIQSAKTPDEKDWTLIKIRTEATIDDSKLTVGEYIFHALLKNPETKIKGAHVSTIDRRFYINEINAILKEQEKYHEELRDKSIYEQCTQALYAQNEVRRNIIAPWSMSDLLIKDILFYHRPLKSKKSQISECPLEFHTYTDKDGATHRQGIKCIPTSHPLFQEYRIWQFIANLRIYERERFDNGKHLINEDKTSDFLTTKKKEELFEWLAEKDSVSQKTLLGHLGLKVERYHWNFPEEKTYPCGETRHLIQSRLKKANLQKAFHSLISDEQKECFERGLWHILYSISDYNELCKALKTFARKTGFKLEEQLLFVEAFSSCPPFKKDYGAYSKRAITKLLPLMRIEKFWHEESIDSTTKNRIEHLISGEECSGIDVRVREKVAEAGLCESIEQYQGLPQWLANYVVYNRHSEASEITKWESPDELDNYIRSFKQYSLRNPIVEQVSLETLRVVRDLWAELQKEGQTIDEIHLEMGRDLKNTAEERSRIFRRNSENEDTNFRIKLLLEEFYANEKDIKDVRPYSPSQQELLRIYEEGVWQQEKDIPQDIKDIKKRISNDKDIKDITPNDIQRYRIWMDQKYCSPYTGKTIPLSRLFTTDYEIEHVIPRSRYFDDSYNNKVICEATVNKDKNNRLGMEYIMAAGGKTIELGNGKNVQILKEEEYVELVDKIFGNNTRKRNIMLTDEITEEFSHRQLNDTRYIARFMKGILSNIVRGKNADGKLEPEETSKNLIVCSGRITDRVKQDWGLNDIWNHIITPRFERLNKKTSSNDFGEYVCKDGKRYFQTRVPLNLQKGFNKKRIDHRHHAMDAIAIACVNRSIVNYLNNAAANQTEREDLRRAVCIPERNGQTKRQLRSPWHCFARDAENALRQIVVSFKQNLRVATKATNSYECFDTASGKKIRRHQSNREHYAIRKPLHKDSVYGEVILPSIASVNLKKALLKADRILDKRLKDKIFELRKLYNYSNKQIEEHLTKVCINCLEWKNYDFKKIAVRILSNDADATHIVAIRKPLDESFDKVKINTITDTGIQKILLNHLSRYADDPKKAFSPEGIEDMNANIASLNGGKQHLPIYKVRVSEKDNGGYFPIGQKGNRSKKYVTTAKETNLFFAVYADSNGKRSFKTIDLRTAIECKKQGLSVSPSVNEKGDKLLFTLSPNDLVYMPSEEEEANGFSIDNNLNKEQIYKMVSATYKQCFFIPHTVADFIYKNKEFNVLNKIELTEDRRSIKEHCVPLKVNRLGK

SEQ ID NO: 1708 - protein, 1569 aa, unidentified
  REGION 1..1569: note = Description of Unknown: uncultivated organism with predicted taxonomy: Bacteroidales
  REGION 1..1569: note = MG22-54 effector
YGLLTHKQLCVLYSSHHVAANSTYPFKTGHNRTPLNRFTTHKTQPYNIMTKNTMNIIGLDLGTNSIGWSWIQQLISPTPTQPSEYLFNGTPIIRMSGSRIIPMPGDVTGSFERGETISKTKDRTAKRMARRMNERFQLRRERLNRVLNIMGFLPEHYARALDRYGKLNEESNTTIAWRSKEDGKNEFIFYPSFLEMASIFKERHPDIQRIPLDWTLYYLRSKALHQAITKEELSWVLHSFNQKRGYYQSREDITEEDKTKKVEYIKGVVNSVEDTGEKAKGKKIYKVTFADGTEFTSTKSEAPLWIGRTREIIVTTSLDTSGKPKLDKEGKIIQSAKTPDEKDWTLIKIRTEATIDDSKLTVGEYIFHALLKNPETKIKGAHVSTIDRRFYINEINAILKEQEKYHEELRDKSLYEQCTQALYAQNEVRRNIIAPWSMSDLLIKDILFYHRPLKSKKSQISECPLEFHTYTDKNGVTHRQGIKCIPTSHPLFQEYRIWQFIANLRIYERERFDNGKHLINEDKTSDFLTTKKKEELYEWLAEKDSVSQKTLLGHLGLKVERYHWNYPEEKTYPCGETRHLIQSRLKKANLQKAFHSLISEEQKDCFERGLWHILYSVSDYNELCKALKTFARKTGFTLEEQSLFVEAFSSCPPFKKDYGAYSKRAITKLLPLMRIGKFWHEESIDSTTKTRIEHLISGEECSGIDVRIREKVAKAGLCESIEQYQGLPLWLANYVVYNRHSEASEITKWESPDELDNYIRSFKQYSLRNPIVEQVSLETLRVVRDLWTELQKEGQTIDEIHLEMGRDLKNTAEERSRIFRRNSENEDTNFRIKLLLEEFNANEKDIKDVRPYSPSQQELLRIYEEGVWQQEKDIPQDIKDIKKRISNDKDIKGITPNDIQRYRIWMDQKYCSPYTGKTIPLSRLFTTDYEIEHVIPRSRYFDDSYNNKVICEAAVNKDKNNRLGMEYIMAAGGKTIKLGNGKNVQILKEEEYVELVDKIFGNNTRKRNIMLADEITEEFSHRQLNDTRYIARFMKGILSNIVREKNADGTLEPEETSKNLIVCSGRITDRVKQDWGLNDIWNHIVTPRFERLNTKTSSNDFGEYVCKDGKRYFQTRVPLNLQKGFNKKRIDHRHHAMDAIAIACVNRSIVNYLNNAAANQTKREDLRRAVCIPERNGQTKRQLRSPWPCFARDTENALRQIVVSFKQNLRVATKATNSYECFDTASGKKIRKHQSNREHYAIRKPLHKDSVYGEVILPSIASVNLKKALLKAERILDKRLKEKIFELRKLYNYSNKQIEEHLTKVCINCPEWKNYDFKKIAVRILSNDADATHIVAIRKPLDESFDEVKINTITDTGIQKILLNHLSRYADDPKKAFSPEGIEDMNANIASLNGGKQHLPIYKVRVSEKDNGGYFPIGQKGNRPKKYVTTAKDTNLFFAVYADSKGKRSFNMIDLRTAIECWKQGVSVAPSINEKGDKLLFTLSPNDLVYMPSEEEEANGFSIKGNLIKEHIYKMVSATNRQCFFIPHTVADFISRGQEYNVLNKIELAEDGRSIKEHCVPLKVNRLGK

SEQ ID NO: 1709 - protein, 1614 aa, unidentified
  REGION 1..1614: note = Description of Unknown: uncultivated organism with predicted taxonomy: Bacteroidales
  REGION 1..1614: note = MG22-55 effector
TNIFQKAKPFHNKFTTFVNVSIQRAVLEYQVGLYNNSFFKKATRCYGLLTHKQLCVLYSSHHVAANSTYPFKTGHNRTPLNRFTTHKTQPYNIMTKNTMNIIGLDLGTNSIGWSWIQQLISPTPTQPSEYLFNGTPIIRMSGSRIIPMPGDVTGSFERGETISKTKDRTAKRMARRMNERFQLRRERLNRVLNIMGFLPEHYARALDRYGKLNEESNTTIAWRSKEDGKNEFIFYPSFLEMASIFKERHPDIQRIPLDWTLYYLRSKALHQAITKEELSWVLHSFNQKRGYYQSREDITEEDKTKKVEYIKGVVNSVEDTGEKAKGKKIYKVTFADGTEFTSTKSEAPLWIGRTREIIVTTSLDTSGKPKLDKEGKIIQSAKTPDEKDWTLIKIRTEATIDDSKLTVGEYIFHALLKNPETKIKGAHVSTIDRRFYINEINAILKEQEKYHEELRDKSLYEQCTQALYAQNEVRRNIIAPWSMSDLLIKDILFYHRPLKSKKSQISECPLEFHTYTDKNGVTHRQGIKCIPTSHPLFQEYRIWQFIANLRIYERERFDNGKHLINEDKTSDFLTTKKKEELYEWLAEKDSVSQKTLLGHLGLKVERYHWNYPEEKTYPCGETRHLIQSRLKKANLQKAFHSLISEEQKDCFERGLWHILYSVSDYNELCKALKTFARKTGFTLEEQSLFVEAFSSCPPFKKDYGAYSKRAITKLLPLMRIGKFWHEESIDSTTKTRIEHLISGEECSGIDVRIREKVAKAGLCESIEQYQGLPLWLANYVVYNRHSEASEITKWESPDELDNYIRSFKQYSLRNPIVEQVSLETLRVVRDLWTELQKEGQTIDEIHLEMGRDLKNTAEERSRIFRRNSENEDTNFRIKLLLEEFNANEKDIKDVRPYSPSQQELLRIYEEGVWQQEKDIPQDIKDIKKRISNDKDIKGITPNDIQRYRIWMDQKYCSPYTGKTIPLSRLFTTDYEIEHVIPRSRYFDDSYNNKVICEAAVNKDKNNRLGMEYIMAAGGKTIKLGNGKNVQILKEEEYVELVDKIFGNNTRKRNIMLADEITEEFSHRQLNDTRYIARFMKGILSNIVREKNADGTLEPEETSKNLIVCSGRITDRVKQDWGLNDIWNHIVTPRFERLNTKTSSNDFGEYVCKDGKRYFQTRVPLNLQKGFNKKRIDHRHHAMDAIAIACVNRSIVNYLNNAAANQTKREDLRRAVCIPERNGQTKRQLRSPWPCFARDTENALRQIVVSFKQNLRVATKATNSYECFDTASGKKIRKHQSNREHYAIRKPLHKDSVYGEVILPSIASVNLKKALLKAERILDKRLKEKIFELRKLYNYSNKQIEEHLTKVCINCPEWKNYDFKKIAVRILSNDADATHIVAIRKPLDESFDEVKINTITDTGIQKILLNHLSRYADDPKKAFSPEGIEDMNANIASLNGGKQHLPIYKVRVSEKDNGGYFPIGQKGNRPKKYVTTAKDTNLFFAVYADSKGKRSFNMIDLRTAIECWKQGVSVAPSINEKGDKLLFTLSPNDLVYMPSEEEEANGFSIKGNLIKEHIYKMVSATNRQCFFIPHTVADFISRGQEYNVLNKIELAEDGRSIKEHCVPLKVNRLGK

SEQ ID NO: 1710 - protein, 1347 aa, unidentified
  REGION 1..1347: note = Description of Unknown: uncultivated organism with predicted taxonomy: Bacteroidales
  REGION 1..1347: note = MG22-56 effector
MTKNTRNIIGLDLGTNSIGWSWIQQLISPTPTQPSEYLFDGTPIIRMSGSRIIPMPGDVTGSFERGETISKTKDRTAKRMARRMNERFQLRRERLNRVLNIMGFLPEHYARALDRYGKLNEESNTTIAWRSKEDGKNEFIFYPSFLEMAAIFKEHHPDIQRIPLDWTLYYLRSKALHQAITKEELSWVLHSFNQKRGYYQSREDITEEDKTKKVEYIKGVVNSVEDTGEKAKGKKIYKVTFADGTEFTSTKSEAPLWIGRTREIIVTTSLDTSGKPKLDKEGKIIQSAKTPDEKDWTLIKIRTEATIDDSKLTVGEYIFHALLKNPETKIKGAHVSTIDRRFYINEINAILKEQEKYHEELRDKSIYEQCTQALYAQNEVRRNIIAPWSMSDLLIKDILFYHRPLKSKKSQISECPLEFHTYTDKDGATHRQGIKCIPTSHPLFQEYRIWQFIANLRIYERERFDNGKHFINEDKTSDFLTTKKKEELYEWLAERDSVSQKTLLGKIGLKVEDYHWNFPEEKTYPCGETRHLIQSRLKKANLQKTFHSLISDEQKECFERGLWHILYSVSDYNELCKALKTFARKTGFTLEEQLLFVEAFSSCPPFKKDYGAYSKRAITKLLPLMRIGKFWHEESIDSTTKNRIEHLISGEECSGIDVRVREKVAKAGLCESIEQYQGLPQWLANYVVYNRHSEASEIIKWESPDELDNYIRAFKQYSLRNPIVEQVSLETLRVVLDLWAELQKEGQTIDEIHLEMGRDLKNTAEERSRIFKRNSENEDTNFRIKLLLEEFYANEKDIKDVRPYSPSQQELLRIYEEGVWQQEKDIPQDIKDIKKRISNDKDIKDITPNDIQRYRIWMDQKYCSPYTGKTIPLSRLFTTDYEIEHVIPRSRYFDDSYNNKVICEAAVNKDKNNRLGMEYIMAAGGKTIELGNGKNVQILKKEEYVELVDKIFGNNTRKRNIMLADEITEDFSHRQLNDTRYIARFMKGILSNIVREKNADGTLEQEETSKNLIVCSGRITDRVKQDWGLNDIWNHIITPRFERLNTKTSSDKFGEYVCKEGKRYFQTRVPLSLQKGFNKKRIDHRHHAMDAIAIACVNRSIVNYLNNAAANQTEREDLRRAVCIPERNGQTKRQLRSPWPCFARDTENALRQIVVSFKQNLRVATKATNSYECFDTTSGKKIRKHQSNREHYAIRKPLHKDSVYGEVILTSIASVNLKKALLKAERILDKRLKEKIFELRKLYNYSNKQIEEHLTKVCINRPEWKNYDFKKIAVRILSNDADATHIVAIRKPLDESFDKVKINTITDTGIQKILLNHLSRYADDPKKAFSPEGIEDMNANIASLNGE

SEQ ID NO: 1711 - protein, 1558 aa, unidentified
  REGION 1..1558: note = Description of Unknown: uncultivated organism with predicted taxonomy: Bacteroidales
  REGION 1..1558: note = MG22-57 effector
LYSSHHVAANSTYPFKTGHNRTPLNRFTTHKTQPYNIMTKNTRNIIGLDLGTNSIGWSWIQQLISPTPTQPSEYIFDGTPIIRMSGSRIIPMPGDVTGSFERGETISKTKDRTAKRMARRMNERFQLRRERLNRVLNIMGFLPEHYARALDRYGKLNEESNTTIAWRSKEDGKNEFIFYPSFLEMASIFKERHPDIQRIPLDWTLYYLRSKALHQAITKEELSWVLHSFNQKRGYYQSREDITEEDKTKKVEYIKGVVNSVEDTGEKAKGKKIYKVTFADGTEFTSTKSEAPLWIGRTREIIVTTSLDSSGKPKLDKEGKIIQSAKTPDEKDWTLIKIRTEATIDDSKLTVGEYIFHALLENPETKIKGAHVSTIDRRFYINEINAILKEQEKYHEELRDKSIYEQCIKALYAQNEVRRNIIAPWSMKDLLTKDILFYHRPFKSKKSQISECPLEFHCYTDKDGETHRQGIKCIPVSHPLFQEYRIWQFISNLRIYEREHFDNGKHFTNVDKTSEFLTSEKKEELYEWLAERDSVSQKTLLGKIGLKVEDYHWNYPEEKTYPCGETRHLIQSRLKKANLQKAFHSLISDEQKDCFERGLWHILYSVSDYNELCKALKTFARKTGFTLEEQLLFVEAFSSCPPFKKDYGAYSKRAITKLLPLMRIGKFWHEESIDSTTKNRIEHLISGEECSGIDVRVREKVAKAGLCESIEQYQGLPQWLANYVVYNRHSEASEIIKWESPDELDNYIRSFKQYSLRNPIVEQVSLETLRVVRDLWAELQKEGQTIDEIHLEMGRDLKNTAEERSRIFRRNSENEDTNFRIKLLLEEFNANEKDIKDVRPYSPSRQELLRIYEEGVWQQEKDIPQDIKDIKKRISNDKDIKDITPNDIQRYRIWMDQKYCSPYTGKTIPLSRLFTTDYEIEHVIPRSRYFDDSYNNKVICEAAVNKDKNNRLGMEYIMAAGGKTIELGNGKNVQILKEEEYVELVDKIFGNNTRKRNIMLADEITEEFSHRQLNDTRYIARFMKGILSNIVREKNADGTLEPEETSKNLIVCSGRITDRVKQDWGLNDIWSHIVTPRFERLNTKTSSNDFGEYVCKDGKRYFQTRVPLNLQKGFNKKRIDHRHHAMDAIAIACVNRSIVNYLNNAAANQTEREDLRRAVYIPERNGQTKRQLRSPWHCFARDAENALRQIVVSFKQNLRVATKATNSYECFDTASGKKIRKHQSNREHYAIRKPLHKDSVYGEVILPSIASVNLKKALMKADRILDKRLKEKIFELRKLYNYSNKQIEEHLTKVCINCPEWKNYDFKKIAVRILSNDADATHIVAIRKPLDETFDEDKIKTITDTGIQKILLNHLSRYADDPKKAFSPEGIEDMNANIASLNSGKQHLPIYKVRVSEKDNGGYFPIGQKGNRPKKYVTTAKDTNLFFAVYADSKGKRSYKTIDLRTAIECRKQGLSVAPSVNQKGDKLLFTLSPNDLVYMPSEEEEVNGFAIDNNLNKDQIYKMVSANNKQCFFIPHTVADFISRGEEYNSHNKIELTEDRRSIKEHCVPLKVNRLGK

SEQ ID NO: 1712 - protein, 1558 aa, unidentified
  REGION 1..1558: note = Description of Unknown: uncultivated organism with predicted taxonomy: Bacteroidales
  REGION 1..1558: note = MG22-58 effector
LYSSHHVAANSTYPFKTGYNRAPLNPFTTHKTQPYNIMTKNTMNIIGLDLGTNSIGWSWIQQLISPTPTQPSEYLFNGTPIIRMSGSRIIPMPGDVTGSFERGETISKTKDRTAKRMDRRMNERFQLRRERLNRVLNIMGFLPEHYARALDRYGKLNEESNTTIAWRSKEDGKNEFIFYPSFLEMASIFKERHPDIQRIPLDWTLYYLRSKALHQAITKEELSWVLHSFNQKRGYYQSREDITEEDKTKKVEYIKGVVNSVEDTGEKAKGKKIYKVTFADGTEFTSTKSEAPLWIGRTREIIVTTSLDTSGKPKLDKEGKIIQSAKTPDEKDWTLIKIRTEATIDDSKLTVGEYIFHALLKNPETKIKGAYVSTIDRRFYINEINAILKEQEKYHKELRDKSLYEQCIKALYAQNEVRRNIIAPWSMSDLLIKDILFYHRPLKSKKSQISECPLEFHTYTDKDGETHRQGIKCIPVSHPLFQEYRIWQFISNLRIYEREHFDNGKHFTNVDKTSEFLTSEKKEELYEWLAEKDSVSQKTLLGRLGLKVERYHWNFPEEKTYPCGETRHLIQSRLKKANLQKAFHSLISDEQKDCFERGLWHILYSVSDYNELCKALKTFARKTGFTLEEQSLFVEAFSSCPPFKKDYGAYSKRAITKLLPLMRIGKFWHEESIDSTTKTRIEHLISGEECSGIDVRVREKVAKAGLCESIEQYQGLPQWLANYVVYNRHSEASEITKWESPDELDNYIRSFKQYSLRNPIVEQVSLETLRVVRDLWTELQKEGQTIDEIHLEMGRDLKNTAEERSRIFRRNSENEDTNFRIKLLLEEFYANEKDIKDVRPYSPSQQELLRIYEEGVWQQEKDIPQDIKDIKKRISNDKDIKDITPNDIQRYRIWMDQKYCSPYTGKTIPLSRLFTTDYEIEHVIPRSRYFDDSYNNKVICEAAVNKDKNNRLGMEYIMAAGGKTIELGNGKNVQILKEEEYVELVDKIFGNNTRKRNIMLADEITEEFSHRQLNDTRYIARFMKGILSNIVREKNADGTLEPEETSKNLIVCSGRITDRVKQDWGLNDIWNHIITPRFERLNTKTSSNDFGEYVCKDGKRYFQTRVPLNLQKGFNKKRIDHRHHAMDAIAIACVNRSIVNYLNNAAANPTEREDLRRAVCIPERNGQTKRQLRSPWHCFARDAENALRQIVVSFKQNLRVATKATNSYECFDTASGKKIRKHQSNREHYAIRKPLHKDSVYGEVILTSIASVNLKKALLKAERILDKRLKEKIFELRKLYNYSNKQIEEHLTKVCINCPEWKNYDFKKIAVRILSNDADATHIVAIRKPLDESFDKIKINTITDTGIQKILKNHLSRYADDPKKAFSPEGIEDMNANIASLNGGKQHLPIYKVRVSEKDNGGYFPIGQKGNRPKKYVTTAKDTNLFFAVYADSKGKRSYNTIDLRTAIECRKQGLSVAPSINEKGDKLLFTLSPNDLVYMPSEGEEANGFAIDNNLNKDQIYKMVSANNKQCFFIPHTVADFISRGEEYNSHNKIELTEDRRSIKEHCVPLKVNRLGK

SEQ ID NO: 1713 - protein, 1521 aa, unidentified
  REGION 1..1521: note = Description of Unknown: uncultivated organism with predicted taxonomy: Bacteroidales
  REGION 1..1521: note = MG22-59 effector
MTKNTRNIIGLDLGTNSIGWSWIQQLISPTPTQPSEYLFDGTPIIRMSGSRIIPMPGDVTGSFERGETISKTKDRTAKRMARRMNERFQLRRERLNRVLNIMGFLPEHYARALDRYGKLNEESNTTIAWRSKEDGKNEFIFYPSFLEMASIFKERHPDIQRIPLDWTLYYLRSKALHQAITKEELSWVLHSFNQKRGYYQSREDITEEDKTKKVEYIKGVVNSVEDTGEKAKGKKIYKVTFADGTEFTSTKSEAPLWIGRTREIIVTTSLDTSGKPKLDKEGKIIQSAKTPDEKDWTLIKIRTEATIDDSKLTVGEYIFHALLKNPETKIKGAHVSTIDRRFYINEINAILKEQEKYHKELRDKSLYEQCIKALYAQNEVRRNIIAPWSMSDLLIKDILFYHRPIKSKKSQISECSLEFHTYTDKDGATHRQGIKCIPTSHPLFQEYRIWQFIANLRIYERERFDNGKHFINEDKTSDFLTTKKKEELYEWLAEKDSVSQKTLLGHLGLKVERYHWNFPEEKTYPCGETRHLIQSRLKKANLQKAFHSLISDEQKDCFERGLWHILYSVSDYNELCKALKTFARKTGFTLEEQLLFVEAFSSCPPFKKDYGAYSKRAITKLLPLMRIGKFWHEESIDSTTKNRIEHLISGEECSGIDVRVREKVAKAGLCESIEQYQGLPQWLANYVVYNRHSEASEIIKWESPDELDNYIRSFKQYSLRNPIVEQVSLETLRVVRDLWAELQKEGQTIDEIHLEMGRDLENTAEERSRIFRRNSENEDTNFRIKLLLEEFYANEKDIKDVRPYSPSQQELLRIYEEGVWQQEKDIPQDIKDIKKRISNDKDIKDITPNDIQRYRIWMDQKYCSPYTGKTIPLSRLFTTDYEIEHVIPRSRYFDDSYNNKVICEAAVNKDKNNRLGMEYIMAAGGKTIELGNGKNVQILKKEEYVELVDKIFGNNTRKRNIMLADEITEDFSHRQLNDTRYIARFMKGILSNIVREKNADGTLEPEETSKNLIVCSGRITDRVKQDWGLNDIWNHIITPRFERLNKKTSSNDFGEYVCKDGKRYFQTRVPLNLQKGFNKKRIDHRHHAMDAIAIACVNRSIVNYLNNAAANQTEREDLRRAVCIPERNGQTKRQLRSPWPCFARDAENALQQIVVSFKQNLRVATKATNSYECFDTASGKRIRKHQSNREHYAIRKPLHKDSVYGEVILTSIASVNLKKALLKAERILDKRLKEKIFELRKLYNYSNKQIEEHLTKVCINCPEWKNYDFKKIAVRILSNDADATHIVAIRKPLDETFDKEKIKTITDTGIQKILKNHLSQNDNDPKKAFTPEGIENMNANIVLLNGGKQHLPIYKVRISEKNNGGYFPIGQKGNRHKKYVTTAQDTNLFFAVYVDSKGKRSFNMIDLRTAIECWKQGVSVAPSINEKGDKLLFTLSPNDLVYMPSEEEEANGFSIKGNLIKEHIYKMVSATNRQCFFIPHTVADFISRGQEYNVLNKIELAEDGRSIKEHCVPLKVNRLGK

SEQ ID NO: 1714 - protein, 1521 aa, unidentified
  REGION 1..1521: note = Description of Unknown: uncultivated organism with predicted taxonomy: Bacteroidales
  REGION 1..1521: note = MG22-60 effector
MTKNTRNIIGLDLGTNSIGWSWIQQLISPPPTQPSEYLFDGTPIIRMSGSRIIPMPGDVTGSFERGETISKTKDRTAKRMARRMNERFQLRRERLNRVLNIMGFLPGHYVRALDRYGKLNEESNTTIAWRSKEDGKNEFIFYPSFLEMASIFKEHHPDIQRIPLDWTLYYLRSKALHQAITKEELSWVLHSFNQKRGYYQSREDITEEDKTKKVEYIKGVVNSVEDTGEKAKGKKIYKVTFADGTEFTSTKSEAPLWIGRTREIIVTTSLDTSGKPKLDKEGKIIQSAKTPDEKDWTLIKIRTEATIDDSKLTVGEYIFHALLKNPKTKIKGAHVSTIDRRFYINEINAILKEQEKYHEELRDKSLYEQCIKALYAQNEVRRNIIAPWSMKDLLTKDILFYHRPLKSKKSQISECPLEFHCYTDKDGETHRQGIKCIPVSHPLFQEYRIWQFISNLRIYEREHFDNGKHFTNVDKTSEFLTNEKKEELYEWLAEKDSVSQKTLLGHLGLKVERYHWNFPEEKTYPCGETRHLIQSRLKKANLQKAFHSLISDEQKDCFERGLWHILYSVSDYNELCKALKTFARKTGFTLEEQLLFVEAFSSCPPFKKDYGAYSKRAITKLLPLMRIGKFWHEESIDSTTKNRIEHLISGEECSGIDVRVREKVAKAGLCESIEQYQGLPQWLANYVVYNRHSEASEIIKWESPDELDNYIRSFKQYSLRNPIVEQVSLETLRVVRDLWAELQKEGQTIDEIHLEMGRDLKNTAEERSRIFRRNSENEDTNFRIKLLLEEFYANEKDIKDVRPYSPSQQELLRIYEEGVWQQEKDIPQDIKDIKKRISNDKDIKDITPNDIQRYRIWMDQKYCSPYTGKTIPLSRLFTTDYEIEHVIPRSRYFDDSYNNKVICEAAVNKDKNNRLGMEYIMAAGGKTIELGNGKNVQILKEEEYVELVDKIFGNNTRKRNIMLADEITEEFSHRQLNDTRYIARFMKGILSNIVREKNADGTLEPEETSKNLIVCSGRITDRVKQDWGLNDIWNHIITPRFERLNTKTSSDKFGEYVCKEGKRYFQTRVPLSLQKGFNKKRIDHRHHAMDAIAIACVNRSIVNYLNNAAANQTEREDLRRAVCIPGRNGQTKRQLRSPWHCFARDAENALRQIVVSFKQNLRVATKATNSYECFDTASGKKIRKRQSNREHYAIRKPLHKDSVYGEVILTSIASVNLKKALLKAERILDKRLKEKIFELRKLYNYSNKQIEEHLTKVCINCPEWKNYDFKKIAVRILSNDADATHIVAIRKPLDESFDKIKINTITDTGIQKILLNHLSRYADDPKKAFSPEGIEDMNANIASLNGGKQHLPVYKVRVSEKDNGGYFPIGQKGNRSKKYVTTAKDTNLFFAVYANSNGKRSYKTIDLRTAIECKKQGLSVAPSVNEKGDKLLFTLSPNDLVYMPSEEEGANGFSIKGNLIKEHIYKMVSANDNRCFFIPHTVADFISNGEEYNRHNKIELTEDRRSIKEHCVPLKVNRLGK

SEQ ID NO: 1715 - protein, 1521 aa, unidentified
  REGION 1..1521: note = Description of Unknown: uncultivated organism with predicted taxonomy: Bacteroidales
  REGION 1..1521: note = MG22-61 effector
MTKNTRNIIGLDLGTNSIGWSWIQQLISPIPTQPSEYLFDGTPIIRMSGSRIIPMPGDVTGSFERGETISKTKDRTAKRMARRMNERFQLRRERLNRVLNIMGFLPEHYARALDRYGKLNEESNTTIAWRSKEDGKNEFIFYPSFLEMASIFKEHHPDIQRIPLDWTLYYLRSKALHQAITKEELSWVLHSFNQKRGYYQSREDITEEDKTKKVEYIKGVVNSVEDTGEKAKGKKIYKVTFANGTEFTSTKSEAPLWIGRTREIIVTTSLDTSGKPKLDKEGKIIQSAKTPDEKDWTLIKIRTEATIDDSKLTVGEYIFHALLKNPETKIKGAHVSTIDRRFYINEINAILKEQEKYHEELRDKSIYEQCTQALYAQNEVRRNIIAPWSMSDLLIKDILFYHRPLKSKKSQISECPLEFHTYTDKDGATHRQGIKCIPTSHPLFQEYRIWQFIANLRIYERERFDNGKHFINEDKTSDFLTTKKKEELYEWLAEKDSVSQKTLLGRLGLKVERYHWNFPEEKTYPCGETRHLIQSRLKKANLQKAFHSLISDEQKDCFERGLWHILYSVSDYNELCKALKTFARKTGFTLEEQLLFVEAFSSCPPFKKDYGAHSKRAITKLLPLMRIGKFWHEESIDSTTKTRIEHLISGEECSGIDVRVREKVAKAGLCESIEQYQGLPQWLANYVVYNRHSEASEITKWESPDELDNYIRSFKQYSLRNPIVEQVSLETLRVVRDLWAELQKEGQTIDEIHLEMGRDLKNTAEERSRIFRRNSENEDTNFRIKLLLEEFNANEKDIKDVRPYSPSQQELLRIYEEGVWQQEKDIPQDIKDIKKRISNDKDIKDITPNDIQRYRIWMDQKYCSPYTGKTIPLSRLFTTDYEIEHVIPRSRYFDDSYNNKVICEAAVNKDKNNRLGMEYIMAAGGKTIELGNGKNVQILMEEEYVELVDKIFGNNTRKRNIMLADEITEEFSHRQLNDTRYIARFMKGILSNIVREKNADGTLEPEETSKNLIVCSGRITDRVKQDWGLNDIWNHIVTPRFERLNTKTSSNDFGEYVCKEGKRYFQTRVPLNLQKGFNKKRIDHRHHAMDAIAIACVNRSIVNYLNNAAANQIEREDLRRAVCIPERNGQTKRQLRSPWHCFARDAENALRQIVVSFKQNLRIATKATNSYECFDTASGKKNRKHQSNREHYAIRKPLHKDSVYGEVILTSIASVNLKKALLKADRILDKRLKEKIFELRKLYNYSNKQIEEHLTKVCINCPEWKNYDFKKIAVRILSNDADATHIVAIRKPLDETFDEDKIKTITDTGIQKILLNHLSRYADDPKKAFSPEGIEDMNANIASLNGGKQHLPIYKVRVSEKDNGGYFPIGQKGNRPKKYVTTAKDTNLFFAVYVDSKGKRSYKTIDLRTAIECKKQGLSVAPSVNEKGDKLLFTLSPNDLVYMPSEEEEANGFSIKGNLIKEHIYKMVSANDNRCFFIPHTVADFISNGEEYNRHNKIELTEDRRSIKEHCVPLKVDRLGK

SEQ ID NO: 1716 - protein, 1558 aa, unidentified
  REGION 1..1558: note = Description of Unknown: uncultivated organism with predicted taxonomy: Bacteroidales
  REGION 1..1558: note = MG22-62 effector
LYSSHHVAANSTYPFKTGYNRAPLNPFTTHKTQPYNIMTKNTMNIIGLDLGTNSIGWSWIQQLISPTPTQPSEYLFNGTPIIRMSGSRIIPMPGDVTGSFERGETISKTKDRTAKRMARRMNERFQLRRERLNRVLNIMGFLPEHYARALDRYGKLNEESNTTIAWRSKEDGKNEFIFYPSFLEMASIFKERHPDIQRIPLDWTLYYLRSKALHQAITKEELSWVLHSFNQKRGYYQSREDITEEDKTKKVEYIKGVVNSVEDTGEKAKGKKIYKVTFADGTEFTSTKSEAPLWIGRTREIIVTTSLDTSGKPKLDKEGKIIQSAKTPDEKDWTLIKIRTEATIDDSKLTVGEYIFHALLKNPETKIKGAYVSTIDRRFYINEINAILKEQEKYHKELRDKSLYEQCIKALYAQNEVRRNIIAPWSMSDLLIKDILFYHRPLKSKKSQISECPLEFHTYTDKDGATHRQGIKCIPTSHPLFQEYRIWQFIANLRIYERERFDNGKHLINEDKTSDFLTTKKKEELYEWLAEKDSVSQKTLLGRLGLKVERYHWNFPEEKTYPCGETRHLIQSRLKKANLQKAFHSLISDEQKDCFERGLWHILYSVSDYNELCKALKTFARKTGFTLEEQSLFVEAFSSCPPFKKDYGAYSKRAITKLLPLMRIGKFWHEESIDSTTKTRIEHLISGEECSGIDVRVREKVAKAGLCESIEQYQGLPQWLANYVVYNRHSEASEITKWESPDELDNYIRSFKQYSLRNPIVEQVSLETLRVVRDLWTELQKEGQTIDEIHLEMGRDLKNTAEERSRIFRRNSENEDTNFRIKLLLEEFYANEKDIKDVRPYSPSQQELLRIYEEGVWQQEKDIPQDIKDIKKRISNDKDIKDITPNDIQRYRIWMDQKYCSPYTGKTIPLSRLFTTDYEIEHVIPRSRYFDDSYNNKVICEAAVNKDKNNRLGMEYIMAAGGKTIELGNGKNVQILKEEEYVELVDKIFGNNTRKRNIMLADEITEEFSHRQLNDTRYIARFMKGILSNIVREKNADGTLEPEETSKNLIVCSGRITDRVKQDWGLNDIWNHIITPRFERLNTKTSSNDFGEYVCKDGKRYFQTRVPLNLQKGFNKKRIDHRHHAMDAIAIACVNRSIVNYLNNAAANPTEREDLRRAVCIPERNGQTKRQLRSPWHCFARDAENALRQIVVSFKQNLRVATKATNSYECFDTASGKKIRKHQSNREHYAIRKPLHKDSVYGEVILTSIASVNLKKALLKAERILDKRLKEKIFELRKLYNYSNKQIEEHLTKVCINCPEWKNYDFKKIAVRILSNDADATHIVAIRKPLDESFDKIKINTITDTGIQKILKNHLSRYADDPKKAFSPEGIEDMNANIASLNGGKQHLPIYKVRVSEKDNGGYFPIGQKGNRSKKYVTTAKDTNLFFAVYADSKGKRSYKTIDLRTAIECRKQGLSVAPSTNEKGDKLLFTLSPNDLVYMPSEGEEANGFSIDNYLNKEQIYKMVSATYKQCFFIPHTVADFIYKNKEFNVLNKIELTEDRRSIKEHCVPLKVNRLGK

SEQ ID NO: 1717 - protein, 913 aa, unidentified
  REGION 1..913: note = Description of Unknown: uncultivated organism with predicted taxonomy: Parabacteroides
  REGION 1..913: note = MG22-63 effector
MTKNTRNIIGLDLGTNSIGWSWIQQLISPTPTQPSEYLFDGTPIIRMSGSRIIPMPGDVTGSFERGETISKTKDRTAKRMARRMNERFQLRRERLNRVLNIMGFLPEHYARALDRYGKLNEESNTTIAWRSKEDGKNEFIFYPSFLEMASIFKERHPDIQRIPLDWTLYYLRSKALHQAITKEELSWVLHSFNQKRGYYQSREDITEEDKTKKVEYIKGVVNSVEDTGEKAKGKKIYKVTFADGTEFTSTKSEAPLWIGRTREIIVTTSLDTSGKPKLDKEGKIIQSAKTPDEKDWTLIKIRTEATIDDSKLTVGEYIFHALLKNPETKIKGAHVSTIDRRFYINEINAILKEQEKYHEELRDKSLYEQCIKALYAQNEVRRNIIAPWSMSDLLIKDILFYHRPLKSKKSQISECPLEFHTYTDKNGATHRQGIKCIPTSHPLFQEYRIWQFIANLRIYERERFDNGKHLINEDKTSDFLTTKKKEELYEWLAEKDSVSQKTLLGHLGLKVERYHWNFPEEKTYPCGETRHLIQSRLKKANLQKAFHSLISDEQKECFERGLWHILYSISDYNELCKALKTFARKTGFTLEEQLLFVEAFSSCPPFKKDYGAYSKRAITKLLPLMRIGKFWYEESIDSTTKNRIEHLISGEECSSIDVRVREKVAKAGLCESIEQYQGLPQWLANYVVYNRHSEASEITKWESPDELDNYIRSFKQYSLRNPIVEQVSLETLRVVRDLWTELQKEGQTIDEIHLEMGRDLKNTAEERSRIFRRNSENEDTNFRIKLLLEEFYANEKDIKDVRPYSPSQQELLRIYEEGVWQQEKDIPQDIKDIKKRISNDKDIKDITPNDIQRYRIWMDQKYCSPYTGKTIPLSRLFTTDYEIEHVIPRSRYFDDSYNNKVICEAAVNKDKNN

SEQ ID NO: 1718 - protein, 1450 aa, unidentified
  REGION 1..1450: note = Description of Unknown: uncultivated organism with predicted taxonomy: Prevotella sp. MGM2
  REGION 1..1450: note = MG22-64 effector
MTKNIRNIIGLDLGTNSIGWSWIQQLISPTPTQPSEYLFNGTPIIRMSGSRIIPMPGDVTGSFERGETISKTKDRTAKRMARRMNERFQLRRERLNRVLNIMGFLPEHYARALDRYGKLNEESNTTIAWRSKEDGKNEFIFYPSFLEMASIFKEHHPDIQRIPLDWTLYYLRSKALHQAITKEELSWVLHSFNQKRGYYQSREDITEEDKTKKVEYIKGVVNSVEDTGEKAKGKKIYKVTFADGTEFTSTKSEAPLWIGRTREIIVTTSLDTSGKPKLDKEGKIIQSAKTPDEKDWTLIKIRTEATIDDSKQTVGEYIFHALLKNPETKIKGAHVSTIDRRFYINEINAILKEQEKYHKELRDKSLYEQCIKALYAQNEVRRNIIAPWSMSDLLIKDILFYHRPLKSKKSQISECPLEFHTYTDKNGATHRQGIKCIPTSHPLFQEYRIWQFIANLRIYERERFDNGKHLINEDKTSDFLTTKKKEELYEWLAEKDSVSQKTLLGHLGLKVERYHWNFPEEKTYPCGETRHLIQSRLKKANLQKAFHSLISDEQKDCFERGLWHILYSVSDYNELCKALKTFARKTGFTLEEQSLFVEAFSSCPPFKKDYGAYSKRAITKLLPLMRIGKFWHEESIDSTTKNRIEHLISGEECSGIDVRVREKVAKAGLCESIEQYQGLQQWLANYVVYNRHSEASEITKWESPDELDNYIRSFKQYSLRNPIVEQVSLETLRVVRDLWAELQKEGQTIDEIHLEMGRDLKNTAEERSRIFRRNSENEDTNFRIKLLLEEFNANEKDIKDVRPYSPSQQELLRIYEEGVWQQEKDIPQDIKDIKKRISNDKDIKDITPNDIQRYRIWMDQKYCSPYTGKTIPLSRLFTTDYEIEHVIPRSRYFDDSYNNKVICEAAVNKDKNNRLGMEYIMAAGGKTIELGNGKNVQILKEEEYVELVDKIFGNNTRKRNIMLADEITEEFSHRQLNDTRYIARFMKGILSNIVREKNADGTLEPEETSKNLIVCSGRITDRVKQDWGLNDIWNHIVTPRFERLNTKTSSNDFGEYVCKEGKRYFQTRVPLNLQKGFNKKRIDHRHHAMDAIAIACVNRSIVNYLNNAAANQTEREDLRRAVCIPERNGQTKRQLRSPWHCFARDAENALRQIVVSFKQNLRVATKATNSYECFDTASGKKIRKRQSNREHYAIRKPLHKDSVYGEVILTSIASVNLKKALLKAERILDKRLKEKIFELRKLYNYSNKQIEEHLTKVCINCPEWKNYDFKKIAVRILSNDADATHIVAIRKPLDESFDKIKINTITDTGIQKILLNHLSRYADDPKKAFSPEGIEDMNANIASLNGGKQHLPIYKVRVSEKDNGGYFPIGQKGNRSKKYVTTAKDTNLFFAVYANSNGKRSYKTIDLRTAIECKKQGLSVAPSVNEKGDKLLFTLSRRTRQTLWSRPCRC

SEQ ID NO: 1719 - protein, 1521 aa, unidentified
  REGION 1..1521: note = Description of Unknown: uncultivated organism with predicted taxonomy: Prevotella
  REGION 1..1521: note = MG22-65 effector
MTKNTRNIIGLDLGTNSIGWSWIQQLISPTPTQPSEYIFDGTPIIRMSGSRIIPMPGDVTGSFERGETISKTKDRTAKRMARRMNERFQLRRERLNRVLNIMGFLPEHYARALDRYGKLNEESNTTIAWRSKEDGKNEFIFYPSFLEMASIFKEHHPDIQRIPLDWTLYYLRSKALHQAITKEELSWVLHSFNQKRGYYQSREDITEEDKTKKVEYIKGVVNSVEDTGEKAKGKKIYKVTFADGTEFTSTKSEAPLWIGRTREIIVTTSLDTSGKPKLDKEGKIIQSAKTPDEKDWTLIKIRTEATIDDSKLTVGEYIFHALLENPETKIKGAYVSTIDRRFYINEINAILKEQEKYHEELRDKSIYEQCIKALYAQNEVRRNIITPWSMKDLLTKDILFYHRPLKSKKSQISECPLEFHCYTDKDGETHRQGIKCIPVSHPLFQEYRIWQFISNLRIYEREHFDNGKHFTNVDKTSDFLTTKKKEELFEWLAEKDSVSQKTLLGHLGLKVERYHWNFPEEKTYPCGETRHLIQSRLKKANLQKAFHSLISDEQKDCFERGLWHILYSVSDYNELCKALKTFARKTGFTLEEQSLFVEAFSSCPPFKKDYGAYSKRAITKLLPLMRIGKFWHEESIDSTTKTRIEHLISGEECSGIDVRIREKVAKAGLCESIEQYQGLQQWLANYVVYNRHSEASEIIKWESPDELDNYIRSFKQYSLRNPIVEQVSLETLRVVRDLWTELQKEGQTIDEIHLEMGRDLKNTAEERSRIFRRNSENEDTNFRIKLLLEEFNANEKDIKDVRPYSPSQQELLRIYEEGVWQQEKDIPQDIKDIKKRISNDKDIKDITPNDIQRYRIWMDQKYCSPYTGKTIPLSRLFTTDYEIEHVIPRSRYFDDSYNNKVICEAAVNKDKNNRLGMEYIMAAGGKTIELGNGKNVQILKEEEYVELVDKIFGNNTRKRNIMLADEITEEFSHRQLNDTRYIARFMKGILSNIVREKNADGTLEPEETSKNLIVCSGRITDRVKQDWGLNDIWNHIVTPRFERLNTKTSSNDFGEYVCKDGKRYFQTRVPLNLQKGFNKKRIDHRHHAMDAIAIACVNRSIVNYLNNAAANQTEREDLRRAVCIPERNGQTKRQLRSPWHCFARDAENALRQIIVSFKQNLRVATKATNSYECFDTASGKKIRKHQSNREHYAIRKPLHKDSVYGEVILTSIASVYLRKALLKAERILDKRLKEKIFELRKLYNYSNKQIEEHLTKVCINCPEWKNYDFKKIAIRILSNDADATHIVAIRKPLDESFDEVKINTITDTGIQKILLNHLSRYADDPKKAFSPEGIEDMNANIASLNGGKQHLPIYKVRVSEKDNGGYFPIGQKGNRPKKYVTTAKDTNLFFAVYADSKGKRSFNMIDLRTAIECRKQGLSVAPSINEKGEKLLFTLSPNDLVYMPSEEEEANGFSIKDNLIKEHIYKMVSATNRQCFFIPHTVADFISRGQEYNVLNKIELAEDGRSIKEHCVPIKVNRLGK

SEQ ID NO: 1720 - protein, 1053 aa, unidentified
  REGION 1..1053: note = Description of Unknown: uncultivated organism with predicted taxonomy: Prevotella sp. MGM2
  REGION 1..1053: note = MG22-66 effector
LYSSHHVAANSTYPFKTGYNRAPLNPFTTHKTQPYNIMTKNTMNIIGLDLGTNSIGWSWIQQLISPTPTQPSEYLFNGTPIIRMSGSRIIPMPGDVTGSFERGETISKTKDRTAKRMARRMNERFQLRRERLNRVLNIMGFLPEHYARALDRYGKLNEESNTTIAWRSKEDGKNEFIFYPSFLEMASIFKERHPDIQRIPLDWTLYYLRSKALHQAITKEELSWVLHSFNQKRGYYQSREDITEEDKTKKVEYIKGVVNSVEDTGEKAKGKKIYKVTFADGTEFTSTKSEAPLWIGRTREIIVTTSLDTSGKPKLDKEGKIIQSAKTPDEKDWTLIKIRTEATIDDSKLTVGEYIFHALLKNPETKIKGAYVSTIDRRFYINEINAILKEQEKYHKELRDKSLYEQCIKALYAQNEVRRNIIAPWSMSDLLIKDILFYHRPLKSKKSQISECPLEFHTYTDKDGATHRQGIKCIPTSHPLFQEYRIWQFIANLRIYERERFDNGKHLINEDKTSDFLTTKKKEELYEWLAEKDSVSQKTLLGRLGLKVERYHWNFPEEKTYPCGETRHLIQSRLKKANLQKAFHSLISDEQKDCFERGLWHILYSVSDYNELCKALKTFARKTGFTLEEQSLFVEAFSSCPPFKKDYGAYSKRAITKLLPLMRIGKFWHEESIDSTTKTRIEHLISGEECSGIDVRVREKVAKAGLCESIEQYQGLPQWLANYVVYNRHSEASEITKWESPDELDNYIRSFKQYSLRNPIVEQVSLEMLRVVRNLWTELQKEGQTIDEIHLEMGRDLKNTAEERSRIFRRNSENEDTNFRIKLLLEEFYANEKDIKDVRPYSPSQQELLRIYEEGVWQQEKDIPQDIKDIKKRISNDKDIKDITPNDIQRYRIWMDQKYCSPYTGKTIPLSRLFTTDYEIEHVIPRSRYFDDSYNNKVICEAAVNKDKNNRLGMEYIMAAGGKTIELGNGKNVQILKEEEYVELVDKIFGNNTRKRNIMLADEITEEFSHRQLNDTRYIARFMKGILSNIVREKNADGTLEPEETSKNLIVCS

SEQ ID NO: 1721 - protein, 938 aa, unidentified
  REGION 1..938: note = Description of Unknown: uncultivated organism with predicted taxonomy: Bacteroidales
  REGION 1..938: note = MG22-67 effector
MTKNTRNIIGLDLGTNSIGWSWIQQLISPTPTQASEYIFDGTPIIRMSGSRIIPMPGDVTGSFERGETISKTKDRTAKRMARRMNERFQLRRERLNRVLNIMGFLPEHYARALDRYGKLNEESNTTIAWRSKEDGKNEFIFYPSFLEMASIFKERHPDIQRIPLDWTLYYLRSKALHQAITKEELSWVLHSFNQKRGYYQSREDITEEDKTKKVEYIKGVVNSVEDTGEKAKGKKIYKVTFADGTEFTSTKSEAPLWIGRTREIIVTTSLDTSGKPKLDKEGKIIQSAKTPDEKDWTLIKIRTEATIDDSKLTVGEYIFHALLKNPETKIKGAHVSTIDRRFYINEINAILKEQEKYHEELRDKSLYEQCIKALYAQNEVRRNIIAPWSMKDLLTKDILFYHRPLKSKKSQISECPLEFHCYTDKDGETLRQGIKCIPVSHPLFQEYRIWQFISNLRIYEREHFDNGKHFTNVDKTSEFLTSEKKEELYEWLAERDSVSQKTLLGKIGLKVEDYHWNYPEEKTYPCGETRHLIQSRLKKANLQKAFHSLISDEQKDCFERGLWHILYSVSDYNELCKALKTFARKTGFTLEEQLLFVEAFSSCPPFKKDYGAYSKRAITKLLPLMRIGKFWHEESIDSTTKNRIEHLISGEECSGIDVRVREKVAKAGLCESIEQYQGLPQWLANYVVYNRHSEASEITKWESPDELDNYIRSFKQYSLRNPIVEQVSLETLRVVRDLWAELQKEGQTIDEIHLEMGRDLKNTAEERSRIFRRNSENEDTNFRIKLLLEEFNANEKDIKDVRPYSPSQQELLRIYEEGVWQQEKDIPQDIKDIKKRISNDKDIKDITPNDIQRYRIWMDQKYCSPYTAKRYHCPVFSPPTTKSNTSFRVHGILTTPIIIRSSAKLPSTKTKTTDWAWNTSWLLEEKRLNSATGKTFKF

SEQ ID NO: 1722 - protein, 1521 aa, unidentified; identical to SEQ ID NO: 1714
  REGION 1..1521: note = Description of Unknown: uncultivated organism with predicted taxonomy: Bacteroidales
  REGION 1..1521: note = MG22-68 effector

SEQ ID NO: 1723 - protein, 1521 aa, unidentified
  REGION 1..1521: note = Description of Unknown: uncultivated organism with predicted taxonomy: Bacteroidales
  REGION 1..1521: note = MG22-69 effector
MTKNTRNIIGLDLGTNSIGWSWIQQLISPTPTQPSEYLFDGTPIIRMSGSRIIPMPGDVTGSFERGETISKTKDRTAKRMARRMNERFQLRRERLNRVLNIMGFLPEHYARALDRYGKLNEESNTTIAWRSKEDGKNEFIFYPSFLEMASIFKERHPDIQRIPLDWTLYYLRSKALHQAITKEELSWVLHSFNQKRGYYQSREDITEEDKTKKVEYIKGVVNSVEDTGEKAKGKKIYKVTFADGTEFTSTKSEAPLWIGRTREIIVTTSLDTSGKPKLDKEGKIIQSAKTPDEKDWTLIKIRTEATIDDSKLTVGEYIFHALLKNPETKIKGAHVSTIDRRFYINEITAILKEQEKYHEELRDKSLYEQCIKALYAQNEVRRNIIAPWSMKDLLTKDILFYHRPLKSKKSQISECPLEFHCYTDKDGETHRQGIKCIPVSHPLFQEYRIWQFISNLRIYEREHFDNGKHFTNVDKTSEFLTSEKKEELYEWLAEKDSVSQKTLLGHLGLKVERYHWNFPEEKTYPCGETRHLIQSRLKKANLQKAFHSLISDEQKECFERGLWHILYSISDYNELCKALKTFARKTGFTLEEQLLFVEAFSSCPPFKKDYGAYSKRAITKLLPLMRIGKFWHEESIDSTTKNRIEHLISGEECSGIDVRVREKVAKAGLCESIEQYQGLPQWLANYVVYNRHSEASEITKWESPDELDNYIRSFKQYSLRNPIVEQVSLETLRVVRDLWAELQKEGQTIDEIHLEMGRDLKNTAEERSRIFRRNSENEDTNFRIKLLLEEFNANEKDIKDVRPYSPSQQELLRIYEEGVWQQEKDIPQDIKDIKKRISNDKDIKDITPNDIQRYRIWMDQKYCSPYTGKTIPLSRLFTTDYEIEHVIPRSRYFDDSYNNKVICEAAVNKDKNNRLGMEYIMAAGGKTIELGNGKNVQILKEEEYVELVDKIFGNNTRKRNIMLADEITEEFSHRQLNDTRYIARFMKGILSNIVREKNADGTLEPEETSKNLIVCSGRITDRVKQDWGLNDIWNHIVTPRFERLNTKTSSNDFGEYVCKEGKRYFQTRVPLNLQKGFNKKRIDHRHHAMDAITIACVNRSIVNYLNNAAANQTEREDLRRAVCIPERNGQTKRQLRSPWHCFARDAENALRQIVVSFKQNLRVATKATNSYECFDTASGKKIRKRQSNREHYAIRKPLHKDSVYGEVILTSIASVNLKKALLKAERILDKRLKEKIFELRKLYNYSNKQIEEHLTKVCINCPEWKNYDFKKIAVRILSNDADATHIVAIRKPLDESFDKIKINTITDTGIQKILLNHLSRYADDPKKAFSPEGIEDMNANIASLNGGKQHLPIYKVRVSEKDNGGYFPIGQKGNRSKKYVTTAKDTNLFFAVYANSNGKRSYKTIDLRTAIECKKQGLSVAPSVNEKGDKLLFTLSPNDLVYMPSEEEGANGFSIKGNLIKEHIYKMVSANDNRCFFIPHTVADFISNGEEYNRHNKIELTEDRRSIKEHCVPLKVNRLGK

SEQ ID NO: 1724 - protein, 1520 aa, unidentified
  REGION 1..1520: note = Description of Unknown: uncultivated organism with predicted taxonomy: Bacteroidales
  REGION 1..1520: note = MG22-70 effector
MTKNTRNIIGLDLGTNSIGWSWIQQLISPTPTQPSEYLFNGTPIIRMSGSRIIPMPGDVTGSFERGETISKTKDRTAKRMARRMNERFQLRRERLNRVLNIMGFLPEHYARALDRYGKLNEESNTTIAWRSKEDGKNEFIFYPSFLEMASIFKEHHPDIQRIPLDWTLYYLRSKALHQAITKEELSWVLHSFNQKRGYYQSREDITEEDKTKKVEYIKGVVNSVEDTGEKAKGKKIYKVTFADGTEFTSTKSEAPLWIGRTREIIVTTSLDTSGKPKLDKEGKIIQSAKTPDEKDWTLIKIRTEATIDDSKLTVGEYIFHALLKNPETKIKGAHVTIDRRFYINEINAILKEQEKYHEELRDKSIYEQCTQALYAQNEVRRNIIAPWSMSDLLIKDILFYHRPLKSKKSQISECPLEFHTYTDKNGATHRQGIKCIPTSHPLFQEYRIWQFIANLRIYERERFDNGKHLINEDKTSDFLTTKKKEELFEWLAEKDSVSQKTLLGRLGLKVERYHWNFPEEKTYPCGETRHLIQSRLKKANLQKAFHSLISDEQKDCFERGLWHILYSVSDYNELCKALKTFARKTGFTLEEQLLFVEAFSSCPPFKKDYGAYSKRAITKLLPLMRIGKFWHEESIDSTTKNRIEHLISGEECSGIDVRVREKVAKAGLCESIEQYQGLQQWLANYVVYNRHSEASEITKWESPDELDNYIRSFKQYSLRNPIVEQVSLETLRVVRDLWAELQKEGQTIDEIHLEMGRDLKNTAEERSRIFRRNSENEDTNFRIKLLLEEFYANEKDIKDVRPYSPSQQELLRIYEEGVWQQEKDIPQDIKDIKKRISNDKDIKDITPNDIQRYRIWMDQKYCSPYTGKTIPLSRLFTTDYEIEHVIPRSRYFDDSYNNKVICEAAVNKDKNNRLGMEYIMAAGGKTIELGNGKNVQILKEEEYVELVDKIFGNNTRKRNIMLADEITEEFSHRQLNDTRYIARFMKGILSNIVREKNADGTLEPEETSKNLIVCSGRITDRVKQDWGLNDIWNHIITPRFERLNTKTSSNDFGEYVCKDGKRYFQTRVPLNLQKGFNKKRIDHRHHAMDAIAIACVNRSIVNYLNNAAANQTEREDLRRAVCIPERNGQTKRQLRSPWPCFARDAENALRQIVVSFKQNLRVATKATNSYECFDTASGKKIRKHQSNREHYAIRKPLHKDSVYGEVILPSIASVNLKKALLKAERILDKRLKEKIFELRKLYNYSNKQIEEHLTKVCINCPEWKNYDFKKIAVRILSNDADTTHIVAIRKPLDETFDEEKIKAITDTGIQKILLNHLRQNDNDPKKAFTPEGIENMNANIVLLNGGKQHLPIYKVRISEKNNGGYFPIGQKGNRSQKYVTTAKDTNLFFAVYADQKGKRSFKTIDLRTAIECRKQGVSVAPSINEKGDKLLFTLSPNDLVYMPSEGEEANGFAIDNNLNKEQIYKMVSATNNRCFFIPHTVADFISRGQEYNSVNKIELTEDGRSIKEHCVPLKVNRLGK

SEQ ID NO: 1725 - protein, 1225 aa, unidentified
  REGION 1..1225: note = Description of Unknown: uncultivated organism with predicted taxonomy: Bacteroidales
  REGION 1..1225: note = MG22-71 effector
VGNYIFQTLLKNPETKIKGAHVCTIDRRFYENELNAILLKQAEFHPELTNRNLYEACLMALYANNEAHRYNLATQNTCNLITKDIIFYQRPLKSKKSLIAECPFEKRIFCDTEGNVQMQCIKCIPVSHPHFQEYRLWQFLNNLRIFQREVVEDGKFTMNVDVTDKYINENSLTLLFEWLQDKITIKQKELLAKLRLKESDFRWNYVEDKAYPCGETRHVLASRLKKLKGITNDFLAQPSLNGKTTVECELWHILYSVTNLAELRKALYTFARKHNFSVVDAEAFVKVFIACPPFKKDYGAYSDKAICKLLSVMRVGKYWSAENIDSTTLLRIEHLITGEEDEHINERTRKHITEKGLQQSVNQYQGLQQWLACYVVYGRHAEVAEIVRWESPTELEQYINNFKQYSLRNPIVEQVSLETLRVVRDLWQTVAKEGGRIDEIHLEMGRDLKNSAAERAKISNRNKQNEGTNFRIKLLLQEFSQYEKDIEGIRPYSPSQQELLRIYEEGVCEQTEMPKDIAKIRRELSSSSSEKDVKRSDIQRYRLWLDQKYCSPYTGQPIPLARLFTTDYEIEHVIPRSKYFDDSYNNKVICEAAVNKAKSNRLGMAFIQESGGQIIPLGNGRNVQVLNESAYVEFINKTFKHNARKRSLMLADEITEEFCNRQLTDTRYIARFMMGVLSNIVRQNDNGVLESEAISKNLIVCNGKITDRVKQDWGLNDVWNHIVTPRFERLNQITNSSDFGEWCNKEGKRYFQTRIPLELQKRVNKKRIDHRHHAMDAIAIACTTRSLVNYLNNQSAHTKAREDYRQRLCRTDGHGQTKRLLRAPWKDFAKDAESALQQIVVSFKQNTRILTHATNSYECFDAKAGKKIIKRQISQNHYAIRKPLHKDTVYGEVVLPSIKLISLNKALSNPRRIIDKQLRSKILELQQRDKLTKKQVCDFFKKTCANSTEWRNYDFAKVAVRVWSNDEEGSRMVSVRKAVDESFDMKQIEKVYDPIVRNILTRHLKACNGDSKTAFSPQGVEEMNQHIAELNNENAHLPIYKVKLGESKGEKFAIGQKGSKATKFVVTAKDTNLFFAVYANEEGKRSYQSVDLRTAIELKKQGCPVAPETNEKGDKLLFILSPNSLVYMPTEEEMERGNIDVQNLNLNQIFKMVSSTGNNCFFVPNTLSQVIFPGKEYESMDKVGTVKEWDGYSISESKNNKKFLSIKACCIPICIDRLGRIQLKK

SEQ ID NO: 1726 - protein, 1521 aa, unidentified
  REGION 1..1521: note = Description of Unknown: uncultivated organism with predicted taxonomy: Bacteroidales
  REGION 1..1521: note = MG22-72 effector
MTKNTRNIIGLDLGTNSIGWSWIQQLISPTPTQPSEYLFDGTPIIRMSGSRIIPMPGDVTGSFERGETISKTKDRTAKRMARRMNERFQLRRERLNRVLNIMGFLPEHYARALDRYGKLNEESNTTIAWRSKEDGKNEFIFYPSFLEMASIFKEHHPDIQRIPLDWTLYYLRSKALHQAITKEELSWVLHSFNQKRGYYQSREDITEEDKTKKVDYIKGVVNSVEDTGEKAKGKKIYKVTFADGTEFTSTKSEAPLWIGRTREIIVTTSLDTSGKPKLDKEGKIIQSAKTPDEKDWTLIKIRTEATIDDSKLTVGEYIFHALLKNPETKIKGAHVSTIDRRFYINEINAILKEQEKYHEELRDKTIYEQCIKALYAQNEVRRNIIAPWSMKDLLTKDILFYHRPLKSKKSQISECPLEFHCYTDKAGETHRQGIKCIPVSHPLFQEYRIWQFISNLRIYEREHFDNGKHFSNVDKTSEFLTSEKKEELYEWLAEKDSVSQKTLLGKIGLKVERYHWNFPEEKTYPCGETRHLIQSRLKKANLQKAFHSLISDEQKDCFERGLWHILYSVSDYNELCKALKTFARKTGFTLEEQLLFVEAFSSCPPFKKDYGAYSKRAITKLLPLMRIGKFWHEESIDSTTKNRIEHLISGEECSGIDVRVREKVAKAGLCESIEQYQGLPQWLANYVVYNRHSEASEIIKWESPDELDNYIRSFKQYSLRNPIVEQVSLETLRVVRDLWAELRKEGQTIDEIHLEMGRDLKNTAEERSRIFRRNSENEDTNFRIKLLLEKFNANEKDIKDVRPYSPSQQELLRIYEEGVWQQEKDIPQDIKDIKKRISNDKDIKDITPNDIQRYRIWMDQKYCSPYTGKTIPLSRLFTTDYEIEHVIPRSRYFDDSYNNKVICEAAVNKDKNNRLGMEYIMAAGGKTIELGNGKNVQILKEEEYVELVDKIFGNNTRKRNIMLADEITEEFSHRQLNDTRYIARFMKGILSNIVREKNADGTLEPEETSKNLIVCSGRITDRVKQDWGLNDIWNHIVTPRFERLNTKTSSNDFGEYVCKDGKRYFQTRVPLNLQKGFNKKRIDHRHHAMDAIAIACVNRSIVNYLNNAAANQTEREDLRRAVCIPERNGQTKRQLRSPWHCFARDAENALRQIVVSFKQNLRVATKATNSYECFDTASGKKIRKHQSNREHYAIRKPLHKDSVYGEVILTSIASVNLKKALLKAERILDKRLKEKIFELRKLYNYSNKQIEEHLTKVCINCPEWKNYDFKKIAVRILSNDADATHIVAIRKPLDETFDKEKIKTITDTGIQKILLNHLSRYADDPKKAFSPEGIEDMNANIASLNGGKQHLPIYKVRVSEKDNGGYFPIGQKGNRSKKYVTTAKDTNLFFAVYADSKGKRSYKTIDLRTAIECRKQGLSVAPSTNEKGDKLLFTLSPNDLVYMPSEGEEANGFSIDNYLNKEQIYKMVSATYKQCFFIPHTVADFIYKNKEFNVLNKIELTEDRRSIKEHCVPLKVNRLGK

SEQ ID NO: 1727 - protein, 1345 aa, unidentified
  REGION 1..1345: note = Description of Unknown: uncultivated organism with predicted taxonomy: Prevotella sp. MGM2
  REGION 1..1345: note = MG22-73 effector
MTKNTRNIIGLDLGTNSIGWSWIQQLISPTPTQPSEYLFDGTPIIRMSGSRIIPMPGDVTGSFERGETISKTKDRTAKRMARRMNERFQLRRERLNRVLNIMGFLPEHYARALDRYGKLNEESNTTIAWRSKEDGKNEFIFYPSFLEMASIFKEHHPDIQRIPLDWTLYYLRSKALHQAITKEELSWVLHSFNQKRGYYQSREDITEEDKTKKVEYIKGVVNSVEDTGEKAKGKKIYKVTFADGTEFTSTKSEAPLWIGRTREIIVTTSLDTSGKPKLDKEGKIIQSAKTPDEKDWTLIKIRTEATIDDSKLTVGEYIFHALLKNPETKIKGAHVSTIDRRFYINEINAILKEQEKYHEELRDKSLYEQCIKALYAQNEVRRNIIAPWSMKDLLTKDILFYHRPLKSKKSQISECPLEFHCYTDKDGETHRQGIKCIPVSHPLFQEYRIWQFISNLRIYEREHFDNGKHFTNVDKTSEFLTSEKKEELYEWLAERDSVSQKTLLGKIGLKVEDYHWNFPEEKTYPCGETRHLIQSRLKKANLQKAFHSLISDEQKECFERGLWHILYSVSDYNELCKALKTFARKTGFTLEEQLLFVEAFSSCPPFKKDYGAYCKRAITKLLPLMRIGKFWHEESIDTTTKTRIEHLISGEECSGIDVRVREKVAKAGLCESIEQYQGLQQWLANYVVYNRHSEASEIIKWESPDELDNYIRSFKQYSLRNPIVEQVSLETLRVVRDLWAELQKEGQTIDEIHLEMGRDLKNTAEERSKIFRRNSENEDTNFRIKLLLEEFYANEKDIKDVRPYSPSQQELLRIYEEGVWQQEKDIPQDIKDIKKRISNDKDIKDITPNDIQRYRIWMDQKYCSPYTGKTIPLSRLFTTDYEIEHVIPRSRYFDDSYNNKVICEAAVNKDKNNRLGMEYIIAAGGKTIELGNGKNVQILKEEEYVELVDKIFGNNTRKRNIMLADEITEEFSHRQLNDTRYIARFMKGILSNIVREKNADGTLEPEETSKNLIVCSGRITDRVKQDWGLNDIWSHIVTPRFERLNTKTSSNDFGEYVCKDGKRYFQTRVPLNLQKGFNKKRIDHRHHAMDAIAIACVNRSIVNYLNNAAANQTEREDLRRAVCIPERNGQTKRQLRSPWHCFAREAENALRQIVVSFKQNLRVATKATNSYECFDTASGKKIRKHQSNREHYAIRKPLHKDSVYGEVILTSIASVNLKKALLKAERILDKRLKEKIFELRKLYNYSNKQIEEHLTKVCINCPEWKNYDFKKIAVRILSNDADATHIVAIRKPLDESFDEVKINTITDTGIQKILKNHLSRYADDPKKAFSPEGIEDMNANIASLN

SEQ ID NO: 1728 - protein, 1283 aa, unidentified; identical to SEQ ID NO: 1672
  REGION 1..1283: note = Description of Unknown: uncultivated organism with predicted taxonomy: Bacteroidales
  REGION 1..1283: note = MG22-74 effector

SEQ ID NO: 1729 - protein, 1524 aa, unidentified
  REGION 1..1524: note = Description of Unknown: uncultivated organism with predicted taxonomy: Bacteroidales
  REGION 1..1524: note = MG22-75 effector
MTKNTRNIIGLDLGTNSIGWSWIQQLISPTPTQPSEYLFDETPIIRMSGSRIIPMPGDVTGSFERGETISKTKDRTAKRMARRMNERFQLRRERLNRVLNIMGFLPEHYARALDRYGKLNEESNTTIAWRSKEDGKNEFIFYPSFLEMASIFKERHPDIQRIPLDWTLYYLRSKALHQAITKEELSWVLHSFNQKRGYYQPRKDITEKEKTKKIEYIKDIVRSVEDTGEKTKGKKAYKVTFDNGFKFISTEAEAPLWVGHTREVIVTTSLDATGAPKRDKEGDIIQSVKAPEEKDWTLKKIRTENHIDKSKLTVGEYILQTLLEKPDTKIKGAHVSTIDRRFYIHEINAILKVQEKYHKELRDKSLYEQCTQALYTQNEVRRNIIAPWSMSDLLIKDILFYHRPLKSKKSQISECPFEFHNYTDKNGASHRQGIKCIPTSHPLFQEYRIWQFIANLRIYERERFDNGKHFINEDKTSDFLTTKKKEELFEWLTEKDSVSQKTLLGHIGLKVEHYHWNFPEEKTYSCGETRHLIQSRLKKANLLKSFCSLVPENQKKEFELKLWHILYSVSDYNELRKALETFARKTGFTREEQDLFVEFFSSCPPFKKIYGAYSKRAIARLLPLMRLGKYWHEEHIDSATMNRIEHLISGEECNGIDVRVRENIAKFGLNQSIEQYQGLPQWLACYVVYNRHSEASEVTKWESPEELDNYIKAFKQYSLRNPIVEQISLETLRVVHDLWAEIQKEGQTIDEIHLEMGRDLKNTAEERARISKRNSENEDTNFRIKLLLKEFYTNEEDMEGIRPYSPSQQELLRIYEEGVWQQEKEIPQDIKDIKKKLSSDKDINEITHSDVQRYRIWMDQEYCSPYTGNPIPLSRLFTPDYEIEHVIPRSRYFDDSYNNKVICEAAVNKDKNNRLGMEYIMEAGGKTIELGNGKNVQVLKEREYVELVNEVFKNNTRKRNILLADEIPEDFSHRQLNDTRYIARFMKGILSNIVREKNADGTLELEETSKNLIVCSGRITDRIKQDWGLNDVWNHIITPRFERLNQKTSSDNFGEYVCKEGKRYFQTRVPLNLQKGFNKKRIDHRHHAIDAIAIACVNRSIVNYLNNAAANQTEREDLRRAVCIPERNGQTKRQLRSPWRNFAKDAENALRQIVVSFKQNLRILTKATNSYECFDTTSGKKIRRHQVNEEHYAVRKPLHEDFVYGEVILSSIASVNFKKALQKANRILDKRLKDKIFELRKLYSYSNKQIEEHLTKVCINTPEWKDYDFKKINIRILSNDEGATHIVAIRKPLDESFDKVKINTITDTGIQKILLNHLSRYAEDPKKAFSLEGIEDMNANITSLNGGKQHLPIYKVRVSEKDNGGYYPIGQKGNRSKKYVTTAKDTNLFFAVYADSNGKRSFKTIDLRTAIECKKQGLSVAPSVNEKGEQLLFTLSPNDLVYMPSEEEEANGFAIDNNLNKEHIYKMVSTDSNRCFFIPHTVADFISRGEEYNRHNKIELTEDRRSIKEHCVPLKVNRLGKKTL

SEQ ID NO: 1730 - protein, 1132 aa, unidentified
  REGION 1..1132: note = Description of Unknown: uncultivated organism with predicted taxonomy: Bacteroidales
  REGION 1..1132: note = MG22-76 effector
MSDLLIKDILFYHRPLKSKKSQISECSLEFHTYTDKDGATHRQGIKCIPTSHPLFQEYRIWQFIANLRIYERERFDNGKHFINEDKTSDFLTTKKKEELYEWLAEKDSVSQKTLLGRLGLKVERYHWNFPEEKTYPCGETRHLIQSRLKKANLQKAFHSLISDEQKECFERGLWHILYSISDYNELCKALKTFARKTGFTLEEQSLFVEAFSSCPPFKKDYGAYSKRAITKLLPLMRIGKFWHEESIDSTTKNRIEHLISGEECSGIDVRVREKVAKAGLCESIEQYQGLPQWLANYVVYNRHSEASEITKWESPDELDNYIRSFKQYSLRNPIVEQVSLETLRVVRDLWTELQKEGQTIDEIHLEMGRDLKNTAEERSRIFRRNSENEDTNFRIKLLLEEFYANEKDIKDVRPYSPSQQELLRIYEEGVWQQEKDIPQDIKDIKKRISNDKDIKDITPNDIQRYRIWMDQKYCSPYTGKTIPLSRLFTTDYEIEHVIPRSRYFDDSYNNKVICEAAVNKDKNNRLGMEYIMAAGGKTIELGNGKNVQILKEEEYVELVDKIFGSNTRKRNIMLADEITEDFSHRQLNDTRYIARFMKGILSNIVREKNAEGTLEPEETSKNLIVCSGRITDRVKQDWGLNDIWNHIITPRFERLNKKTSSNDFGEYVCKEGKRYFQTRVPLNLQKGFNKKRIDHRHHAMDAIAIACINRSIVNYLNNAAANQTEREDLRRAVCIPERNGQTKRQLRSPWHCFARDAENALRQIVVSFKQNLRVATKATNSYECFDTASGKKIRKHQSNHEHYAIRKPLHKDSVYGEIILPSIASVNLKKALLKAERILDKRLKEKIFELRKLYNYSNKQIEEHLTKVCINCPEWKNYDFKKIAVRILSNDADATHIVAIRKPLDETFDKEKIKTITDTGIQKILLNHLSRYADDPKKAFSPEGIEDMNANIASLNGGKQHLPIYKVRVSEKDNGGYFPIGQKGNRSKKYVTTAKDTNLFFAVYADSKGKRSYKTIDLRTAIECRKQGLSVAPSTNEKGDKLLFTLSPNDLVYMPSEGEEANGFSIDNYLNKEQIYKMVSATYKQCFFIPHTVADFIYKNKEFNVLNKIELTEDRRSIKEHCVPLKVNRLGK

SEQ ID NO: 1731 - protein, 1521 aa, unidentified; identical to SEQ ID NO: 1692
  REGION 1..1521: note = Description of Unknown: uncultivated organism with predicted taxonomy: Prevotella
  REGION 1..1521: note = MG22-77 effector

SEQ ID NO: 1732 - protein, 1420 aa, unidentified; identical to SEQ ID NO: 1676
  REGION 1..1420: note = Description of Unknown: uncultivated organism with predicted taxonomy: Bacteroidales
  REGION 1..1420: note = MG22-78 effector

SEQ ID NO: 1733 - protein, 1521 aa, unidentified
  REGION 1..1521: note = Description of Unknown: uncultivated organism with predicted taxonomy: Bacteroidales
  REGION 1..1521: note = MG22-79 effector
MTKNTRNIIGLDLGTNSIGWSWIQQLISPTPTQPSEYLFNGTPIIRMSGSRIIPMPGDVTGSFERGETISKTKDRTAKRMARRMNERFQLRRERLNRVLNIMGFLPEHYARALDRYGKLNEESNTTIAWRSKEDGKNEFIFYPSFLEMASIFKEHHPDIQRIPLDWTLYYLRSKALHQAITKEELSWVLHSFNQKRGYYQSREDITEEDKTKKVEYIKGVVNSVEDTGEKAKGKKIYKVTFADGTEFTSTKSEAPLWIGRTREIIVTTSLDTSGKPKLDKEGKIIQSAKTPDEKDWTLIKIRTEATIDDSKLTVGEYIFHALLKNPETKIKGAHVSTIDRRFYINEINAILKEQEKYHEELRDKSLYEQCIKALYAQNEVRRNIIAPWSMSDMLIKDILFYHRPLKSKKSQISECSLEFHTYTDKDGATHRQGIKCIPTSHPLFQEYRIWQFIANLRIYERERFDNGKHFINEDKTSDFLTTKKKEELYEWLAEKDSVSQKTLLGHLGLKVERYHWNFPEEKTYPCGETKHLIQSRLKKANLQKAFHSLISDEQKDCFERGLWHILYSVSDYNELCKALKTFARKTEFTLEEQLLFVEAFSSCPPFKKDYGAYSKRAITKLLPLMRIGKFWHEESIDSTTKNRIEHLISGEECSGIDVRVREKVAKAGLCESIEQYQGLQQWLANYVVYNRHSEASEITKWESPDELDNYIRSFKQYSLRNPIVEQVSLETLRVVRDLWAELQKEGQTIDEIHLEMGRDLKNTAEERSRIFRRNSENEDTNFRIKLLLEEFYANEKDIKDVRPYSPSQQELLRIYEEGVWQQEKDIPQDIKDIRKRISNDKDIKDITPNDIQRYRIWMDQKYCSPYTGKTIPLSRLFTTDYEIEHVIPRSRYFDDSYNNKVICEAAVNKDKNNRLGMEYIIAAGGKTIELGNGKNVQILKEEEYVELVDKIFGNNTRKRNIMLADEITEEFSHRQLNDTRYIARFMKGILSNIVREKNTDGTLEPEETSKNLIVCSGRITDRVKQDWGLNDIWNHIITPRFERLNTKTSSNDFGEYVCKEGKRYFQTRVPLNLQKGFNKKRIDHRHHAMDAIAIACVNRSIVNYLNNAAANQTEREDLRRAVCIPERNGQTKRQLRSPWHCFARDTENALRQIVVSFKQNLRITTKATNSYECFDTASGKKIRKHQSNREHYAIRKPLHKDSVYGEVILTSIASVNLKKALLKAERILDKRLKEKIFELRKLYNYSNKQIEEHLTKVCINCPEWKNYDFKKIAVRILSNDADATHIVAIRKPLDESFDEVKINTITDTGIQKILLNHLSRYADDPKKAFSPEGIEDMNANIASLNGGKQHLPIYKVRVSEKDNGGYFPIGQKGNRPKKYVTTAQDTNLFFAVYVDSKGKRSYKTIDLRTAIECKKQGLSVAPSVNEKGDKLLFTLSPNDLVYMPSEEEEANGFSIKGNLIKEHIYKMVSANNRQCFFIPHSVADFISKGEEYNAHNKIELAEDGRSIKVHCVPLKVNRLGK

SEQ ID NO: 1734 - protein, 1558 aa, unidentified
  REGION 1..1558: note = Description of Unknown: uncultivated organism with predicted taxonomy: Bacteroidales
  REGION 1..1558: note = MG22-80 effector
LYSSHHVAANSTYPFKTGYNRAPLNPFTTHKTQPYNIMTKNTMNIIGLDLGTNSIGWSWIQQLISPTPTQPSEYLFNGTPIIRMSGSRIIPMPGDVTGSFERGETISKTKDRTAKRMARRMNERFQLRRERLNRVLNIMGFLPEHYARALDRYGKLNEESNTTIAWRSKEDGKNEFIFYPSFLEMASIFKERHPDIQRIPLDWTLYYLRSKALHQAITKEELSWVLHSFNQKRGYYQSREDITEEDKTKKVEYIKGVVNSVEDTGEKAKGKKIYKVTFADGTEFTSTKSEAPLWIGRTREIIVTTSLDTSGKPKLDKEGKIIQSAKTPDEKDWTLIKIRTEATIDDSKLTVGEYIFHALLKKPETKIKGAYVSTIDRRFYINEINAILKEQEKYHKELRDKSLYEQCIKALYAQNEVRRNIIAPWSMSDLLIKDILFYHRPLKSKKSQISECPLEFHTYTDKDGATHRQGIKCIPTSHPLFQEYRIWQFIANLRIYERERFDNGKHLINEDKTSDFLTTKKKEELYEWLAEKDSVSQKTLLGRLGLKVERYHWNFPEEKTYPCGETRHLIQSRLKKANLQKAFHSLISDEQKDCFERGLWHILYSVSDYNELCKALKTFARKTGFTLEEQSLFVEAFSSCPPFKKDYGAYSKRAITKLLPLMRIGKFWHEESIDSTTKTRIEHLISGEECSGIDVRVREKVAKAGLCESIEQYQGLPQWLANYVVYNRHSEASEITKWESPDELDNYIRSFKQYSLRNPIVEQVSLETLRVVRDLWTELQKEGQTIDEIHLEMGRDLKNTAEERSRIFRRNSENEDTNFRIKLLLEEFYANEKDIKDVRPYSPSQQELLRIYEEGVWQQEKDIPQDIKDIKKRISNDKDIKDITPNDIQRYRIWMDQKYCSPYTGKTIPLSRLFTTDYEIEHVIPRSRYFDDSYNNKVICEAAVNKDKNNRLGMEYIMAAGGKTIELGNGKNVQILKEEEYVELVDKIFGNNTRKRNIMLADEITEEFSHRQLNDTRYIARFMKGILSNIVREKNADGTLEPEETSKNLIVCSGRITDSVKQDWGLNDIWNHIITPRFERLNTKTSSNDFGEYVCKDGKRYFQTRVPLNLQKGFNKKRIDHRHHAMDAIAIACVNRSIVNYLNNAAANPTEREDLRRAVCIPERNGQTKRQLRSPWHCFARDAENALRQIVVSFKQNLRVATKATNSYECFDTASGKKIRKHQSNREHYAIRKPLHKDSVYGEVILTSIASVNLKKALLKAERILDKRLKEKIFELRKLYNYSNKQIEEHLTKVCINCPEWKNYDFKKIAVRILSNDADATHIVAIRKPLDESFDKIKINTITDTGIQKILKNHLSRYADDPKKAFSPEGIEDMNANIASLNGGKQHLPIYKVRVSEKDNGGYFPIGQKGNRPKKYVTTAKDTNLFFAVYADSKGKRSYKTIDLRTAIECRKQGLSVAPSINEKGDKLLFTLSPNDLVYMPSEGEEANGFAIDNNLNKEQIYKMVSANDNRCFFIPHTVADFISNGEEYNRHNKIELTEDRRSIKEHCVPLKVNRLGK

SEQ ID NO: 1735 - protein, 1533 aa, unidentified
  REGION 1..1533: note = Description of Unknown: uncultivated organism with predicted taxonomy: Bacteroidales
  REGION 1..1533: note = MG22-81 effector
MKKKNILGLDLGTNSIGWAWLQQDDTEQTIQTEYLLQNNPTIRMSGSRIIPTSGDVINDFEAGKAVSKTKDRTTFRMTRRMNERFKLRRERLNRVLRILGMLPAHYAQHVDRYGKPDEEKQPKIAWEVAPDGKSNFLFHQSFLEMVKLFGVHQPQLQRIPLDWTLYYLRHKALTQPISKAELAWILHSFNQKRGYNQTRDELTEVNEKEKLEYTNSKVVSVELIEQKKSPLYLVTFENGVAVETSKVDAPQWVGQMRYAIITTKLNDLGQPLHKKDGSIDQKVSLPNDDDWALNKLRTETQIDQSHTTVGNYIFQTLLKNPETKIKGAHVCTIDRRFYENELNAILLKQAEFHPELTNRNLYEACLMALYANNEAHRYNLATQNTCNLITKDIIFYQRPLKSKKSLIAECPFEKRIFCDTEGNVQMQGIKCIPVSHPHFQEYRLWQFLNNLRIFQREVVEDGKFTMNVDVTDKYINENSLTLLFEWLQDKITIKQKELLAKLRLKESDFRWNYVEDKAYPCGETRHVLASRLKKLKGITNDFLAQPSLNGKTTVECELWHILYSVTNLAELRKALYTFARKHNFSVVDAEAFVKVFIACPPFKKDYGAYSDKAICKLLSVMRVGKYWSAENIDSTTLLRIEHLITGEEDEHINERTRKHITEKGLQQSVNQYQGLQQWLACYVVYGRHAEVAEIVRWESPTELEQYINNFKQYSLRNPIVEQVSLETLRVVRDLWQTVAKEGGRIDEIHLEMGRDLKNSAAERAKISNRNKQNEGTNFRIKLLLQEFSQYEKDIEGIRPYSPSQQELLRIYEEGVCEQTEMPKDIAKIRRELSSSSSEKDVKRSDIQRYRLWLDQKYCSPYTGQPIPLARLFTTDYEIEHVIPRSKYFDDSYNNKVICEAAVNKAKSNRLGMAFIQESGGQIIPLGNGRNVQVLNESAYVEFINKTFKHNARKRSLMLADEITEEFCNRQLTDTRYIARFMMGVLSNIVRQNDNGVLESEAISKNLIVCNGKITDRVKQDWGLNDVWNHIVTPRFERLNQITNSSDFGEWCNKEGKRYFQTRIPLELQKRVNKKRIDHRHHAMDAIAIACTTRSLVNYLNNQSAHTKAREDYRQRLCRTDGHGQTKRLLRAPWKDFAKDAESALQQIVVSFKQNTRILTHATNSYECFDAKAGKKIIKRQISQNHYAIRKPLHKDTVYGEVVLPSIKLISLNKALSNPRRIIDKQLRSKILELQQRDKLTKKQVCDFFKKTCANSTEWRNYDFAKVAVRVWSNDEEGSRMVSVRKAVDESFDMKQIEKVYDPIVRNILTRHLKACNGDSKTAFSPQGVEEMNQHIAELNNENAHLPIYKVKLGESKGEKFAIGQKGSKATKFVVTAKDTNLFFAVYANEEGKRSYQSVDLRTAIELKKQGCPVAPETNEKGDKLLFILSPNSLVYMPTEEEMERGNIDVQNLNLNQIFKMVSSTGNNCFFVPNTLSQVIFPGKEYESMDKVGTVKEWDGYSISESKNNKKFLSIKACCIPICIDRLGRIQLKK

SEQ ID NO: 1736 - protein, 1521 aa, unidentified; identical to SEQ ID NO: 1719
  REGION 1..1521: note = Description of Unknown: uncultivated organism with predicted taxonomy: Prevotella
  REGION 1..1521: note = MG22-82 effector

SEQ ID NO: 1737 - protein, 1521 aa, unidentified
  REGION 1..1521: note = Description of Unknown: uncultivated organism with predicted taxonomy: Prevotella
  REGION 1..1521: note = MG22-83 effector
MTKNTRNIIGLDLGTNSIGWSWIQQLISPTPTQPSEYLFDGTPIIRMSGSRIIPMPGDVTGSFERGETISKTKDRTAKRMARRMNERFQLRRERLNRVLNIMGFLPEHYARALDRYGKLNEESNTTIAWRSKEDGKNEFIFYPSFLEMASIFKERHPDIQRIPLDWTLYYLRSKALHQAITKEELSWVLHSFNQKRGYYQSREDITEEDKTKKVEYIKGVVNSVEDTGEKAKGKKIYKVTFADGTEFTSTKSEAPLWIGRTREIIVTTSLDTSGKPKLDKEGKIIQSAKTPDEKDWTLIKIRTEATIDDSKLTVGEYIFHALLKNPETKIKGAHVSTIDRRFYINEINAILKEQEKYHEELRDKSLYEQCTQALYAQNEVRRNIIAPWSMSDLLIKDILFYHRPLKSKKSQISECSLEFHTYTDKNGATHRQGIKCIPTSHPLFQEYRIWQFIANLRIYERERFDNGKHLINEDKTSDFLTTKKKEELFEWLAEKDSVSQKTLLGRLGLKVERYHWNFPEEKTYPCGETRHLIQSRLKKANLQKAFHSLISDEQKDCFERGLWHILYSVSDYNELCKALKTFARKTGFTLEEQLLFVEAFSSCPPFKKDYGAYSKRAITKLLPLMRIGKFWHEESIDSTTKNRIEHLISGEECSGIDVRVREKVAKAGLCESIEQYQGLPQWLANYVVYNRHSEASEIIKWESPDELDNYIRAFKQYSLRNPIVEQVSLETLRVVRDLWAELQKEGQTIDEIHLEMGRDLKNTAEERSRIFRRNSENEDTNFRIKLLLEEFNANEKDIKDVRPYSPSQQELLRIYEEGVWQQEKDIPQDIKDIKKRISNDKDIKDITPNDIQRYRIWMDQKYCSPYTGKTIPLSRLFTTDYEIEHVIPRSRYFDDSYNNKVICEAAVNKDKNNRLGMEYIMAAGGKTIELGNGKNVQILKEEEYVELVDKIFGNNTRKRNIMLADEITEEFSHRQLNDTRYIARFMKGILSNIVREKNADGTLEPEETSKNLIVCSGRITDRVKQDWGLNDIWSHIVTPRFERLNTKTSSNDFGEYVCKDGKRYFQTRVPLNLQKGFNKKRIDHRHHAMDAIAIACVNRSIVNYLNNAAANQTEREDLRRAVCIPERNGQTKRQLRSPWHCFARDAENALRQIVVSFKQNLRVATKATNSYECFDTASGKKIRKHQSNREHYAIRKPLHKDSVYGEVILPSIASVNLKKALMKADRILDKRLKEKIFELRKLYNYSNKQIEEHLTKVCINCPEWKNYDFKKIAVRILSNDADATHIVAIRKPLDETFDEDKIKTITDTGIQKILLNHLSRYADDPKKAFSPEGIEDMNANIASLNSGKQHLPIYKVRVSEKDNGGYFPIGQKGNRPKKYVTTAKDTNLFFAVYADSKGKRSYKTIDLRTAIECRKQGLSVAPSVNQKGDKLLFTLSPNDLVYMPSEEEEVNGFAIDNNLNKDQIYKMVSANNKQCFFIPHTVADFISRGEEYNSHNKIELTEDRRSIKEHCVPLKVNRLGK

SEQ ID NO: 1738 - protein, 1558 aa, unidentified
  REGION 1..1558: note = Description of Unknown: uncultivated organism with predicted taxonomy: Bacteroidales
  REGION 1..1558: note = MG22-84 effector
LYSSHHVATNSTYPFKTGHNRTPLNRFTTHKTQPYNIMTKNTRNIIGLDLGTNSIGWSWIQQLISPTSTQPSEYLFDGTPIIRMSGSRIIPMPGDVTGSFERGETISKTKDRTAKRMARRMNERFQLRRERLNRVLNIMGFLPEHYARALDRYGKLNEESNTTIAWRSKEDGKNEFIFYPSFLEMASIFKEHHPDIQRIPLDWTLYYLRSKALHQAITKEELSWVLHSFNQKRGYYQSREDITEEDKTKKVEYIKGVVNSVEDTGEKAKGKKIYKVTFADGTEFTSTKSEAPLWIGRTREIIVTTSLDTSGKPKLDKEGKIIQSAKTPDEKDWTLIKIRTEATIDDSKLTVGEYIFHALLKNPETKIKGAHVSTIDRRFYINEINAILKEQEKYHEELRDKSLYEQCTQALYAQNEVRRNIIAPWSMSDLLIKDILFYHRPLKSKKSQISECSLEFHTYTDKDGATHRQGIKCIPTSHPLFQEYRIWQFIANLRIYERERFDNGKHFINEDKTSDFLTTKKKEKLYEWLAEKDSVSQKTLLGHLGLKVERYHWNFPEEKTYPCGETRHLIQSRMKKANLQKAFHSLISDEQKDCFERGLWHILYSVSDYNELCKALKTFARKTGFTLEEQLLFVEAFSSCPPFKKDYGAYSKRAITKLLPLMRIGKFWHEESIDSTTKNRIEHLISGEECSGIDVRVREKVAKAGLCESIEQYQGLPQWLANYVVYNRHSEASEITKWESPDELDNYIRSFKQYSLRNPIVEQVSLETLRVVRDLWAELQKEGQTIDEIHLEMGRDLKNTAEERSRIFRRNSENEDTNFRIKLLLEEFYANEKDIKDVRPYSPSQQELLRIYEEGVWQQEKDIPQDIKDIKKRISNDKDIKDITPNDIQRYRIWMDQKYCSPYTGKTIPLSRLFTTDYEIEHVIPRSRYFDDSYNNKVICEAAVNKDKNNRLGMEYIMAAGGKTIELGNGKNVQILKEEEYVELVDKIFGNNTRKRNIMLADEITEDFSHRQLNDTRYIARFMKGILSNIVREKNADGTLEQEETSKNLIVCSGRITDRVKQDWGLNDIWNHIITPRFERLNTKTSSDKFGEYVCKEGKRYFQTRVPLSLQKGFNKKRIDHRHHAMDAIAIACVNRSIVNYLNNAAANQTEREDLRRAVCIPERNGQTKRQLRSPWHCFARDTENALRQIVVSFKQNLRVATKATNSYECFDTASGKKIRKHQSNHEHYAIRKPLHKDSVYGEVILPSIASVNLKKALLKAERILDKRLKEKIFELRKLYNYSNKQIEEHLTKVCINCPEWKNYDFKKIAVRILSNDADATHIVAIRKPLDESFDKVKINTITDTGIQKILLNHLSRYADDPKKAFSPEGIEDMNANIASLNGGKQHLPIYKVRVSEKNNGGYFPIGQKGNRHKKYVTTAQDTNLFFAIYADSKGKRSYKTIDLRTAIECRKQGLSVAPSINEKGDKLLFTLSPNDLVYMPSEGEETNGFAIDNNLNKEQIYKMVSATNNRCFFIPHTVADFISRGQEYNSVNKIELTEDGRSIKEHCVPLKVNRLGK

SEQ ID NO: 1739 - protein, 1521 aa, unidentified
  REGION 1..1521: note = Description of Unknown: uncultivated organism with predicted taxonomy: Prevotella
  REGION 1..1521: note = MG22-85 effector
MTKNTRNIIGLDLGTNSIGWSWIQQLISPTPTQPSEYFFDGTPIIRMSGSRIIPMPGDVTGSFERGETISKTKDRTAKRMARRMNERFQLRRERLNRVLNIMGFLPEHYARALDRYGKLNEESNTTIAWRSKEDGKNEFIFYPSFLEMASIFKEHHPDIQRIPLDWTLYYLRSKALHQAITKEELSWVLHSFNQKRGYYQSREDITEEDKTKKVEYIKGVVNSVEDTGEKAKGKKIYKVTFADGTEFTSTKSEAPLWIGRTREIIVTTSLDTSGKPKLDKEGKIIQSAKTPDEKDWTLIKIRTEATIDDSKLTVGEYIFHALLKNPETKIKGAHVSTIDRRFYINEINAILKEQEKYHKELRDKSLYEQCIKALYAQNEVRRNIIAPWSMSDLLIKDILFYHRPLKSKKSQISECPLEFHTYTDKDGATHRQGIKCIPTSHPLFQEYRIWQFIANLRIYERERFDNGKHIINEDKTSDFLTTKKKEELFEWLAEKDSVSQKTLLGHLGLKVERYHWNFPEEKTYPCGETRHLIQSRLKKANLQKAFHSLISDEQKDCFERSLWHILYSVSDYNELCKALKTFARKTGFTLEEQSLFVEAFSSCPPFKKDYGAYSKRAITKLLPLMRIGKFWHEESIDSTTKNRIEHLISGDECSGIDVRVREKVAKAGLCESIEQYQGLPQWLANYVVYNRHSEASEITKWESPDELDNYIRSFKQYSLRNPIVEQVSLETLRVVRDLWAELQKEGQTIDEIHLEMGRDLKNTAEERSRIFRRNSENEDTNFRIKLLLEEFYANEKDIKDVRPYSPSQQELLRIYEEGVWQQEKDIPQDIKDIKKRISNDKDIKDITPNDIQRYRIWMDQKYCSPYTGKTIPLSRLFTTDYEIEHVIPRSRYFDDSYNNKVICEAAVNKDKNNRLGMEYIMAAGGKTIELGNGKNVQILKEEEYVELVDKIFGNNTRKRNIMLADEITEEFSHRQLNDTRYIARFMKGILSNIVREKNADGTLEPEETSKNLIVCSGRITDRVKQDWGLNDIWNHIITQRFERLNKKTSSNDFGEYVCKDGKRYFQTRVPLNLQKGFNKKRIDHRHHAMDAIAIACVNRSIVNYLNNAAANQTEREDLRRAVCIPERNGQTKRQLRSPWHCFARDAENALRQIVVSFKQNLRIATKATNSYECFDTASGKKIRKHQSNREHYAIRKPLHKDSVYGEVILPSIASVNLKKALLKAERILDKRLKDKIFELRKLYNYSNKQIEEHLTKVCINCPEWKNYDFKKIAVRILSNDADATHIVAIRKPLDETFDKEKIKTITDTGIQKILLNHLSRYADDPKKAFSPEGIEDMNANIASLNGGKQHLPIYKVRVSEKDNGGYFPIGQKGNRSKKYVTTAKETNLFFAVYADSNGKRSFKTIDLRTAIECKKQGLSVAPSVNEKGDKLLFTLSPNDLVYMPSEEEEANGFSIDNNLNKEQIYKMVSATYKQCFFIPHTVADFIYKNKEFNVLNKIELTEDRRSIKEHCVPLKVNRLGK

SEQ ID NO: 1740 - protein, 985 aa, unidentified
  REGION 1..985: note = Description of Unknown: uncultivated organism with predicted taxonomy: Bacteroidales
  REGION 1..985: note = MG22-86 effector
MKKANLQKAFHSLISDEQKDCFERGLWHILYSVSDYNELCKALKTFARKTGFTLEEQLLFVEAFSSCPPFKKDYGAYSKRAITKLLPLMRIGKFWHEESIDSTTKNRIEHLISGEECSGIDVRVREKVAKAGLCESIEQYQGLPQWLANYVVYNRHSEASEITKWESPDELDNYIRSFKQYSLRNPIVEQVSLETLRVVRDLWAELQKEGQTIDEIHLEMGRDLKNTAEERSRIFRRNSENEETNFRIKLLLEEFYANEKDIKDVRPYSPSQQELLRIYEEGVWQQEKDIPQDIKDIKKRISNDKDIKDITPNDIQRYRIWMDQKYCSPYTGKTIPLSRLFTTDYEIEHVIPRSRYFDDSYNNKVICEAAINKDKNNRLGMEYIMAAGGKTIELGNGKDVQILKEEEYVELVDKIFGNNTRKRNIMLADEITEEFSHRQLNDTRYIARFMKGILSNIVREKNADGTLEPEETSKNLIVCSGRITDRVKQDWGLNDIWNHIITPRFERLNKKTSSNDFGEYVCKDGKRYFQTRVPLNLQKGFNKKRIDHRHHAMDAIAIACVNRSIVNYLNNAAANQTEREDLRRAVCIPERNGQTKRQLRSPWHCFARDAENALRQIVVSFKQNLRVATKATNSYECFDTASGKKIRKHQSNREHYAIRKPLHKDSVYGEVILTSIASVNLKKALLKADRILDKRLKEKIFELRKLYNYSNKQIEEHLTKVCINCPEWKNYDFKKIAVRILSNDADATHIVAIRKPLDESFDEVKINTITDTGIQKILKNHLSRYADDPKKAFSPEGIEDMNANIASLNGGKQHLPIYKVRVSEKDNGGYFPIGQKGNRSKKYVTTAKDTNLFFAVYANSNGKRCFKTIDLRTAIECRKQGLSVAPSINEKGDKLLFTLSPNDLVYMPSEGEEANGFAIDNNLNKEQIYKMVSATNNRCFFIPHTVADFISRGQEYNSVNKIELTEDGRSIKEHCVPLKVNRLGK

SEQ ID NO: 1741 - protein, 935 aa, unidentified
  REGION 1..935: note = Description of Unknown: uncultivated organism with predicted taxonomy: Prevotella sp. MGM2
  REGION 1..935: note = MG22-87 effector
YQSREDITEEDKTKKVEYIKGVVNSVEDTGEKAKGKKIYKVTFADGTEFTSTKSEAPLWIGRTREIIVTTSLDTSGKPKLDKEGKIIQSAKTPDEKDWTLIKIRTEATIDDSKLTVGEYIFHALLKNPETKIKGAHVSTIDRRFYINEINAILKEQEKYHKELREKSLYEQCIKALYAQNEVRRNIIAPWSMSDLLIKDILFYHRPLKSKKSQISECPLEFHCYTDKAGETHRQGIKCIPVSHPLFQEYRIWQFISNLRIYEREHFDNGKHFSNVDKTSEFLTSEKKEELYEWLAEKDSVSQKTLLGKIGLKVEDYHWNFPEEKTYPCGETRHLIQSRLKKANLQKAFHSLISDEQKDCFERGLWHILYSVSDYNELCKALKTFARKTGFTLEEQLLFVEAFSSCPPFKKDYGAYSKRAITKLLPLMRIGKFWHEESIDSTTKTRIEHLISGEECSGIDVRVREKVAKAGLCESIEQYQGLPQWLANYVVYNRHSEASEITKWESPDELDNYIRSFKQYSLRNPIVEQVSLETLRVVRDLWAELQKEGQTIDEIHLEMGRDLKNTAEERSRIFRRNSENEDTNFRIKLLLEEFYANEKDIKDVRPYSPSQQELLRIYEEGVWQQEKDIPQDIKDIKKRISNDKDIKDITPNDIQRYRIWMDQKYCSPYTGKTIPLSRLFTTDYEIEHVIPRSRYFDDSYNNKVICEAAVNKDKNNRLGMEYIMAAGGKTIELGNGKNVQILKEEEYVELVDKIFGNNTRKRNIMLADEITEEFSQRQLNDTRYIARFMKGILSNIVREKNADGTLEPEETSKNLIVCSGRITDRVKQDWGLNDIWNHIVTPRFERLNTKTSSNDFGEYVCKEGKQYFQTRVPLNLQKGFNKKRIDHRHHAMDAIAIACVNRSIVNYLNNAAANQIEREALRRAVCIPERNGQTKR

SEQ ID NO: 1742 - protein, 1521 aa, unidentified
  REGION 1..1521: note = Description of Unknown: uncultivated organism with predicted taxonomy: Prevotella sp. MGM2
  REGION 1..1521: note = MG22-88 effector
MTKNTRNIIGLDLGTNSIGWSWIQQLISPTPTQPSEYLFDGTPIIRMSGSRIIPMPGDVTGSFERGETISKTKDRTAKRMARRMNERFQLRRERLNRVLNIMGFLPEHYARALDRYGKLNEESNTTIAWRSKEDGKNEFIFYPSFLEMASIFKERHPDIQRIPLDWTLYYLRSKALHQAITKEELSWVLHSFNQKRGYYQSREDITEEDKTKKVEYIKGVVNSVEDTGEKAKGKKIYKVTFADGTEFTSTKSEAPLWIGRTREIIVTTSLDTSGKPKLDKEGKIIQSAKTPDEKDWTLIKIRTEATIDDSKLTVGEYIFHALLKNPETKIKGAHVSTIDRRFYINEINAILKEQEKYHEELRDKSIYEQCTQALYAQNEVRRNIIAPWSMSDLLIKDILFYHRPLKSKKSQISECPLEFHTYTDKDGATHRQGIKCIPTSHPLFQEYRIWQFIANLRIYERERFDNGKHLINEDKTSDFLTTKKKEELFEWLAEKDSVSQKTLLGHLGLKVERYHWNFPEEKTYPCGETRHLIQSRLKKANLQKAFHSLISDEQKECFERGLWHILYSISDYNELCKALKTFARKTGFKLEEQLLFVEAFSSCPPFKKDYGAYSKRAITKLLPLMRIEKFWHEESIDSTTKNRIEHLISGEECSGIDVRVREKVAEAGLCESIEQYQGLPQWLANYVVYNRHSEASEITKWESPDELDNYIRSFKQYSLRNPIVEQVSLETLRVVRDLWAELQKEGQTIDEIHLEMGRDLKNTAEERSRIFRRNSENEDTNFRIKLLLEEFYANEKDIKDVRPYSPSQQELLRIYEEGVWQQEKDIPQDIKDIKKRISNDKDIKDITPNDIQRYRIWMDQKYCSPYTGKTIPLSRLFTTDYEIEHVIPRSRYFDDSYNNKVICEAAVNKDKNNRLGMEYIMAAGGKTIELGNGKNVQILKEEEYVELVDKIFGNNTRKRNIMLTDEITEEFSHRQLNDTRYIARFMKGILSNIVRGKNADGKLEPEETSKNLIVCSGRITDRVKQDWGLNDIWNHIITPRFERLNKKTSSNDFGEYVCKDGKRYFQTRVPLNLQKGFNKKRIDHRHHAMDAIAIACVNRSIVNYLNNAAANQTEREDLRRAVCIPERNGQTKRQLRSPWHCFARDAENALRQIVVSFKQNLRVATKATNSYECFDTASGKKIRRHQSNREHYAIRKPLHKDSVYGEVILPSIASVNLKKALLKADRILDKRLKDKIFELRKLYNYSNKQIEEHLTKVCINCLEWKNYDFKKIAVRILSNDADATHIVAIRKPLDESFDKVKINTITDTGIQKILLNHLSRYADDPKKAFSPEGIEDMNANIASLNGGKQHLPIYKVRVSEKDNGGYFPIGQKGNRSKKYVTTAKETNLFFAVYADSNGKRSFKTIDLRTAIECKKQGLSVSPSVNEKGDKLLFTLSPNDLVYMPSEEEEANGFSIDNNLNKEQIYKMVSATYKQCFFIPHTVADFIYKNKEFNVLNKIELTEDRRSIKEHCVPLKVNRLGK

SEQ ID NO: 1743 - protein, 884 aa, unidentified
  REGION 1..884: note = Description of Unknown: uncultivated organism with predicted taxonomy: Prevotella sp. MGM2
  REGION 1..884: note = MG22-89 effector
LLPLMRIGKFWHEESIDSTTKNRIEHLISGEECSGIDVRVREKVAKAGLCESIEQYQGLPQWLANYVVYNRHSEASEITKWESPDELDNYIRSFKQYSLRNPIVEQVSLETLRVVRDLWAELQKEGQTIDEIHLEMGRDLKNTAEERSRIFRRNSENEDTIFRIKLLLEEFYANEKDIKDVRPYSPSQQELLRIYEEGVWQQEKDIPQDIKDIKKRISNDKDIKDITPNDIQRYRIWMDQKYCSPYTGKTIPLSRLFTTDYEIEHVIPRSRYFDDSYNNKVICEAAVNKDKNNRLGMEYIMAAGGKTIELGNGKNVQILKEEEYVELVDKIFGNNTRKRNIMLADEITEEFSHRQLNDTRYIARFMKGILSNIVREKNADGTLEPEETSKNLIVCSGRITDRVKQDWGLNDIWNHIITPRFERLNKKTSSNDFGEYVCKDGKRYFQTRVPLNLQKGFNKKRIDHRHHAMDAIAIACVNRSIVNYLNNAAANQTEREDLRRAVCIPERNGQTKRQLRSPWHCFARDAENALRQIVVSFKQNLRVATKATNSYECFDTASGKKIRKHQSNREHYAIRKPLHKDSVYGEVILTSIASVNLKKALLKADRILDKRLKEKIFELRKLYNYSNKQIEEHLTKVCINCPEWKNYDFKKIAIRILSNDADATHIVAIRKPLDESFDKVKINTITDTGIQKILLNHLSRYADDPKKAFSPEGIEDMNANIASLNGGKQHLPIYKVRASEKDNGGYFPIGQKGNRPKKYVTTAKDTNLFFAVYADSKGKRSFNMIDLRTAIECWKQGVSVAPSINEKGDKLLFTLSPNDLVYMPSEEEEANGFSIKGNLIKEHIYKMVSATNRQCFFIPHTVADFISRGQEYNVLNVDNSAKIR

SEQ ID NO: 1744 - protein, 1558 aa, unidentified
  REGION 1..1558: note = Description of Unknown: uncultivated organism with predicted taxonomy: Bacteroidales
  REGION 1..1558: note = MG22-90 effector
LYSSHHVAANSTYPFKTGHNRTPLNRFTTHKTQPYNIMTKNTRNIIGLDLGTNSIGWSWIQQLISPTPTQPSEYLFNGTPIIRMSGSRIIPMPGDVTGSFERGETISKTKDRTAKRMARRMNERFQLRRERLNRVLNIMGFLPEHYARALDRYGKLNEESNTTIAWRSKEDGKNEFIFYPSFLEMASIFKEHHPDIQRIPLDWTLYYLRSKALHQAITKEELSWVLHSFNQKRGYYQSREDITEEDKTKKVEYIKGVVNSVEDTGEKAKGKKIYKVTFADGTEFTSTKSEAPLWIGRTREIIVTTSLDTSGKPKLDKEGKIIQSAKTPDEKDWTLIKIRTEATIDDSKLTVGEYIFHALLKNPETKIKGAYVSTIDRRFYINEINAILKEQEKYHKELRDKSLYEQCIKALYAQNEVRRNIIAPWSMSDLLIKDILFYHRPLKSKKSQISECPLEFHTYTDKDGATHRQGIKCIPTSHPLFQEYRIWQFIANLRIYERERFDNGKHLINEDKTSDFLTTKKKEDLYEWLAEKDSVSQKTLLGHLGLKVERYHWNFPEEKTYPCGETRHLIQSRLKKANLQKAFHSLISDEQKDCFERGLWHILYSVSDYNELCKALKTFARKTGFTLEEQLLFVEAFSSCPPFKKDYGAYSKRAITKLLPLMRIGKFWHEESIDSTTKNRIEHLISGEECSGIDVRVREKVAKAGLCESIEQYQGLQQWLANYVVYNRHSEASEITKWESPDELDNYIRSFKQYSLRNPIVEQVSLETLRVVRDLWAELQKEGQTIDEIHLEMGRDLKNTAEERSRIFRRNSENEDTNFRIKLLLEEFYANEKDIKDVRPYSPSQQELLRIYEEGVWQQEKDIPQDIKDIKKRISNDKDIKDITPNDIQRYRIWMDQKYCSPYTGKTIPLSRLFTTDYEIEHVIPRSRYFDDSYNNKVICEAAVNKDKNNRLGMEYIIAAGGKTIELGNGKNVQILKEEEYVELVDKIFGNNTRKRNIMLADEITEEFSHRQLNDTRYIARFMKGILSNIVREKNTDGTLEPEETSKNLIVCSGRITDRVKQDWGLNDIWNHIITPRFERLNTKTSSNDFGEYVCKDGKRYFQTRVPLNLQKGFNKKRIDHRHHAMDAIAIACVNRSIVNYLNNAAANQTEREDLRRAVCIPERNGQTKRQLRSPWPCFARDTENALRQIVVSFKQNLRIATKATNSYECFDTASGKKIRKHQSNHEHYAIRKPLHKDSVYGEVILTSIASVNLKKALLKAERILDKRLKEKIFELRKLYNYSNKQIEEHLTKVCINCPEWKNYDFKKIAVRILSNDADATHIVAIRKPLDESFDEVKINTITDTGIQKILLNHLSRYADDPKKAFSPEGIEDMNANIASLNGGKQHLPIYKVRVSEKNNGGYFPIGQKGNRPKKYVTTAQDTNLFFAVYADQKGKRSFKTIDLRTAIECRKQGLSVAPSINEKGDKLLFTLSPNDLVYMPSEEEEANGFSIKGNLIKEHIYKMVSANNRQCFFIPHSVADFISKGEEYNAHNKIELAEDGRSIKVHCVPLKVNRLGK

SEQ ID NO: 1745 - protein, 1521 aa, unidentified
  REGION 1..1521: note = Description of Unknown: uncultivated organism with predicted taxonomy: Prevotella
  REGION 1..1521: note = MG22-91 effector
MTKNTRNIIGLDLGTNSIGWSWIQQLISPTPTQPSEYLFDGTPIIRMSGSRIIPMPGDVTGSFERGETISKTKDRTAKRMARRMNERFQLRRERLNRVLNIMGFLPEHYARALDRYGKLNEESNTTIAWRSKEDGKNEFIFYPSFLEMAFIFKERHPDIQRIPLDWTLYYLRSKALHQAITKEELSWVLHSFNQKRGYYQSREDITEEDKTKKVEYIKGVVNSVEDTGEKAKGKKIYKVTFADGTEFTSTKSEALLWIGRTREIIVTTSLDTSGKPKLDKEGKIIQSAKTPDEKDWTLIKIRTEATIDDSKLTVGEYIFHALLKNPETKIKGAHVSTIDRRFYINEINAILKEQEKYHEELRDKSIYEQCTQALYAQNEVRRNIIAPWSMSDLLIKDILFYHRPLKSKKSQISECPLEFHTYTDKNGATHRQGIKCIPTSHPLFQEYRIWQFIANLRIYERERFDNGKHLINEDKTSDFLTTKKKEELFEWLAEKDSVSQKTLLGHLGLKVERYHWNFPEEKTYPCGETRHLIQSRLKKANLQKAFHSLISDEQKECFERGLWHILYSISDYNELCKALKTFARKTGFKLEEQLLFVEAFSSCPPFKKDYGAYSKRAITKLLPLMRIGKFWHEESIDSTTKNRIEHLISGEECSGIDVRVREKVAEAGLCESIEQYQGLPQWLANYVVYNRHSEASEITKWESPDELDNYIRSFKQYSLRNPIVEQVSLETLRVVRDLWAELQKEGQTIDEIHLEMGRDLKNTAEERSRIFRRNSENEDTNFRIKLLLEEFYANEKDIKDVRPYSPSQQELLRIYEEGVWQQEKDIPQDIKDIKKRISNDKDIKDITPNDIQRYRIWMDQKYCSPYTGKTIPLSRLFTTDYEIEHVIPRSRYFDDSYNNKVICEAAVNKDKNNRLGMEYIMAAGGKTIELGNGKNVQILKEEEYVELVDKIFGNNTRKRNIMLTDEITEEFSHRQLNDTRYIVRFMKGILSNIVRGKNADGKLEPEETSKNLIVCSGRITDRVKQDWGLNDIWNHIITPRFERLNKKTSSNDFGEYVCKDGKRYFQTRVPLNLQKGFNKKRIDHRHHAMDAIAIACVNRSIVNYLNNAAANQTEREDLRRAVCIPERNGQTKRQLRSPWHCFARDAENALRQIVVSFKQNLRVATKATNSYECFDTASGKKIRRHQSNREHYAIRKPLHKDSVYGEVILPSIASVNLKKALLKADRILDKRLKDKIFELRKLYNYSNKQIEEHLTKVCINCLEWKNYDFKKIAVRILSNDADATHIVAIRKPLDESFDKVKINTITDTGIQKILLNHLSRYADDPKKAFSPEGIEDMNANIASLNGGKQHLPIYKVRVSEKDNGGYFPIGQKGNRSKKYVTTAKETNLFFAVYADSNGKRSFKTIDLRTAIECKKQGLSVAPSVNEKGDKLLFTLSPNDLVYMPSEEEEANGFSIDNNLNKEQIYKMVSATYKQCFFIPHTVADFIYKNKEFNVLNKIELTEDRRSIKEHCVPLKVNRLGK

SEQ ID NO: 1746 - protein, 1558 aa, unidentified; identical to SEQ ID NO: 1667
  REGION 1..1558: note = Description of Unknown: uncultivated organism with predicted taxonomy: Bacteroidales
  REGION 1..1558: note = MG22-92 effector

SEQ ID NO: 1747 - protein, 750 aa, unidentified
  REGION 1..750: note = Description of Unknown: uncultivated organism with predicted taxonomy: Bacteroides
  REGION 1..750: note = MG22-93 effector
LGPNSIGWAVVEREEKSSDNSSLFTGGKILMAGSRIIPMSADILNNYEKGVSVSQTSERTKYRQVRRQYERFHQRRERLNRVLQELGFLPAHYSEQLDRYGKLPKGKEPKIAWRPTADGKYEFIFRSSFLEMMAEIRKSHPECKQIPYDWTLYYLRKKALYEKLTPEELSWVLHSFNQKRGYNAVRGQVEEDTETPDKLQEYRKSCLIGLEDTGEKTRGTNVYKLSFEDGTVFEMPLRKINFAVGDEVEFFITTRLDEDGTPKLNKQGLPVISYKIPNADDAWTLNKLRAEFTIDQSCSTVGQYIYDAILRNPQQKIRGELVRTVDRRFYRDELNRILDKQISLHPILQDDNKLQECLLALYPSNEAHRCTMSGRGFKALFMDDVILYQRPLKSKKSLIDACKYEFHTYINKDGKHEKSVLRCASRSNPLFQEFRLWQFIENLRIYKRKDLSDGHLLTDVDVTGKYLSDEDVRVALFDWMRDRSDVDQKSLLKYFKLSESDFRWNYVEDRKYPASETRAEMLKRLKKAGVPTDFLNLENEMALWEIFYSINEKKELEKALSSFARKHNFEVEKFIQSFRTIKPYPSDYCAYSTKALRRLLPLMRQGKYWKEEEIDDQTRSRIQRLIDGEWDEGIAEKVREKTVSLRCESDFRGLPVWLASYVVYNRHSEASEIKKWESPEEMDADIRKFRQHSLRNPIVEQVCLETLRVVRDIWKEEGISMKSTWRWDVKCGLQQRNAKRVAAYKWKTSR

SEQ ID NO: 1748 - protein, 1496 aa, unidentified
  REGION 1..1496: note = Description of Unknown: uncultivated organism with predicted taxonomy: Prevotella
  REGION 1..1496: note = MG22-94 effector
MKNILGLDLGPNSIGWAVVQTEKEGAEESLFAQGKILMAGSRIIPMDASTLGDFEKGNSTSQTADRTKFRQVRRQYERFHQRRERLNRVLLTLDYLPEHYAKELDRYGKLPKEGEPKLAWRPTPDGAYEFLFRDAFLEMVSEFKKHHPELKQIPYDWTIYYLRKKALRQALTPHELSWVLHSFNQKRGYNAVRGKEDKETESPDKRQEYHKSVLTSISDTGEKLRGNVVYRLAFSDGATFDVAGRHISLSEGEEVEYIKTTKLDEDGMPKLTRQGVPDVSYKIPNADDAWTLNKLRAEFTIEQSGTTVGEYIYDAILRNPGQKIRGELVRTIDRRFYRDELCRILDTQIPLHPVLQDGNKLEECLQTLYPNNEAHRLSMLGRGFKGLFMDDVILYQRPLKSKKSLIDDCKYESRTYVNQDGARVRVGLKCASRSHPLFQEYRLWQFMENLRILKRKEFVDGHLRTNVDVTGHHLPDENSRVALFDWLYGRATVDQKALLKYLHLSEEEYSWNYVEERDYPAAETRAEMQKRLKKAGISADFLTPEREMALWEILYSVGVQGELEKALRRFASKHGVDADKFCQSFRTIKPYPADYCAYSTKALRRLLPLMRQGRYWSLSAIDPQTRQRMQRLIDGEWDEGISDRVREKTSDLRHETDFRGLTSWMATYVVYNRHSEAADIKKWHTPEEMDADIRRFRQHSLRNPIVEQVCLEALRTVRDIWKEIGKIDEIHVEMGRNMRATAKERQKTSQLQLENEQANLRIKALLQEFMNPEFEVEDVRPYSPSQQELLRIYEGTVLEQEAGHIDEPIREIIRKFSQTDAAKRPTTSEVLRYKLWLEQKYRSPYTGEVIPLGKLFTPAYQIEHVIPQSLYYDNSFNNKVICEAEVNLLKGNQLGMPFIMRHANEKVVCSMGKQVKIFTPEAYRLFVEEHYRGRKMTILLSEEIPTAFNDRQKNDTRYISRYIIGELSKLVREEKPDGTLEQEPTSKNVVVLNGSVTDKLKKDWGLVDVWNEIITPRFRRLNEMEGSQRFGQDAEKGGKRYFQITMPLELQRGFQRKRIDHRHHAMDAITIACATRQVINYLNNDHSHAGQGREDLHRAVCRKRGSEWFIRKPWDTFTQDAHARLNQIVISFKQNLRVINKTGNHYWRYNPKTGKKEIFHQQKGDSWAIRQALHKESVFGRVNLRTTKFVSFKEAFASLERIVDKRLKRAILAGMARYSGHCTDKQMLIYLQEQQEWKSFDFKKVAVYTFSEDDDKSRMCAIRKRLDDSFDKKKILSVTDTGIQRILLRHLEQSGGNPKDAFSPEGIVRMNETIQELNGGKPHQPILSVRITETMGNKFAVGMRGNRGKKFVEAAKGTNLFFATYLQEDGKRLFRSLPLNEVVERQKQGLPVAPERDEQGNSLLFVLSPGDLVYLPTSDEQEGRVEPAALDLSRIYKMVSCTRSQCLFVPHRVASVIKDKYEYSSMNKMERAITGEMIKESCLPLEVDRLGRYRIK

SEQ ID NO: 1749 - protein, 1381 aa, unidentified
  REGION 1..1381: note = Description of Unknown: uncultivated organism with predicted taxonomy: Bacteroidales
  REGION 1..1381: note = MG22-95 effector
EADADEEKKKKEVKTLEKATVVSIEQSDAAKGGRYWWNYHLSNGMIYKRTSERPMEWLGTERYFIVTTKLDADGNPKKRKDGTTDKSISAPSADDWGLMKLKTESEIGESGKQLGEFIYDKILADPTAKIIGGEVTVVDRRFYRDELRAILDKQREYIAALRDRELYAECIEALYPSNAAYRNIIAGKDFSYLLTDDVILYQRPLKSKKYLISDCPYETVTFTDKSGQEVTKRLKCVPRSHPLFQEFRVWQFIANLRIYQKERVEGGRKLIDADVTDLLLKNDADRVALFEWLNARADVVQDDLLKFLVAEARKRPISEQSADFGELLVMAHGAKAKKDKAYTAFKWNYVEDKKYPCNKTHSVILSKLSSEEEREALTPEIEEMIWHALYSITDKREFDKAFSPNARHPERGLYATLSRHFSPESIGGIKSIILKESDYGSYSRRALSRLLPLMRCGALWSAEAIDTATRARIDKIIDGEWDEGIDTRTRNLMAGMSTVEQFRGMATWQACYVVYGRHSEASEVMRWNSPDDLRAFITSFPHNSLRNPTVERIILETLRIVEEIWRHYGHIDEIHVELARSVKQNKEQRERAMTQMAENERRNLRLRAMLEAFLNDRDPIGFDPDANINPGSPNQQLKLRLFEDTAFSYAQANGDDQVEEMLNIRNSITGGSDEKSATPAQIRRYALWLEQNFRSPYTGATISLARLFTDDYQVDHIIPQALYWDDSFNNKVLCEGGVNNTKSNALAFDFIAAHQGETIALPNGRKVTILSMEQYQELVLATYKNNRAKCEKLLMKEIPAEFTQRQLNDTRYISKVVKSLLSNVVRERDEEGNLEAEAISKNVIVPVGAMTDRLKQDWGLKDVWNQLMLPRFRALNDKMAPYRFTKITRRGHEIPAMPLELVKGFSKKRIDHRHHAMDAIAIACTTRRHIQYINGDAGEAEADKSKYIDKQRVIDARRTIRNKIAHRLDGDGKPIFDKPWTTFTEDVKRALENLIVSFKQTNKVISHTSNKSQRYVDGQKRFVRQTKGEQIAIRKPLHKETVSALVNLREVKEVTLKEAVATVPTIVDKELRAKIVELIAKGYDEKRMKAYFEEHNDEWTDVNPARKKVKVYRFSEESGSNHYYATRVALDTTFDAKKIRTITDTGIQKILLRYLEAKGSAAVAFTPEGIDELNANIARYNGGRQHQPIVKVRTYVNGDRYAIGTVGNKSKKYVVAQSGTLLYYFAFAHTEYDKKRKEEVTLRVFSAIPLRDVIAAMKADRDNWEDCVTASLKERGIIPADARFLFKLSPGDMIYLPDAHETIAPSAIDRAKVYKVVSFFGDNGGYLFVVPYSVAKPIIDKIEYGTQNKVNLAGELKQRIIPLAVDRLGNITWVYDPAGEK

SEQ ID NO: 1750 - protein, 890 aa, unidentified
  REGION 1..890: note = Description of Unknown: uncultivated organism with predicted taxonomy: Bacteroidales
  REGION 1..890: note = MG22-96 effector
MRVGKYWTADNIDPTTLHRIQLLISGEDDGELNLRTRDKLENLRNIEDFQGLPVWMACYVVYGRHSESGNIQKWSNPHDIDIFLNNFKQHSLHNPIVEQVVLETMRVVRDVWAKFGNLDEIHLELGRNLNQTAEQRKRDTERNLGNERANLRAKILLTEFLNPEMNVENVRPYSPSQLELLRIFEEGILDDSAGNMPDDIQEIIKKLDSTDIKRRPTESEVLRYRNWLEQGYRSPYTNEIIPLSKLFTTAYQIEHIIPQSLYFNNSYNNKVICEAEVNQLKSNQLGMEFVKNHGGEIVECAFGRKVRILTPEEYTAFVEQHYKHNVHKKNNLLSTELPSEFSSRQLNDSRYISKLMIGLLSNIVREETDGHLEEEAISKNLIVCTGKVTERLKQDWGLKDVWNEIIRPRFERLNQMEQTERFGHWENKQGKNVFQITIPIELSSSVDRKRIDHRHHAMDAITIACATRNMVNYLSNQASGKTRFDLQHALCIKQKMDAQGNYKWLIRKPWQTFTEDAKTALNEIVVSFKQNLRVINKTSNHYETIGSDGKKILRRQSKGDSWAIRKSMHKDTVFGNVNLRSIKQVTLKQALQQVDRICSKELKKYILSLQKLHFSGKGIEAQLKEKGRRLFPDIDLKKIDIYYFSNDSENTRMVASRKPLDNSFNQKAIEAITDSGIRKILLNHLEQCNGDSEAAFSPMGIEQMNEHITSLNNGIPHKPIYKVRKSEIQGSKFPVGTKGCRSKKFFEADKGTNLFFAIYVDSEGKRSFDSIPLNIVIERQKQGLPSCPEKDSNGNTLLFCISPSDTVYVPTPDEMETGNIDLNYIDKGRLYKMVSCSGRQCFFLPIEIACMIWDKVEFSATNKMERSITGEMIKDICIPIKCNRLGELLP

SEQ ID NO: 1751 - protein, 1490 aa, unidentified
  REGION 1..1490: note = Description of Unknown: uncultivated organism with predicted taxonomy: Bacteroidetes
  REGION 1..1490: note = MG22-97 effector
MKRVLGLDLGTNSIGWAVVEKDSLNETDGKIIMSGSRIIPMDAAMMSDFDKGNAQSQTAERTRLRSIRKLNERHKIRRQRLNRVLSILKYLPEHYANNIDRYGNIDENKEPKIAWKINSNGRKEFLFMDSFEEMVAEIHQKHPDAKTIPYDWTLYYLRSKALHKPISKFELAWVLHSFLQKRGYYQLRGEEEDSTAKKEEYASLKVISVEDSGDRKGNNTWWNVNLENGLTYKVCLQDRPPLEGKTRDFIITTKLDKEGKPALDKDGKPRYSIRAPKDDDWGLMKIRTESQIAKAGMTVGQYIYNTILNTLDKKIRGQIVRTIERKYYREELLRILECQIMFHLELQDKELYTECIEALYPSNDSYRASIATRNFKYLIADDVIFYQRPLKSKKSEISDCPYETRTFVDKSTGEIKKTSLKCISRQNPLFQEFRLWQFISNLRIYKRYDAEDGRIVINKDITKDLLPDANVVASLYEWLSTKAGVSQEQLLKYLKLSSADYRWNYVEEKKYPAGETRAMLMSGFKKAGIDTNLLTEEIEMALWHILYSVNDRQELIKALSSFAVQHQWPAEVFSNVFCKTKPFEDYGAYSEKAIKKLLPLMRVGKYWTADDIDPATRHRIQLLITGEDDSELNLRTRDKLEDLKSIDDFQGLPVWMACYVVYGRHSESGNILKWSNPHDIDIFLNNFKQHSLHNPIVEQVVLETMRVVRDVWAKFGNLDEIHLELGRNLNQTAEQRKRDTERNLGNERANLRAKILLTEFLNPEMNVENVRPYSPSQQELLRIFEEGIIDDSTGNMPDDIQEIIKKLDSSDIKRRPTESEILRYRNWLEQGYRSPYTNEIIPLSKLFTPAYQIEHIIPQSLYFNNSYNNKVICETEVNQLKSNQLGMEFVKNHGGEIVECAFGRKVRILTPEEYTAFVEQHYKHNIHKKNNLLSTELPSEFSSRQLNDSRYISKLMIGLLSNIVREDADGQLEEEAISKNLIVCTGKVTERLKQDWGLKDVWNEIIRPRFERLNHMEQSERFGHWENKQGKNVFQITIPLELSSSVDRKRIDHRHHAMDAITIACATRNMVNYLSNQASGKARYDLQHVLCVKQKMDAQGNYKWLIRKPWQTFTEDAKAAIKEIVVSFKQNLRVINKTSNHYEAIGSDGKKILRRQTKGDSWAIRKSMHKDTVFGNVNLRSVKQVTLKQALQQVDRICSKELKKYILSLQKLHFSDKGIEAQLKEKGRQLFPNIDLKKIDIYYFSNDSENTRMVATRKPLDASFNQKAIEAITDSGIRKILLNHLEQYNGDSEAAFSPMGIEQMNEHITSLNNGIPHKPIYKVRKSEIQGSKFPVGTKGCRSKKFFEADKGTNLFFAIYVDSEGKRSFDSIPLNIVIERQKQGLPSCPEKDSNGNTLLFCISPGDTVYVPTPDEMETGNIDLNYIDKGRLYKMVSCTGKESHFLPLSSATTIKDKYEYSSLNKLGRALSGEMIKDICIPIKCNRLGELLP

SEQ ID NO: 1752 - protein, 979 aa, unidentified
  REGION 1..979: note = Description of Unknown: uncultivated organism with predicted taxonomy: Bacteroidales
  REGION 1..979: note = MG22-98 effector
MTRKILGLDLGPNSIGWAVIARETSSDEENSGRIIDAGSRIIPMIDDSKFEKGETISATKDRRQKRSMRRMLERKKQRRQRLLRALNVMGFLPEHFAAYIDKHGNMRHDCDTPLMAWEQNADGHRQFIFTDAFEEMVADFRQHAICSCADGKLIPYDWTPYYLRKKALTTAISREELAFVLTQFNKKRGYHQLRGDELDEAEQKSKNQEIRTLTVKEIIDYKKISQKHKYTFLLSNGMAFERESTSKLDDWVGKERDFIITTEYDEEGNIKKNRFGEDKISIRAPEETDWTLRKKKAENDISDKKEVGEYIYDELLRTPDMKIIGGKVMTIDRKFYRRELRKILATQEPYHPELKDESVKRKVAKALYPNNTDHRRAIMRKSLSDIIVDDIIFYQRSLKSKKSTIADCPYEKRYYKDSEGMLKKTGVKCISKSHPLFQEFRTWQFINDLCITRQGEPVDFSNEEAADLFDYLHCKEKTNETDILKNFLKLNKQEQELHKWNYGKDAEKPCCPTHCQFVERFKKIGLEPSILTAETEQVLWEIAYSVKDVAEYNKAIEKFADRIGADREEFTKAFRNLPDYKSEYGSYSHKAICKLLPLMRRGSAWQWEAIDKDTREKIGHIINGEHDERLTEDTRQNFSKKTKEDDFQGLQPWEACQLVYGGQTDDEEIQKWDSPEDVDKYIASFRQHSMRNPVVEQVVLETLRTARDIMRRYGKVDEIHLEMARSMKQTSQQRKADNERMQSNYKRNQEVRDKIAEELQQNATNGERPKIGAKKIASYKIWEDQKGRSPYTGKAISDAALLNADGRYDIDHVIPQSRYYDDSLNNKVICEKEVNLKKGNMLGLEFIQKHGGETIQLSSGGEVTILREEEDKKLVNETFKGRKQKIMLMTETPNDFTNRQKTDTQYIASTMMRLLSNIVREQDPDGSLEREVRSKNPIVCTGGITDKLKKDWGVNDAWNRIILPRFKRMDELTMAERTG

SEQ ID NO: 1753 - protein, 1537 aa, unidentified
  REGION 1..1537: note = Description of Unknown: uncultivated organism with predicted taxonomy: Flavobacteriales
  REGION 1..1537: note = MG22-99 effector
MAKYILGLDLGPNSIGWAVVEGVEQEEHVGLVPQRIVMSGSRIIPIDKTTLSNFETGNTVSQTADRTQKRGMRRNLERKKLRRQRLFRVLKTMGMLPRHFAEHVDGLGNLDEDGRRLSMAWAPQEGERPLFLFQDAFAEMVGEFAARQPQLMLGGKLVPKDWTLYYLRKKGLTDRLEKEELAWVLASFLQKRGYRYMRGQDADNTKENEKKELRTLEIVDLISDGDGSKKGKGVDLVLEDELRFTVKNANEADFKRGQTLDFIVTTTYDERGKVKMDANNKPMRKLSMPKEGDWELLKTRTEQRIRVQEGSTVGSYIYESILENPDVKIIGERVHVVGREFYEEETKRILEAQTQFHPELSDPEMRDKVAHALYPNNEAHRNAILNRSLADIIVADVVFYQRPLRSKKSSISDCPFEKRNYVGSDGEERKVGVKCISKSHPLFQEFRTWQFVGNVKLVSKDDSGDDKNLSLLGRKKCFNGGTCEEGAELFEWLHNRKSVKQGDFLKGFVGLTKGEIDRYYRWNYEADKEIPCCETRAEFLGYFKKAGLPADALTEEAERRLWEVAYSVSDREEFRKALRSYARWIGADEERFVEACGKMKPFPSDYGSYSEKAIKKLLPLMRTGKYWSFDAIAPETQSKIRHLITGEEDERLTDEVREHFKYRVDEANYQGLQLWEACELVYGSSFSKDDIAHWKSPDDLDRWLEGFRQHSLRNPIVEQVVLEAVRTVRDIWRKIGHIDEIHLEMARDMRKTAQERKRDSERNSQNFKARQRIKMLLDEFEKMRIDDVHPYSPMHQEKLRIVEDGVFDRVSAKGDEKSKEMLKDMRAFQTNVEKNNVTPGDISRYMLYLEQNYRSPYTNETISMKRLFSSDYEIEHVIPRSRFFDDSMSNKVICEAKVNKEKGNMTGMEFIMKRGGEKIELGEGREVTIVNEKDYRQYVDEVYKNNSRKRKNLLSEDIPGGFSNSQMNNTRYISRLVMTILSNIVRDDREDGKSDEGIRANRLITCQGGVTDKLKKDWHVNDVWNRIILPRYERMQNEVMKGVTFVTNNSRGHEIPTMPDKLKTEEYNPKRIDHRHHAMDAIVIACATRSIVNFLNNESARDEASEGSEKAKARQTYAELRSLLCVKDADNDEKVIRKPWENFEVDVLKALEDIVVSTKHKQRVLTRTSNHYEKFVDGKKQKVSQKGKSYAVRLSLHKDTVWGQVNLRRQEGVSLLTALKDPQRVVDKALRKKIVELQAQGKKPKDIKKYFAENADVWPETQGKVAVWHFTDDEPTKTYATRFISSLTELFDKISTREKAEEKIQSITDTGIQKILLAHLAECNYDVAEAFSPIGIERMNANIVALNGGKQHKPIKKVRRTESGSKFAVGASSGSRHKFVENAKGGNLFFAVYLAVSEDKNGNEVRKRQYETLPLRTVLDRLKQGLSPVPEVDEGGNRLLFSLCPYDLVYVPKEGENVGELTAERLDKERIYMFVSSSDSDAMFRPHRVAAPIVEKKEFTLHNKMSKAVTGEMIKEVCIPLEVDRLGDITKKRIGDD

SEQ ID NO: 1754 - protein, 1489 aa, unidentified
  REGION 1..1489: note = Description of Unknown: uncultivated organism with predicted taxonomy: Bacteroidales
  REGION 1..1489: note = MG22-100 effector
LGPNSIGWAVVQTELDDEKKDTLYSSGKILMSGSRIIPMSADIMNNFQKGVSVSQTAERTRYRLVRRQYERFHLRRERLNRVLMTMGYLPEHYAEQLDRYGKLPKGKEPKLAWRMAKDGKPEFIFREAFLEMVDEMRAVHPDLQQIPYDWTIYYLRKKALSRALRPEELAWVLHSFNQKRGFFAVRGQVDTDAEAPDKLQEYHKARLASVVDTGEKNRGNAVYRLCFDDGVEFEVALRRMTLQVGDDVEYIKTTKLDDDGMPKQTKQGKPDISYKIPGANDAWTLNKLRAEYTIDQSQSTVGEYIYKALLTNPQQKIRGELVRTIDRHFYRDELRRILQAQKPHHPLLQDQEMLDECLQMLYPHNESHSNSMRGRDLCALLTDDIIMYQRPLKSKKSLIAGCKYETHRYVDKDGKMKTEGVKCASKSHPLFQEFRLWQFIENLRIIQRKDTSNGRVRYDVDVTEQFIHDYEGRAALFEWLQTRSKIKQDALLKHFGMKEEGFRWNYVEDREYPAGETRAEMLKRLKKAGVDADFLTAERELALWEILYSVNGQEELGKALRTFARKHQLDEEKFAQNFCTIKPYPSDYCAFSVKALKRLLPLMRCGKYWTAEQIDASTAQRIQKLIDGEYDEQITEQVRNATATLRSVGDYQGLSTWLASYVVYGRHSEASDTKKWETPEDMEADIKAFRQHSLRNPIVEQVCLETLRTVHDIWKEVGHIDEIHVEMGREMRATAKEREERSARQLRNEQTNLRIKALLQEFMNPALEIEDVRPYSPSQQELLHIYEETVLEQEAGNIDDDIREIIRKFTQTEASKRPTEGEVRRYKLWLEQRYRSPYTGKNIPLGKLFTPAYQIEHVIPQSVYYDNSYNNKVICEAEVNLLKGNMLGMAFIKEHAGEIVPLSLGGEVEILKPDTYREFVEEHYKGRKRQIMLSEEIPTEFTSRQMNDTRYIARFIMGELSKLVRQQNADGTYEEEATSKNVIVLNGAITDKLKKDWGLVDVWNGIIAERFKRLNQMEGGTRFGHEENKDGKRYFQIEMPLELQRGFNRKRIDHRHHAMDAIVIACATRAVVNYLNNDHAHDGAGREDVKRAVSRKRDQTWLINKPWPTFTEEAKEELKQMVVSFKQNLRVINKTSNHYEKYNTATGKKEKFRQHHGDNWAIRKALHKESVFAQVNLRSIQTVNFKTAYEQVLRIVDKRLKRAIRDAKNRYAMRCTDKQILKYLQGMPEWKDYDFKRIAIYAFSNDQEKTQMCAIRKRLDDSFDKKKIASVTDTGIQQILLHHLEENGNNPKEAFSPEGIERMNANIAALNNGKAHQPIYVVRISEPMGQKFAVGHIGNRSKKFVEAAKGTNLFFAIYDLGGDRRGYTSLPFREVVERQKLGYPTAPETDEEGHRLLFVLRPGDLVYVPTEEQLQSRIDARAIDKSRIYKMVSCTGNECHFIPANTASFIRDKYEYGSLNKLARAITGEMIKEICIPLEIDRLGRYRIK

SEQ ID NO: 1755 - protein, 1215 aa, unidentified
  REGION 1..1215: note = Description of Unknown: uncultivated organism with predicted taxonomy: Bacteroidales
  REGION 1..1215: note = MG22-101 effector
RIPNADDAWTLNKLRAEFTIDQSHSTVGQYIFNAILRNPQQKIRGELVRTVDRRFYRDELRRILEVQIPLHPALQDREKLEECLLALYPNNEAHRRSMQGRDFKALLMDDIILYQRPLKSKKSLIGECKYETHTYINKEGKRETIGLKCASRSNPLFQEYRLWQFLENLRILKRKTLDGNHYRTDVDVTTLFLRTDESYTSLFDYLRSRAEIDQKTLLKFFKLKEEDYRWNYVEERKYPTSETRAEMLKRLKKAGVPTEFLTHELEMALWEILYSVSGQSELEKALRKFAEKNNLDQETFYQCFRTIKPYSADYCAFSTKALRRLLPLMRRGHYWNYNAIDPLTQQRIARLINGEEDTTISNRVREKAETLRTETDYQGLPTWLASYVVYGRHSEASEIKKWASPEEMDRDIRCFRQHSLRNPIVEQVCLEALRTVRDIWKEIGSINEIHVELGREMRATAKERESRHNRQLENEQTNLRIKALLQEFMNPEFGIEDVRPYSPNQQELLRIYEDTVLSQEAGRVDEPIREIIRKFSQTDAAKRPTTAEVLRYKLWLEQKYRSPYTGEPISLSKIFTSAYQIEHVIPQSVYYDNSYSNKVICEAEVNLLKGNMLGMPFIMQHAGEKVQCSVGNIVTISTPEAYRAFVEEHYKGKKQKILLSEEIPTNFTARQMNDTRYISRFIIGELSKLVREHNPDGTLEQEAVSKNILILNGAVTDKLKKDWGLVDVWNGIIAPRFRRLNAMEGSQRFGHEAMKDGKRYFQIEMPLELQRGFQRKRIDHRHHAMDAIAIACATRNVVNYLNNDHSHEGAGREDIKRAVSSKRSGQWLVNKPWSTFTQEARKQLQQIVVSFKQNLRVINKTSNRYVRYNPQTRKKETIVQQKGDNWAIRKPLHKESVFGRVNLRTQKAVNFKTAYANIERIVDKRFKHAVLAAIKRYGGKCTDKQVLKYMQGMPEWKDFDFKKVQIYVFSNDDVKTQTSAIRKRLDDSFDKKKILTITDTGIQRILLRHLEQNGNNPKEAFSPEGIVRLNESMLELNGGKPHLPIFAVRISEPLGNKFSVGMRGNRSKKFVEAAKGTNLFFAIYQQEDGRRLYRSVPLNEVIERQKQGLSSAPEHDENGNALLFVLSPGDLVYLPTKEERNSRIDVQAIDKTRIYKMVSCSGNQCQFIPINVASAIVDKYEFSSANKMERAITGEMIKELCLPIEVDRLGRYRLK

SEQ ID NO: 1756 - protein, 1377 aa, unidentified
  REGION 1..1377: note = Description of Unknown: uncultivated organism with predicted taxonomy: Clostridia
  REGION 1..1377: note = MG23-1 effector
MGKKMYVGLDMGTSSVGLAVTDENYKLYRVKGKDYWCSRTFDEADTAVERRTNRISRRRRQREVARLGILRELFADEIAKVDPGFYARLDESKYHLEDRDNKQPYAIFADKGYTDKEYYARYPTIFHLRSELIDSDKPHDVRLVYLALANMFKHRGHFLNDSLSSDKPLADTTEAYSNFYYTASELSISFPAEAQPDSIDAASLEALLGDKGVSRTDKAKNICQYLAIDKKTSKPLYTLINLICGLNIKLIDIYGAELIDEENKKLSIGFRDSSYEQQDADGRKLLGENYAIIDAAKELHDIGLLSSIMKGYKYLSQARVALYEEHAADLKKLKSVLKRYDKDSYRKVFRSMDEGSYSAYIGSVNSGTKIRRGVKDGSADTFCKSMKKVLEKLPKDDMDVQYLLAKATDSSLLPKQLTFENGVIPNQLHAAEMKAILRQAEKYLPFLLEKDEYDLTVSQRIIQLFTFRIPYYVGPIGKNHAGEKGYNIWATRRAGEEDGRVYPWNFEQKIDTKAAAEKFIERMVRHCTYINGERTLPKCSLLYEKYMVLNELNNLRINGEKPAVSVKQDIYTKLFCRGKRVTMKMLKDYLYNSSLIPSKEDVVISGIDNGFNTSLTSVGKFRGILGDAVFADSNQKMIEDIIFWGTVYGNDKKFLKERIEEVYGDRLNHDEIKRILGFNFNDWGNLSREFLELEGECECGRCSIIQAQWNTNHNLMELLSDQFTFKNELEKKTGSAEKALADWSIDDLEGKYLSAPVKRMIWQTIKMLREVCEVTGRTPDKVFVEMAREDGEKGARTVSRKKKLLDLYDAIKHEERELAKVFSDEIDSKTEADFRSKKLYLYYLQQGRCMYSGDIIHLSDLMNDNLYDIDHIYPRHFIKDDSLENNLVLVKKQINNRKQDTFPIERSIQEDMRPFWKSLADSGFISAEKYKRLTRRDAFTDEEKAAFISRQLVETRQGTKAIADILKQALPDTEIVYVKAGLVSDFRQKFELYKVRALNDTHHAKDAYLNIVVGNTYSTKFTNNPLNFIKAGAKRPQDNQFKYNMDKIFDYNVISRGERAWIAGSDGSICTVKKFMSRNTVLITRKAKEVHGALSNKATIWGKNVAKPGAYLPVKSTDLKAQDVTKYGGITSIANSGYTLAEYKVNGKTTRSLEALPVYLGRAEQLTEKTVVDYLSSSLQESSKKKIEDIQVRKLFIPQGSKVKIDGFCYYLGGKTGDSIYLNNAVPLYLSSTSEEYLRKLLKAVENNNYNERDKNGQIILTAPKNVQLLSSIFDKLRSKPFSNNKWNIYFSIVNGKETKVEQLFSKLSIDKQAEVISQIVIWINSSRQNVNLSLIGGSAHSGTQALSKTVSRLNECMLISQSITGIYEHSVDLLTI

SEQ ID NO: 1757 - protein, 1375 aa, unidentified
  REGION 1..1375: note = Description of Unknown: uncultivated organism with predicted taxonomy: Firmicutes
  REGION 1..1375: note = MG23-3 effector
MSEKIPYYIGLDMGTNSVGWAVTDENYKILRGKGKDMWGVRLFDEAQTAAERRTNRVSRRRRQREVARIGLVKEYFADALNAVDPGFMVRLEESKYWLEDRSEENQQKFALFNDKDFTDKEYYTVYPTIFHLRKELIESTEQHDVRLVYLAILNLFKRRGHFLNKSLESDGETMSMAEAYAALVDEAAALEITLPMPIDAKKLEEVLSQKGVSRKFVEQDTNEFFGFSKKASEARELVKLMCGLTGKMRNIYGEELIDDDNKKLALSFRSNDYEEKMNEVAELVGDENMRLLEAVKEVHDIALLANILSGEQYLSVARVKQYNKHKEDLQQLKRVLRTYDKAAYKKMFRVMGKDNYSAYVGSVNYKEHKERRNAGAGKDGESFRKAVEKVIDALPEEAQLDQDVIEIREKIKNEAFLPKQLTSANGIIPNQVHLRELKRILENASGYLPFLNEIDESGLTVKERIAQLYEFQIPYYVGPLSKQNSKNAWANRRPGEEKGRILPWNFEQKIDVNQAAEDFIKRMVRHCSYLDAEFTLPKQSLMYEKYMVLNELNNLRINGEKPTVLQKQQIYNELFGKGKRITQKALINYLKDEGIVEKDSEPIISGIDGDFKASLSTFGKLRTVLKEEARKDSSQEMMDQIVFWATVYGDDKRFIRARIEEHYSEILDDHAIKQLLGMKFNGWGNLSKAFLEMEGASKEDGVYRSVIQALWETNDNLMELLGQRYTYKEELEKRVQTKEKPLAEWTIDDLDGMYLSPSVKRMVWQTLKIIREITEVRGSAPSKIFVEMARDDAQTKAKNKGKRTKSRKDFLLECYKDDKAWKDELTSVDDGELRAKKLYLYYLQMGRCMYSGEAIDLASLMSGNTMYDIDHIHPRHFVKDDSLENNLVLVKKDKNAHKSDNYPLESEIRNKQFGFWKSLLDKGLITKTKFTRLIRSEDFSPEELAGFINRQLVETRQGTKAITKILQQAFPDDDMEVVFTKAGVAAKLRHDFDLVKVRCVNDTHHAHDAYLNIVAGNVYNAKFTSNPLRFIKNEVKKGNASYHMDKIFFRDVKRGNKLVWQAPNNEEKTPGTIAIVREQLARRTVLQTRRSYMAHGILSDATIYSKDTAKTESYRPVKSSDERLSDVKKYGGMTSIKNTAYALVEYTVKGKTIRSLEGVPIYLGNCSKDDKKLLQYLQEILQRENKNKQVENVSVRMYPIRQRSYLKVDGYYYYLGGATGSSVYLLDAMSVYLSKEDMGYVKKVEKAVAQQRYDECTKEGEFVLTREKNMDLYNKLVDKFSHGVFIKRKASILKTLEEGIDVFSELNIEKQCGIIMQIFAWITTSQQNVNLTDIGGVAHAGTLLISKKLSTSREALLIEQSLTGLWSKTTDLLTV

SEQ ID NO: 1758 - protein, 1371 aa, unidentified
  REGION 1..1371: note = Description of Unknown: uncultivated organism with predicted taxonomy: Clostridiales
  REGION 1..1371: note = MG23-4 effector
MEERKMYWGLDLGTNSVGWAVTDQNYQLMRAKGKDLWGARLFDRADTSAERRGYRVSRRRRQREVARCGVLKEYFYEEISKMDAGFFVRLEESKFWKEDRSEGNQQKYALFADANFTDKDYFEKYPTIFHLRKELLETSEAHDVRLVYLALLNMFKHRGHFLNTALSAEETETDMNAAYQELVDTAGYFDIAFDPQLDAREIENILGEKGISRSRILEKLSTYMGISKSDKAAYELLKLVCGNAGKLVNIYGSEILGEENKTLSISFRDSNYEEKETQVKELVGDDYFELLLAAKAVHDIGLLANILKGHAYLTYARVESYEEHKKDLQLLKCVLKKYNPEGYDKMFRVMEPGNYSAYIGSVNSKESGKVRRNEGKGRSREDLYKTIRKLLGQCPQDDQDVALILSKIESETFLPKQLTADNGVIPNQVYAKEMRKILKNAATYLPFLKEKDESQLTVAERIIQLFSFRIPYYIGPLGQEHLDEKGYNEWARRIAPGKVYPWNLEEKFDTKEAAEKFIERMVRHCSYLTQEKTLPKNSLLYEKFMVLNELNNLKIHGEKITVEQKQDLYNSLFIKGKRVSIAQIVRHCQLSGWVEKDDTDFLSGIDLTGFKASLSSVGKFRGVFGEGFFNDKQTAMAEQIIFWATVYGNDKSYLRERIEEEYLELLDEKQIKRILGFKFEGWGNLSREFLYLRGTSRQDSERSVIMALWETNDNLMELLSERYTYKEALQEQIKEKEKTLEEWTIEDLGGMYLSAPVKRMLWQTMKILLELKQTLGQTPDRVYVEMSREDGEKGERKDSRKKKLLDLYSALKGEEKAWRKEIEDRPEADFRIKKLYLYYRQMGKCMYTGETIELADLFNDNLYDIDHIYPRHFVKDDSIENNLILVKKQKNARKGDSYPIEREIQRARYQLWKMLADKNFISREKHQRLIRTTPFSEEEKAGFISRQLVETRQGTKAIIQILRQIFPDTMVVFSKAGEVSAFRHKFNLEKVRCLNDFHHAQDAYLNIVVGNAYYVKFTANPINFIREAEKNPQKDLYKYHMDKFFEYTVQRGDETAWIGTKDEKNSTIHIVKKVMARNTPLITKRCYTVHGGITRKDTIYNKETAKGQGYIAVKGSDPRLCDVTKYGGRTSINNMFYTLASYWVKGKSVLSLEAIPGYLGNAEHISDETLLRYLQDSLEKENPGKVISDLQIKYRCIRYKSLLKIDGFYYYIVGKTGKRIYLESAVPLILNNEDAIYLKKIEKAVSGQYFEEKREGQLIITEERNQKLYDILLEKLTDGIYRNKKASLQTILQEGREKFIRLSIPNQCQILMNLVEWFQLSCVTADMKEIGGSANSGKCLMGKKISDCSEMILITQSATGLQERRIDLLKL

SEQ ID NO: 1759 - protein, 1385 aa, unidentified
  REGION 1..1385: note = Description of Unknown: uncultivated organism with predicted taxonomy: Firmicutes
  REGION 1..1385: note = MG23-5 effector
MDKVKQAPYYIGLDMGTSSVGWAVTDEDYKILRGKGKDMWGVRLFDEAKTAAERRTFRVARRRRQREVARIGLLREYFADAIHEVDPGFFHRLEESKYYLEDRDDDNQQKFALFNDKNFTDKEYYAQYPTIFHLRKELIESSDPHDVRFVFLAILNLFKRRGHFLNKGLSADGGESSMAEAYETLVEEARNQEIILPEALDTQALEACLGEKGLSRSTIKENVMELLAVSKKDKAATELISMMCGLMGTLQKIYGSDLIDDEHKGMKISFRAMNYEEEAAEIVALIGEDNFALLEAVKEVHDIGLLAHILEGEQYLSMARVKQYDAHHEDLLQLKRVLKKYDKDEYDKMFRMMGQDNYSAYVGSVNYNENKVRRNGGKGKDVEAFYKNVKKVMDKLPEIAQNDPDVKDIRTKIEGEAFLQKQLTASNGIIPNQVHTRELKAILENASGYLPFLNEKDDSGLTVKERILELYSFQIPYYVGPLGQQHEGEKGYNVWAKRRPGEAKGRILPWNFEQKIDVNQAAEDFIKRMVRHCTYLKGENTLPKQSLLYEKFMVLNELNNLRIRGEKPSVEVKQEIYETLFMTGKRVTRKQLLKYLVANGLLNEDDGDMVSGIDQDFKASLSSLNKFKGVLGDAAVYDSNRAMIEQIIFWATIYGDDKHFLKNRIKEHYGDSLDNQQIKRICGMKFNGWGNLSKTFLELQGASKEDGVYRSIIQSLWETNDNLMQLLSERYTYSEELEKMIGDAEKPLSEWKIEDLDDMYLSPSVKRMVWQTLKILNEIVEVRGYAPDKIFVEMARDSAQTRARNKGKRTQSRKEFLLNVYKEDKEWRKEIQSCEEIKFRKKKIYLYYLQHGKSLYSGKTIDFDTLLSDNDAYDIDHIYPRHFVKDDSLENNLVLCLKSENAKKGDQYPLRKTFDSAVLSSQEGVWKSLLKQKVITKEKYDRLVRTADFTIDELAGFINRQLVETRQGTKAITQILKRVFKNEAVEIIFTKAELISDFRRIFDLPKVRCVNSTHHAHDAYLNIVVGNVYNAKFTKHPRHFIEECQRKGSYDYNMYRMFDYDVKCGSKIVWCGSKITTCGKGTISTVKKQLQKRSVLLTKKSFMKHGKLFAANNTGKESIKSDAYYSDKTTDIRLLDVQKYGGKSDISNTAFALVEFYSKGKPVRILERIPLYLNITNNNDENLNNYISKKIKKDLKNVEISEMSIRMYPIRQYVKLKINGYFYYLSGSDDDTRVSLRDAVTFYLSDEEMAYVKYIEKAVETQNFYRQKNKKAVLSEAGNIKLYEVLIEKLQQGIFLKKKISIVPVLLEGKEKFKALPLEKQCYIIMQIFAWITSNQQGVNLKDIGGASNAGKLKMSKNISDLSEAILIEQSATGLYERRIDLLTV

SEQ ID NO: 1760 - protein, 1382 aa, unidentified
  REGION 1..1382: note = Description of Unknown: uncultivated organism with predicted taxonomy: Clostridiales
  REGION 1..1382: note = MG23-6 effector
MDKVKQAPYYIGLDMGTSSVGWAVTDEDYKILRGKGKDMWGVRLFDEAKTAAERRTFRVARRRRQREVARIGLLREYFADAIHEVDPGFFHRLEESKYYLEDRDDDNQQKFALFNDKNFTDKEYYAQYPTIFHLRKELIESSDPHDVRFVFLAILNLFKRRGHFLNKGLSADGGESSMAEAYETLVEEARNQEIILPEALDTQALEACLGEKGLSRSTIKENVMELLVVSKKDKAATELISMMCGLKGTLQKIYGSDLIDDEHKGMKISFRDMNYEEEAAEIVALIGEDNFALLEAVKEVHDIGLLAHILEGEQYLSMARVKQYDAHHEDLLQLKRVLKKYDKDEYDKMFRMMGQDNYSAYVGSVNYNENKVRRNGGKGKDVEAFYKNVKKVMDKLPEIAQNDPDVKDIRTKIEGEAFLQKQLTASNGIIPNQVHTRELKAILEKASGYLPFLNEKDDSGLTVKERILELYSFQIPYYVGPLGQQHAGEKGYNVWAKRRPGEAKGRILPWNFEQKIDVNQAAEDFIKRMVRHCTYLKGENTLPKQSLLYEKFMVLNELNNLRIRGEKPSVEVKQDIYETLFMTGKRVTRKQLLKYLAANGLLNEDDGDMVSGIDQDFKASLSSLNKFKGVLGDAAVYDSNRAMIEQIIFWATIYGDDKHFLKNRIKEHYGDSLDDQQIKRICGMKFNGWGNLSKTFLELQGASKEDGVYRSIIQSLWETNDNLMQLMSERYTYTEKLEKMVGDAEKPLSEWKIEDLDDLYLSPSVKRMVWQTLKILNEIVEVRGYAPDKIFVEMARDSAQTRARNKGKRTQSRKDFLINAYKEDKEWRKEIESRDEAEFRIKKLYLYYVQMGRCMYSGEAIDLHALMAGNEQYDIDHIYPRHFVKDDSLENNLVLVKKTINAHKSDTFPLEAELRKKQYAFWRSLLDRGLITQNKFNRLTRATGFSNEELAGFINRQLVETRQGTKAITQILKEAFKNDDTRIVFTKAEVTADFRHKYDLPKARSVNNLHHAHDAYLNIVAGNVYDAKFTSHPINFIKECRNKGVFNYNMAKVFDYNVKRGNRYVWIAQNDGMDMPLTIERVKNQLARNTILMTRRSYMAHGGISNKATIYGKDTAKPGSYLPVKSSDSRLSDVTKYGGITSVLNTAYALVEYKVKGKMVRSLESVPLYVDATGKDDEKLLNYLRESLQFENKKNLVENVSVRLYPVRQRSLLKLDGYYYHLGGGAGSMFYLIDAVPMYLPQKVVMYIKKIEKAMETQRYDEINSKNEVIITKENNAETYDLLLHKLTKGIYSHRKASIINILVNGEEKFDSLNLEAQCSVILKIFAWINSSQQTVDLKDIGGSANSGFLKTSRKLSNSTEAILIEQSATGLYERRIDLLTV

SEQ ID NO: 1761 - protein, 1371 aa, unidentified; identical to SEQ ID NO: 1758
  REGION 1..1371: note = Description of Unknown: uncultivated organism with predicted taxonomy: Clostridiales
  REGION 1..1371: note = MG23-7 effector

SEQ ID NO: 1762 - protein, 1371 aa, unidentified
  REGION 1..1371: note = Description of Unknown: uncultivated organism with predicted taxonomy: Clostridiales
  REGION 1..1371: note = MG23-8 effector
MEERKMYWGLDLGTNSVGWAVTDQNYQLMRAKGKDLWGARLFDRADTSAERRGYRVSRRRRQREVARCGVLKEYFYEEISKMDAGFFVRLEESKFWKEDRSEGNQQKYALFADANFTDKDYFEKYPTIFHLRKELLETSEAHDVRLVYLALLNMFKHRGHFLNTALSAEETETDMNAAYQELVDTAGYFDIAFDPQLDAREIENILGEKGISRSRILEKLSTYMGISKSDKAAYELLKLVCGNAGKLVNIYGSEILGEENKTLSISFRDSNYEEKETQVKELVGDDYFELLLAAKAVHDIGLLANILKGHAYLTYARVESYEEHKKDLQLLKCVLKKYNQEGYDKMFRVMEPGNYSAYIGSVNSKESGKVRRNEGKGRSREDLYKTIRKLLGQCPQDDQDVALILSKIESETFLPKQLTADNGVIPNQVYVKEMRKILKNAATYLPFLKEKDESQLTVAERIIQLFSFRIPYYIGPLGQEHLDEKGYNEWARRIAPGKVYPWNLEEKFDTKEAAEKFIERMVRHCSYLTQEKTLPKNSLLYEKFMVLNELNNLKIHGEKITVEQKQDLYNSLFIKGKRVSIAQIVRHCQLSGWVEKDDTDFLSGIDLTGFKASLSSVGKFRGVFGEGFFNDKQTAMAEQIIFWATVYGNDKSYLRERIEEEYSELLDEKQIKRILGFKFEGWGNLSREFLYLRGTSRQDSERSVIMALWETNDNLMELLSERYTYKEALQEQIKEKEKTLEEWTIEDLGGMYLSAPVKRMLWQTMKILLELKQTLGQTPDRVYVEMPREDGEKGERKDSRKKKLLDLYSALKGEEKAWRKEIEDRPEADFRIKKLYLYYRQMGKCMYTGETIELADLFNDNLYDIDHIYPRHFVKDDSIENNLILVKKQKNARKGDSYPIEREIQRARYQLWKMLADKNFISREKHQRLIRTTPFSEEEKAGFISRQLVETRQGTKAITQILRQIFPDTMVVFSKAGEVSAFRHKFNLEKVRCLNDFHHAQDAYLNIVVGNAYYVKFTANPINFIREAEKNPQKDLYKYHMDKFFEYTVQRGDETAWIGTKDEKNSTIHIVKKVMARNTPLITKRCYTVHGGITRKDTIYNKETAKGQGYIAVKGSDPRLCDVTKYGGRTSINNMFYTLASYRVKGKSVLSLEAIPGYLGNAENISDETLLRYLQDSLEKENPGKVISDLQIKYRCIRYKSLLKIDGFYYYIVGKTGKQIYLESAVPLILNNEDAIYLKKIEKAVSGQYFEEKREGQLIITEECNQKLYDILLEKLTDGIYRNKKASLQTILQEGREKFIRLSIPNQCQILMNLVGWFQLSCVTADMKEIGGSVNSGKCLMGKKISDCSEMILITQSATGLQERRIDLLKL

SEQ ID NO: 1763 - protein, 1371 aa, unidentified
  REGION 1..1371: note = Description of Unknown: uncultivated organism with predicted taxonomy: Clostridiales
  REGION 1..1371: note = MG23-9 effector
MEERKMYWGLDLGTNSVGWAVTDQNYQLMRAKGKDLWGARLFDRADTSAERRGYRVSRRRRQREVARCGVLKEYFYEEISKMDAGFFVRLEESKFWKEDRSEGNQQKYALFADANFTDKDYFEKYPTIFHLRKELLETSEAHDVRLVYLALLNMFKHRGHFLNTALSAEETETDMNAAYQELVDTAGYFDIAFDPQLDAREIENILGEKGISRSRILEKLSTYMGISKSDKAAYELLKLVCGNAGKLVNIYGSEILGEENKTLSISFRDSNYEEKETQVKELVGDDYFELLLAAKAVHDIGLLANILKGHAYLTYARVESYEEHKKDLQLLKCVLKKYNPEGYDKMFRVMEPGNYSAYIGSVNSKESGKVRRNEGKGRSREDLYKTIRKLLGQCPQDDQDVALILSKIESETFLPKQLTADNGVIPNQVYAKEMRKILKNAATYLPFLKEKDEFQLTVAERIIQLFSFRIPYYIGPLGQEHLDEKGYNEWARRIAPGKVYPWNLEEKFDTKEAAEKFIERMVRHCSYLTQEKTLPKNSLLYEKFMVLNELNNLKIHGEKITVEQKQDLYNSLFIKGKRVSIAQIVRHCQLSGWVEKDDTDFLSGIDLTGFKASLSSVGKFRGVFGEGFFNDKQTAMAEQIIFWATVYGNDKSYLRERIEEEYSELLDEKQIKRILGFKFEGWGNLSREFLYLRGTSRQDSERSVIMALWETNDNLMELLSERYTYKEALQEQIKEKEKTLEEWTIEDLGGMYLSAPVKRMLWQTMKILLELKQTLGQTPDRVYVEMSREDGEKGERKDSRKKKLLDLYSALKGEEKAWRKEIEDRPEADFRIKKLYLYYRQMGKCMYTGETIELADLFNDNLYDIDHIYPRHFVKDDSIENNLILVKKQKNARKGDSYPIEREIQRARYQLWKMLADKNFISREKHQRLIRTTPFSEEEKAGFISRQLVETRQGTKAITQILRQIFPDTMVVFSKAGEVSAFRHKFNLEKVRCLNDFHHAQDAYLNIVVGNAYYVKFTANPINFIREAEKNPQKDLYKYHMDKFFEYTVQRGDETAWIGTKDEKNSTIHIVKKVMARNTPLITKRCYTVHGGITRKDTIYNKETAKGQGYIAVKGSDPRLCDVTKYGGRTSINNMFYTLASYRVKGKSVLSLEAIPGYLGNAENISDETLLRYLQDSLEKENPGKVISDLQIKYRCIRYKSLLKIDGFYYYIVGKTGKRICLESAVPLILNNEDAIYLKKIEKAVSGQYFEEKREGQLIITEECNQKLYDILLEKLTDGIYRNKKASLQTILQEGREKFIRLSIPNQCQILMNLVGWFQLSCVTADMKEIGGSVNSGKCLMGKKISDCSEMILITQSATGLQERCIDLLKL

SEQ ID NO: 1764 - protein, 1389 aa, unidentified
  REGION 1..1389: note = Description of Unknown: uncultivated organism with predicted taxonomy: Clostridiales
  REGION 1..1389: note = MG23-10 effector
MEINLENNAEEIIMGKKMYIGIDMGTSSVGMAVTDENYTLYRVKGKDFWTSRLFKEANTAAERRTNRVARRRRQRETARMGILRELFSEEINKVDEGFFARLDESKYHIEDRVVKQKYALFADKGYTDKEYYKEYPTIFHLRNELLHPQKNSYDVRLVYLAIANMFKHRGNFLNETLDIDKITANAVDVYSQLVEELDLYCIQMPVSIDIGKLMNIIGENGISRSKRLENASKYLGITKKDKQSYEILKLICGLKGILYNIYGENVIDEENKKFSLSFTGSIYEDSEAQAKDILGDEYFELIEIIKELHDICVLSGIIKGHKFLSEARVELYEEHKKDLDMLQQVLKKYDKNAYDEMFRVMKEGNYSAYVGSVNARGKNKKIRRNVGEGKKGKNGRSQETFYKYVKTTLKNFPDDDENIKNILFKIENETFMPKQLTASNGIIPNQLHAAEMKAILTNAEKYLPFLLDKDESGLTVSQRILELFKFHIPYYVGPLGAAGKNVWAKRRKGEEKGRIYPWNFEKKIDTQEAAEEFIKRMVRHCSYIKGEHTLPKQSLLYEKFMVLNELNNLKINGTKPDVFVKRDIYENLFKTGKRVTLDKLKSYLYNNSFIDSKEVMITGIDGGFNSSLTSVGKFIGILGEDLFTDSNQAMVEQIIFWGTIYGSDKKFLKNRIEKEYKDRLTPKQIKRILGFKFNGWGKLSKLFLELKGSCECGECSIIQALWQTNHNLMELMSDQYDFKTNLMELSEETIKPLSEWTIDNLEDYYMSAPVKRMVWQTVKMLNETCELTGRLPDKIFVEMPREHESGNERKASRKKKMLDLYKAIKSEQKQWAEHMIAEIDKSDEADFRIKKLYLYYIQQGKCMYSGDTIDLDLLLKNNNIYDIDHIYPRHFIKDDSIDNNLVLVKKEINNHKSDKYPLESDIREDMSGFWKYLCEKKFITKEKYNRLMRTEKFSAEEKAAFVNRQLVETGQGTKVITQILKQAFPDTQVVFVKARMVSDFRHEFGINKVRELNDTHHAKDAYLNIVVGNTYYTKFTNNPINFMKNAEKNPEDVQYKYNMDKIFRYNVIRNGETAWIADNGVTKQHVIKTINRNTVTITRKTEEVHGALSNKVTVWSSKLAKKNPDAYMPVKTTDEKACDVTKYGGITAIANSGYTLVEYNINGKMIRSIEALPVYLGRKNMLTEDKIKEYLHEKIRKEYKNKTVTDLKVCILFIPQKSKVCVDGFNYYLGGVTGNSIYLSNAEPLYLSKEDEEYLRKIIKAVGKGYYEETDENGQIIITGERNMKFFNTLGSKLNARPYNNNRWNIYKIMENKEEIFAGLSIEKQCYVINQIISWINSKTQNVDLSDIKGSSHSGTMPLNKKISECSQFELIYQSVTGMYEKRTDLLKL

SEQ ID NO: 1765 - protein, 1368 aa, unidentified
  REGION 1..1368: note = Description of Unknown: uncultivated organism with predicted taxonomy: Butyrivibrio sp. CAG:318
  REGION 1..1368: note = MG23-11 effector
MDKKMYVGIDMGTNSVGMAVTDEEYNLYRVKGKDLWCSRLFTEADTAAERRTNRISRRRRQREVARQGVLRKLFADEINKVDEGFFARLDESKYHLEDRDSEQKYTLFTDTGYTDKDYFKDYPTIFHLRNELLHPVKDSYDVRLVYLAIANMFKHRGNFLNESLDADKITSSADEAYRSLVETAMMYSIEFPENINVKKFIDIIGENGVSRSKHLENVCEYLEITKKDKQAYEILKLICGMSGVLINIYGEDVIDEENKKFSICFRDSNYEEKEGEALELLGDEYFELLETIKEIHDIGMLAGIIKGHKYLSEARVDLYEQHKKDLDMLQHVLKKYDMKAYDEMFRVMKAGNYSAYVGSVNAHSKKIRRNGGDGRTREEFYKNVKAVLKKFPEDDEEIKTILSEIDSETFMPKQLTASNGVIPNQLHVSELKAILTNAEKYLPFLLDKDESGLTVSERIVELFRFHIPYYVGPIGAQGENVWAKRRPGEENGKVYPWNFEQKIDTQSAAKEFINRMVRHCTYLSGERTLPKQSFLYEKFMVLNELNNLRIDGKKPSVQVKQGIYEELFKTGKRVTLNQLIKYLYNKSIIASKEDVVIEGIDGGFNASLTSVGKFRGVLGDELFTDANQAMAEEIIFWGTVYGNDKKFLKDEIESKYGTVLSKDQIKRILGFKFNGWGNLSKTFLELQGSCECGDCSLIQALWETNHNLMELLSEQYGFKKELDALASNVEKPLTEWTIDDLDNKYLSAPVKRMVWQTIKMLREACELTNKEPDRVFVEMPREHGKENDRKASRKKKLLDLYSTLKREDKTWAELKIREIEGRTEADFRIKKLYLYYMQQGKCMYSGEKIELNDLFNNNLYDIDHIYPRHFIKDDSLENNLVLVKKEINNHKSDNYPLESDIRKNMNKFWKSLRDKNFISKEKYSRLIRTEEFTDEEKAAFISRQLVETRQGTKAITQVLKQAFPNTQIVFVKAGIVSDFRKKFDINKVRALNDTHHAKDAYLNIVVGNTYYTKFTNNPMNFIKDARKNPKNDFYRYNMDKIFDYNVIRNGEEAWIADNGKTKQHVLRIMKKNSVTITVKTEEYHGALSNKVTVWSKEKAKGNPDAYMPVKTSDTKAQDVTKYGGITSIANSGYTLVEYKVKGKKVRSLEALPAYLGRSNALTNEDIMQYISAALQKEYAGKEISDLSVRVPFVPQKSKVRVDGFEYYLGGKTGKSVYLSNAMPLYLSGNDEEYLRKIMKAIEIDNYEEIDKDSNAIITEEKNVALFDVLCVKLNSEPYINNRWNICKTLEGKEEIFKNLDIKKQCYVIGQIISWINSAMQNVNLKDVCGSEHAGTQTLNKKISESKECILIHQSVTGMYERKIDLLSI

SEQ ID NO: 1766 - protein, 1109 aa, unidentified
  REGION 1..1109: note = Description of Unknown: uncultivated organism with predicted taxonomy: Butyrivibrio sp. CAG:318
  REGION 1..1109: note = MG23-12 effector
LCLERSERNDKNYEEKEGEALELLGDEYFELLETIKEIHDIGMLAGIIKGHKYLSEARVDLYKQHKKDLDMLQHVLKKYDMKAYDEMFRVMKAGNYSAYVGSVNAHSKKIRRNGGDGRTREDFYKNVKAVLKKFPEDDEEIKTILSEIDSETFMPKQLTASNGVIPNQLHVSELKAILTNAEKYLPFLLDKDESGLTVSERIVELFRFHIPYYVGPIGAQGENVWAKRRPGEENGKVYPWNFEQKIDTQSAAKEFINRMVRHCTYLSGERTLPKQSFLYEKFMVLNELNNLRIDGKKPSVQVKQGIYEELFKTGKRVTLNQLIKYLYNKSIIASKEDVVIEGIDGGFNASLTSVGKFRGVLGDELFTDANQAMAEEIIFWGTVYGNDKKFLKDEIESKYGTVLSKDQIKRILGFKFNGWGNLSKTFLELQGSCECGDCSLIQALWETNHNLMELLSEQYGFKKELDALASNVEKPLTEWTIDDLDNKYLSAPVKRMVWQTIKMLREACELTNKEPDRVFVEMPREHGKENDRKASRKKKLLDLYSALKRENKTWAELKIREIEGKTEADFRIKKLYLYYMQQGKCMYSGEKIELNDLFNNNLYDIDHIYPRHFIKDDSLENNLVLVKKQINNHKSDNYPLENNIRKNMNEFWKTLREKNFISKEKYSRLIRTEEFTDEEKAAFISRQLVETRQGTKAITQVLKQAFPNTQIVFVKAGIVSDFRKKFDINKVRALNDTHHAKDAYLNIVVGNTYYTKFTNNPMNFIKDARKNPKNDFYRYNMDKIFDYNVIRNGEEAWIADNGKTKQHVLRIMKKNSVIITVKTEEANGKLSDINIVGKRYIKNADAYMPIKTSIAKMEDVTKYGGYGSISSAGYALVEYKVKGKKVRSLEALPVYLGRSNALTNEDIMQYISAAFQKEYAGKEISDLSVRVPFIPMESKVEIDGFEYYLGGKSTNQFYLKNAMPLYLPDNDEEYFRKIMKAIEIDDYKEVGKNGKAVITKENNMILFDTLSAKLKSEPYIHNRCNIYKILEGKEKIFKDLDIQKQCYVIVKIIDWIKSKTQGVDLTDIQGKKQSGTMKINKRISECRECILIHQSVTGMYERRIDLLSI

SEQ ID NO: 1767 - protein, 1389 aa, unidentified
  REGION 1..1389: note = Description of Unknown: uncultivated organism with predicted taxonomy: Clostridium sp. AF36-4
  REGION 1..1389: note = MG23-13 effector
MEINLENNAEEIIMGKKMYIGIDMGTSSVGMAVTDENYNLYRVKGKDFWTSRLFKEANTAVERRTNRVSRRRRQRETARMGILRELFSEEINKVDEGFFARLDESKYHIEDRDVKQKYALFADKGYTDKEYYKEYPTIFHLRNELLHPQKDSYDVRLVYLAIANMFKHRGNFLNETLDIDKITASADDVYSQLIEELDLYCIQMPVNINIGELINIIGENGISRSKRLENASKYLGITKKDKQSYEILKLICGLKGILYNIYGENVIDEENKKFSISFTDSNYEDEETQAKDILGDEYFELIEIIKELHDIGVLSGIIKGHKFLSEARVELYEEHKKDLDMLQQVLKKYDKNAYDEMFRVMKEGNYSAYVGSVNARGKNKKIRRNVGEGKKGKNGRSQEAFYKYVKTTLKNFPDDDENIKNILFKIENETFMPKQLTASNGIIPNQLHAAEMKAILTNAEKYLPFLLDKDESGLTVSQRILELFKFHIPYYVGPLGAAGKNVWAKRRKGEEKGRIYPWNFEKKIDTQEAAEEFIKRMVRHCSYIKGEHTLPKQSLLYEKFMVLNELNNLKINGTKPDVFVKQDIYENLFKTGKRVTLDKLKSYLYNNSFIDSKEVMITGIDGGFNSSLTSVGKFIGILGEDLFTDSNQAMVEQIIFWGTIYGSDKKFLKNRIEKEYKDRLTPKQIKRILGFKFNGWGKLSKRFLELKGSCECGECSIIQALWQTNHNLMELMSDQYDFKTNLMELSEETIKPLSEWTIDNLEDYYMSAPVKRMVWQTVKMLNETCELTGRVPDKIFVEMPREHESGNERKASRKKKMLDLYKAIKSEQKQWAEQMIAEIDKRDEADFRIKKLYLYYIQQGKCMYSGDTIDLDLLLKNNNIYDIDHIYPRHFIKDDSIDNNLVLVKKEINNHKSDKYPLESDIREDMSGFWKYLCEKKFITKEKYNRLMRTEKFSAEEKAAFVNRQLVETGQGTKVITQILKQAFPDTQVVFVKARMVSDFRHEFGINKVRELNDTHHAKDAYLNIVVGNTYNTKFTNNPINFMKNAEKNPEDVQYKYNMDKIFRYNVIRNGETAWIADNGVTKQHVLKTINRNTVTITRKTEEVHGALSNKVTVWSSKSAKKNPDAYMPVKTTDEKACDVTKYGGITAIANSGYTLVEYNINGKMIRSIEALPVYLGRKNMLTEDKIKEYLHEKIRKEYKNKTVTDLKVCILFIPQKSKVCVDGFNYYLGGVTGNSIYLSNAEPLYLSKEDEEYLRKIIKAVGKGYYEETDKNGQIIITGERNMEFFNTLGSKLNARPYNNNRWNIYKIMENKEEIFAGLSIEKQCYVINQIISWINSKTQNVDLSDIKGSSHSGTMTLNKKISECSQFELIYQSVTGMYEKRTDLLKL

SEQ ID NO: 1768 - protein, 1368 aa, unidentified
  REGION 1..1368: note = Description of Unknown: uncultivated organism with predicted taxonomy: Butyrivibrio sp. CAG:318
  REGION 1..1368: note = MG23-14 effector
MDKKMYVGIDMGTNSVGMAVTDEEYNLYRVKGKDLWCSRLFTEADTAAERRTNRISRRRRQREVARMGVLRELFAEEINKVDEGFFARLDESKYHLEDRDSEQKYTLFTDTGYTDKDYFKDYPTIFHLRNELLHPVKDSYDVRLVYLAIANMFKHRGNFLNESLDADKITSSADETYQQLIEMAMMYSIEFPKNINVEKFIDIIGENGVSRSKHLENVCEYLGITKKDKPAYEILNLVCGLRGVLINIYGNEVIDEENKKFSICFRDSNYEEKEGEALELLGDEYFELLETIKEIHDIGMLAGIIKGHKYISEARVDLYEQHKKDLDMLQHVLKKYDMKAYDEMFRVMKAGNYSAYVGSVNAHSKKIRRNGGDGRTREEFYKNVKAVLKKFPEDDEEIKTILSEIDSETFMPKQLTASNGVIPNQLHASELKAILTNAEKYLPFLLGKDESGLTVSERIVELFRFHIPYYVGPIGAQGENVWAKRRPGEENGKVYPWNFEQKIDTQSAAKEFINRMVRHCTYLSGERTLPKQSFLYEKFMVLNELNNLKIDGKKPSVQVKQGIYEELFKTGKRVTLKQLKKYLYNNSIIASEENVVIEGIDGGFNSSLTSVGKFRGVLGDELFTDANQAMAEEIIFWGTVYGNDKKFLKDEIESKYGTVLSKDQIKRILGFKFNGWGNLSKTCLELQGSCECGDCSLIQALWETNHNLMELLSEQYGFKKELDALACNVEKPLTEWTIDDLDNKYLSAPVKRMVWQTIKMLREVCELTNKEPDRVFVEMPREHGKENDRKTSRKKKILDLYSALKREKKEWAELKIREIEGRTEADFRIKKLYLYYLQQGRCMYSGEKIELNDLFNNNLYDIDHIYPRHFIKDDSLENNLVLVKKEINNHKSDNYPLESDIRKNMNEFWKSLREKNFISKEKYSRLIRTEEFTDEEKAAFISRQLVETRQGTKAITQVLKQAFPNTQIVFVKAGIVSDFRKKFDINKVRALNDTHHAKDAYLNIVVGNTYYTKFTNNPMNFIKDARKNPKNDFYRYNMDKIFDYNVIRNGEEAWIADNGKTKQHVLRIMKKNSVTITVKTEEYHGALSNKVTVWSKEKAKGNPDAYMPVKTSDTKAQDVTKYGGITSIANSGYTLIEYKVKGKKVRSLEALPVYLGRSNTLTDEDIMQYISNVLQKEYAGKEISDLSVRVPFVPQKSKVRVDGFEYYLGGKTGNYICLNNAMPLYLSGNDEEYLRKIMKAIEIDNYEEIDKDSNAIITEEKNAALFNTLSVKLNSEPYINNQWNIYKILEGKEEIFKDLDIQKQCYVIVKIIDWIKSKTQGVDLTDIQGKNQSGTMKVNKRISECKECILIHQSVTGMYERRIDLLSI

SEQ ID NO: 1769 - protein, 1366 aa, unidentified
  REGION 1..1366: note = Description of Unknown: uncultivated organism with predicted taxonomy: Butyrivibrio sp. CAG:318
  REGION 1..1366: note = MG23-15 effector
MDKKMYVGIDMGTNSVGMAVTDEEYNLYRVKGKDLWCSRLFTEADTAAERRTNRISRRRRQREVARQGVLRKLFADEINKVDEGFFARLDESKYHLEDRDSEQKYTLFTDTGYTDKDYFKDYPTIFHLRNELLHPVKESYDVRLVYLAIANMFKHRGNFLNESLDADKITSSADEAYRSLVETAMMYSIEFPENINVKKFIDIIGENGVSRSKHLENVCEYLEITKKDKQAYEILKLICGMSGVLINIYGNEVIDEENKKFSICFRDSNYEEKEGEALELLGDEYFELLEAIKEIHDIGMLAGIIKGHKYLSEARVDLYEQHKKDLDMLQHVLKKYDMKAYDEMFRVMKAGNYSAYVGSVNAHSKKIRRNGGDGRTQEEFYKNVKAVLKKIPEDDEEIKTILSEIDSETFMPKQLTASNGVIPNQLHVSELKAILTNAEKYLPFLLDKDESGLTVSERIVELFRFHIPYYVGPIGAQGENVWAKRRPGEENGKVYPWNFEQKIDTQSAAKEFINRMVRHCTYLSGERTLPKQSLLYEKFMVLNELNNLKIAGKKPSVQVKQDIYEKLFKPGKKVTLKQLQEYLCNNSIIASKEDIEGIDGGFNASLTSVGKFRGVLGDELFTDANQAMAEEIIFWGTVYGNDKKFLKDEIESKYGTVLSKDQIKRILGFKFNGWGNLSKTFLELQGSCECGNCSLIQALWETNHNLMELLSEQYGFKKELDALACNVEKPLTEWTIDDLDNKYLSAPVKRMVWQTIKMLREVCELTNKEPDRVFVEMPREHGKENDRKASRKKKLLDLYSALKRENKTWAELKIREIEGKTEADFRIKKLYLYYMQQGKCMYSGEKIELNDLFNNNLYDIDHIYPRHFIKDDSLENNLVLVKKEINNHKSDNYPLESDIRKNMNKFWKSLREQNFISEEKYSRLIRTEEFTDEEKAAFISRQLVETRQGTKAITQVLKQAFPNTQIVFVKAGIVSDFRKKFDINKVRALNDTHHAKDAYLNIVVGNTYYTKFTNNPMNFIKDARKNPKNDFYRYNMDKIFDYNVIRNGEEAWIADNGKTKQHVLRIMKKNSVTITVKTEEYHGALSNKVTVWSKEKAKGNPDVYMPVKTSDTKAQDVTKYGGITSIANSGYTLVEYKVKGKKVRSLEALPVYLGRSNALTNEDIMQYISAALQKEYAGKEISDLSVRVPFVPQKSKVRVDGFEYYLGGKTEKNIYLNNTMPLYLSWNDEEYLRKIMKAIDIDSYEEIDKDGNAIITEEKNVALFGALSVKLNSEPYINNRWNIYKILDGKEEIFKNLDIKKQCYVISQIIAWINSSTPNVNLKDVCGSEHSGMQRLNKKISECKECILIHQSVTGMYERRIDLLSI

SEQ ID NO: 1770 - protein, 1389 aa, unidentified; identical to SEQ ID NO: 1767
  REGION 1..1389: note = Description of Unknown: uncultivated organism with predicted taxonomy: Clostridium sp. AF36-4
  REGION 1..1389: note = MG23-16 effector

SEQ ID NO: 1771 - protein, 1366 aa, unidentified
  REGION 1..1366: note = Description of Unknown: uncultivated organism with predicted taxonomy: Butyrivibrio sp. CAG:318
  REGION 1..1366: note = MG23-17 effector
MDKKMYVGIDMGTNSVGMAVTDEEYNLYRVKGKDFWCSRLFKKANTAAERRTNRISRHRRQREVARQGVLRELFADEINKVDEGFFARLDESKYHLEDRDSEQKYTLFTDTGYTDKDYFKDYPTIFHLRNELLHPVKDSYDVRLVYLAIANMFKHRGNFLNESLDADKITSSADEAYRRLVETAMMYSIEFPENINVKKFIDIIGENGVSRSKHLGNVCEYLGITKKDKPAYEILNLVCGLRGVLINIYGNEVIDEENKKFSICFRDSNYEEKEGEALELLGDEYFELLETIKEIHDIGMLAGIIKGHKYLSEARVDLYKQHKKDLDMLQHVLKKYDMKAYDEMFRVMKAGNYSAYVGSVNAHSKKIRRNGGDGRTREDFYKNVKAVLKKFPEDDEEIKTILSEIDSETFMPKQLTASNGVIPNQLHVSELKAILTNAEKYLPFLLDKDESGLTVSERIVELFRFHIPYYVGPIGAQGENVWAKRRPGEENGKVYPWNFEQKIDTQSAAKEFINRMVRHCTYLSGERTLPKQSFLYEKFMVLNELNNLRIDGKKPSVQVKQGIYEELFKTGKRVTLNQLIKYLYNKSIIASKEDVVIEGIDGGFNASLTSVGKFRGVLGDELFTDANQAMAEEIIFWGTVYGNDKKFLKDEIESKYGTVLSRDQIKRILGFKFNGWGNLSKTFLELQGSCECGDCSLIQALWETNHNLMELLSEQYGFKKELDALASNVEKPLTEWTIDDLDNKYLSAPVKRMVWQTIKMLREACELTNKEPDRVFVEMPREHGKENDRKASRKKKLLDLYSALKRENKTWAELKIREIEGKTEADFRIKKLYLYYMQQGKCMYSGEKIELNDLFNNNLYDIDHIYPRHFIKDDSLENNLVLVKKQINNHKSDNYPLESNIRKNMNEFWKTLREKNFISKEKYSRLIRTEEFTDEEKAAFISRQLVETRQGTKAITQVLKQAFPNTQIVFVKAGIVSDFRKKFDINKVRALNDTHHAKDAYLNIVVGNTYYTKFTNNPMNFIKDARKNPKNDFYRYNMDKIFDYNVIRNGEEAWIADNGKTKQHVLRIMKKNSVIITVKTEEANGKLSDINIVGKRYIKNADAYMPIKTSIAKMEDVTKYGGYGSISSAGYALVEYKVKGKKVRSLEALPVYLGRSNALTNEDIMQYISAAFQKEYAGKEISDLSVRVPFIPMESKVEIDGFEYYLGGKSTNQFYLKNAMPLYLPDNDEEYFRKIMKAIEIDDYKEVGKNGKAVITKENNMILFDTLSAKLKSEPYIHNRCNIYKILEGKEKIFKDLDIQKQCYVIVKIIDWIKSKTQGVDLTDIQGKKQSGTMKINKRISECRECILIHQSVTGMYERRIDLLSI

SEQ ID NO: 1772 - protein, 1389 aa, unidentified
  REGION 1..1389: note = Description of Unknown: uncultivated organism with predicted taxonomy: Clostridiales
  REGION 1..1389: note = MG23-18 effector
MEINLENNAEEIIMGKKMYIGIDMGTSSVGMAVTDENYNLYRVKGKDFWTSRLFKEANTAAERRTNRVSRRRRQRETARMGILRELFSEEINKVDEGFFARLDESKYHIEDRDVKQKYALFADKGYTDKEYYQDYPTIFHLRNELLHPQKDSYDVRLVYLAIANMFKHRGNFLNETLDIDKITASADDVYSQLIEELDLYCIQMPVNINIGELINIIGENGISRSKRLENASKYLGISKKDKQSYEILKLICGLKGILYNIYGENVIDEENKKFSISFTDSNYEDEETQAKDILGDEYFELIEIIKELHDIGVLSGIIKGHKFLSEARVELYEEHKKDLDMLQQVLKKYDKNAYDEMFRVMKEGNYSAYVGSVNARGKNKKIRRNVGEGKKGKNGRSQEAFYKYVKTTLKNFPDDDENIKNILFKIENETFMPKQLTASNGIIPNQLHAAEMKAILTNAEKYLPFLLDKDVSGLTVSQRILELFKFHIPYYVGPLGAAGKNVWAKRRKGEEKGRIYPWNFEKKIDTQEAAEEFIKRMVRHCSYIKGEHTLPKQSLLYEKFMVLNELNNLKINGTKPDVFVKQDIYENLFKTGKRVTLDKLKSYLYNNSFIDSKEVMITGIDGGFNSSLTSVGKFIGILGEDLFTDSNQAMVEQIIFWGTIYGSDKKFLKNRIEKEYKDRLTPKQIKRILGFKFNGWGKLSKRFLELKGSCECGECSIIQALWQTNHNLMELMSDQYDFKTNLMELSEETIKPLSEWTIDNLEDYYMSAPVKRMVWQTVKMLNEICELTGRIPDKIFVEMPREHESGNERKASRKKKLLDLYKAVKSEQKQWAEHKITEIDKRDEADFRIKKLYLYYIQHGKCMYSGDTIDLDLLLKNNNIYDIDHIYPRHFIKDDSIDNNLVLVKKEINNHKSDKYPLESDIREDMSGFWKYLCEKKFITKEKYNRLMRTEKFSAEEKAAFVNRQLVETGQGTKVITQILKQAFPDTQVVFVKARMVSDFRHEFGINKVRELNDTHHAKDAYLNIVVGNTYNTKFTNNPINFMKNAEKNPEDVQYKYNMDKIFRYNVIRNGETAWIADNGTTKQHVIKTINRNTVTITRKTEEVHGALSNKVTVWSSKSAEKNPDAYMPVKTTDEKAGDVTKYGGITAIANSGYTLVEYNINGKMIRSIEALPVYLGRKNMLTEDKIKEYLHEKIRKEYKNKTVTDLKVCILFIPQKSKVCVDGFNYYLGGVTGNSIYLSNAEPLYLSKEDEEYLRKIIKAVGKGYYEETDKNGQIIITGERNMKIFNTLSSKLNNRPYNNNRWNIYKIMENKEEIFAGLSIEKQCYVINQIISWINSKTQNVDLSDIKGSSHSGTMTLNKKISECSQFELIYQSVTGMYEKRTDLLKL

SEQ ID NO: 1773 - protein, 1368 aa, unidentified; identical to SEQ ID NO: 1768
  REGION 1..1368: note = Description of Unknown: uncultivated organism with predicted taxonomy: Butyrivibrio sp. CAG:318
  REGION 1..1368: note = MG23-19 effector

SEQ ID NO: 1774 - protein, 1368 aa, unidentified; identical to SEQ ID NO: 1765
  REGION 1..1368: note = Description of Unknown: uncultivated organism with predicted taxonomy: Butyrivibrio sp. CAG:318
  REGION 1..1368: note = MG23-20 effector

SEQ ID NO: 1775 - protein, 993 aa, unidentified
  REGION 1..993: note = Description of Unknown: uncultivated organism with predicted taxonomy: Butyrivibrio sp. CAG:318
  REGION 1..993: note = MG23-21 effector
MDKKMYVGIDMGTNSVGMAVTDEEYNLYRVKGKDLWCSRLFTEADTAAERRTNRISRRRRQREVARQGVLRELFAEEINKVDEGFFARLDESKYHLEDRDSEQKYTLFTDTGYTDKDYFKDYPTIFHLRNELLHPVKDSYDVRLVYLAIANMFKHRGNFLNESLDADKITSSADESYRSLVETAMMYSIEFPENINVKKFIDIIGENGVSRSKHLENVCEYLEITKKDKQAYEILKLICGMSGVLINIYGNEVIDEENKKFSICFRDSNYEEKEGEALELLGDEYFELLEAIKEIHDIGMLAGIIKGHKYLSEARVDLYEQHKKDLDMLQHVLKKYDMKAYDEMFRVMRAGNYSAYVGSVNAHSKKIRRNGGDGRTQEEFYKNVKAVLKKFPEDDEEIKTILSEIDSETFMPKQLTASNGVIPNQLHVSELKAILTNAEKYLPFLLDKDESGLTVSERIVELFRFHIPYYVGPIGAQGENVWAKRRPGEENGKVYPWNFEQKIDTQSAAKEFINRMVRHCTYLSGERTLPKQSFLYEKFMVLNELNNLRIDGKKPSVQVKQGIYEELFKTGKRVTLNQLIKYLYNKSIIASKEDVVIEGIDGGFNASLTSVGKFRGVLGDELFTDANQAMAEEIIFWGTVYGNDKKFLKDEIESKYGTVLSKDQIKRILGFKFNGWGNLSKTFLELQGSCECGDCSLIQALWETNHNLMELLSEQYGFKKELDALACNVEKPLTEWTIDDLDNKYLSAPVKRMVWQTIKMLREACELTNKEPDRVFVEMPREHGKENDRKASRKKKLLDLYSALKREDKTWAELKIREIEGRTEADFRIKKLYLYYMQQGRCMYSGEKIELNDLFNNNLYDIDHIYPRHFIKDDSLENNLVLVKKQINNHKSDNYPLESDIRKNMNEFWKSLREKNFISKEKYSRLIRTEEFTDEEKAAFISRQLVETRQGTKAITQVLKQAFPNTQIVFVKAGIVSDFRKKFDINKVRALND

SEQ ID NO: 1776 - protein, 1368 aa, unidentified; identical to SEQ ID NO: 1765
  REGION 1..1368: note = Description of Unknown: uncultivated organism with predicted taxonomy: Butyrivibrio sp. CAG:318
  REGION 1..1368: note = MG23-22 effector

SEQ ID NO: 1777 - protein, 1366 aa, unidentified
  REGION 1..1366: note = Description of Unknown: uncultivated organism with predicted taxonomy: Butyrivibrio sp. CAG:318
  REGION 1..1366: note = MG23-23 effector
MDKKMYVGIDMGTNSVGMAVTDEEYNLYRVKGKDFWCSRLFKKANTAAERRTNRISRHRRQREVARQGVLRELFADEINKVDEGFFARLDESKYHLEDRDSEQKYTLFTDTGYTDKDYFKDYPTIFHLRNELLHPVKDSYDVRLVYLAIANMFKHRGNFLNESLDADKITSSADEAYRRLVETAMMYSIEFPENINVKKFIDIIGENGVSRSKHLGNVCEYLGITKKDKPAYEILNLVCGLRGVLINIYGNEVIDEENKKFSICFRDSNYEEKEGEALELLGDEYFELLETIKEIHDIGMLAGIIKGHKYLSEARVDLYKQHKKDLDMLQHVLKKYDMKAYDEMFRVMKAGNYSAYVGSVNAHSKKIRRNGGDGRTREDFYKNVKAVLKKFPEDDEEIKTILSEIDSETFMPKQLTASNGVIPNQLHVSELKAILTNAEKYLPFLLDKDESGLTVSERIVELFRFHIPYYVGPIGAQGENVWAKRRPGEENGKVYPWNFEQKIDTQSAAKEFINRMVRHCTYLSGERTLPKQSFLYEKFMVLNELNNLRIDGKKPSVQVKQGIYEELFKTGKRVTLNQLIKYLYNKSIIASKEDVVIEGIDGGFNASLTSVGKFRGVLGDELFTDANQAMAEEIIFWGTVYGNDKKFLKDEIESKYGTVLSKDQIKRILGFKFNGWGNLSKTFLELQGSCECGDCSLIQALWETNHNLMELLSEQYGFKKELDALASNVEKPLTEWTIDDLDNKYLSAPVKRMVWQTIKMLREACELTNKEPDRVFVEMPREHGKENDRKASRKKKLLDLYSALKRENKTWAELKIREIEGKTEADFRIKKLYLYYMQQGKCMYSGEKIELNDLFNNNLYDIDHIYPRHFIKDDSLENNLVLVKKQINNHKSDNYPLESNIRKNMNEFWKTLREKNFISKEKYSRLIRTEEFTDEEKAAFISRQLVETRQGTKAITQVLKQAFPNTQIVFVKAGIVSDFRKKFDINKVRALNDTHHAKDAYLNIVVGNTYYTKFTNNPMNFIKDARKNPKNDFYRYNMDKIFDYNVIRNGEEAWIADNGKTKQHVLRIMKKNSVIITVKTEEANGKLSDINIVGKRYIKNADAYMPIKTSIAKMEDVTKYGGYGSISSAGYALVEYKVKGKKVRSLEALPVYLGRSNALTNEDIMQYISAAFQKEYAGKEISDLSVRVPFIPMESKVEIDGFEYYLGGKSTNQFYLKNAMPLYLPDNDEEYFRKIMKAIEIDDYKEVGKNGKAVITKENNMILFDTLSAKLKSEPYIHNRCNIYKILEGKEKIFKDLDIQKQCYVIVKIIDWIKSKTQGVDLTDIQGKKQSGTMKINKRISECRECILIHQSVTGMYERRIDLLSI

SEQ ID NO: 1778 - protein, 1383 aa, unidentified
  REGION 1..1383: note = Description of Unknown: uncultivated organism with predicted taxonomy: Clostridiales
  REGION 1..1383: note = MG23-24 effector
MEINLENNAEEIIMGKKMYIGIDMGTSSVGMAVTDENYTLYRVKGKDFWTSRLFKEANTAAERRTNRVSRRRRQRETARMGILRELFSEEINKVDEGFFARLDESKYHIEDRDVKQKYALFADKGYTDKEYYQDYPTIFHLRNELLHPQKDSYDVRLVYLAIANMFKHRGNFLNETLDIDKITASADDVYSQLIEELDLYCIQMPVNINIGELINIIGENGISRSKRLENASKYLGISKKDKQSYEILKLICGLKGILYNIYGENVIDEENKKFSISFTDSNYEDEETQAKDILGDEYFELIEIIKELHDICVLSGIIKGHKFLSEARVELYEEHKNDLDMLQQVLKKYDKNAYDEMFRVMKEGNYSAYVGSVNACGKNKKIRRNGGKGRSQEDFYKYVKTTLKNYPDDDENIKNILFKIENETFMPKQLTASNGIIPNQLHAAEMKAILTNAEKYLPFLLDKDVSGLTVSQRILELFKFHIPYYVGPLGAAGKNVWAKRRKGEEKGRIYPWNFEKKIDTQEAAEEFIKRMVRHCSYIKGEHTLPKQSLLYEKFMVLNELNNLKINGTKPDVFVKQDIYENLFKTGKRVTLDKLKSYLYNNSFIDSKEVMITGIDGGFNSSLTSVGKFIGILGEDLFTDSNQAMVEQIIFWGTIYGNDKKFLKNRIEKEYKDRLTPKQIKRILGFKFNGWGKLSKLFLELKGSCECGECSIIQALWQTNHNLMELMSDQYDFKTNLMELSEETIKPLSEWTIDNLEDYYMSAPVKRMVWQTVKMLNEICELTGRIPDKIFVEMPREHESSNERKASRKKKLLDLYKAVKSEQKQWAEHKITEIDKRDEADFRIKKLYLYYIQQGKCMYSGDTIDLDLLLKNNNIYDIDHIYPRHFIKDDSIDNNLVLVKKEINNHKSDKYPLESDIREDMSGFWKYLCEKKFITKEKYNRLMRTEKFSAEEKAAFVNRQLVETGQGTKVITQILKQAFPDTQVVFVKARMVSDFRHEFGINKVRELNDTHHAKDAYLNIVVGNTYYTKFTNNPINFMKNAEKNPEDVQYKYNMDKIFRYNVIRNGETAWIADNGVTKQHVLKTINRNTVTITRKTEEVHGALSNKVTVWSSKLAKKNPDAYMPVKTTDEKACDVTKYGGITAIANSGYTLVEYNINGKMIRSIEALPVYLGRKNMLTEDKIKEYLHEKIRKEYKNKTVTDLKVCILFIPQKSKVCVDGFNYYLGGVTGNSIYLSNAEPLYLSKEDEEYLRKIIKAVGKGYYEETDKNGQIIITGERNMEFFNTLGSKLNARPYNNNRWNIYKIMENKEEIFAGLSIEKQCYVINQIISWINSKTQNVDLSDIKGSSHSGTMTLNKKISECSQFELIYQSVTGMYEKRTDLLKL

SEQ ID NO: 1779 - protein, 1368 aa, unidentified
  REGION 1..1368: note = Description of Unknown: uncultivated organism with predicted taxonomy: Butyrivibrio sp. CAG:318
  REGION 1..1368: note = MG23-25 effector
MDKKMYVGIDMGTNSVGMAVTDEEYNLYRVKGKDLWCSRLFTEADTAAERRTNRISRRRRQREVARQGVLRKLFADEINKVDEGFFARLDESKYHLEDRDSEQKYTLFTDTGYTDKDYFKDYPTIFHLRNELLHPVKESYDVRLVYLAIANMFKHRGNFLNESLDADKITSSADEAYRSLVETAMMYSIEVPENINVKKFIDIIGENGVSRSKHLENVCEYLEITKKDKQAYEILKLICGMSGVLINIYGEDVIDEENKKFSICFRDSNYEEKEGEALELLGDEYFELLEAIKEIHDIGMLAGIIKGHKYLSEARVDLYEQHKKDLDMLQHVLKKYDMKAYDEMFRVMKAGNYSAYVGSVNAHSKKIRRNGGDGRTREEFYKNVKAVLKKFQEDDEEIKTILSEIDSETFMPKQLTASNGVIPNQLHVSELKAILTNAEEYLPFLLGKDESGLTVSERIVELFRFHIPYYVGPIGAQGENVWAKRRPGEENGKVYPWNFEQKIDIQSAAKEFINRMVRHCTYLSGERTLPKQSFLYEKFMVLNELNNLKIDGKKPSVQVKQGIYEELFKTGKRVTLNRLKDYLYNNSIIASKEDVVIEGIDGGFNASLTSVGKFRGVLGDELFTDANQAMAEEIIFWGTVYGNDKKFLKDEIESKYGTVLSKDQIKRILGFKFNGWGNLSKTFLELQGSCECGDCSLIQALWETNHNLMELLSEQYGFKKELDALACNVEKPLTEWTIDDLDNKYLSAPVKRMVWQTIKMLREACELTNKEPDRVFVEMPREHGKENDRKASRKKKLLDLYSALKRENKTWAELKIREIEGKTEADFRIKKLYLYYMQQGRCMYSGEKIELNDLFNNNLYDIDHIYPRHFIKDDSLENNLVLVKKQINNHKSDNYPLESNIRKNMNEFWKTLRDKNFISKEKYSRLIRTEEFTDEEKAAFISRQLVETRQGTKAITQVLKQAFPNTQIVFVKAGIVSDFRKKFDINKVRALNDTHHAKDAYLNIVVGNTYYTKFTNNPMNFIKDARKNPKNDFYRYNMDKIFDYNVIRNGEEAWIADNGKTKQHVLQIMKKNSVTITVKTEEYHGALSNKVTVWSKEKAKGNPDAYMPVKTSDTKAQDVTKYGGITAIANSGYTLVEYKVKGKKVRSLEALPVYLGRSNALTNEDIMQYISAALQKEYAGKEISDLSVRVPFVPQKSKVRVDGFEYYLGGKTGKNIYLNNAMPLYLSWNDEEYLRKIMKAIEIDNYEEIDKYSNAIITEEKNVALFDVLSVKLNSEPYINNRWNICKTLEGKEEIFKNLDIKKQCYVIGQIISWINSAMQNVNLKDVCGSEHSGMQQLNKKISECKECILIHQSVTGMYERRIDLLSI

SEQ ID NO: 1780 - protein, 1368 aa, unidentified; identical to SEQ ID NO: 1765
  REGION 1..1368: note = Description of Unknown: uncultivated organism with predicted taxonomy: Butyrivibrio sp. CAG:318
  REGION 1..1368: note = MG23-26 effector

SEQ ID NO: 1781 - protein, 829 aa, unidentified
  REGION 1..829: note = Description of Unknown: uncultivated organism with predicted taxonomy: Butyrivibrio sp. CAG:318
  REGION 1..829: note = MG23-27 effector
MVLNELNNLRIDGKKPSVQVKQGIYEELFKTGKRVTLNQLIKYLYNKSIIASKEDVVIEGIDGGFNASLTSVGKFRGVLGDELFTDANQAMAEEIIFWGTVYGNDKKFLKDEIESKYGTVLSKDQIKRILGFKFNGWGNLSKTFLELQGSCECGDCSLIQALWETNHNLMELLSEQYGFKKELDALASNVEKPLTEWTIDDLDNKYLSAPVKRMVWQTIKMLREACELTNKEPDRVFVEMPREHGKENDRKASRKKKLLDLYSTLKREDKTWAELKIREIEGRTEADFRIKKLYLYYMQQGKCMYSGEKIELNDLFNNNLYDIDHIYPRHFIKDDSLENNLVLVKKEINNHKSDNYPLESDIRKNMNKFWKSLRDKNFISKEKYSRLIRTEEFTDEEKAAFISRQLVETRQGTKAITQVLKQAFPNTQIVFVKAGIVSDFRKKFDINKVRALNDTHHAKDAYLNIVVGNTYYTKFTNNPMNFIKDARKNPKNDFYRYNMDKIFDYNVIRNGEEAWIADNGKTKQHVLRIMKKNSVTITVKTEEYHGALSNKVTVWSKEKAKGNPDAYMPVKTSDTKAQDVTKYGGITSIANSGYTLVEYKVKGKKVRSLEALPAYLGRSNALTNEDIMQYISAALQKEYAGKEISDLSVRVPFVPQKSKVRVDGFEYYLGGKTGKSVYLSNAMPLYLSGNDEEYLRKIMKAIEIDNYEEIDKDSNAIITEEKNVALFDVLCVKLNSEPYINNRWNICKTLEGKEEIFKNLDIKKQCYVIGQIISWINSAMQNVNLKDVCGSEHAGTQTLNKKISESKECILIHQSVTGMYERKIDLLSI

SEQ ID NO: 1782 - protein, 1366 aa, unidentified; identical to SEQ ID NO: 1777
  REGION 1..1366: note = Description of Unknown: uncultivated organism with predicted taxonomy: Butyrivibrio sp. CAG:318
  REGION 1..1366: note = MG23-28 effector

SEQ ID NO: 1783 - protein, 1368 aa, unidentified; identical to SEQ ID NO: 1765
  REGION 1..1368: note = Description of Unknown: uncultivated organism with predicted taxonomy: Butyrivibrio sp. CAG:318
  REGION 1..1368: note = MG23-29 effector

SEQ ID NO: 1784 - protein, 1366 aa, unidentified
  REGION 1..1366: note = Description of Unknown: uncultivated organism with predicted taxonomy: Butyrivibrio sp. CAG:318
  REGION 1..1366: note = MG23-30 effector
MDKKMYVGIDMGTNSVGMAVTDEEYNLYRVKGKDLWCSRLFTEADTAAERRTNRISRRRRQREVARQGVLRKLFADEINKVDEGFFARLDESKYHLEDRDSEQKYTLFTDTGYTDKDYFKDYPTIFHLRNELLHPVKDSYDVRLVYLAIANMFKHRGNFLNESLDADKITSSADEAYRSLVETAMMYSIEFPENINVKKFIDIIGENGVSRSKHLENVCEYLGITKKDKQAYEILKLICGMSGVLINIYGEDVIDEENKKFSICFRDSNYEEKEGEALELLGDEYFELLEAIKEIHDIGMLAGIIKGHKYLSEARVDLYEQHKKDLDMLQHVLKKYDMKAYDEMFRVMKAGNYSAYVGSVNAHSKKIRRNGGDGRTQEEFYKNVKAVLKKFPEDDEEIKTILSEIDSETFMPKQLTASNGVIPNQLHVSELKAILTNAEKYLPFLLGKDESGLTVSERIVELFRFHIPYYVGPIGAQGENVWAKRRSGEENGKVYPWNFEQKIDTQSAAKEFINRMVRHCTYLSGERTLPKQSLLYEKFMVLNELNNLKIAGKKPSVQVKQDIYEKLFKLGKKVTLKQLEEYLCNNSIIASKEDIEGIDGGFNSSLTSVGKFRGVLGDELFTDANQAMAEEIIFWGTVYGNDKKFLKDEIESKYGTVLSKDQIKRILGFKFNGWGNLSKTFLELQGSCECGNCSLIQALWETNHNLMELLSEQYGFKKELDALACNVEKPLTEWTIDDLDNKYLSAPVKRMVWQTIKMLREVCELTNKEPDRVFVEMPREHGKENDRKASRKKKLLDLYSALKRENKTWAELKIREIEGKTEADFRIKKLYLYYMQQGKCMYSGEKIELNDLFNNNLYDIDHIYPRHFIKDDSLENNLVLVKKEINNHKSDNYPLESDIRKNMNKFWKSLREQNFISEEKYSRLIRTEEFTDEEKAAFISRQLVETRQGTKAITQVLKQAFPNTQIVFVKAGIVSDFRKKFDINKVRALNDTHHAKDAYLNIVVGNTYYTKFTNNPMNFIKDARKNPKNDFYRYNMDKIFDYNVIRNGEEAWIADNGKTKQHVLRIMKKNSVTITVKTEEYHGALSNKVTVWSKEKAKGNPDVYMPVKTSDTKAQDVTKYGGITSIANSGYTLVEYKVKGKKVRSLEALPVYLGRSNALTNEDIMQYISAALQKEYAGKEISDLSVRVPFVPQKSKVRVDGFEYYLGGKTEKNIYLNNTMPLYLSWNDEEYLRKIMKAIDIDSYEEIDKDGNAIITEEKNVALFGALSVKLNSEPYINNRWNIYKILDGKEEIFKNLDIKKQCYVISQIIAWINSSTPNVNLKDVCGSEHSGMQRLNKKISECKECILIHQSVTGMYERRIDLLSI

SEQ ID NO: 1785 - protein, 1368 aa, unidentified; identical to SEQ ID NO: 1765
  REGION 1..1368: note = Description of Unknown: uncultivated organism with predicted taxonomy: Butyrivibrio sp. CAG:318
  REGION 1..1368: note = MG23-31 effector

SEQ ID NO: 1786 - protein, 1366 aa, unidentified
  REGION 1..1366: note = Description of Unknown: uncultivated organism with predicted taxonomy: Butyrivibrio sp. CAG:318
  REGION 1..1366: note = MG23-32 effector
MDKKMYVGIDMGTNSVGMAVTDEEYNLYRVKGKDLWCSRLFTEADTAAERRTNRISRRRRQREVARQGVLRKLFADEINKVDEGFFARLDESKYHLEDRDSEQKYTLFTDTGYTDKDYFKDYPTIFHLRNELLHPVKDSYDVRLVYLAIANMFKHRGNFLNESLDADKITSSADEAYRSLVETAMMYSIEFPENINVKKFIDIIGENGVSRSKHLENVCEYLGITKKDKQAYEILKLICGMSGVLINIYGEDVIDEENKKFSICFRDSNYEEKEGEALELLGDEYFELLEAIKEIHDIGMLAGIIKGHKYLSEARVDLYEQHKKDLDMLQHVLKKYDMKAYDEMFRVMKAGNYSAYVGSVNAHSKKIRRNGGDGRTQEEFYKNVKAVLKKFPEDDEEIKTILSEIDSETFMPKQLTASNGVIPNQLHVSELKAILTNAEKYLPFLLGKDESGLTVSERIVELFRFHIPYYVGPIGAQGENVWAKRRSGEENGKVYPWNFEQKIDTQSAAKEFINRMVRHCTYLSGERTLPKQSLLYEKFMVLNELNNLKIAGKKPSVQVKQDIYEKLFKLGKKVTLKQLEEYLCNNSIIASKEDIEGIDGGFNSSLTSVGKFRGVLGDELFTDANQAMAEEIIFWGTVYGNDKKFLKDEIESKYGTVLSKDQIKRILGFKFNGWGNLSKTFLELQGSCECGDCSLIQALWETNHNLMELLSEQYGFKKELDALASNVEKPLTEWTIDDLDNKYLSAPVKRMVWQTIKMLREACELTNKEPDRVFVEMPREHGKENDRKASRKKKLLDLYSALKREDKTWAELKIREIEGKTEADFRIKKLYLYYMQQGRCMYSGEKIELNDLFNNNLYDIDHIYPRHFIKDDSLENNLVLVKKQINNHKSDNYPLESNIRKNMNEFWKTLRDKNFISKEKYSRLIRTEEFTDEEKAAFISRQLVETRQGTKAITQVLKQAFPNTQIVFVKAGIVSDFRKKFDINKVRALNDTHHAKDAYLNIVVGNTYYTKFTNNPMNFIKDARKNPKNDFYRYNMDKIFDYNVIRNGEEAWIADNGKTKQHVLQIMKKNSVTITVKTEEYHGALSNKVTVWSKEKAKGNPDAYMPVKTSDTKAQDVTKYGGITAIANSGYTLVEYKVKGKKVRSLEALPVYLGRSNALTNEDIMQYISAALQKEYAGKEISDLSVRVPFVPQKSKVRVDGFEYYLGGKTGKSVYLSNAMPLYLSGNDEEYLRKIMKAIEIDNYEEIDKDSNAIITEEKNVALFDVLCVKLNSEPYINNRWNICKTLEGKEEIFKNLDIKKQCYVIGQIISWINSAMQNVNLKDVCGSEHAGTQTLNKKISESKECILIHQSVTGMYERKIDLLSI

SEQ ID NO: 1787 - protein, 1389 aa, unidentified
  REGION 1..1389: note = Description of Unknown: uncultivated organism with predicted taxonomy: Clostridiales
  REGION 1..1389: note = MG23-33 effector
MEINLENNAEEIIMGKKMYIGIDMGTSSVGMAVTDENYTLYRVKGKDFWTSRLFKEANTAAERRTNRVSRRRRQRETARMGILRELFSEEINKVDEGFFARLDESKYHIEDRDVKQKYALFADKGYTDKEYYQDYPTIFHLRNELLHPQKDSYDVRLVYLAIANMFKHRGNFLNETLDIDKITASADDVYSQLIEELDLYCIQMPVNINIGELINIIGENGISRSKRLENASKYLGITKKDKQSYEILKLICGLKGILYNIYGENVIDEENKKFSISFTDSNYEDEETQAKDILGDEYFELIEIIKELHDIGVLSGIIKGHKFLSEARVELYEEHKKDLDMLQQVLKKYDKNAYDEMFRVMKEGNYSAYVGSVNARGKNKKIRRNVGEGKKGKNGRSQEAFYKYVKTTLKNFPDDDENIKNILFKIENETFMPKQLTASNGIIPNQLHAAEMKAILTNAEKYLPFLLDKDESGLTVSQRILELFKFHIPYYVGPLGAAGKNVWAKRRKGEEKGRIYPWNFEKKIDTQEAAEEFIKRMVRHCSYIKGEHTLPKQSLLYEKFMVLNELNNLKINGTKPDVFVKQDIYENLFKTGKRVTLDKLKSYLYNNSLIDSKEVMITGIDGGFKSSLTSVGKFIGILGEDLFTDSNQAMVEQIIFWGTIYGSDKKFLKNRIEKEYKDRLTPKQIKRILGFKFNGWGKLSKRFLELKGSCECGECSIIQALWQTNHNLMELMSDQYDFKTNLMELSEETIKPLSEWTIDNLEDYYMSAPVKRMVWQTVKMLNETCELTGRVPDKIFVEMPREHESGNERKASRKKKLLDLYKAVKSEQKQWAEHKITEIDKRDEADFRIKKLYLYYIQHGKCMYSGDTIDLDLLLKNNNIYDIDHIYPRHFIKDDSIDNNLVLVKKEINNHKSDKYPLESDIREDMSGFWKYLCEKKFITKEKYNRLMRTEKFSAEEKAAFVNRQLVETGQGTKVITQILKQAFPDTQVVFVKARMVSDFRHEFGINKVRELNDTHHAKDAYLNIVVGNTYYTKFTNNPINFMKNAEKNPEDVQYKYNMDKIFRYNVIRNGETAWIADNGVTKQHVLKTINRNTVTITRKTEEVHGALSNKVTVWSSKSAEKNPDAYMPVKTTDEKAGDVTKYGGITAIANSGYTLVEYNINGKMIRSIEALPVYLGRKNMLTEDKIKEYLHEKIRKEYKNKTVTDLKVCILFIPQKSKVCVDGFNYYLGGVTGNSIYLSNAEPLYLSKEDEEYLRKIIKAVGKGYYEETDENGQIIITSERNMKFFNTLSSKLNARPYNNNRWNIYKIMENKEEIFAGLSIEKQCYVINQIISWINSKTQNVDLSDIKGSSHSGTMTLNKKISECSQFELIYQSVTGMYEKRTDLLKL

SEQ ID NO: 1788 - protein, 1368 aa, unidentified
  REGION 1..1368: note = Description of Unknown: uncultivated organism with predicted taxonomy: Butyrivibrio sp. CAG:318
  REGION 1..1368: note = MG23-34 effector
MDKKMYVGIDMGTNSVGMAVTDEEYNLYRVKGKDLWCSRLFTEADTAAERRTNRISRRRRQREVARQGVLRKLFADEINKVDEGFFARLDESKYHLEDRDSEQKYTLFTDTGYTDKDYFKDYPTIFHLRNELLHPVKDSYDVRLVYLAIANMFKHRGNFLNESLDADKITSSADEAYRSLVETAMMYSIEFPENINVKKFIDIIGENGVSRSKHLENVCEYLEITKKDKQAYEILKLVCGMSGVLINIYGDEVIDEENKKFSICFRDSNYEEKEGEALELLGDEYFELLEAIKEIHDIGMLAGIIKGHKYLSEARVDLYEQHKKDLDMLQHVLKKYDMKAYDEMFRVMKAGNYSAYVGSVNAHSKKIRRNGGDGRTREEFYKNVKAVLKKFPEDDEEIKTILSEIDSETFMPKQLTASNGVIPNQLHVSELKAILTNAEKYLPFLLGKDESGLTVSERIVELFRFHIPYYVGPIGAQGENVWAQRRPGEEKGRVYPWNFEQKIDTQSAAKEFINRMVRHCTYLSGERTLPKQSFLYEKFMVLNELNNLRIDGKKPSVQVKQGIYEELFKTGKRVTLNKLKDYLYNKSIIASKEDVVIEGIDGGFNASLTSVGKFRGVLGDELFTDANQAMAEEIIFWGTVYGNDKKFLKDEIESKYGTVLSKDQIKRILGFKFNGWGNLSKTFLELQGLCECGDCSLIQALWETNHNLMELLSEQYGFKKELDALACNVEKPLTEWTIDDLDNKYLSAPVKRMVWQTIKMLREACELTNKEPDRVFVEMPREHGKENDRKASRKKKLLDLYSALKRENKTWAELKIREIEGKTEADFRIKKLYLYYMQQGKCMYSGEKIELNDLFNNNLYDIDHIYPRHFIKDDSLENNLVLVKKQINNHKSDNYPLESNIRKNMNEFWKTLREKNFISKEKYSRLIRTEEFTDEEKAAFISRQLVETRQGTKAISQVLKQAFPNTQIVFVKAGIVSDFRKKFDINKVRALNDTHHAKDAYLNIVVGNTYYTKFTNNPMNFIKDARKNPKNDFYRYNMDKIFDYNVIRNGEEAWIADNGKTKQHVLRIMKKNSVTITVKTEEYHGALSNKVTVWSKEKAKGNPDAYMPVKTSDTKAQDVTKYGGITSIANSGYTLVEYKVKGKKVRSLEALPVYLGRSNALTNEDIMQYISAALQKEYAGKEISDLSVRVPFVPQKSKVRVDGFEYYLGGKTGNRICLNNAMSLYLSENDEEYLRKIMKAIEIDNYEEIDKDSNAIITEEKNVDLFDVLSVKLNSEPYINNRWNIYKTLDGKKEIFENLDIKKQCYVISQIIFWINSSTQSVNLKDVCGSEHSGMQPLNKKISECKECILIHQSVTGMYERRIDLLSI

SEQ ID NO: 1789 - protein, 1180 aa, unidentified
  REGION 1..1180: note = Description of Unknown: uncultivated organism with predicted taxonomy: Butyrivibrio sp. CAG:318
  REGION 1..1180: note = MG23-35 effector
MDKKMYVGIDMGTNSVGMAVTDEEYNLYRVKGKDLWCSRLFTEADTAAERRTNRISRRRRQREVARQGVLRKLFADEINKVDEGFFARLDESKYHLEDRDSEQKYTLFTDTGYTDKDYFKDYPTIFHLRNELLHPVKDSYDVRLVYLAIANMFKHRGNFLNESLDADKITSSADEAYRSLVETAMMYSIEFPENINVKKFIDIIGENGVSRSKHLENVCEYLEITKKDKQAYEILKLICGMSGVLINIYGEDVIDEENKKFSICFRDSNYEEKEGEALELLGDEYFELLEAIKEIHDIGMLAGIIKGHKYLSEARVDLYEQHKKDLDMLQHVLKKYDMKAYDEMFRVMKAGNYSAYVGSVNAHSKKIRRNGGDGRTQEEFYKNVKAVLKKFPEDDEEIKTILSEIDSETFMPKQLTASNGVIPNQLHVSELKAILTNAEEYLPFLLGKDESGLTVSERIVELFRFHIPYYVGPIGAQGENVWAQRRPGEEKGRVYPWNFEQKIDTQSAAKEFINRMVRHCTYLSGERTLPKQSLLYEKFMVLNELNNLKIAGKKPSVQVKQDIYEKLFKLGKKVTLKQLEEYLCNNSIIASKEDIEGIDGGFNSSLTSVGKFRGVLGDELFTDANQAMAEEIIFWGTVYGNDKKFLKDEIESKYGTVLSKDQIKRILGFKFNGWGNLSKTFLELQGSCECGDCSLIQALWETNHNLMELLSEQYGFKKELDALASNVEKPLTEWTIDDLDNKYLSAPVKRMVWQTIKMLREACELTNKEPDRVFVEMPREHGKENDRKASRKKKLLDLYSALKREDKTWAELKIREIEGRTEADFRIKKLYLYYMQQGRCMYSGEKIELNDLFNNNLYDIDHIYPRHFIKDDSLENNLVLVKKQINNHKSDNYPLESNIRKNMNEFWKTLRDKNFISKEKYSRLIRTEEFTDEEKAAFISRQLVETRQGTKAITQILKQAFPNTQIVFVKAGIVSDFRKKFDINKVRALNDTHHAKDAYLNIVVGNTYYTKFTNNPMNFIKDASKNPKNDFYRYNMDKIFDYNVIRNGEEAWIADNGKTKQHVLRIMKKNSVTITVKTEEYHGALSNKVTVWSKEKAKGNPDAYMPVKTSDTKAQDVTKYGGITAIANSGYTLVEYKVKGKKVRSLEALPVYLGRSNALTNEDIMQYISAALQKEYMSHV

SEQ ID NO: 1790 - protein, 1389 aa, unidentified
  REGION 1..1389: note = Description of Unknown: uncultivated organism with predicted taxonomy: Clostridiales
  REGION 1..1389: note = MG23-36 effector
MEINLENNAEEIIMGKKMYIGIDMGTSSVGMAVTDENYNLYRVKGKDFWTSRLFKEASTAANRRTNRVARRRRQRELARMGILRELFSEEINKVDEGFFARLDESKYHIEDRDVKQKYALFADKGYTDKEYYKEYPTIFHLRNELLHPQKDSYDVRLVYLAIANMFKHRGNFLNETLDIDKITANAVDVYSQLIEQLDLYCIQMPVSIDIGKLINIIGENGISRSKRLENASKYLGITKKDKQSYEILKLICGLKGILYNIYGENVIDEENKKFSISFTDSNYEDEETQAKDILGDEYFELIEIIKELHDIGVLSGIIKGHKFLSEARVELYEEHKKDLDMLQQVLKKYDKNAYDEMFRVMKEGNYSAYVGSVNARGKNKKIRRNVGEGKKGKNGRSQEAFYKYVKTTLKNFPDDDENIKNILFKIENETFMPKQLTASNGIIPNQLHAAEMKAILTNAEKYLPFLLDKDESGLTVSQRILELFKFHIPYYVGPLGAAGKNVWAKRRKGEEKGRIYPWNFEKKIDTQEAAEEFIKRMVIHCSYIKGEHTLPKQSLLYEKFTVLNELNNLKINGTKPDVFVKQDIYENLFKTGKRVTLDKLKSYLYNNSFIDSKEVMITGIDGGFNSSLTSVGKFIGILGEDLFTDSNQAMVEQIIFWGTIYGSDKKFLKNRIEKEYKDRLTPKQIKRILGFKFNGWSKLSKRFLELKGSCECGECSIIQALWQTNHNLMELMSDQYDFKTNLMELSEETIKPLSEWTIDNLEDYYMSAPVKRMVWQTVKMLNETCELTGRVPDKIFVEMPREHESGNERKASRKKKLLDLYKAVKSEQKQWAEHKITEIDKRDEADFRIKKLYLYYIQQGKCMYSGDTIDLDLLLKNNNIYDIDHIYPRHFIKDDSIDNNLVLVKKEINNHKSDKYPLESDIREDMSGFWKYLCEKKFITKEKYNRLMRTEKFSAEEKAAFVNRQLVETGQGTKVITQILKQAFPDTQVVFVKARMVSDFRHEFGINKVRELNDTHHAKDAYLNIVVGNTYYTKFTNNPINFMKNAEKNPEDVQYKYNMDKIFRYNVIRNGETAWIADNGVTKQHVLKTINRNTVTITRKTEEVHGALSNKVTVWSSKLAKKNPDAYMPVKTTDEKACDVTKYGGITAIANSGYTLVEYNINGKMIRSIEALPVYLGRKNMLTEDKIKEYLHEKIRKEYKNKTVTDLKVCILFIPQKSKVCVDGFNYYLGGVTGNSIYLSNAEPLYLSKEDEEYLRKIIKAVGKGYYEETDKNGQIIITGERNMEFFNTLGSKLNARPYNNNRWNIYKIMDNKEEIFAGLSIEKQCYVINQIISWINSKTQNVDLSDIKGSSHSGTMTLNKKISDCSQFELIYQSVTGMYEKRTDLLKL

SEQ ID NO: 1791 - protein, 1389 aa, unidentified
  REGION 1..1389: note = Description of Unknown: uncultivated organism with predicted taxonomy: Clostridiales
  REGION 1..1389: note = MG23-37 effector
MEINLENNAEEIIMGKKMYIGIDMGTSSVGMAVTDENYTLYRVKGKDFWTSRLFKEANTAAERRTNRVSRRRRQRETARMGILRELFSEEINKVDEGFFARLDESKYHIEDRDVKQKYALFADKGYTDKEYYQDYPTIFHLRNELLHPQKDSYDVRLVYLAIANMFKHRGNFLNETLDIDKITASADDVYSQLIDELDLYCIQMPVSIDIGKLINIIGENGISRSKRLENASKYLGITKKDKQSYEILKLICGLKGILYNIYGENVIDEENKKFSISFTDSNYEDEETQAKDILGDEYFELIEIIKELHDIGVLSGIIKGHKFLSEARVELYEEHKKDLDMLQQVLKKYDKNAYDEMFRVMKEGNYSAYVGSVNARGKNKKIRRNVGEGKKGKNGRSQEAFYKYVKTTLKNFPDDDENIKNILFKIENETFMPKQLTASNGIIPNQLHAAEMKAILTNAEKYLPFLLDKDESGLTVSQRILELFKFHIPYYVGPLGAAGKNVWAKRRKGEEKGRIYPWNFEKKIDTQEAAEEFIKRMVRHCSYIKGEHTLPKQSLLYEKFMVLNELNNLKINGTKPDVFVKQDIYENLFKTGKRVTLDKLKSYLYNNSFIDSKEVMITGIDGGFNSSLTSVGKFIGILVEDLFTDSNQAMVEQIIFWGTIYGNDKKFLKNRIEKEYKDRLTPKQIKRILGFKFNGWGKLSKLFLELKGSCECGECSIIQALWQTNHNLMELMSDQYDFKTNLMELSEETIKPLSEWTIDNLEDYYMSAPVKRMVWQTVKMLNEICELTGRIPDKIFVEMPREHESSNERKASRKKKLLDLYKAVKSEQKQWAEHKITEIDKRDEADFRIKKLYLYYIQQGKCMYSGDTIDLDLLLKNNNIYDIDHIYPRHFIKDDSIDNNLVLVKKEINNHKSDKYPLESDIREDMSGFWKYLCEKKFITKEKYNRLMRTEKFSAEEKAAFVNRQLVETGQGTKVITQILKQAFPDTQVVFVKARMVSDFRHEFGINKVRELNDTHHAKDAYLNIVVGNTYYTKFTNNPINFMKNAEKNPEDVQYKYNMDKIFRYNVIRNGETAWIADNGVTKQHVLKTINRNTVTITRKTEEVHGALSNKGTVWSSKLAKKNPDAYMPVKTTDEKACDVKKYGGITAIANSGYTLVEYNINGKMIRSIEALPVYLGRKNMLTDDKIREYLHEKIRKEYKNKTVTDLKVCILFIPQKSKVCVDGFNYYLGGVTGNSIYLSNAEPLYLSKEDEEYLRKIIKAVDKGYYEETDKNGQIIITGERNMKIFNTLSSKLNNRPYNNNRWNIYKIMENKEEIFAGLSIEKQCYVINQIISWINSKTQNVDLSDIKGSSHSGTMTLNKKISECSQFELIYQSVTGMYEKRTDLLKL

SEQ ID NO: 1792 - protein, 1368 aa, unidentified; identical to SEQ ID NO: 1765
  REGION 1..1368: note = Description of Unknown: uncultivated organism with predicted taxonomy: Butyrivibrio sp. CAG:318
  REGION 1..1368: note = MG23-38 effector

SEQ ID NO: 1793 - protein, 1366 aa, unidentified; identical to SEQ ID NO: 1784
  REGION 1..1366: note = Description of Unknown: uncultivated organism with predicted taxonomy: Butyrivibrio sp. CAG:318
  REGION 1..1366: note = MG23-39 effector

SEQ ID NO: 1794 - protein, 1366 aa, unidentified
  REGION 1..1366: note = Description of Unknown: uncultivated organism with predicted taxonomy: Butyrivibrio sp. CAG:318
  REGION 1..1366: note = MG23-40 effector
MDKKMYVGIDMGTNSVGMAVTDEEYNLYRVKGKDLWCSRLFTEADTAAERRTNRISRRRRQREVARQGVLRKLFADEINKVDEGFFARLDESKYHLEDRDSEQKYTLFTDTGYTDKDYFKDYPTIFHLRNELLHPVKDSYDVRLVYLAIANMFKHRGNFLNESLDADKITSSADEAYRSLVETAMMYSIEFPENINVKKFIDIIGENGVSRSKHLENVCEYLGITKKDKQAYEILKLICGMSGVLINIYGEDVIDEENKKFSICFRDSNYEEKEGEALELLGDEYFELLEDIKEIHDIGMLAGIIKGHKYLSEARVDLYEQHKKDLDMLQHVLKKYDMKAYDEMFRVMKAGNYSAYVGSVNAHSKKIRRNGGDGRTQEEFYKNVKAVLKKFPEDDEEIKTILSEIDSETFMPKQLTASNGVIPNQLHVSELKAILTNAEKYLPFLLGKDESGLTVSERIVELFRFHIPYYVGPIGAQGENVWAKRRSGEENGKVYPWNFEQKIDTQSAAKEFINRMVRHCTYLSGERTLPKQSLLYEKFMVLNELNNLKIAGKKPSVQVKQDIYEKLFKLGKKVTLKQLEEYLCNNSIIASKEDIEGIDGGFNSSLTSVGKFRGVLGDELFTDANQAMAEEIIFWGTVYGNDKKFLKDEIESKYGTVLSKDQIKRILGFKFNGWGNLSKTFLELQGSCECGDCSLIQALWETNHNLMELLSEQYGFKKELDALASNVEKPLTEWTIDDLDNKYLSAPVKRMVWQTIKMLREACELTNKEPDRVFVEMPREHGKENDRKASRKKKLLDLYSALKRENKTWAELKIREIEGKTEADFRIKKLYLYYMQQGKCMYSGEKIELNDLFNNNLYDIDHIYPRHFIKDDSLENNLVLVKKQINNHKSDNYPLESDIRKNMNKFWKSLREKNFISEEKYSRLIRTEEFTDEEKAAFISRQLVETRQGTKAITQVLKQAFPNTQIVFVKAGIVSDFRKKFDINKVRALNDTHHAKDAYLNIVVGNTYYTKFTNNPMNFIKDARKNPKNDFYRYNMDKIFDYNVIRNGEEAWIADNGKTKQHVLQIMKKNSVTITVKTEEYHGALSNKVTVWSKEKAKGNPDAYMPVKTSDTKAQDVTKYGGITAIANSGYTLVEYKVKGKKVRSLEALPVYLGRSNALTNEDIMQYISAALQKEYAGKEISDLSVRVPFVPQKSKVRVDGFEYYLGGKTGKSVYLSNAMPLYLSGNDEEYLRKIMKAIEIDNYEEIDKDSNAIITEEKNVALFDVLCVKINSEPYINNQWNIYKILEGKEEIFKNLDIKKQCYIIGQIISWINSSTQNVNLKDVCGSEHSGMQRLNKKISECKECILIHQSVTGMYERRIDLLSI

SEQ ID NO: 1795 - protein, 958 aa, unidentified
  REGION 1..958: note = Description of Unknown: uncultivated organism with predicted taxonomy: Clostridiales
  REGION 1..958: note = MG23-41 effector
MPKQLTASNGIIPNQLHAAEMKAILTNAEKYLPFLLDKDESGLTVSQRILELFKFHIPYYVGPLGAAGKNVWAKRRKGEEKGRIYPWNFEKKIDTQEAAEEFIKRMVRHCSYIKGEHTLPKQSLLYEKFMVLNELNNLKINGTKPDVFVKQDIYENLFKTGKRVTLDKLKSYLYNNSFIDSKEVMITGIDGGFNSSLTSVGKFIGILGEDLFTDSNQAMVEQIIFWGTIYGSDKKFLKNRIEKEYKDRLTPKQIKRILGFKFNGWGKLSKRFLELKGSCECGECSIIQALWQTNHNLMELMSDQYDFKTNLMEVSEKTIKPLSEWTIDNLDDYYMSAPVKRMVWQTVKMLNETCELTGRVPDKIFVEMPREHESGNERKASRKKKLLDLYKAVKSEQKQWAEHKITEIDKRDEADFRIKKLYLYYIQHGKCMYSGDTIDLDLLLKNNNIYDIDHIYPRHFIKDDSIDNNLVLVKKEINNHKSDKYPLESDIREDMSGFWKYLCEKKFITKEKYNRLMRTEKFSAEEKAAFVNRQLVETGQGTKVITQILKQAFPDTQVVFVKARMVSDFRHEFGINKVRELNDTHHAKDAYLNIVVGNTYYTKFTNNPINFMKNAEKNPEDVQYKYNMDKIFRYNVIRNGETAWIADNGVTKQHVLKTINRNTVTITRKTEEVHGALSNKVTVWSSKSAEKNPDAYMPVKTTDEKAGDVTKYGGITAIANSGYTLVEYNINGKMIRSIEALPVYLGRKNMLTEDKIKEYLYEKIRKEYKNKTVTDLKVCILFIPQKSKVCVDGFNYYLGGVTGNSIYLSNAEPLYLSKEDEEYLRKIIKAVGKGYYEETDKNGQIIITGERNMKFFNTLGSKLNARPYNNNRRNIYKIMENKEEIFAGLSIEKQCYVINQIISWINSKTQNVDLSDIKGSSHSGTMTLNKKISECSQFELIYQSVTGMYEKRTDLLKL

SEQ ID NO: 1796 - protein, 1366 aa, unidentified
  REGION 1..1366: note = Description of Unknown: uncultivated organism with predicted taxonomy: Butyrivibrio sp. CAG:318
  REGION 1..1366: note = MG23-42 effector
MDKKMYVGIDMGTNSVGMAVTDEEYNLYRVKGKDLWCSRLFTEADTAAERRTNRISRRRRQREVARQGVLRKLFADEINKVDEGFFARLDESKYHLEDRDSEQKYTLFTDTGYTDKDYFKDYPTIFHLRNELLHPVKDSYDVRLVYLAIANMFKHRGNFLNESLDADKITSSADEAYRSLVETAMMYSIEFPENINVKKFIDIIGENGVSRSKHLENVCEYLGITKKDKQAYEILKLICGMSGVLINIYGEDVIDEENKKFSICFRDSNYEEKEGEALELLGDEYFELLEAIKEIHDIGMLAGIIKGHKYLSEARVDLYEQHKKDLDMLQHVLKKYDMKAYDEMFRVMKAGNYSAYVGSVNAHSKKIRRNGGDGRTQEEFYKNVKAVLKKFPEDDEEIKTILSEIDSETFMPKQLTASNGVIPNQLHVSELKAILTNAEKYLPFLLGKDESGLTVSERIVELFRFHIPYYVGPIGAQGENVWAKRRSGEENGKVYPWNFEQKIDTQSAAKEFINRMVRHCTYLSGERTLPKQSLLYEKFMVLNELNNLKIAGKKPSVQVKQDIYEKLFKLGKKVTLKQLEEYLCNNSIIASKEDIEGIDGGFNSSLTSVGKFRGVLGDELFTDANQAMAEEIIFWGTVYGNDKKFLKDEIESKYGTVLSKDQIKRILGFKFNGWGNLSKTFLELQGSCECGDCSLIQALWETNHNLMELLSEQYGFKKELDALASNVEKPLTEWTIDDLDNKYLSAPVKRMVWQTIKMLREACELTNKEPDRVFVEMPREHGKENDRKASRKKKLLDLYSALKREDKTWAELKIREIEGKTEADFRIKKLYLYYMQQGRCMYSGEKIELNDLFNNNLYDIDHIYPRHFIKDDSLENNLVLVKKQINNHKSDNYPLESNIRKNMNEFWKTLRDKNFISKEKYSRLIRTEEFTDEEKAAFISRQLVETRQGTKAITQVLKQAFPNTQIVFVKAGIVSDFRKKFDINKVRALNDTHHAKDAYLNIVVGNTYYTKFTNNPMNFIKDARKNPKNDFYRYNMDKIFDYNVIRNGEEAWIADNGKTKQHVLQIMKKNSVTITVKTEEYHGALSNKVTVWSKEKAKGNPDAYMPVKTSDTKAQDVTKYGGITAIANSGYTLVEYKVKGKKVRSLEALPVYLGRSNALTNEDIMQYISAALQKEYAGKEISDLSVRVPFVPQKSKVRVDGFEYYLGGKTGKNIYLNNAMPLYLSWNDEEYLRKIMKAIEIDNYEEIDKYSNAIITEEKNVALFDVLSVKLNSEPYINNRWNICKTLEGKEEIFKNLDIKKQCYVIGQIISWINSAMQNVNLKDVCGSEHSGMQQLNKKISECKECILIHQSVTGMYERRIDLLSI

SEQ ID NO: 1797 - protein, 1368 aa, unidentified
  REGION 1..1368: note = Description of Unknown: uncultivated organism with predicted taxonomy: Butyrivibrio sp. CAG:318
  REGION 1..1368: note = MG23-43 effector
MDKKMYVGIDMGTNSVGMAVTDEEYNLYRVKGKDLWCSRLFTEADTATERRTNRISRRRRQREVARQGVLRKLFADEINKVDEGFFARLDESKYHLEDRDSEQKYTLFTDTGYTDKDYFKDYPTIFHLRNELLHPVKDSYDVRLVYLAIANMFKHRGNFLNESLDADKITSSADEAYRSLVETAMMYSIEFPENINVKKFIDIIGENGVSRSKHLENVCEYLEITKKDKQAYEILKLICGMSGVLINIYGEDVIDEENKKFSICFRDSNYEEKEGEALELLGDEYFELLETIKEIHDIGMLAGIIKGHKYLSEARVDLYEQHKKDLDMLQHVLKKYDMKAYDEMFRVMKAGNYSAYVGSVNAHSKKIRRNGGDGRTREEFYKNVKAVLKKFPEDDEEIKTILSEIDSETFMPKQLTASNGVIPNQLHVSELKAILTNAEKYLPFLLDKDESGLTVSERIVELFRFHIPYYVGPIGAQGENVWAKRRPGEENGKVYPWNFEQKIDTQSAAKEFINRMVRHCTYLSGERTLPKQSFLYEKFMVLNELNNLRIDGKKPSVQVKQGIYEELFKTGKRVTLNQLIKYLYNKSIIASKEDVVIEGIDGGFNASLTSVGKFRGVLGDELFTDANQAMAEEIIFWGTVYGNDKKFLKDEIESKYGTVLSKDQIKRILGFKFNGWGNLSKTFLELQGSCECGDCSLIQALWETNHNLMELLSEQYGFKKELDALASNVEKPLTEWTIDDLDNKYLSAPVKRMVWQTIKMLREACELTNKEPDRVFVEMPREHGKENDRKASRKKKLLDLYSTLKREDKTWAELKIREIEGRTEADFRIKKLYLYYMQQGKCMYSGEKIELNDLFNNNLYDIDHIYPRHFIKDDSLENNLVLVKKEINNHKSDNYPLESDIRKNMNKFWKSLRDKNFISKEKYSRLIRTEEFTDEEKAAFISRQLVETRQGTKAITQVLKQAFPNTQIVFVKAGIVSDFRKKFDINKVRALNDTHHAKDAYLNIVVGNTYYTKFTNNPMNFIKDARKNPKNDFYRYNMDKIFDYNVIRNGEEAWIADNGKTKQHVLRIMKKNSVTITVKTEEYHGALSNKVTVWSKEKAKGNPDAYMPVKTSDTKAQDVTKYGGITSIANSGYTLVEYKVKGKKVRSLEALPAYLGRSNALTNEDIMQYISAALQKEYAGKEISDLSVRVPFVPQKSKVRVDGFEYYLGGKTGKSVYLSNAMPLYLSGNDEEYLRKIMKAIEIDNYEEIDKDSNAIITEEKNVALFDVLCVKLNSEPYINNRWNICKTLEGKEEIFKNLDIKKQCYVIGQIISWINSAMQNVNLKDVCGSEHAGTQTLNKKISESKECILIHQSVTGMYERKIDLLSI

SEQ ID NO: 1798 - protein, 1366 aa, unidentified
  REGION 1..1366: note = Description of Unknown: uncultivated organism with predicted taxonomy: Butyrivibrio sp. CAG:318
  REGION 1..1366: note = MG23-44 effector
MDKKMYVGIDMGTNSVGMAVTDEEYNLYRVKGKDFWCSRLFKKANTAAERRTNRISRHRRQREVARQGVLRELFADEINKVDEGFFARLDESKYHLEDRDSEQKYTLFTDTGYTDKDYFKDYPTIFHLRNELLHPVKDSYDVRLVYLAIANMFKNRGNFLNESLDADKITSSADEAYRRLVETAMMYSIEFPENINVKKFIDIIGENGVSRSKHLGNVCEYLGITKKDKPAYEILNLVCGLRGVLINIYGNEVIDEENKKFSICFRDSNYEEKEGEALELLGDEYFELLETIKEIHDIGMLAGIIKGHKYLSEARVDLYKQHKKDLDMLQHVLKKYDMKAYDEMFRVMKAGNYSAYVGSVNAHSKKIRRNGGDGRTREDFYKNVKAVLKKFPEDDEEIKTILSEIDSETFMPKQLTASNGVIPNQLHVSELKAILTNAEKYLPFLLDKDESGLTVSERIVELFRFHIPYYVGPIGAQGENVWAKRRPGEENGKVYPWNFEQKIDTQSAAKEFINRMVRHCTYLSGERTLPKQSFLYEKFMVLNELNNLRIDGKKPSVQVKQGIYEELFKTGKRVTLNQLIKYLYNKSIIASKEDVVIEGIDGGFNASLTSVGKFRGVLGDELFTDANQAMAEEIIFWGTVYGNDKKFLKDEIESKYGTVLSKDQIKRILGFKFNGWGNLSKTFLELQGSCECGDCSLIQALWETNHNLMELLSEQYGFKKELDALASNVEKPLTEWTIDDLDNKYLSAPVKRMVWQTIKMLREACELTNKEPDRVFVEMPREHGKENDRKASRKKKLLDLYSALKRENKTWAELKIREIEGKTEADFRIKKLYLYYMQQGKCMYSGEKIELNDLFNNNLYDIDHIYPRHFIKDDSLENNLVLVKKQINNHKSDNYPLENNIRKNMNEFWKTLREKNFISKEKYSRLIRTEEFTDEEKAAFISRQLVETRQGTKAITQVLKQAFPNTQIVFVKAGIVSDFRKKFDINKVRALNDTHHAKDAYLNIVVGNTYYTKFTNNPMNFIKDARKNPKNDFYRYNMDKIFDYNVIRNGEEAWIADNGKTKQHVLRIMKKNSVIITVKTEEANGKLSDINIVGKRYIKNADAYMPIKTSIAKMEDVTKYGGYGSISSAGYALVEYKVKGKKVRSLEALPVYLGRSNALTNEDIMQYISAAFQKEYAGKEISDLSVRVPFIPMESKVEIDGFEYYLGGKSTNQFYLKNAMPLYLPDNDEEYFRKIMKAIEIDDYKEVGKNGKAVITKENNMILFDTLSAKLKSEPYIHNRCNIYKILEGKEKIFKDLDIQKQCYVIVKIIDWIKSKTQGVDLTDIQGKKQSGTMKINKRISECRECILIHQSVTGMYERRIDLLSI

SEQ ID NO: 1799 - protein, 1042 aa, unidentified
  REGION 1..1042: note = Description of Unknown: uncultivated organism with predicted taxonomy: Butyrivibrio sp. CAG:318
  REGION 1..1042: note = MG23-45 effector
MDKKMYVGIDMGTNSVGMAVTDEEYNLYRVKGKDLWCSRLFTEADTAAERRTNRISRRRRQREVARQGVLRKLFADEINKVDEGFFARLDESKYHLEDRDSEQKYTLFTDTGYTDKDYFKDYPTIFHLRNELLHPVKDSYDVRLVYLAIANMFKHRGNFLNESLDADKITSSADEAYRSLVETAMMYSIEFPENINVKKFIDIIGENGVSRSKHLENVCEYLEITKKDKQAYEILKLICGMSGVLINIYGEDVIDEENKKFSICFRDSNYEEKEGEALELLGDEYFELLETIKEIHDIGMLAGIIKGHKYLSEARVDLYEQHKKDLDMLQHVLKKYDMKAYDEMFRVMKAGNYSAYVGSVNAHSKKIRRNGGDGRTREEFYKNVKAVLKKFPEDDEEIKTILSEIDSETFMPKQLTASNGVIPNQLHVSELKAILTNAEKYLPFLLDKDESGLTVSERIVELFRFHIPYYVGPIGAQGENVWAKRRPGEENGKVYPWNFEQKIDTQSAAKEFINRMVRHCTYLSGERTLPKQSFLYEKFMVLNELNNLRIDGKKPSVQVKQGIYEELFKTGKRVTLNQLIKYLYNKSIIASKEDVVIEGIDGGFNASLTSVGKFRGVLGDELFTDANQAMAEEIIFWGTVYGNDKKFLKDEIESKYGTVLSKDQIKRILGFKFNGWGNLSKTFLELQGSCECGDCSLIQALWETNHNLMELLSEQYGFKKELDALASNVEKPLTEWTIDDLDNKYLSAPVKRMVWQTIKMLREACELTNKEPDRVFVEMPREHGKENDRKASRKKKLLDLYSTLKREDKTWAELKIREIEGRTEADFRIKKLYLYYMQQGKCMYSGEKIELNDLFNNNLYDIDHIYPRHFIKDDSLENNLVLVKKEINNHKSDNYPLESDIRKNMNKFWKSLRDKNFISKEKYSRLIRTEEFTDEEKAAFISRQLVETRQGTKAITQVLKQAFPNTQIVFVKAGIVSDFRKKFDINKVRALNDTHHAKDAYLNIVVGNTYYTKFTNNPMNFIKDARKNPKNDFYRYNMDKIF

SEQ ID NO: 1800 - protein, 1376 aa, unidentified
  REGION 1..1376: note = Description of Unknown: uncultivated organism with predicted taxonomy: Clostridiales
  REGION 1..1376: note = MG23-46 effector
MGKNMYIGVDMGTSSDGVAVTDENYTLYRVKGKDLWTSRLFKEANTAAERRTNRVSRRRRQRETARMGILRELFSEEINKVDEGFFARLDESKYHIEDRVVKQKYALFVDKGYTDKEYYKEYPTIFHLRNELLHPQKNSYDVRLVYLAVANMFKHRGNFLNETLDIDKITANAVDVYSQLIEELDLYCIQMPVSIDIGKLINIIGENGISRSKRLENASKYLGITKKDKQSYEILKLICGLKGILYNIYGENVIDEENKKFSLSFTDSNYEDEETQAKDILGDEYFELIEIIKELYDIGVLSGIIKGHKFLSEARVELYEEHKKDLDMLQQVLKKYDKNAYDEMFRVMKEGNYSAYVGSVNARGKNKKIRRNVGEGKKGKNGRSQEAFYKYVKTTLKNYPDDDENIKNILFKIENETFMPKQLTASNGIIPNQLHAAELKAILTNAEKYLPFLLDKDESDLTVSQRILELFKFHIPYYVGPLGAAGKNVWAKRRKGEEKGRIYPWNFEKKIDTQEAAEEFIKRMVRHCSYIKGEHTLPKQSLLYEKFMVLNELNNLKINGTKPDVFVKQDIYENLFKTGKRVTLDKLKSYLYNNSFIDSKEVMITGIDGGFNSSLTSVGKFIGILGEDLFTDSNQAMVEQIIFWGTIYGSDKKFLKNRIEKEYKDRLTPKQIKRILGFKFNGWGKLSKRFLELKGSCECGECSIIQALWQTNHNLMELMSDQYDFKTNLMEVSEKTIKPLSEWTIDNLDDYYMSAPVKRMVWQTIKMLNEICELTGRIPDKIFVEMPREHENGNERKASRKKKLLDLYKAIKSEQKQWAEQMIAEIDKRDEADFRIKKLYLYYIQQGKCMYSGDTIDLDLLLKNNNIYDIDHIYPRHFIKDDSIDNNLVLVKKEINNHKSDKYPLESDIKKDMSGFWKYLCEKKFITKEKYNRLMRTDKFSAEEKAAFVNRQLVETGQGTKVITQILKQAFPDTQVVFVKARMVSDFRHEFGINKVRELNDTHHAKDAYLNIVVGNTYYTKFTNNPINFMKNAEKNPEDVQYKYNMDKIFRYNVIRNGETAWIADNGVTKQHVLKTINRNTVTITRKTEEVHGALSNKVTVWSSKLAKKNPDAYMPVKTTDEKACDVTKYGGITAIANSGYTLVEYNINGKMIRSIEALPVYLGRKNMLTEDKIKEYLHEKIRKEYKNKTVTDLKICILFIPQKSKVCVDGFNYYLGGVTGNSIYLSNAEPLYLSKEDEEYLRKIIKAVGKGYYEETDENGQIIITGERNMKFFNTLSSKLNNRPYNNNRWNIYKIMENKEEIFAGLSIEKQCYVINQIISWINSKTQNVDLSDIKGSSHSGTMTLNKKISECSQFELIYQSVTGMYEKRTDLLKL

SEQ ID NO: 1801 - protein, 1366 aa, unidentified
  REGION 1..1366: note = Description of Unknown: uncultivated organism with predicted taxonomy: Butyrivibrio sp. CAG:318
  REGION 1..1366: note = MG23-47 effector
MDKKMYVGIDMGTNSVGMAVTDEEYNLYRVKGKDLWCSRLFTEADTAAERRTNRISRRRRQREVARQGVLRKLFADEINKVDEGFFARLDESKYHLEDRDSEQKYTLFTDTGYTDKDYFKDYPTIFHLRNELLHPVKDSYDVRLVYLAIANMFKHRGNFLNESLDADKITSSADEAYRSLVETAMMYSIEFPENINVKKFIDIIGENGVSRSKHLENVCEYLGITKKDKQAYEILKLICGMSGVLINIYGEDVIDEENKKFSICFRDSNYEEKEGEALELLGDEYFELLEAIKEIHDIGMLAGIIKGHKYLSEARVDLYEQHKKDLDMLQHVLKKYDMKAYDEMFRVMKAGNYSAYVGSVNAHSKKIRRNGGDGRTQEEFYKNVKAVLKKFPEDDEEIKTILSEIDSETFMPKQLTASNGVIPNQLHVSELKAILTNAEKYLPFLLGKDESGLTVSERIVELFRFHIPYYVGPIGAQGENVWAKRRSGEENGKVYPWNFEQKIDTQSAAKEFINRMVRHCTYLSGERTLPKQSLLYEKFMVLNELNNLKIAGKKPSVQVKQDIYEKLFKLGKKVTLKQLEEYLCNNSIIASKEDIEGIDGGFNSSLTSVGKFRGVLGDELFTDANQAMAEEIIFWGTVYGNDKKFLKDEIESKYGTVLSKDQIKRILGFKFNGWGNLSKTFLELQGSCECGDCSLIQALWETNHNLMELLSEQYGFKKELDALASNVEKPLTEWTIDDLDNKYLSAPVKRMVWQTIKMLREACELTNKEPDRVFVEMPREHGKENDRKASRKKKLLDLYSALKRENKTWAELKIREIEGKTEADFRIKKLYLYYMQQGKCMYSGEKIELNDLFNNNLYDIDHIYPRHFIKDDSLENNLVLVKKQINNHKSDNYPLESDIRKNMNKFWKSLREKNFISEEKYSRLIRTEEFTDEEKAAFISRQLVETRQGTKAITQVLKQAFPNTQIVFVKAGIVSDFRKKFDINKVRALNDTHHAKDAYLNIVVGNTYYTKFTNNPMNFIKDARKNPKNDFYRYNMDKIFDYNVIRNGEEAWIADNGKTKQHVLQIMKKNSVTITVKTEEYHGALSNKVTVWSKEKAKGNPDAYMPVKTSDTKAQDVTKYGGITAIANSGYTLVEYKVKGKKVRSLEALPVYLGRSNALTNEDIMQYISAALQKEYAGKEISDLSVRVPFVPQKSKVRVDGFEYYLGGKTGKSVYLSNAMPLYLSGNDEEYLRKIMKAIEIDNYEEIDKDSNAIITEEKNVALFDVLCVKINSEPYINNQWNIYKILEGKEEIFKNLDIKKQCYIIGQIISWINSSTQNVNLKDVCGSEHSGMQRLNKKISECKECILIHQSVTGMYERRIDLLSI

SEQ ID NO: 1802 - protein, 1368 aa, unidentified; identical to SEQ ID NO: 1765
  REGION 1..1368: note = Description of Unknown: uncultivated organism with predicted taxonomy: Butyrivibrio sp. CAG:318
  REGION 1..1368: note = MG23-48 effector

SEQ ID NO: 1803 - protein, 993 aa, unidentified
  REGION 1..993: note = Description of Unknown: uncultivated organism with predicted taxonomy: Clostridiales
  REGION 1..993: note = MG23-49 effector
MEINLENNAEEIIMGKKMYIGIDMGTSSVGMAVTDENYTLYRVKGKDFWTSRLFKEANTAAERRTNRVSRRRRQRETARMGILRELFSEEINKVDEGFFARLDESKYHIEDRDVKQKYALFADKGYTDKEYYQDYPTIFHLRNELLHPQKDSYDVRLVYLAIANMFKHRGNFLNETLDIDKITASADDVYSQLIEELDLYCIQMPVNINIGELINIIGENGISRSKRLENASKYLGISKKDKQSYEILKLICGLKCILYNIYGENVIDEENKKFSISFTDSNYEDEETQAKDILGDEYFELIEIIKELHDICVLSGIIKGHKFLSEARVELYEEHKNDLDMLQQVLKKYDKNAYDEMFRVMKEGNYSAYVGSVNARGKNKKIRRNGGKGRSQEDFYKYVKTTLKNYPDDDENIKNILFKIENETFMPKQLTASNGIIPNQLHAAEMKAILTNAEKYLPFLLDKDVSGLTVSQRILELFKFHIPYYVGPLGAAGKNVWAKRRKGEEKGRIYPWNFEKKIDTQEAAEEFIKRMVRHCSYIKGEHTLPKQSLLYEKFMVLNELNNLKINGTKPDVFVKQDIYENLFKTGKRVTLDKLKSYLYNNSFIDSKEVMITGIDGGFNSSLTSVGKFIGILGEDLFTDSNQAMVEQIIFWGTIYGNDKKFLKNRIEKEYKDRLTPKQIKRILGFKFNGWGKLSKLFLELKGSCECGECSIIQALWQTNHNLMELMSDQYDFKTNLMELSEETIKPLSEWTIDNLEDYYMSAPVKRMVWQTVKMLNEICELTGRIPDKIFVEMPREHESSNERKASRKKKLLDLYKAVKSEQKQWAEHKITEIDKRDEADFRIKKLYLYYIQQGKCMYSGDTIDLDLLLKNNNIYDIDHIYPRHFIKDDSIDNNLVLVKKEINNHKSDKYPLESDIREDMSGFWKYLCEKKFITKEKYNRLMRTEKFSAEEKAAFVNRQLVETGQGTKVITQILKQAFPDTQVVFVKARMVSD

SEQ ID NO: 1804 - protein, 1386 aa, unidentified
  REGION 1..1386: note = Description of Unknown: uncultivated organism with predicted taxonomy: Clostridiales
  REGION 1..1386: note = MG23-50 effector
MDRDDKKMYVGIDMGTNSVGLAVTDEKYNLYRVKGKDFWCSRIFSKAETAEVRRVNRISRRRRQRETARQGILREFFAEEINKVDEGFFARLDESKYHIEDRENQQKYTLFIDNGYTDKEYYAEYPTIFHLRNELLHPQKDSYDVRLVYLAISNMFKHRGNFLNETLDMGKVTSSAGDIYQQLVEEAMLYVIELPVSIDVERLINIIGEKGVSRSKHLENVSSYLGITKKDKSAYEILKLVCGMSGLLFNIYGEEIIDEENKKFSLNFRDTNYEEKEGQALELLGNDNFQLIEIIKELHDIGVLSSIIKGHKFLSESRVELYEEHKKDLDMLQAVLKRYDKKAYNDMFRIMKEGNYSAYVGSVNSIGQNEKRSEKCQKQKIRRNRGKGSSQEVFYKYVKSVLKKLPEDDKDVKKIMEKIENETFMPKQLTASNGVMPNQLHTVELRAILENAEKYLPFLLNKDESGLTVSQRIVELFKFHIPYYVGPIGAGGQNVWAKRRKGEEKGRIYPWNFEQKIDTQAAAEEFIGRMVRHCTYLANERTLPKQSLLYEKYMVLNELNNMKINGIKPDVSVKQGIYNDLFKKGKRVTLNALKSYLYNNSIIESKEDVVITGIDIVHNGGFSASLTSVGKFIGVLGDELFTDENQTMVEQIIFWGTVYGNDKKFLKNRIQETYAGRLTWEQIKRIAGFKFNGWGNLSKAFLELKGNCECGECSIIQALWETNHNLMELLADQYDFKKNLEAMSNNVEKPLQEWTIEDLEGKYLSAPVKRMVWQTVKMLREVCELTGRQPDKVFVEMPREEGIKNERKNSRKKKLLELYTSIKNEQKAWSEVKIREIDGRTETDFRIKKLYLYYLQHGKCMYSGEKIELNDLFNNNLYDIDHIYPRHFIKDDSIENNLVLVKKQINNHKSDTFPIESSIQKNMMTFWKTLVEHNFITKEKYNRLMRTEEFTDEEKAAFISRQLVETRQGTKAVTQILKQAFPDTQIIFVKAGVVSDFRKKFNINKVRALNDTHHAKDAYLNIVVGNIYNTKFTSNPINFIKDARKNVNDISYKYNMDKMFDYNVCRNGENAWIADNGKSKQHVLSVLGKNSVIITRKTEENHGALSNKVTVWSKDTAKKNPGAYMPVKTTDSKAQDVTKYGGITSIASSGYTLIEYKVKGKTIRSIEALPVYLGKSDTLTEERILEYIGVNLKKEYKDKEISDIKVCVKFIPFKSKIRIDGFNYYLGGKTGNYIYLNNDEALYLNNNDEEYLRKITKAIDITNYEEIDENGNVIITQEKNTKLFNVLCEKLNNKPYRYNRWNIYNVLEGKEETFRKLDVEKQCYIINQIILWVNSAVQNINLKYINGKEHEGSLHMNKKISEYDEAVLIQQSVTGMYERKTDLLKV

SEQ ID NO: 1805 - protein, 1389 aa, unidentified
  REGION 1..1389: note = Description of Unknown: uncultivated organism with predicted taxonomy: Clostridiales
  REGION 1..1389: note = MG23-51 effector
MEINLENNAEEIIMGKKMYIGIDMGTSSVGMAVTDENYTLYRVKGKDFWTSRLFKEANTAAERRTNRVARRRRQRETARMGILRELFSEEINKVDEGFFARLDESKYHIEDRDVKQKYALFADKGYTDKEYYQDYPTIFHLRNELLHPQKDSYDVRLVYLAIANMFKHRGNFLNETLDIDKITASADDVYSQLIEELDLYCIQMPVNINIGELINIIGENGISRSKRLENASKYLGISKKDKQSYEILKLICGLKGILYNIYGENVIDEENKKFSISFTDSNYEDEETQAKDILGDEYFELIEIIKELHDIGVLSGIIKGHKFLSEARVELYEEHKKDLDMLQQVLKKYDKNAYDEMFRVMKEGNYSAYVGSVNARGKNKKIRRNVGEGKKGKNGRSQEAFYKYVKTTLKNFPDDDENIKNILFKIENETFMPKQLTASNGIIPNQLHAAEMKAILTNAEKYLPFLLDKDESGLTVSQRILELFKFHIPYYVGPLGAAGKNVWAKRRKGEEKGRIYPWNFEKKIDTQEAAEEFIKRMVRHCSYIKGEHTLPKQSLLYEKFTVLNELNNLKINGTKPDVFVKQDIYENLFKTGKRVTLDKLKSYLYNNSFIDSKEVMITGIDGGFNSSLTSVGKFIGILGEDLFTDSNQAMVEQIIFWGTIYGSDKKFLKNRIEKEYKDRLTPKQIKRILGFKFNGWGKLSKRFLELKGSCECGECSIIQALWQTNHNLMELMSDQYDFKTNLMEVSEKTIKPLSEWTIDNLDDYYMSAPVKRMVWQTIKMLNEICELTGRIPDKIFVEMPREHENGNERKASRKKKLLDLYKAIKSEQKQWAEQMIAEIDKRDEADFRIKKLYLYYIQQGKCMYSGDTIDLDLLLKNNNIYDIDHIYPRHFIKDDSIDNNLVLVKKEINNHKSDKYPLESDIREDMSGFWKYLCEKKFITKEKYNRLMRTEKFSAEEKAAFVNRQLVETGQGTKVITQILKQAFPDTQVVFVKARMVSDFRHEFGINKVRELNDTHHAKDAYLNIVVGNTYYTKFTNNPINFMKNAEKNPEDVQYKYNMDKIFRYNVIRNGETAWIADNGVTKQHVLKTINRNTVTITRKTEEVHGALSNKVTVWSSKSAEKNPDAYMPVKTTDEKAGDVTKYGGITAIANSGYTLIEYNINGKMIRSIEALPVYLGRKNMLTDDKIKEYLHEKIRKEYKNKTVTDLKVCILFIPQKSKVCVDGFNYYLGGVTGNSIYLSNAEPLYLSKEDEEYLRKIIKAVSKGYYEETDKNGQIIITDERNMKFFNTLGSKLNARPYCNNRWNIYKIMENKEEIFAGLSIEKQCYVINQIISWINSKTQNVDLSDIKGGSHSGTMTLNKKISECSQFELIYQSVTGMYEKRTDLLKL

SEQ ID NO: 1806 - protein, 1366 aa, unidentified
  REGION 1..1366: note = Description of Unknown: uncultivated organism with predicted taxonomy: Butyrivibrio sp. CAG:318
  REGION 1..1366: note = MG23-52 effector
MDKKMYVGIDMGTNSVGMAVTDEEYNLYRVKGKDLWCSRLFTEADTAAERRTNRISRRRRQREVARQGVLRKLFADEINKVDEGFFARLDESKYHLEDRDSEQKYTLFTDTGYTDKDYFKDYPTIFHLRNELLHPVKDSYDVRLVYLAIANMFKHRGNFLNESLDADKITSSADEAYRSLVETAMMYSIEFPENINVKKFIDIIGENGVFRSKHLENVCEYLGITKKDKQAYEILKLICGMSGVLINIYGEDVIDEENKKFSICFRDSNYEEKEGEALELLGDEYFELLEAIKEIHDIGMLAGIIKGHKYLSEARVDLYEQHKKDLDMLQHVLKKYDMKAYDEMFRVMKAGNYSAYVGSVNAHSKKIRRNGGDGRTQEEFYKNVKAVLKKFPEDDEEIKTILSEIDSETFMPKQLTASNGVIPNQLHVSELKAILTNAEKYLPFLLGKDESGLTVSERIVELFRFHIPYYVGPIGAQGENVWAKRRSGEENGKVYPWNFEQKIDTQSAAKEFINRMVRHCTYLSGERTLPKQSLLYEKFMVLNELNNLKIAGKKPSVQVKQDIYEKLFKLGKKVTLKQLEEYLCNNSIIASKEDIEGIDGGFNSSLTSVGKFRGVLGDELFTDANQAMAEEIIFWGTVYGNDKKFLKDEIESKYGTVLSKDQIKRILGFKFNGWGNLSKTFLELQGSCECGDCSLIQALWETNHNLMELLSEQYGFKKELDALASNVEKPLTEWTIDDLDNKYLSAPVKRMVWQTIKMLREACELTNKEPDRVFVEMPREHGKENDRKASRKKKLLDLYSALKREDKTWAELKIREIEGKTEADFRIKKLYLYYMQQGRCMYSGEKIELNDLFNNNLYDIDHIYPRHFIKDDSLENNLVLVKKQINNHKSDNYPLESNIRKNMNEFWKTLRDKNFISKEKYSRLIRTEEFTDEEKAAFISRQLVETRQGTKAITQVLKQAFPNTQIVFVKAGIVSDFRKKFDINKVRALNDTHHAKDAYLNIVVGNTYYTKFTNNPMNFIKDARKNPKNDFYRYNMDKIFDYNVIRNGEEAWIADNGKTKQHVLQIMKKNSVTITVKTEEYHGALSNKVTVWSKEKAKGNPDAYMPVKTSDTKAQDVTKYGGITAIANSGYTLVEYKVKGKKVRSLEALPVYLGRSNALTNEDIMQYISAALQKEYAGKEISDLSVRVPFVPQKSKVRVDGFEYYLGGKTGKNIYLNNAMPLYLSWNDEEYLRKIMKAIEIDNYEEIDKYSNAIITEEKNVALFDVLSVKLNSEPYINNRWNICKTLEGKEEIFKNLDIKKQCYVIGQIISWINSAMQNVNLKDVCGSEHSGMQQLNKKISECKECILIHQSVTGMYERRIDLLSI

SEQ ID NO: 1807 - protein, 1368 aa, unidentified; identical to SEQ ID NO: 1765
  REGION 1..1368: note = Description of Unknown: uncultivated organism with predicted taxonomy: Butyrivibrio sp. CAG:318
  REGION 1..1368: note = MG23-53 effector

SEQ ID NO: 1808 - protein, 1366 aa, unidentified; identical to SEQ ID NO: 1777
  REGION 1..1366: note = Description of Unknown: uncultivated organism with predicted taxonomy: Butyrivibrio sp. CAG:318
  REGION 1..1366: note = MG23-54 effector

SEQ ID NO: 1809 - protein, 1368 aa, unidentified; identical to SEQ ID NO: 1765
  REGION 1..1368: note = Description of Unknown: uncultivated organism with predicted taxonomy: Butyrivibrio sp. CAG:318
  REGION 1..1368: note = MG23-55 effector

SEQ ID NO: 1810 - protein, 1114 aa, unidentified
  REGION 1..1114: note = Description of Unknown: uncultivated organism with predicted taxonomy: Butyrivibrio sp. CAG:318
  REGION 1..1114: note = MG23-56 effector
FFITCLCLERSERNDKNYEEKEGEALELLGDEYFELLETIKEIHDIGMLAGIIKGHKYLSEARVDLYKQHKKDLDMLQHVLKKYDMKAYDEMFRVMKAGNYSAYVGSVNAHSKKIRRNGGDGRTREDFYKNVKAVLKKFPEDDEEIKTILSEIDSETFMPKQLTASNGVIPNQLHVSELKAILTNAEKYLPFLLDKDESGLTVSERIVELFRFHIPYYVGPIGAQGENVWAKRRPGEENGKVYPWNFEQKIDTQSAAKEFINRMVRHCTYLSGERTLPKQSFLYEKFMVLNELNNLRIDGKKPSVQVKQGIYEELFKTGKRVTLNQLIKYLYNKSIIASKEDVVIEGIDGGFNASLTSVGKFRGVLGDELFTDANQAMAEEIIFWGTVYGNDKKFLKDEIESKYGTVLSKDQIKRILGFKFNGWGNLSKTFLELQGSCECGDCSLIQALWETNHNLMELLSEQYGFKKELDALASNVEKPLTEWTIDDLDNKYLSAPVKRMVWQTIKMLREACELTNKEPDRVFVEMPREHGKENDRKASRKKKLLDLYSALKRENKTWAELKIREIEGKTEADFRIKKLYLYYMQQGKCMYSGEKIELNDLFNNNLYDIDHIYPRHFIKDDSLENNLVLVKKQINNHKSDNYPLESNIRKNMNEFWKTLREKNFISKEKYSRLIRTEEFTDEEKAAFISRQLVETRQGTKAITQVLKQAFPNTQIVFVKAGIVSDFRKKFDINKVRALNDTHHAKDAYLNIVVGNTYYTKFTNNPMNFIKDARKNPKNDFYRYNMDKIFDYNVIRNGEEAWIADNGKTKQHVLRIMKKNSVIITVKTEEANGKLSDINIVGKRYIKNADAYMPIKTSIAKMEDVTKYGGYGSISSAGYALVEYKVKGKKVRSLEALPVYLGRSNALTNEDIMQYISAAFQKEYAGKEISDLSVRVPFIPMESKVEIDGFEYYLGGKSTNQFYLKNAMPLYLPDNDEEYFRKIMKAIEIDDYKEVGKNGKAVITKENNMILFDTLSAKLKSEPYIHNRCNIYKILEGKEKIFKDLDIQKQCYVIVKIIDWIKSKTQGVDLTDIQGKKQSGTMKINKRISECRECILIHQSVTGMYERRIDLLSI

SEQ ID NO: 1811 - protein, 829 aa, unidentified; identical to SEQ ID NO: 1781
  REGION 1..829: note = Description of Unknown: uncultivated organism with predicted taxonomy: Butyrivibrio sp. CAG:318
  REGION 1..829: note = MG23-57 effector

SEQ ID NO: 1812 - protein, 1366 aa, unidentified
  REGION 1..1366: note = Description of Unknown: uncultivated organism with predicted taxonomy: Butyrivibrio sp. CAG:318
  REGION 1..1366: note = MG23-58 effector
MDKKMYVGIDMGTNSVGMAVTDEEYNLYRVKGKDFWCSRLFKKANTAAERRTNRISRHRRQREVARQGVLRELFADEINKVDEGFFARLDESKYHLEDRDSEQKYTLFTDTGYTDKDYFKDYPTIFHLRNELLHPVKDSYDVRLVYLAIANMFKHRGNFLNESLDADKITSSADEAYRRLVETAMMYSIEFPENINVKKFIDIIGENGVSRSKHLGNVCEYLGITKKDKPAYEILNLVCGLRGVLINIYGNEVIDEENKKFSICFRDSNYEEKEGEALELLGDEYFELLETIKEIHDIGMLAGIIKGHKYLSEARVDLYKQHKKDLDMLQHVLKKYDMKAYDEMFRVMKAGNYSAYVGSVNAHSKKIRRNGGDGRTREDFYKNVKAVLKKFPEDDEEIKTILSEIDSETFMPKQLTASNGVIPNQLHVSELKAILTNAEKYLPFLLDKDESGLTVSERIVELFRFHIPYYVGPIGAQGENVWAKRRPGEENGKVYPWNFEQKIDTQSAAKEFINRMVRHCTYLSGERTLPKQSFLYEKFMVLNELNNLRIDGKKPSVQVKQGIYEELFKTGKRVTLNQLIKYLYNKSIIASKEDVVIEGIDGGFNASLTSVGKFRGVLGDELFTDANQAMAEEIIFWGTVYGNDKKFLKDEIESKYGTVLSRDQIKRILGFKFNGWGNLSKTFLELQGSCECGDCSLIQALWETNHNLMELLSEQYGFKKELDALASNVEKPLTEWTIDDLDNKYLSAPVKRMVWQTIKMLREACELTNKEPDRVFVEMPREHGKENDRKASRKKKLLDLYSALKRENKTWAELKIREIEGKTEADFRIKKLYLYYMQQGKCMYSGEKIELNDLFNNNLYDIDHIYPRHFIKDDSLENNLVLVKKQINNHKSDNYPLESNIRKNMNEFWKTLREKNFISKEKYSRLIRTEEFTDEEKAAFISRQLVETRQGTKAITQVLKQAFPNTQIVFVKAGIVSDFRKKFDINKVRALNDTHHAKDAYLNIVVGNTYYTKFTNNPMNFIKDARKNPKNDFYRYNMDKIFDYNVIRNGEEAWIADNGKTKQHVLRIMKKNSVIITVKTEEANGKLSDINIVGKRYIKNADAYMPIKTSIAKMEDVTKYGGYGSISSAGYALVEYKVKGKKVRSLEALPVYLGRSNALTNEDIMQYISAAFQKEYAGKEISDLSVRVPFIPMESKVEIDGFEYYLGGKSTNQFYLKNAMPLYLPDNDEEYFRKIMKAIEIDDYKEVGKNGNAVITKENNMILFDTLSAKLKSEPYIHNRCNIYKILEGKEKIFKDLDIQKQCYVIVKIIDWIKSKTQGVDLTDIQGKKQSGTMKINKRISECRECILIHQSVTGMYERRIDLLSI

SEQ ID NO: 1813 - protein, 1389 aa, unidentified
  REGION 1..1389: note = Description of Unknown: uncultivated organism with predicted taxonomy: Clostridiales
  REGION 1..1389: note = MG23-59 effector
MEINLENNAEEIIMGKKMYIGIDMGTSSVGMAVTDENYNLYRVKGKDFWTSRLFKEASTAANRRTNRVARRRRQRELARMGILRELFSEEINKVDEGFFARLDESKYHIEDRDVKQKYALFADKGYTDKEYYQDYPTIFHLRNELLHPQKDSYDVRLVYLAIANMFKHRGNFLNETLDIDKITASADDVYSQLIEELDLYCIQMPVNINIGELINIIGENGISRSKRLENASKYLGISKKDKQSYEILKLICGLKGILYNIYGENVIDEENKKFSISFTDSNYEDEETQAKDILGDEYFELIEIIKELHDIGVLSGIIKGHKFLSEARVELYEEHKKDLDMLQQVLKKYDKNAYDEMFRVMKEGNYSAYVGSVNARGKNKKIRRNVGEGKKGKNGRSQEAFYKYVKTTLKNFPDDDENIKNILFKIENETFMPKQLTASNGIIPNQLHAAEMKAILTNAEKYLPFLLDKDVSGLTVSQRILELFKFHIPYYVGPLGAAGKNVWAKRRKGEEKGRIYPWNFEKKIDTQEAAEEFIKRMVRHCSYIKGEHTLPKQSLLYEKFMVLNELNNLKINGTKPDVFVKQDIYENLFKTGKRVTLDKLKSYLYNNSFIDSKEVMITGIDGGFNSSLTSVGKFIGILGEDLFTDSNQAMVEQIIFWGTIYGSDKKFLKNRIEKEYKDRLTPKQIKRILGFKFNGWGKLSKRFLELKGSCECGECSIIQALWQTNHNLMELMSDQYDFKTNLMELSEETIRPLSEWTIDNLEDYYMSAPVKRMVWQTVKMLNETCELTGRIPDKIFVEMPREHESGNERKASRKKKLLDLYKAVKSEQKQWAEHKITEIDKRDEADFRIKKLYLYYIQHGKCMYSGDTIDLDLLLKNNNIYDIDHIYPRHFIKDDSIDNNLVLVKKEINNHKSDKYPLESDIREDMSGFWKYLCEKKFITKEKYNRLMRTEKFSAEEKAAFVNRQLVETGQGTKVITQILKQAFPDTQVVFVKARMVSDFRHEFGINKVRELNDTHHAKDAYLNIVVGNTYNTKFTNNPINFMKNAEKNPEDVQYKYNMDKIFRYNVIRNGETAWIADNGVTKQHVLKTINRNTVTITRKTEEVHGALSNKVTVWSSKSAKKNPDAYMSVKTTDEKACDVTKYGGFTAIANSGYTLVEYNINGKMIRSIEALPVYLGRKNMLTDDKIKEYLHEKIRKEYKNKTVTDLKVCILFIPQKSKVCVDGFNYYLGGVTGNSIYLSNAEPLYLSKEDEEYLRKIIKAVGKGYYEETDKNGQIIITGERNMKFFNTLSSKLNNRPYNNNRWNIYKIMENKEEIFAGLSIEKQCYVINQIISWINSKTQNVDLSDIKGSSHSGTMTLNKKISECSQFELIYQSVTGMYEKRTDLLKL

SEQ ID NO: 1814 - protein, 1389 aa, unidentified
  REGION 1..1389: note = Description of Unknown: uncultivated organism with predicted taxonomy: Clostridiales
  REGION 1..1389: note = MG23-60 effector
MEINLENNAEEIIMGKKMYIGIDMGTSSVGMAVTDENYNLYRVKGKDFWTSRLFKEANTAAERRTNRVSRRRRQRETARMGILRELFSEEINKVDEGFFARLDESKYHIEDRDVKQKYALFADKGYTDKEYYQDYPTIFHLRNELLHPQKDSYDVRLVYLAIANMFKHRGNFLNETLDIDKITASADDVYSQLIEELDLYCIQMPVNINIGELINIIGENGISRSKRLENASKYLGISKKDKQSYEILKLICGLKGILYNIYGENVIDEENKKFSISFTDSNYEDEETQAKDILGDEYFELIEIIKELHDIGVLSGIIKGHKFLSEARVELYEEHKKDLDMLQQVLKKYDKNAYDEMFRVMKEGNYSAYVGSVNARGKNKKIRRNVGEGKKGKNGRSQEAFYKYVKTTLKNFPDDDENIKNILFKIENETFMPKQLTASNGIIPNQLHAAEMKAILTNAEKYLPFLLDKDESGLTVSQRILELFKFHIPYYVGPLGAAGKNVWAKRRKGEEKGRIYPWNFEKKIDTQEAAEEFIKRMVRHCSYIKGEHTLPKQSLLYEKFTVLNELNNLKINGTKPDVFVKQDIYENLFKTGKRVTLDKLKSYLYNNSFIDSKEVMITGIDGGFNSSLTSVGKFIGILGEDLFTDSNQAMVEQIIFWGTIYGSDKKFLKNRIEKEYKDRLTPKQIKRILGFKFNGWGKLSKRFLELKGSCECGECSIIQVLWQTNHNLMELMSDQYDFKTNLMELSEETIKPLSEWTIDNLEDYYMSTPVKRMVWQTVKMLNETCELTGRVPDKIFVEMPREHESGNERKASRKKKLLDLYKAVKSEQKQWAEHKITEIDKRDEADFRIKKLYLYYIQQGKCMYSGDTIDLDLLLKNNNIYDIDHIYPRHFIKDDSIDNNLVLVKKEINNHKSDKYPLESDIREDMSGFWKYLCEKKFITKEKYNRLMRTEKFSAEEKATFVNRQLVETGQGTKVITQILKQAFPDTQVVFVKARMVSDFRHEFGINKVRELNDTHHAKDAYLNIVVGNTYNTKFTNNPINFMKNAEKNPEDVQYKYNMDKIFRYNVIRNGETAWIADNGTTKQHVIKTINRNTVTITRKTEEVHGALSNKVTVWSSKSAEKNPDAYMPVKTTDEKAGDVTKYGGITAIANSGYTLVEYNINGKMIRSIEALPVYLGRKNMLTEDKIKEYLHEKIRKEYKNKTVTDLKVCILFIPQKSKVCVDGFNYYLGGVTGNSIYLSNAEPLYLSKEDEEYLRKIIKAVGKGYYEETDKNGQIIITGERNMKFFNTLGSKLNARPYNNNRWNIYKIMDNKEEIFAGLSIEKQCYVINQIISWINSKTQNVDLSDIKGSSHSGTMTLNKKISDCSQFELIYQSVTGMYEKRTDLLKL

SEQ ID NO: 1815 - protein, 881 aa, unidentified
  REGION 1..881: note = Description of Unknown: uncultivated organism with predicted taxonomy: Clostridiales
  REGION 1..881: note = MG23-61 effector
MGKNMYIGVDMGTSSVGMAVTDENYTLYRVKGKDFWTSRLFKEANTAAERRTNRVARRRRQRETARMGILRELFSEEINKVDEGFFARLDESKYHIEDRDVKQKYALFADKGYTDKEYYQDYPTIFHLRNELLHPQKDSYDVRLVYLAIANMFKHRGNFLNETLDIDKITASADDVYSQLIEELDLYCIQMPVNINIGELINIIGENGISRSKRLENASKYLGISKKDKQSYEILKLICGLKGILYNIYGENVTDEENKKFSISFTDSNYEDEETQAKDILGDEYFELIEIIKELHDIGVLSGIIKGHKFLSEARVELYEEHKKDLDMLEQVLKKYDKNAYDEMFRVMKEGNYSAYVGSVNARGKNKKIKRNVGEGKKGKNGRSQEAFYKYVKTTLKNFPDDDENIKNILFKIENETFMPKQLTASNGIIPNQLHAAEMKAILTNAEKYLPFLLDKDESGLTVSQRILELFKFHIPYYVGPLGAAGKNVWAKRRKGEEKGRIYPWNFEKKIDTQEAAEEFIKRMVRHCSYIKGEHTLPKQSLLYEKFTVLNELNNLKINGTKPDVFVKQDIYENLFKTGKRVTLDKLKSYLYNNSFIDSKEVMITGIDGGFNSSLTSVGKFIGILGEDLFTDSNKAMVEQIIFWGTIYGSDKKFLKNRIEKEYKDRLTPKQIKRILGFKFNGWGKLSKRFLELKGSCECGECSIIQALWQTNHNLMELMSDQYDFKTNLMEVSEKTIKPLSEWTIDNLDDYYMSAPVKRMVWQTIKMLNEICELTGRIPDKIFVEMPREHENGNERKASRKKKLLDLYKAIKSEQKQWAEQMIAEIDKRDEADFRIKKLYLYYIQQGKCMYSGDTIDLDLLLKNNNIYDIDHIYPRHFIKD

SEQ ID NO: 1816 - protein, 1368 aa, unidentified; identical to SEQ ID NO: 1788
  REGION 1..1368: note = Description of Unknown: uncultivated organism with predicted taxonomy: Butyrivibrio sp. CAG:318
  REGION 1..1368: note = MG23-62 effector

SEQ ID NO: 1817 - protein, 1366 aa, unidentified
  REGION 1..1366: note = Description of Unknown: uncultivated organism with predicted taxonomy: Butyrivibrio sp. CAG:318
  REGION 1..1366: note = MG23-63 effector
MDKKMYVGIDMGTNSVGMAVTDEEYNLYRVKGKDLWCSRLFTEADTAAERRTNRISRRRRQREVARQGVLRKLFADEINKVDEGFFARLDESKYHLEDRDSEQKYTLFTDTGYTDKDYFKDYPTIFHLRNELLHPVKDSYDVRLVYLAIANMFKHRGNFLNESLDADKITSSADEAYRSLVETAMMYSIEFPENINVKKFIDIIGENGVSRSKHLENVCEYLEITKKDKQAYEILKLICGMSGVLINIYGEDVIDEENKKFSICFRDSNYEEKEGEALELLGDEYFELLETIKEIHDIGMLAGIIKGHKYLSEARVDLYEQHKKDLDMLQHVLKKYDMKAYDEMFRVMKAGNYSAYVGSVNAHSKKIRRNGGDGRTREEFYKNVKAVLKKFPEDDEEIKTILSEIDSETFMPKQLTASNGVIPNQLHVSELKAILTNAEKYLPFLLDKDESGLTVSERIVELFRFHIPYYVGPIGAQGENVWAKRRPGEENGKVYPWNFEQKIDTQSAAKEFINRMVRHCTYLSGERTLPKQSFLYEKFMVLNELNNLRIDGKKPSVQVKQGIYEELFKTGKRVTLNQLIKYLYNKSIIASKEDVVIEGIDGGFNASLTSVGKFRGVLGDELFTDANQAMAEEIIFWGTVYGNDKKFLKDEIESKYGTVLSKDQIKRILGFKFNGWGNLSKTFLELQGSCECGDCSLIQALWETNHNLMELLSEQYGFKKELDALASNVEKPLTEWTIDDLDNKYLSAPVKRMVWQTIKMLREACELTNKEPDRVFVEMPREHGKENDRKASRKKKLLDLYSTLKREDKTWAELKIREIEGRTEADFRIKKLYLYYMQQGRCMYSGEKIELNDLFNNNLYDIDHIYPRHFIKDDSLENNLVLVKKQINNHKSDNYPLESNIRKNMNEFWKTLREKNFISKEKYSRLIRTEEFTDEEKAAFISRQLVETRQGTKAITQVLKQAFPNTQIVFVKAGIVSDFRKKFDINKVRALNDTHHAKDAYLNIVVGNTYYTKFTNNPMNFIKDARKNPKNDFYRYNMDKIFDYNVIRNGEEAWIADNGKTKQHVLRIMKKNSVIITVKTEEANGKLSDINIVGKRYIKNADAYMPIKTSIAKMEDVTKYGGYGSISSAGYALVEYKVKGKKVRSLEALPVYLGRSNALTNEDIMQYISAAFQKEYAGKEISDLSVRVPFIPMESKVEIDGFEYYLGGKSTNQFYLKNAMPLYLPDNDEEYFRKIMKAIEIDDYKEVGKNGKAVITKENNMILFDTLSAKLKSEPYIHNRCNIYKILEGKEKIFKDLDIQKQCYVIVKIIDWIKSKTQGVDLTDIQGKKQSGTMKINKRISECRECILIHQSVTGMYERRIDLLSI

SEQ ID NO: 1818 - protein, 1376 aa, unidentified; identical to SEQ ID NO: 1800
  REGION 1..1376: note = Description of Unknown: uncultivated organism with predicted taxonomy: Clostridiales
  REGION 1..1376: note = MG23-64 effector

SEQ ID NO: 1819 - protein, 1389 aa, unidentified
  REGION 1..1389: note = Description of Unknown: uncultivated organism with predicted taxonomy: Clostridiales
  REGION 1..1389: note = MG23-65 effector
MEINLENNAEEIIMGKKMYIGIDMGTSSVGMAVTDENYNLYRVKGKDFWTSRLFKEANTAAKRRTNRVSRRRRQRETARMGILRELFSEEINKVDEGFFARLDESKYHIEDRVVKQKYALFADKEYTDKEYYKEYPTIFHLRNELLHPQKNSYDVRLVYLAVANMFKHRGNFLNETLDIDKITASADDVYSQLIEELDLYCIQMPVNINIGELINIIGENGISRSKRLENASKYLGISKKDKQSYEILKLICGLKGILYNIYGENVIDEENKKFSLSFTDSNYEDEETQAKDILGDEYFDLIEIIKELHDIGVLSGIIKGHKFLSEARVELYEEHKKDLDMLQQVLKKYDKNAYDEMFRVMKEGNYSAYVGSVNARGKNKKIRRNVGEGKKGRNGRSQEAFYKYVKTTLKNFPDDDENIKNILFKIENETFMPKQLTASNGIIPNQLHAAEMKAILTNAEKYLPFLLDKDESGLTVSQRILELFKFHIPYYVGPLGAAGKNVWAKRRKGEEKGRIYPWNFEKKIDTQEAAEEFIKRMVRHCSYIKGEHTLPKQSLLYEKFMVLNELNNLKINGTKPDVFVKRDIYENLFKTGKRVTLDKLKSYLYNNSFIDSKEVMITGIDGGFNSSLTSVGKFIGILGEDLFTDSNQAMVEQIIFWGTIYGSDKKFLKNRIEKEYKDRLTPKQIKRILGFKFNGWGKLSKLFLELKGSCECGECSIIQALWQTNHNLMELMSDQYDFKTNLMELSEETIKPLSEWTIDNLEDYYMSAPVKRMVWQTVKMLNETCELTGRLPDKIFVEMPREHESGNERKASRKKKMLDLYKAIKSEQKQWAEHMIAEIDKSDEADFRIKKLYLYYIQQGKCMYSGDTIDLDLLLKNNNIYDIDHIYPRHFIKDDSIDNNLVLVKKEINNHKSDKYPLESDIREDMSGFWKYLCEKKFITKEKYNRLMRTEKFSAEEKAAFVNRQLVETGQGTKVITQILKQAFPDTQVVFVKARMVSDFRHEFGINKVRELNDTHHAKDAYLNIVVGNTYYTKFTNNPINFMKNAEKNPEDVQYKYNMDKIFRYNVIRNGETAWIADNGVTKQHVIKTINRNTVTITRKTEEVHGALSNKVTVWSSKLAKKNPDAYMPVKTTDEKACDVTKYGGITAIANSGYTLVEYNINGKMIRSIEALPVYLGRKNMLTEDKIKEYLHEKIRKEYKNKTVTDLKVCILFIPQKSKVCVDGFNYYLGGVTGNSIYLSNAEPLYLSKEDEEYLRKIIKAVGKGYYEETDENGQIIITGERNMKFFNTLGSKLNARPYNNNRWNIYKIMENKEEIFAGLSIEKQCYVINQIISWINSKTQNVDLSDIKGSSHSGTMPLNKKISECSQFELIYQSVTGMYEKRTDLLKL

SEQ ID NO: 1820 - protein, 1368 aa, unidentified
  REGION 1..1368: note = Description of Unknown: uncultivated organism with predicted taxonomy: Butyrivibrio sp. CAG:318
  REGION 1..1368: note = MG23-66 effector
MDKKMYVGIDMGTNSVGMAVTDEEYNLYRVKGKDLWCSRLFTEADTAAERRTNRISRRRRQREVARQGVLRELFAEEINKVDEGFFARLDESKYHLEDRDSEQKYTLFTDTGYTDKDYFKDYPTIFHLRNELLHPVKDSYDVRLVYLAIANMFKHRGNFLNESLDADKITSSADESYRSLVETAMMYSIEFPENINVKKFIDIIGENGVSRSKHLENVCEYLEITKKDKQAYEILKLICGMSGVLINIYGNEVIDEENKKFSICFRDSNYEEKEGEALELLGDEYFELLEAIKEIHDIGMLAGIIKGHKYLSEARVDLYEQHKKDLDMLQHVLKKYDMKAYDEMFRVMKAGNYSAYVGSVNAHSKKIRRNGGDGRTQEEFYKNVKAVLKKFPEDDEEIKTILSEIDSETFMPKQLTASNGVIPNQLHVSELKAILTNAEKYLPFLLDKDESGLTVSERIVELFRFHIPYYVGPIGAQGENVWAKRRPGEENGKVYPWNFEQKIDTQSAAKEFINRMVRHCTYLSGERTLPKQSFLYEKFMVLNELNNLRIAGKKPSVQVKQGIYEELFKTGKRVTLNKLKDYLYNKSIIASKEDVVIEGIDGGFNASLTSVGKFRGVLGDELFTDANQAMAEEIIFWGTVYGNDKKFLKDEIESKYGTVLSKDQIKRILGFKFNGWGNLSKTFLELQGSCECGDCSLIQALWETNHNLMELLSEQYGFKKELDALASNVEKPLTEWTIDDLDNKYLSAPVKRMVWQTIKMLREACELTNKEPDRVFVEMPREHGKENDRKASRKKKLLDLYSALKREDKTWAELKIREIEGRTEADFRIKKLYLYYMQQGRCMYSGEKIELNDLFNNNLYDIDHIYPRHFIKDDSLENNLVLVKKQINNHKSDNYPLESNIRKNMNEFWKTLRDKNFISKEKYSRLIRTEEFTDEEKAAFISRQLVETRQGTKAITQILKQAFPNTQIVFVKAGIVSDFRKKFDINKVRALNDTHHAKDAYLNIVVGNTYYTKFTNNPMNFIKDARKNPKNDFYRYNMDKIFDYNVIRNGEEAWISDNGKTKQHVLRIMKKNSVTITVKTEEAHGALSNKVTVWSKEKAKGNPDAYMPVKTSDIKAQDVTKYGGITAIANSGYTLVEYKVKGKKVRSLEALPVYLGRSNALTNEDIMQYISAALQNEYAGKEISDLSVRVPFVPQKSKVRIDGFEYYLGGKTGKSVYLSNAMPLYLSGNDEEYLRKIMKAIEIDNYEEIDKDSNAIITEEKNVALFDVLCVKINSEPYINNRWNIYKILEGKEEIFKNLDIEKQCYIIGQIISWINSSTQNVNLKDVCGSEHSGMQQLNKKISECKECILIHQSVTGMYERRIDLLSI

SEQ ID NO: 1821 - protein, 1366 aa, unidentified; identical to SEQ ID NO: 1777
  REGION 1..1366: note = Description of Unknown: uncultivated organism with predicted taxonomy: Butyrivibrio sp. CAG:318
  REGION 1..1366: note = MG23-67 effector

SEQ ID NO: 1822 - protein, 1366 aa, unidentified
  REGION 1..1366: note = Description of Unknown: uncultivated organism with predicted taxonomy: Butyrivibrio sp. CAG:318
  REGION 1..1366: note = MG23-68 effector
MDKKMYVGIDMGTNSVGMAVTDEEYNLYRVKGKDLWCSRLFTEADTAAERRTNRISRRRRQREVARQGVLRKLFADEINKVDEGFFARLDESKYHLEDRDSEQKYTLFTDTGYTDKDYFKDYPTIFHLRNELLHPVKDSYDVRLVYLAIANMFKHRGNFLNESLDADKITSSADEAYRSLVETAMMYSIEFPENINVKKFIDIIGENGVSRSKHLENVCEYLEITKKDKQAYEILKLICGMSGVLINIYGEDVIDEENKKFSICFRDSNYEEKEGEALELLGDEYFELLEAIKEIHDIGMLAGIIKGHKYLSEARVDLYEQHKKDLDMLQHVLKKYDMKAYDEMFRVMKAGNYSAYVGSVNAHSKKIRRNGGDGRTQEEFYKNVKAVLKKFPEDDEEIKTILSEIDSETFMPKQLTASNGVIPNQLHVSELKAILTNAEEYLPFLLGKDESGLTVSERIVELFRFHIPYYVGPIGAQGENVWAQRRPGEEKGRVYPWNFEQKIDTQSAAKEFINRMVRHCTYLSGERTLPKQSLLYEKFMVLNELNNLKIAGKKPSVQVKQDIYEKLFKLGKKVTLKQLEEYLCNNSIIASKEDIEGIDGGFNSSLTSVGKFRGVLGDELFTDANQAMAEEIIFWGTVYGNDKKFLKDEIESKYGTVLSKDQIKRILGFKFNGWGNLSKTFLELQGSCECGDCSLIQALWETNHNLMELLSEQYGFKKELDALASNVEKPLTEWTIDDLDNKYLSAPVKRMVWQTIKMLREACELTNKEPDRVFVEMPREHGKENDRKASRKKKLLDLYSALKREDKTWAELKIREIEGRTEADFRIKKLYLYYMQQGRCMYSGEKIELNDLFNNNLYDIDHIYPRHFIKDDSLENNLVLVKKQINNHKSDNYPLESNIRKNMNEFWKTLRDKNFISKEKYSRLIRTEEFTDEEKAAFISRQLVETRQGTKAITQILKQAFPNTQIVFVKAGIVSDFRKKFDINKVRALNDTHHAKDAYLNIVVGNTYYTKFTNNPMNFIKDARKNPKNDFYRYNMDKIFDYNVIRNGEEAWIADNGKTKQHVLQIMKKNSVTITVKTEEYHGALSNKVTVWSKEKAKGNPDAYMPVKTSDTKAQDVTKYGGITAIANSGYTLVEYKVKGKKVRSLEALPVYLGRSNALTNEDIMQYISAALQKEYAGKEISDLSVRVPFVPQKSKVRVDGFEYYLGGKTGKSVYLSNAMPLYLSGNDEEYLRKIMKAIEIDNYEEIDKDSNAIITEEKNVALFDVLCVKINSEPYINNQWNIYKILEGKEEIFKKLDIKKQCYIIGQIISWINSSTQNVNLKDVCGSEHSGMQRLNKKISECKECILIHQSVTGMYERRIDLLSI

SEQ ID NO: 1823 - protein, 1366 aa, unidentified
  REGION 1..1366: note = Description of Unknown: uncultivated organism with predicted taxonomy: Butyrivibrio sp. CAG:318
  REGION 1..1366: note = MG23-69 effector
MDKKMYVGIDMGTNSVGMAVTDEEYNLYRVKGKDLWCSRLFTEADTAAERRTNRISRRRRQREVARQGVLRKLFADEINKVDEGFFARLDESKYHLEDRDSEQKYTLFTDTGYTDKDYFKDYPTIFHLRNELLHPVKDSYDVRLVYLAIANMFKHRGNFLNESLDADKITSSADEAYRSLVETAMMYSIEFPENINVKKFIDIIGENGVSRSKHLENVCEYLGITKKDKQAYEILKLICGMSGVLINIYGEDVIDEENKKFSICFRDSNYEEKEGEALELLGDEYFELLEAIKEIHDIGMLAGIIKGHKYLSEARVDLYEQHKKDLDMLQHVLKKYDMKAYDEMFRVMKAGNYSAYVGSVNAHSKKIRRNGGDGRTQEEFYKNVKAVLKKFPEDDEEIKTILSEIDSETFMPKQLTASNGVIPNQLHVSELKAILTNAEKYLPFLLGKDESGLTVSERIVELFRFHIPYYVGPIGAQGENVWAKRRSGEENGKVYPWNFEQKIDTQSAAKEFINRMVRHCTYLSGERTLPKQSLLYEKFMVLNELNNLKIAGKKPSVQVKQDIYEKLFKLGKKVTLKQLEEYLCNNSIIASKEDIEGIDGGFNSSLTSVGKFRGVLGDELFTDANQAMAEEIIFWGTVYGNDKKFLKDEIESKYGTVVSKDQIKRILGFKFNGWGNLSKTFLELQGSCECGDCSLIQALWETNHNLMELLSEQYGFKKELDALASNVEKPLTEWTIDDLDNKYLSAPVKRMVWQTIKMLREACELTNKEPDRVFVEMPREHGKENDRKASRKKKLLDLYSALKRENKTWAELKIREIEGKTEADFRIKKLYLYYMQQGKCMYSGEKIELNDLFNNNLYDIDHIYPRHFIKDDSLENNLVLVKKEINNHKSDNYPLESDIRKNMNKFWKSLRDKNFISKEKYSRLIRTEEFTDEEKAAFISRQLVETRQGTKAITQVLKQAFPNTQIVFVKAGIVSDFRKKFDINKVRALNDTHHAKDAYLNIVVGNTYYTKFTNNPMNFIKDARKNPKNDFYRYNMDKIFDYNVIRNGEEAWIADNGKTKQHVLRIMKKNSVTITVKTEEYHGALSNKVTVWSKEKAKGNPDAYMPVKTSDTKAQDVTKYGGITSIANSGYTLVEYKVKGKKVRSLEALPAYLGRSNALTNEDIMQYISAALQKEYAGKEISDLSVRVPFVPQKSKVRVDGFEYYLGGKTGKSVYLSNAMPLYLSGNDEEYLRKIMKAIEIDNYEEIDKDSNAIITEEKNVALFDVLCVKLNSEPYINNRWNICKTLEGKEEIFKNLDIKKQCYVIGQIISWINSAMQNVNLKDVCGSEHAGTQTLNKKISESKECILIHQSVTGMYERKIDLLSI

SEQ ID NO: 1824 - protein, 1368 aa, unidentified
  REGION 1..1368: note = Description of Unknown: uncultivated organism with predicted taxonomy: Butyrivibrio sp. CAG:318
  REGION 1..1368: note = MG23-70 effector
MDKKMYVGIDMGTNSVGMAVTDEEYNLYRVKGKDFWCSRLFKKANTAAERRTNRISRHRRQREVARQGVLRELFADEINKVDEGFFARLDESKYHLEDRDSEQKYTLFTDTGYTDKDYFKDYPTIFHLRNELLHPVKDSYDVRLVYLAIANMFKHRGNFLNESLDADKITSSADEAYRRLVETAMMYSIEFPENINVKKFIDIIGENGVSRSKHLGNVCEYLGITKKDKPAYEILNLVCGLRGVLINIYGNEVIDEENKKFSICFRDSNYEEKEGEALELLGDEYFELLETIKEIHDIGMLTGIIKGHKYLSEARVDLYKQHKKDLDMLQHVLKKYDMKAYDEMFRVMKAGNYSAYVGSVNAHSKKIRRNGGDGRTREDFYKNVKAVLKKFPEDDEEIKTILSEIDSETFMPKQLTASNGVIPNQLHVSELKAILTNAEKYLPFLLDKDESGLTVSERIVELFRFHIPYYVGPIGAQGENVWAKRRPGEENGKVYPWNFEQKIDTQSAAKEFINRMVRHCTYLSGERTLPKQSFLYEKFMVLNELNNLRIDGKKPSVQVKQGIYEELFKTGKRVTLNQLIKYLYNKSIIASKEDVVIEGIDGGFNASLTSVGKFRGVLGDELFTDANQAMAEEIIFWGTVYGNDKKFLKDEIESKYGTVLSKDQIKRILGFKFNGWGNLSKTFLELQGSCECGDCSLIQALWETNHNLMELLSEQYGFKKELDALASNVEKPLTEWTIDDLDNKYLSAPVKRMVWQTIKMLREACELTNKEPDRVFVEMPREHGKENDRKASRKKKLLDLYSALKRENKTWAELKIREIEGKTEADFRIKKLYLYYMQQGKCMYSGEKIELNDLFNNNLYDIDHIYPRHFIKDDSLENNLVLVKKQINNHKSDNYPLESNIRKNMNEFWKTLREKNFISKEKYSRLIRTEEFTDEEKAAFISRQLVETRQGTKAITQVLKQAFPNTQIVFVKAGIVSDFRKKFDINKVRALNDTHHAKDAYLNIVVGNTYYTKFTNNPMNFIKDARKNPKNDFYRYNMDKIFDYNVIRNGEEAWIADNGKTKQHVLQIMKKNSVTITVKTEEYHGALSNKVTVWSKEKAKGNPDAYMPVKTSDTKAQDVTKYGGITAIANSGYTLVEYKVKGKKVRSLEALPVYLGRSNALTNEDIMQYISAALQKEYAGKEISDLSVRVPFVPQKSKVRVDGFEYYLGGKTGKSVYLSNAMPLYLSGNDEEYLRKIMKAIEIDNYEEIDKDSNAIITEEKNVALFDVLCVKINSEPYINNQWNIYKILEGKEEIFKNLDIKKQCYIIGQIISWINSSTQNVNLKDVCGSEHSGMQRLNKKISECKECILIHQSVTGMYERRIDLLSI

SEQ ID NO: 1825 - protein, 774 aa, unidentified
  REGION 1..774: note = Description of Unknown: uncultivated organism with predicted taxonomy: Butyrivibrio sp. YAB3001
  REGION 1..774: note = MG23-71 effector
GNFLNESLSTNSNSVSISDAYQNLVEIANLFDISFPANIDVTKLQDILSDRTTSKRVKLEQLVELMGIVKKASPAEYELLQMCCGMKGKLSNIFGEVISEEDKAFSFSFSDSKYEENAGKALELVGDEYYEIIDAVKEVYDIGLLANIMKGEKYLSDARVADYKAHKKDLALLKQVIREYAEDEYDNFFRKMDEGNYSAYVGSVNSKLEKIRRNGNKGRSQEDLYKTIQTIIKNMREEDKEDSRVKEILSKIEAGSFLPKQLTGSNGVIPNQVHEREMKQILENASTYLPFLREKDESGLSVAERILKMFTFHIPYYIGPLGQEHLDENGYNVWARRIAPGPIYPWNIEEKIDVNEAAEKFITRMLRKCTYIQDEQALPKQSLLYEKFMVLNELNNLRIFGEKISVEVKQNIFNELFMKGKKVTRDNLIKYLVASGVISKNESAEEAISGVDGDFKSYLSSVNKFESIFGKESIYGSKREMIEKIIFWGTVFGKDKRIIKEKLKKEYGSELSDDVIKRIAGFNFSGWGNLSEELLEMPGSCGTDEEEKSIIICLWETNENLMELLGSSHTFKKEIENRIATQNKELMEWTIEDLDGMYLSPSVKRRVWQTLKVLKEIYQVTGGEPEKIFVEMPREEGEKGKRTESRKKKLEFLYKGQKQFLQEIGKRDERDFRQKKLYLYYLQNGKSMYTGNEIDLDELLSNNSKYDIDHIYPRHYIKDDSLDNNLVLVEKEINNDIKGGDYPISKTIQSKMRSFWKELQEKGFITSEKYNRLV

SEQ ID NO: 1826 - protein, 1386 aa, unidentified
  REGION 1..1386: note = Description of Unknown: uncultivated organism with predicted taxonomy: Eubacterium
  REGION 1..1386: note = MG23-72 effector
MDRDDKKMYVGIDMGTNSVGLAVTDENYNLYRVKGKDFWCSRIFSKAETAEVRRVNRISRRRRQRETARQGILREFFAEEINKVDEGFFARLDESKYHIEDRENQQKYTLFIDNGYTDKEYYAEYPTIFHLRNELLHPQKDSYDVRLVYLAISNMFKHRGNFLNETLDMGKVTSSAGDIYQQLVEEAMLYVIELPVSIDVERLINIIGEKGVSRSKHLENVSSYLGITKKDKSAYEILKLVCGMSGLLFNIYGEEIIDEENKKFSLNFRDTNYEEKEGKALELLGNDNFQLIEIIKELHDIGVLSSIIKGHKFLSESRVELYEEHKKDLDMLQVVLKRYDKKAYNDMFRIMKEGNYSAYVGSVNSIGQNEKRSEKCQKQKIRRNRGKGSSQEVFYKYVKSVLKKLPEDDKDVKKIMEKIENETFMPKQLTASNGVIPNQLHTVELRAILENAEKYLSFLLNKDESGLTVSQRIVELFKFHIPYYVGPIGASGQNVWAKRRKGEEKGRIYPWNFEQKIDTQAAAEEFIGRMVRHCTYLANERTLPKQSLLYEKYMVLNELNNMKINGIKPDVSVKQGIYDDLFKKGKRVTLNALKSYLYNNSIIESKEDVVITGIDIVHNGGFSASLTSVGKFIGVLGDELFTDENQTMVEQIIFWGTVYGNDKKFLKNRIQETYAGRLTWEQIKRIAGFKFNGWGNLSKAFLELKGNCECGECSIIQALWETNHNLMELLADQYDFKKNLEAMSNNVEKPLQEWTIEDLEGKYLSAPVKRMVWQTMKMLREVCELTGRQPDKVFVEMPREEGIKNERKNSRKKKLLELYTSIKNEQKAWSEVKIREIDGRTETDFRIKKLYLYYLQQGKCMYSGEKIELNDLFNNNLYDIDHIYPRHFIKDDSIENNLVLVKKQINNHKSDTFPIESSIQKNMMTFWKTLVEHNFITKEKYNRLMRTEEFTDEEKAAFISRQLVETRQGTKAITQILKQAFPDTQIIFVKAGVVSDFRKKFNINKVRALNDTHHAKDAYLNIVVGNIYNTKFTSNPINFIKDARKNVNDVSYKYNMDKMFDYNVCRNGENAWIADNGKSKQHVLSVLGKNSVIITRKTEENHGALSNKVTVWSKETAKKNPGAYMPVKTTDSKAQDVTKYGGITSVASSGYTLIEYKVKGKIIRSIEALPVYLGKSDTLTEEKILEYIGESLEKEYKDKKISDIKVRVKFIPLKSKIRLDGFNYYLGGKTGNYIYLNNNEALYLNNNDEEYLRKITKAIDITNYEEIDENGNVIITHEKNTKLFNVLCEKLNNKPYINNRWNIYNVLEGKEEIFRKLDVEKQCYIINQIILWGNSAVQNINLKYINGKEHEGSLLMNKKISEYDEVVLIQQSVTGMYERKTDLLKV

SEQ ID NO: 1827 - protein, 114 aa, unidentified
  REGION 1..114: note = Description of Unknown: uncultivated organism with predicted taxonomy: Candidatus Melainabacteria
  REGION 1..114: note = MG1-4 RuvC-III domain
AETSHIARVAQQMTAFIFGWGLQIQGESRRIFVNNGSSTCAIRKRYGLNKLLGDNLKKNRSNDKHHALDAICISFSRDFKYDKEIKKDIIKGFNPEIVKNAIDKIMPYPYANDK

SEQ ID NO: 1828 - protein, 142 aa, unidentified
  REGION 1..142: note = Description of Unknown: uncultivated organism with predicted taxonomy: Verrucomicrobia
  REGION 1..142: note = MG1-5 RuvC-III domain
AETAWISKLAQKICCIHFGFQFGGLKGEKKVWTVSGNTTAMIRGRYGLNRLLHNEEISEDLPLLDRIVKEKNFEEKNRDNKKHHALDAMCICFAPTSNAKKALSRKNILPEEIAKNPESDDARNFFAKYLAEVVPTKVAIKK

SEQ ID NO: 1829 - protein, 140 aa, unidentified
  REGION 1..140: note = Description of Unknown: uncultivated organism with predicted taxonomy: unclassified Verrucomicrobia (miscellaneous)
  REGION 1..140: note = MG1-6 RuvC-III domain
AETAHIAKLAQKIVCMHFGFQFGGLSGTKRVFTVPGALTSRIRKFYGLDRILHNAAAESENLSFEEFLKFSEDLEKKNRKNKKHHALDAMCLCFAPTGVDSRRAKLGEILPEKLRSEKAAREFFKSYLDKIMPVDVAPKK

SEQ ID NO: 1830 - protein, 140 aa, unidentified
  REGION 1..140: note = Description of Unknown: uncultivated organism with predicted taxonomy: unclassified Verrucomicrobia (miscellaneous)
  REGION 1..140: note = MG1-7 RuvC-III domain
AETAHISKLAQKIVCLHFGFQFGGLSGTKRVFTVPGALTARIRTFYGLNKILHNEDLAHETLSFEGFLKRGEELDKKNRANKKHHALDAMCLCFAPTGVNSKRARVDMLLPPKIRSEKEAELFFRKYLDKLIPVDVAPKK

SEQ ID NO: 1831 - protein, 137 aa, unidentified
  REGION 1..137: note = Description of Unknown: uncultivated organism
  REGION 1..137: note = MG1-1 RuvC-III domain
AETAWISKLAQAIVNLQFGWTNGYDEKRERRVIVVSGGLTARVRRKYGLDKLLYNDVTDLEVLAKKVKNRDDKRHHALDAMVMTFIPQWARNPDQEGFFRFPREFRDASGREDYQKVRQLFAKHLSEVMPTNIAFER

SEQ ID NO: 1832 - protein, 127 aa, unidentified
  REGION 1..127: note = Description of Unknown: uncultivated organism with predicted taxonomy: Verrucomicrobia
  REGION 1..127: note = MG1-2 RuvC-III domain
AETAWISKLAQTILNLKFGWTNGNTPDGRKAVVVVPGGLTARIRRKYSLNSLLAGDGVDEEEAEKKNRKDHRHHALDAMVISFLPGWVANPDKEHFFRFPEPVRANPRGFFQTAIHNVVPRQLCFEK

SEQ ID NO: 1833 - protein, 137 aa, unidentified
  REGION 1..137: note = Description of Unknown: uncultivated organism
  REGION 1..137: note = MG1-3 RuvC-III domain
QLARQLRAEIMRWMQVDDKPDEAARRIGTPSGWLAAQARKSWLPAEEYEKVRNNVTHHLIDAAILAHIPPREGMNSVRCKGIFYVESVPVRDPVTGDTTYRLETKALPELSPLPRLKHWLPDNGEYDVCPVWKPRRQ

SEQ ID NO: 1834 - protein, 137 aa, unidentified; identical to SEQ ID NO: 1833
  REGION 1..137: note = Description of Unknown: uncultivated organism
  REGION 1..137: note = MG1-13 RuvC-III domain

SEQ ID NO: 1835 - protein, 140 aa, unidentified
  REGION 1..140: note = Description of Unknown: uncultivated organism
  REGION 1..140: note = MG1-8 RuvC-III domain
AETAWISKLAQTIVNLRFGWRNGVDYSGPQPVKRVIVVSGGLTARVRAKYGLDKLLYGENTPPEVLAKKVKNRDDDRHHALDAMVMTFIPHWARDPNKQGFFRFPPAFRDANGREDYQQIQSLFARQLEKIVPRHLAYEP

SEQ ID NO: 1836 - protein, 176 aa, unidentified
  REGION 1..176: note = Description of Unknown: uncultivated organism with predicted taxonomy: Verrucomicrobia
  REGION 1..176: note = MG1-9 RuvC-III domain
AESAWIARLAQTIARLHFGWPLDDEPGEERVITISGGLTARIRRKYLLDSLLGVGNDAETLRREIDSALNELQALRTDTSLSENAPKQKRAELRQRLANLAAEAEKNRDDQRHHALDAMLLTFLPNWARDRTKEDFFRFPTAIGDNDFYSKEDQPEMAAIKSQLAKLYVENKPVFR

SEQ ID NO: 1837 - protein, 138 aa, unidentified
  REGION 1..138: note = Description of Unknown: uncultivated organism
  REGION 1..138: note = MG1-10 RuvC-III domain
QLASQLRKQVAFWLGIHADSDDLSAAVALRERIGNPQGQYTAAMRRSLLPESGKDRSGYVHHREDAALLSCMPPMGLNSIKYKGIFYTKMVPWLDSSGQLQQRRSLFALSCADGLPLPDIASILEDDTECPIIKRRSE

SEQ ID NO: 1838 - protein, 123 aa, unidentified
  REGION 1..123: note = Description of Unknown: uncultivated organism
  REGION 1..123: note = MG1-11 RuvC-III domain
QLARELRRYIAVWMGINRDVDAVRERIGNPCGSYTAAARRGMLPADYRKDRSNNLHHRIDAAVLTCIPPAAGLNNLRCGGIFRNTRINGKRCTTTIPGLPLPDFGALIADDSTCPLVSRRRTG

SEQ ID NO: 1839 - protein, 125 aa, unidentified
  REGION 1..125: note = Description of Unknown: uncultivated organism
  REGION 1..125: note = MG1-12 RuvC-III domain
QLARQLREEAARWLGVFGDDAKVRQKIGTPTGYQTSVCREAWSENVPKKDRTNLRHHLWDAAVISHIPPDRGMQLSHCGGIFFHAGEKKNGNILMRALPGLGPDLNSFENATKDQCLVEKKKTNR

SEQ ID NO: 1840 - protein, 137 aa, unidentified; identical to SEQ ID NO: 1831
  REGION 1..137: note = Description of Unknown: uncultivated organism
  REGION 1..137: note = MG1-14 RuvC-III domain

SEQ ID NO: 1841 - protein, 130 aa, unidentified
  REGION 1..130: note = Description of Unknown: uncultivated organism
  REGION 1..130: note = MG1-20 RuvC-III domain
AVTGWVARMARDIACLWFGWEPGAEGEQRKLHTVSGSLVGKVRRKFGLNKALNPFLSAADAKKDEKNREDKRHHALDAMVMTYLDEYMRNPRNFSKLQKELGEIFGKLGGAQYFEEKLEDVIPHKIARNK

SEQ ID NO: 1842 - protein, 130 aa, unidentified; identical to SEQ ID NO: 1841
  REGION 1..130: note = Description of Unknown: uncultivated organism with predicted taxonomy: Candidatus Peregrinibacteria bacterium CG10_big_fil_rev_8_21_14_0_10_54_7
  REGION 1..130: note = MG1-21 RuvC-III domain

SEQ ID NO: 1843 - protein, 130 aa, unidentified; identical to SEQ ID NO: 1841
  REGION 1..130: note = Description of Unknown: uncultivated organism with predicted taxonomy: Candidatus Peregrinibacteria bacterium CG10_big_fil_rev_8_21_14_0_10_54_7
  REGION 1..130: note = MG1-22 RuvC-III domain

SEQ ID NO: 1844 - protein, 114 aa, unidentified
  REGION 1..114: note = Description of Unknown: uncultivated organism with predicted taxonomy: Candidatus Melainabacteria bacterium
  REGION 1..114: note = MG1-23 RuvC-III domain
AETAQIARIAQQITALVFNWGLQVEGENRHIFVNNGSSTASIRRTYKLNKLLGDDVKKNRDNDKHHALDAICISFSRDYKYNKEKKVDEIEGLNPEIIKEVINNLMPYPYANDK

SEQ ID NO: 1845 - protein, 114 aa, unidentified
  REGION 1..114: note = Description of Unknown: uncultivated organism
  REGION 1..114: note = MG1-24 RuvC-III domain
AETAYIARVAQQITAFCFGWGLQVEGEKRHIFVNNGSSTHAIRRRYGLNSLLGNDIKKNRDNDKHHALDAICISFSRDFKYDEKSKVDVIDGFTKEMVKKVLDEIIPYPYTNKK

SEQ ID NO: 1846 - protein, 120 aa, unidentified
  REGION 1..120: note = Description of Unknown: uncultivated organism
  REGION 1..120: note = MG1-25 RuvC-III domain
AETAQIARVAQDITAFVFGWGLQLEGEKRRIFVNNGATTSAIRKTYRLNKLLGNDVKKNRQNDKHHALDAICISFSRGYKYNATTKRDEIEGLDIHDNEFRDLVKSSIDSLLPYPYSNDK

SEQ ID NO: 1847 - protein, 114 aa, unidentified
  REGION 1..114: note = Description of Unknown: uncultivated organism
  REGION 1..114: note = MG1-26 RuvC-III domain
AETSHIARVAQQMTAFIFGWGLQVQGKNRRIFVNNGSSTCAIRKRYDLNKLLGDDRKKNRENDKHHALDAICISFSRDFKYDKEIKKDIIKGFNPEIVKDAIDKIMPYPYANDK

SEQ ID NO: 1848 - protein, 120 aa, unidentified
  REGION 1..120: note = Description of Unknown: uncultivated organism
  REGION 1..120: note = MG1-27 RuvC-III domain
AETAQIARVAQDITAFIFGWGLQLKDEKRRIFVNNGASTSGIRKTYRLNKLLGNDVKKNRNNDKHHALDAICISFSQNYKYNKHTKRDEIEGLDIHDNEFRELIKQTLDAIIPYPYTNDK

SEQ ID NO: 1849 - protein, 114 aa, unidentified
  REGION 1..114: note = Description of Unknown: uncultivated organism
  REGION 1..114: note = MG1-28 RuvC-III domain
AETAHIAKVAQQIAAVCFSWGLQIEGEKRHIYVNNGSSTHAIRHRYGLNSLLGNDIKKNRDNDKHHALDAICISFSRDFKYDEESKKDIIKGFTREMVKKVIDEIMPVPYTNKK

SEQ ID NO: 1850 - protein, 114 aa, unidentified; identical to SEQ ID NO: 1845
  REGION 1..114: note = Description of Unknown: uncultivated organism
  REGION 1..114: note = MG1-29 RuvC-III domain

SEQ ID NO: 1851 - protein, 114 aa, unidentified; identical to SEQ ID NO: 1849
  REGION 1..114: note = Description of Unknown: uncultivated organism
  REGION 1..114: note = MG1-30 RuvC-III domain

SEQ ID NO: 1852 - protein, 120 aa, unidentified
  REGION 1..120: note = Description of Unknown: uncultivated organism
  REGION 1..120: note = MG1-31 RuvC-III domain
AETAQIARVAQDITAFIFSWGLQLKDEKRRIFVNNGASTSGIRKTYRLNKLLGNDVKKNRSNDKHHALDAICISFSQNYKYNKYTKRDEIEGLDIHDNEFRELIKQTLDAIIPYPYTNDK

SEQ ID NO: 1853 - protein, 120 aa, unidentified
  REGION 1..120: note = Description of Unknown: uncultivated organism
  REGION 1..120: note = MG1-32 RuvC-III domain
AETAQIARVAQDITAFIFGWGLQLKDEKRRIFVNNGASTSGIRKTYRLNKLLGNDVKKNRSNDKHHALDAICISFSQNYKYNKYTKRDEIEGLDIHDNEFRELIKQTLDAIIPYPYTNDK

SEQ ID NO: 1854 - protein, 120 aa, unidentified; identical to SEQ ID NO: 1852
  REGION 1..120: note = Description of Unknown: uncultivated organism
  REGION 1..120: note = MG1-33 RuvC-III domain

SEQ ID NO: 1855 - protein, 114 aa, unidentified; identical to SEQ ID NO: 1847
  REGION 1..114: note = Description of Unknown: uncultivated organism with predicted taxonomy: Candidatus Gastranaerophilales bacterium HUM_9
  REGION 1..114: note = MG1-34 RuvC-III domain

SEQ ID NO: 1856 - protein, 120 aa, unidentified; identical to SEQ ID NO: 1846
  REGION 1..120: note = Description of Unknown: uncultivated organism
  REGION 1..120: note = MG1-35 RuvC-III domain

SEQ ID NO: 1857 - protein, 115 aa, unidentified
  REGION 1..115: note = Description of Unknown: uncultivated organism with predicted taxonomy: Clostridium
  REGION 1..115: note = MG1-36 RuvC-III domain
EDTQYIAKWITNYIRRNIQFVECSKYNNKVLIISSNLTSYINRKLDISNNIIIGNQKHALDALVTATVSKELLNKIIIYSRENTENSQFPIPWENFKQDMNNLPPIFVSRAPKRK

SEQ ID NO: 1858 - protein, 120 aa, unidentified; identical to SEQ ID NO: 1846
  REGION 1..120: note = Description of Unknown: uncultivated organism
  REGION 1..120: note = MG1-37 RuvC-III domain

SEQ ID NO: 1859 - protein, 114 aa, unidentified; identical to SEQ ID NO: 1844
  REGION 1..114: note = Description of Unknown: uncultivated organism with predicted taxonomy: Candidatus Melainabacteria bacterium
  REGION 1..114: note = MG1-38 RuvC-III domain

SEQ ID NO: 1860 - protein, 120 aa, unidentified; identical to SEQ ID NO: 1852
  REGION 1..120: note = Description of Unknown: uncultivated organism
  REGION 1..120: note = MG1-39 RuvC-III domain

SEQ ID NO: 1861 - protein, 120 aa, unidentified; identical to SEQ ID NO: 1853
  REGION 1..120: note = Description of Unknown: uncultivated organism
  REGION 1..120: note = MG1-40 RuvC-III domain

SEQ ID NO: 1862 - protein, 114 aa, unidentified; identical to SEQ ID NO: 1847
  REGION 1..114: note = Description of Unknown: uncultivated organism with predicted taxonomy: Candidatus Gastranaerophilales bacterium HUM_9
  REGION 1..114: note = MG1-41 RuvC-III domain

SEQ ID NO: 1863 - protein, 120 aa, unidentified; identical to SEQ ID NO: 1848
  REGION 1..120: note = Description of Unknown: uncultivated organism
  REGION 1..120: note = MG1-42 RuvC-III domain

SEQ ID NO: 1864 - protein, 120 aa, unidentified; identical to SEQ ID NO: 1852
  REGION 1..120: note = Description of Unknown: uncultivated organism
  REGION 1..120: note = MG1-43 RuvC-III domain

SEQ ID NO: 1865 - protein, 114 aa, unidentified; identical to SEQ ID NO: 1849
  REGION 1..114: note = Description of Unknown: uncultivated organism
  REGION 1..114: note = MG1-44 RuvC-III domain

SEQ ID NO: 1866 - protein, 114 aa, unidentified; identical to SEQ ID NO: 1847
  REGION 1..114: note = Description of Unknown: uncultivated organism with predicted taxonomy: Candidatus Melainabacteria
  REGION 1..114: note = MG1-45 RuvC-III domain

SEQ ID NO: 1867 - protein, 114 aa, unidentified; identical to SEQ ID NO: 1849
  REGION 1..114: note = Description of Unknown: uncultivated organism
  REGION 1..114: note = MG1-46 RuvC-III domain

SEQ ID NO: 1868 - protein, 120 aa, unidentified; identical to SEQ ID NO: 1848
  REGION 1..120: note = Description of Unknown: uncultivated organism
  REGION 1..120: note = MG1-47 RuvC-III domain

SEQ ID NO: 1869 - protein, 114 aa, unidentified
  REGION 1..114: note = Description of Unknown: uncultivated organism
  REGION 1..114: note = MG1-48 RuvC-III domain
AETAQIARVAQQLAAFIFGWGMQTEGDKRHLFINNGSTTAAIRRRYGLNKLLGDDIKKNRENDKHHALDAICISFSKDFKYDHKSKKDIIEGFTYDFVKNEIDKLIPYPYANDK

SEQ ID NO: 1870 - protein, 114 aa, unidentified
  REGION 1..114: note = Description of Unknown: uncultivated organism
  REGION 1..114: note = MG1-49 RuvC-III domain
NETTQIAKIVQSVTASVLEWDLQVKDKNRHIFISDGSSTHKIRQQYKLDRLLDDNAKKNRENGKHRALDAICISYSKDFQYNTEQHKYEIENIDIPHIEDVINHVVPYPYTNDK

SEQ ID NO: 1871 - protein, 114 aa, unidentified; identical to SEQ ID NO: 1870
  REGION 1..114: note = Description of Unknown: uncultivated organism
  REGION 1..114: note = MG1-50 RuvC-III domain

SEQ ID NO: 1872 - protein, 114 aa, unidentified
  REGION 1..114: note = Description of Unknown: uncultivated organism with predicted taxonomy: Candidatus Melainabacteria bacterium
  REGION 1..114: note = MG1-51 RuvC-III domain
ADTAQIAKVAQQLAAFIFGWGMQTDGDKRHLFVNNGSTTAAIRRRYGLNKILGNDIKKNRENDKHHALDAICISFSQDFKYDPKSQKDIINGFTYDFVKNEIDKLIPYPYANNK

SEQ ID NO: 1873 - protein, 114 aa, unidentified
  REGION 1..114: note = Description of Unknown: uncultivated organism
  REGION 1..114: note = MG1-52 RuvC-III domain
AETAQIARVAQQLAAFIFGLGMQTEGDKRHLFVNNGSTTAAIRRRYGLNKLLGDDVKKNRENDKHHALDAICISFSRDFKYDEKSKKDVIEGFTYDFVKKAIDELIPYPYANDK

SEQ ID NO: 1874 - protein, 114 aa, unidentified; identical to SEQ ID NO: 1870
  REGION 1..114: note = Description of Unknown: uncultivated organism
  REGION 1..114: note = MG1-53 RuvC-III domain

SEQ ID NO: 1875 - protein, 114 aa, unidentified; identical to SEQ ID NO: 1870
  REGION 1..114: note = Description of Unknown: uncultivated organism
  REGION 1..114: note = MG1-54 RuvC-III domain

SEQ ID NO: 1876 - protein, 114 aa, unidentified; identical to SEQ ID NO: 1870
  REGION 1..114: note = Description of Unknown: uncultivated organism
  REGION 1..114: note = MG1-55 RuvC-III domain

SEQ ID NO: 1877 - protein, 114 aa, unidentified
  REGION 1..114: note = Description of Unknown: uncultivated organism
  REGION 1..114: note = MG1-56 RuvC-III domain
AETAHIARVAQQITAFIFDWGLQLEGENRHIFVNNGSSTCAIRKRYHLNSLLGDDEKKNRSNDKHHALDAICISYSRDFKYDKNIKKDTIEEFNPEVVKKVIDEIIPYPYANKK

SEQ ID NO: 1878 - protein, 114 aa, unidentified
  REGION 1..114: note = Description of Unknown: uncultivated organism
  REGION 1..114: note = MG1-57 RuvC-III domain
NETAQIAKVAQSITAFILGWGLQVKGENRHIFVNNGSSTHKIRQQFKLNRLLGNDEKKNRENDKHHALDAICISYSKDFRYNTEKHKYEIDNLDIPHIEEVINSIVPYPYTNDK

SEQ ID NO: 1879 - protein, 114 aa, unidentified
  REGION 1..114: note = Description of Unknown: uncultivated organism with predicted taxonomy: Candidatus Termititenax aidoneus
  REGION 1..114: note = MG1-58 RuvC-III domain
AETAQIARVAQEITAFVFGWGMQTSGDDRHIFVNNGSSTSAIRRRYGLNKILGDDVKKNRENDKHHALDAICISFSRDFKYDEHSKKDVIKGFTYDFVKKEIDKLMPYPYANDK

SEQ ID NO: 1880 - protein, 141 aa, unidentified
  REGION 1..141: note = Description of Unknown: uncultivated organism with predicted taxonomy: Verrucomicrobia
  REGION 1..141: note = MG1-59 RuvC-III domain
AETAWISKLAQRICCLHFGFQFGGLTGAKKVWTVSGNTTAMIRGRYGLNRLLHDEESAADSLFDRICMEKKFEEKNRKNKKHHALDAMCLCFAPTSNAKKASAYKNILPEEITRNPESDEARKFFGKYLANVIPNKVAVEK

SEQ ID NO: 1881 - protein, 140 aa, unidentified
  REGION 1..140: note = Description of Unknown: uncultivated organism with predicted taxonomy: unclassified Verrucomicrobia (miscellaneous)
  REGION 1..140: note = MG1-60 RuvC-III domain
AETAHIAKLAQKIVCMHFGFQFGGLSGTKRVFTVPGALTSRIRKFYGLDRILHNSAAESENLSFEEFLKFSEDLEKKNRKNKKHHALDAMCLCFAPTGVDSRRAKLGEILPEKLRSEKAAREFFKSYLDKIMPVDVAPKK

SEQ ID NO: 1882 - protein, 129 aa, unidentified
  REGION 1..129: note = Description of Unknown: uncultivated organism
  REGION 1..129: note = MG1-61 RuvC-III domain
AETAYIAKMSQKIAHLFFGWSQGTLGSKKKVIVANGSLTAKMRGLYGLNRILHSGISEEEYKELVKSGKIDEKNRDNPRHHALDAIVLSMLPEIQMNDRKKDFFPIWFTPDYCRENLEKCFPKHIKYEK

SEQ ID NO: 1883 - protein, 129 aa, unidentified; identical to SEQ ID NO: 1882
  REGION 1..129: note = Description of Unknown: uncultivated organism with predicted taxonomy: Deltaproteobacteria
  REGION 1..129: note = MG1-62 RuvC-III domain

SEQ ID NO: 1884 - protein, 176 aa, unidentified
  REGION 1..176: note = Description of Unknown: uncultivated organism with predicted taxonomy: Verrucomicrobia bacterium 61-8
  REGION 1..176: note = MG1-63 RuvC-III domain
AESAWIARLAQTIARLHFGWPLDDEPGEERVITISGGLTARIRRKYLLDSLLGVGNDAETLRREIDSALDELEALRTDTSLSENARKQKRAELRQRLANLAAEAEKNRDDQRHHALDAMLLTFLPNWARDRTKEDFFRFPTAIGDNDFYSKEDQPEMAAIKSELAKLYVENKPVFR

SEQ ID NO: 1885 - protein, 176 aa, unidentified
  REGION 1..176: note = Description of Unknown: uncultivated organism
  REGION 1..176: note = MG1-64 RuvC-III domain
AESAWIARLAQTIARLHFGWPLDDEPGEERVITISGGLTARIRRKYLLDSLLGVGNDAETLRREIDSALNELQALRTDTSLSENAPKQKRAELRQRLANLAAEAEKNRDDQRHHALDAMLLTFLPNWARDRNKEDFFRFPTAIGDNDFYSKEDQPEMAAIKSELAKLYVENKPVFR

SEQ ID NO: 1886 - protein, 179 aa, unidentified
  REGION 1..179: note = Description of Unknown: uncultivated organism with predicted taxonomy: Verrucomicrobia
  REGION 1..179: note = MG1-65 RuvC-III domain
ATTATIARMALRITDILFDWQNGNDAQGNKRVRVFPGGRTAAIRRRYLLNTLLGADSDQKLKTITDLQSEISQIKAQWPSLQGEEHKPTRKAYYQKRRQLAELIEGTKKDRSDARHHALDAMVLTFLPTWAQHPNKDEFFRFPPPLDNPYPQRPDILKVHQFFRDALNNVIPTPLAFEK

SEQ ID NO: 1887 - protein, 129 aa, unidentified
  REGION 1..129: note = Description of Unknown: uncultivated organism
  REGION 1..129: note = MG1-66 RuvC-III domain
AETSYISRLAQKIVHLYFGWEQLTKGSSRRVFVVSGAFTKRIRDLFKLDAILYPDLTLEEVYKYSAEEREEKNRNNPRHHALDALVVSITQEIKYNPLKGKDEYPEWFTPEFCKQAVERCLPVKVRFEK

SEQ ID NO: 1888 - protein, 176 aa, unidentified
  REGION 1..176: note = Description of Unknown: uncultivated organism
  REGION 1..176: note = MG1-67 RuvC-III domain
AESAWIARLAQTIARLHFGWPLDDEPGEERVITISGGLTARIRRKYLLDSLLGVGNDAETLRREIDSALDELEALRTDTSLSENARKQKRAELRQRLANLAAEAEKNRDDQRHHALDAMLLTFLPNWARDRNKEDFFRFPTAIGDNDLYSKEDQPKIEAIKSKLAKLYEENGAVFR

SEQ ID NO: 1889 - protein, 129 aa, unidentified
  REGION 1..129: note = Description of Unknown: uncultivated organism with predicted taxonomy: Elusimicrobia bacterium HGW-Elusimicrobia-1
  REGION 1..129: note = MG1-68 RuvC-III domain
AETAYIAKLSQKICHLFFGWEQGTEGSKRKVIVANGGLTAKMRNAYDLNRILHTGLSDAEYKELCKSGEIDKKNRDNPRHHALDAMVISMIPEIKMNDRKKDFFPIWFNPDYCREKLEQCFPKNIRYEK

SEQ ID NO: 1890 - protein, 140 aa, unidentified
  REGION 1..140: note = Description of Unknown: uncultivated organism with predicted taxonomy: Pedosphaera sp. Tous-C6FEB
  REGION 1..140: note = MG1-69 RuvC-III domain
AETAWISKLAQTIVNLRFGWRNGVDYSGPQPVKRVIVVSGGLTARVRRKYGLDKLLYGEDTAPEVLAKKVKNRDDDRHHALDAMVMTFIPHWARDPNKQGFFRFPPAFRDANGREDYQRIRSLFASHLQQIVPRHLAYEP

SEQ ID NO: 1891 - protein, 123 aa, unidentified
  REGION 1..123: note = Description of Unknown: uncultivated organism with predicted taxonomy: Endomicrobium
  REGION 1..123: note = MG1-70 RuvC-III domain
AETSYISRLAQRIVHLFFGWEQLTKGSTRHVYVVSGALTKYIRDKFELDVLLYPDLTKEEVFKIPSEEREEKNRNNPRHHALDALVVSIARPENVDKYPEWFTQDFCRMAIEKCLPVKVRFEK

SEQ ID NO: 1892 - protein, 179 aa, unidentified; identical to SEQ ID NO: 1886
  REGION 1..179: note = Description of Unknown: uncultivated organism
  REGION 1..179: note = MG1-71 RuvC-III domain

SEQ ID NO: 1893 - protein, 105 aa, unidentified
  REGION 1..105: note = Description of Unknown: uncultivated organism with predicted taxonomy: Deltaproteobacteria
  REGION 1..105: note = MG1-72 RuvC-III domain
AETAWISKLAQTIVNLRFGWRNGVDYSGPQPVKRVIVVSGGLTARVRAKYGLDKLLYGENTPPEVLAKKVKNRDDDRHHALDAMVMTFIPHWARDPHKEGFFRFP

SEQ ID NO: 1894 - protein, 176 aa, unidentified
  REGION 1..176: note = Description of Unknown: uncultivated organism with predicted taxonomy: Pedosphaera sp. Tous-C6FEB
  REGION 1..176: note = MG1-73 RuvC-III domain
AESAWIARLAQTIARLHFGWPLDDEPGEERVITISGGLTARIRRKYLLDSLLGVGNDAETLRREIDSALNELQALRTDTSLSENAPKQKRAELRQRLANLAAEAEKNRDDQRHHALDAMLLTFLPNWARDRNKEDFFRFPTAIGDNDFYSKEDQPEMAAIKSQLAKLYVENKPVFR

SEQ ID NO: 1895 - protein, 179 aa, unidentified; identical to SEQ ID NO: 1886
  REGION 1..179: note = Description of Unknown: uncultivated organism
  REGION 1..179: note = MG1-74 RuvC-III domain

SEQ ID NO: 1896 - protein, 83 aa, unidentified
  REGION 1..83: note = Description of Unknown: uncultivated organism
  REGION 1..83: note = MG1-75 RuvC-III domain
QLARQLVAECAHWMGIAGDPDEIQRRIGTPSGYMRAQALRSWEDTVPAKNRSDLVHHLVDAAVVAHIPPGAGMNQVSYGGIFY

SEQ ID NO: 1897 - protein, 130 aa, unidentified
  REGION 1..130: note = Description of Unknown: uncultivated organism
  REGION 1..130: note = MG1-76 RuvC-III domain
AETAYISRLAQKICHLFFGWEQLTKGSQRKVFVVSGAFTRKIRTIFELDRILYPDLSDEEYKELLTKGEIQKKNRDNPRHHVLDTIVLSIIPEIKYNPEREKDDYPVWFNKEYCRQYIEKCFPRPIRFVK

SEQ ID NO: 1898 - protein, 123 aa, unidentified
  REGION 1..123: note = Description of Unknown: uncultivated organism with predicted taxonomy: Verrucomicrobia
  REGION 1..123: note = MG1-78 RuvC-III domain
AETAWISKLAQTIISLRFGWPGGIANGERKIIVVSGGLTGRIRRKYKLNSLLNPDAKSEEEAEVKNRNDDRHHALDAMVISFIPNWARDAKKTGFFRFPDGIHRELFAKEIADVIPLNVCFEK

SEQ ID NO: 1899 - protein, 156 aa, unidentified
  REGION 1..156: note = Description of Unknown: uncultivated organism
  REGION 1..156: note = MG1-79 RuvC-III domain
QLARHLRAEVIHWLGLDQIQDQKERNKEIARRIGTPTGFQTSVCRESWTPPHVFPQMYRLLCDKKGVPVRDRNGQERWVKDRTNLRHHLWDAAVLSHIPPGVGLNSADCGGIFVHRRDPQNGEWSVSALADLGPDLVAFEKANADRCLVVRLRQRK

SEQ ID NO: 1900 - protein, 123 aa, unidentified; identical to SEQ ID NO: 1898
  REGION 1..123: note = Description of Unknown: uncultivated organism with predicted taxonomy: Verrucomicrobia
  REGION 1..123: note = MG1-80 RuvC-III domain

SEQ ID NO: 1901 - protein, 169 aa, unidentified
  REGION 1..169: note = Description of Unknown: uncultivated organism
  REGION 1..169: note = MG1-81 RuvC-III domain
QHTAYIARIVRHVALIRLGWTGDDGRDPTIIKGNKPSSSFQVTNGQLTSRLRQAWGLNHILHPLPEGKRWDDLTDAEKEQMQQKNRGDLRHHALDAMVIACTLPWLAHRTVGATDPETGEHGWWQLDERTRRSLALNPVFPTEGQMRRVAEEWMQKVVVRHHVSRSPHQ

SEQ ID NO: 1902 - protein, 19 aa, unidentified
  REGION 1..19: note = Description of Unknown: uncultivated organism
  REGION 1..19: note = MG1-82 RuvC-III domain
AETAWISKLAQTIVNLRFG

SEQ ID NO: 1903 - protein, 156 aa, unidentified
  REGION 1..156: note = Description of Unknown: uncultivated organism
  REGION 1..156: note = MG1-83 RuvC-III domain
QIARYLRVEIIHWLGLDRIKNEMERNKQIAGRIGTPTGFQTSICRESWTPRTVFPQMYRLLHDKKGIPVRDQHGRERWVKDRTNLRHHLWDAAVLSHIPPREGLNSADCGGIFVHRRDQQTGEWRVSALPNLGPDLVAFEKENEGRCLVAHLRQRK

SEQ ID NO: 1904 - protein, 138 aa, unidentified
  REGION 1..138: note = Description of Unknown: uncultivated organism with predicted taxonomy: Coraliomargarita sp. CAG:312
  REGION 1..138: note = MG1-84 RuvC-III domain
AETAWISKLAQRIVCMHFGFQFGGNTGEKRVFTVPGNITAKIRSAFGLNKILHNIDADKKNMSEFDIVKLDYELDKKNRKNKKHHALDAMCLCFAPTGPNAQKLGIGALLPPEIAAKAEEFFRGYIEKVVPNEVAPKK

SEQ ID NO: 1905 - protein, 140 aa, unidentified; identical to SEQ ID NO: 1881
  REGION 1..140: note = Description of Unknown: uncultivated organism with predicted taxonomy: unclassified Verrucomicrobia (miscellaneous)
  REGION 1..140: note = MG1-85 RuvC-III domain

SEQ ID NO: 1906 - protein, 138 aa, unidentified; identical to SEQ ID NO: 1904
  REGION 1..138: note = Description of Unknown: uncultivated organism with predicted taxonomy: Coraliomargarita sp. CAG:312
  REGION 1..138: note = MG1-86 RuvC-III domain

SEQ ID NO: 1907 - protein, 142 aa, unidentified
  REGION 1..142: note = Description of Unknown: uncultivated organism with predicted taxonomy: Verrucomicrobia
  REGION 1..142: note = MG1-87 RuvC-III domain
AETAWISKLAQRICCLHFGFQFGGLAGAKKVWTVSGNTTAMIRGRYGLNRLLHDEESAEDLSLFDRICMEKKFEEKNRKNKKHHALDAMCLCFAPTSNAKKASAYKNILPEEITRNPESDEARKFFGKYLASVIPNKVAVKK

SEQ ID NO: 1908 - protein, 140 aa, unidentified
  REGION 1..140: note = Description of Unknown: uncultivated organism with predicted taxonomy: unclassified Verrucomicrobia (miscellaneous)
  REGION 1..140: note = MG1-88 RuvC-III domain
AETAHIAKLAQKIVCMHFGFQFGGLSGTKRVFTVPGALTSRIRKFYGLDRILHNSASESENLSFEEFLKFSEDLEKKNRKNKKHHALDAMCLCFAPTGVDSRRAKLGEILPEKLRSEKAAREFFKSYLDKIMPVDVAPKK

SEQ ID NO: 1909 - protein, 140 aa, unidentified; identical to SEQ ID NO: 1881
  REGION 1..140: note = Description of Unknown: uncultivated organism with predicted taxonomy: unclassified Verrucomicrobia (miscellaneous)
  REGION 1..140: note = MG1-89 RuvC-III domain

SEQ ID NO: 1910 - protein, 140 aa, unidentified; identical to SEQ ID NO: 1881
  REGION 1..140: note = Description of Unknown: uncultivated organism with predicted taxonomy: unclassified Verrucomicrobia (miscellaneous)
  REGION 1..140: note = MG1-90 RuvC-III domain

SEQ ID NO: 1911 - protein, 142 aa, unidentified
  REGION 1..142: note = Description of Unknown: uncultivated organism
  REGION 1..142: note = MG1-91 RuvC-III domain
AETAWISKLAQRICCIHFGFQFGGLTGEKKVWTVSGNTTAMIRSRYGLNRLLHNEDVPKDISLSERLKLESEFERKNRDNKKHHALDAMCLCYAPTSNTRRAASYKNILPAEITRNPESDEARRFFGGYLANVIPNKVAIEK

SEQ ID NO: 1912 - protein, 140 aa, unidentified
  REGION 1..140: note = Description of Unknown: uncultivated organism with predicted taxonomy: unclassified Verrucomicrobia (miscellaneous)
  REGION 1..140: note = MG1-92 RuvC-III domain
AETAHISKLAQKIVCLHFGFQFGGLSGTKRVFTVPGSLTARIRTFYGLNKILHNEDLAHETLSYEGFLKRGEELDKKNRANKKHHALDAMCLCFAPTGVNSKRARVDMLLPPKIRSEKDAELFFRKYLDKLIPVDVAPKK

SEQ ID NO: 1913 - protein, 140 aa, unidentified; identical to SEQ ID NO: 1881
  REGION 1..140: note = Description of Unknown: uncultivated organism with predicted taxonomy: unclassified Verrucomicrobia (miscellaneous)
  REGION 1..140: note = MG1-93 RuvC-III domain

SEQ ID NO: 1914 - protein, 142 aa, unidentified
  REGION 1..142: note = Description of Unknown: uncultivated organism with predicted taxonomy: unclassified Verrucomicrobia (miscellaneous)
  REGION 1..142: note = MG1-94 RuvC-III domain
AETAWISKLAQKICCIHFGFQFGGLKGEKKVWTVSGNTTAMIRGRYGLNRLLHNEEISEDLPLLDRIVKEKNFEEKNRDNKKHHALDAMCICFAPTSNAKKALSRKNILPEEIAKNPESDDARNFFAKYLEEVVPTKVAIKK

SEQ ID NO: 1915 - protein, 138 aa, unidentified; identical to SEQ ID NO: 1904
  REGION 1..138: note = Description of Unknown: uncultivated organism with predicted taxonomy: Coraliomargarita sp. CAG:312
  REGION 1..138: note = MG1-95 RuvC-III domain

SEQ ID NO: 1916 - protein, 140 aa, unidentified; identical to SEQ ID NO: 1908
  REGION 1..140: note = Description of Unknown: uncultivated organism with predicted taxonomy: unclassified Verrucomicrobia (miscellaneous)
  REGION 1..140: note = MG1-96 RuvC-III domain

SEQ ID NO: 1917 - protein, 140 aa, unidentified; identical to SEQ ID NO: 1881
  REGION 1..140: note = Description of Unknown: uncultivated organism with predicted taxonomy: unclassified Verrucomicrobia (miscellaneous)
  REGION 1..140: note = MG1-97 RuvC-III domain

SEQ ID NO: 1918 - protein, 140 aa, unidentified; identical to SEQ ID NO: 1881
  REGION 1..140: note = Description of Unknown: uncultivated organism with predicted taxonomy: unclassified Verrucomicrobia (miscellaneous)
  REGION 1..140: note = MG1-98 RuvC-III domain

SEQ ID NO: 1919 - protein, 140 aa, unidentified; identical to SEQ ID NO: 1881
  REGION 1..140: note = Description of Unknown: uncultivated organism with predicted taxonomy: unclassified Verrucomicrobia (miscellaneous)
  REGION 1..140: note = MG1-99 RuvC-III domain

SEQ ID NO: 1920 - protein, 138 aa, unidentified; identical to SEQ ID NO: 1904
  REGION 1..138: note = Description of Unknown: uncultivated organism with predicted taxonomy: Coraliomargarita sp. CAG:312
  REGION 1..138: note = MG1-100 RuvC-III domain

SEQ ID NO: 1921 - protein, 138 aa, unidentified
  REGION 1..138: note = Description of Unknown: uncultivated organism with predicted taxonomy: unclassified Verrucomicrobia (miscellaneous)
  REGION 1..138: note = MG1-101 RuvC-III domain
AETAWISKLAQQVVCLHFGFQFGGMEGQRRVFCIPGGVTARIRGMFGLNELLHVKDYDTDSMSETEIVELHKRLEKKNRENKKHHALDAMCLCFAPTGSQIKRFDAKTIMPEGILGREKQYFKSYLDKIVPNEVATQK

SEQ ID NO: 1922 - protein, 140 aa, unidentified; identical to SEQ ID NO: 1881
  REGION 1..140: note = Description of Unknown: uncultivated organism with predicted taxonomy: unclassified Verrucomicrobia (miscellaneous)
  REGION 1..140: note = MG1-102 RuvC-III domain

SEQ ID NO: 1923 - protein, 140 aa, unidentified
  REGION 1..140: note = Description of Unknown: uncultivated organism with predicted taxonomy: Verrucomicrobia
  REGION 1..140: note = MG1-103 RuvC-III domain
AETAHIAKLAQKIVCMHFGFQFGGLSGTKRVFTLPGALTSRIRKFYGLDRILHISAAESENLSFEEFLKFSEDLEKKNRKNKKHHALDAMCLCFAPTGVDSRRAKLGEILPEKLRSEKAAREFFKSYLDKIMPVDVAPKK

SEQ ID NO: 1924 - protein, 138 aa, unidentified; identical to SEQ ID NO: 1904
  REGION 1..138: note = Description of Unknown: uncultivated organism with predicted taxonomy: Verrucomicrobia
  REGION 1..138: note = MG1-104 RuvC-III domain

SEQ ID NO: 1925 - protein, 140 aa, unidentified
  REGION 1..140: note = Description of Unknown: uncultivated organism
  REGION 1..140: note = MG1-105 RuvC-III domain
AETAHIAKLAQKIVCMHFGFQFGGLSGTKRVFTVPGALTSRIRKFYGLDRILHNSAAERENLSFEEFLKFSEDLEKKNRKNKKHHALDAMCLCFAPTGVDSRRVKLGEILPEKLKSEKAAREFFKSYLDKIMPVDVAPKK

SEQ ID NO: 1926 - protein, 142 aa, unidentified
  REGION 1..142: note = Description of Unknown: uncultivated organism with predicted taxonomy: Verrucomicrobia
  REGION 1..142: note = MG1-106 RuvC-III domain
AETAWISKLAQRICCLHFGFQFGGLAGAKKVWTVSGNTTAMIRGRYGLNRLLHDEESAEDLSLFDRICMEKKFEEKNRKNKKHHALDAMCLCFAPTSNAKKASAYKNILPEEITRNPESDEARKFFGKYLATVIPNKVAVEK

SEQ ID NO: 1927 - protein, 142 aa, unidentified; identical to SEQ ID NO: 1907
  REGION 1..142: note = Description of Unknown: uncultivated organism with predicted taxonomy: Verrucomicrobia
  REGION 1..142: note = MG1-107 RuvC-III domain

SEQ ID NO: 1928 - protein, 142 aa, unidentified
  REGION 1..142: note = Description of Unknown: uncultivated organism with predicted taxonomy: Verrucomicrobia
  REGION 1..142: note = MG1-108 RuvC-III domain
AETAWISKLAQRICCLHFGFQFGGLAGAKKVWTVSGNTTAMIRGRYGLNRLLHDEEAAEDLSLFDRICMEKKFEEKNRKNKKHHALDAMCLCFAPTSNAKKASAYKNILPEEITRNPESDEARKFFGRYLATVIPNKVAVEK

SEQ ID NO: 1929 - protein, 140 aa, unidentified; identical to SEQ ID NO: 1881
  REGION 1..140: note = Description of Unknown: uncultivated organism with predicted taxonomy: unclassified Verrucomicrobia (miscellaneous)
  REGION 1..140: note = MG1-109 RuvC-III domain

SEQ ID NO: 1930 - protein, 142 aa, unidentified
  REGION 1..142: note = Description of Unknown: uncultivated organism with predicted taxonomy: Verrucomicrobia
  REGION 1..142: note = MG1-110 RuvC-III domain
AETAWISKLAQRICCLHFGFQFGGLAGAKKVWTVSGNTTAMIRGRYGLNRLLHDEESAEDLSLFDRICMEKKLEEKNRKNKKHHALDAMCLCFAPTSNAKKASAYKNILPEEITRNPESDEARKFFGKYLANVIPNKVAVEK

SEQ ID NO: 1931 - protein, 138 aa, unidentified; identical to SEQ ID NO: 1904
  REGION 1..138: note = Description of Unknown: uncultivated organism with predicted taxonomy: Coraliomargarita sp. CAG:312
  REGION 1..138: note = MG1-111 RuvC-III domain

SEQ ID NO: 1932 - protein, 140 aa, unidentified; identical to SEQ ID NO: 1881
  REGION 1..140: note = Description of Unknown: uncultivated organism with predicted taxonomy: unclassified Verrucomicrobia (miscellaneous)
  REGION 1..140: note = MG1-112 RuvC-III domain

SEQ ID NO: 1933 - protein, 140 aa, unidentified
  REGION 1..140: note = Description of Unknown: uncultivated organism with predicted taxonomy: Verrucomicrobia
  REGION 1..140: note = MG1-113 RuvC-III domain
AETAHISKLAQKIVCLHFGFQFGGLGGTKRVFTVPGALTARIRSFYGLNKILHNEDLAKDALSYEEVLKRGEELDKKNRENEKHHALDAMCLCFAPTGVNSKRARIDMLLPPDIRGEGKAELFFRKYLDRLIPVDVAPKK

SEQ ID NO: 1934 - protein, 140 aa, unidentified; identical to SEQ ID NO: 1912
  REGION 1..140: note = Description of Unknown: uncultivated organism with predicted taxonomy: unclassified Verrucomicrobia (miscellaneous)
  REGION 1..140: note = MG1-114 RuvC-III domain

SEQ ID NO: 1935 - protein, 140 aa, unidentified; identical to SEQ ID NO: 1830
  REGION 1..140: note = Description of Unknown: uncultivated organism with predicted taxonomy: unclassified Verrucomicrobia (miscellaneous)
  REGION 1..140: note = MG1-115 RuvC-III domain

SEQ ID NO: 1936 - protein, 142 aa, unidentified
  REGION 1..142: note = Description of Unknown: uncultivated organism with predicted taxonomy: Verrucomicrobia
  REGION 1..142: note = MG1-116 RuvC-III domain
AETAWISKLAQRICCLHFGFQFGGLAGAKKVWTVSGNTTAMIRGRYGLNRLLHDEESAEDLSLFDRICMEKKFEEKNRKNKKHHALDAMCLCFAPTSNAKKASAYKNILPEEITRNPESDEARKFFGRYLATVIPNKVAVEK

SEQ ID NO: 1937 - protein, 138 aa, unidentified; identical to SEQ ID NO: 1904
  REGION 1..138: note = Description of Unknown: uncultivated organism with predicted taxonomy: Coraliomargarita sp. CAG:312
  REGION 1..138: note = MG1-117 RuvC-III domain

SEQ ID NO: 1938 - protein, 140 aa, unidentified; identical to SEQ ID NO: 1881
  REGION 1..140: note = Description of Unknown: uncultivated organism with predicted taxonomy: unclassified Verrucomicrobia (miscellaneous)
  REGION 1..140: note = MG1-118 RuvC-III domain

SEQ ID NO: 1939 - protein, 140 aa, unidentified; identical to SEQ ID NO: 1881
  REGION 1..140: note = Description of Unknown: uncultivated organism with predicted taxonomy: unclassified Verrucomicrobia (miscellaneous)
  REGION 1..140: note = MG1-119 RuvC-III domain

SEQ ID NO: 1940 - protein, 140 aa, unidentified
  REGION 1..140: note = Description of Unknown: uncultivated organism with predicted taxonomy: unclassified Verrucomicrobia (miscellaneous)
  REGION 1..140: note = MG1-120 RuvC-III domain
AETAHISKLAQKIVCLHFGFQFGGLGGTKRVFTVPGALTARIRSFYGLNKILHNEDLAKDALSYEEVLKRGEELDKKNRKNKKHHALDAMCLCFAPTGVNSKRARIDMLLPPDIRGEREAELFFRKYLDRLIPVDVAPKK

SEQ ID NO: 1941 - protein, 140 aa, unidentified; identical to SEQ ID NO: 1881
  REGION 1..140: note = Description of Unknown: uncultivated organism with predicted taxonomy: unclassified Verrucomicrobia (miscellaneous)
  REGION 1..140: note = MG1-121 RuvC-III domain

SEQ ID NO: 1942 - protein, 140 aa, unidentified; identical to SEQ ID NO: 1908
  REGION 1..140: note = Description of Unknown: uncultivated organism with predicted taxonomy: unclassified Verrucomicrobia (miscellaneous)
  REGION 1..140: note = MG1-122 RuvC-III domain

SEQ ID NO: 1943 - protein, 140 aa, unidentified
  REGION 1..140: note = Description of Unknown: uncultivated organism with predicted taxonomy: unclassified Verrucomicrobia (miscellaneous)
  REGION 1..140: note = MG1-123 RuvC-III domain
AETAHIAKLAQKIVCMHFGFQFGGLSGTKRVFTVPGALTSRIRKFYGLDRILHNSAAERENLSFEEFLKFSEDLEKKNRKNKKHHALDAMCLCFAPTGVDSRRAKLGEILPEKLRSEKAAREFFKSYLDKIMPVDVAPKK

SEQ ID NO: 1944 - protein, 142 aa, unidentified
  REGION 1..142: note = Description of Unknown: uncultivated organism with predicted taxonomy: Verrucomicrobia
  REGION 1..142: note = MG1-124 RuvC-III domain
AETAWISKLAQRICCLHFGFQFGGLAGAKKVWTVSGNTTAMIRGRYGLNRLLHDEESAEDLSLFDRICMEKKFEEKNRKNKKHHALDAMCLCFAPTSNAKKASAYKNILPEEITRNPESDEARKFFGKYLASVIPNKVAVEK

SEQ ID NO: 1945 - protein, 138 aa, unidentified; identical to SEQ ID NO: 1904
  REGION 1..138: note = Description of Unknown: uncultivated organism with predicted taxonomy: Verrucomicrobia
  REGION 1..138: note = MG1-125 RuvC-III domain

SEQ ID NO: 1946 - protein, 140 aa, unidentified; identical to SEQ ID NO: 1881
  REGION 1..140: note = Description of Unknown: uncultivated organism with predicted taxonomy: unclassified Verrucomicrobia (miscellaneous)
  REGION 1..140: note = MG1-126 RuvC-III domain

SEQ ID NO: 1947 - protein, 142 aa, unidentified; identical to SEQ ID NO: 1926
  REGION 1..142: note = Description of Unknown: uncultivated organism with predicted taxonomy: Verrucomicrobia
  REGION 1..142: note = MG1-127 RuvC-III domain

SEQ ID NO: 1948 - protein, 140 aa, unidentified; identical to SEQ ID NO: 1908
  REGION 1..140: note = Description of Unknown: uncultivated organism with predicted taxonomy: unclassified Verrucomicrobia (miscellaneous)
  REGION 1..140: note = MG1-128 RuvC-III domain

SEQ ID NO: 1949 - protein, 142 aa, unidentified
  REGION 1..142: note = Description of Unknown: uncultivated organism with predicted taxonomy: Verrucomicrobia
  REGION 1..142: note = MG1-129 RuvC-III domain
AETAWISKLAQRICCLHFGFQFGGLAGAKKVWTVSGNTTAMIRGRYALNRLLHDEESAEDLSLFDRICMEKKFEEKNRKNKKHHALDAMCLCFAPTSNAKKASAYKNILPEEITRNPESDEARKFFGKYLANVIPNKVAVEK

SEQ ID NO: 1950 - protein, 140 aa, unidentified; identical to SEQ ID NO: 1881
  REGION 1..140: note = Description of Unknown: uncultivated organism with predicted taxonomy: unclassified Verrucomicrobia (miscellaneous)
  REGION 1..140: note = MG1-130 RuvC-III domain

SEQ ID NO: 1951 - protein, 140 aa, unidentified; identical to SEQ ID NO: 1912
  REGION 1..140: note = Description of Unknown: uncultivated organism with predicted taxonomy: unclassified Verrucomicrobia (miscellaneous)
  REGION 1..140: note = MG1-131 RuvC-III domain

SEQ ID NO: 1952 - protein, 140 aa, unidentified; identical to SEQ ID NO: 1881
  REGION 1..140: note = Description of Unknown: uncultivated organism with predicted taxonomy: unclassified Verrucomicrobia (miscellaneous)
  REGION 1..140: note = MG1-132 RuvC-III domain

SEQ ID NO: 1953 - protein, 138 aa, unidentified; identical to SEQ ID NO: 1904
  REGION 1..138: note = Description of Unknown: uncultivated organism with predicted taxonomy: Coraliomargarita sp. CAG:312
  REGION 1..138: note = MG1-133 RuvC-III domain

SEQ ID NO: 1954 - protein, 140 aa, unidentified; identical to SEQ ID NO: 1830
  REGION 1..140: note = Description of Unknown: uncultivated organism with predicted taxonomy: unclassified Verrucomicrobia (miscellaneous)
  REGION 1..140: note = MG1-134 RuvC-III domain

SEQ ID NO: 1955 - protein, 140 aa, unidentified
  REGION 1..140: note = Description of Unknown: uncultivated organism with predicted taxonomy: unclassified Verrucomicrobia (miscellaneous)
  REGION 1..140: note = MG1-135 RuvC-III domain
AETAHIAKLAQKIVCMHFGFQFGGLSGTKRVFTVPGALTSRIRKFYGLDRILHNSAAESENLSFEEFLKFSEDLEKKNRKNKKHHALDAMCLCFAPTGVDSGRAKLGEILPEKLRSEKAAREFFKSYLDKIMPVDVAPKK

SEQ ID NO: 1956 - protein, 142 aa, unidentified; identical to SEQ ID NO: 1907
  REGION 1..142: note = Description of Unknown: uncultivated organism with predicted taxonomy: Verrucomicrobia
  REGION 1..142: note = MG1-136 RuvC-III domain

SEQ ID NO: 1957 - protein, 140 aa, unidentified; identical to SEQ ID NO: 1881
  REGION 1..140: note = Description of Unknown: uncultivated organism with predicted taxonomy: unclassified Verrucomicrobia (miscellaneous)
  REGION 1..140: note = MG1-137 RuvC-III domain

SEQ ID NO: 1958 - protein, 140 aa, unidentified; identical to SEQ ID NO: 1881
  REGION 1..140: note = Description of Unknown: uncultivated organism with predicted taxonomy: unclassified Verrucomicrobia (miscellaneous)
  REGION 1..140: note = MG1-138 RuvC-III domain

SEQ ID NO: 1959 - protein, 140 aa, unidentified; identical to SEQ ID NO: 1881
  REGION 1..140: note = Description of Unknown: uncultivated organism with predicted taxonomy: unclassified Verrucomicrobia (miscellaneous)
  REGION 1..140: note = MG1-139 RuvC-III domain

SEQ ID NO: 1960 - protein, 140 aa, unidentified; identical to SEQ ID NO: 1881
  REGION 1..140: note = Description of Unknown: uncultivated organism with predicted taxonomy: unclassified Verrucomicrobia (miscellaneous)
  REGION 1..140: note = MG1-140 RuvC-III domain

SEQ ID NO: 1961 - protein, 142 aa, unidentified
  REGION 1..142: note = Description of Unknown: uncultivated organism with predicted taxonomy: Verrucomicrobia
  REGION 1..142: note = MG1-141 RuvC-III domain
AETAWISKLAQRICCLHFGFQFGGLAGAKKVWTVSGNTTSMIRGRYGLNRLLHDEESAEDLSLFDRICMEKKFEEKNRKNKKHHALDAMCLCFAPTSNAKKASAYKNILPEEITRNPESDEARKFFGKYLANVIPNKVAVEK

SEQ ID NO: 1962 - protein, 140 aa, unidentified; identical to SEQ ID NO: 1830
  REGION 1..140: note = Description of Unknown: uncultivated organism with predicted taxonomy: unclassified Verrucomicrobia (miscellaneous)
  REGION 1..140: note = MG1-142 RuvC-III domain

SEQ ID NO: 1963 - protein, 140 aa, unidentified
  REGION 1..140: note = Description of Unknown: uncultivated organism with predicted taxonomy: Verrucomicrobia bacterium
  REGION 1..140: note = MG1-143 RuvC-III domain
AETAHISKLAQKIVCLHFGFQFGGLGGTKRVFTVPGALTARIRSFYGLNKILHNEDLAKDALSYEEVLKRGEELDKKNRKNKKHHALDAMCLCFAPTGVNSKRARIDMLLPPDIRGERKAELFFRKYLDRLIPVDVAPKK

SEQ ID NO: 1964 - protein, 140 aa, unidentified
  REGION 1..140: note = Description of Unknown: uncultivated organism with predicted taxonomy: unclassified Verrucomicrobia (miscellaneous)
  REGION 1..140: note = MG1-144 RuvC-III domain
AETAHISKLAQKIVCLHFGFQFGGLSGTKRVFTVPGSLTARIRTFYGLNKILHNEDLAHETLSYEGFLKRVEELDKKNRANKKHHALDAMCLCFAPTGVNSKRARVDMLLPPKIRSEKDAELFFRKYLDKLIPVDVAPKK

SEQ ID NO: 1965 - protein, 142 aa, unidentified; identical to SEQ ID NO: 1926
  REGION 1..142: note = Description of Unknown: uncultivated organism with predicted taxonomy: Verrucomicrobia
  REGION 1..142: note = MG1-145 RuvC-III domain

SEQ ID NO: 1966 - protein, 140 aa, unidentified; identical to SEQ ID NO: 1881
  REGION 1..140: note = Description of Unknown: uncultivated organism with predicted taxonomy: unclassified Verrucomicrobia (miscellaneous)
  REGION 1..140: note = MG1-147 RuvC-III domain

SEQ ID NO: 1967 - protein, 140 aa, unidentified; identical to SEQ ID NO: 1908
  REGION 1..140: note = Description of Unknown: uncultivated organism with predicted taxonomy: unclassified Verrucomicrobia (miscellaneous)
  REGION 1..140: note = MG1-148 RuvC-III domain

SEQ ID NO: 1968 - protein, 140 aa, unidentified; identical to SEQ ID NO: 1881
  REGION 1..140: note = Description of Unknown: uncultivated organism with predicted taxonomy: unclassified Verrucomicrobia (miscellaneous)
  REGION 1..140: note = MG1-149 RuvC-III domain

SEQ ID NO: 1969 - protein, 138 aa, unidentified; identical to SEQ ID NO: 1904
  REGION 1..138: note = Description of Unknown: uncultivated organism with predicted taxonomy: Coraliomargarita sp. CAG:312
  REGION 1..138: note = MG1-150 RuvC-III domain

SEQ ID NO: 1970 - protein, 140 aa, unidentified
  REGION 1..140: note = Description of Unknown: uncultivated organism with predicted taxonomy: Verrucomicrobia
  REGION 1..140: note = MG1-151 RuvC-III domain
AETAHISKLAQKIVCLHFGFQFGGLGGTKRVFTVTGALTARIRSFYGLNKILHNEDLAKDALSYEEVLKRGEELDKKNRKNKKHHALDAMCLCFAPTGVNSKRARIDMLLPPDIRGEREAELFFRKYLDRLIPVDVAPKK

SEQ ID NO: 1971 - protein, 142 aa, unidentified; identical to SEQ ID NO: 1911
  REGION 1..142: note = Description of Unknown: uncultivated organism
  REGION 1..142: note = MG1-152 RuvC-III domain

SEQ ID NO: 1972 - protein, 140 aa, unidentified
  REGION 1..140: note = Description of Unknown: uncultivated organism with predicted taxonomy: unclassified Verrucomicrobia (miscellaneous)
  REGION 1..140: note = MG1-153 RuvC-III domain
AETAHIAKLAQKIVCMHFGFQFGGLSGTKRVFTVPGALTSRIRKFYGLDRILHNSAAESENLSFEEFLKFSEDLEKKNRKNKKHHALDAMCLCFAPTGVDSRRAKLGEILPEKLRSEKAAREFFKSYLDKIMPMDVAPKK

SEQ ID NO: 1973 - protein, 142 aa, unidentified; identical to SEQ ID NO: 1949
  REGION 1..142: note = Description of Unknown: uncultivated organism with predicted taxonomy: Verrucomicrobia
  REGION 1..142: note = MG1-154 RuvC-III domain

SEQ ID NO: 1974 - protein, 142 aa, unidentified
  REGION 1..142: note = Description of Unknown: uncultivated organism with predicted taxonomy: Verrucomicrobia
  REGION 1..142: note = MG1-155 RuvC-III domain
AETAWISKLAQRVCCIHFGFQFGGLTGVKKVWTVSGNTTAMIRSRYGLNRLLHDENVPKDISLSERLKLENDFEKKNRDNKKHHALDAMCLCYAPTSNTRRAASYKNILPAEITRNPESDEARRFFGRYLANVIPNKVAIEK

SEQ ID NO: 1975 - protein, 138 aa, unidentified; identical to SEQ ID NO: 1904
  REGION 1..138: note = Description of Unknown: uncultivated organism with predicted taxonomy: Coraliomargarita sp. CAG:312
  REGION 1..138: note = MG1-156 RuvC-III domain

SEQ ID NO: 1976 - protein, 138 aa, unidentified
  REGION 1..138: note = Description of Unknown: uncultivated organism with predicted taxonomy: Verrucomicrobia
  REGION 1..138: note = MG1-157 RuvC-III domain
AETAWISKLAQQVVCLHFGFQFGGMEGQRRVFCIPGGVTARIRGMFGLNELLHVKDYDTDSMSETEIVELYKRLEKKNRENKKHHALDAMCLCFAPTGSQIKRFDAKTIMPEGILGREKQYFKSYLDKIVPNEVATQK

SEQ ID NO: 1977 - protein, 140 aa, unidentified; identical to SEQ ID NO: 1830
  REGION 1..140: note = Description of Unknown: uncultivated organism with predicted taxonomy: unclassified Verrucomicrobia (miscellaneous)
  REGION 1..140: note = MG1-158 RuvC-III domain

SEQ ID NO: 1978 - protein, 136 aa, unidentified
  REGION 1..136: note = Description of Unknown: uncultivated organism with predicted taxonomy: Coraliomargarita sp. CAG:312
  REGION 1..136: note = MG1-159 RuvC-III domain
AETAWIARLAQRIVCMHFGFPMGALIGKKRVFTVSGSVTSRIRGMYGLNKILHNTEIDKTLSEVDILKLNDSLETKNRANKKHHALDAMCLCFAPTSKEVLNKNREILPVEIAKDAENYFRRYLDNIIPNKVATMK

SEQ ID NO: 1979 - protein, 140 aa, unidentified; identical to SEQ ID NO: 1925
  REGION 1..140: note = Description of Unknown: uncultivated organism with predicted taxonomy: unclassified Verrucomicrobia (miscellaneous)
  REGION 1..140: note = MG1-160 RuvC-III domain

SEQ ID NO: 1980 - protein, 142 aa, unidentified; identical to SEQ ID NO: 1911
  REGION 1..142: note = Description of Unknown: uncultivated organism with predicted taxonomy: Verrucomicrobia
  REGION 1..142: note = MG1-161 RuvC-III domain

SEQ ID NO: 1981 - protein, 138 aa, unidentified; identical to SEQ ID NO: 1904
  REGION 1..138: note = Description of Unknown: uncultivated organism with predicted taxonomy: Coraliomargarita sp. CAG:312
  REGION 1..138: note = MG1-162 RuvC-III domain

SEQ ID NO: 1982 - protein, 140 aa, unidentified
  REGION 1..140: note = Description of Unknown: uncultivated organism with predicted taxonomy: unclassified Verrucomicrobia (miscellaneous)
  REGION 1..140: note = MG1-163 RuvC-III domain
AETAHISKLAQKIVCLHFGFQFGGLSGTKRVFTVPGSLTARIRTFYGLNKILHNEDLAHETLSFEGFLKRGEELDKKNRANKKHHALDAMCLCFAPTGVNSKRARVDMLLPPKIRSEKDAELFFRKYLDKLIPVDVAPKK

SEQ ID NO: 1983 - protein, 142 aa, unidentified
  REGION 1..142: note = Description of Unknown: uncultivated organism with predicted taxonomy: Verrucomicrobia
  REGION 1..142: note = MG1-164 RuvC-III domain
AETAWISKLAQKICCIHFGFQFGGLKGEKKVWTVSGNTTAMIRGRYGLNRLLHNEEISEDLPLLDRIVKEKNFEEKNRDNKKHHALDAMCICFAPTSNAKKALSRKNILPEEIAKNPESDDARKFFAKYLAEVVPTKVAIKK

SEQ ID NO: 1984 - protein, 140 aa, unidentified; identical to SEQ ID NO: 1881
  REGION 1..140: note = Description of Unknown: uncultivated organism with predicted taxonomy: unclassified Verrucomicrobia (miscellaneous)
  REGION 1..140: note = MG1-165 RuvC-III domain

SEQ ID NO: 1985 - protein, 140 aa, unidentified
  REGION 1..140: note = Description of Unknown: uncultivated organism with predicted taxonomy: unclassified Verrucomicrobia (miscellaneous)
  REGION 1..140: note = MG1-166 RuvC-III domain
AETAHIAKLAQKIVCMHFGFQFGGLSGTKRVFTVPGALTSRIRKFYGLDRILHNSASESENLSFEEFLKFSEDLEKKNRKNKKHHALDAMCLCFAPTGVDSRRAKLGEILPEKLRSEKAAREFFKSYLEKIMPVDVAPKK

SEQ ID NO: 1986 - protein, 140 aa, unidentified; identical to SEQ ID NO: 1881
  REGION 1..140: note = Description of Unknown: uncultivated organism with predicted taxonomy: unclassified Verrucomicrobia (miscellaneous)
  REGION 1..140: note = MG1-167 RuvC-III domain

SEQ ID NO: 1987 - protein, 142 aa, unidentified; identical to SEQ ID NO: 1911
  REGION 1..142: note = Description of Unknown: uncultivated organism with predicted taxonomy: Verrucomicrobia
  REGION 1..142: note = MG1-168 RuvC-III domain

SEQ ID NO: 1988 - protein, 140 aa, unidentified; identical to SEQ ID NO: 1881
  REGION 1..140: note = Description of Unknown: uncultivated organism with predicted taxonomy: unclassified Verrucomicrobia (miscellaneous)
  REGION 1..140: note = MG1-169 RuvC-III domain

SEQ ID NO: 1989 - protein, 140 aa, unidentified; identical to SEQ ID NO: 1881
  REGION 1..140: note = Description of Unknown: uncultivated organism with predicted taxonomy: unclassified Verrucomicrobia (miscellaneous)
  REGION 1..140: note = MG1-170 RuvC-III domain

SEQ ID NO: 1990 - protein, 140 aa, unidentified; identical to SEQ ID NO: 1881
  REGION 1..140: note = Description of Unknown: uncultivated organism with predicted taxonomy: unclassified Verrucomicrobia (miscellaneous)
  REGION 1..140: note = MG1-171 RuvC-III domain

SEQ ID NO: 1991 - protein, 142 aa, unidentified; identical to SEQ ID NO: 1907
  REGION 1..142: note = Description of Unknown: uncultivated organism with predicted taxonomy: Verrucomicrobia
  REGION 1..142: note = MG1-172 RuvC-III domain

SEQ ID NO: 1992 - protein, 140 aa, unidentified; identical to SEQ ID NO: 1881
  REGION 1..140: note = Description of Unknown: uncultivated organism with predicted taxonomy: unclassified Verrucomicrobia (miscellaneous)
  REGION 1..140: note = MG1-173 RuvC-III domain

SEQ ID NO: 1993 - protein, 140 aa, unidentified; identical to SEQ ID NO: 1881
  REGION 1..140: note = Description of Unknown: uncultivated organism with predicted taxonomy: unclassified Verrucomicrobia (miscellaneous)
  REGION 1..140: note = MG1-174 RuvC-III domain

SEQ ID NO: 1994 - protein, 142 aa, unidentified; identical to SEQ ID NO: 1944
  REGION 1..142: note = Description of Unknown: uncultivated organism with predicted taxonomy: Coraliomargarita sp. CAG:312
  REGION 1..142: note = MG1-175 RuvC-III domain

SEQ ID NO: 1995 - protein, 140 aa, unidentified; identical to SEQ ID NO: 1881
  REGION 1..140: note = Description of Unknown: uncultivated organism with predicted taxonomy: unclassified Verrucomicrobia (miscellaneous)
  REGION 1..140: note = MG1-176 RuvC-III domain

SEQ ID NO: 1996 - protein, 142 aa, unidentified; identical to SEQ ID NO: 1926
  REGION 1..142: note = Description of Unknown: uncultivated organism with predicted taxonomy: Verrucomicrobia
  REGION 1..142: note = MG1-177 RuvC-III domain

SEQ ID NO: 1997 - protein, 136 aa, unidentified; identical to SEQ ID NO: 1978
  REGION 1..136: note = Description of Unknown: uncultivated organism with predicted taxonomy: Coraliomargarita sp. CAG:312
  REGION 1..136: note = MG1-178 RuvC-III domain

SEQ ID NO: 1998 - protein, 142 aa, unidentified; identical to SEQ ID NO: 1961
  REGION 1..142: note = Description of Unknown: uncultivated organism with predicted taxonomy: Coraliomargarita sp. CAG:312
  REGION 1..142: note = MG1-179 RuvC-III domain

SEQ ID NO: 1999 - protein, 140 aa, unidentified
  REGION 1..140: note = Description of Unknown: uncultivated organism with predicted taxonomy: unclassified Verrucomicrobia (miscellaneous)
  REGION 1..140: note = MG1-180 RuvC-III domain
AETAHIAKLAQKIVCMHFGFQFGGVSGTKRVFTVPGALTSRIRKFYGLDRILHNSAAESENLSFEEFLKFSEDLEKKNRKNKKHHALDAMCLCFAPTGVDSRRAKLGEILPEKLRSEKAAREFFKSYLDKIMPVDVAPKK

SEQ ID NO: 2000 - protein, 140 aa, unidentified; identical to SEQ ID NO: 1912
  REGION 1..140: note = Description of Unknown: uncultivated organism with predicted taxonomy: unclassified Verrucomicrobia (miscellaneous)
  REGION 1..140: note = MG1-181 RuvC-III domain

SEQ ID NO: 2001 - protein, 140 aa, unidentified; identical to SEQ ID NO: 1830
  REGION 1..140: note = Description of Unknown: uncultivated organism with predicted taxonomy: unclassified Verrucomicrobia (miscellaneous)
  REGION 1..140: note = MG1-182 RuvC-III domain

SEQ ID NO: 2002 - protein, 138 aa, unidentified; identical to SEQ ID NO: 1904
  REGION 1..138: note = Description of Unknown: uncultivated organism with predicted taxonomy: Coraliomargarita sp. CAG:312
  REGION 1..138: note = MG1-183 RuvC-III domain

SEQ ID NO: 2003 - protein, 140 aa, unidentified; identical to SEQ ID NO: 1881
  REGION 1..140: note = Description of Unknown: uncultivated organism with predicted taxonomy: unclassified Verrucomicrobia (miscellaneous)
  REGION 1..140: note = MG1-184 RuvC-III domain

SEQ ID NO: 2004 - protein, 138 aa, unidentified; identical to SEQ ID NO: 1904
  REGION 1..138: note = Description of Unknown: uncultivated organism with predicted taxonomy: Coraliomargarita sp. CAG:312
  REGION 1..138: note = MG1-185 RuvC-III domain

SEQ ID NO: 2005 - protein, 140 aa, unidentified; identical to SEQ ID NO: 1881
  REGION 1..140: note = Description of Unknown: uncultivated organism with predicted taxonomy: unclassified Verrucomicrobia (miscellaneous)
  REGION 1..140: note = MG1-186 RuvC-III domain

SEQ ID NO: 2006 - protein, 142 aa, unidentified
  REGION 1..142: note = Description of Unknown: uncultivated organism with predicted taxonomy: Verrucomicrobia
  REGION 1..142: note = MG1-187 RuvC-III domain
AETAWISKLAQRICCLHFGFQFGGLAGAKKVWTVSGNTTAMIRGRYGLNRLLHDEESAEDLSLFDRICMEKKFEEKNRKNKKHHALDAMCLCFAPTSNAKKASAYKNILPEEITRNPESDEARKFFGKYLANVIPNKVAVEK

SEQ ID NO: 2007 - protein, 138 aa, unidentified; identical to SEQ ID NO: 1904
  REGION 1..138: note = Description of Unknown: uncultivated organism with predicted taxonomy: Verrucomicrobia
  REGION 1..138: note = MG1-188 RuvC-III domain

SEQ ID NO: 2008 - protein, 142 aa, unidentified; identical to SEQ ID NO: 1936
  REGION 1..142: note = Description of Unknown: uncultivated organism with predicted taxonomy: Verrucomicrobia
  REGION 1..142: note = MG1-189 RuvC-III domain

SEQ ID NO: 2009 - protein, 140 aa, unidentified; identical to SEQ ID NO: 1881
  REGION 1..140: note = Description of Unknown: uncultivated organism with predicted taxonomy: unclassified Verrucomicrobia (miscellaneous)
  REGION 1..140: note = MG1-190 RuvC-III domain

SEQ ID NO: 2010 - protein, 140 aa, unidentified; identical to SEQ ID NO: 1881
  REGION 1..140: note = Description of Unknown: uncultivated organism with predicted taxonomy: unclassified Verrucomicrobia (miscellaneous)
  REGION 1..140: note = MG1-191 RuvC-III domain

SEQ ID NO: 2011 - protein, 140 aa, unidentified; identical to SEQ ID NO: 1881
  REGION 1..140: note = Description of Unknown: uncultivated organism with predicted taxonomy: unclassified Verrucomicrobia (miscellaneous)
  REGION 1..140: note = MG1-192 RuvC-III domain

SEQ ID NO: 2012 - protein, 142 aa, unidentified; identical to SEQ ID NO: 1949
  REGION 1..142: note = Description of Unknown: uncultivated organism with predicted taxonomy: Verrucomicrobia
  REGION 1..142: note = MG1-193 RuvC-III domain

SEQ ID NO: 2013 - protein, 140 aa, unidentified; identical to SEQ ID NO: 1881
  REGION 1..140: note = Description of Unknown: uncultivated organism with predicted taxonomy: unclassified Verrucomicrobia (miscellaneous)
  REGION 1..140: note = MG1-194 RuvC-III domain

SEQ ID NO: 2014 - protein, 140 aa, unidentified; identical to SEQ ID NO: 1908
  REGION 1..140: note = Description of Unknown: uncultivated organism with predicted taxonomy: unclassified Verrucomicrobia (miscellaneous)
  REGION 1..140: note = MG1-195 RuvC-III domain

SEQ ID NO: 2015 - protein, 140 aa, unidentified; identical to SEQ ID NO: 1940
  REGION 1..140: note = Description of Unknown: uncultivated organism with predicted taxonomy: Verrucomicrobia
  REGION 1..140: note = MG1-196 RuvC-III domain

SEQ ID NO: 2016 - protein, 140 aa, unidentified; identical to SEQ ID NO: 1881
  REGION 1..140: note = Description of Unknown: uncultivated organism with predicted taxonomy: unclassified Verrucomicrobia (miscellaneous)
  REGION 1..140: note = MG1-197 RuvC-III domain

SEQ ID NO: 2017 - protein, 140 aa, unidentified; identical to SEQ ID NO: 1881
  REGION 1..140: note = Description of Unknown: uncultivated organism with predicted taxonomy: unclassified Verrucomicrobia (miscellaneous)
  REGION 1..140: note = MG1-198 RuvC-III domain

SEQ ID NO: 2018 - protein, 140 aa, unidentified; identical to SEQ ID NO: 1881
  REGION 1..140: note = Description of Unknown: uncultivated organism with predicted taxonomy: unclassified Verrucomicrobia (miscellaneous)
  REGION 1..140: note = MG1-199 RuvC-III domain

SEQ ID NO: 2019 - protein, 142 aa, unidentified; identical to SEQ ID NO: 1949
  REGION 1..142: note = Description of Unknown: uncultivated organism
  REGION 1..142: note = MG1-200 RuvC-III domain

SEQ ID NO: 2020 - protein, 142 aa, unidentified; identical to SEQ ID NO: 1944
  REGION 1..142: note = Description of Unknown: uncultivated organism with predicted taxonomy: Verrucomicrobia
  REGION 1..142: note = MG1-201 RuvC-III domain

SEQ ID NO: 2021 - protein, 142 aa, unidentified; identical to SEQ ID NO: 2006
  REGION 1..142: note = Description of Unknown: uncultivated organism with predicted taxonomy: Coraliomargarita sp. CAG:312
  REGION 1..142: note = MG1-202 RuvC-III domain

SEQ ID NO: 2022 - protein, 138 aa, unidentified; identical to SEQ ID NO: 1904
  REGION 1..138: note = Description of Unknown: uncultivated organism with predicted taxonomy: Coraliomargarita sp. CAG:312
  REGION 1..138: note = MG1-203 RuvC-III domain

SEQ ID NO: 2023 - protein, 142 aa, unidentified; identical to SEQ ID NO: 1930
  REGION 1..142: note = Description of Unknown: uncultivated organism with predicted taxonomy: Verrucomicrobia
  REGION 1..142: note = MG1-204 RuvC-III domain

SEQ ID NO: 2024 - protein, 142 aa, unidentified; identical to SEQ ID NO: 1944
  REGION 1..142: note = Description of Unknown: uncultivated organism with predicted taxonomy: Coraliomargarita sp. CAG:312
  REGION 1..142: note = MG1-205 RuvC-III domain

SEQ ID NO: 2025 - protein, 138 aa, unidentified; identical to SEQ ID NO: 1904
  REGION 1..138: note = Description of Unknown: uncultivated organism with predicted taxonomy: Coraliomargarita sp. CAG:312
  REGION 1..138: note = MG1-206 RuvC-III domain

SEQ ID NO: 2026 - protein, 140 aa, unidentified; identical to SEQ ID NO: 1940
  REGION 1..140: note = Description of Unknown: uncultivated organism with predicted taxonomy: unclassified Verrucomicrobia (miscellaneous)
  REGION 1..140: note = MG1-207 RuvC-III domain

SEQ ID NO: 2027 - protein, 140 aa, unidentified; identical to SEQ ID NO: 1881
  REGION 1..140: note = Description of Unknown: uncultivated organism with predicted taxonomy: unclassified Verrucomicrobia (miscellaneous)
  REGION 1..140: note = MG1-208 RuvC-III domain

SEQ ID NO: 2028 - protein, 140 aa, unidentified; identical to SEQ ID NO: 1881
  REGION 1..140: note = Description of Unknown: uncultivated organism with predicted taxonomy: unclassified Verrucomicrobia (miscellaneous)
  REGION 1..140: note = MG1-209 RuvC-III domain

SEQ ID NO: 2029 - protein, 140 aa, unidentified; identical to SEQ ID NO: 1881
  REGION 1..140: note = Description of Unknown: uncultivated organism with predicted taxonomy: unclassified Verrucomicrobia (miscellaneous)
  REGION 1..140: note = MG1-210 RuvC-III domain

SEQ ID NO: 2030 - protein, 138 aa, unidentified; identical to SEQ ID NO: 1904
  REGION 1..138: note = Description of Unknown: uncultivated organism with predicted taxonomy: Coraliomargarita sp. CAG:312
  REGION 1..138: note = MG1-211 RuvC-III domain

SEQ ID NO: 2031 - protein, 140 aa, unidentified; identical to SEQ ID NO: 1908
  REGION 1..140: note = Description of Unknown: uncultivated organism with predicted taxonomy: unclassified Verrucomicrobia (miscellaneous)
  REGION 1..140: note = MG1-212 RuvC-III domain

SEQ ID NO: 2032 - protein, 115 aa, unidentified
  REGION 1..115: note = Description of Unknown: uncultivated organism with predicted taxonomy: unclassified Verrucomicrobia (miscellaneous)
  REGION 1..115: note = MG1-213 RuvC-III domain
AETAHIAKLAQKIVCMHFGFQFGGLSGTKRVFTVPGALTSRIRKFYGLDRILHNSAAESENLSFEEFLKFSEDLEKKNRKNKKHHALDAMCLCFAPTGVDSRRAKLGEILPEKLR

SEQ ID NO: 2033 - protein, 140 aa, unidentified
  REGION 1..140: note = Description of Unknown: uncultivated organism with predicted taxonomy: unclassified Verrucomicrobia (miscellaneous)
  REGION 1..140: note = MG1-214 RuvC-III domain
AETAHIAKLAQKIVCMHFGFQFGGLSGTKRVFTVPGALTSRIRKFYGLDRILHNSAAESENLSFEEFLKFSEDLEKKNRKNKKHHALDAMCLCFAPTGVDSRCAKLGEILPEKLRSEKAAREFFKSYLDKIMPVDVAPKK

SEQ ID NO: 2034 - protein, 140 aa, unidentified; identical to SEQ ID NO: 1881
  REGION 1..140: note = Description of Unknown: uncultivated organism with predicted taxonomy: unclassified Verrucomicrobia (miscellaneous)
  REGION 1..140: note = MG1-215 RuvC-III domain

SEQ ID NO: 2035 - protein, 140 aa, unidentified
  REGION 1..140: note = Description of Unknown: uncultivated organism with predicted taxonomy: unclassified Verrucomicrobia (miscellaneous)
  REGION 1..140: note = MG1-216 RuvC-III domain
AETAHIAKLAQKIVCMHFGFQFGGLSGAKRVFTVPGALTSRIRKFYGLDRILHNSAAESENLSFEEFLKFSEDLEKKNRKNKKHHALDAMCLCFAPTGVDSRRAKLGEILPEKLRSEKAAREFFKSYLDKIMPVDVAPKK

SEQ ID NO: 2036 - protein, 138 aa, unidentified; identical to SEQ ID NO: 1904
  REGION 1..138: note = Description of Unknown: uncultivated organism with predicted taxonomy: Coraliomargarita sp. CAG:312
  REGION 1..138: note = MG1-217 RuvC-III domain

SEQ ID NO: 2037 - protein, 140 aa, unidentified; identical to SEQ ID NO: 1908
  REGION 1..140: note = Description of Unknown: uncultivated organism with predicted taxonomy: unclassified Verrucomicrobia (miscellaneous)
  REGION 1..140: note = MG1-218 RuvC-III domain

SEQ ID NO: 2038 - protein, 140 aa, unidentified; identical to SEQ ID NO: 1925
  REGION 1..140: note = Description of Unknown: uncultivated organism with predicted taxonomy: unclassified Verrucomicrobia (miscellaneous)
  REGION 1..140: note = MG1-219 RuvC-III domain

SEQ ID NO: 2039 - protein, 140 aa, unidentified; identical to SEQ ID NO: 1881
  REGION 1..140: note = Description of Unknown: uncultivated organism with predicted taxonomy: unclassified Verrucomicrobia (miscellaneous)
  REGION 1..140: note = MG1-220 RuvC-III domain

SEQ ID NO: 2040 - protein, 66 aa, unidentified
  REGION 1..66: note = Description of Unknown: uncultivated organism with predicted taxonomy: unclassified Verrucomicrobia (miscellaneous)
  REGION 1..66: note = MG1-221 RuvC-III domain
AETAHIAKLAQKIVCMHFGFQFGGLSGTKRVFAVPGALTSRIRKFYGLDRILHNSEAESENLSFEE

SEQ ID NO: 2041 - protein, 140 aa, unidentified; identical to SEQ ID NO: 1881
  REGION 1..140: note = Description of Unknown: uncultivated organism with predicted taxonomy: unclassified Verrucomicrobia (miscellaneous)
  REGION 1..140: note = MG1-222 RuvC-III domain

SEQ ID NO: 2042 - protein, 140 aa, unidentified
  REGION 1..140: note = Description of Unknown: uncultivated organism with predicted taxonomy: unclassified Verrucomicrobia (miscellaneous)
  REGION 1..140: note = MG1-223 RuvC-III domain
AETAHIAKLAQKIVCMHFGFQFGRLSGTKRVFTVPGALTSRIRKFYGLDRILHNSAAESENLSFEEFLKFSEDLEKKNRKNKKHHALDAMCLCFAPTGVDSRRAKLGEILPEKLRSEKAAREFFKSYLDKIMPVDVAPKK

SEQ ID NO: 2043 - protein, 140 aa, unidentified; identical to SEQ ID NO: 1964
  REGION 1..140: note = Description of Unknown: uncultivated organism with predicted taxonomy: unclassified Verrucomicrobia (miscellaneous)
  REGION 1..140: note = MG1-224 RuvC-III domain

SEQ ID NO: 2044 - protein, 138 aa, unidentified; identical to SEQ ID NO: 1904
  REGION 1..138: note = Description of Unknown: uncultivated organism with predicted taxonomy: Coraliomargarita sp. CAG:312
  REGION 1..138: note = MG1-225 RuvC-III domain

SEQ ID NO: 2045 - protein, 138 aa, unidentified; identical to SEQ ID NO: 1904
  REGION 1..138: note = Description of Unknown: uncultivated organism with predicted taxonomy: Coraliomargarita sp. CAG:312
  REGION 1..138: note = MG1-226 RuvC-III domain

SEQ ID NO: 2046 - protein, 138 aa, unidentified; identical to SEQ ID NO: 1904
  REGION 1..138: note = Description of Unknown: uncultivated organism with predicted taxonomy: Coraliomargarita sp. CAG:312
  REGION 1..138: note = MG1-227 RuvC-III domain

SEQ ID NO: 2047 - protein, 140 aa, unidentified
  REGION 1..140: note = Description of Unknown: uncultivated organism with predicted taxonomy: unclassified Verrucomicrobia (miscellaneous)
  REGION 1..140: note = MG1-228 RuvC-III domain
AETAHIAKLAQKIVCMHFGFQFGGLSGTKRVFTVPGALTSRIRKFYGLDRILHNSEAESENLSFEEFLKFSEDLEKKNRKNKKHHALDAMCLCFAPTGVDSRRAKLGEILPEKLRSEKAAREFFKSYLDKIMPVDVAPKK

SEQ ID NO: 2048 - protein, 140 aa, unidentified; identical to SEQ ID NO: 1881
  REGION 1..140: note = Description of Unknown: uncultivated organism with predicted taxonomy: Verrucomicrobia
  REGION 1..140: note = MG1-229 RuvC-III domain

SEQ ID NO: 2049 - protein, 140 aa, unidentified; identical to SEQ ID NO: 1881
  REGION 1..140: note = Description of Unknown: uncultivated organism with predicted taxonomy: Verrucomicrobia
  REGION 1..140: note = MG1-230 RuvC-III domain

SEQ ID NO: 2050 - protein, 140 aa, unidentified; identical to SEQ ID NO: 1881
  REGION 1..140: note = Description of Unknown: uncultivated organism with predicted taxonomy: unclassified Verrucomicrobia (miscellaneous)
  REGION 1..140: note = MG1-231 RuvC-III domain

SEQ ID NO: 2051 - protein, 142 aa, unidentified; identical to SEQ ID NO: 1949
  REGION 1..142: note = Description of Unknown: uncultivated organism with predicted taxonomy: Verrucomicrobia
  REGION 1..142: note = MG1-232 RuvC-III domain

SEQ ID NO: 2052 - protein, 140 aa, unidentified; identical to SEQ ID NO: 1933
  REGION 1..140: note = Description of Unknown: uncultivated organism
  REGION 1..140: note = MG1-233 RuvC-III domain

SEQ ID NO: 2053 - protein, 140 aa, unidentified; identical to SEQ ID NO: 1955
  REGION 1..140: note = Description of Unknown: uncultivated organism with predicted taxonomy: unclassified Verrucomicrobia (miscellaneous)
  REGION 1..140: note = MG1-234 RuvC-III domain

SEQ ID NO: 2054 - protein, 140 aa, unidentified; identical to SEQ ID NO: 1881
  REGION 1..140: note = Description of Unknown: uncultivated organism with predicted taxonomy: unclassified Verrucomicrobia (miscellaneous)
  REGION 1..140: note = MG1-236 RuvC-III domain

SEQ ID NO: 2055 - protein, 140 aa, unidentified; identical to SEQ ID NO: 1908
  REGION 1..140: note = Description of Unknown: uncultivated organism with predicted taxonomy: Verrucomicrobia
  REGION 1..140: note = MG1-237 RuvC-III domain

SEQ ID NO: 2056 - protein, 138 aa, unidentified; identical to SEQ ID NO: 1904
  REGION 1..138: note = Description of Unknown: uncultivated organism with predicted taxonomy: Coraliomargarita sp. CAG:312
  REGION 1..138: note = MG1-238 RuvC-III domain

SEQ ID NO: 2057 - protein, 140 aa, unidentified; identical to SEQ ID NO: 1830
  REGION 1..140: note = Description of Unknown: uncultivated organism with predicted taxonomy: unclassified Verrucomicrobia (miscellaneous)
  REGION 1..140: note = MG1-239 RuvC-III domain

SEQ ID NO: 2058 - protein, 140 aa, unidentified; identical to SEQ ID NO: 1881
  REGION 1..140: note = Description of Unknown: uncultivated organism with predicted taxonomy: unclassified Verrucomicrobia (miscellaneous)
  REGION 1..140: note = MG1-240 RuvC-III domain

SEQ ID NO: 2059 - protein, 138 aa, unidentified; identical to SEQ ID NO: 1904
  REGION 1..138: note = Description of Unknown: uncultivated organism with predicted taxonomy: Verrucomicrobia
  REGION 1..138: note = MG1-241 RuvC-III domain

SEQ ID NO: 2060 - protein, 138 aa, unidentified; identical to SEQ ID NO: 1904
  REGION 1..138: note = Description of Unknown: uncultivated organism with predicted taxonomy: Coraliomargarita sp. CAG:312
  REGION 1..138: note = MG1-242 RuvC-III domain

SEQ ID NO: 2061 - protein, 142 aa, unidentified; identical to SEQ ID NO: 1974
  REGION 1..142: note = Description of Unknown: uncultivated organism with predicted taxonomy: Verrucomicrobia
  REGION 1..142: note = MG1-243 RuvC-III domain

SEQ ID NO: 2062 - protein, 140 aa, unidentified; identical to SEQ ID NO: 1881
  REGION 1..140: note = Description of Unknown: uncultivated organism with predicted taxonomy: unclassified Verrucomicrobia (miscellaneous)
  REGION 1..140: note = MG1-244 RuvC-III domain

SEQ ID NO: 2063 - protein, 138 aa, unidentified; identical to SEQ ID NO: 1904
  REGION 1..138: note = Description of Unknown: uncultivated organism with predicted taxonomy: Coraliomargarita sp. CAG:312
  REGION 1..138: note = MG1-245 RuvC-III domain

SEQ ID NO: 2064 - protein, 140 aa, unidentified; identical to SEQ ID NO: 1940
  REGION 1..140: note = Description of Unknown: uncultivated organism with predicted taxonomy: unclassified Verrucomicrobia (miscellaneous)
  REGION 1..140: note = MG1-246 RuvC-III domain

SEQ ID NO: 2065 - protein, 138 aa, unidentified; identical to SEQ ID NO: 1904
  REGION 1..138: note = Description of Unknown: uncultivated organism with predicted taxonomy: Coraliomargarita sp. CAG:312
  REGION 1..138: note = MG1-247 RuvC-III domain

SEQ ID NO: 2066 - protein, 140 aa, unidentified; identical to SEQ ID NO: 1970
  REGION 1..140: note = Description of Unknown: uncultivated organism with predicted taxonomy: unclassified Verrucomicrobia (miscellaneous)
  REGION 1..140: note = MG1-248 RuvC-III domain

SEQ ID NO: 2067 - protein, 140 aa, unidentified; identical to SEQ ID NO: 1972
  REGION 1..140: note = Description of Unknown: uncultivated organism with predicted taxonomy: unclassified Verrucomicrobia (miscellaneous)
  REGION 1..140: note = MG1-249 RuvC-III domain

SEQ ID NO: 2068 - protein, 138 aa, unidentified; identical to SEQ ID NO: 1904
  REGION 1..138: note = Description of Unknown: uncultivated organism with predicted taxonomy: Coraliomargarita sp. CAG:312
  REGION 1..138: note = MG1-250 RuvC-III domain

SEQ ID NO: 2069 - protein, 138 aa, unidentified; identical to SEQ ID NO: 1904
  REGION 1..138: note = Description of Unknown: uncultivated organism with predicted taxonomy: Coraliomargarita sp. CAG:312
  REGION 1..138: note = MG1-251 RuvC-III domain

SEQ ID NO: 2070 - protein, 140 aa, unidentified; identical to SEQ ID NO: 1830
  REGION 1..140: note = Description of Unknown: uncultivated organism with predicted taxonomy: unclassified Verrucomicrobia (miscellaneous)
  REGION 1..140: note = MG1-252 RuvC-III domain

SEQ ID NO: 2071 - protein, 140 aa, unidentified; identical to SEQ ID NO: 1881
  REGION 1..140: note = Description of Unknown: uncultivated organism with predicted taxonomy: unclassified Verrucomicrobia (miscellaneous)
  REGION 1..140: note = MG1-253 RuvC-III domain

SEQ ID NO: 2072 - protein, 140 aa, unidentified; identical to SEQ ID NO: 1881
  REGION 1..140: note = Description of Unknown: uncultivated organism with predicted taxonomy: unclassified Verrucomicrobia (miscellaneous)
  REGION 1..140: note = MG1-254 RuvC-III domain

SEQ ID NO: 2073 - protein, 140 aa, unidentified; identical to SEQ ID NO: 1881
  REGION 1..140: note = Description of Unknown: uncultivated organism with predicted taxonomy: unclassified Verrucomicrobia (miscellaneous)
  REGION 1..140: note = MG1-255 RuvC-III domain

SEQ ID NO: 2074 - protein, 140 aa, unidentified; identical to SEQ ID NO: 1908
  REGION 1..140: note = Description of Unknown: uncultivated organism with predicted taxonomy: unclassified Verrucomicrobia (miscellaneous)
  REGION 1..140: note = MG1-256 RuvC-III domain

SEQ ID NO: 2075 - protein, 140 aa, unidentified; identical to SEQ ID NO: 1881
  REGION 1..140: note = Description of Unknown: uncultivated organism with predicted taxonomy: unclassified Verrucomicrobia (miscellaneous)
  REGION 1..140: note = MG1-257 RuvC-III domain

SEQ ID NO: 2076 - protein, 142 aa, unidentified; identical to SEQ ID NO: 1911
  REGION 1..142: note = Description of Unknown: uncultivated organism with predicted taxonomy: Verrucomicrobia
  REGION 1..142: note = MG1-258 RuvC-III domain

SEQ ID NO: 2077 - protein, 140 aa, unidentified; identical to SEQ ID NO: 1881
  REGION 1..140: note = Description of Unknown: uncultivated organism with predicted taxonomy: unclassified Verrucomicrobia (miscellaneous)
  REGION 1..140: note = MG1-259 RuvC-III domain

SEQ ID NO: 2078 - protein, 140 aa, unidentified; identical to SEQ ID NO: 1881
  REGION 1..140: note = Description of Unknown: uncultivated organism with predicted taxonomy: unclassified Verrucomicrobia (miscellaneous)
  REGION 1..140: note = MG1-260 RuvC-III domain

SEQ ID NO: 2079 - protein, 140 aa, unidentified; identical to SEQ ID NO: 1881
  REGION 1..140: note = Description of Unknown: uncultivated organism with predicted taxonomy: unclassified Verrucomicrobia (miscellaneous)
  REGION 1..140: note = MG1-261 RuvC-III domain

SEQ ID NO: 2080 - protein, 140 aa, unidentified; identical to SEQ ID NO: 1830
  REGION 1..140: note = Description of Unknown: uncultivated organism with predicted taxonomy: unclassified Verrucomicrobia (miscellaneous)
  REGION 1..140: note = MG1-262 RuvC-III domain

SEQ ID NO: 2081 - protein, 138 aa, unidentified; identical to SEQ ID NO: 1976
  REGION 1..138: note = Description of Unknown: uncultivated organism with predicted taxonomy: Verrucomicrobia
  REGION 1..138: note = MG1-263 RuvC-III domain

SEQ ID NO: 2082 - protein, 140 aa, unidentified; identical to SEQ ID NO: 1830
  REGION 1..140: note = Description of Unknown: uncultivated organism with predicted taxonomy: unclassified Verrucomicrobia (miscellaneous)
  REGION 1..140: note = MG1-264 RuvC-III domain

SEQ ID NO: 2083 - protein, 140 aa, unidentified; identical to SEQ ID NO: 1982
  REGION 1..140: note = Description of Unknown: uncultivated organism with predicted taxonomy: unclassified Verrucomicrobia (miscellaneous)
  REGION 1..140: note = MG1-265 RuvC-III domain

SEQ ID NO: 2084 - protein, 138 aa, unidentified; identical to SEQ ID NO: 1904
  REGION 1..138: note = Description of Unknown: uncultivated organism with predicted taxonomy: Coraliomargarita sp. CAG:312
  REGION 1..138: note = MG1-266 RuvC-III domain

SEQ ID NO: 2085 - protein, 142 aa, unidentified; identical to SEQ ID NO: 1928
  REGION 1..142: note = Description of Unknown: uncultivated organism with predicted taxonomy: Verrucomicrobia
  REGION 1..142: note = MG1-267 RuvC-III domain

SEQ ID NO: 2086 - protein, 140 aa, unidentified; identical to SEQ ID NO: 1923
  REGION 1..140: note = Description of Unknown: uncultivated organism with predicted taxonomy: Verrucomicrobia
  REGION 1..140: note = MG1-268 RuvC-III domain

SEQ ID NO: 2087 - protein, 140 aa, unidentified; identical to SEQ ID NO: 1881
  REGION 1..140: note = Description of Unknown: uncultivated organism with predicted taxonomy: unclassified Verrucomicrobia (miscellaneous)
  REGION 1..140: note = MG1-269 RuvC-III domain

SEQ ID NO: 2088 - protein, 138 aa, unidentified; identical to SEQ ID NO: 1921
  REGION 1..138: note = Description of Unknown: uncultivated organism with predicted taxonomy: Verrucomicrobia
  REGION 1..138: note = MG1-270 RuvC-III domain

SEQ ID NO: 2089 - protein, 140 aa, unidentified; identical to SEQ ID NO: 1908
  REGION 1..140: note = Description of Unknown: uncultivated organism with predicted taxonomy: unclassified Verrucomicrobia (miscellaneous)
  REGION 1..140: note = MG1-271 RuvC-III domain

SEQ ID NO: 2090 - protein, 203 aa, unidentified
  REGION 1..203: note = Description of Unknown: uncultivated organism
  REGION 1..203: note = MG1-272 RuvC-III domain
QRTAYIARCLRYVCLLKFGWLSPEDRDPGHEKANDATRSYLVTNGGTTRRLRQAWNLDELLRETVSPEKWAGMTDVEKERALAQGARIPTEEWKKLDKAKQDDVLRARRTKNRQDVRHHALDAMVVACTLPWAANLTVWASGWCNLDTDDGSVSSVRCPIFGENDFGEGIYAAIEAKLSELKTALPEATSNAITHYRSHERHK

SEQ ID NO: 2091 - protein, 198 aa, unidentified
  REGION 1..198: note = Description of Unknown: uncultivated organism with predicted taxonomy: Rhizobiales
  REGION 1..198: note = MG1-273 RuvC-III domain
QQTAYIARCLREACLIIFGKEWLDWTDGAGRDPRLLTDNRASKNYLTTNGVITSRLRGAWHLNEVLWPKPERLNDTEWDKLTDDEKIPLKAKYKEERELRALKNRQDHRHHAIDAMVISCAMPWQTCKTRTGSQQSDDGLCEVDSETGAITKIWNPVFNDYGYGIKQAAEAKSALLLKFSSERQVDLLRHHKSNNRNA

SEQ ID NO: 2092 - protein, 198 aa, unidentified
  REGION 1..198: note = Description of Unknown: uncultivated organism
  REGION 1..198: note = MG1-274 RuvC-III domain
QQTAYIARCLREACLIHFGKEWLDWTDGAGRDPRLLPDNRASKSYLTTSGATTARLRGAWHLNEILWPKPQRLNDAEWDKLTDEEKTILKAKYKEERAVRALKNRQDHRHHALDAMVISCAVPWQTFKVRLGNQQPEDGLCELDAETGEITKIWNPVFNDYGYGIMRAVESRMDLLLKFSTDRQTDLLRHHKSSQRNA

SEQ ID NO: 2093 - protein, 125 aa, unidentified; identical to SEQ ID NO: 1839
  REGION 1..125: note = Description of Unknown: uncultivated organism
  REGION 1..125: note = MG1-275 RuvC-III domain

SEQ ID NO: 2094 - protein, 123 aa, unidentified
  REGION 1..123: note = Description of Unknown: uncultivated organism with predicted taxonomy: Verrucomicrobia bacterium IMCC26134
  REGION 1..123: note = MG1-276 RuvC-III domain
AETAWISKLAQTIVGLRFGWPGGIVDGKRKVIVVSGGLTGRIRRKYKLNRLLNPNASSEEEAETKNRDDDRHHALDAMVISFIPNWTRNAKLAGFFRFPEGVHGEFFANEIADVVPKNVALEK

SEQ ID NO: 2095 - protein, 174 aa, unidentified
  REGION 1..174: note = Description of Unknown: uncultivated organism
  REGION 1..174: note = MG1-277 RuvC-III domain
QHTAYIARVIRQTSLIQLGWLGEDGRDPTGLKDPQKTAWKFQVTNGHLTSRLRKAWGLNQILHPFPSKDEWGAMTPDEQENKKSELQEKNRGDLRHHALDAIVIACTMPWLAHRTVRVKDPETGEDGWWDLDERTQRSVARNPICPNEGQMYGLAKEEIEKVVVRHHVAKGNKR

SEQ ID NO: 2096 - protein, 166 aa, unidentified
  REGION 1..166: note = Description of Unknown: uncultivated organism
  REGION 1..166: note = MG1-279 RuvC-III domain
QHTAYIARVIRHISLIQLGWLNDAGRDPTPEKQNPALSFQVTNGQLTSRLRKSWGLNQILHPLPPGKRWDELTDEEQTQFTEKNRGDLRHHSLDAMVIACTLPWLAHRTHGATDQFGHHGWWTQDEKQRSKAANPLFPNEGQMHDVVKKEIEKVIVRHHVSRSNHK

SEQ ID NO: 2097 - protein, 203 aa, unidentified; identical to SEQ ID NO: 2090
  REGION 1..203: note = Description of Unknown: uncultivated organism
  REGION 1..203: note = MG1-280 RuvC-III domain

SEQ ID NO: 2098 - protein, 174 aa, unidentified; identical to SEQ ID NO: 2095
  REGION 1..174: note = Description of Unknown: uncultivated organism with predicted taxonomy: Thermoflexibacter ruber
  REGION 1..174: note = MG1-281 RuvC-III domain

SEQ ID NO: 2099 - protein, 174 aa, unidentified; identical to SEQ ID NO: 2095
  REGION 1..174: note = Description of Unknown: uncultivated organism
  REGION 1..174: note = MG1-282 RuvC-III domain

SEQ ID NO: 2100 - protein, 137 aa, unidentified
  REGION 1..137: note = Description of Unknown: uncultivated organism with predicted taxonomy: Verrucomicrobia bacterium IMCC26134
  REGION 1..137: note = MG1-283 RuvC-III domain
AETAWVSKLAQTIANLRFNWTNGYDQNRKKRVIVISGGVTARVRRKYGLDKLLYNKDTDAEVFAKKLKNRADKRHHALDAMVLTFVPQWARDPGKEGFFRFPAEFRDANGREDYEQIRKLFGDSIAKVMPRYLTYER

SEQ ID NO: 2101 - protein, 172 aa, unidentified
  REGION 1..172: note = Description of Unknown: uncultivated organism
  REGION 1..172: note = MG1-284 RuvC-III domain
QHTAYIARVIRQVSLIQLGWLAEDGRDATGLKDPEMTAWRFQVTNGSLTSRLRKSWGLNQILNPFPSKDAWEAMTPEEQEKKKTEMQEKNRGDLRHHSLDAMVIACTLPWLAHRTHGAKDSFGRPGWWWLDEKKRSQASTPIFPKEGQMHEVVKKEIEKVLVRHHVSRSNHQ

SEQ ID NO: 2102 - protein, 127 aa, unidentified
  REGION 1..127: note = Description of Unknown: uncultivated organism with predicted taxonomy: Verrucomicrobia
  REGION 1..127: note = MG1-285 RuvC-III domain
AETAWIAKLAQAIVGLHFGWRNGVDESGNKRVTVISGGLTGRIRRKYALNQILNPNAKTEEEAEKKNRDDDRHHALDAMVISFIPSWVRDAMKEKFFRFPEPIHQNAKGFFEKEIQSVKPRNIALQK

SEQ ID NO: 2103 - protein, 137 aa, unidentified; identical to SEQ ID NO: 1831
  REGION 1..137: note = Description of Unknown: uncultivated organism with predicted taxonomy: Verrucomicrobia
  REGION 1..137: note = MG1-287 RuvC-III domain

SEQ ID NO: 2104 - protein, 137 aa, unidentified; identical to SEQ ID NO: 1831
  REGION 1..137: note = Description of Unknown: uncultivated organism
  REGION 1..137: note = MG1-288 RuvC-III domain

SEQ ID NO: 2105 - protein, 146 aa, unidentified
  REGION 1..146: note = Description of Unknown: uncultivated organism with predicted taxonomy: Deltaproteobacteria bacterium RIFOXYA12_FULL_61_11
  REGION 1..146: note = MG1-290 RuvC-III domain
TQTAYIARALRGLCLLRQNWLTPEGRDPSDQPGGPGQFFQLTNGYLTAGIRRCWGLDELLPSALDDEGGKNRHDLRHHALDAAVIACTLPWAAHQPLSRGGWREAPPFGSARREQWRTPFDHLRSQIRARVPDIVPTQKVGTSAKQ

SEQ ID NO: 2106 - protein, 126 aa, unidentified
  REGION 1..126: note = Description of Unknown: uncultivated organism with predicted taxonomy: Candidatus Termititenax aidoneus
  REGION 1..126: note = MG1-291 RuvC-III domain
AETAYITKLTQKIAHLFFGWDWQTKGSHRKIIVQSGGYTSKIRKIFKLNALLYPEKTGDEIREIVETGKNRDNKRHHALDALVLSITPEIKYDEKKDADVYPVWFNPEYCKNALDKVNPTYIDFEK

SEQ ID NO: 2107 - protein, 133 aa, unidentified
  REGION 1..133: note = Description of Unknown: uncultivated organism with predicted taxonomy: Candidatus Termititenax aidoneus
  REGION 1..133: note = MG1-292 RuvC-III domain
SQTAYISKLAQKVTALTFGWGMQTKDDNRNIVIATGGQTARIRSRFKLDRLLHSGMTDEEFEKALRNGEIEKKNRSNPRHHALDALVLSAVPEIRVDKNRKGKYDDIYPSWLTRDFCEKEVAHVYPKQIKFSK

SEQ ID NO: 2108 - protein, 133 aa, unidentified; identical to SEQ ID NO: 2107
  REGION 1..133: note = Description of Unknown: uncultivated organism with predicted taxonomy: Elusimicrobia bacterium HGW-Elusimicrobia-1
  REGION 1..133: note = MG1-293 RuvC-III domain

SEQ ID NO: 2109 - protein, 129 aa, unidentified
  REGION 1..129: note = Description of Unknown: uncultivated organism with predicted taxonomy: Endomicrobium proavitum
  REGION 1..129: note = MG1-294 RuvC-III domain
QATSQIEKEAQTIASLLFGWGINTKGDKKKILFFTGGNTADVRKNLNLNRLLHPALSDEEYNELKKKKDFKDKNRKNTKHHALDALVLSVLPEITMDKKSIENKPEFFNIKFCEEQLKKVYPIIIKQTK

SEQ ID NO: 2110 - protein, 124 aa, unidentified
  REGION 1..124: note = Description of Unknown: uncultivated organism with predicted taxonomy: Verrucomicrobia bacterium 12-59-8
  REGION 1..124: note = MG1-295 RuvC-III domain
AETAYIARVARDVAALRCGWQPGEAGEKRHIHIINGANTAKVRGLYHLNSLLASDQGGLEPDKFMKKVRENKKHHALDAMVLSFIREWIRNPKTRQYEFPAGIDREYFRKCLENVVPYNCILPK

SEQ ID NO: 2111 - protein, 129 aa, unidentified
  REGION 1..129: note = Description of Unknown: uncultivated organism
  REGION 1..129: note = MG1-296 RuvC-III domain
QATMYIEKYAQKITALFFGWGEQTKGDERHIFVCNGGLTAKLRKENGLDRLLWSEEEFYKLMASGKLDEKNRENKKHHALDALVISFADDLRTDPKTGRKLFPEFAQNNPAFFSEAMDKVFPKQLRKKA

SEQ ID NO: 2112 - protein, 124 aa, unidentified; identical to SEQ ID NO: 2110
  REGION 1..124: note = Description of Unknown: uncultivated organism with predicted taxonomy: Verrucomicrobia bacterium 12-59-8
  REGION 1..124: note = MG1-297 RuvC-III domain

SEQ ID NO: 2113 - protein, 130 aa, unidentified
  REGION 1..130: note = Description of Unknown: uncultivated organism
  REGION 1..130: note = MG1-298 RuvC-III domain
QATRYIEKLAQKLISLYFGWGEQTTGDKRKMFVCTGGLTAKIRSQYGLNRLLHKDLSGEEFKKIVAEGKLDEKNRNNKRHHALDALVISFTRDIKYDNKGKPVLPDYACNPAFFADAIEKVFPVTIRSKK

SEQ ID NO: 2114 - protein, 127 aa, unidentified
  REGION 1..127: note = Description of Unknown: uncultivated organism
  REGION 1..127: note = MG1-299 RuvC-III domain
AETAWISRLAQKIADLSFGWKNGIDAAGRKRTVVVSGGLTARIRRKYGLNRILNPGASSEEEAEKKNRSDKRHHALDAMTISFIPQWARDPGKTGFFRFPKAIRDNPLPFFQARIDAVVPRQLCYEK

SEQ ID NO: 2115 - protein, 127 aa, unidentified
  REGION 1..127: note = Description of Unknown: uncultivated organism
  REGION 1..127: note = MG1-300 RuvC-III domain
AETAWISRLSQKIIDLTFGWSNGVDASGRKRSIIVSGGLTARIRRKYHLNHILNPDAETDEEAEKKNRKDKRHHALDAMTISFIPQWARDPDKTGFFRLPKEIRDNPLPFFAKRIDTVIPRQLCFEK

SEQ ID NO: 2116 - protein, 127 aa, unidentified
  REGION 1..127: note = Description of Unknown: uncultivated organism
  REGION 1..127: note = MG1-301 RuvC-III domain
AETAWISRLAQKIADLTFGWQNGVDAAGRKRTIIVSGGLTARIRRKYGLNRLLNPDASSEEEAEKKNRSDKRHHALDAMTISFIPQWARDPDKTGFFRFPKEIRDNSLPFFKARIDAVVPRQLCYEK

SEQ ID NO: 2117 - protein, 127 aa, unidentified
  REGION 1..127: note = Description of Unknown: uncultivated organism
  REGION 1..127: note = MG1-302 RuvC-III domain
AETAWISRLAQKIADLAFGWHNGVDAAGRKRTVVVSGGLTARIRRKYGLNRILNPNVATEEEAEKKNRADKRHHALDAMTISFIPQWARDPDKTGFFRLPREIRDNPWPFFQARIDAVVPRQLCYEK

SEQ ID NO: 2118 - protein, 127 aa, unidentified; identical to SEQ ID NO: 2117
  REGION 1..127: note = Description of Unknown: uncultivated organism
  REGION 1..127: note = MG1-303 RuvC-III domain

SEQ ID NO: 2119 - protein, 173 aa, unidentified
  REGION 1..173: note = Description of Unknown: uncultivated organism with predicted taxonomy: Verrucomicrobia
  REGION 1..173: note = MG1-304 RuvC-III domain
AATSWIARITQSIVRLHFGWQLDDEPGKEKVMTISGGLTARIRRKYLLDSLLGTDKESQKVCEQVDQVLAEMEKLKSQPRSEETKVQWRELSQKRSQLARDSEKNRGDQRHHALDAMLLTFLPNWARDRNKEDFLRLEDIGDNAPYTDEGKRNAEKITDEIKKLVEETKPIYK

SEQ ID NO: 2120 - protein, 127 aa, unidentified
  REGION 1..127: note = Description of Unknown: uncultivated organism with predicted taxonomy: Verrucomicrobia bacterium IMCC26134
  REGION 1..127: note = MG1-305 RuvC-III domain
AETAWISRLAQKIADLSFGWQNGVDAAGRKRTIVVSGGLTARIRRKYGLNRLLNPNATSEEEAEKKNRADKRHHALDAMTISFIPQWARDPDKTGFFRFPKEIRDNPHPFFQARIEAVVPRQLCYEK

SEQ ID NO: 2121 - protein, 123 aa, unidentified
  REGION 1..123: note = Description of Unknown: uncultivated organism with predicted taxonomy: Verrucomicrobia
  REGION 1..123: note = MG1-306 RuvC-III domain
AETAWISKLAQTIIGLRFGWPNGIANGERKVIVISGGLTGRIRRKYKLNSLLNPDAKSEEEAEIKNRGDDRHHALDAMVISFLPTWARNSRFTGFFRFPDEVTRELFKREIAEVIPQNVCFER

SEQ ID NO: 2122 - protein, 198 aa, unidentified
  REGION 1..198: note = Description of Unknown: uncultivated organism with predicted taxonomy: Verrucomicrobia bacterium IMCC26134
  REGION 1..198: note = MG1-307 RuvC-III domain
QQTAYIARCLREACLIHFGKEWLDWTDGAGRDPLLLPDNRASKSYLTTSGATTARLRGAWHLNEILWPKPQRLNDAEWDKLTDEEKTILKAKYKEERAVRALKNRQDHRHHALDAMVISCAVPWQTFKVRLGNQQPEDGLCELDAETGEITKIWNPVFNDYGYGIMRAVESRMDLLLKFSTDRQTDLLRHHKSSQRNA

SEQ ID NO: 2123 - protein, 127 aa, unidentified
  REGION 1..127: note = Description of Unknown: uncultivated organism
  REGION 1..127: note = MG1-308 RuvC-III domain
QLARQLRRMICFWMGIQEDSKETRERIGNPSGLHTAAARRGWKITKDRSDLTHHRMDAAVLSFIPPGAGLNSVMYGGIFEEVHSTKEINGNKFKVVQMRGAPELKPDLSALKKDSLTECPVINIRSK

SEQ ID NO: 2124 - protein, 152 aa, unidentified
  REGION 1..152: note = Description of Unknown: uncultivated organism
  REGION 1..152: note = MG1-309 RuvC-III domain
QLARELRRRVVEWLGIERRHAGIADPTQRALAREAEERRRVAAPAGALTAACREAWKDRLPEAYFTPIEIRGQTVLTKNRGNLRHHMWDAGVLAHIPPGDGLNHVRYGGIFETADIGGAPRPVPLPELAPDLAEIEKADPLACRVFHLRPRH

SEQ ID NO: 2125 - protein, 137 aa, unidentified
  REGION 1..137: note = Description of Unknown: uncultivated organism
  REGION 1..137: note = MG1-310 RuvC-III domain
QLARQLRAEIMRWMQVDDKPDEAARRIGTPSGWLAAQARKSWLPAEEYEKVRNNVTHHLIDAAILAHIPPREGMNSVPCKGIFYVESVPVRDPVTGDTTYRLETKALPELSPLPRLKHWLPDNGEYDVCPVWKPRRQ

SEQ ID NO: 2126 - protein, 137 aa, unidentified
  REGION 1..137: note = Description of Unknown: uncultivated organism
  REGION 1..137: note = MG1-311 RuvC-III domain
QLARQLRAEVMRWMQVEDQPDEAARRIGTPSGWLAAQARKSWLAAIDYQKVRNNLTHHLIDAAVLAHIPPREGMNSVICKGIFYVEREPVRDEATGITSHRFVTKALPELSALPRIKQWLPDNGEYAVCPVLKPRRQ

SEQ ID NO: 2127 - protein, 137 aa, unidentified; identical to SEQ ID NO: 2126
  REGION 1..137: note = Description of Unknown: uncultivated organism
  REGION 1..137: note = MG1-312 RuvC-III domain

SEQ ID NO: 2128 - protein, 127 aa, unidentified; identical to SEQ ID NO: 2123
  REGION 1..127: note = Description of Unknown: uncultivated organism
  REGION 1..127: note = MG1-314 RuvC-III domain

SEQ ID NO: 2129 - protein, 137 aa, unidentified
  REGION 1..137: note = Description of Unknown: uncultivated organism with predicted taxonomy: Verrucomicrobia bacterium
  REGION 1..137: note = MG1-315 RuvC-III domain
QLARQLRAEVMRWMHVEDQPDEAARRIGTPSGWLVAQARKSWLAASDYQKVRNNLTHHLIDAAVLAHIPPREGMNSIICKGIFYDVRERVRDEATGITSHRFLTKALPELSPLPRLKQWLPDNGEYAVCPVLKPRHQ

SEQ ID NO: 2130 - protein, 198 aa, unidentified; identical to SEQ ID NO: 2092
  REGION 1..198: note = Description of Unknown: uncultivated organism with predicted taxonomy: Thiorhodospira sibirica
  REGION 1..198: note = MG1-316 RuvC-III domain

SEQ ID NO: 2131 - protein, 137 aa, unidentified
  REGION 1..137: note = Description of Unknown: uncultivated organism
  REGION 1..137: note = MG1-317 RuvC-III domain
QLARQLRAEVMRWMKVEGDPDEAARRIGTPSGWLAAQARKSWLAQGDYEKVRNNLTHHLIDAAVLAHIPPREGMNSVLYKGIFYVVREPVRNEITGTTSQRLLTKALPQLSPLPRLNHWLPDNGEYAVCPVLKPRRQ

SEQ ID NO: 2132 - protein, 137 aa, unidentified; identical to SEQ ID NO: 2126
  REGION 1..137: note = Description of Unknown: uncultivated organism
  REGION 1..137: note = MG1-318 RuvC-III domain

SEQ ID NO: 2133 - protein, 130 aa, unidentified
  REGION 1..130: note = Description of Unknown: uncultivated organism with predicted taxonomy: Verrucomicrobia bacterium IMCC26134
  REGION 1..130: note = AKC83434.1 RuvC-III domain
AETAYIARLAQTVAALHFGWPINSQPGERRITIVNGGLTARVRRNYRLNSLLNPCPTGKDQKEWEEDADVEKNRKDDRHHALDAMVISFIPAWTRDPKKEKFFRLPDGVTPETFQERLEEVLPRQLHYER

SEQ ID NO: 2134 - protein, 130 aa, unidentified; identical to SEQ ID NO: 2133
  REGION 1..130: note = Description of Unknown: uncultivated organism with predicted taxonomy: Verrucomicrobia bacterium IMCC26134
  REGION 1..130: note = AKC83434.1 RuvC-III domain

SEQ ID NO: 2135 - protein, 123 aa, unidentified
  REGION 1..123: note = Description of Unknown: uncultivated organism with predicted taxonomy: Verrucomicrobia bacterium 61-8
  REGION 1..123: note = OJV06180.1 RuvC-III domain
AETAWIAKLSQAILDAFFGWKNGVDDEGRKRVISVNGGLTARIRRKYQLNSILNPSLNEEEAEKKNRSDKRHHALDAMVINFIPSWTRDTAKEHFFRFPSGIHRETFVQQIANVTPRNLCLEK

SEQ ID NO: 2136 - protein, 123 aa, unidentified; identical to SEQ ID NO: 2135
  REGION 1..123: note = Description of Unknown: uncultivated organism with predicted taxonomy: Verrucomicrobia bacterium 61-8
  REGION 1..123: note = OJV06180.1 RuvC-III domain

SEQ ID NO: 2137 - protein, 137 aa, unidentified
  REGION 1..137: note = Description of Unknown: uncultivated organism with predicted taxonomy: Pedosphaera sp. Tous-C6FEB
  REGION 1..137: note = PAW75411.1 RuvC-III domain
AETAWVSKLAQAIVNLTFGWTNANDEEGRKRVIVVSGGLTARVRRKYSLDKLLYTNTTDPEVLTKQVKNRSDKRHHALDAMVLTYIPQWARDPGKEGFFRFPAEFRDATGREDYSAIQRLFKDKLAKTTPRFLAYER

SEQ ID NO: 2138 - protein, 137 aa, unidentified; identical to SEQ ID NO: 2137
  REGION 1..137: note = Description of Unknown: uncultivated organism with predicted taxonomy: Pedosphaera sp. Tous-C6FEB
  REGION 1..137: note = PAW75411.1 RuvC-III domain

SEQ ID NO: 2139 - protein, 130 aa, unidentified; identical to SEQ ID NO: 2133
  REGION 1..130: note = Description of Unknown: uncultivated organism with predicted taxonomy: Verrucomicrobia bacterium IMCC26134
  REGION 1..130: note = WP_082083265.1 RuvC-III domain

SEQ ID NO: 2140 - protein, 130 aa, unidentified; identical to SEQ ID NO: 2133
  REGION 1..130: note = Description of Unknown: uncultivated organism with predicted taxonomy: Verrucomicrobia bacterium IMCC26134
  REGION 1..130: note = WP_082083265.1 RuvC-III domain

SEQ ID NO: 2141 - protein, 156 aa, unidentified; identical to SEQ ID NO: 1899
  REGION 1..156: note = Description of Unknown: uncultivated organism
  REGION 1..156: note = MG2-1 RuvC-III domain

SEQ ID NO: 2142 - protein, 174 aa, unidentified
  REGION 1..174: note = Description of Unknown: uncultivated organism
  REGION 1..174: note = MG2-7 RuvC-III domain
TQTSHLNKMAIRLVKQRIGIDAKHLPGNVTAFIRQKLHIDECLFNAVPRLQTAAKGQPKSSKRKKKAEEAPVEPIQDDMPPRKLTKADIRELTYLHHAMDAVTQGLALLLFAPEDWPLLVKRNLPDSEQRHLKARYPFLDFSADKHISIQDLPEDTLHTISERLAECRVVRHIP

SEQ ID NO: 2143 - protein, 206 aa, unidentified
  REGION 1..206: note = Description of Unknown: uncultivated organism
  REGION 1..206: note = MG2-3 RuvC-III domain
TITSHLNRLAQQVLLRSLPHLAEHQITAIPGSVIGVLRDAPGWRLLGCLDGAATADVIRKVLQLDHEGKPMCASDVAPLMKRIPKPKGEIRELTHLHHAVDACAIAIINHLLPKDGKLWELVAKRELTDADKNAYDDLRQKNQSQWQPRRLARLFSIVPNLDDKGQQPKHDHKWRIRPCRLKDVLPDIGAQVNKCLRERRVVEHTP

SEQ ID NO: 2144 - protein, 161 aa, unidentified
  REGION 1..161: note = Description of Unknown: uncultivated organism with predicted taxonomy: Verrucomicrobia
  REGION 1..161: note = MG2-5 RuvC-III domain
TQTSQLVRLAAQALRRNLPHLGPENVVSLPGSVTGMVRKSWNVTGCLELACPQVMEEVVDQDGKAVRRAKDKGEIRGITHLHHALDACVIGFSSHFIPNNGGLWELMVKRRWTPAEEKELEARRVFSKGMDGRFQMTDLHKRHKEAIRQRLAEKRVVQHIP

SEQ ID NO: 2145 - protein, 153 aa, unidentified
  REGION 1..153: note = Description of Unknown: uncultivated organism with predicted taxonomy: Verrucomicrobia bacterium
  REGION 1..153: note = MG2-6 RuvC-III domain
TQTSQLVRLAAQVIRKKYVDSKEPKIVSMPGSVTAVFRKSWKVMGCLSKAVPAILDENGEVRPKDEIRNITHLHHAIDACVLALASHLFPNNGRLWELLVKNKLNSSEVDELKKIPLVQVGVDNKINISDLPEFIKEQISNRLLERRVVQHIS

SEQ ID NO: 2146 - protein, 154 aa, unidentified
  REGION 1..154: note = Description of Unknown: uncultivated organism with predicted taxonomy: Verrucomicrobia
  REGION 1..154: note = MG2-8 RuvC-III domain
TVTSQLVRLGALTLKREFADVKQPPVIVSLPGAVTGEVRKAWDVLGCLGLACSQVLDVEGKPKTKTEIRDITHLHHALDACVLGLASHFIPNNGRVWELITKRNLTSAEQKELIALNVFATGPQGRVQLRDLRPERKEQIRQRLAEKRVVQHIP

SEQ ID NO: 2147 - protein, 154 aa, unidentified; identical to SEQ ID NO: 2146
  REGION 1..154: note = Description of Unknown: uncultivated organism with predicted taxonomy: Verrucomicrobia
  REGION 1..154: note = MG2-10 RuvC-III domain

SEQ ID NO: 2148 - protein, 156 aa, unidentified
  REGION 1..156: note = Description of Unknown: uncultivated organism
  REGION 1..156: note = MG2-11 RuvC-III domain
TQTSQLVRLGAQILKKGFTGLERQPVITSMPGSVTGVMRKGWNLIGCLSAANPNVLDEIGQPKIKTEIRDITHLHHALDACVLVLASYFIPNKGAVWELIVKRRLDETEQLQLRTATRGIFNFSPGRRFGLADLPNSLKEQIRQRLAERRVVQHVP

SEQ ID NO: 2149 - protein, 28 aa, unidentified
  REGION 1..28: note = Description of Unknown: uncultivated organism with predicted taxonomy: Verrucomicrobia bacterium
  REGION 1..28: note = MG2-12 RuvC-III domain
TKTRFINKLAAQQLQAAFRDLPEQQRPP

SEQ ID NO: 2150 - protein, 156 aa, unidentified
  REGION 1..156: note = Description of Unknown: uncultivated organism with predicted taxonomy: Verrucomicrobia bacterium
  REGION 1..156: note = MG2-13 RuvC-III domain
TQTSQLVRLGAQVLKKGFTGLERQPVITSMPGSVTGVMRKGWNLIGCLSAANPNVLDEIGQPKIKTEIRDITHLHHALDACVLALVSHFIPNNGGVWELIVKRRLDETEQLQLRAATHGIFNFSPGRRFGLADLPDSLKEQIRQRLAERRVVQHVP

SEQ ID NO: 2151 - protein, 156 aa, unidentified
  REGION 1..156: note = Description of Unknown: uncultivated organism with predicted taxonomy: Verrucomicrobia bacterium
  REGION 1..156: note = MG2-14 RuvC-III domain
SQTSYLNKLAVQQANHWFRQQLGLDTKLPLVIQLSGSVTAAIRTGWDLFGQLNEVCPATRNKTKTEVREITHLHHALDAIVIGLSAHYFPRDKRLWSLMSRRAVKNSVDQAYMKQQLGDLVCFNSDGKWKLQELDIGIKKQVAARLSEKRVVRHNP

SEQ ID NO: 2152 - protein, 156 aa, unidentified; identical to SEQ ID NO: 2151
  REGION 1..156: note = Description of Unknown: uncultivated organism with predicted taxonomy: Verrucomicrobia bacterium
  REGION 1..156: note = MG2-15 RuvC-III domain

SEQ ID NO: 2153 - protein, 153 aa, unidentified
  REGION 1..153: note = Description of Unknown: uncultivated organism with predicted taxonomy: Verrucomicrobia bacterium
  REGION 1..153: note = MG2-16 RuvC-III domain
TQTSQLARMAAQMVKRTFQDVEQKPVIVSMPGSVTSTVRKGWDLLGCLSKACPEVLDETGQVKTKSEIRDITHLHHALDACVLGLAAHFIPNNGDIWKLIIKQDLNETEKDLLRPLGIFDIGEKRFRLKDLPNELKNQLRERLAELRVVQHIP

SEQ ID NO: 2154 - protein, 206 aa, unidentified; identical to SEQ ID NO: 2143
  REGION 1..206: note = Description of Unknown: uncultivated organism
  REGION 1..206: note = MG2-17 RuvC-III domain

SEQ ID NO: 2155 - protein, 153 aa, unidentified
  REGION 1..153: note = Description of Unknown: uncultivated organism with predicted taxonomy: Verrucomicrobia
  REGION 1..153: note = MG2-18 RuvC-III domain
TQTSQLVRLGAQMLKRPFLREKHQPVITSMPGSVTGEVRKGWNLLGCLSKACPQVLDENGEVRTKTEIREITHLHHALDACVLGLAAHFIPNNGRIWELIVKRNLTDTEKLQLRALGIFDFSPEGFRLKELPDELKNQIRERLAERRVVQHVP

SEQ ID NO: 2156 - protein, 156 aa, unidentified
  REGION 1..156: note = Description of Unknown: uncultivated organism with predicted taxonomy: Verrucomicrobia
  REGION 1..156: note = MG2-19 RuvC-III domain
TQTSQLVRLAVQVLKKKYIGEKEKPVFVSMPGSITGKFRAAWNLLGCLLKAVPWAADEDNQVKPKDELRNITHLHHAIDACVLALAGHFIPTYKNGKVWELMIKGTVKPSEKSYIEDVPMLQLDSENRLHIKDLPDSIKEQITERLYERRVVQHIP

SEQ ID NO: 2157 - protein, 189 aa, unidentified
  REGION 1..189: note = Description of Unknown: uncultivated organism with predicted taxonomy: Verrucomicrobia bacterium
  REGION 1..189: note = MG2-20 RuvC-III domain
TVTSHLVRLGAQVLQRAFPPEQRPPVISLPGSVTGEVRKAWKVTACLEAANPAVMEVVEEPDPQTGEMRRIRRAKKKEDIRGITHLHHALDACVLGLASLYFPRHGAVWSAAVKAGQHAATEYDNNEHPLWQAMTKRRPTAQEVVLLKATGLYDGPDSNGRMQLRDLPAELKGQIRRRLAEKRVVQHIP

SEQ ID NO: 2158 - protein, 156 aa, unidentified
  REGION 1..156: note = Description of Unknown: uncultivated organism
  REGION 1..156: note = MG2-21 RuvC-III domain
TQTSQLVRLAVQVLMKKYIGEKEKPVFVSMPGSITGKFRAGWNLLGCLLKAVPWAADEDNQVKPKDELRNITHLHHAIDACVLALAAHFIPTYKNGKVWELMFKGTVKPSEKMYIEDVPVLQLDSENRLHIKDLPDSIKEQITERLYERRVVQHIP

SEQ ID NO: 2159 - protein, 206 aa, unidentified; identical to SEQ ID NO: 2143
  REGION 1..206: note = Description of Unknown: uncultivated organism
  REGION 1..206: note = MG2-22 RuvC-III domain

SEQ ID NO: 2160 - protein, 152 aa, unidentified
  REGION 1..152: note = Description of Unknown: uncultivated organism with predicted taxonomy: Verrucomicrobia bacterium
  REGION 1..152: note = MG2-23 RuvC-III domain
TQTSQLVRLGAQMLKRPFLGEKHQPVITSLPGSVTGVVRKGWNLLGCLSKACPQVLDETGEVRTKTDIREITHLHHAVDACVLGLAAHFVPNNGRMELIVKRNLTETEKLQLRALGVFDFSPDGFRLKELPEGLKNQIRDRLAERRVVQHIP

SEQ ID NO: 2161 - protein, 185 aa, unidentified
  REGION 1..185: note = Description of Unknown: uncultivated organism with predicted taxonomy: Verrucomicrobia bacterium
  REGION 1..185: note = MG2-24 RuvC-III domain
TVTSHLVRLGAQVLQRVFPKDQRPPVVSLPGSVTGEVRKAWRLTGCLEAANPAVMEEVQERNPDTGELQTVRRPKKKDEIRGITHLHHALDACVLGLASLCFPRHGAVWSAMVKAGGDREADDDRRLWLAMTKRRPTPQEATLLKATGRYQQDSEGRLHLADLDEQLKQQIRARLAEKRVVQHVP

SEQ ID NO: 2162 - protein, 175 aa, unidentified
  REGION 1..175: note = Description of Unknown: uncultivated organism
  REGION 1..175: note = MG2-25 RuvC-III domain
TLTSQLVRLGAQVIKRFFAGGARVNNPREAPTDSTARGFVNPRSGPRITSLPGAVTGAVRKGWRVLGCLAQAAPQILEPTGEPKSKTDIRDLTHLHHALDACVLALAAHYFPKDGSLWEAMIVRAPNAAQKQLLHATGFYEFIAEDKPNLKDLPIELKQQIANRLAEKRVVQHIP

SEQ ID NO: 2163 - protein, 156 aa, unidentified
  REGION 1..156: note = Description of Unknown: uncultivated organism with predicted taxonomy: Verrucomicrobia bacterium
  REGION 1..156: note = MG2-26 RuvC-III domain
TQTSQLVRLGAQVLQRAYLGLARPPVVTSLPGSVTGTVRKGWDLLGCLATANPGVLDESGEVKNKTEIRDITHLHHALDACVLALAARAIPNNGRVWELLTRRDNGLNEVERQQLLALGIYARDSEGRLVLRDLSPDLNEQVRQRLAERRVVQHIP

SEQ ID NO: 2164 - protein, 161 aa, unidentified
  REGION 1..161: note = Description of Unknown: uncultivated organism
  REGION 1..161: note = MG2-27 RuvC-III domain
TQTSHLVRLAAEELKKEFGGVQCSTRIVSMPGSVTAETRKAWKLEACLAQANPEVAELRERRKTEPAPVSIKQELRDISHLHHALDACVLACAAHYLEKKGNIWKALVQRRKSEAENLELLSTGLFKRGQDGQARLQDLPAQLKNQISRVLAECRVVQHIP

SEQ ID NO: 2165 - protein, 154 aa, unidentified
  REGION 1..154: note = Description of Unknown: uncultivated organism with predicted taxonomy: Verrucomicrobia
  REGION 1..154: note = MG2-28 RuvC-III domain
TQTSQLARLAAQILRTPFNDTSNPPEIVSLPGFVTATVRRSWDVLGCLSQAAPGVLNTDGSTRSKTEIRNITHLHHALDACVIGLASHFIPNRGDVWRLLAQRNLRAWEKQQLADLGVFDFDAHGGLRLRDLPQQLKEQLRQRLTERRVVQHVP

SEQ ID NO: 2166 - protein, 152 aa, unidentified
  REGION 1..152: note = Description of Unknown: uncultivated organism with predicted taxonomy: Verrucomicrobia bacterium
  REGION 1..152: note = MG2-29 RuvC-III domain
TISSYVAKLAVGQIKKEFSELSKKPPVISLPGRLTGEARKSWKLLGLLSAVNENITSETPKNDIRGLTHLHHAMDAAVMGLMAHCADNLSDGTSWQLLLKRNLRPEEKNLLKANMRNIGFDGNRAHLLDVPNEIKEQLRRCLLERRVVQHVP

SEQ ID NO: 2167 - protein, 153 aa, unidentified
  REGION 1..153: note = Description of Unknown: uncultivated organism with predicted taxonomy: Verrucomicrobia bacterium
  REGION 1..153: note = MG2-30 RuvC-III domain
TLTSYVTKLALQQIKNQFDTCRKKPQVIALPGRLTGETRKTWKLMGLLHVVNEKIDGKTLKNDIRSMSHLHHAIDATIMGLLAYYIKDLADGTTWQLLLKRYLTASEIQHLKDNLNHFKIDSKNRAHLCDIPSHVQKQIEQCLKERRVVQHVP

SEQ ID NO: 2168 - protein, 153 aa, unidentified; identical to SEQ ID NO: 2167
  REGION 1..153: note = Description of Unknown: uncultivated organism with predicted taxonomy: Verrucomicrobia bacterium
  REGION 1..153: note = MG2-31 RuvC-III domain

SEQ ID NO: 2169 - protein, 153 aa, unidentified; identical to SEQ ID NO: 2167
  REGION 1..153: note = Description of Unknown: uncultivated organism with predicted taxonomy: Verrucomicrobia bacterium
  REGION 1..153: note = MG2-32 RuvC-III domain

SEQ ID NO: 2170 - protein, 66 aa, unidentified
  REGION 1..66: note = Description of Unknown: uncultivated organism with predicted taxonomy: Verrucomicrobia bacterium
  REGION 1..66: note = MG2-33 RuvC-III domain
TLTSYVTKLALQQIKNQFDTCRKKPQVIALPGRLTGETRKTWKLMGLLHVVNEKIDGKTLKNDIRS

SEQ ID NO: 2171 - protein, 66 aa, unidentified; identical to SEQ ID NO: 2170
  REGION 1..66: note = Description of Unknown: uncultivated organism with predicted taxonomy: Verrucomicrobia bacterium
  REGION 1..66: note = MG2-34 RuvC-III domain

SEQ ID NO: 2172 - protein, 156 aa, unidentified
  REGION 1..156: note = Description of Unknown: uncultivated organism with predicted taxonomy: Thermogutta terrifontis
  REGION 1..156: note = MG2-35 RuvC-III domain
TQTSYLNKLAAQQVQRWFSDQLDEDVKLPPVVQLSGSVTAAVRRSWDLFDQLQQVCPETRGKSKSDIRGMTHLHHALDAVTVGLAAHLFPKDGHLWALMSKRKITRPSDRDYMRSRLGDLVSFNNDGKWRLEALPESLLFEVAGKLAEQRVVRHMP

SEQ ID NO: 2173 - protein, 157 aa, unidentified
  REGION 1..157: note = Description of Unknown: uncultivated organism with predicted taxonomy: Coraliomargarita sp. CAG:312
  REGION 1..157: note = MG2-36 RuvC-III domain
TQTSHLNKLAFKVVKSLYADAEKAPELIHVPGIVTSVVRKNWDLLPCMGDACPEIYETLENGDKVLRLKDEIRSITHLHHAVDAVAMGLAASVFPRTRNFYEAVSKRRLNQADRQELLKTGLVLFSGDKWKLVELEKSYLKEISGRISENRVVKFLP

SEQ ID NO: 2174 - protein, 94 aa, unidentified
  REGION 1..94: note = Description of Unknown: uncultivated organism with predicted taxonomy: Coraliomargarita sp. CAG:312
  REGION 1..94: note = MG2-37 RuvC-III domain
TQTSHLNKLAFKVVDSLYVDSEEKPELVHLPGSVTSVLRTNWDLSACMAKACPEIIVTVKSADSASGERGMGGDGLPQGLNGSVTDTAACCGGE

SEQ ID NO: 2175 - protein, 157 aa, unidentified
  REGION 1..157: note = Description of Unknown: uncultivated organism with predicted taxonomy: Coraliomargarita sp. CAG:312
  REGION 1..157: note = MG2-38 RuvC-III domain
TQTSHLNKLAFKVVKSLYADAEKAPELIHVPGTVTSVVRKNWDLLPCMGDACPEIYETLENGDKVLRLKDEIRSITHLHHAVDAVAMGLAASVFPRTRNFYEAVSKRRLNQADRQELLKTGLVLFSGDKWKLVELEKSYLKEISGRISENRVVKFLP

SEQ ID NO: 2176 - protein, 202 aa, unidentified
  REGION 1..202: note = Description of Unknown: uncultivated organism with predicted taxonomy: Verrucomicrobia bacterium
  REGION 1..202: note = MG2-39 RuvC-III domain
TQTSHLNKLAFKVVDSLYVDSEEKPELVHLPGSVTSVLRTNWDLSACMAKACPEIIVTVKSADSASGERGMGGDGLPQGLNGSVTDTAACCGGEADAPQSGGSSGGEKKVLLMKGKIRSITHLHHAVDAVAIGLAAAVFPHTNRFYELVSKRNLNRSEREELYRTGLFVFSERNWRLKELPAKLINEISDRIAEGRVVKYLP

SEQ ID NO: 2177 - protein, 157 aa, unidentified; identical to SEQ ID NO: 2173
  REGION 1..157: note = Description of Unknown: uncultivated organism with predicted taxonomy: Coraliomargarita sp. CAG:312
  REGION 1..157: note = MG2-40 RuvC-III domain

SEQ ID NO: 2178 - protein, 202 aa, unidentified; identical to SEQ ID NO: 2176
  REGION 1..202: note = Description of Unknown: uncultivated organism with predicted taxonomy: Coraliomargarita sp. CAG:312
  REGION 1..202: note = MG2-41 RuvC-III domain

SEQ ID NO: 2179 - protein, 202 aa, unidentified; identical to SEQ ID NO: 2176
  REGION 1..202: note = Description of Unknown: uncultivated organism with predicted taxonomy: Coraliomargarita sp. CAG:312
  REGION 1..202: note = MG2-42 RuvC-III domain

SEQ ID NO: 2180 - protein, 202 aa, unidentified; identical to SEQ ID NO: 2176
  REGION 1..202: note = Description of Unknown: uncultivated organism with predicted taxonomy: Verrucomicrobia
  REGION 1..202: note = MG2-43 RuvC-III domain

SEQ ID NO: 2181 - protein, 157 aa, unidentified; identical to SEQ ID NO: 2173
  REGION 1..157: note = Description of Unknown: uncultivated organism with predicted taxonomy: Coraliomargarita sp. CAG:312
  REGION 1..157: note = MG2-44 RuvC-III domain

SEQ ID NO: 2182 - protein, 202 aa, unidentified; identical to SEQ ID NO: 2176
  REGION 1..202: note = Description of Unknown: uncultivated organism with predicted taxonomy: Coraliomargarita sp. CAG:312
  REGION 1..202: note = MG2-45 RuvC-III domain

SEQ ID NO: 2183 - protein, 157 aa, unidentified; identical to SEQ ID NO: 2173
  REGION 1..157: note = Description of Unknown: uncultivated organism with predicted taxonomy: Coraliomargarita sp. CAG:312
  REGION 1..157: note = MG2-46 RuvC-III domain

SEQ ID NO: 2184 - protein, 202 aa, unidentified; identical to SEQ ID NO: 2176
  REGION 1..202: note = Description of Unknown: uncultivated organism with predicted taxonomy: Verrucomicrobia bacterium
  REGION 1..202: note = MG2-47 RuvC-III domain

SEQ ID NO: 2185 - protein, 157 aa, unidentified; identical to SEQ ID NO: 2173
  REGION 1..157: note = Description of Unknown: uncultivated organism with predicted taxonomy: Coraliomargarita sp. CAG:312
  REGION 1..157: note = MG2-48 RuvC-III domain

SEQ ID NO: 2186 - protein, 202 aa, unidentified; identical to SEQ ID NO: 2176
  REGION 1..202: note = Description of Unknown: uncultivated organism with predicted taxonomy: Coraliomargarita sp. CAG:312
  REGION 1..202: note = MG2-49 RuvC-III domain

SEQ ID NO: 2187 - protein, 157 aa, unidentified; identical to SEQ ID NO: 2173
  REGION 1..157: note = Description of Unknown: uncultivated organism with predicted taxonomy: Coraliomargarita sp. CAG:312
  REGION 1..157: note = MG2-50 RuvC-III domain

SEQ ID NO: 2188 - protein, 157 aa, unidentified; identical to SEQ ID NO: 2173
  REGION 1..157: note = Description of Unknown: uncultivated organism with predicted taxonomy: Coraliomargarita sp. CAG:312
  REGION 1..157: note = MG2-51 RuvC-III domain

SEQ ID NO: 2189 - protein, 202 aa, unidentified; identical to SEQ ID NO: 2176
  REGION 1..202: note = Description of Unknown: uncultivated organism with predicted taxonomy: Verrucomicrobia bacterium
  REGION 1..202: note = MG2-52 RuvC-III domain

SEQ ID NO: 2190 - protein, 202 aa, unidentified; identical to SEQ ID NO: 2176
  REGION 1..202: note = Description of Unknown: uncultivated organism with predicted taxonomy: Verrucomicrobia bacterium
  REGION 1..202: note = MG2-53 RuvC-III domain

SEQ ID NO: 2191 - protein, 135 aa, unidentified
  REGION 1..135: note = Description of Unknown: uncultivated organism with predicted taxonomy: Coraliomargarita sp. CAG:312
  REGION 1..135: note = MG2-54 RuvC-III domain
TQTSHLNKLAFKLVKSLYVDAGKTPELVHLPGSVTSAVRKNWELLPCMGDVCPEIYETLENGDKVLLLKDKIRSITHLHHAVDAVAMGLAASVFPRTKRFYEAVSKRHLSEADREELLNTGLVLFSDDKWKLVEL

SEQ ID NO: 2192 - protein, 157 aa, unidentified; identical to SEQ ID NO: 2175
  REGION 1..157: note = Description of Unknown: uncultivated organism with predicted taxonomy: Coraliomargarita sp. CAG:312
  REGION 1..157: note = MG2-55 RuvC-III domain

SEQ ID NO: 2193 - protein, 157 aa, unidentified
  REGION 1..157: note = Description of Unknown: uncultivated organism with predicted taxonomy: Coraliomargarita sp. CAG:312
  REGION 1..157: note = MG2-56 RuvC-III domain
TQTSHLNKLAFKVVKSLYADAEKAPELIHVPGIVTSVVRKNWNLLPCMGDACPEIYETLENGDKVLRLKDEIRSITHLHHAVDAVAMGLAASVFPRTRNFYEAVSKRRLNQADRQELLKTGLVLFSGDKWKLVELEKSYLKEISGRISENRVVKFLP

SEQ ID NO: 2194 - protein, 202 aa, unidentified; identical to SEQ ID NO: 2176
  REGION 1..202: note = Description of Unknown: uncultivated organism with predicted taxonomy: Coraliomargarita sp. CAG:312
  REGION 1..202: note = MG2-57 RuvC-III domain

SEQ ID NO: 2195 - protein, 202 aa, unidentified; identical to SEQ ID NO: 2176
  REGION 1..202: note = Description of Unknown: uncultivated organism with predicted taxonomy: Verrucomicrobia bacterium
  REGION 1..202: note = MG2-58 RuvC-III domain

SEQ ID NO: 2196 - protein, 157 aa, unidentified; identical to SEQ ID NO: 2175
  REGION 1..157: note = Description of Unknown: uncultivated organism with predicted taxonomy: Coraliomargarita sp. CAG:312
  REGION 1..157: note = MG2-59 RuvC-III domain

SEQ ID NO: 2197 - protein, 157 aa, unidentified; identical to SEQ ID NO: 2173
  REGION 1..157: note = Description of Unknown: uncultivated organism with predicted taxonomy: Coraliomargarita sp. CAG:312
  REGION 1..157: note = MG2-60 RuvC-III domain

SEQ ID NO: 2198 - protein, 157 aa, unidentified; identical to SEQ ID NO: 2173
  REGION 1..157: note = Description of Unknown: uncultivated organism with predicted taxonomy: Coraliomargarita sp. CAG:312
  REGION 1..157: note = MG2-61 RuvC-III domain

SEQ ID NO: 2199 - protein, 155 aa, unidentified
  REGION 1..155: note = Description of Unknown: uncultivated organism with predicted taxonomy: Verrucomicrobia
  REGION 1..155: note = MG2-62 RuvC-III domain
TQTSHLNKLAIRLVKRELGIDARHLAGAVTGFVRKNLSIDECLVAAVPRMQRAQRVSEHDSRKLLKSQMRELSHLHHAMDAITQGLTGILFRVEDWKLLVKRHLTERERAVLAAKYPTLLRFSANGEIALKPLPDSLLSEITARLKECRVVQHVP

SEQ ID NO: 2200 - protein, 157 aa, unidentified; identical to SEQ ID NO: 2173
  REGION 1..157: note = Description of Unknown: uncultivated organism with predicted taxonomy: Coraliomargarita sp. CAG:312
  REGION 1..157: note = MG2-63 RuvC-III domain

SEQ ID NO: 2201 - protein, 157 aa, unidentified; identical to SEQ ID NO: 2173
  REGION 1..157: note = Description of Unknown: uncultivated organism with predicted taxonomy: Coraliomargarita sp. CAG:312
  REGION 1..157: note = MG2-64 RuvC-III domain

SEQ ID NO: 2202 - protein, 202 aa, unidentified; identical to SEQ ID NO: 2176
  REGION 1..202: note = Description of Unknown: uncultivated organism with predicted taxonomy: Coraliomargarita sp. CAG:312
  REGION 1..202: note = MG2-65 RuvC-III domain

SEQ ID NO: 2203 - protein, 157 aa, unidentified; identical to SEQ ID NO: 2175
  REGION 1..157: note = Description of Unknown: uncultivated organism with predicted taxonomy: Coraliomargarita sp. CAG:312
  REGION 1..157: note = MG2-66 RuvC-III domain

SEQ ID NO: 2204 - protein, 157 aa, unidentified; identical to SEQ ID NO: 2173
  REGION 1..157: note = Description of Unknown: uncultivated organism with predicted taxonomy: Coraliomargarita sp. CAG:312
  REGION 1..157: note = MG2-67 RuvC-III domain

SEQ ID NO: 2205 - protein, 157 aa, unidentified; identical to SEQ ID NO: 2173
  REGION 1..157: note = Description of Unknown: uncultivated organism with predicted taxonomy: Coraliomargarita sp. CAG:312
  REGION 1..157: note = MG2-68 RuvC-III domain

SEQ ID NO: 2206 - protein, 157 aa, unidentified; identical to SEQ ID NO: 2173
  REGION 1..157: note = Description of Unknown: uncultivated organism with predicted taxonomy: Coraliomargarita sp. CAG:312
  REGION 1..157: note = MG2-69 RuvC-III domain

SEQ ID NO: 2207 - protein, 157 aa, unidentified; identical to SEQ ID NO: 2173
  REGION 1..157: note = Description of Unknown: uncultivated organism with predicted taxonomy: Coraliomargarita sp. CAG:312
  REGION 1..157: note = MG2-70 RuvC-III domain

SEQ ID NO: 2208 - protein, 157 aa, unidentified; identical to SEQ ID NO: 2173
  REGION 1..157: note = Description of Unknown: uncultivated organism with predicted taxonomy: Coraliomargarita sp. CAG:312
  REGION 1..157: note = MG2-71 RuvC-III domain

SEQ ID NO: 2209 - protein, 157 aa, unidentified; identical to SEQ ID NO: 2173
  REGION 1..157: note = Description of Unknown: uncultivated organism with predicted taxonomy: Coraliomargarita sp. CAG:312
  REGION 1..157: note = MG2-72 RuvC-III domain

SEQ ID NO: 2210 - protein, 202 aa, unidentified; identical to SEQ ID NO: 2176
  REGION 1..202: note = Description of Unknown: uncultivated organism with predicted taxonomy: Verrucomicrobia bacterium
  REGION 1..202: note = MG2-73 RuvC-III domain

SEQ ID NO: 2211 - protein, 155 aa, unidentified; identical to SEQ ID NO: 2199
  REGION 1..155: note = Description of Unknown: uncultivated organism with predicted taxonomy: Verrucomicrobia
  REGION 1..155: note = MG2-74 RuvC-III domain

SEQ ID NO: 2212 - protein, 157 aa, unidentified; identical to SEQ ID NO: 2173
  REGION 1..157: note = Description of Unknown: uncultivated organism with predicted taxonomy: Coraliomargarita sp. CAG:312
  REGION 1..157: note = MG2-75 RuvC-III domain

SEQ ID NO: 2213 - protein, 136 aa, unidentified
  REGION 1..136: note = Description of Unknown: uncultivated organism with predicted taxonomy: Verrucomicrobia bacterium
  REGION 1..136: note = MG2-76 RuvC-III domain
TVTSQLVRLGAQALKREFIDLEEPPVTVSLPGAVTGEVRKAWDVLGCLSKACPEVLDAEGKVKTKTEIRDITHLHHALDACVIGLAAHFIPNRGRVWELITKRRLTAAEQSELVALKVFTPESHGEVRLNDLKPDR

SEQ ID NO: 2214 - protein, 154 aa, unidentified
  REGION 1..154: note = Description of Unknown: uncultivated organism
  REGION 1..154: note = MG2-77 RuvC-III domain
TVTSQLVRLGAQALKREFIDLEEPPVTVSLPGAVTGEVRKAWDVLGCLSKACPEVLDAEGKVKTKTEIRDITHLHHALDACVIGLAAHFIPNRGRVWELITKRRLTAAEQSELVALKVFTPESHGEVRLNDLKPERKEQIRQRLAERRVVQHIP

SEQ ID NO: 2215 - protein, 154 aa, unidentified; identical to SEQ ID NO: 2214
  REGION 1..154: note = Description of Unknown: uncultivated organism with predicted taxonomy: Verrucomicrobia bacterium
  REGION 1..154: note = MG2-78 RuvC-III domain

SEQ ID NO: 2216 - protein, 154 aa, unidentified
  REGION 1..154: note = Description of Unknown: uncultivated organism with predicted taxonomy: Verrucomicrobia bacterium
  REGION 1..154: note = MG2-79 RuvC-III domain
TQTSQLVRLGGQVLKRAFANSEEKPTLVSLPGSVTGAVRKAWKVLGCLSLANQQVLDENGDVKTKTDIRDITHLHHALDACVLGLTSHFIPNNGRVWELIVKRNPNDLERQQLMALGVFGFNAEKRFEMRDLDNKLKEQIRQRLAEKRVVQHIP

SEQ ID NO: 2217 - protein, 154 aa, unidentified; identical to SEQ ID NO: 2214
  REGION 1..154: note = Description of Unknown: uncultivated organism with predicted taxonomy: Verrucomicrobia bacterium
  REGION 1..154: note = MG2-80 RuvC-III domain

SEQ ID NO: 2218 - protein, 110 aa, unidentified
  REGION 1..110: note = Description of Unknown: uncultivated organism with predicted taxonomy: Verrucomicrobia bacterium
  REGION 1..110: note = MG2-81 RuvC-III domain
TVTSQLVRLGAQIIKKTFAGSEKPPMVVSLPGSVTGTVRKGWNLLGCLELAAPQVKEADGGIKNKTDIRDVTHLHHALDACVLGLASYYLPNNGGLWEVMIKRNPNDGEK

SEQ ID NO: 2219 - protein, 154 aa, unidentified
  REGION 1..154: note = Description of Unknown: uncultivated organism with predicted taxonomy: Verrucomicrobia bacterium
  REGION 1..154: note = MG2-82 RuvC-III domain
TVTSQLVRLGAQALKREFIDLEEPPVTVSLPGAVTGEVRKAWDVLGCLSKACPEVLDAEGKVKTKTEIRDITHLHHALDACVIGLAAHFIPNRGRVWELITKRRLTAAEQSELVALKVFTPESHGEVRLKDLKPERKEQIRQRLAERRVVQHIP

SEQ ID NO: 2220 - protein, 157 aa, unidentified
  REGION 1..157: note = Description of Unknown: uncultivated organism
  REGION 1..157: note = MG2-83 RuvC-III domain
TQTSQLVRLGAQVLKKNLPHLTTGDVTSLPGSVTGTVRKGWKLEACLGLANPQVFDGNGGAKTKTEIRDITHLHHALDACVLGIAANYFQNQKLGASSLWELLIKRKYNEQEKTILRALGIFQFDKEGNSQIKELPKEIREQIRQRLAEKRVVQHIP

SEQ ID NO: 2221 - protein, 154 aa, unidentified; identical to SEQ ID NO: 2146
  REGION 1..154: note = Description of Unknown: uncultivated organism with predicted taxonomy: Verrucomicrobia bacterium
  REGION 1..154: note = MG2-84 RuvC-III domain

SEQ ID NO: 2222 - protein, 154 aa, unidentified; identical to SEQ ID NO: 2214
  REGION 1..154: note = Description of Unknown: uncultivated organism with predicted taxonomy: Verrucomicrobia bacterium
  REGION 1..154: note = MG2-85 RuvC-III domain

SEQ ID NO: 2223 - protein, 154 aa, unidentified; identical to SEQ ID NO: 2146
  REGION 1..154: note = Description of Unknown: uncultivated organism
  REGION 1..154: note = MG2-86 RuvC-III domain

SEQ ID NO: 2224 - protein, 154 aa, unidentified; identical to SEQ ID NO: 2146
  REGION 1..154: note = Description of Unknown: uncultivated organism with predicted taxonomy: Methylococcales bacterium
  REGION 1..154: note = MG2-87 RuvC-III domain

SEQ ID NO: 2225 - protein, 154 aa, unidentified; identical to SEQ ID NO: 2146
  REGION 1..154: note = Description of Unknown: uncultivated organism
  REGION 1..154: note = MG2-88 RuvC-III domain

SEQ ID NO: 2226 - protein, 154 aa, unidentified; identical to SEQ ID NO: 2146
  REGION 1..154: note = Description of Unknown: uncultivated organism with predicted taxonomy: Verrucomicrobia
  REGION 1..154: note = MG2-89 RuvC-III domain

SEQ ID NO: 2227 - protein, 72 aa, unidentified
  REGION 1..72: note = Description of Unknown: uncultivated organism with predicted taxonomy: Verrucomicrobia bacterium
  REGION 1..72: note = MG2-90 RuvC-III domain
TQTSQLVRLGAQVLKKNLPHLTTGDVTSLPGSVTGTVRKGWKLEACLGLANPQVFDGNGGAKTKTEIRDITH

SEQ ID NO: 2228 - protein, 157 aa, unidentified; identical to SEQ ID NO: 2220
  REGION 1..157: note = Description of Unknown: uncultivated organism
  REGION 1..157: note = MG2-91 RuvC-III domain

SEQ ID NO: 2229 - protein, 54 aa, unidentified
  REGION 1..54: note = Description of Unknown: uncultivated organism with predicted taxonomy: Verrucomicrobiae bacterium Tous-C5FEB
  REGION 1..54: note = MG2-92 RuvC-III domain
TVTSQLVRLGAQIIKKTFAENEKLPTVVSLPGSVTGTVRKGWNLLGCLATAAPQ

SEQ ID NO: 2230 - protein, 174 aa, unidentified
  REGION 1..174: note = Description of Unknown: uncultivated organism
  REGION 1..174: note = MG2-94 RuvC-III domain
TQTSHLNKMAISLVKQRIGIDAKHLPGSVTAFIRQKLHIDECLFNAVPRLQKAAKGEGKKLKLKKNTEEPPAEPLLNDLPPRKLTKADIRELTHLHHAMDAVTQGLALLLFAPEDWPLLVKRHLSDSERRLLKSRYPYLVFTENSRMDIQDLPDATLKTISGRLAECRVVRHIP

SEQ ID NO: 2231 - protein, 174 aa, unidentified; identical to SEQ ID NO: 2230
  REGION 1..174: note = Description of Unknown: uncultivated organism
  REGION 1..174: note = MG2-95 RuvC-III domain

SEQ ID NO: 2232 - protein, 174 aa, unidentified; identical to SEQ ID NO: 2142
  REGION 1..174: note = Description of Unknown: uncultivated organism
  REGION 1..174: note = MG2-96 RuvC-III domain

SEQ ID NO: 2233 - protein, 173 aa, unidentified
  REGION 1..173: note = Description of Unknown: uncultivated organism with predicted taxonomy: Acidobacteria bacterium RIFCSPLOWO2_12_FULL_68_19
  REGION 1..173: note = MG2-97 RuvC-III domain
TQTSHLNKMAISLVKQRIGIDAKHLPGSVTAFIRQKLHIDECLFTAVPRLQKTAKGEGKRPKRKNADEVTAEPMQSDMPPRKLTKADIRELTHLHHAMDAVTQGLALLLFAPEDWPLLVKRNLTDSERRLLKSRYPYLVFTENSRMEIQDLPEATLKTISDRLAECRVIRHIP

SEQ ID NO: 2234 - protein, 154 aa, unidentified
  REGION 1..154: note = Description of Unknown: uncultivated organism with predicted taxonomy: Verrucomicrobia bacterium
  REGION 1..154: note = MG2-98 RuvC-III domain
TITSQLVRLGARTLEKAFTDGNHAPKIVSMPGSVTGRVQRAWSLMGCIAKANPSVLDENGKPKPKGDIRDISHLHHAVDACVLGIAGTLFPNDGSLWKAMAARSPARAEAEQLLATGLYERDSEKHLRLRDLPAALKNQIADRLSERRVYQHVS

SEQ ID NO: 2235 - protein, 174 aa, unidentified; identical to SEQ ID NO: 2142
  REGION 1..174: note = Description of Unknown: uncultivated organism
  REGION 1..174: note = MG2-99 RuvC-III domain

SEQ ID NO: 2236 - protein, 174 aa, unidentified; identical to SEQ ID NO: 2230
  REGION 1..174: note = Description of Unknown: uncultivated organism with predicted taxonomy: Proteobacteria
  REGION 1..174: note = MG2-100 RuvC-III domain

SEQ ID NO: 2237 - protein, 174 aa, unidentified
  REGION 1..174: note = Description of Unknown: uncultivated organism with predicted taxonomy: Bradyrhizobium
  REGION 1..174: note = MG2-101 RuvC-III domain
TQTSHLNKMAISLVKQRIGIDAKHLPGSVTAFIRQKLHIDECLFNAVPRLQKAAKGEGKKLKLKKNTEEPPAEPLLNDLPPRKLTKADIRELTHLHHAMDAVTQGLALLLFAPEDWPLLVKRHLSDSEKRLLKARYPFLLFNGDNNISIQDLPEAALQTISDRLAECRVVRHIP

SEQ ID NO: 2238 - protein, 154 aa, unidentified
  REGION 1..154: note = Description of Unknown: uncultivated organism with predicted taxonomy: Methylococcales bacterium
  REGION 1..154: note = MG2-102 RuvC-III domain
TQTSQLVRLGAQVLKRVFANSEKKSPVVSLPGSVTGAVRKAWKVLGCLSLANQQVLDENGDVKTKTDIRDITHLHHALDACVLGLTSHFIPNNGRVWELIVKRNPNELEKRELMALGVFGFNAEKRFEMRDLDNKLKEQIRQRLAEKRVVQHIP

SEQ ID NO: 2239 - protein, 153 aa, unidentified
  REGION 1..153: note = Description of Unknown: uncultivated organism with predicted taxonomy: Verrucomicrobia bacterium
  REGION 1..153: note = MG2-103 RuvC-III domain
TQTSQLVRLGAQVLRNVLPHLKQNDVISLPGSVTGTVRKAWKVLGCLSLANPQVLDENGDVKTKTDIRDITHLHHALDACVLGLVSHFIPNSGQVWELIVKRNPNDTEKKQLTALGVFGFGKDNRFEMRDLDDRLKEQIRQRLAEKRVVQHVP

SEQ ID NO: 2240 - protein, 158 aa, unidentified
  REGION 1..158: note = Description of Unknown: uncultivated organism with predicted taxonomy: Verrucomicrobia bacterium
  REGION 1..158: note = MG2-104 RuvC-III domain
TVTSHLVRLGAQVLKRHFSDLPREHRIQLEPVSLPGSVTGEIRKAWKLIGCLAVANPQVLNPDGTVKPKQDIRGITHLHHALDACVLGLAAFYFPRHGSLWAAMVKRRPSAEEAALLRQTGFYQTDSEGRFRLIDFPEVLAQQIRQRLAEKRVVQHVP

SEQ ID NO: 2241 - protein, 158 aa, unidentified; identical to SEQ ID NO: 2240
  REGION 1..158: note = Description of Unknown: uncultivated organism with predicted taxonomy: Verrucomicrobia bacterium
  REGION 1..158: note = MG2-105 RuvC-III domain

SEQ ID NO: 2242 - protein, 163 aa, unidentified
  REGION 1..163: note = Description of Unknown: uncultivated organism with predicted taxonomy: Rothia
  REGION 1..163: note = MG3-6 RuvC-III domain
ASTSYAAVAVRERLEQHFNEGLALDDKSRVVLDVYAGAVTRESRRAGGIDERILLRGERDKNRFDVRHHAVDAAVMTLLNRSVALTLEQRSQLRRTFYEQGLDKLDRNQLKPEEDWRDFTGLAPASQEKFLEWRKAATILGDLLAEAIEDDSIAVVSPLRLRP

SEQ ID NO: 2243 - protein, 159 aa, unidentified
  REGION 1..159: note = Description of Unknown: uncultivated organism with predicted taxonomy: Rothia
  REGION 1..159: note = MG3-7 RuvC-III domain
ASTSYAATAIRERIEQYFNEKAEKLDLAKVHIDVYSGSLTRESRRAGGIDKMVLLRGQSDKNRFDVRHHAIDAAVLTLLNRSVAVTLEQRRLIKQQREYSLEKSRRERDNVWRDFMGLGPAAQEKFAKWKKTAYVLADIIKEAISNDAIPVVSPLRLRP

SEQ ID NO: 2244 - protein, 163 aa, unidentified
  REGION 1..163: note = Description of Unknown: uncultivated organism with predicted taxonomy: Rothia
  REGION 1..163: note = MG3-8 RuvC-III domain
ASTSYAAVAVRERLEQHFNEGLAPDDKNRVVLDVYAGSVTRESRRAGGIDERILLRGERDKNRFDVRHHAIDAAVMTLLNRSVALTLEQRSQLRRAFYEQGLDKLDRDQLKPEEDWRNFIGLSLASQEKFLEWKKVTTVLGDLLAEAIEDDSIAVVSPLRLRP

SEQ ID NO: 2245 - protein, 145 aa, unidentified
  REGION 1..145: note = Description of Unknown: uncultivated organism with predicted taxonomy: Dermabacter hominis
  REGION 1..145: note = MG3-1 RuvC-III domain
ASTSYAATEITRRILGHFHDEVPVVAFGGSGTREARRAGRVDHIIRLRGSLDKSRLDTRHHAIDAAVLTLQSPAIYRVLLTRVNLKHEHEVTGEAPEWRDYEGADQAEKVLYRRWQKNIATLAELMRQEIENNRVPVTRPIRLRK

SEQ ID NO: 2246 - protein, 148 aa, unidentified
  REGION 1..148: note = Description of Unknown: uncultivated organism with predicted taxonomy: Micrococcales
  REGION 1..148: note = MG3-5 RuvC-III domain
SATAFAAVEIRRKLENHFKDRTKPVRVDVYRGALTRESRRAGRIDAKIRLRGNIDKDRLDIRHHAIDAAVLTLLDPSVAKTLAMRLDLKREQQDSGRDTRWKEFKGLTPASQERFIKWCQASECLADMLRQQIEADRVPVVVPLRISP

SEQ ID NO: 2247 - protein, 156 aa, unidentified
  REGION 1..156: note = Description of Unknown: uncultivated organism with predicted taxonomy: Rothia
  REGION 1..156: note = MG3-6 RuvC-III domain
ASTSYAATSIRERLEQHFNDDLPDGFAPVAVDVYGGSLTRESRRAGGIDKSIMLRGQSDKNRFDVRHHAIDAAVMTLLNPSVAVTLEQRRMLKQENDYSSPRGQHDNGWRDFIGRGEASQSKFLHWKKTAVVLADLISEAIEQDTIPVVNPLRLRP

SEQ ID NO: 2248 - protein, 163 aa, unidentified
  REGION 1..163: note = Description of Unknown: uncultivated organism with predicted taxonomy: Rothia
  REGION 1..163: note = MG3-7 RuvC-III domain
ASTSYAAVAVRERLEQHFNEGLAPDDKSRVVLDVYAGAVTRESRRAGGIDERILLRGERDKNRFDVRHHAIDAAVMTLLNRSVALTLEQRSQLRRAFYELELDKLDRDQLKPGEDWRNFTGLYEASQNKFSEWKKAATVLGDLLAEAIEDDAIAVVSPLRLRP

SEQ ID NO: 2249 - protein, 163 aa, unidentified; identical to SEQ ID NO: 2244
  REGION 1..163: note = Description of Unknown: uncultivated organism with predicted taxonomy: Rothia
  REGION 1..163: note = MG3-8 RuvC-III domain

SEQ ID NO: 2250 - protein, 152 aa, unidentified
  REGION 1..152: note = Description of Unknown: uncultivated organism with predicted taxonomy: Brevibacterium
  REGION 1..152: note = MG3-42 RuvC-III domain
ESTAYAATEIRRRLQYYFEENCGANSPQPEILVLPGAVTREARRAGGFDSRIKLRGKNDKDRFDARHHALDAAIMTVVDRSVARTLQQRSDLKYSNFLTGAEPRWKDFKGDSPESRKKFERWVQTSNRLADLVSDAIVTDSIPVIFPLRLGT

SEQ ID NO: 2251 - protein, 144 aa, unidentified
  REGION 1..144: note = Description of Unknown: uncultivated organism with predicted taxonomy: Brevibacterium mcbrellneri
  REGION 1..144: note = MG3-68 RuvC-III domain
ESTAYAATEIRRRVQYYFEENCGANVPQPEIFVLPGAVTREARRAGGFDSRIKLRGKGDKDRFDARHHALDAAIMTVVDWSVARTLQQRSDLKYSNFLTGAEPRWKEFKGDSPEARKKFERWIQTSNRLADLVSDAIVAAAIPV

SEQ ID NO: 2252 - protein, 152 aa, unidentified; identical to SEQ ID NO: 2250
  REGION 1..152: note = Description of Unknown: uncultivated organism with predicted taxonomy: Brevibacterium mcbrellneri
  REGION 1..152: note = MG3-88 RuvC-III domain

SEQ ID NO: 2253 - protein, 131 aa, unidentified
  REGION 1..131: note = Description of Unknown: uncultivated organism with predicted taxonomy: Planctomycetes
  REGION 1..131: note = MG4-5 RuvC-III domain
NDTRYASRLAADYLALLYGGRVDANGRQRVQVGTGATTGFLRDEWGLNAILGDNDEKERADHRHHAIDAVVIALTGPGTVQALTRAALRAKELGRRLFVPLDPPWADRDSFLRDVRASVEAITVSYRVDRK

SEQ ID NO: 2254 - protein, 121 aa, unidentified
  REGION 1..121: note = Description of Unknown: uncultivated organism
  REGION 1..121: note = MG4-11 RuvC-III domain
TDTSYISKKAVEYVSLLFGGSIDAKGKRRVFATKGGITGRLRREWGLNVLLGGEDEKNRADHRHHAIDALVIALSTPAVIKKIGGEDTRPKEDILPPIDNLADVAREVLEKVNVVYRCSQK

SEQ ID NO: 2255 - protein, 148 aa, unidentified
  REGION 1..148: note = Description of Unknown: uncultivated organism
  REGION 1..148: note = MG4-12 RuvC-III domain
NDSRYMSKLALRYLGVLYGAVNGCVGGQDEDEGGKRVIFASTGKVTAWIRREWRLNEILCDDDEPTGEGADVEKNRNDHRHHAIDALVISLSTPSYVQQLNRAAQLADNDAKARLFKKGNFMPPVTGFKALVAQVVDGIVVSKRVDSK

SEQ ID NO: 2256 - protein, 134 aa, unidentified
  REGION 1..134: note = Description of Unknown: uncultivated organism
  REGION 1..134: note = MG4-13 RuvC-III domain
NDTKYASKLAKKFLGLLYPGQEALSRVQATKGGITANLRDVFNLNSILKDGDSVERDGYEPKKTRADHRHHAIDAICIALTEPSTVKMLSEASSRALKERKRRFGKVQPPWENFWEDVKKAIDNTIVSHRVSKK

SEQ ID NO: 2257 - protein, 130 aa, unidentified
  REGION 1..130: note = Description of Unknown: uncultivated organism
  REGION 1..130: note = MG4-14 RuvC-III domain
NDTAHASRSALRYLGLLYGSNKAGVGPDGRRRVQAGRGQVTAFLRDEWRLNSILGDLQKSRADHRHHAVDALAIALTDSRIIKTLSDAASRALSERRRRFGRVAPPWKSFLEEAKNAIAATIVSHRVSRK

SEQ ID NO: 2258 - protein, 128 aa, unidentified
  REGION 1..128: note = Description of Unknown: uncultivated organism with predicted taxonomy: Thermogutta terrifontis
  REGION 1..128: note = MG4-15 RuvC-III domain
SDTRWISKAAADYLGHLYGGRIDPTGQQRVFTVAGGLTGLFRRAWNLNAILGGSPEKNRYDHRHHAIDAIVVALTDPSMIQRFAHEASRLLKAWPRVAVRLDPPWSTFLSDVQRHVEGIVVSFRVSRR

SEQ ID NO: 2259 - protein, 128 aa, unidentified; identical to SEQ ID NO: 2258
  REGION 1..128: note = Description of Unknown: uncultivated organism with predicted taxonomy: Thermogutta terrifontis
  REGION 1..128: note = MG4-16 RuvC-III domain

SEQ ID NO: 2260 - protein, 128 aa, unidentified
  REGION 1..128: note = Description of Unknown: uncultivated organism with predicted taxonomy: Thermogutta terrifontis
  REGION 1..128: note = MG4-17 RuvC-III domain
NDTRWISKAAADYFGYLYGGRIAPTGQQRVFTVTGGLTALFRRAWNLNAVLGGNPEKNRYDHRHHAIDAIVVALTEPSMIQRFSNEAEKLIKAFPRVAVRLDPPWDTFLSDVQQHVERIVVSFRVNRR

SEQ ID NO: 2261 - protein, 128 aa, unidentified
  REGION 1..128: note = Description of Unknown: uncultivated organism with predicted taxonomy: Thermogutta terrifontis
  REGION 1..128: note = MG4-18 RuvC-III domain
SDTRWISKAAADYLGHLYGGRIDPTGQQRVFTVAGGLTGLFRRAWNLNAILGGSPEKNRYDHRHHAIDAIVVALTEPSMIQRFAHEASRLLKAWPRVAVRLDPPWSTFLSDVQRHVEGIVVSFRVSRR

SEQ ID NO: 2262 - protein, 141 aa, unidentified
  REGION 1..141: note = Description of Unknown: uncultivated organism
  REGION 1..141: note = MG4-19 RuvC-III domain
NDTRYASKLACELVGTLFGGRDIPTESGSRQVVFASSGMVTATLRKGWGLEAILREAAPSANGQNRGKPRTDHRHHAIDAITIALSAPRMIAALSRNNAQDPYWPRNGRTAPKLQSPWNGFVDSIRPHFEQMLVSHRPEHR

SEQ ID NO: 2263 - protein, 141 aa, unidentified; identical to SEQ ID NO: 2262
  REGION 1..141: note = Description of Unknown: uncultivated organism
  REGION 1..141: note = MG4-20 RuvC-III domain

SEQ ID NO: 2264 - protein, 141 aa, unidentified; identical to SEQ ID NO: 2262
  REGION 1..141: note = Description of Unknown: uncultivated organism
  REGION 1..141: note = MG4-21 RuvC-III domain

SEQ ID NO: 2265 - protein, 141 aa, unidentified
  REGION 1..141: note = Description of Unknown: uncultivated organism with predicted taxonomy: Planctomyces sp. SH-PL14
  REGION 1..141: note = MG4-22 RuvC-III domain
NDTRYASKLACELVGTLFGGRDIPTESGSRQVVFASSGMVTATLRKGWGLEAILREAAPSANGQNRGKPRTDHRHHAIDAITIALSAPRMIAALSRNNAQDPYWPRNGRTAPKLQSPWNGIVDSIRPHFEQMLVSHRPEHR

SEQ ID NO: 2266 - protein, 141 aa, unidentified; identical to SEQ ID NO: 2262
  REGION 1..141: note = Description of Unknown: uncultivated organism
  REGION 1..141: note = MG4-23 RuvC-III domain

SEQ ID NO: 2267 - protein, 141 aa, unidentified; identical to SEQ ID NO: 2262
  REGION 1..141: note = Description of Unknown: uncultivated organism
  REGION 1..141: note = MG4-24 RuvC-III domain

SEQ ID NO: 2268 - protein, 141 aa, unidentified; identical to SEQ ID NO: 2262
  REGION 1..141: note = Description of Unknown: uncultivated organism
  REGION 1..141: note = MG4-25 RuvC-III domain

SEQ ID NO: 2269 - protein, 141 aa, unidentified; identical to SEQ ID NO: 2262
  REGION 1..141: note = Description of Unknown: uncultivated organism
  REGION 1..141: note = MG4-26 RuvC-III domain

SEQ ID NO: 2270 - protein, 141 aa, unidentified; identical to SEQ ID NO: 2262
  REGION 1..141: note = Description of Unknown: uncultivated organism
  REGION 1..141: note = MG4-27 RuvC-III domain

SEQ ID NO: 2271 - protein, 141 aa, unidentified; identical to SEQ ID NO: 2262
  REGION 1..141: note = Description of Unknown: uncultivated organism
  REGION 1..141: note = MG4-28 RuvC-III domain

SEQ ID NO: 2272 - protein, 141 aa, unidentified; identical to SEQ ID NO: 2262
  REGION 1..141: note = Description of Unknown: uncultivated organism
  REGION 1..141: note = MG4-29 RuvC-III domain

SEQ ID NO: 2273 - protein, 134 aa, unidentified
  REGION 1..134: note = Description of Unknown: uncultivated organism with predicted taxonomy: Alphaproteobacteria bacterium
  REGION 1..134: note = MG4-30 RuvC-III domain
NDTAYASRLAADYLGILYGGRTDREHRLRVQATAGQATARLRARWNLDSILDDGPTKHGGRASKERTDHRHHAIDAVVIGVTDQGMMERLSDAAKRGQEVGKRFARLDEPWNGFLEQVRKEVGQIVVSHRVSKK

SEQ ID NO: 2274 - protein, 131 aa, unidentified
  REGION 1..131: note = Description of Unknown: uncultivated organism
  REGION 1..131: note = MG4-31 RuvC-III domain
NDTRYLARESANYLGCLFTAEETEGPNPLRVFVVTGGLTNMMRGLWGLNTLAGGPANEKDRIDHRHHAIDALVVALTKQAHTQKLMSAAARAERQHLLRNFQDVAHPWADFAEQAKVAVDKIVVSYRPDRK

SEQ ID NO: 2275 - protein, 133 aa, unidentified
  REGION 1..133: note = Description of Unknown: uncultivated organism
  REGION 1..133: note = MG4-32 RuvC-III domain
QETRYIGRLACDYLGLLYGGQVEAQGTAVSERRILTPTGGLVAWLRRGWGLNSVLSDRDEKERNDHRHHAVDAIVIACADQRAIQRLSESAERMEREGRERPYESVDPPWEGFEQSVQEAIHAVVVSHRQSRK

SEQ ID NO: 2276 - protein, 115 aa, unidentified
  REGION 1..115: note = Description of Unknown: uncultivated organism with predicted taxonomy: Insolitispirillum peregrinum
  REGION 1..115: note = MG4-33 RuvC-III domain
NDTRYLARESANYLGCLFTAEETEGPNPLRVFVVTGGLTNMMRGLWGLNTLAGGPANEKDRIDHRHHAIDALVVALTKQAHTQKLMSAAARAERQHLLRNFQDVAHPWADFAEQA

SEQ ID NO: 2277 - protein, 129 aa, unidentified
  REGION 1..129: note = Description of Unknown: uncultivated organism with predicted taxonomy: Planctomycetes bacterium
  REGION 1..129: note = MG4-34 RuvC-III domain
NDTRYMSRVACEYLGALYGGLSDEYHRRRVQSTTGGLTFELRRGWSLNSILGIGDEKNRADHRHHAVDAIVVALTGPKAIQQASRAAQRAETRGGARLFEEFEDPWPGFRDDVKAIVKSIVVSHRQSRK

SEQ ID NO: 2278 - protein, 133 aa, unidentified; identical to SEQ ID NO: 2275
  REGION 1..133: note = Description of Unknown: uncultivated organism
  REGION 1..133: note = MG4-35 RuvC-III domain

SEQ ID NO: 2279 - protein, 143 aa, unidentified
  REGION 1..143: note = Description of Unknown: uncultivated organism with predicted taxonomy: Proteobacteria
  REGION 1..143: note = MG4-36 RuvC-III domain
NDTRAASVAAARYLALLYGGEIVDGKRKILKITGQVTAYLRDVWGLNGLIPSIHREARGEAADAEAESRTLKSRDDHRHHAVDAVVVALCNQRWIQRLSEANRGALAARRRWFAPVEPPWVGFKEQLKDTLKSMNISFRPDHR

SEQ ID NO: 2280 - protein, 76 aa, unidentified
  REGION 1..76: note = Description of Unknown: uncultivated organism with predicted taxonomy: Solemya velesiana gill symbiont
  REGION 1..76: note = MG4-37 RuvC-III domain
NDTRASAVAAARYLSLLYGGETVDGKRKILKVTGQVTAYLRDVWGLNGLIPSIHREARGEAEDGQAEARPVKSRDD

SEQ ID NO: 2281 - protein, 127 aa, unidentified
  REGION 1..127: note = Description of Unknown: uncultivated organism with predicted taxonomy: Acidobacteria
  REGION 1..127: note = MG4-38 RuvC-III domain
NDTRYAAVVAGRYLSLLYGGEVIDGKRKILKVTGQITAHLRRVWGMNEILGRAGVKSRDDHRQHAIDAALVAVADQRSVQRLSQAAARAELQHRRRLPALEPPFVGFKEGLQCLVQTMNISFRPDHR

SEQ ID NO: 2282 - protein, 89 aa, unidentified
  REGION 1..89: note = Description of Unknown: uncultivated organism with predicted taxonomy: Planctomycetes
  REGION 1..89: note = MG4-39 RuvC-III domain
NDTRYSSRLASEYLSLLYGGRSDAQGNLRVQASTGAVTSLLRDQWGLNAILAELGRQLGVSGLDDDVEKARFDHRHHAVDALVIALTTP

SEQ ID NO: 2283 - protein, 127 aa, unidentified
  REGION 1..127: note = Description of Unknown: uncultivated organism with predicted taxonomy: Thermogutta terrifontis
  REGION 1..127: note = MG4-40 RuvC-III domain
SDTRWISRTAADYLGLLYGGRIDPTGKQRIQTTAGRLTALLRRAWDLDSILGPGTEKNRADHRQHAIDAVVIALTDPAVVHRLSRWASHRPSWVRITPQLDSPWPGFFDQVKHRILSILVSFRQHRR

SEQ ID NO: 2284 - protein, 116 aa, unidentified
  REGION 1..116: note = Description of Unknown: uncultivated organism with predicted taxonomy: Planctomycetes
  REGION 1..116: note = MG4-41 RuvC-III domain
NDTRYSSRLAAEYLSLLYGGRYDAQGNLRVQASTGTVTAQLRGQWGLNAILAELGRQLGVRDLDNDVEKARFDHRHHAVDALVIALTTPAMIKRFSDESQRARQYGRQFRCFFDPP

SEQ ID NO: 2285 - protein, 127 aa, unidentified; identical to SEQ ID NO: 2283
  REGION 1..127: note = Description of Unknown: uncultivated organism with predicted taxonomy: Thermogutta terrifontis
  REGION 1..127: note = MG4-42 RuvC-III domain

SEQ ID NO: 2286 - protein, 127 aa, unidentified; identical to SEQ ID NO: 2283
  REGION 1..127: note = Description of Unknown: uncultivated organism
  REGION 1..127: note = MG4-43 RuvC-III domain

SEQ ID NO: 2287 - protein, 132 aa, unidentified
  REGION 1..132: note = Description of Unknown: uncultivated organism with predicted taxonomy: Proteobacteria
  REGION 1..132: note = MG4-44 RuvC-III domain
NDTRHAAKVAMGYLGLLYPKEERLKRVKAFAGGVTGELRKCWKLNSILGDPDSVEPKKNRADHRHHAIDALVLALATPGMVQYLSKAAAQQLACQRSIRGYQKFMEDPWPHFLEDVRKAVNAIVVSHRVDHR

SEQ ID NO: 2288 - protein, 132 aa, unidentified; identical to SEQ ID NO: 2287
  REGION 1..132: note = Description of Unknown: uncultivated organism
  REGION 1..132: note = MG4-45 RuvC-III domain

SEQ ID NO: 2289 - protein, 127 aa, unidentified; identical to SEQ ID NO: 2283
  REGION 1..127: note = Description of Unknown: uncultivated organism
  REGION 1..127: note = MG4-46 RuvC-III domain

SEQ ID NO: 2290 - protein, 143 aa, unidentified
  REGION 1..143: note = Description of Unknown: uncultivated organism with predicted taxonomy: Proteobacteria
  REGION 1..143: note = MG4-47 RuvC-III domain
NDTRASAVAAARYLSLLYGGETVDGKRKILKVTGQVTAYLRDVWGLNGLIPSIHREARGEAEDRQAEARPVKSRDDHRHHAVDAVVVALCNQGWIQRLSEANRGALAARRRLFAPVEPPWVGFKEQLKDILKSMNISFRPDHR

SEQ ID NO: 2291 - protein, 122 aa, unidentified
  REGION 1..122: note = Description of Unknown: uncultivated organism
  REGION 1..122: note = MG4-48 RuvC-III domain
HATAYAARVAARELARLYPNQERAHRIWVSSGRATACLRDAWQLNQLLGRKDEKNRADHRHHMVDAVVVALTTPKIVQDLTHAAQNAVRARRFQGMEPPSGLHEALRQRLEKVIVSHRVERK

SEQ ID NO: 2292 - protein, 143 aa, unidentified
  REGION 1..143: note = Description of Unknown: uncultivated organism
  REGION 1..143: note = MG4-49 RuvC-III domain
NDTRYSSRLAAEYLSLLYGGRYDAQGNLRVQASTGTVTAQLRGQWGLNAILAELGRQLGVRDLDNDVEKARFDHRHHAVDALVIALTTPAMIKRFSDESQRARQYGRQFRCFFDPPWGTRAQFVADVRNAVLAINVSRRVDRR

SEQ ID NO: 2293 - protein, 92 aa, unidentified
  REGION 1..92: note = Description of Unknown: uncultivated organism with predicted taxonomy: Solemya velesiana gill symbiont
  REGION 1..92: note = MG4-51 RuvC-III domain
NDTRAAAVAAARYLALLFGGETVGGKLKILKITGQVTAHLRDAWDLNGLIPSIHRETRGEAADKEPKTPPLKSRDDHRHHAVDAVVVALCDQ

SEQ ID NO: 2294 - protein, 143 aa, unidentified
  REGION 1..143: note = Description of Unknown: uncultivated organism
  REGION 1..143: note = MG4-52 RuvC-III domain
NDTRASAVAAARYLSLLYGGETVDGKRKILKVTGQVTAYLRDVWGLNGLIPSIHREARGEAEDGQAEARPVKSRDDHRHHAVDAVVVALCNQGWIQRLSEANRGALAARRRLFAPVEPPWVGFKEQLKDILKSMNISFRPDHR

SEQ ID NO: 2295 - protein, 128 aa, unidentified
  REGION 1..128: note = Description of Unknown: uncultivated organism
  REGION 1..128: note = MG4-53 RuvC-III domain
NDTRYAARAAAEYLGRLYGGQSDAGHRRRIQVATGQVTAFLRREWGLNAILGDGDEKSRDDHRHHAVDALCVALTDAGIVQALAAAAARAPAEGRRCFARLAPPWPSFLADARRAVLEITVSHRVRRK

SEQ ID NO: 2296 - protein, 127 aa, unidentified; identical to SEQ ID NO: 2281
  REGION 1..127: note = Description of Unknown: uncultivated organism
  REGION 1..127: note = MG4-54 RuvC-III domain

SEQ ID NO: 2297 - protein, 132 aa, unidentified
  REGION 1..132: note = Description of Unknown: uncultivated organism with predicted taxonomy: Flavobacterium hercynium
  REGION 1..132: note = MG4-55 RuvC-III domain
NDTRHAAKVAMGYLGLLYPKEERLKRVKAFAGGVTGELRKCWKLNSILGDPDSVEPKKNRADHRHHAIDALVLALATPGMVQYLSKAAEQQLACQRSIRGYQKFMEDPWPHFLEDVRKAVNAIVVSHRVDHR

SEQ ID NO: 2298 - protein, 143 aa, unidentified; identical to SEQ ID NO: 2279
  REGION 1..143: note = Description of Unknown: uncultivated organism with predicted taxonomy: Pseudoxanthobacter soli
  REGION 1..143: note = MG4-56 RuvC-III domain

SEQ ID NO: 2299 - protein, 128 aa, unidentified
  REGION 1..128: note = Description of Unknown: uncultivated organism with predicted taxonomy: candidate division Zixibacteria bacterium CG_4_9_14_3_um_filter_46_8
  REGION 1..128: note = MG4-57 RuvC-III domain
NDTRYASVLAAKYLGALYGGAIDAEHTRRIQVSAGMVTAYLRNEYGLNPILGDGGEKSRDDHRHHAIDAICVALTDAATVKMLSDAASRALSERRRQFGHIDPPWPSFLADVRKHIDDLIVSHAVSRK

SEQ ID NO: 2300 - protein, 143 aa, unidentified; identical to SEQ ID NO: 2294
  REGION 1..143: note = Description of Unknown: uncultivated organism
  REGION 1..143: note = MG4-58 RuvC-III domain

SEQ ID NO: 2301 - protein, 143 aa, unidentified; identical to SEQ ID NO: 2294
  REGION 1..143: note = Description of Unknown: uncultivated organism with predicted taxonomy: Proteobacteria
  REGION 1..143: note = MG4-60 RuvC-III domain

SEQ ID NO: 2302 - protein, 127 aa, unidentified; identical to SEQ ID NO: 2283
  REGION 1..127: note = Description of Unknown: uncultivated organism with predicted taxonomy: Thermogutta terrifontis
  REGION 1..127: note = MG4-61 RuvC-III domain

SEQ ID NO: 2303 - protein, 124 aa, unidentified
  REGION 1..124: note = Description of Unknown: uncultivated organism
  REGION 1..124: note = MG4-62 RuvC-III domain
QDTRYITTLARDFVSLLYGKDASAIVTPSGPLTAWLRRGWHLNSVLGFTDEKEREDHRHHAVDAIVIALATRSNIKRLSDAAERVEREGREKAFGTVDPPWDGFEHEVRSIIDGVVVSHRQSQR

SEQ ID NO: 2304 - protein, 132 aa, unidentified
  REGION 1..132: note = Description of Unknown: uncultivated organism with predicted taxonomy: Planctomyces sp. SH-PL14
  REGION 1..132: note = MG4-63 RuvC-III domain
SETRYIARQAADYLGLLYGGRIEQRAGDEVGRRRVLVTPGRATALLRNGWQLASVTGGLKNRQDHRHHAIDALIVGLTQDGFLKQLSEAAARADELQLTRLTTEMDSPWETFLDDVGKGYERIHVSTRPTRK

SEQ ID NO: 2305 - protein, 124 aa, unidentified; identical to SEQ ID NO: 2303
  REGION 1..124: note = Description of Unknown: uncultivated organism
  REGION 1..124: note = MG4-64 RuvC-III domain

SEQ ID NO: 2306 - protein, 128 aa, unidentified
  REGION 1..128: note = Description of Unknown: uncultivated organism
  REGION 1..128: note = MG4-65 RuvC-III domain
QDTRYACRLAADYLGRLYGGRVDAQGKMRIEVRPGGLTAHVRNELMLHAILDDGGAKTRADHRHHAVDALAVGLTSQSMVQQLQTAAGRALQAGRRLFAPVPEPWTGFLEDARRSIGQIIVSRRPDRK

SEQ ID NO: 2307 - protein, 143 aa, unidentified
  REGION 1..143: note = Description of Unknown: uncultivated organism
  REGION 1..143: note = MG4-66 RuvC-III domain
NDTRYSSRLAAEYLALLYGGRSDAQGNLRVRAITGAVTAQLRDQWGLNAVLAELGRQLGVRDLDDNVEKARFDHRHHAVDALVIALTTPGMVKRFSDESQRARQYGRQLRCFFDPPWGTRTEFVADVRNAVLAINVSRRLDRR

SEQ ID NO: 2308 - protein, 128 aa, unidentified
  REGION 1..128: note = Description of Unknown: uncultivated organism with predicted taxonomy: Proteobacteria
  REGION 1..128: note = MG4-67 RuvC-III domain
NDTRYASRLAAEYVGLLYGGRADAEHRQRVYVCTGGTTAFLRNEWKLNTILGDGGPKTRDDHRHHAVDALVIALTGPATVKMLADAADNPWQHRRRLFAPIQEPWVGFLDQAREAILRINVSHRVNRR

SEQ ID NO: 2309 - protein, 127 aa, unidentified
  REGION 1..127: note = Description of Unknown: uncultivated organism with predicted taxonomy: Thermogutta terrifontis
  REGION 1..127: note = MG4-68 RuvC-III domain
SDTRWITTAAADYLGYLYGGRIDSEGRQRVFTVTGPLTALIRRGWNLDGILGGPEKNRFDYRQHAIDAIVIALIDQAIVQQISLLSSRLWGTDRPTAVQLPEPWPSFYHDAKNAILNIVVSHRISRR

SEQ ID NO: 2310 - protein, 143 aa, unidentified
  REGION 1..143: note = Description of Unknown: uncultivated organism with predicted taxonomy: Planctomycetes bacterium
  REGION 1..143: note = MG4-70 RuvC-III domain
NDTRAAAVAAARYLALLFGGETVGGKLKILKITGQVTAHLRDAWDLNGLIPSIHRETRGEAADKEPKTPPLKSRDDHRHHAVDAVVVALCDQGSIHRLSEASKTAVAARRRLLAPMAPPWVGFREQLKDILKSMNISFRPDHR

SEQ ID NO: 2311 - protein, 140 aa, unidentified
  REGION 1..140: note = Description of Unknown: uncultivated organism
  REGION 1..140: note = MG4-71 RuvC-III domain
TDTRYASRLAADYLGLLYGGTVDAAGRRRVQTSSGTATWYLRSEWDMNAVIPGLSGSPTGSASGTFIEKVRTDHRHHAIDAVAIALTSARVVKMLADAARNPEQHRRRRFAPVPPPWPNFKDEVSAAAEKIIVSHRVDRR

SEQ ID NO: 2312 - protein, 135 aa, unidentified
  REGION 1..135: note = Description of Unknown: uncultivated organism with predicted taxonomy: Acidobacteria
  REGION 1..135: note = MG4-72 RuvC-III domain
NDTAYATSLAAKYLGLLYGGVNDADGRKRVQATSGQATAYFRSLWKLNSILNDGPTSDGGAVPKSRDDHRHHAVDAVVIGLTDAAMIKRLSDAAQRAQLEHRRRFASLEAPWPNFVDSVRTEIDRIIVSHRVSKK

SEQ ID NO: 2313 - protein, 85 aa, unidentified
  REGION 1..85: note = Description of Unknown: uncultivated organism
  REGION 1..85: note = MG4-73 RuvC-III domain
TDTRYASRLAADYLGLLYGGTVDAAGRRRVQTSSGTATWYLRSEWDMNAVIPGLSGSPTGSASGTFIEKVRTDHRHHAIDAVAIA

SEQ ID NO: 2314 - protein, 135 aa, unidentified
  REGION 1..135: note = Description of Unknown: uncultivated organism with predicted taxonomy: Acidobacteria
  REGION 1..135: note = MG4-74 RuvC-III domain
NDTAYATSLAAKYLGLLYGGVNDADGRKRVQATSGQATAYFRSLWKLNSILNDGPTSDGGAVPKSRDDHRHHAVDAVVIGLTDAAMIKRLSDAAQRAQLEHRRRFASLEAPCPNFVDSVRTEIDRIIVSHRVSKK

SEQ ID NO: 2315 - protein, 143 aa, unidentified; identical to SEQ ID NO: 2310
  REGION 1..143: note = Description of Unknown: uncultivated organism with predicted taxonomy: Proteobacteria
  REGION 1..143: note = MG4-76 RuvC-III domain

SEQ ID NO: 2316 - protein, 142 aa, unidentified
  REGION 1..142: note = Description of Unknown: uncultivated organism
  REGION 1..142: note = MG4-77 RuvC-III domain
NDTRAAAVAAARYLALLYGGETVDGKRKILKPTGQVTAYLREVWGLNGLIPSIHREAAGAEESDDGRTIRKSRDDHRHHAIDAVAVALCDQGTIQMLSEANRGAAAARRRRFAPVPPPWVGFKDELRQVLRSMNISFRPDHR

SEQ ID NO: 2317 - protein, 122 aa, unidentified
  REGION 1..122: note = Description of Unknown: uncultivated organism
  REGION 1..122: note = MG4-78 RuvC-III domain
QATAHAARLAGRLLGRWYPAEERLSRIQITNGAVTSWLRVAWGLNQLLGVADEKNRSDHRHHLVDATVIALTTAATVKALTEAARRSARPRRFVDMPVPPGLVDSLRQQLETVIVSHRVDRR

SEQ ID NO: 2318 - protein, 122 aa, unidentified; identical to SEQ ID NO: 2317
  REGION 1..122: note = Description of Unknown: uncultivated organism
  REGION 1..122: note = MG4-79 RuvC-III domain

SEQ ID NO: 2319 - protein, 132 aa, unidentified
  REGION 1..132: note = Description of Unknown: uncultivated organism with predicted taxonomy: Planctomycetes
  REGION 1..132: note = MG4-80 RuvC-III domain
NDTRHSTKLAAQYLGLLYGGPYDAQGHRRLVAVSGSITAHLRRAWRLGVHPGPDQAGPGKNRDDHRHHALDAIVVALTSHATIQKLSTFAARSQPGQQRLITGDLQEPWPSFQRDVRQALMAIYVSFRAEHK

SEQ ID NO: 2320 - protein, 127 aa, unidentified
  REGION 1..127: note = Description of Unknown: uncultivated organism with predicted taxonomy: Rhodobacteraceae
  REGION 1..127: note = MG4-81 RuvC-III domain
NDTRAAAVAAARYLALLYGGETVDGKRKILKPTGQVTAYLREVWGLNGLIPSIHREAAGAEESDDGRTIRKSRDDHRHHAIDAVAVALCDQGTIQMLSEANRGAAAARRRRFAPVPPPWVGFKDELR

SEQ ID NO: 2321 - protein, 135 aa, unidentified
  REGION 1..135: note = Description of Unknown: uncultivated organism
  REGION 1..135: note = MG4-82 RuvC-III domain
VDTRYMSRAAAEYVGLLYGGAVDSQGTRRVQVSPGGVTADLRRLWGLNRVLPRDPGDDERPGKKSRSDHRHHALDAAVIALTSPAMVQQLSRCAQDALLIGSRRFVALELPFPSLIDDLKKAIDEIVVSYRVKRK

SEQ ID NO: 2322 - protein, 133 aa, unidentified
  REGION 1..133: note = Description of Unknown: uncultivated organism
  REGION 1..133: note = MG4-83 RuvC-III domain
NDTRYISRLAVQYAGLLYGAGADGVDPSGRRRVQAARGQITAHLRDVYELNSLLGDGGEKYRGDHRHHAVDALCVALTTPRAVKQLSDAAAAGEDRRRAWYDTRLITDPWPGFLDDARNAVNAIVVSHCPSRK

SEQ ID NO: 2323 - protein, 126 aa, unidentified
  REGION 1..126: note = Description of Unknown: uncultivated organism
  REGION 1..126: note = MG4-84 RuvC-III domain
NDTRYAAVEAMDFLKLLYGEEAQRKVIVQAARGGTTRFLREEFGLNQILGDGGEKSRDDHRHHAVDAICVALTDPATVKMLSDAAARALSEGRRRFASVPFPWGRFLDDVRASIQGINVSFRVSRK

SEQ ID NO: 2324 - protein, 122 aa, unidentified; identical to SEQ ID NO: 2317
  REGION 1..122: note = Description of Unknown: uncultivated organism
  REGION 1..122: note = MG4-85 RuvC-III domain

SEQ ID NO: 2325 - protein, 122 aa, unidentified; identical to SEQ ID NO: 2317
  REGION 1..122: note = Description of Unknown: uncultivated organism
  REGION 1..122: note = MG4-86 RuvC-III domain

SEQ ID NO: 2326 - protein, 134 aa, unidentified
  REGION 1..134: note = Description of Unknown: uncultivated organism
  REGION 1..134: note = MG4-87 RuvC-III domain
SDTRYIARAVSEYLGVLYGGRTDADGKQRIVACSGGLTSWLRREWGLDALLSPTGDDAEAEKNRIDHRHHAVDALVVALTTPRTQAMLQAAAARQEQEGRFRLFGRIEPLWSAFPREAKAAVEAIVVSHRQQRA

SEQ ID NO: 2327 - protein, 121 aa, unidentified
  REGION 1..121: note = Description of Unknown: uncultivated organism with predicted taxonomy: Planctomycetes bacterium
  REGION 1..121: note = MG4-88 RuvC-III domain
NDTRHNSKVAAEYLGLLYGGLWDASGKRRIEAITGGITALLRNAWRLRKDRADHRHHALDAIVLALVDPAQVKSLQESAERASEGSARFRLGELDEPWPGFRDAVRSALEEINVSIRADRK

SEQ ID NO: 2328 - protein, 61 aa, unidentified
  REGION 1..61: note = Description of Unknown: uncultivated organism with predicted taxonomy: Planctomicrobium piriforme
  REGION 1..61: note = MG4-89 RuvC-III domain
AETRKIGAASAGFLGLLYGGEIDAAHKRRVFVTTGGLTAHLRREWHLNGILGTEGEKARDD

SEQ ID NO: 2329 - protein, 124 aa, unidentified; identical to SEQ ID NO: 2303
  REGION 1..124: note = Description of Unknown: uncultivated organism
  REGION 1..124: note = MG4-90 RuvC-III domain

SEQ ID NO: 2330 - protein, 130 aa, unidentified
  REGION 1..130: note = Description of Unknown: uncultivated organism with predicted taxonomy: Deltaproteobacteria bacterium
  REGION 1..130: note = MG4-91 RuvC-III domain
RETSYFARLAQEYVGLLYGGIVDAEGTRRVIASSGGATHWLRRELGLDSILSDDEEKNRSDHRHHAVDAITTALLDSRTIQLLARAAQEAEERGSRRLFLSLQEEPWQGCRRDVEEAVARINVSHRQRRR

SEQ ID NO: 2331 - protein, 127 aa, unidentified
  REGION 1..127: note = Description of Unknown: uncultivated organism with predicted taxonomy: Alphaproteobacteria
  REGION 1..127: note = MG4-92 RuvC-III domain
TDTAYAARLARDYLGVLYGAESLRRIQVLPGRLTSLLRGAWQLNRILGDPERNTKSRADHRHHAIDALVAAVTDRSMVQKICTRAKQLEDLKQVRLLPEIDPPWAGLLNDTREALARTIPSSRVDRK

SEQ ID NO: 2332 - protein, 127 aa, unidentified
  REGION 1..127: note = Description of Unknown: uncultivated organism with predicted taxonomy: Proteobacteria
  REGION 1..127: note = MG4-93 RuvC-III domain
TDTAYAARLARDYLGVLYGAESLRRIQVLPGRLTSLLRGAWQLNRILGDPERNTKSRADHRHHAIDALVAAVTDRSMVQKICTRAKQLEELKQARLLPEIDPPWAGLLNDTREALARTIPSSRADRK

SEQ ID NO: 2333 - protein, 130 aa, unidentified
  REGION 1..130: note = Description of Unknown: uncultivated organism with predicted taxonomy: Planctomycetales bacterium 4484_113
  REGION 1..130: note = MG4-94 RuvC-III domain
NDTRYGSKLAKKYLGLLYGGVDNDGIDASRKRRVQATIGAVTAKLRDAMGLNAVLGKGAKSRDDHRHHAVDAVVIALTSPGTIKGISDASQHPALTDVRKIKLAEPWQGFLAEVRQAVDRIVVSHRVDRR

SEQ ID NO: 2334 - protein, 126 aa, unidentified
  REGION 1..126: note = Description of Unknown: uncultivated organism with predicted taxonomy: Planctomycetes bacterium
  REGION 1..126: note = MG4-95 RuvC-III domain
NDTRYASKLAKKYLGLLYGKDAAKHVQAGRGGVTKFIRDELCLNAILGDGGDEKKRTDHRHHAVDAIAIALTSPGVVKMLSDAARYNEEKGLRRRFGNIKSPWPGFFEDVRKAVENIVASHRVSRR

SEQ ID NO: 2335 - protein, 130 aa, unidentified; identical to SEQ ID NO: 2333
  REGION 1..130: note = Description of Unknown: uncultivated organism with predicted taxonomy: Planctomycetales bacterium 4484_113
  REGION 1..130: note = MG4-96 RuvC-III domain

SEQ ID NO: 2336 - protein, 122 aa, unidentified
  REGION 1..122: note = Description of Unknown: uncultivated organism with predicted taxonomy: Planctomycetes bacterium
  REGION 1..122: note = MG4-97 RuvC-III domain
NATAYAARYAARHLALLYPQEERRKRVQVSAGRTTAYLRRAWNLNRLIGLADEKNRADYRHHAVDAVVIALTTPKLTGELSKAAARSVRPGTFQGLTPPPGLTRQLEEILDQMVVSHRVDRR

SEQ ID NO: 2337 - protein, 132 aa, unidentified
  REGION 1..132: note = Description of Unknown: uncultivated organism
  REGION 1..132: note = MG4-98 RuvC-III domain
NDTAWASKWAKKYLGLLYGDIKSKGIDSAGKLRVQAVSGRLTSELRRIWGLNNILGDGNTKSRDDHRHHAIDAIVIALSNPAVVKQLAEASKRAVNIGDKLLKDFPQPWEGFHNDVKRVIDGIIASHRVSKR

SEQ ID NO: 2338 - protein, 126 aa, unidentified; identical to SEQ ID NO: 2334
  REGION 1..126: note = Description of Unknown: uncultivated organism with predicted taxonomy: Planctomycetes bacterium
  REGION 1..126: note = MG4-99 RuvC-III domain

SEQ ID NO: 2339 - protein, 126 aa, unidentified; identical to SEQ ID NO: 2334
  REGION 1..126: note = Description of Unknown: uncultivated organism with predicted taxonomy: Planctomycetes bacterium
  REGION 1..126: note = MG4-100 RuvC-III domain

SEQ ID NO: 2340 - protein, 132 aa, unidentified; identical to SEQ ID NO: 2337
  REGION 1..132: note = Description of Unknown: uncultivated organism
  REGION 1..132: note = MG4-101 RuvC-III domain

SEQ ID NO: 2341 - protein, 134 aa, unidentified
  REGION 1..134: note = Description of Unknown: uncultivated organism
  REGION 1..134: note = MG4-102 RuvC-III domain
NDTRYAAKEAAAYLGMLYGGSVTSIDGRKRVQVLSGGLTYKVRSAYNLNGILNDGDVKTRNDHRHHAVDAIAIGMTSPGMVKKLTEIAKELENRRDYIRFGTGKGILPDKWNTFDEDVRRVIGKIKVSHKIPRK

SEQ ID NO: 2342 - protein, 134 aa, unidentified; identical to SEQ ID NO: 2341
  REGION 1..134: note = Description of Unknown: uncultivated organism
  REGION 1..134: note = MG4-103 RuvC-III domain

SEQ ID NO: 2343 - protein, 125 aa, unidentified
  REGION 1..125: note = Description of Unknown: uncultivated organism with predicted taxonomy: Planctomycetes bacterium
  REGION 1..125: note = MG4-104 RuvC-III domain
NDTRYASKLATEYLALLYGGRWDRNGVLRLQCSAGGCTAVVRRAWGGNYLLGEGEKERGDFRHHAIDALTVAVVSPAIVKAVAEMPKETVRKAIEEKQPLIVNSLYTQARAKLDAAGISHHTINR

SEQ ID NO: 2344 - protein, 125 aa, unidentified; identical to SEQ ID NO: 2343
  REGION 1..125: note = Description of Unknown: uncultivated organism
  REGION 1..125: note = MG4-105 RuvC-III domain

SEQ ID NO: 2345 - protein, 125 aa, unidentified
  REGION 1..125: note = Description of Unknown: uncultivated organism
  REGION 1..125: note = MG4-106 RuvC-III domain
NDTRYASKLATEYLALLYGGMNDRNRVQRIQCSAGGCTAVVRRAWGGNYLLGEGEKVRGDHRHHAIDALTIAVTSPAIVKLIAGLKGEDRRRAIEEKRPLVVTDLYTQAKAKLDSAGISHHTVNK

SEQ ID NO: 2346 - protein, 125 aa, unidentified; identical to SEQ ID NO: 2345
  REGION 1..125: note = Description of Unknown: uncultivated organism
  REGION 1..125: note = MG4-107 RuvC-III domain

SEQ ID NO: 2347 - protein, 125 aa, unidentified; identical to SEQ ID NO: 2343
  REGION 1..125: note = Description of Unknown: uncultivated organism
  REGION 1..125: note = MG4-108 RuvC-III domain

SEQ ID NO: 2348 - protein, 125 aa, unidentified; identical to SEQ ID NO: 2343
  REGION 1..125: note = Description of Unknown: uncultivated organism with predicted taxonomy: Planctomycetes bacterium
  REGION 1..125: note = MG4-109 RuvC-III domain

SEQ ID NO: 2349 - protein, 125 aa, unidentified; identical to SEQ ID NO: 2343
  REGION 1..125: note = Description of Unknown: uncultivated organism
  REGION 1..125: note = MG4-110 RuvC-III domain

SEQ ID NO: 2350 - protein, 125 aa, unidentified
  REGION 1..125: note = Description of Unknown: uncultivated organism with predicted taxonomy: Planctomycetes bacterium
  REGION 1..125: note = MG4-111 RuvC-III domain
NDTRYASKLATEYLALLYGGRNDRNGVQRIQCSAGGCTAVVRRAWGGNYLLGEGEKVRGDHRHHAIDALTIAVTSPAIVKLIAGVKGEDRRRAIEEKRPLVVTDLYTQAKAKLDSAGISHHTVNK

SEQ ID NO: 2351 - protein, 125 aa, unidentified; identical to SEQ ID NO: 2343
  REGION 1..125: note = Description of Unknown: uncultivated organism
  REGION 1..125: note = MG4-112 RuvC-III domain

SEQ ID NO: 2352 - protein, 125 aa, unidentified; identical to SEQ ID NO: 2345
  REGION 1..125: note = Description of Unknown: uncultivated organism
  REGION 1..125: note = MG4-113 RuvC-III domain

SEQ ID NO: 2353 - protein, 125 aa, unidentified; identical to SEQ ID NO: 2343
  REGION 1..125: note = Description of Unknown: uncultivated organism
  REGION 1..125: note = MG4-114 RuvC-III domain

SEQ ID NO: 2354 - protein, 125 aa, unidentified; identical to SEQ ID NO: 2343
  REGION 1..125: note = Description of Unknown: uncultivated organism
  REGION 1..125: note = MG4-115 RuvC-III domain

SEQ ID NO: 2355 - protein, 141 aa, unidentified
  REGION 1..141: note = Description of Unknown: uncultivated organism
  REGION 1..141: note = MG4-116 RuvC-III domain
NDTRYSSRLACDLIAKLYGGRVIETETGTRQVVFASSGMVTATLRKGLGLEAVLCEASGSSNGETRGKSRTDHRHHAIDALTIALTRQSMIQTMSRTASLEPNWAITSRSLRTIPSPWSNFIDSVRPHVQELLVSHRPEHR

SEQ ID NO: 2356 - protein, 140 aa, unidentified
  REGION 1..140: note = Description of Unknown: uncultivated organism with predicted taxonomy: Acidobacteriales bacterium 59-55
  REGION 1..140: note = MG4-117 RuvC-III domain
NDTRYASVLASRFLGALYGGRDLVDAEKVRQVIFASSGAVTATLRSSWGLEAILREIVPTEPGESRGKPRTDHRHHAIDAITIALTRPKVIQSMALAASLEPWQRDSRAWRKIESPWRDFVLSIRPHIEQMLVSHRPEHK

SEQ ID NO: 2357 - protein, 141 aa, unidentified; identical to SEQ ID NO: 2355
  REGION 1..141: note = Description of Unknown: uncultivated organism
  REGION 1..141: note = MG4-118 RuvC-III domain

SEQ ID NO: 2358 - protein, 140 aa, unidentified; identical to SEQ ID NO: 2356
  REGION 1..140: note = Description of Unknown: uncultivated organism
  REGION 1..140: note = MG4-119 RuvC-III domain

SEQ ID NO: 2359 - protein, 141 aa, unidentified; identical to SEQ ID NO: 2355
  REGION 1..141: note = Description of Unknown: uncultivated organism
  REGION 1..141: note = MG4-120 RuvC-III domain

SEQ ID NO: 2360 - protein, 140 aa, unidentified
  REGION 1..140: note = Description of Unknown: uncultivated organism with predicted taxonomy: Acidobacteriales bacterium 59-55
  REGION 1..140: note = MG4-121 RuvC-III domain
NDTRYASVLASRFLGALYGGRDLVDAEKVRQVIFASSGAVTATLRSSWGLEAILREIVPTEPGEPRGKPRTDHRHHAIDAITIALTRPKVIQSMALAASLEPWQRDSRAWRKIESPWRDFVLSIRPHIEQMLVSHRPEHK

SEQ ID NO: 2361 - protein, 140 aa, unidentified
  REGION 1..140: note = Description of Unknown: uncultivated organism with predicted taxonomy: uncultured bacterium
  REGION 1..140: note = MG4-122 RuvC-III domain
NDTRYASVLAARFLGSLYGGRDVVDGDNARQVIFASSGAVTASLRSSWGLEAILHEIVPAESGESRGKPRTDHRHHAIDAITIALTRPKVIQSMARTASLEPWQIDSRAWRKIELPWRDFVPSIRPHIEQMLVSHRPEHK

SEQ ID NO: 2362 - protein, 141 aa, unidentified; identical to SEQ ID NO: 2355
  REGION 1..141: note = Description of Unknown: uncultivated organism
  REGION 1..141: note = MG4-123 RuvC-III domain

SEQ ID NO: 2363 - protein, 141 aa, unidentified; identical to SEQ ID NO: 2355
  REGION 1..141: note = Description of Unknown: uncultivated organism
  REGION 1..141: note = MG4-124 RuvC-III domain

SEQ ID NO: 2364 - protein, 141 aa, unidentified; identical to SEQ ID NO: 2355
  REGION 1..141: note = Description of Unknown: uncultivated organism
  REGION 1..141: note = MG4-125 RuvC-III domain

SEQ ID NO: 2365 - protein, 141 aa, unidentified
  REGION 1..141: note = Description of Unknown: uncultivated organism
  REGION 1..141: note = MG4-126 RuvC-III domain
NDTRYACKLACELVGTLYGGRDEKTDTDSRQVVFASSGMVTATLRKSWGLEAIMRETAPSANGQNHGKPRTDHRHHAIDAITIALSRPKMIATLSRNNAQDSYRPSNGHTAPRIQSPWEDFVDSIRPHFEKMLVSHRPDHR

SEQ ID NO: 2366 - protein, 140 aa, unidentified; identical to SEQ ID NO: 2361
  REGION 1..140: note = Description of Unknown: uncultivated organism
  REGION 1..140: note = MG4-127 RuvC-III domain

SEQ ID NO: 2367 - protein, 140 aa, unidentified; identical to SEQ ID NO: 2356
  REGION 1..140: note = Description of Unknown: uncultivated organism with predicted taxonomy: Acidobacteriales bacterium 59-55
  REGION 1..140: note = MG4-128 RuvC-III domain

SEQ ID NO: 2368 - protein, 142 aa, unidentified
  REGION 1..142: note = Description of Unknown: uncultivated organism
  REGION 1..142: note = MG4-129 RuvC-III domain
NDTRYTSLLAARLLSTLYGGRDVAENGGKRQIIFASTGAVTATLRRNWGFEQILRNIIPPEPSESTGKPRTDHRHHAIDAIVIALTRNDVIQSMARASALEPWQPGTRSWRHVPQPWCTPDFFRSVEEQVREMLTSHRPEHK

SEQ ID NO: 2369 - protein, 132 aa, unidentified
  REGION 1..132: note = Description of Unknown: uncultivated organism with predicted taxonomy: Planctomycetes
  REGION 1..132: note = MG4-130 RuvC-III domain
QDTRYMSRLATEYLGLLYGGTIDADHTRRVQVSAGRVTAYLRDEWGLNAILADGGEEEKNRDDHRHHAVDASVIALTNAGTVELLSHSAEVAAERGRRLFVREEIQQPWPTFLDDVRRAIEAINISYRVNRR

SEQ ID NO: 2370 - protein, 140 aa, unidentified; identical to SEQ ID NO: 2356
  REGION 1..140: note = Description of Unknown: uncultivated organism
  REGION 1..140: note = MG4-131 RuvC-III domain

SEQ ID NO: 2371 - protein, 128 aa, unidentified
  REGION 1..128: note = Description of Unknown: uncultivated organism with predicted taxonomy: Planctomycetes bacterium
  REGION 1..128: note = MG4-132 RuvC-III domain
NDTRYTSLLAARLLSTLYGGRDVTENGKNRQVIFASTGAVTATLRRNWGFEQILRGIIPAEPGESSGKPRTDHRHHAIDAIVIALTRNNVIQAMARASALEAWQSGTRSWRHVPQPWRTPDFFRSVEQ

SEQ ID NO: 2372 - protein, 99 aa, unidentified
  REGION 1..99: note = Description of Unknown: uncultivated organism
  REGION 1..99: note = MG4-133 RuvC-III domain
NDTRYACKLACELVGTLYGGRDEKTDTDSRQVVFASSGMVTATLRKSWGLEAIMRETAPSANGQNHGKPRTDHRHHAIDAITIALSRPKMIATLSRNNA

SEQ ID NO: 2373 - protein, 140 aa, unidentified; identical to SEQ ID NO: 2356
  REGION 1..140: note = Description of Unknown: uncultivated organism with predicted taxonomy: Acidobacteriales bacterium 59-55
  REGION 1..140: note = MG4-134 RuvC-III domain

SEQ ID NO: 2374 - protein, 140 aa, unidentified; identical to SEQ ID NO: 2356
  REGION 1..140: note = Description of Unknown: uncultivated organism with predicted taxonomy: Acidobacteriales bacterium 59-55
  REGION 1..140: note = MG4-135 RuvC-III domain

SEQ ID NO: 2375 - protein, 140 aa, unidentified; identical to SEQ ID NO: 2356
  REGION 1..140: note = Description of Unknown: uncultivated organism with predicted taxonomy: Acidobacteriales bacterium 59-55
  REGION 1..140: note = MG4-136 RuvC-III domain

SEQ ID NO: 2376 - protein, 142 aa, unidentified
  REGION 1..142: note = Description of Unknown: uncultivated organism with predicted taxonomy: Acidobacteriales bacterium 59-55
  REGION 1..142: note = MG4-137 RuvC-III domain
NDTRYTSLLAARLLSTLYGGRDVTENGKNRQVIFASTGAVTATLRRNWGFEQILRGIIPAEPGESSGKPRTDHRHHAIDAIVIALTRNNVIQAMARASALEAWQSGTRSWRHVPQPWRTPDFFRSVEQQVAEVLTSHRPEHK

SEQ ID NO: 2377 - protein, 142 aa, unidentified
  REGION 1..142: note = Description of Unknown: uncultivated organism with predicted taxonomy: uncultured bacterium
  REGION 1..142: note = MG4-138 RuvC-III domain
NDTRYASKLACELVGTLYGGRDVPLKDGKSRQVVFASSGMVTSTLRKGWGLEAILREAAPSANGQNRGKPRTDHRHHAIDAITIALSRPKMIAALSRNNAQDPYWPNNGRTTPKIQSPWKDFVDSIRPHFEQMLVSHRPEHR

SEQ ID NO: 2378 - protein, 135 aa, unidentified
  REGION 1..135: note = Description of Unknown: uncultivated organism
  REGION 1..135: note = MG4-139 RuvC-III domain
NCIRYASQMACKLMGTLYGGRDMETAGRSRQIIFASTGMLTGTLRRAWGLEAILREETPSSIEGKPRNDYRHHAIDAIAVALSHPKLIAALSRSDDSYAWATRALLKIESPWKNFIDSIRPHFDQMLISHRPEHR

SEQ ID NO: 2379 - protein, 172 aa, unidentified
  REGION 1..172: note = Description of Unknown: uncultivated organism with predicted taxonomy: Planctomycetes bacterium
  REGION 1..172: note = MG4-140 RuvC-III domain
NDTRYTSKLAGRLLMSLYGGRDIVPAETLDELDEFKDRTGRRAICVSSGMVTSLLRDAWHLNLSGVIGDDAFKCPKKSEDDEESGKRRKGQSNKKDRCDHRHHALDAVVIALTSEKVIREINMLASRLYRERQTPLKYRDLKSIQNPWHNFMDDHFRDIFRRIVVSRRPEHK

SEQ ID NO: 2380 - protein, 141 aa, unidentified; identical to SEQ ID NO: 2365
  REGION 1..141: note = Description of Unknown: uncultivated organism
  REGION 1..141: note = MG4-141 RuvC-III domain

SEQ ID NO: 2381 - protein, 62 aa, unidentified
  REGION 1..62: note = Description of Unknown: uncultivated organism with predicted taxonomy: Polaribacter sp. ALD11
  REGION 1..62: note = MG4-142 RuvC-III domain
NDTRYTSLLAARLLSTLYGGRDVAENGGKRQIIFASTGAVTATLRRNWGFEQILRNIIPPEP

SEQ ID NO: 2382 - protein, 140 aa, unidentified; identical to SEQ ID NO: 2356
  REGION 1..140: note = Description of Unknown: uncultivated organism
  REGION 1..140: note = MG4-143 RuvC-III domain

SEQ ID NO: 2383 - protein, 140 aa, unidentified; identical to SEQ ID NO: 2361
  REGION 1..140: note = Description of Unknown: uncultivated organism
  REGION 1..140: note = MG4-144 RuvC-III domain

SEQ ID NO: 2384 - protein, 66 aa, unidentified
  REGION 1..66: note = Description of Unknown: uncultivated organism
  REGION 1..66: note = MG4-145 RuvC-III domain
NDTRYACKLACELVGTLYGGRDEKTDTDSRQVVFASSGMVTATLRKSWGLEAIMRETAPSANGQNH

SEQ ID NO: 2385 - protein, 140 aa, unidentified; identical to SEQ ID NO: 2356
  REGION 1..140: note = Description of Unknown: uncultivated organism with predicted taxonomy: Acidobacteriales bacterium 59-55
  REGION 1..140: note = MG4-146 RuvC-III domain

SEQ ID NO: 2386 - protein, 141 aa, unidentified; identical to SEQ ID NO: 2365
  REGION 1..141: note = Description of Unknown: uncultivated organism
  REGION 1..141: note = MG4-147 RuvC-III domain

SEQ ID NO: 2387 - protein, 140 aa, unidentified; identical to SEQ ID NO: 2356
  REGION 1..140: note = Description of Unknown: uncultivated organism
  REGION 1..140: note = MG4-148 RuvC-III domain

SEQ ID NO: 2388 - protein, 140 aa, unidentified; identical to SEQ ID NO: 2356
  REGION 1..140: note = Description of Unknown: uncultivated organism
  REGION 1..140: note = MG4-149 RuvC-III domain

SEQ ID NO: 2389 - protein, 142 aa, unidentified
  REGION 1..142: note = Description of Unknown: uncultivated organism with predicted taxonomy: Polaribacter sp. ALD11
  REGION 1..142: note = MG4-150 RuvC-III domain
NDTRYTSLLAARLLSTLYGGRDLAENGRKRQIIFASSGAVTATLRRNWGFEQILRNIIPPEPNESSGKPRTDHRHHAIDAIVIALTRNDVIQAMARASALEPWQPGTRSWRHVPQPWHTPNFFRSVEEQVREMLTSHRPEHK

SEQ ID NO: 2390 - protein, 142 aa, unidentified; identical to SEQ ID NO: 2376
  REGION 1..142: note = Description of Unknown: uncultivated organism with predicted taxonomy: Acidobacteriales
  REGION 1..142: note = MG4-151 RuvC-III domain

SEQ ID NO: 2391 - protein, 141 aa, unidentified; identical to SEQ ID NO: 2365
  REGION 1..141: note = Description of Unknown: uncultivated organism
  REGION 1..141: note = MG4-152 RuvC-III domain

SEQ ID NO: 2392 - protein, 140 aa, unidentified; identical to SEQ ID NO: 2356
  REGION 1..140: note = Description of Unknown: uncultivated organism
  REGION 1..140: note = MG4-153 RuvC-III domain

SEQ ID NO: 2393 - protein, 140 aa, unidentified
  REGION 1..140: note = Description of Unknown: uncultivated organism with predicted taxonomy: Acidobacteriales bacterium 59-55
  REGION 1..140: note = MG4-154 RuvC-III domain
NDTRYASVLAARFLGSLYGGRDVVDGDNARQVIFASSGAVTATLRSSWGLEAILHEIVPAESGESRGKPRTDHRHHAIDAITIALTRSKVIQSMARTASLEPWQIDSRAWRKIELPWRDFVPSIRPHIEQMLVSHRPEHK

SEQ ID NO: 2394 - protein, 127 aa, unidentified
  REGION 1..127: note = Description of Unknown: uncultivated organism with predicted taxonomy: Deltaproteobacteria
  REGION 1..127: note = MG4-155 RuvC-III domain
NDTRYASKLAARYMACLYGGLSDSCGQRIFVSPGQVTAFLRRLWAIEGLLSGGGGKSRDDHRHHAIDAVVVALTGPAWVKALSDAASRAREEGRRRFASLEAPWPGFAAAVQDRLQGLTVSHRANLK

SEQ ID NO: 2395 - protein, 131 aa, unidentified
  REGION 1..131: note = Description of Unknown: uncultivated organism with predicted taxonomy: Planctomycetes bacterium
  REGION 1..131: note = MG4-156 RuvC-III domain
NDTKYASLLAMEFLGQLYGGVCDERGIRRVNAVSGGVTAQIRKGWRLHSILRDGPSQGEAKPRDDHRHHAIDALVIAMTDAGAVQAVSRASERSRLDHRHGFRVDDPWNGFLEQVQAVIRAIRVSHRPDHH

SEQ ID NO: 2396 - protein, 140 aa, unidentified; identical to SEQ ID NO: 2356
  REGION 1..140: note = Description of Unknown: uncultivated organism
  REGION 1..140: note = MG4-157 RuvC-III domain

SEQ ID NO: 2397 - protein, 140 aa, unidentified; identical to SEQ ID NO: 2356
  REGION 1..140: note = Description of Unknown: uncultivated organism
  REGION 1..140: note = MG4-158 RuvC-III domain

SEQ ID NO: 2398 - protein, 140 aa, unidentified; identical to SEQ ID NO: 2356
  REGION 1..140: note = Description of Unknown: uncultivated organism with predicted taxonomy: Acidobacteriales bacterium 59-55
  REGION 1..140: note = MG4-159 RuvC-III domain

SEQ ID NO: 2399 - protein, 132 aa, unidentified; identical to SEQ ID NO: 2369
  REGION 1..132: note = Description of Unknown: uncultivated organism with predicted taxonomy: Planctomycetes
  REGION 1..132: note = MG4-160 RuvC-III domain

SEQ ID NO: 2400 - protein, 140 aa, unidentified; identical to SEQ ID NO: 2356
  REGION 1..140: note = Description of Unknown: uncultivated organism with predicted taxonomy: Acidobacteriales bacterium 59-55
  REGION 1..140: note = MG4-161 RuvC-III domain

SEQ ID NO: 2401 - protein, 141 aa, unidentified; identical to SEQ ID NO: 2262
  REGION 1..141: note = Description of Unknown: uncultivated organism
  REGION 1..141: note = MG4-162 RuvC-III domain

SEQ ID NO: 2402 - protein, 142 aa, unidentified
  REGION 1..142: note = Description of Unknown: uncultivated organism with predicted taxonomy: Acidobacteriales bacterium 59-55
  REGION 1..142: note = MG4-163 RuvC-III domain
NDTRYTSLLAARLLSTLYGGRDVAENGGKRQIIFASTGAVTATLRRNWGFEQILRNIIPPEPSESTGKPRTDHRHHAIDAIVIALTRNDVIQSMARASALEPWQPGTRSWRHVPQPWRTPDFFRSVEEQVREMLTSHRPEHK

SEQ ID NO: 2403 - protein, 141 aa, unidentified; identical to SEQ ID NO: 2365
  REGION 1..141: note = Description of Unknown: uncultivated organism
  REGION 1..141: note = MG4-164 RuvC-III domain

SEQ ID NO: 2404 - protein, 140 aa, unidentified; identical to SEQ ID NO: 2356
  REGION 1..140: note = Description of Unknown: uncultivated organism
  REGION 1..140: note = MG4-165 RuvC-III domain

SEQ ID NO: 2405 - protein, 140 aa, unidentified; identical to SEQ ID NO: 2393
  REGION 1..140: note = Description of Unknown: uncultivated organism with predicted taxonomy: Candidatus Sulfotelmatomonas gaucii
  REGION 1..140: note = MG4-166 RuvC-III domain

SEQ ID NO: 2406 - protein, 142 aa, unidentified; identical to SEQ ID NO: 2376
  REGION 1..142: note = Description of Unknown: uncultivated organism with predicted taxonomy: Acidobacteriales bacterium 59-55
  REGION 1..142: note = MG4-167 RuvC-III domain

SEQ ID NO: 2407 - protein, 141 aa, unidentified; identical to SEQ ID NO: 2365
  REGION 1..141: note = Description of Unknown: uncultivated organism
  REGION 1..141: note = MG4-168 RuvC-III domain

SEQ ID NO: 2408 - protein, 140 aa, unidentified; identical to SEQ ID NO: 2356
  REGION 1..140: note = Description of Unknown: uncultivated organism
  REGION 1..140: note = MG4-169 RuvC-III domain

SEQ ID NO: 2409 - protein, 141 aa, unidentified; identical to SEQ ID NO: 2365
  REGION 1..141: note = Description of Unknown: uncultivated organism
  REGION 1..141: note = MG4-170 RuvC-III domain

SEQ ID NO: 2410 - protein, 140 aa, unidentified; identical to SEQ ID NO: 2356
  REGION 1..140: note = Description of Unknown: uncultivated organism
  REGION 1..140: note = MG4-171 RuvC-III domain

SEQ ID NO: 2411 - protein, 140 aa, unidentified; identical to SEQ ID NO: 2356
  REGION 1..140: note = Description of Unknown: uncultivated organism
  REGION 1..140: note = MG4-172 RuvC-III domain

SEQ ID NO: 2412 - protein, 128 aa, unidentified
  REGION 1..128: note = Description of Unknown: uncultivated organism with predicted taxonomy: Ignavibacteriales bacterium CG_4_9_14_3_um_filter_30_11
  REGION 1..128: note = MG4-173 RuvC-III domain
QDTRYASKLACRYLGVLYGGTSDASGNQRVFASAGQVTAKLRRAWDLDRILSPDKPEKSRDDHRHHAIDALTVALSSTTLIRALATAAGEADRLFRRKIILPVPWVGFGEQARSAVENIQPSHRPMRK

SEQ ID NO: 2413 - protein, 78 aa, unidentified
  REGION 1..78: note = Description of Unknown: uncultivated organism with predicted taxonomy: uncultured bacterium
  REGION 1..78: note = MG4-174 RuvC-III domain
NDTRYASKLACELVGTLYGGRDVPLKDGKSRQVVFASSGMVTSTLRKGWGLEAILREAAPSANGQNRGKPRTDHRHHA

SEQ ID NO: 2414 - protein, 141 aa, unidentified; identical to SEQ ID NO: 2365
  REGION 1..141: note = Description of Unknown: uncultivated organism
  REGION 1..141: note = MG4-175 RuvC-III domain

SEQ ID NO: 2415 - protein, 140 aa, unidentified; identical to SEQ ID NO: 2356
  REGION 1..140: note = Description of Unknown: uncultivated organism with predicted taxonomy: Acidobacteriales bacterium 59-55
  REGION 1..140: note = MG4-176 RuvC-III domain

SEQ ID NO: 2416 - protein, 172 aa, unidentified
  REGION 1..172: note = Description of Unknown: uncultivated organism
  REGION 1..172: note = MG4-177 RuvC-III domain
NDTRYTSKLAGRLLMSLYGGRDIVPAETLDELDEFKDRTGRRAICVSSGMVTSLLRDAWHLNLSGVIGDDAFKCPKKSEDDEESGKRRKGQSNKKDRCDHRHHALDAVVIALTSEKVIREINMLASRLYRERQTPLKYRDLKSIQNPWHNFMDDHFRDIFRGMLVSHRPEHK

SEQ ID NO: 2417 - protein, 140 aa, unidentified; identical to SEQ ID NO: 2356
  REGION 1..140: note = Description of Unknown: uncultivated organism with predicted taxonomy: Acidobacteriales bacterium 59-55
  REGION 1..140: note = MG4-178 RuvC-III domain

SEQ ID NO: 2418 - protein, 142 aa, unidentified; identical to SEQ ID NO: 2368
  REGION 1..142: note = Description of Unknown: uncultivated organism with predicted taxonomy: Acidobacteria
  REGION 1..142: note = MG4-179 RuvC-III domain

SEQ ID NO: 2419 - protein, 140 aa, unidentified; identical to SEQ ID NO: 2361
  REGION 1..140: note = Description of Unknown: uncultivated organism
  REGION 1..140: note = MG4-180 RuvC-III domain

SEQ ID NO: 2420 - protein, 141 aa, unidentified; identical to SEQ ID NO: 2365
  REGION 1..141: note = Description of Unknown: uncultivated organism
  REGION 1..141: note = MG4-181 RuvC-III domain

SEQ ID NO: 2421 - protein, 140 aa, unidentified; identical to SEQ ID NO: 2356
  REGION 1..140: note = Description of Unknown: uncultivated organism
  REGION 1..140: note = MG4-182 RuvC-III domain

SEQ ID NO: 2422 - protein, 80 aa, unidentified
  REGION 1..80: note = Description of Unknown: uncultivated organism
  REGION 1..80: note = MG4-183 RuvC-III domain
NDTRYASKLACELVGTLYGGRDVPLKDGKSRQVVFASSGMVTSTLRKGWGLEAILREAAPSANGQNRGKPRTDHRHHAID

SEQ ID NO: 2423 - protein, 140 aa, unidentified; identical to SEQ ID NO: 2361
  REGION 1..140: note = Description of Unknown: uncultivated organism
  REGION 1..140: note = MG4-184 RuvC-III domain

SEQ ID NO: 2424 - protein, 140 aa, unidentified; identical to SEQ ID NO: 2356
  REGION 1..140: note = Description of Unknown: uncultivated organism
  REGION 1..140: note = MG4-185 RuvC-III domain

SEQ ID NO: 2425 - protein, 141 aa, unidentified; identical to SEQ ID NO: 2365
  REGION 1..141: note = Description of Unknown: uncultivated organism
  REGION 1..141: note = MG4-186 RuvC-III domain

SEQ ID NO: 2426 - protein, 92 aa, unidentified
  REGION 1..92: note = Description of Unknown: uncultivated organism with predicted taxonomy: Polaribacter sp. ALD11
  REGION 1..92: note = MG4-187 RuvC-III domain
NDTRYTSLLAARLLSTLYGGRDVAENGGKRQIIFASTGAVTATLRRNWGFEQILRNIIPPEPSESTGKPRTDHRHHAIDAIVIALTRNDVIQ

SEQ ID NO: 2427 - protein, 140 aa, unidentified; identical to SEQ ID NO: 2356
  REGION 1..140: note = Description of Unknown: uncultivated organism with predicted taxonomy: Acidobacteriales bacterium 59-55
  REGION 1..140: note = MG4-188 RuvC-III domain

SEQ ID NO: 2428 - protein, 142 aa, unidentified; identical to SEQ ID NO: 2368
  REGION 1..142: note = Description of Unknown: uncultivated organism with predicted taxonomy: Polaribacter sp. ALD11
  REGION 1..142: note = MG4-189 RuvC-III domain

SEQ ID NO: 2429 - protein, 140 aa, unidentified; identical to SEQ ID NO: 2361
  REGION 1..140: note = Description of Unknown: uncultivated organism
  REGION 1..140: note = MG4-190 RuvC-III domain

SEQ ID NO: 2430 - protein, 141 aa, unidentified; identical to SEQ ID NO: 2365
  REGION 1..141: note = Description of Unknown: uncultivated organism
  REGION 1..141: note = MG4-191 RuvC-III domain

SEQ ID NO: 2431 - protein, 140 aa, unidentified; identical to SEQ ID NO: 2356
  REGION 1..140: note = Description of Unknown: uncultivated organism
  REGION 1..140: note = MG4-192 RuvC-III domain

SEQ ID NO: 2432 - protein, 140 aa, unidentified; identical to SEQ ID NO: 2356
  REGION 1..140: note = Description of Unknown: uncultivated organism with predicted taxonomy: Acidobacteriales bacterium 59-55
  REGION 1..140: note = MG4-193 RuvC-III domain

SEQ ID NO: 2433 - protein, 141 aa, unidentified; identical to SEQ ID NO: 2365
  REGION 1..141: note = Description of Unknown: uncultivated organism
  REGION 1..141: note = MG4-194 RuvC-III domain

SEQ ID NO: 2434 - protein, 140 aa, unidentified; identical to SEQ ID NO: 2356
  REGION 1..140: note = Description of Unknown: uncultivated organism
  REGION 1..140: note = MG4-195 RuvC-III domain

SEQ ID NO: 2435 - protein, 142 aa, unidentified; identical to SEQ ID NO: 2368
  REGION 1..142: note = Description of Unknown: uncultivated organism with predicted taxonomy: Acidobacteriales bacterium 59-55
  REGION 1..142: note = MG4-196 RuvC-III domain

SEQ ID NO: 2436 - protein, 140 aa, unidentified; identical to SEQ ID NO: 2356
  REGION 1..140: note = Description of Unknown: uncultivated organism
  REGION 1..140: note = MG4-197 RuvC-III domain

SEQ ID NO: 2437 - protein, 131 aa, unidentified; identical to SEQ ID NO: 2395
  REGION 1..131: note = Description of Unknown: uncultivated organism
  REGION 1..131: note = MG4-198 RuvC-III domain

SEQ ID NO: 2438 - protein, 141 aa, unidentified; identical to SEQ ID NO: 2365
  REGION 1..141: note = Description of Unknown: uncultivated organism
  REGION 1..141: note = MG4-199 RuvC-III domain

SEQ ID NO: 2439 - protein, 141 aa, unidentified; identical to SEQ ID NO: 2365
  REGION 1..141: note = Description of Unknown: uncultivated organism
  REGION 1..141: note = MG4-200 RuvC-III domain

SEQ ID NO: 2440 - protein, 142 aa, unidentified; identical to SEQ ID NO: 2368
  REGION 1..142: note = Description of Unknown: uncultivated organism with predicted taxonomy: Acidobacteriales bacterium 59-55
  REGION 1..142: note = MG4-201 RuvC-III domain

SEQ ID NO: 2441 - protein, 140 aa, unidentified; identical to SEQ ID NO: 2356
  REGION 1..140: note = Description of Unknown: uncultivated organism with predicted taxonomy: Acidobacteriales bacterium 59-55
  REGION 1..140: note = MG4-202 RuvC-III domain

SEQ ID NO: 2442 - protein, 140 aa, unidentified; identical to SEQ ID NO: 2356
  REGION 1..140: note = Description of Unknown: uncultivated organism with predicted taxonomy: Acidobacteriales bacterium 59-55
  REGION 1..140: note = MG4-203 RuvC-III domain

SEQ ID NO: 2443 - protein, 140 aa, unidentified; identical to SEQ ID NO: 2356
  REGION 1..140: note = Description of Unknown: uncultivated organism with predicted taxonomy: Acidobacteriales bacterium 59-55
  REGION 1..140: note = MG4-204 RuvC-III domain

SEQ ID NO: 2444 - protein, 128 aa, unidentified
  REGION 1..128: note = Description of Unknown: uncultivated organism with predicted taxonomy: Acidobacteria
  REGION 1..128: note = MG4-205 RuvC-III domain
QDTRYASKLACRYLGVLYGGTIDASGKRRVFASAGQVTAKLRRAWDLDRILSPDKPEKCRDDHRHHAIDALTVALSSTTLIRELARAAGEADRLFRRKIILPVPWVGFGEQTRSAVERIQPSHRPMRK

SEQ ID NO: 2445 - protein, 140 aa, unidentified; identical to SEQ ID NO: 2356
  REGION 1..140: note = Description of Unknown: uncultivated organism
  REGION 1..140: note = MG4-206 RuvC-III domain

SEQ ID NO: 2446 - protein, 128 aa, unidentified; identical to SEQ ID NO: 2444
  REGION 1..128: note = Description of Unknown: uncultivated organism
  REGION 1..128: note = MG4-207 RuvC-III domain

SEQ ID NO: 2447 - protein, 140 aa, unidentified; identical to SEQ ID NO: 2361
  REGION 1..140: note = Description of Unknown: uncultivated organism
  REGION 1..140: note = MG4-208 RuvC-III domain

SEQ ID NO: 2448 - protein, 141 aa, unidentified; identical to SEQ ID NO: 2365
  REGION 1..141: note = Description of Unknown: uncultivated organism
  REGION 1..141: note = MG4-209 RuvC-III domain

SEQ ID NO: 2449 - protein, 167 aa, unidentified
  REGION 1..167: note = Description of Unknown: uncultivated organism with predicted taxonomy: candidate division Kazan bacterium
  REGION 1..167: note = MG4-210 RuvC-III domain
NDTRYTSKLAGRLLMSLYGGRDIVPAETLDELDEFKDRTGRRAICVSSGMVTSLLRDAWHLNLSGVIGDDAFKCPKKSEDDEESGKRRKGQSNKKDRCDHRHHALDAVVIALTSEKVIREINMLASRLYRERQTPLKYRDLKSIQNPWHNFMDDHFRDIFRGMLVSH

SEQ ID NO: 2450 - protein, 142 aa, unidentified; identical to SEQ ID NO: 2368
  REGION 1..142: note = Description of Unknown: uncultivated organism with predicted taxonomy: Acidobacteriales bacterium 59-55
  REGION 1..142: note = MG4-211 RuvC-III domain

SEQ ID NO: 2451 - protein, 140 aa, unidentified; identical to SEQ ID NO: 2361
  REGION 1..140: note = Description of Unknown: uncultivated organism
  REGION 1..140: note = MG4-212 RuvC-III domain

SEQ ID NO: 2452 - protein, 142 aa, unidentified; identical to SEQ ID NO: 2368
  REGION 1..142: note = Description of Unknown: uncultivated organism with predicted taxonomy: Polaribacter sp. ALD11
  REGION 1..142: note = MG4-213 RuvC-III domain

SEQ ID NO: 2453 - protein, 141 aa, unidentified; identical to SEQ ID NO: 2365
  REGION 1..141: note = Description of Unknown: uncultivated organism
  REGION 1..141: note = MG4-214 RuvC-III domain

SEQ ID NO: 2454 - protein, 172 aa, unidentified; identical to SEQ ID NO: 2416
  REGION 1..172: note = Description of Unknown: uncultivated organism
  REGION 1..172: note = MG4-215 RuvC-III domain

SEQ ID NO: 2455 - protein, 140 aa, unidentified; identical to SEQ ID NO: 2356
  REGION 1..140: note = Description of Unknown: uncultivated organism
  REGION 1..140: note = MG4-216 RuvC-III domain

SEQ ID NO: 2456 - protein, 80 aa, unidentified
  REGION 1..80: note = Description of Unknown: uncultivated organism with predicted taxonomy: candidate division Zixibacteria bacterium CG_4_9_14_3_um_filter_46_8
  REGION 1..80: note = MG4-217 RuvC-III domain
SDTRYASKLAMRYLALLYGGLSDEGGTQRIQAGSGNVTKHVRQAHRLNGILGDGPGKNRNDHRHHAVDALAIALTDQALV

SEQ ID NO: 2457 - protein, 128 aa, unidentified
  REGION 1..128: note = Description of Unknown: uncultivated organism with predicted taxonomy: Planctomicrobium piriforme
  REGION 1..128: note = MG4-218 RuvC-III domain
NDTRYATRQATDYLALLYGGLYEKGGKRFIQAAKGGTTAYLRNEWQLNSILGDGGTKSRDDHRHHAVDAVAIALTDAGTVKMLSDAAGRAAQEGRRRFGRVEDPWPGFLDDVRQAIEGLNVSHRVSRK

SEQ ID NO: 2458 - protein, 140 aa, unidentified; identical to SEQ ID NO: 2393
  REGION 1..140: note = Description of Unknown: uncultivated organism with predicted taxonomy: Candidatus Sulfotelmatomonas gaucii
  REGION 1..140: note = MG4-219 RuvC-III domain

SEQ ID NO: 2459 - protein, 135 aa, unidentified
  REGION 1..135: note = Description of Unknown: uncultivated organism with predicted taxonomy: Proteobacteria
  REGION 1..135: note = MG4-220 RuvC-III domain
NDTRYASTMAGDYLGFLYGGKIDSQRNLRVRATTGQVTAYLRDEWMLNRILRDGPTEQGGKVAKSREDHRHHAVDAIAIALTDESTIQQLSRAAQQAPQLGRRRFAPVQAPWPDFVDSVRAEIGRIVVSHRPNRK

SEQ ID NO: 2460 - protein, 142 aa, unidentified; identical to SEQ ID NO: 2368
  REGION 1..142: note = Description of Unknown: uncultivated organism with predicted taxonomy: Acidobacteriales bacterium 59-55
  REGION 1..142: note = MG4-221 RuvC-III domain

SEQ ID NO: 2461 - protein, 140 aa, unidentified; identical to SEQ ID NO: 2356
  REGION 1..140: note = Description of Unknown: uncultivated organism
  REGION 1..140: note = MG4-222 RuvC-III domain

SEQ ID NO: 2462 - protein, 141 aa, unidentified; identical to SEQ ID NO: 2365
  REGION 1..141: note = Description of Unknown: uncultivated organism
  REGION 1..141: note = MG4-223 RuvC-III domain

SEQ ID NO: 2463 - protein, 140 aa, unidentified; identical to SEQ ID NO: 2361
  REGION 1..140: note = Description of Unknown: uncultivated organism
  REGION 1..140: note = MG4-224 RuvC-III domain

SEQ ID NO: 2464 - protein, 172 aa, unidentified
  REGION 1..172: note = Description of Unknown: uncultivated organism
  REGION 1..172: note = MG4-225 RuvC-III domain
NDTLYTSKLAGRLLMSLYGGRDIVPAETLDELDEFKDRTGRRAICVSSGMVTSLLRDAWHLNLSGVIGDDAFKCPKKSEDDEESGKRRKGQSNKKDRCDHRHHALDAVVIALTSEKVIREINMLASRLYRERQTPLKYRDLKSIQNPWHNFMDDHFRDIFRGMLVSHRPEHK

SEQ ID NO: 2465 - protein, 92 aa, unidentified; identical to SEQ ID NO: 2426
  REGION 1..92: note = Description of Unknown: uncultivated organism with predicted taxonomy: Polaribacter sp. ALD11
  REGION 1..92: note = MG4-226 RuvC-III domain

SEQ ID NO: 2466 - protein, 141 aa, unidentified; identical to SEQ ID NO: 2365
  REGION 1..141: note = Description of Unknown: uncultivated organism
  REGION 1..141: note = MG4-227 RuvC-III domain

SEQ ID NO: 2467 - protein, 130 aa, unidentified
  REGION 1..130: note = Description of Unknown: uncultivated organism
  REGION 1..130: note = MG4-247 RuvC-III domain
PDTAYASRLAVEYLGRLYGGRGGVDADGNRRVQAGRGQVTAYLRNEWGLNKILNDGGEKSRDDHRHHAVDAICVALTDAGTVKMLSDAASRATIERRRRFGKVNPPWPTFLDDVRKSIEGLIVSHRVSRK

SEQ ID NO: 2468 - protein, 130 aa, unidentified; identical to SEQ ID NO: 2467
  REGION 1..130: note = Description of Unknown: uncultivated organism with predicted taxonomy: Planctomycetes
  REGION 1..130: note = MG4-248 RuvC-III domain

SEQ ID NO: 2469 - protein, 135 aa, unidentified
  REGION 1..135: note = Description of Unknown: uncultivated organism with predicted taxonomy: Fuerstia marisgermanicae
  REGION 1..135: note = MG4-249 RuvC-III domain
QDTAYASKLAKRYLGLLYGGEIDNLGKRRVTATSGMVTWDLRGGWDLNGILNDGRTSNGSTVVKTRDDHRHHAVDAVVIALTDDRSIQQLNKAAAMGQMQGKRGIIKLPSTWNNFVDTVRAEIGRIIVSHRVSKK

SEQ ID NO: 2470 - protein, 134 aa, unidentified
  REGION 1..134: note = Description of Unknown: uncultivated organism
  REGION 1..134: note = MG4-250 RuvC-III domain
NDTAYASKLACQYLGVLYGGVEDSTGKKRVKASSGGVTGYLRRLWNLNRILNDGPTKSGGFIPKTRDDHRHHAVDAVVIGLTDESVVHKLSRAAERGFYRGRPFAPLEGLWPNFVPSIKTEIDRVVVSHRVSKK

SEQ ID NO: 2471 - protein, 126 aa, unidentified
  REGION 1..126: note = Description of Unknown: uncultivated organism
  REGION 1..126: note = MG4-251 RuvC-III domain
NDTRYASRLAVKYLGMLYGGVIDAAGKQRVFATTGGATAIVRRAWGANFLLGEGEKVRDDHRHHAIDALTIALTTPDIVKIIAGMPEELRRAKGKTPDDTIIDNAVFKQAKEMLDKAAVSHHIVNK

SEQ ID NO: 2472 - protein, 125 aa, unidentified
  REGION 1..125: note = Description of Unknown: uncultivated organism with predicted taxonomy: Bdellovibrio exovorus
  REGION 1..125: note = MG4-252 RuvC-III domain
NDTRYASRLAMNYLGLLYGGAIDRNGKRRIQACSGGCTALIRRAWGANYLLGDGEKKREDHRHHAIDALTIAIITPEIVKTVANISKDEYKRRHMQNLPMLDDALYLQAEGKIDSATVSHHVVNK

SEQ ID NO: 2473 - protein, 126 aa, unidentified; identical to SEQ ID NO: 2471
  REGION 1..126: note = Description of Unknown: uncultivated organism
  REGION 1..126: note = MG4-253 RuvC-III domain

SEQ ID NO: 2474 - protein, 126 aa, unidentified
  REGION 1..126: note = Description of Unknown: uncultivated organism
  REGION 1..126: note = MG4-254 RuvC-III domain
NDTRYASRLAMQYLALLYGGIIDKTGKQRIFATSGSCTAMIRRAWGGNYLLGEGEKVRDDHRHHAIDALTIALTTPEMIKVIASMTREERSRKQKSCNDTIIDNEIFRQASADLDNIPVSHHVVNK

SEQ ID NO: 2475 - protein, 126 aa, unidentified; identical to SEQ ID NO: 2471
  REGION 1..126: note = Description of Unknown: uncultivated organism
  REGION 1..126: note = MG4-255 RuvC-III domain

SEQ ID NO: 2476 - protein, 126 aa, unidentified; identical to SEQ ID NO: 2471
  REGION 1..126: note = Description of Unknown: uncultivated organism
  REGION 1..126: note = MG4-256 RuvC-III domain

SEQ ID NO: 2477 - protein, 144 aa, unidentified
  REGION 1..144: note = Description of Unknown: uncultivated organism with predicted taxonomy: Planctomycetes
  REGION 1..144: note = MG4-257 RuvC-III domain
NDTKFASREAGDYLGLLYGGRVDADGNTRVQMTKGGITSELRNALQLGSIPSQVEDWICDPEEKRGKDRGDHRHHAIDAIAIALSSPGIIKPLMGAYSSSETAKKEMRRDIWASFAKKAAWPGFSDNVVEAVNSISISRRPKHR

SEQ ID NO: 2478 - protein, 145 aa, unidentified
  REGION 1..145: note = Description of Unknown: uncultivated organism
  REGION 1..145: note = MG4-258 RuvC-III domain
NDTRYVSKLAARYVGMLYGGRDVPQPDGAAKRVVFASTGMLTASLRRTWGLEAILREPEPAETSRKPGKQRTDNRHHAIDAIVIALTSNAVIQKASSVAATGSYGDAARAISRVQPPWGDFVGDFVDSIRPAIERMVVSHRPSHK

SEQ ID NO: 2479 - protein, 142 aa, unidentified
  REGION 1..142: note = Description of Unknown: uncultivated organism with predicted taxonomy: Acidobacteria
  REGION 1..142: note = MG4-259 RuvC-III domain
NDTRYTTRLAADLLGSLYGGRDETLPDGAKRRAIFATTGQVTATLRRVWNLESILREALPSANGESKGKPRTDHRHHAIDAIVVALTSQRTVQLLSMAAAQSVAGESRSRVFTGIQSPWPNFVDSIRPHIEQMIVSHRPEHK

SEQ ID NO: 2480 - protein, 141 aa, unidentified
  REGION 1..141: note = Description of Unknown: uncultivated organism with predicted taxonomy: Planctomycetes bacterium
  REGION 1..141: note = MG4-260 RuvC-III domain
NDTRYASKLACELVGSLFGGRDAQTENGSRQIVFASSGMVTATLRKGWGLEAILREAAPSANGQNRGKPRTDHRHHAIDAITIALSRPKMIATLSRNNAQDPYWPQNGRTAPRIQSPWKDFVGSIRPHFEQMLVSHRPEHR

SEQ ID NO: 2481 - protein, 125 aa, unidentified
  REGION 1..125: note = Description of Unknown: uncultivated organism
  REGION 1..125: note = MG4-261 RuvC-III domain
NDTRYASKLSMRYLAFLYGGIVDKNSIRRIFSVAGGCTALIRRAWGGNYLLGEGEKVRDDHRHHAIDAVTVALTTPELVQKIAKLSQEGRRKLNDSTKNFIDNDFYYQAQGMMDSCAVSHHQTNK

SEQ ID NO: 2482 - protein, 115 aa, unidentified
  REGION 1..115: note = Description of Unknown: uncultivated organism with predicted taxonomy: Planctomycetes
  REGION 1..115: note = MG6-7 RuvC-III domain
NDTRYITREILRYLKQLGCTVTGSRGKVTSELRHQWGLNSILESDLPGPKNREDHRHHAIDAVVTALTNQKHLHELAATKYAVAHDGFPVPWEGFRDAVAQAVNKIQVSHRVTRK

SEQ ID NO: 2483 - protein, 115 aa, unidentified
  REGION 1..115: note = Description of Unknown: uncultivated organism with predicted taxonomy: Planctomycetes bacterium
  REGION 1..115: note = MG6-8 RuvC-III domain
NDTRYISREVVKYLKQLGCIVTGTKGQITSELRHQWGLNNILDYTGAGLKNRDDHRHHAVDAVVTAVTEQKHLGGLAASKYDKSGIEFDPPWEGFREQVAEKINAINVSHRVTRK

SEQ ID NO: 2484 - protein, 115 aa, unidentified
  REGION 1..115: note = Description of Unknown: uncultivated organism
  REGION 1..115: note = MG6-9 RuvC-III domain
NDTRYICKEVVKYLKQLGVNVRGSKGRVTAELRHQWGLNSILDLNNSNMKNRDDHRHHAIDAVVTAVTKNEHLRRLAKSKYSKTDSSFSEPWEDFREELAEKVKHINVSHRVRRK

SEQ ID NO: 2485 - protein, 117 aa, unidentified
  REGION 1..117: note = Description of Unknown: uncultivated organism with predicted taxonomy: Planctomycetes bacterium
  REGION 1..117: note = MG6-10 RuvC-III domain
NDTRYICREAVRYLKQICSNVKGTRGKITSELRHQWGLNSILNLTDPNMKNRDDHRHHAIDAAVVAVTRNKHLRELAESKYAKTGSGVKFEAPWKDFREELAEKIKHINVSHRVTRK

SEQ ID NO: 2486 - protein, 115 aa, unidentified; identical to SEQ ID NO: 2483
  REGION 1..115: note = Description of Unknown: uncultivated organism with predicted taxonomy: Planctomycetes bacterium
  REGION 1..115: note = MG6-11 RuvC-III domain

SEQ ID NO: 2487 - protein, 115 aa, unidentified; identical to SEQ ID NO: 2484
  REGION 1..115: note = Description of Unknown: uncultivated organism
  REGION 1..115: note = MG6-12 RuvC-III domain

SEQ ID NO: 2488 - protein, 117 aa, unidentified; identical to SEQ ID NO: 2485
  REGION 1..117: note = Description of Unknown: uncultivated organism with predicted taxonomy: Planctomycetes bacterium
  REGION 1..117: note = MG6-13 RuvC-III domain

SEQ ID NO: 2489 - protein, 126 aa, unidentified
  REGION 1..126: note = Description of Unknown: uncultivated organism
  REGION 1..126: note = MG6-20 RuvC-III domain
NDTAYIAREVRQYLKCLYSEEELVRDESVVCTRGQVTSDLCWCWELNSILNPDDQRETKNRADLRHHAIDAIVVALTTRQRLFALSQVFAKKHSLAKAKHEPWPHFREDVENAVLAIKVSHRPRKR

SEQ ID NO: 2490 - protein, 159 aa, unidentified
  REGION 1..159: note = Description of Unknown: uncultivated organism with predicted taxonomy: Arcicella aurantiaca
  REGION 1..159: note = MG7-2 RuvC-III domain
NETQYITKQVKAELDKICRTITVTSGGITDYLRHQWGVDDVLKNINLEKYEAAGKVSDEDYRDRQGHWRTRKKIADWSKRDDHRHHAIDALVIACTKPAYIKRLNDLNQEYDSYKEMKKDGGKMESLTKFPQPKMKGGFIQNVTKATENILISFKAGKK

SEQ ID NO: 2491 - protein, 95 aa, unidentified
  REGION 1..95: note = Description of Unknown: uncultivated organism with predicted taxonomy: Flavobacteriales
  REGION 1..95: note = MG7-5 RuvC-III domain
KETQYITKQVKAELDKICRKITVTSGGITDYLRHQWGVDDVLKNINLEKYEAAGKVHDEEYRDRQGHWRTRKKIADWSKREDHRHHAIDALGIAC

SEQ ID NO: 2492 - protein, 88 aa, unidentified
  REGION 1..88: note = Description of Unknown: uncultivated organism with predicted taxonomy: Arcicella aurantiaca
  REGION 1..88: note = MG7-6 RuvC-III domain
NETQYITKQVKAELDKICKKITVTSGGITDYLRHQWGVDDVLKNINLEKYEAAEKVHDEEYRDRQGHWRTRKKIADWSKRDDHRHHAI

SEQ ID NO: 2493 - protein, 156 aa, unidentified
  REGION 1..156: note = Description of Unknown: uncultivated organism
  REGION 1..156: note = MG7-9 RuvC-III domain
RESQYIARKAVEVLREVCRNVYTTTGSITDFLRHRWGWDEVIPYLRLPQFKEAGLTEIIPVQNGQKTKEVIKGWSKRDDHRHHALDALVVACTRQSHIQRINELSPILAGTYGEERRQQLLDIVRDKYIAGKIPFSFRQVCEAMNQVLVSHKQRTR

SEQ ID NO: 2494 - protein, 158 aa, unidentified
  REGION 1..158: note = Description of Unknown: uncultivated organism with predicted taxonomy: Bacteroidetes
  REGION 1..158: note = MG7-10 RuvC-III domain
RETQYIAKKAVEMLRQVCREVRSTTGSITDFLRHQWGWDEVIKELRLPQFRQAGEDLIEYRPAANGGRDRVVIKDWDKRKDHRHHALDALVVAFTRVSHIQRVTKLNQIMSGKFGEERRKELLRTGRDLYIAGKAPFTFAQVSKAIANILISFKQGLR

SEQ ID NO: 2495 - protein, 150 aa, unidentified
  REGION 1..150: note = Description of Unknown: uncultivated organism with predicted taxonomy: Bacteroidetes
  REGION 1..150: note = MG7-11 RuvC-III domain
RETAYISREVKNLLLGICRNVHSTSGTVTNYLRHIWGLDSILQELNIEKYRACGQTVKEIIGSNGSTKENERIVNWSKRDDHRHHAIDAIVIALTKQSHIQKLNNLNQEFQNYRELKQSAYNFPLPWATVHSDVLRTVSNILVSFKSGKK

SEQ ID NO: 2496 - protein, 158 aa, unidentified; identical to SEQ ID NO: 2494
  REGION 1..158: note = Description of Unknown: uncultivated organism with predicted taxonomy: Bacteroidetes
  REGION 1..158: note = MG7-12 RuvC-III domain

SEQ ID NO: 2497 - protein, 148 aa, unidentified
  REGION 1..148: note = Description of Unknown: uncultivated organism with predicted taxonomy: Deltaproteobacteria bacterium
  REGION 1..148: note = MG7-13 RuvC-III domain
KETQYITKVVREKLWEVSHEVRTTTGAITGFLRHEWGLSNLLHDLNFPKYEAQGLVEEWVDEETGEVIKRIEDWSKRMDHRHHALDALVVALTRPAHVHYLNNLNKQFGNLARENGWRTPLRSPVTNLYQKARAAMEPILVKHQKKSR

SEQ ID NO: 2498 - protein, 148 aa, unidentified
  REGION 1..148: note = Description of Unknown: uncultivated organism with predicted taxonomy: Deltaproteobacteria bacterium
  REGION 1..148: note = MG7-14 RuvC-III domain
KETQYITKVVREKLREVSHEVRTTTGAITGFLRHEWGLSNLLHDLNFPKYEAQGLVEEWVDEETGEVIKRIEDWSKRMDHRHHALDALVVALTRPAHVHYLNNLNKQFGNLARENGWRTPLRSPVTNLYQKARAAMEPILVKHQKKSR

SEQ ID NO: 2499 - protein, 137 aa, unidentified
  REGION 1..137: note = Description of Unknown: uncultivated organism with predicted taxonomy: Collinsella
  REGION 1..137: note = MG14-1 RuvC-III domain
TDTAYMSREVCAYLADCLLFPDDGAKAHVVPTTGRATAWLRRRWGLNFGSNGEKDRSDDRHHATDACVIAACSPSLVIKTARINQETHWSITRGMNETQRRDAIMKALESVMPWETFANEVRAAHDFVVPTRFVPRK

SEQ ID NO: 2500 - protein, 126 aa, unidentified
  REGION 1..126: note = Description of Unknown: uncultivated organism
  REGION 1..126: note = MG14-3 RuvC-III domain
NDTRYMSRAVAKWLDGCLPFPDDGHRHVFAVSGGATAMLRRAWDIAILDEEGKKDRDDDRHHAIDAALIAACTPSIVMKVAKANEMWQSDAERESLFLGSMPFPDFKQKVEAWIPCIVPTLYLPRN

SEQ ID NO: 2501 - protein, 137 aa, unidentified
  REGION 1..137: note = Description of Unknown: uncultivated organism with predicted taxonomy: Coriobacteriales
  REGION 1..137: note = MG14-4 RuvC-III domain
TDTAYMSREVCSYLSDCLLFPEDGSKVHVVPTTGRATAWLRRRWGLNFGSTGEKDRTDDRHHATDACVIAACSRSLVIKTAKISQETHWSVTPGLTESQRKDARMKALESVMPWETFANEVRSRHDFVVPTRFVPRK

SEQ ID NO: 2502 - protein, 137 aa, unidentified; identical to SEQ ID NO: 2501
  REGION 1..137: note = Description of Unknown: uncultivated organism with predicted taxonomy: Actinobacteria
  REGION 1..137: note = MG14-5 RuvC-III domain

SEQ ID NO: 2503 - protein, 126 aa, unidentified; identical to SEQ ID NO: 2500
  REGION 1..126: note = Description of Unknown: uncultivated organism with predicted taxonomy: Collinsella
  REGION 1..126: note = MG14-6 RuvC-III domain

SEQ ID NO: 2504 - protein, 137 aa, unidentified
  REGION 1..137: note = Description of Unknown: uncultivated organism with predicted taxonomy: Collinsella
  REGION 1..137: note = MG14-7 RuvC-III domain
TDTAYMSREVCAYLADCLLFPDDGAKAHVVPTTGRTTAWLRRRWGLNFGLTGKKDRSDDRHHATDACVIAACSPSLVIKSAQINQKMHWSMTKGMSKAQRQDAIMKALENVMPWETFANEVRTVHKLIIPTRFVPRK

SEQ ID NO: 2505 - protein, 128 aa, unidentified
  REGION 1..128: note = Description of Unknown: uncultivated organism with predicted taxonomy: Olsenella
  REGION 1..128: note = MG14-8 RuvC-III domain
NDDRYMSVAVKNYLEDCLLFPEDGRKRHVTAVAGGATGNLRWVWGLNFGEGNIKDRADDRHHAIDAAIIAACSESTVKKVAEASAKGREAFKQLRKSRLADTQPWPTFATEVAARREFVVPTRMADHG

SEQ ID NO: 2506 - protein, 128 aa, unidentified
  REGION 1..128: note = Description of Unknown: uncultivated organism with predicted taxonomy: Olsenella sp. KH3B4
  REGION 1..128: note = MG14-9 RuvC-III domain
NDDRYMSVAVKNYLEDCLLFPEDGRKRHVIAVAGGATGNLRWVWGLNFGDGNVKDRTDDRHHAVDAAIIAACSESTVKKIAEASSKGREAFKKQRESRLADTQPWPTFADEVKARRAFVVPTRMADHG

SEQ ID NO: 2507 - protein, 137 aa, unidentified
  REGION 1..137: note = Description of Unknown: uncultivated organism with predicted taxonomy: Collinsella
  REGION 1..137: note = MG14-10 RuvC-III domain
TDTAYMSREVCAYLADCLLFPEDGTKSHVVPTTGRATAWLRRRWGLNFGTNGEKDRSDDRHHATDACVIAACSRSLVIKTAHISEQTHWTVTKNLDKDERNRLRMKALENVMPWETFANEVRASHDFVIPTRFVPRK

SEQ ID NO: 2508 - protein, 103 aa, unidentified
  REGION 1..103: note = Description of Unknown: uncultivated organism with predicted taxonomy: Collinsella sp. AF20-14LB
  REGION 1..103: note = MG14-11 RuvC-III domain
NDTRYMSKDVAKWLADCLPFPKDGRRHVFCVSGAATGLMRRVWRIGILDENGKKDREDDRHHAVDAAVIAACTPSVVKSIALISEEHATHRDADRLLNRSLPY

SEQ ID NO: 2509 - protein, 137 aa, unidentified
  REGION 1..137: note = Description of Unknown: uncultivated organism with predicted taxonomy: Collinsella
  REGION 1..137: note = MG14-12 RuvC-III domain
TDTAYMSREVCAYLADCLLFPDDGAKAHVVPTTGRATAWLRRRWGLNFGSNGEKDRSDDRHHATDACVIAACSRSLVIKTARINQETHWSITRGMNETQRHDAIMKALESVMPWETFANEVRAAHDFVVPTRFVPRK

SEQ ID NO: 2510 - protein, 137 aa, unidentified; identical to SEQ ID NO: 2509
  REGION 1..137: note = Description of Unknown: uncultivated organism with predicted taxonomy: Collinsella
  REGION 1..137: note = MG14-13 RuvC-III domain

SEQ ID NO: 2511 - protein, 128 aa, unidentified
  REGION 1..128: note = Description of Unknown: uncultivated organism with predicted taxonomy: Olsenella
  REGION 1..128: note = MG14-14 RuvC-III domain
NDDRYMSVAVKNYLEDCLLFPEDGRKRHVTAVAGGATGNLRWVWGLNFGEGNVKDRADDRHHAIDAAIIAACSESTVKKVAEASAKGREAFKQLRKSRLADTQPWPTFATEVAARREFVVPTRMADHG

SEQ ID NO: 2512 - protein, 137 aa, unidentified; identical to SEQ ID NO: 2509
  REGION 1..137: note = Description of Unknown: uncultivated organism with predicted taxonomy: Coriobacteriales
  REGION 1..137: note = MG14-15 RuvC-III domain

SEQ ID NO: 2513 - protein, 126 aa, unidentified
  REGION 1..126: note = Description of Unknown: uncultivated organism with predicted taxonomy: Eggerthellales
  REGION 1..126: note = MG14-16 RuvC-III domain
NDTRYMSAALAKWLRECLPFARDGHEHVFCVAGGATALMRSVWDIGITGPDGKKNRDDDRHHAVDAAVIACCTPGIVKNVALVNEGHARADVRQRLFSDSLPYPEFKEQVNAWIPCIVPTLTLPNT

SEQ ID NO: 2514 - protein, 137 aa, unidentified; identical to SEQ ID NO: 2509
  REGION 1..137: note = Description of Unknown: uncultivated organism with predicted taxonomy: Collinsella
  REGION 1..137: note = MG14-17 RuvC-III domain

SEQ ID NO: 2515 - protein, 128 aa, unidentified; identical to SEQ ID NO: 2505
  REGION 1..128: note = Description of Unknown: uncultivated organism with predicted taxonomy: Olsenella
  REGION 1..128: note = MG14-18 RuvC-III domain

SEQ ID NO: 2516 - protein, 137 aa, unidentified; identical to SEQ ID NO: 2509
  REGION 1..137: note = Description of Unknown: uncultivated organism with predicted taxonomy: Coriobacteriales
  REGION 1..137: note = MG14-19 RuvC-III domain

SEQ ID NO: 2517 - protein, 137 aa, unidentified; identical to SEQ ID NO: 2509
  REGION 1..137: note = Description of Unknown: uncultivated organism with predicted taxonomy: Coriobacteriales
  REGION 1..137: note = MG14-20 RuvC-III domain

SEQ ID NO: 2518 - protein, 128 aa, unidentified; identical to SEQ ID NO: 2505
  REGION 1..128: note = Description of Unknown: uncultivated organism with predicted taxonomy: Olsenella sp. KH3B4
  REGION 1..128: note = MG14-21 RuvC-III domain

SEQ ID NO: 2519 - protein, 137 aa, unidentified; identical to SEQ ID NO: 2509
  REGION 1..137: note = Description of Unknown: uncultivated organism with predicted taxonomy: Collinsella
  REGION 1..137: note = MG14-22 RuvC-III domain

SEQ ID NO: 2520 - protein, 137 aa, unidentified; identical to SEQ ID NO: 2509
  REGION 1..137: note = Description of Unknown: uncultivated organism with predicted taxonomy: Collinsella
  REGION 1..137: note = MG14-23 RuvC-III domain

SEQ ID NO: 2521 - protein, 137 aa, unidentified
  REGION 1..137: note = Description of Unknown: uncultivated organism with predicted taxonomy: Collinsella
  REGION 1..137: note = MG14-24 RuvC-III domain
TDTAYMSREVCAYLADCLLFPEDGTKSHVVPTTGRATAWLRRRWGLNFGTNGEKDRSDDRHHATDACVIAACSRSLVIKTAKISEQTHWTVTKNLDKDERDHLRMKALENVMPWETFANEVRASHDFVIPTRFVPRK

SEQ ID NO: 2522 - protein, 128 aa, unidentified
  REGION 1..128: note = Description of Unknown: uncultivated organism with predicted taxonomy: Olsenella
  REGION 1..128: note = MG14-25 RuvC-III domain
NDDRYMSVAVKNYLEDCLLFPEDGRKRHVTAVAGGATGNLRWVWGLNFGEGNVKDRADDRHHAIDAAIIAACSESTVKKIAEASSKGREAFKKQRESRLADTQPWPTFADEVKARRAFVVPTRMADHG

SEQ ID NO: 2523 - protein, 137 aa, unidentified; identical to SEQ ID NO: 2509
  REGION 1..137: note = Description of Unknown: uncultivated organism with predicted taxonomy: Coriobacteriia
  REGION 1..137: note = MG14-26 RuvC-III domain

SEQ ID NO: 2524 - protein, 137 aa, unidentified; identical to SEQ ID NO: 2509
  REGION 1..137: note = Description of Unknown: uncultivated organism with predicted taxonomy: Collinsella
  REGION 1..137: note = MG14-27 RuvC-III domain

SEQ ID NO: 2525 - protein, 126 aa, unidentified
  REGION 1..126: note = Description of Unknown: uncultivated organism with predicted taxonomy: Collinsella
  REGION 1..126: note = MG14-28 RuvC-III domain
NDTRYMSKDVAKWLTDCLPFPEDGRKHVFCVSGVATALMRGIWRIGILDDDGKKNREDDRHHAVDAAVIAACTPSIVRGIALISEEHATHRDADRLLNRSLPYPEYRDQVKAWIPCIVPTYSPNRT

SEQ ID NO: 2526 - protein, 137 aa, unidentified; identical to SEQ ID NO: 2509
  REGION 1..137: note = Description of Unknown: uncultivated organism with predicted taxonomy: Coriobacteriales
  REGION 1..137: note = MG14-29 RuvC-III domain

SEQ ID NO: 2527 - protein, 137 aa, unidentified; identical to SEQ ID NO: 2509
  REGION 1..137: note = Description of Unknown: uncultivated organism with predicted taxonomy: Collinsella
  REGION 1..137: note = MG14-30 RuvC-III domain

SEQ ID NO: 2528 - protein, 123 aa, unidentified
  REGION 1..123: note = Description of Unknown: uncultivated organism with predicted taxonomy: Coriobacteriia bacterium
  REGION 1..123: note = MG14-31 RuvC-III domain
NDTRYASLAAKRYIEEYLTFKDNGKSRHVIAVAGGATAALRNAWGIRKDRSEDNLHHAVDASIIAACDESTVIAIAKASERKALTPKDKRKELFSRTEPWQDFANEVLSRKEHIIPSFMTDHK

SEQ ID NO: 2529 - protein, 128 aa, unidentified
  REGION 1..128: note = Description of Unknown: uncultivated organism with predicted taxonomy: Olsenella sp. KH3B4
  REGION 1..128: note = MG14-32 RuvC-III domain
NDDRYMSVAVKNYLEDCLLFPEDGRKRHVTAVAGGATGNLRWVWGLNFGEGNVKDRADDRHHAIDAAIIAACSESTVKKVAEASTKGREAFKQLRKSRLADTQPWPTFATEVAARREFVVPTRMADHG

SEQ ID NO: 2530 - protein, 137 aa, unidentified; identical to SEQ ID NO: 2509
  REGION 1..137: note = Description of Unknown: uncultivated organism with predicted taxonomy: Collinsella
  REGION 1..137: note = MG14-33 RuvC-III domain

SEQ ID NO: 2531 - protein, 128 aa, unidentified; identical to SEQ ID NO: 2505
  REGION 1..128: note = Description of Unknown: uncultivated organism with predicted taxonomy: Olsenella
  REGION 1..128: note = MG14-34 RuvC-III domain

SEQ ID NO: 2532 - protein, 128 aa, unidentified
  REGION 1..128: note = Description of Unknown: uncultivated organism with predicted taxonomy: Olsenella sp. KH3B4
  REGION 1..128: note = MG14-35 RuvC-III domain
NDDRYMSVAVKNYLEDCLLFPDSDRKRHVTAIAGGATGNLRWVWGLNSGSNNTKDRSDDRHHAVDAAVIAACSEATVQKVARARSLGRETFKHMRKSRLADTQPWPTFADEVIARKEFVIPTRMADHG

SEQ ID NO: 2533 - protein, 137 aa, unidentified
  REGION 1..137: note = Description of Unknown: uncultivated organism with predicted taxonomy: Coriobacteriales
  REGION 1..137: note = MG14-36 RuvC-III domain
TDTAYMSREVCAYLADCLLFPDDGAKAHVVPTTGRATAWLRRRWGLNFGSNGEKDRSDDRHHATDACVIAACSRSLVIKTARINQETHWSITRGMNETQRRDAIMKALESVMPWETFANEVRAAHDFVVPTRFVPRK

SEQ ID NO: 2534 - protein, 126 aa, unidentified
  REGION 1..126: note = Description of Unknown: uncultivated organism with predicted taxonomy: Coprococcus comes
  REGION 1..126: note = MG14-37 RuvC-III domain
NDTRYMSRQLAMWVRECLPFPDDRRQHVFCVAGAATSLMRRIWGIGIVDEKGKKDRSDDRHHAVDAAVIACCSPEIVKGIARVNSGRSNIKERERLRYESMPYPEFKAQVEAWIPCIVPTRTVSRT

SEQ ID NO: 2535 - protein, 137 aa, unidentified
  REGION 1..137: note = Description of Unknown: uncultivated organism with predicted taxonomy: Coriobacteriia bacterium
  REGION 1..137: note = MG14-38 RuvC-III domain
TDTAYMSREVCAYLADCLLFPDDGAKAHVVPTTGRATAWLRRRWGLNFGSNGEKDRSDDRHHATDACVIAACSRRLVIKTARINQEMHWSMTKGMSKAQRQDAIMKALENVMPWETFANEVRVAHDFVVPTRFVPRK

SEQ ID NO: 2536 - protein, 137 aa, unidentified; identical to SEQ ID NO: 2533
  REGION 1..137: note = Description of Unknown: uncultivated organism with predicted taxonomy: Collinsella
  REGION 1..137: note = MG14-39 RuvC-III domain

SEQ ID NO: 2537 - protein, 126 aa, unidentified
  REGION 1..126: note = Description of Unknown: uncultivated organism
  REGION 1..126: note = MG14-40 RuvC-III domain
NDTRYMSRQLAMWVRECLPFPDDKRQHVFCVAGAATSLMRRIWGIGVVDEKGKTDRSDDRHHAVDGAVIACCSPEIVKGIARVNSGRSNIKERERLRYESMPYPEFKDQVEAWIPCIVPTRTVSRT

SEQ ID NO: 2538 - protein, 137 aa, unidentified
  REGION 1..137: note = Description of Unknown: uncultivated organism with predicted taxonomy: Collinsella
  REGION 1..137: note = MG14-41 RuvC-III domain
TDTAYMSREVCAYLADCLQFPDDGAKAHVVPTTGRATAWLRRRWGLNFGSNGEKDRSDDRHHATDACVIAACSRSLVIKTARLNQETHWSITRGMNEIQRHDAIMKALESVMPWETFANEVRAAHDFVVPTRFVPRK

SEQ ID NO: 2539 - protein, 137 aa, unidentified; identical to SEQ ID NO: 2533
  REGION 1..137: note = Description of Unknown: uncultivated organism with predicted taxonomy: Collinsella
  REGION 1..137: note = MG14-42 RuvC-III domain

SEQ ID NO: 2540 - protein, 137 aa, unidentified
  REGION 1..137: note = Description of Unknown: uncultivated organism with predicted taxonomy: Collinsella
  REGION 1..137: note = MG14-43 RuvC-III domain
TDTAYMSREVCAYLADCLLFPDDGAKAHVVPTTGRATAWLRRRWGLNFGSNGEKDRSDDRHHATDACVIAACSRSLVIKTARINQETHWSITRGMDETQRRDAIMKALESVMPWETFANEVRAAHDFVVPTRFVPRK

SEQ ID NO: 2541 - protein, 137 aa, unidentified
  REGION 1..137: note = Description of Unknown: uncultivated organism with predicted taxonomy: Olsenella mediterranea
  REGION 1..137: note = MG14-44 RuvC-III domain
TDTAYMSREVCAYLADCLQFPDDGAKAHVVPTTGRATAWLRRRWGLNFGSNGEKDRSDDRHHATDACVIAACSRSLVIKTARINQETHWSITRGMNETQRHDAIMKALESVMPWETFANEVRAAHDFVVPTRFVPRK

SEQ ID NO: 2542 - protein, 137 aa, unidentified; identical to SEQ ID NO: 2538
  REGION 1..137: note = Description of Unknown: uncultivated organism with predicted taxonomy: Collinsella
  REGION 1..137: note = MG14-45 RuvC-III domain

SEQ ID NO: 2543 - protein, 137 aa, unidentified; identical to SEQ ID NO: 2533
  REGION 1..137: note = Description of Unknown: uncultivated organism with predicted taxonomy: Collinsella
  REGION 1..137: note = MG14-46 RuvC-III domain

SEQ ID NO: 2544 - protein, 126 aa, unidentified
  REGION 1..126: note = Description of Unknown: uncultivated organism with predicted taxonomy: Collinsella sp. AM13-34
  REGION 1..126: note = MG14-47 RuvC-III domain
NDTRYMSVALAKWLRECLPFARDGHEHVFRVAGGATALMRSVWDIGITGPDGKKNRDDDRHHAVDAAVISCCTPGIVKNVALVNEGHARADVRQRLFRDSLPYPEFKEQVNAWIPCIVPTLTLPNT

SEQ ID NO: 2545 - protein, 137 aa, unidentified
  REGION 1..137: note = Description of Unknown: uncultivated organism with predicted taxonomy: Collinsella
  REGION 1..137: note = MG14-48 RuvC-III domain
TDTAYMSREVCAYLADCLLFPDDGAKAHVVPTTGRATAWLRRRWGLNFGSNGEKDRSDDRHHATDACVIAACSRSLVIKTARINQETHRSITRGMNETQRRDAIMKALESVMPWETFANEVRAAHDFVVPTRFVPRK

SEQ ID NO: 2546 - protein, 126 aa, unidentified
  REGION 1..126: note = Description of Unknown: uncultivated organism with predicted taxonomy: Collinsella sp. AF20-14LB
  REGION 1..126: note = MG14-49 RuvC-III domain
NDTRYMSRQLAMWVRECLPFPDDKRQHVFCVAGAATSLMRRIWGIGIVDEKGKKDRSDDRHHAVDAAVIACCSPEIVKGIARVNSGRSNIKERERLRYESMPYPEFKAQVEAWIPCIVPTRTVSRT

SEQ ID NO: 2547 - protein, 128 aa, unidentified
  REGION 1..128: note = Description of Unknown: uncultivated organism with predicted taxonomy: Libanicoccus massiliensis
  REGION 1..128: note = MG14-50 RuvC-III domain
NDTRYMSRAVKSYLEDCLIFPKGKREKHVTAVAGGATGNLRWVWGLNFGAHGEKNRKDDRHHAVDAAVIAACNESAVMKVAKTTSMGREQFRKERKARLSNTQPWPTFADEVAAIRELVIPTRMVSHG

SEQ ID NO: 2548 - protein, 137 aa, unidentified; identical to SEQ ID NO: 2533
  REGION 1..137: note = Description of Unknown: uncultivated organism with predicted taxonomy: Collinsella
  REGION 1..137: note = MG14-51 RuvC-III domain

SEQ ID NO: 2549 - protein, 137 aa, unidentified
  REGION 1..137: note = Description of Unknown: uncultivated organism with predicted taxonomy: Collinsella
  REGION 1..137: note = MG14-52 RuvC-III domain
TDTAYMSREVCAYLADCLLFPDDGAKAHVVPTTGRATAWLRRRWGLNFGLTGEKDRSDDRHHATDACVIAACSPSLVIKTAQINQKMHWSMTKGMSKAQRQDAIMKALENVMPWETFANEVRAVHKLIIPTRLVPRK

SEQ ID NO: 2550 - protein, 128 aa, unidentified
  REGION 1..128: note = Description of Unknown: uncultivated organism with predicted taxonomy: Olsenella sp. KH3B4
  REGION 1..128: note = MG14-53 RuvC-III domain
NDDRYMSVAVKNYLEDCLLFPEDGRKRHVTAVAGGATGNLRWVWGLNFGSGNVKDRDDDRHHAVDAAIIAACSEGTVQKVAKASSKGREAFKHLRESRLADTQPWPTFADEVIARREFVVPTRMVDHG

SEQ ID NO: 2551 - protein, 128 aa, unidentified
  REGION 1..128: note = Description of Unknown: uncultivated organism with predicted taxonomy: Olsenella sp. KH3B4
  REGION 1..128: note = MG14-54 RuvC-III domain
NDDRYMSVAVKNFLEDRLLFPEDGRKRHVTAVAGGATGNLRWVWGLNFGEGNIKDRTDDRHHAVDAAIIAACSESTVKKVAKASAKAREAFKQLRKSRLADTQPWPTFAAEVAARREFVVPTRMADHG

SEQ ID NO: 2552 - protein, 126 aa, unidentified
  REGION 1..126: note = Description of Unknown: uncultivated organism with predicted taxonomy: Collinsella
  REGION 1..126: note = MG14-55 RuvC-III domain
NDTRYMSKDVAKWLADCLPFPEDGRKHVFCVSGAATAFMRGIWRIGILDDVGKKNREDDRHYAVDAAVIAACTSSIVKGIALISEEHATNRDADRLLDGSLPYPEYRDQVKAWIPCIVPTYSPTRT

SEQ ID NO: 2553 - protein, 137 aa, unidentified
  REGION 1..137: note = Description of Unknown: uncultivated organism with predicted taxonomy: Collinsella
  REGION 1..137: note = MG14-56 RuvC-III domain
TDTAYMSREVCAYLADCLLFPNDGAKAHVVPTTGRATAWLRRRWGLNFGLTGEKDRSDDRHHATDACVIAACSPSLVIKTAQINQKMHWSMTKGMSKAQRQDAIMKALENVMPWETFANEVRAVHKLIIPTRFVPRK

SEQ ID NO: 2554 - protein, 128 aa, unidentified
  REGION 1..128: note = Description of Unknown: uncultivated organism with predicted taxonomy: Olsenella
  REGION 1..128: note = MG14-57 RuvC-III domain
NDDRYMSVAVKNFLEDRLLFPEDGRKRHVTAVAGGATGSLRWVWGLNFGEGNIKDRTDDRHHAVDAAIIAACSESTVKKVAEASAKGREAFKQLRKSRLADTQPWPSFAAEAAARREFVVPTRMADHG

SEQ ID NO: 2555 - protein, 137 aa, unidentified; identical to SEQ ID NO: 2533
  REGION 1..137: note = Description of Unknown: uncultivated organism with predicted taxonomy: Collinsella
  REGION 1..137: note = MG14-58 RuvC-III domain

SEQ ID NO: 2556 - protein, 137 aa, unidentified; identical to SEQ ID NO: 2535
  REGION 1..137: note = Description of Unknown: uncultivated organism with predicted taxonomy: Collinsella
  REGION 1..137: note = MG14-59 RuvC-III domain

SEQ ID NO: 2557 - protein, 137 aa, unidentified; identical to SEQ ID NO: 2553
  REGION 1..137: note = Description of Unknown: uncultivated organism with predicted taxonomy: Collinsella
  REGION 1..137: note = MG14-60 RuvC-III domain

SEQ ID NO: 2558 - protein, 137 aa, unidentified; identical to SEQ ID NO: 2533
  REGION 1..137: note = Description of Unknown: uncultivated organism with predicted taxonomy: Collinsella
  REGION 1..137: note = MG14-61 RuvC-III domain

SEQ ID NO: 2559 - protein, 137 aa, unidentified
  REGION 1..137: note = Description of Unknown: uncultivated organism with predicted taxonomy: Collinsella
  REGION 1..137: note = MG14-62 RuvC-III domain
TDTAYMSREVCAYLADCLQFPDDGAKAHVVPTTGRATAWLRRRWGLNFGSNGEKDRSDDRHHATDACVIAACSRSLVIKTARLNQETHWSITRGMNEIQRHDAIMKALENVMPWETFANEVRAAHDFVVPTRFVPRK

SEQ ID NO: 2560 - protein, 126 aa, unidentified
  REGION 1..126: note = Description of Unknown: uncultivated organism with predicted taxonomy: Collinsella
  REGION 1..126: note = MG14-63 RuvC-III domain
NDTRYMSVALAKWLMECLPFAKDGHEHVFCVAGGATALMRSVWNIGITGPDGKKNRDDDRHHAVDAAVIACCTPGIVKNVALVNEGHARADVRQRLFRDSLPYPEFKEQVDAWIPCIVPTLTLPST

SEQ ID NO: 2561 - protein, 137 aa, unidentified
  REGION 1..137: note = Description of Unknown: uncultivated organism with predicted taxonomy: Collinsella
  REGION 1..137: note = MG14-64 RuvC-III domain
TDTAYMSREVCAYLADCLLFPEDGTKSHVVPTTGRATAWLRRRWGLNFGINGEKDRSDDRHHATDACVIAACSRSLVIKTAKISEQTHWAVTKDLDKDERDHLRMKALENVMPWETFANEVRASHDFVIPTRFVPHK

SEQ ID NO: 2562 - protein, 137 aa, unidentified; identical to SEQ ID NO: 2553
  REGION 1..137: note = Description of Unknown: uncultivated organism with predicted taxonomy: Collinsella
  REGION 1..137: note = MG14-65 RuvC-III domain

SEQ ID NO: 2563 - protein, 137 aa, unidentified
  REGION 1..137: note = Description of Unknown: uncultivated organism with predicted taxonomy: Collinsella
  REGION 1..137: note = MG14-66 RuvC-III domain
TDTAYMSREACAYLADCLLFPDDGAKAHVVPTTGRATAWLRRRWGLNFGSNGEKDRSDDRHHATDACVIAACSRSLVIKTARINQETHWSITRGMNETQRRDAIMKALESVMPWETFANEVRAAHDFVVPTRFVPRK

SEQ ID NO: 2564 - protein, 137 aa, unidentified; identical to SEQ ID NO: 2533
  REGION 1..137: note = Description of Unknown: uncultivated organism with predicted taxonomy: Collinsella
  REGION 1..137: note = MG14-67 RuvC-III domain

SEQ ID NO: 2565 - protein, 137 aa, unidentified; identical to SEQ ID NO: 2533
  REGION 1..137: note = Description of Unknown: uncultivated organism with predicted taxonomy: Collinsella
  REGION 1..137: note = MG14-68 RuvC-III domain

SEQ ID NO: 2566 - protein, 128 aa, unidentified
  REGION 1..128: note = Description of Unknown: uncultivated organism with predicted taxonomy: Olsenella
  REGION 1..128: note = MG14-69 RuvC-III domain
NDDRYMSREVKSYLEDTLIFPEDGRVKHVIAVAGGATGSLRHVWGLNFGANNSKDRSDNRHHAIDACVIAACSESTLQAVAKARKLGAETYKRMRKDRLKDTQPWPTFADEVIARREFVIPTHMVSHG

SEQ ID NO: 2567 - protein, 137 aa, unidentified
  REGION 1..137: note = Description of Unknown: uncultivated organism with predicted taxonomy: Collinsella tanakaei
  REGION 1..137: note = MG14-70 RuvC-III domain
TDTAYMSREVCAYLSDCLQFPDDGLKNHIVPIAGRATAWLRRQWGLNFGATGEKDRSDDRHHATDACVIAACSRSLVIKTAKVMKQTHWQVTRDMTREQRRSARMKALEGTMPWSTFANEVRERWKVTVPTRFVPRK

SEQ ID NO: 2568 - protein, 137 aa, unidentified
  REGION 1..137: note = Description of Unknown: uncultivated organism with predicted taxonomy: Collinsella
  REGION 1..137: note = MG14-71 RuvC-III domain
TDTAYMSREVCAYLADCLLFPDDGAKAHVVPTTGRATAWLRRRWGLNFGSNGEKDRSDDRHHATDACVISACSRSLVIKTARINQETHWSITRGMNETQRRDAIMKALESVMPWETFANEVRAAHDFVVPTRFVPRK

SEQ ID NO: 2569 - protein, 123 aa, unidentified
  REGION 1..123: note = Description of Unknown: uncultivated organism with predicted taxonomy: Atopobium sp. ICM42b
  REGION 1..123: note = MG14-72 RuvC-III domain
VDTQYMARAISAWLSDSLNFSTEFNQKQHVYAVNGRMTAKLRRKWGLNFGEDDTKDRSDNRHHAIDAAVIAVCSASMVKEFAISYSRLREVRDSVIAEPWEGFADQVREAREWVIPTMYRPNK

SEQ ID NO: 2570 - protein, 137 aa, unidentified; identical to SEQ ID NO: 2533
  REGION 1..137: note = Description of Unknown: uncultivated organism with predicted taxonomy: Collinsella
  REGION 1..137: note = MG14-73 RuvC-III domain

SEQ ID NO: 2571 - protein, 126 aa, unidentified
  REGION 1..126: note = Description of Unknown: uncultivated organism with predicted taxonomy: Collinsella
  REGION 1..126: note = MG14-74 RuvC-III domain
NDTRYMSKDVAKWLADCLPFPEDGRKHIFCVSGAATAFMRGIWRIGILDDAGKKNREDDRHYAVDAAVIAACTSSIVKDIALISEEHATNRDADRLLDGSLPYPEYRDQVKAWIPCIVPTYSPTRT

SEQ ID NO: 2572 - protein, 126 aa, unidentified
  REGION 1..126: note = Description of Unknown: uncultivated organism with predicted taxonomy: Collinsella sp. AM13-34
  REGION 1..126: note = MG14-75 RuvC-III domain
NDTRYMSVALAKWLRECLPFAKDGHEHVFCVAGGATALMRSVWNIGITGPDGKKNREDDRHHAVDAAVIACCTPGIVRNVALVNEGHARADVRQRLFSDSLPYPEFKEQVDAWIPCIVPTLTLPNA

SEQ ID NO: 2573 - protein, 137 aa, unidentified; identical to SEQ ID NO: 2533
  REGION 1..137: note = Description of Unknown: uncultivated organism with predicted taxonomy: Collinsella
  REGION 1..137: note = MG14-76 RuvC-III domain

SEQ ID NO: 2574 - protein, 137 aa, unidentified; identical to SEQ ID NO: 2499
  REGION 1..137: note = Description of Unknown: uncultivated organism with predicted taxonomy: Collinsella
  REGION 1..137: note = MG14-77 RuvC-III domain

SEQ ID NO: 2575 - protein, 137 aa, unidentified
  REGION 1..137: note = Description of Unknown: uncultivated organism with predicted taxonomy: Collinsella
  REGION 1..137: note = MG14-78 RuvC-III domain
TDTAYMSREVCAYLADCLLFPDDGAKAHVVPTTGRATAWLRRRWELNFGSNREKDRSDDRHHATDACVIAACSRSLVIKTARINQETHWSITRGMNETQRRDAIMKALESVMPWETFANEVRAAHDFVVPTRFVPRK

SEQ ID NO: 2576 - protein, 137 aa, unidentified; identical to SEQ ID NO: 2533
  REGION 1..137: note = Description of Unknown: uncultivated organism with predicted taxonomy: Collinsella
  REGION 1..137: note = MG14-79 RuvC-III domain

SEQ ID NO: 2577 - protein, 137 aa, unidentified; identical to SEQ ID NO: 2499
  REGION 1..137: note = Description of Unknown: uncultivated organism with predicted taxonomy: Coriobacteriales
  REGION 1..137: note = MG14-80 RuvC-III domain

SEQ ID NO: 2578 - protein, 137 aa, unidentified
  REGION 1..137: note = Description of Unknown: uncultivated organism with predicted taxonomy: Collinsella
  REGION 1..137: note = MG14-82 RuvC-III domain
TDTAYMSREVCAYLADCLLFPDDGAKAHVVPTTGRATAWLRRRWGLNFGSNREKDRSDDRHHATDACVIAACSRSLVIKTARINQETHWSITRGMNETQRRNAIMKALESVMPWETFANEVRAAHDFVVPTRFVPRK

SEQ ID NO: 2579 - protein, 137 aa, unidentified; identical to SEQ ID NO: 2507
  REGION 1..137: note = Description of Unknown: uncultivated organism with predicted taxonomy: Collinsella
  REGION 1..137: note = MG14-83 RuvC-III domain

SEQ ID NO: 2580 - protein, 128 aa, unidentified; identical to SEQ ID NO: 2505
  REGION 1..128: note = Description of Unknown: uncultivated organism with predicted taxonomy: Olsenella
  REGION 1..128: note = MG14-84 RuvC-III domain

SEQ ID NO: 2581 - protein, 137 aa, unidentified; identical to SEQ ID NO: 2540
  REGION 1..137: note = Description of Unknown: uncultivated organism with predicted taxonomy: Collinsella
  REGION 1..137: note = MG14-85 RuvC-III domain

SEQ ID NO: 2582 - protein, 137 aa, unidentified; identical to SEQ ID NO: 2538
  REGION 1..137: note = Description of Unknown: uncultivated organism with predicted taxonomy: Collinsella
  REGION 1..137: note = MG14-87 RuvC-III domain

SEQ ID NO: 2583 - protein, 137 aa, unidentified; identical to SEQ ID NO: 2538
  REGION 1..137: note = Description of Unknown: uncultivated organism with predicted taxonomy: Collinsella
  REGION 1..137: note = MG14-88 RuvC-III domain

SEQ ID NO: 2584 - protein, 137 aa, unidentified; identical to SEQ ID NO: 2533
  REGION 1..137: note = Description of Unknown: uncultivated organism with predicted taxonomy: Collinsella
  REGION 1..137: note = MG14-89 RuvC-III domain

SEQ ID NO: 2585 - protein, 137 aa, unidentified
  REGION 1..137: note = Description of Unknown: uncultivated organism with predicted taxonomy: Coriobacteriia
  REGION 1..137: note = MG14-90 RuvC-III domain
TDTAYMSREVCAYLADCLLFPDDGAKAHVVPTTGRATAWLRRRWGLNFGSNGEKDRSDDRHHATDACVIAACSRRLVIKTARINQEMHWSMTKGMSKAQRQDAIMKALENAMPWETFANEVRVAHDFVVPTRFVPRK

SEQ ID NO: 2586 - protein, 137 aa, unidentified; identical to SEQ ID NO: 2567
  REGION 1..137: note = Description of Unknown: uncultivated organism with predicted taxonomy: Collinsella tanakaei
  REGION 1..137: note = MG14-91 RuvC-III domain

SEQ ID NO: 2587 - protein, 137 aa, unidentified; identical to SEQ ID NO: 2541
  REGION 1..137: note = Description of Unknown: uncultivated organism with predicted taxonomy: Collinsella
  REGION 1..137: note = MG14-92 RuvC-III domain

SEQ ID NO: 2588 - protein, 137 aa, unidentified; identical to SEQ ID NO: 2538
  REGION 1..137: note = Description of Unknown: uncultivated organism with predicted taxonomy: Collinsella
  REGION 1..137: note = MG14-93 RuvC-III domain

SEQ ID NO: 2589 - protein, 137 aa, unidentified; identical to SEQ ID NO: 2533
  REGION 1..137: note = Description of Unknown: uncultivated organism with predicted taxonomy: Collinsella
  REGION 1..137: note = MG14-94 RuvC-III domain

SEQ ID NO: 2590 - protein, 126 aa, unidentified
  REGION 1..126: note = Description of Unknown: uncultivated organism with predicted taxonomy: Collinsella
  REGION 1..126: note = MG14-95 RuvC-III domain
NDTRYMSVALAKWLRECLPFTKDGHEHVFCVAGGATALMRSVWDIGITGPDGKKNRDDDRHHAVDAAVIACCTPGIVKNVALVNEGHARADVRQRLFSDSLPYPEFKEQVDAWISCIVPTLTLPNT

SEQ ID NO: 2591 - protein, 137 aa, unidentified
  REGION 1..137: note = Description of Unknown: uncultivated organism with predicted taxonomy: Collinsella
  REGION 1..137: note = MG14-96 RuvC-III domain
TDTAYMSREVCAYLADCLLFPDDGAKAHVVPTTGRATAWLRRRWGLNFGSNGEKDRSDNRHHATDACVIAACSRSLVIKTARINQETHWSITRGMNETQRRDAIMKALESVMPWETFANEVRAAHDFVVPTRFVPRK

SEQ ID NO: 2592 - protein, 137 aa, unidentified; identical to SEQ ID NO: 2533
  REGION 1..137: note = Description of Unknown: uncultivated organism with predicted taxonomy: Collinsella
  REGION 1..137: note = MG14-97 RuvC-III domain

SEQ ID NO: 2593 - protein, 137 aa, unidentified
  REGION 1..137: note = Description of Unknown: uncultivated organism with predicted taxonomy: Collinsella
  REGION 1..137: note = MG14-98 RuvC-III domain
TDTAYMSREVCAYLADCLLFPDDGAKAHVVPTTGRATAWLRRRWGLNFGSNGEKDRSDDRHHATDACVIAACSRSLVIKTARINQETHWSITRGMNEAQRRDAIMKALESVMPWETFANEVRAAHDFVVPTRFVPRK

SEQ ID NO: 2594 - protein, 128 aa, unidentified; identical to SEQ ID NO: 2506
  REGION 1..128: note = Description of Unknown: uncultivated organism with predicted taxonomy: Olsenella
  REGION 1..128: note = MG14-99 RuvC-III domain

SEQ ID NO: 2595 - protein, 137 aa, unidentified; identical to SEQ ID NO: 2533
  REGION 1..137: note = Description of Unknown: uncultivated organism with predicted taxonomy: Collinsella
  REGION 1..137: note = MG14-100 RuvC-III domain

SEQ ID NO: 2596 - protein, 126 aa, unidentified
  REGION 1..126: note = Description of Unknown: uncultivated organism with predicted taxonomy: Eggerthella sp. AM16-19
  REGION 1..126: note = MG14-101 RuvC-III domain
NDTRYMSVALAKWLRECLPFARDGHEHVFCVAGGATALMRSVWNIGITGPDGKKNRDDDRHHAVDAAVIACCTPGIVKNVALVNEGHARADVRQRLFRDSLPYPEFKEQVNAWIPCIVPTLTLPNT

SEQ ID NO: 2597 - protein, 128 aa, unidentified
  REGION 1..128: note = Description of Unknown: uncultivated organism with predicted taxonomy: Olsenella sp. KH3B4
  REGION 1..128: note = MG14-102 RuvC-III domain
NDDRYMSVAVKNFLEDRLLFPEDGRKRHVTAVAGGATGNLRWVWGLNFGEGNIKDRTDDRHHAVDAAIIAACSESTVKKVAKASAKGREAFKQLRKSRLADTQPWPTFAAEVAARREFVVPTRMADHG

SEQ ID NO: 2598 - protein, 137 aa, unidentified; identical to SEQ ID NO: 2538
  REGION 1..137: note = Description of Unknown: uncultivated organism with predicted taxonomy: Collinsella
  REGION 1..137: note = MG14-103 RuvC-III domain

SEQ ID NO: 2599 - protein, 137 aa, unidentified; identical to SEQ ID NO: 2538
  REGION 1..137: note = Description of Unknown: uncultivated organism with predicted taxonomy: Collinsella
  REGION 1..137: note = MG14-104 RuvC-III domain

SEQ ID NO: 2600 - protein, 137 aa, unidentified; identical to SEQ ID NO: 2509
  REGION 1..137: note = Description of Unknown: uncultivated organism with predicted taxonomy: Collinsella
  REGION 1..137: note = MG14-105 RuvC-III domain

SEQ ID NO: 2601 - protein, 137 aa, unidentified; identical to SEQ ID NO: 2549
  REGION 1..137: note = Description of Unknown: uncultivated organism with predicted taxonomy: Collinsella
  REGION 1..137: note = MG14-106 RuvC-III domain

SEQ ID NO: 2602 - protein, 137 aa, unidentified; identical to SEQ ID NO: 2499
  REGION 1..137: note = Description of Unknown: uncultivated organism with predicted taxonomy: Collinsella
  REGION 1..137: note = MG14-107 RuvC-III domain

SEQ ID NO: 2603 - protein, 123 aa, unidentified
  REGION 1..123: note = Description of Unknown: uncultivated organism with predicted taxonomy: Atopobium sp. ICM42b
  REGION 1..123: note = MG14-108 RuvC-III domain
VDTQYMARAISAWLSDSLNFSSEFDQKQHVYAVNGRMTAKLRRKWGLNFGEDDTKDRSDNRHHAIDAAVIAACSASMVKEFAISYSRLREVRDSVIAEPWEGFADQVREAREWIIPTMYRPNK

SEQ ID NO: 2604 - protein, 123 aa, unidentified
  REGION 1..123: note = Description of Unknown: uncultivated organism with predicted taxonomy: Atopobium sp. ICM42b
  REGION 1..123: note = MG14-109 RuvC-III domain
SDTQYMSKAIVAWLSDSLDFPSRYGQKQHVYATNGRMTSKLRKEWGLNFGENGIKDRNDKRHHAVDAAVIAACSASMVKEFATSYSRSHETKNSTIAEPWEGFADQVREAREWVIPTMYRPNK

SEQ ID NO: 2605 - protein, 137 aa, unidentified; identical to SEQ ID NO: 2538
  REGION 1..137: note = Description of Unknown: uncultivated organism with predicted taxonomy: Collinsella
  REGION 1..137: note = MG14-110 RuvC-III domain

SEQ ID NO: 2606 - protein, 126 aa, unidentified
  REGION 1..126: note = Description of Unknown: uncultivated organism
  REGION 1..126: note = MG14-111 RuvC-III domain
NDTRYMSRQLAMWVRECLPFPDDKRQHVFCVAGAATSLMRRIWGIGIVDEKGKKDRSDDRHHAVDAAVIACCDQRIVKGIARVNSGRSNIKERERLRYESMPYPEFKAQVEAWIPCIVPTRTVSRT

SEQ ID NO: 2607 - protein, 137 aa, unidentified
  REGION 1..137: note = Description of Unknown: uncultivated organism with predicted taxonomy: Collinsella
  REGION 1..137: note = MG14-112 RuvC-III domain
TDTAYMSREVCAYLADCLLFPDDGAKAHVVPTTGRATAWLRRRWGLNFGSNGEKDRSDDRHHATDACVIAACSRSLVIKTARINQETHWSITRGMNETQRRGAIMKALESVMPWETFANEVRAAHGFVVPTRFVPRK

SEQ ID NO: 2608 - protein, 137 aa, unidentified; identical to SEQ ID NO: 2533
  REGION 1..137: note = Description of Unknown: uncultivated organism with predicted taxonomy: Collinsella
  REGION 1..137: note = MG14-113 RuvC-III domain

SEQ ID NO: 2609 - protein, 137 aa, unidentified
  REGION 1..137: note = Description of Unknown: uncultivated organism with predicted taxonomy: Collinsella
  REGION 1..137: note = MG14-114 RuvC-III domain
TDTAYMSREVCAYLADCLLFPDDGAKAHVVPTTGRATAWLRRRWGLNFGSNGEKDRSDDRHHATDACVIAACSRSLVIKTARINQEAHWSITRGMNETQRRDAIMKALESVMPWETFANEVRAAHDFVVPTRFVPRK

SEQ ID NO: 2610 - protein, 137 aa, unidentified; identical to SEQ ID NO: 2540
  REGION 1..137: note = Description of Unknown: uncultivated organism with predicted taxonomy: Collinsella
  REGION 1..137: note = MG14-115 RuvC-III domain

SEQ ID NO: 2611 - protein, 137 aa, unidentified
  REGION 1..137: note = Description of Unknown: uncultivated organism with predicted taxonomy: Collinsella
  REGION 1..137: note = MG14-116 RuvC-III domain
TDTAYMSREVCAYLADCLLFPDDGAKAHVVPTTGRATAWLRRRWGLNFGSDGEKDRSDDRHHATDACVIAACSPSLVIKTARINQETHWSITRGMNETQRRDAIMKALESVMPWETFANEVRAAHDFVVPTRFVPRK

SEQ ID NO: 2612 - protein, 137 aa, unidentified; identical to SEQ ID NO: 2545
  REGION 1..137: note = Description of Unknown: uncultivated organism with predicted taxonomy: Collinsella
  REGION 1..137: note = MG14-117 RuvC-III domain

SEQ ID NO: 2613 - protein, 128 aa, unidentified
  REGION 1..128: note = Description of Unknown: uncultivated organism with predicted taxonomy: Olsenella sp. KCTC 15699
  REGION 1..128: note = MG14-118 RuvC-III domain
NDDRYMSVAVKNYLEDCLLFPEDGHKRHVTAVAGGATGNLRWVWGLNFGEGNVKNRADDRHHAVDAAIIAACSESTVKKVAEASAKGREAFKQLRKSRLADTQPWPTFAAEVAARREFVVPTRMADHG

SEQ ID NO: 2614 - protein, 137 aa, unidentified
  REGION 1..137: note = Description of Unknown: uncultivated organism with predicted taxonomy: Collinsella
  REGION 1..137: note = MG14-119 RuvC-III domain
TDTAYMSREVCTYLADCLLFPDDGAKAHVVPTTGRATAWLRRRWGLNFGSNGEKDRSDDRHHATDACVIAACSRSLVIKTARINQETHWSITRGMNETQRRDAIMKALESVMPWETFANEVRAAHDFVVPTRFVPRK

SEQ ID NO: 2615 - protein, 137 aa, unidentified; identical to SEQ ID NO: 2567
  REGION 1..137: note = Description of Unknown: uncultivated organism with predicted taxonomy: Collinsella tanakaei
  REGION 1..137: note = MG14-120 RuvC-III domain

SEQ ID NO: 2616 - protein, 137 aa, unidentified
  REGION 1..137: note = Description of Unknown: uncultivated organism with predicted taxonomy: Collinsella
  REGION 1..137: note = MG14-121 RuvC-III domain
TDTAYMSREVCAYLADCLLFPDDGAKAHVVPTTGRATAWLRRRWGLNFGSNGEKDRLDDRHHATDACVIAACSRSLVIKTARINQETHWSITRGMNEAQRRDAIMKALESVMPWETFANEVRAAHDFVVPTRFVPRK

SEQ ID NO: 2617 - protein, 128 aa, unidentified
  REGION 1..128: note = Description of Unknown: uncultivated organism with predicted taxonomy: Olsenella
  REGION 1..128: note = MG14-122 RuvC-III domain
NDDRYMSVAVKNYLEDCLLFPEDGRKRHVTAVAGGATGNLRWVWGLNFGEGNVKDRADDRHHAVDAAIIAACSESTVKKVAEASAKGREAFKQLRKSRLADTQPWPTFAAEVAARREFVVPTRMADHG

SEQ ID NO: 2618 - protein, 137 aa, unidentified; identical to SEQ ID NO: 2533
  REGION 1..137: note = Description of Unknown: uncultivated organism with predicted taxonomy: Olsenella mediterranea
  REGION 1..137: note = MG14-123 RuvC-III domain

SEQ ID NO: 2619 - protein, 137 aa, unidentified; identical to SEQ ID NO: 2533
  REGION 1..137: note = Description of Unknown: uncultivated organism with predicted taxonomy: Collinsella
  REGION 1..137: note = MG14-124 RuvC-III domain

SEQ ID NO: 2620 - protein, 137 aa, unidentified; identical to SEQ ID NO: 2533
  REGION 1..137: note = Description of Unknown: uncultivated organism with predicted taxonomy: Collinsella
  REGION 1..137: note = MG14-125 RuvC-III domain

SEQ ID NO: 2621 - protein, 128 aa, unidentified; identical to SEQ ID NO: 2547
  REGION 1..128: note = Description of Unknown: uncultivated organism with predicted taxonomy: Libanicoccus massiliensis
  REGION 1..128: note = MG14-126 RuvC-III domain

SEQ ID NO: 2622 - protein, 137 aa, unidentified; identical to SEQ ID NO: 2533
  REGION 1..137: note = Description of Unknown: uncultivated organism with predicted taxonomy: Collinsella
  REGION 1..137: note = MG14-127 RuvC-III domain

SEQ ID NO: 2623 - protein, 137 aa, unidentified; identical to SEQ ID NO: 2538
  REGION 1..137: note = Description of Unknown: uncultivated organism with predicted taxonomy: Collinsella
  REGION 1..137: note = MG14-128 RuvC-III domain

SEQ ID NO: 2624 - protein, 137 aa, unidentified; identical to SEQ ID NO: 2533
  REGION 1..137: note = Description of Unknown: uncultivated organism with predicted taxonomy: Collinsella
  REGION 1..137: note = MG14-129 RuvC-III domain

SEQ ID NO: 2625 - protein, 79 aa, unidentified
  REGION 1..79: note = Description of Unknown: uncultivated organism with predicted taxonomy: Olsenella sp. KH3B4
  REGION 1..79: note = MG14-130 RuvC-III domain
NDDRYMSVAVKNYLEDCLLFPEDGRKRHVTAVAGGATGNLRWVWGLNFGEGNVKDRADDRHHAIDAAIIAACSESTVKK

SEQ ID NO: 2626 - protein, 137 aa, unidentified; identical to SEQ ID NO: 2538
  REGION 1..137: note = Description of Unknown: uncultivated organism with predicted taxonomy: Collinsella
  REGION 1..137: note = MG14-131 RuvC-III domain

SEQ ID NO: 2627 - protein, 137 aa, unidentified; identical to SEQ ID NO: 2533
  REGION 1..137: note = Description of Unknown: uncultivated organism with predicted taxonomy: Collinsella
  REGION 1..137: note = MG14-132 RuvC-III domain

SEQ ID NO: 2628 - protein, 137 aa, unidentified; identical to SEQ ID NO: 2533
  REGION 1..137: note = Description of Unknown: uncultivated organism with predicted taxonomy: Collinsella
  REGION 1..137: note = MG14-133 RuvC-III domain

SEQ ID NO: 2629 - protein, 137 aa, unidentified; identical to SEQ ID NO: 2533
  REGION 1..137: note = Description of Unknown: uncultivated organism with predicted taxonomy: Collinsella
  REGION 1..137: note = MG14-135 RuvC-III domain

SEQ ID NO: 2630 - protein, 137 aa, unidentified
  REGION 1..137: note = Description of Unknown: uncultivated organism with predicted taxonomy: Collinsella
  REGION 1..137: note = MG14-136 RuvC-III domain
TDTAYMSREVCAYLADCLLFPDDGAKAHVVPTTGRATAWLRRRWGLNFGSNREKDCSDDRHHATDACVIAACSRSLVIKTARINQETHWSITRGMNETQRRNAIMKALESVMPWETFANEVRAAHDFVVPTRFVPRK

SEQ ID NO: 2631 - protein, 126 aa, unidentified; identical to SEQ ID NO: 2606
  REGION 1..126: note = Description of Unknown: uncultivated organism with predicted taxonomy: Clostridiales
  REGION 1..126: note = MG14-137 RuvC-III domain

SEQ ID NO: 2632 - protein, 137 aa, unidentified; identical to SEQ ID NO: 2499
  REGION 1..137: note = Description of Unknown: uncultivated organism with predicted taxonomy: Collinsella
  REGION 1..137: note = MG14-138 RuvC-III domain

SEQ ID NO: 2633 - protein, 137 aa, unidentified; identical to SEQ ID NO: 2538
  REGION 1..137: note = Description of Unknown: uncultivated organism with predicted taxonomy: Collinsella
  REGION 1..137: note = MG14-139 RuvC-III domain

SEQ ID NO: 2634 - protein, 137 aa, unidentified; identical to SEQ ID NO: 2533
  REGION 1..137: note = Description of Unknown: uncultivated organism with predicted taxonomy: Collinsella
  REGION 1..137: note = MG14-140 RuvC-III domain

SEQ ID NO: 2635 - protein, 128 aa, unidentified; identical to SEQ ID NO: 2551
  REGION 1..128: note = Description of Unknown: uncultivated organism with predicted taxonomy: Olsenella sp. KH3B4
  REGION 1..128: note = MG14-141 RuvC-III domain

SEQ ID NO: 2636 - protein, 137 aa, unidentified; identical to SEQ ID NO: 2541
  REGION 1..137: note = Description of Unknown: uncultivated organism with predicted taxonomy: Collinsella
  REGION 1..137: note = MG14-142 RuvC-III domain

SEQ ID NO: 2637 - protein, 137 aa, unidentified; identical to SEQ ID NO: 2533
  REGION 1..137: note = Description of Unknown: uncultivated organism with predicted taxonomy: Collinsella
  REGION 1..137: note = MG14-143 RuvC-III domain

SEQ ID NO: 2638 - protein, 126 aa, unidentified
  REGION 1..126: note = Description of Unknown: uncultivated organism with predicted taxonomy: Collinsella
  REGION 1..126: note = MG14-144 RuvC-III domain
NDTRYMSVALAKWLRECLPFARDGHEHVFCVAGGATALMRSVWDIGITGPDGKKNRDDDRHHAVDAAVIACCTPGIVKNVALVNEGHARADVRQRLFRDSLPYPEFKEQVNAWIPCIVPTLTLPNT

SEQ ID NO: 2639 - protein, 128 aa, unidentified; identical to SEQ ID NO: 2505
  REGION 1..128: note = Description of Unknown: uncultivated organism with predicted taxonomy: Olsenella sp. KCTC 15699
  REGION 1..128: note = MG14-145 RuvC-III domain

SEQ ID NO: 2640 - protein, 128 aa, unidentified
  REGION 1..128: note = Description of Unknown: uncultivated organism with predicted taxonomy: Olsenella
  REGION 1..128: note = MG14-146 RuvC-III domain
NDDRYMSVAVKNYLEDCLLFPEDGRKRHVTAVAGGATGNLRWVWGLNFGEGNIKDRTDDRHHAVDAAIIAACSESTVKKVAEASAKGREAFKQLRKSRLADTQPWPTFAAEVAARREFVVPTHMANHG

SEQ ID NO: 2641 - protein, 128 aa, unidentified; identical to SEQ ID NO: 2532
  REGION 1..128: note = Description of Unknown: uncultivated organism with predicted taxonomy: Olsenella sp. KH3B4
  REGION 1..128: note = MG14-147 RuvC-III domain

SEQ ID NO: 2642 - protein, 137 aa, unidentified; identical to SEQ ID NO: 2533
  REGION 1..137: note = Description of Unknown: uncultivated organism with predicted taxonomy: Olsenella mediterranea
  REGION 1..137: note = MG14-148 RuvC-III domain

SEQ ID NO: 2643 - protein, 137 aa, unidentified; identical to SEQ ID NO: 2538
  REGION 1..137: note = Description of Unknown: uncultivated organism with predicted taxonomy: Collinsella
  REGION 1..137: note = MG14-149 RuvC-III domain

SEQ ID NO: 2644 - protein, 137 aa, unidentified
  REGION 1..137: note = Description of Unknown: uncultivated organism with predicted taxonomy: Collinsella
  REGION 1..137: note = MG14-150 RuvC-III domain
TDTAYMSREVCAYLADCLLFPDDGAKAHVVPTTGRATAWLRRRWGLNFGSNGEKDRSDDRHHATDACVIAACNRSLVIKTARINQETHWSITRGMNETQRRDAIMKALESVMPWETFANEVRAAHDFVVPTRFVPRK

SEQ ID NO: 2645 - protein, 137 aa, unidentified; identical to SEQ ID NO: 2538
  REGION 1..137: note = Description of Unknown: uncultivated organism with predicted taxonomy: Collinsella
  REGION 1..137: note = MG14-151 RuvC-III domain

SEQ ID NO: 2646 - protein, 137 aa, unidentified; identical to SEQ ID NO: 2509
  REGION 1..137: note = Description of Unknown: uncultivated organism with predicted taxonomy: Collinsella
  REGION 1..137: note = MG14-152 RuvC-III domain

SEQ ID NO: 2647 - protein, 137 aa, unidentified; identical to SEQ ID NO: 2509
  REGION 1..137: note = Description of Unknown: uncultivated organism with predicted taxonomy: Coriobacteriales
  REGION 1..137: note = MG14-153 RuvC-III domain

SEQ ID NO: 2648 - protein, 128 aa, unidentified; identical to SEQ ID NO: 2554
  REGION 1..128: note = Description of Unknown: uncultivated organism with predicted taxonomy: Olsenella
  REGION 1..128: note = MG14-154 RuvC-III domain

SEQ ID NO: 2649 - protein, 128 aa, unidentified; identical to SEQ ID NO: 2505
  REGION 1..128: note = Description of Unknown: uncultivated organism with predicted taxonomy: Olsenella
  REGION 1..128: note = MG14-155 RuvC-III domain

SEQ ID NO: 2650 - protein, 128 aa, unidentified; identical to SEQ ID NO: 2547
  REGION 1..128: note = Description of Unknown: uncultivated organism with predicted taxonomy: Libanicoccus massiliensis
  REGION 1..128: note = MG14-156 RuvC-III domain

SEQ ID NO: 2651 - protein, 137 aa, unidentified; identical to SEQ ID NO: 2540
  REGION 1..137: note = Description of Unknown: uncultivated organism with predicted taxonomy: Collinsella
  REGION 1..137: note = MG14-157 RuvC-III domain

SEQ ID NO: 2652 - protein, 137 aa, unidentified; identical to SEQ ID NO: 2509
  REGION 1..137: note = Description of Unknown: uncultivated organism with predicted taxonomy: Collinsella
  REGION 1..137: note = MG14-158 RuvC-III domain

SEQ ID NO: 2653 - protein, 137 aa, unidentified; identical to SEQ ID NO: 2533
  REGION 1..137: note = Description of Unknown: uncultivated organism with predicted taxonomy: Collinsella
  REGION 1..137: note = MG14-159 RuvC-III domain

SEQ ID NO: 2654 - protein, 137 aa, unidentified; identical to SEQ ID NO: 2553
  REGION 1..137: note = Description of Unknown: uncultivated organism with predicted taxonomy: Collinsella
  REGION 1..137: note = MG14-160 RuvC-III domain

SEQ ID NO: 2655 - protein, 137 aa, unidentified; identical to SEQ ID NO: 2553
  REGION 1..137: note = Description of Unknown: uncultivated organism with predicted taxonomy: Collinsella
  REGION 1..137: note = MG14-161 RuvC-III domain

SEQ ID NO: 2656 - protein, 128 aa, unidentified; identical to SEQ ID NO: 2522
  REGION 1..128: note = Description of Unknown: uncultivated organism with predicted taxonomy: Olsenella
  REGION 1..128: note = MG14-162 RuvC-III domain

SEQ ID NO: 2657 - protein, 137 aa, unidentified; identical to SEQ ID NO: 2553
  REGION 1..137: note = Description of Unknown: uncultivated organism with predicted taxonomy: Collinsella
  REGION 1..137: note = MG14-163 RuvC-III domain

SEQ ID NO: 2658 - protein, 128 aa, unidentified; identical to SEQ ID NO: 2505
  REGION 1..128: note = Description of Unknown: uncultivated organism with predicted taxonomy: Olsenella
  REGION 1..128: note = MG14-164 RuvC-III domain

SEQ ID NO: 2659 - protein, 137 aa, unidentified; identical to SEQ ID NO: 2509
  REGION 1..137: note = Description of Unknown: uncultivated organism with predicted taxonomy: Collinsella
  REGION 1..137: note = MG14-165 RuvC-III domain

SEQ ID NO: 2660 - protein, 137 aa, unidentified; identical to SEQ ID NO: 2533
  REGION 1..137: note = Description of Unknown: uncultivated organism with predicted taxonomy: Collinsella sp. AM17-1
  REGION 1..137: note = MG14-166 RuvC-III domain

SEQ ID NO: 2661 - protein, 137 aa, unidentified; identical to SEQ ID NO: 2538
  REGION 1..137: note = Description of Unknown: uncultivated organism with predicted taxonomy: Collinsella
  REGION 1..137: note = MG14-167 RuvC-III domain

SEQ ID NO: 2662 - protein, 128 aa, unidentified; identical to SEQ ID NO: 2505
  REGION 1..128: note = Description of Unknown: uncultivated organism with predicted taxonomy: Olsenella sp. KH3B4
  REGION 1..128: note = MG14-168 RuvC-III domain

SEQ ID NO: 2663 - protein, 128 aa, unidentified; identical to SEQ ID NO: 2511
  REGION 1..128: note = Description of Unknown: uncultivated organism with predicted taxonomy: Olsenella
  REGION 1..128: note = MG14-169 RuvC-III domain

SEQ ID NO: 2664 - protein, 128 aa, unidentified; identical to SEQ ID NO: 2529
  REGION 1..128: note = Description of Unknown: uncultivated organism with predicted taxonomy: Olsenella sp. KH3B4
  REGION 1..128: note = MG14-170 RuvC-III domain

SEQ ID NO: 2665 - protein, 123 aa, unidentified; identical to SEQ ID NO: 2528
  REGION 1..123: note = Description of Unknown: uncultivated organism with predicted taxonomy: Coriobacteriia bacterium
  REGION 1..123: note = MG14-171 RuvC-III domain

SEQ ID NO: 2666 - protein, 137 aa, unidentified; identical to SEQ ID NO: 2561
  REGION 1..137: note = Description of Unknown: uncultivated organism with predicted taxonomy: Collinsella
  REGION 1..137: note = MG14-172 RuvC-III domain

SEQ ID NO: 2667 - protein, 137 aa, unidentified; identical to SEQ ID NO: 2533
  REGION 1..137: note = Description of Unknown: uncultivated organism with predicted taxonomy: Collinsella
  REGION 1..137: note = MG14-173 RuvC-III domain

SEQ ID NO: 2668 - protein, 137 aa, unidentified
  REGION 1..137: note = Description of Unknown: uncultivated organism with predicted taxonomy: Collinsella
  REGION 1..137: note = MG14-174 RuvC-III domain
TDTAYMSREVCAYLADCLLFPDDGAKAHVVPTTGRATAWLRRRWGLNFGSNGEKDRSDDRHHATDACVIAACSRSLVIKTARINQETHWSIIRGMNETQRRDAIMKALESVMPWETFANEVRVAHDFVVPTRFVPRK

SEQ ID NO: 2669 - protein, 137 aa, unidentified; identical to SEQ ID NO: 2535
  REGION 1..137: note = Description of Unknown: uncultivated organism with predicted taxonomy: Collinsella
  REGION 1..137: note = MG14-175 RuvC-III domain

SEQ ID NO: 2670 - protein, 137 aa, unidentified; identical to SEQ ID NO: 2535
  REGION 1..137: note = Description of Unknown: uncultivated organism with predicted taxonomy: Collinsella aerofaciens
  REGION 1..137: note = MG14-176 RuvC-III domain

SEQ ID NO: 2671 - protein, 137 aa, unidentified; identical to SEQ ID NO: 2533
  REGION 1..137: note = Description of Unknown: uncultivated organism with predicted taxonomy: Collinsella
  REGION 1..137: note = MG14-177 RuvC-III domain

SEQ ID NO: 2672 - protein, 128 aa, unidentified
  REGION 1..128: note = Description of Unknown: uncultivated organism with predicted taxonomy: Olsenella sp. GAM18
  REGION 1..128: note = MG14-178 RuvC-III domain
NDDRYMSVAVKNYLEDCLLFPEDGRKRHVTAVAGGATGNLRWVWGLNFGEGNIKDRTDDRHHAVDAAIIAACSESTVKKVAEASAKGREAFKQLRKSRLADTQPWPTFATEVAARREFVVPTRMADHG

SEQ ID NO: 2673 - protein, 137 aa, unidentified; identical to SEQ ID NO: 2533
  REGION 1..137: note = Description of Unknown: uncultivated organism with predicted taxonomy: Collinsella
  REGION 1..137: note = MG14-179 RuvC-III domain

SEQ ID NO: 2674 - protein, 137 aa, unidentified; identical to SEQ ID NO: 2545
  REGION 1..137: note = Description of Unknown: uncultivated organism with predicted taxonomy: Collinsella
  REGION 1..137: note = MG14-180 RuvC-III domain

SEQ ID NO: 2675 - protein, 128 aa, unidentified; identical to SEQ ID NO: 2566
  REGION 1..128: note = Description of Unknown: uncultivated organism with predicted taxonomy: Olsenella
  REGION 1..128: note = MG14-181 RuvC-III domain

SEQ ID NO: 2676 - protein, 137 aa, unidentified; identical to SEQ ID NO: 2533
  REGION 1..137: note = Description of Unknown: uncultivated organism with predicted taxonomy: Olsenella mediterranea
  REGION 1..137: note = MG14-182 RuvC-III domain

SEQ ID NO: 2677 - protein, 137 aa, unidentified; identical to SEQ ID NO: 2609
  REGION 1..137: note = Description of Unknown: uncultivated organism with predicted taxonomy: Collinsella
  REGION 1..137: note = MG14-183 RuvC-III domain

SEQ ID NO: 2678 - protein, 128 aa, unidentified; identical to SEQ ID NO: 2617
  REGION 1..128: note = Description of Unknown: uncultivated organism with predicted taxonomy: Olsenella
  REGION 1..128: note = MG14-184 RuvC-III domain

SEQ ID NO: 2679 - protein, 137 aa, unidentified; identical to SEQ ID NO: 2533
  REGION 1..137: note = Description of Unknown: uncultivated organism with predicted taxonomy: Collinsella
  REGION 1..137: note = MG14-185 RuvC-III domain

SEQ ID NO: 2680 - protein, 137 aa, unidentified; identical to SEQ ID NO: 2591
  REGION 1..137: note = Description of Unknown: uncultivated organism with predicted taxonomy: Collinsella
  REGION 1..137: note = MG14-186 RuvC-III domain

SEQ ID NO: 2681 - protein, 137 aa, unidentified; identical to SEQ ID NO: 2585
  REGION 1..137: note = Description of Unknown: uncultivated organism with predicted taxonomy: Coriobacteriales
  REGION 1..137: note = MG14-187 RuvC-III domain

SEQ ID NO: 2682 - protein, 137 aa, unidentified; identical to SEQ ID NO: 2533
  REGION 1..137: note = Description of Unknown: uncultivated organism with predicted taxonomy: Collinsella
  REGION 1..137: note = MG14-188 RuvC-III domain

SEQ ID NO: 2683 - protein, 137 aa, unidentified; identical to SEQ ID NO: 2538
  REGION 1..137: note = Description of Unknown: uncultivated organism with predicted taxonomy: Collinsella
  REGION 1..137: note = MG14-189 RuvC-III domain

SEQ ID NO: 2684 - protein, 137 aa, unidentified; identical to SEQ ID NO: 2533
  REGION 1..137: note = Description of Unknown: uncultivated organism with predicted taxonomy: Collinsella
  REGION 1..137: note = MG14-190 RuvC-III domain

SEQ ID NO: 2685 - protein, 137 aa, unidentified; identical to SEQ ID NO: 2538
  REGION 1..137: note = Description of Unknown: uncultivated organism with predicted taxonomy: Collinsella
  REGION 1..137: note = MG14-191 RuvC-III domain

SEQ ID NO: 2686 - protein, 137 aa, unidentified; identical to SEQ ID NO: 2540
  REGION 1..137: note = Description of Unknown: uncultivated organism with predicted taxonomy: Collinsella
  REGION 1..137: note = MG14-192 RuvC-III domain

SEQ ID NO: 2687 - protein, 137 aa, unidentified; identical to SEQ ID NO: 2538
  REGION 1..137: note = Description of Unknown: uncultivated organism with predicted taxonomy: Collinsella
  REGION 1..137: note = MG14-193 RuvC-III domain

SEQ ID NO: 2688 - protein, 128 aa, unidentified; identical to SEQ ID NO: 2550
  REGION 1..128: note = Description of Unknown: uncultivated organism with predicted taxonomy: Olsenella
  REGION 1..128: note = MG14-194 RuvC-III domain

SEQ ID NO: 2689 - protein, 137 aa, unidentified; identical to SEQ ID NO: 2535
  REGION 1..137: note = Description of Unknown: uncultivated organism with predicted taxonomy: Collinsella
  REGION 1..137: note = MG14-195 RuvC-III domain

SEQ ID NO: 2690 - protein, 126 aa, unidentified; identical to SEQ ID NO: 2560
  REGION 1..126: note = Description of Unknown: uncultivated organism with predicted taxonomy: Collinsella
  REGION 1..126: note = MG14-196 RuvC-III domain

SEQ ID NO: 2691 - protein, 137 aa, unidentified; identical to SEQ ID NO: 2533
  REGION 1..137: note = Description of Unknown: uncultivated organism with predicted taxonomy: Collinsella
  REGION 1..137: note = MG14-197 RuvC-III domain

SEQ ID NO: 2692 - protein, 137 aa, unidentified; identical to SEQ ID NO: 2545
  REGION 1..137: note = Description of Unknown: uncultivated organism with predicted taxonomy: Collinsella
  REGION 1..137: note = MG14-198 RuvC-III domain

SEQ ID NO: 2693 - protein, 137 aa, unidentified; identical to SEQ ID NO: 2568
  REGION 1..137: note = Description of Unknown: uncultivated organism with predicted taxonomy: Collinsella
  REGION 1..137: note = MG14-199 RuvC-III domain

SEQ ID NO: 2694 - protein, 137 aa, unidentified; identical to SEQ ID NO: 2538
  REGION 1..137: note = Description of Unknown: uncultivated organism with predicted taxonomy: Collinsella
  REGION 1..137: note = MG14-200 RuvC-III domain

SEQ ID NO: 2695 - protein, 137 aa, unidentified; identical to SEQ ID NO: 2533
  REGION 1..137: note = Description of Unknown: uncultivated organism with predicted taxonomy: Collinsella
  REGION 1..137: note = MG14-201 RuvC-III domain

SEQ ID NO: 2696 - protein, 137 aa, unidentified; identical to SEQ ID NO: 2533
  REGION 1..137: note = Description of Unknown: uncultivated organism with predicted taxonomy: Collinsella
  REGION 1..137: note = MG14-202 RuvC-III domain

SEQ ID NO: 2697 - protein, 137 aa, unidentified; identical to SEQ ID NO: 2533
  REGION 1..137: note = Description of Unknown: uncultivated organism with predicted taxonomy: Collinsella
  REGION 1..137: note = MG14-203 RuvC-III domain

SEQ ID NO: 2698 - protein, 137 aa, unidentified; identical to SEQ ID NO: 2538
  REGION 1..137: note = Description of Unknown: uncultivated organism with predicted taxonomy: Collinsella
  REGION 1..137: note = MG14-204 RuvC-III domain

SEQ ID NO: 2699 - protein, 137 aa, unidentified; identical to SEQ ID NO: 2533
  REGION 1..137: note = Description of Unknown: uncultivated organism with predicted taxonomy: Olsenella mediterranea
  REGION 1..137: note = MG14-205 RuvC-III domain

SEQ ID NO: 2700 - protein, 73 aa, unidentified
  REGION 1..73: note = Description of Unknown: uncultivated organism with predicted taxonomy: Collinsella
  REGION 1..73: note = MG14-206 RuvC-III domain
TDTAYMSREVCAYLADCLLFPDDGAKAHVVPTTGRATAWLRRRWGLNFGSNGEKDRSDDRHHACHRCLCDCSM

SEQ ID NO: 2701 - protein, 137 aa, unidentified; identical to SEQ ID NO: 2630
  REGION 1..137: note = Description of Unknown: uncultivated organism with predicted taxonomy: Collinsella
  REGION 1..137: note = MG14-207 RuvC-III domain

SEQ ID NO: 2702 - protein, 128 aa, unidentified; identical to SEQ ID NO: 2597
  REGION 1..128: note = Description of Unknown: uncultivated organism with predicted taxonomy: Olsenella
  REGION 1..128: note = MG14-208 RuvC-III domain

SEQ ID NO: 2703 - protein, 137 aa, unidentified; identical to SEQ ID NO: 2559
  REGION 1..137: note = Description of Unknown: uncultivated organism with predicted taxonomy: Collinsella
  REGION 1..137: note = MG14-209 RuvC-III domain

SEQ ID NO: 2704 - protein, 137 aa, unidentified; identical to SEQ ID NO: 2575
  REGION 1..137: note = Description of Unknown: uncultivated organism with predicted taxonomy: Collinsella
  REGION 1..137: note = MG14-210 RuvC-III domain

SEQ ID NO: 2705 - protein, 137 aa, unidentified; identical to SEQ ID NO: 2533
  REGION 1..137: note = Description of Unknown: uncultivated organism with predicted taxonomy: Collinsella
  REGION 1..137: note = MG14-211 RuvC-III domain

SEQ ID NO: 2706 - protein, 126 aa, unidentified; identical to SEQ ID NO: 2590
  REGION 1..126: note = Description of Unknown: uncultivated organism with predicted taxonomy: Collinsella
  REGION 1..126: note = MG14-212 RuvC-III domain

SEQ ID NO: 2707 - protein, 137 aa, unidentified; identical to SEQ ID NO: 2533
  REGION 1..137: note = Description of Unknown: uncultivated organism with predicted taxonomy: Collinsella
  REGION 1..137: note = MG14-213 RuvC-III domain

SEQ ID NO: 2708 - protein, 137 aa, unidentified; identical to SEQ ID NO: 2533
  REGION 1..137: note = Description of Unknown: uncultivated organism with predicted taxonomy: Coriobacteriales
  REGION 1..137: note = MG14-214 RuvC-III domain

SEQ ID NO: 2709 - protein, 115 aa, unidentified
  REGION 1..115: note = Description of Unknown: uncultivated organism with predicted taxonomy: Olsenella
  REGION 1..115: note = MG14-215 RuvC-III domain
NDTRYMSRATMAFLADTLEYPDDGRKRHVIAVAGSATSALRHVWGLNFGEGNVKDRSDDRHHAVDACVIAACSESTLKKVARARSRGYRSFKKTQESRLSDTQPWPTFADDVIAM

SEQ ID NO: 2710 - protein, 137 aa, unidentified; identical to SEQ ID NO: 2533
  REGION 1..137: note = Description of Unknown: uncultivated organism with predicted taxonomy: Collinsella
  REGION 1..137: note = MG14-216 RuvC-III domain

SEQ ID NO: 2711 - protein, 137 aa, unidentified; identical to SEQ ID NO: 2533
  REGION 1..137: note = Description of Unknown: uncultivated organism with predicted taxonomy: Collinsella
  REGION 1..137: note = MG14-217 RuvC-III domain

SEQ ID NO: 2712 - protein, 137 aa, unidentified
  REGION 1..137: note = Description of Unknown: uncultivated organism with predicted taxonomy: Olsenella mediterranea
  REGION 1..137: note = MG14-218 RuvC-III domain
TDTAYMSREVCAYLADCLLFPDDGAKAHVVPTTGRATAWLRRRWGLSFGSNGEKDRSDDRHHATDACVIAACSRSLVIKTARINQETHWSITRGMNETQRRDAIMKALESVMPWETFANEVRAAHDFVVPTRFVPRK

SEQ ID NO: 2713 - protein, 137 aa, unidentified; identical to SEQ ID NO: 2538
  REGION 1..137: note = Description of Unknown: uncultivated organism with predicted taxonomy: Collinsella
  REGION 1..137: note = MG14-219 RuvC-III domain

SEQ ID NO: 2714 - protein, 137 aa, unidentified; identical to SEQ ID NO: 2538
  REGION 1..137: note = Description of Unknown: uncultivated organism with predicted taxonomy: Collinsella
  REGION 1..137: note = MG14-220 RuvC-III domain

SEQ ID NO: 2715 - protein, 137 aa, unidentified; identical to SEQ ID NO: 2540
  REGION 1..137: note = Description of Unknown: uncultivated organism with predicted taxonomy: Collinsella
  REGION 1..137: note = MG14-221 RuvC-III domain

SEQ ID NO: 2716 - protein, 137 aa, unidentified; identical to SEQ ID NO: 2538
  REGION 1..137: note = Description of Unknown: uncultivated organism with predicted taxonomy: Collinsella
  REGION 1..137: note = MG14-222 RuvC-III domain

SEQ ID NO: 2717 - protein, 126 aa, unidentified
  REGION 1..126: note = Description of Unknown: uncultivated organism with predicted taxonomy: Collinsella sp. AM13-34
  REGION 1..126: note = MG14-223 RuvC-III domain
NDTRYMSVALAKWLRECLPFTKDGHEHVFCVAGGATALMRSVWDIGITGPDGKKNRDDDRHHAVDAAVIACCTPGIVRNVALVNEGHARADVRQRLFSDSLPYPEFKEQVDAWIPCIVPTLTLPNT

SEQ ID NO: 2718 - protein, 137 aa, unidentified; identical to SEQ ID NO: 2563
  REGION 1..137: note = Description of Unknown: uncultivated organism with predicted taxonomy: Collinsella
  REGION 1..137: note = MG14-224 RuvC-III domain

SEQ ID NO: 2719 - protein, 137 aa, unidentified; identical to SEQ ID NO: 2499
  REGION 1..137: note = Description of Unknown: uncultivated organism with predicted taxonomy: Collinsella
  REGION 1..137: note = MG14-225 RuvC-III domain

SEQ ID NO: 2720 - protein, 137 aa, unidentified; identical to SEQ ID NO: 2499
  REGION 1..137: note = Description of Unknown: uncultivated organism with predicted taxonomy: Collinsella
  REGION 1..137: note = MG14-226 RuvC-III domain

SEQ ID NO: 2721 - protein, 137 aa, unidentified; identical to SEQ ID NO: 2533
  REGION 1..137: note = Description of Unknown: uncultivated organism with predicted taxonomy: Collinsella
  REGION 1..137: note = MG14-227 RuvC-III domain

SEQ ID NO: 2722 - protein, 137 aa, unidentified; identical to SEQ ID NO: 2567
  REGION 1..137: note = Description of Unknown: uncultivated organism with predicted taxonomy: Olsenella
  REGION 1..137: note = MG14-228 RuvC-III domain

SEQ ID NO: 2723 - protein, 137 aa, unidentified; identical to SEQ ID NO: 2614
  REGION 1..137: note = Description of Unknown: uncultivated organism with predicted taxonomy: Olsenella
  REGION 1..137: note = MG14-229 RuvC-III domain

SEQ ID NO: 2724 - protein, 137 aa, unidentified; identical to SEQ ID NO: 2533
  REGION 1..137: note = Description of Unknown: uncultivated organism with predicted taxonomy: Collinsella
  REGION 1..137: note = MG14-230 RuvC-III domain

SEQ ID NO: 2725 - protein, 137 aa, unidentified; identical to SEQ ID NO: 2607
  REGION 1..137: note = Description of Unknown: uncultivated organism with predicted taxonomy: Collinsella
  REGION 1..137: note = MG14-231 RuvC-III domain

SEQ ID NO: 2726 - protein, 137 aa, unidentified; identical to SEQ ID NO: 2538
  REGION 1..137: note = Description of Unknown: uncultivated organism with predicted taxonomy: Collinsella
  REGION 1..137: note = MG14-232 RuvC-III domain

SEQ ID NO: 2727 - protein, 137 aa, unidentified; identical to SEQ ID NO: 2533
  REGION 1..137: note = Description of Unknown: uncultivated organism with predicted taxonomy: Collinsella
  REGION 1..137: note = MG14-233 RuvC-III domain

SEQ ID NO: 2728 - protein, 137 aa, unidentified; identical to SEQ ID NO: 2541
  REGION 1..137: note = Description of Unknown: uncultivated organism with predicted taxonomy: Collinsella
  REGION 1..137: note = MG14-234 RuvC-III domain

SEQ ID NO: 2729 - protein, 137 aa, unidentified; identical to SEQ ID NO: 2611
  REGION 1..137: note = Description of Unknown: uncultivated organism with predicted taxonomy: Collinsella
  REGION 1..137: note = MG14-235 RuvC-III domain

SEQ ID NO: 2730 - protein, 137 aa, unidentified; identical to SEQ ID NO: 2533
  REGION 1..137: note = Description of Unknown: uncultivated organism with predicted taxonomy: Collinsella
  REGION 1..137: note = MG14-236 RuvC-III domain

SEQ ID NO: 2731 - protein, 137 aa, unidentified; identical to SEQ ID NO: 2533
  REGION 1..137: note = Description of Unknown: uncultivated organism with predicted taxonomy: Collinsella
  REGION 1..137: note = MG14-237 RuvC-III domain

SEQ ID NO: 2732 - protein, 123 aa, unidentified; identical to SEQ ID NO: 2603
  REGION 1..123: note = Description of Unknown: uncultivated organism with predicted taxonomy: Atopobium sp. ICM42b
  REGION 1..123: note = MG14-238 RuvC-III domain

SEQ ID NO: 2733 - protein, 137 aa, unidentified; identical to SEQ ID NO: 2578
  REGION 1..137: note = Description of Unknown: uncultivated organism with predicted taxonomy: Collinsella
  REGION 1..137: note = MG14-239 RuvC-III domain

SEQ ID NO: 2734 - protein, 137 aa, unidentified; identical to SEQ ID NO: 2593
  REGION 1..137: note = Description of Unknown: uncultivated organism with predicted taxonomy: Collinsella
  REGION 1..137: note = MG14-240 RuvC-III domain

SEQ ID NO: 2735 - protein, 137 aa, unidentified; identical to SEQ ID NO: 2616
  REGION 1..137: note = Description of Unknown: uncultivated organism with predicted taxonomy: Collinsella
  REGION 1..137: note = MG14-241 RuvC-III domain

SEQ ID NO: 2736 - protein, 137 aa, unidentified; identical to SEQ ID NO: 2499
  REGION 1..137: note = Description of Unknown: uncultivated organism with predicted taxonomy: Collinsella
  REGION 1..137: note = MG14-242 RuvC-III domain

SEQ ID NO: 2737 - protein, 137 aa, unidentified; identical to SEQ ID NO: 2541
  REGION 1..137: note = Description of Unknown: uncultivated organism with predicted taxonomy: Collinsella
  REGION 1..137: note = MG14-243 RuvC-III domain

SEQ ID NO: 2738 - protein, 129 aa, unidentified
  REGION 1..129: note = Description of Unknown: uncultivated organism
  REGION 1..129: note = MG14-244 RuvC-III domain
NDTRYMSVAVKNYLEDCLLFPEDGRKLHVTAVSGGATASLRRVWGLNSNGSDDEKTNSNTMRNSIDAAVIAACSVKTVQAVAKTRSLGRETFRHMRRSRLADTQPWETFADDVIVKCKTVIPTRMAEHG

SEQ ID NO: 2739 - protein, 128 aa, unidentified
  REGION 1..128: note = Description of Unknown: uncultivated organism with predicted taxonomy: Olsenella
  REGION 1..128: note = MG14-245 RuvC-III domain
NDDRYMSVAVKNYLEDCLLFPNDGRKKHVTAVAGGATGNLRWVWGLNFGQGNTKDRDDDRHHAVDAAIIAACSESTVKKVAEASSKGRETFKHLRKSRLSDTQPWPTFAEEVAARRAFVVPTRMVNHG

SEQ ID NO: 2740 - protein, 128 aa, unidentified
  REGION 1..128: note = Description of Unknown: uncultivated organism with predicted taxonomy: Coriobacteriales
  REGION 1..128: note = MG14-246 RuvC-III domain
NDTRYMSVAVKDYLEKSLLFPDDGRKSHVIAVAGGATSALRHVWGLNFGADNTKDRSDDRHHAVDAAVIAACSQATVKKVADTSKLGHSEFKRKRESRLADTQPWPTFADEVIARREFVIPTRMANHG

SEQ ID NO: 2741 - protein, 128 aa, unidentified; identical to SEQ ID NO: 2740
  REGION 1..128: note = Description of Unknown: uncultivated organism with predicted taxonomy: Coriobacteriales
  REGION 1..128: note = MG14-247 RuvC-III domain

SEQ ID NO: 2742 - protein, 128 aa, unidentified; identical to SEQ ID NO: 2740
  REGION 1..128: note = Description of Unknown: uncultivated organism
  REGION 1..128: note = MG14-248 RuvC-III domain

SEQ ID NO: 2743 - protein, 128 aa, unidentified; identical to SEQ ID NO: 2740
  REGION 1..128: note = Description of Unknown: uncultivated organism with predicted taxonomy: Olsenella
  REGION 1..128: note = MG14-249 RuvC-III domain

SEQ ID NO: 2744 - protein, 128 aa, unidentified
  REGION 1..128: note = Description of Unknown: uncultivated organism with predicted taxonomy: Olsenella
  REGION 1..128: note = MG14-250 RuvC-III domain
NDTRYMSVAVKNYLEDCLQFPDDGRKTHVIAVAGGATASLRHVWGLNFGKNNEKDRTDNRHHAVDAAVIAACSTKTVQAVARASSVGRESFKHIRQSRLADTQPWKTFAEDVITERSFVIPTYMADHG

SEQ ID NO: 2745 - protein, 129 aa, unidentified
  REGION 1..129: note = Description of Unknown: uncultivated organism
  REGION 1..129: note = MG14-251 RuvC-III domain
NDTRYMSVAIKNYLEDCLLFPEDGRKLHVTAVSGGATASLRRVWGLNTKGSDDEKTNSDTMRNAIDAAVIAACSVKTVQAVAKTRSLGRETFRHMRRSRLADTQPWETFADDVLAKCETVIPTRMAEHG

SEQ ID NO: 2746 - protein, 128 aa, unidentified
  REGION 1..128: note = Description of Unknown: uncultivated organism with predicted taxonomy: Olsenella umbonata
  REGION 1..128: note = MG14-252 RuvC-III domain
NDDRYMSRAVKSYLEDTLIFPEDGRKKHVTAVSGGATGSLRHVWGLNFGDGNTKDRSDNRHHAVDACVIAACSEATVQAVAKARKLGAEAYKHIREDRLKDTQPWPTFADEVVARREFVIPTRMVSHG

SEQ ID NO: 2747 - protein, 123 aa, unidentified
  REGION 1..123: note = Description of Unknown: uncultivated organism with predicted taxonomy: Atopobium sp. ICM42b
  REGION 1..123: note = MG14-253 RuvC-III domain
NDNRYLSRAVMNWLAETLAFGDMDRRHVYAVTGAGTAILRKSWALNFGPNGLKDRNYDRHHAIDAAVIAACSVSTIQAIATAHAHERRLSESRMVSTQPWPSFAIELTQRIERVVPTHQVQHK

SEQ ID NO: 2748 - protein, 128 aa, unidentified; identical to SEQ ID NO: 2744
  REGION 1..128: note = Description of Unknown: uncultivated organism with predicted taxonomy: Olsenella sp. KH3B4
  REGION 1..128: note = MG14-254 RuvC-III domain

SEQ ID NO: 2749 - protein, 128 aa, unidentified; identical to SEQ ID NO: 2746
  REGION 1..128: note = Description of Unknown: uncultivated organism with predicted taxonomy: Olsenella
  REGION 1..128: note = MG14-255 RuvC-III domain

SEQ ID NO: 2750 - protein, 93 aa, unidentified
  REGION 1..93: note = Description of Unknown: uncultivated organism with predicted taxonomy: Olsenella
  REGION 1..93: note = MG14-256 RuvC-III domain
NDNRYLSRSVMNWLADTLAFDNLGHRHVYAVTGAGTAILRRHWALNFGSNGLKDRNDDRHHAIDAAVIAACSVSTIQSIATAHARGYRSSESR

SEQ ID NO: 2751 - protein, 153 aa, unidentified
  REGION 1..153: note = Description of Unknown: uncultivated organism with predicted taxonomy: Megasphaera
  REGION 1..153: note = MG15-1 RuvC-III domain
QDTQYISKYLYNYLRHHLVLAKGYTERKRRIIPVNGAVTAYFRKRLGINKIRENGDLHHAVDAVIIACATQGIVNKVSRYSKSRELWDYEVDMETGEVLQKKNKNTKDVFPEPWLNFRYELEQKVRVRPLDIPETADITEMEEPFVSHMPNRK

SEQ ID NO: 2752 - protein, 169 aa, unidentified
  REGION 1..169: note = Description of Unknown: uncultivated organism with predicted taxonomy: Selenomonas sp. AE3005
  REGION 1..169: note = MG15-3 RuvC-III domain
TDTQYISRFVKNLLDEHLEFAPWLSGKKQHVIAVNGAVTDYTRKRLGIRKIREDGDLHHAVDAAVIATVTQGNIQKLTNYSKRIECACIKNSDGSYTNPDTGEILKKDELIVQMSKHFPEPWPKFRHELEARVSDHPKELIESLKLPSYSMEEIDALKPPFVSRMPTRK

SEQ ID NO: 2753 - protein, 169 aa, unidentified; identical to SEQ ID NO: 2752
  REGION 1..169: note = Description of Unknown: uncultivated organism with predicted taxonomy: Selenomonas sp. AE3005
  REGION 1..169: note = MG15-4 RuvC-III domain

SEQ ID NO: 2754 - protein, 158 aa, unidentified
  REGION 1..158: note = Description of Unknown: uncultivated organism with predicted taxonomy: Veillonellales
  REGION 1..158: note = MG15-6 RuvC-III domain
QDTQYISRFLYNYLRNTLKLAPGYTDRKRRIIPVNGAVTGYIRKRLDIRKIRENGDLHHAVDAVVIAVTTQGMIQKVTRYSQIRENPKLIDKKTGEVLTAKEFHNKDNFPEPWPRFRQELEVRVSEDPEEAIRRLRLPAYENVGEIKKPFVSRMPRRK

SEQ ID NO: 2755 - protein, 153 aa, unidentified
  REGION 1..153: note = Description of Unknown: uncultivated organism with predicted taxonomy: Megasphaera stantonii
  REGION 1..153: note = MG15-7 RuvC-III domain
QDTQYISKYLYNYLRHHLVLAKGYTERKRRIIPVNGAVTAYIRKRLGINKIRENGDLHHAVDAVIIACATQGIVNKVSRYSKSRELWDYEVDMETGEVLQKKNENRKDIFPEPWLNFRYELEQKVRVRPLDIPETADITEMEEPFVSHMPNRK

SEQ ID NO: 2756 - protein, 164 aa, unidentified
  REGION 1..164: note = Description of Unknown: uncultivated organism with predicted taxonomy: Dialister
  REGION 1..164: note = MG15-8 RuvC-III domain
QDTQYISRFLYNYLRNTLELAPGYTDRKRRIIPVNGAVTGYIRKRLDIRKIRENGDLHHAVDAVVIAATTQGMIQKVTRYSQIKENETWIDDHTKVDERTGEIFFVKKAHEKDAFPEPWPRFRQELEARVSEDPEEAIRRLGLPSYENAGEIKKPFVSRMPRRK

SEQ ID NO: 2757 - protein, 153 aa, unidentified; identical to SEQ ID NO: 2755
  REGION 1..153: note = Description of Unknown: uncultivated organism with predicted taxonomy: Dialister invisus
  REGION 1..153: note = MG15-9 RuvC-III domain

SEQ ID NO: 2758 - protein, 153 aa, unidentified
  REGION 1..153: note = Description of Unknown: uncultivated organism with predicted taxonomy: Dialister
  REGION 1..153: note = MG15-10 RuvC-III domain
QDTQYISKYLYNYLRHHLVLAKGYTERKRRIIPVNGAVTAYFRKRLGINKIRENGDLHHAVDAVIIACATQGIVNKVSRYSKSRELWDYEVDMETGEVLQKKNKNTKDVFPEPWLNFRYELEQKVRIRPLDIPKTADITEMEEPFVSHMPNRK

SEQ ID NO: 2759 - protein, 153 aa, unidentified; identical to SEQ ID NO: 2758
  REGION 1..153: note = Description of Unknown: uncultivated organism with predicted taxonomy: Dialister
  REGION 1..153: note = MG15-11 RuvC-III domain

SEQ ID NO: 2760 - protein, 167 aa, unidentified
  REGION 1..167: note = Description of Unknown: uncultivated organism with predicted taxonomy: Megasphaera micronuciformis
  REGION 1..167: note = MG15-12 RuvC-III domain
QDTQYISRFMLNYLQNNYELTPGNTDRKRRIIPVNGAVTAYVRKRLGISKIRENGDLHHAVDAAVIAAVTQGVVNSVSKYSKRHELQYHVDEHGNCVDLVTGELMGDAFKENHKIKGFPEPWPQFRAELEARVSENATEAIRILNLPTYSPDEEIKTPFVSRMVRHK

SEQ ID NO: 2761 - protein, 153 aa, unidentified; identical to SEQ ID NO: 2755
  REGION 1..153: note = Description of Unknown: uncultivated organism with predicted taxonomy: Megasphaera sp. AM44-1BH
  REGION 1..153: note = MG15-13 RuvC-III domain

SEQ ID NO: 2762 - protein, 153 aa, unidentified
  REGION 1..153: note = Description of Unknown: uncultivated organism with predicted taxonomy: Dialister
  REGION 1..153: note = MG15-14 RuvC-III domain
QDTQYISKYLYNYLRHHLVLAKGYTERKRRIIPVNGAVTAYFRKRLGINKIRENGDLHHAVDAVIIACATQGIVNKVSRYSKSRELWDYEVDMETGEVLQKKNENRKDIFPEPWLNFRYELEQKVRVRPLDIPETADITEMEEPFVSHMPNRK

SEQ ID NO: 2763 - protein, 167 aa, unidentified
  REGION 1..167: note = Description of Unknown: uncultivated organism with predicted taxonomy: Megasphaera micronuciformis
  REGION 1..167: note = MG15-15 RuvC-III domain
QDTQYISRFMLNYLQNNYELTPGNTDRRRRIIPVNGAVTAYVRKRLGISKIRENGDLHHAVDAAVIAAVTQGVVNSVSRYSKRHELQYHVDEHGNCVDLVTGELMGDAFKENHKIKGFPEPWPQFRAELEARVSENAAEAIRILNLPTYSPDEEIKTPFVSRMVRHK

SEQ ID NO: 2764 - protein, 165 aa, unidentified
  REGION 1..165: note = Description of Unknown: uncultivated organism with predicted taxonomy: Megasphaera stantonii
  REGION 1..165: note = MG15-16 RuvC-III domain
QDTQYISRYLYNYLKRHIELKEGYTDRKRRIIPVNGAVTAYVRKRLGISKIRENGDLHHAVDAVIIACVTQGVVNKISRYSKIKELRQFMTADGTIVDQETGEVLQTANPRKTDPFPEPWPKFRQELEARVSDNPAEAIAALRLPTYEGIVTISAPFVSRMPNRK

SEQ ID NO: 2765 - protein, 153 aa, unidentified; identical to SEQ ID NO: 2755
  REGION 1..153: note = Description of Unknown: uncultivated organism with predicted taxonomy: Dialister
  REGION 1..153: note = MG15-17 RuvC-III domain

SEQ ID NO: 2766 - protein, 167 aa, unidentified
  REGION 1..167: note = Description of Unknown: uncultivated organism with predicted taxonomy: Megasphaera micronuciformis
  REGION 1..167: note = MG15-18 RuvC-III domain
QDTQYISRFMLNYLQNNYELTPGNTDRKRRIIPVNGAVTAYVRKRLGISKIRENGDLHHAVDAAVIAAVTQGVVNSVSKYSKRHELQYHVDEHGNCVDLVTGELMGDAFKENHKIKGFPEPWPQFRAELEARVSENAAEAIRILKLPTYSPDEEIKTPFVSRMVRHK

SEQ ID NO: 2767 - protein, 167 aa, unidentified
  REGION 1..167: note = Description of Unknown: uncultivated organism with predicted taxonomy: Megasphaera micronuciformis
  REGION 1..167: note = MG15-19 RuvC-III domain
QDTQYISRFMLNYLQNNYELTPGNTDRRRRIIPVNGAVTAYVRKRLGISKIRENGDLHHAVDAAVIAAVTQGVVNSVSKYSKRHELQYHVDEHGNCVDLVTGELMGDAFKENHKIKGFPEPWPQFRAELEARVSENAAEAIRILKLPTYSPDEEIKTPFVSRMVRHK

SEQ ID NO: 2768 - protein, 153 aa, unidentified; identical to SEQ ID NO: 2751
  REGION 1..153: note = Description of Unknown: uncultivated organism with predicted taxonomy: Dialister
  REGION 1..153: note = MG15-20 RuvC-III domain

SEQ ID NO: 2769 - protein, 153 aa, unidentified; identical to SEQ ID NO: 2755
  REGION 1..153: note = Description of Unknown: uncultivated organism with predicted taxonomy: Dialister
  REGION 1..153: note = MG15-21 RuvC-III domain

SEQ ID NO: 2770 - protein, 153 aa, unidentified; identical to SEQ ID NO: 2751
  REGION 1..153: note = Description of Unknown: uncultivated organism with predicted taxonomy: Dialister
  REGION 1..153: note = MG15-22 RuvC-III domain

SEQ ID NO: 2771 - protein, 153 aa, unidentified; identical to SEQ ID NO: 2758
  REGION 1..153: note = Description of Unknown: uncultivated organism with predicted taxonomy: Dialister
  REGION 1..153: note = MG15-23 RuvC-III domain

SEQ ID NO: 2772 - protein, 153 aa, unidentified
  REGION 1..153: note = Description of Unknown: uncultivated organism with predicted taxonomy: Dialister invisus
  REGION 1..153: note = MG15-24 RuvC-III domain
QDTQYISKYLYNYLLENLELAKGYTERKRRIIPVNGAVTAYIRKRLGINKIRENGDLHHAVDAVIIACATQGIVNKVSRYSKSRELWDYEVDKETGEILQKKNKNTKDVFPEPWLNFRYELEQKVRIRPLDIPETADITKMEEPFVSHMPNRK

SEQ ID NO: 2773 - protein, 153 aa, unidentified; identical to SEQ ID NO: 2772
  REGION 1..153: note = Description of Unknown: uncultivated organism with predicted taxonomy: Dialister
  REGION 1..153: note = MG15-25 RuvC-III domain

SEQ ID NO: 2774 - protein, 153 aa, unidentified; identical to SEQ ID NO: 2751
  REGION 1..153: note = Description of Unknown: uncultivated organism with predicted taxonomy: Dialister
  REGION 1..153: note = MG15-26 RuvC-III domain

SEQ ID NO: 2775 - protein, 153 aa, unidentified
  REGION 1..153: note = Description of Unknown: uncultivated organism with predicted taxonomy: Dialister
  REGION 1..153: note = MG15-27 RuvC-III domain
QDTQYISKYLYNYLRHHLVLAKGYTERKRRIIPVNGAVTAYFRKRLGINKIRGNGDLHHAVDAVIIACATQGIVNKVSRYSKSRELWDYEVDMETGEVLQKKNKNTKDVFPEPWLNFRYELEQKVRVRPLDIPKTADITEMEEPFVSHMPNRK

SEQ ID NO: 2776 - protein, 153 aa, unidentified; identical to SEQ ID NO: 2751
  REGION 1..153: note = Description of Unknown: uncultivated organism with predicted taxonomy: Dialister
  REGION 1..153: note = MG15-28 RuvC-III domain

SEQ ID NO: 2777 - protein, 119 aa, unidentified
  REGION 1..119: note = Description of Unknown: uncultivated organism with predicted taxonomy: Dialister invisus
  REGION 1..119: note = MG15-29 RuvC-III domain
QDTQYISKYLYNYLRHHLVLAKGYTERKRRIIPVNGAVTAYFRKRLGINKIRENGDLHHAVDAVIIACATQGIVNKVSRYSKSRELWDYEVDMETGEVLQKKNKNTKDVFPEPWLNFRY

SEQ ID NO: 2778 - protein, 153 aa, unidentified; identical to SEQ ID NO: 2755
  REGION 1..153: note = Description of Unknown: uncultivated organism with predicted taxonomy: Megasphaera sp. AM44-1BH
  REGION 1..153: note = MG15-30 RuvC-III domain

SEQ ID NO: 2779 - protein, 153 aa, unidentified
  REGION 1..153: note = Description of Unknown: uncultivated organism with predicted taxonomy: Dialister
  REGION 1..153: note = MG15-31 RuvC-III domain
QDTQYISKYLYNYLRHHLVLAKGYTERKRRIIPVNGAVTAYFRKRLGINKIRENGDLHHAVDAVIIACATQGIINKVSRYSKSRELWDYEVDMETGEVLQKKNKNTKDVFPEPWLNFRYELEQKVRVRPLNIPETADITEMEEPFVSHMPNRK

SEQ ID NO: 2780 - protein, 153 aa, unidentified; identical to SEQ ID NO: 2751
  REGION 1..153: note = Description of Unknown: uncultivated organism with predicted taxonomy: Veillonellales
  REGION 1..153: note = MG15-32 RuvC-III domain

SEQ ID NO: 2781 - protein, 153 aa, unidentified
  REGION 1..153: note = Description of Unknown: uncultivated organism with predicted taxonomy: Dialister
  REGION 1..153: note = MG15-33 RuvC-III domain
QDTQYISKYLYNYLRHHLVLAKGYTERKRRIIPVNGAVTAYFRKRLGINKIRENGDLHHAVDAVIIACATQGIVNKVSRYSKSRELWDYEVDMETGEVLQKKNKNTKDVFPEPWLNFRYELEQKVRVRPLDIPKTADITEMEEPFVSHMPNRK

SEQ ID NO: 2782 - protein, 153 aa, unidentified; identical to SEQ ID NO: 2772
  REGION 1..153: note = Description of Unknown: uncultivated organism with predicted taxonomy: Megasphaera
  REGION 1..153: note = MG15-34 RuvC-III domain

SEQ ID NO: 2783 - protein, 165 aa, unidentified; identical to SEQ ID NO: 2764
  REGION 1..165: note = Description of Unknown: uncultivated organism with predicted taxonomy: Megasphaera
  REGION 1..165: note = MG15-35 RuvC-III domain

SEQ ID NO: 2784 - protein, 153 aa, unidentified; identical to SEQ ID NO: 2772
  REGION 1..153: note = Description of Unknown: uncultivated organism with predicted taxonomy: Dialister
  REGION 1..153: note = MG15-36 RuvC-III domain

SEQ ID NO: 2785 - protein, 153 aa, unidentified; identical to SEQ ID NO: 2772
  REGION 1..153: note = Description of Unknown: uncultivated organism with predicted taxonomy: Dialister
  REGION 1..153: note = MG15-37 RuvC-III domain

SEQ ID NO: 2786 - protein, 170 aa, unidentified
  REGION 1..170: note = Description of Unknown: uncultivated organism with predicted taxonomy: Selenomonas bovis
  REGION 1..170: note = MG15-38 RuvC-III domain
NDTKYISRFIYNLIRQHLQFAPFRTDRKQHIISVNGAVTSYIRKRLGIPKIREDGDLHHAVDAVVIASITQGTIQKVTRYSREKETLYHCDSKGRLIDTSTGEILSPEEHQRRLAEKFPEPWPCFRKEIEARISHHPAENLRLLHLPTYTEEELAELEKPIFVSRMPNHK

SEQ ID NO: 2787 - protein, 153 aa, unidentified; identical to SEQ ID NO: 2751
  REGION 1..153: note = Description of Unknown: uncultivated organism with predicted taxonomy: Dialister
  REGION 1..153: note = MG15-39 RuvC-III domain

SEQ ID NO: 2788 - protein, 153 aa, unidentified; identical to SEQ ID NO: 2751
  REGION 1..153: note = Description of Unknown: uncultivated organism with predicted taxonomy: Dialister
  REGION 1..153: note = MG15-40 RuvC-III domain

SEQ ID NO: 2789 - protein, 165 aa, unidentified
  REGION 1..165: note = Description of Unknown: uncultivated organism with predicted taxonomy: Megasphaera sp. AM44-1BH
  REGION 1..165: note = MG15-41 RuvC-III domain
QDTQYLSTYLYNYLCHVMKLTPGCTERKRRIIAVNGAVTAYVRKRLGINKIRSNGDLHHAVDAVIIACVTQGVINRISRYSKIKELQNFQTNDGQVVDSVTGEILTLKHVHKKDPFPEPWPHFRQELEARVGKQPQEAIAALHLPTYKNVESIYTPFVSRMPNRK

SEQ ID NO: 2790 - protein, 167 aa, unidentified
  REGION 1..167: note = Description of Unknown: uncultivated organism with predicted taxonomy: Veillonellales
  REGION 1..167: note = MG15-42 RuvC-III domain
QDTQYISRFLYNYLRQNLPLKEGFTNRKRRIIPVNGAVTSYVRKRLGIAKIRENGDLHHAVDAVIIACVTQGVIKRVSEYSKSRELWLYQLDDGTVIDGETGEVMTGQRGHKQEPFPEPWPEFRHELEDRVSENPPELLRHLQLPAYEGIDIETIKTPFVSRMPNRK

SEQ ID NO: 2791 - protein, 153 aa, unidentified; identical to SEQ ID NO: 2758
  REGION 1..153: note = Description of Unknown: uncultivated organism with predicted taxonomy: Veillonellales
  REGION 1..153: note = MG15-43 RuvC-III domain

SEQ ID NO: 2792 - protein, 167 aa, unidentified; identical to SEQ ID NO: 2790
  REGION 1..167: note = Description of Unknown: uncultivated organism with predicted taxonomy: Veillonellales
  REGION 1..167: note = MG15-44 RuvC-III domain

SEQ ID NO: 2793 - protein, 170 aa, unidentified; identical to SEQ ID NO: 2786
  REGION 1..170: note = Description of Unknown: uncultivated organism with predicted taxonomy: Selenomonas bovis
  REGION 1..170: note = MG15-45 RuvC-III domain

SEQ ID NO: 2794 - protein, 153 aa, unidentified
  REGION 1..153: note = Description of Unknown: uncultivated organism with predicted taxonomy: Dialister
  REGION 1..153: note = MG15-46 RuvC-III domain
QDTQYISKYLYNYLRHHLVPAKGYTERKRRIIPVNGAVTAYIRKRLGINKIRENGDLHHAVDAVIIACATQGIVNKVSRYSKSRELWDYEVDMETGEVLQKKNENRKDIFPEPWLNFRYELEQKVRVRPLDIPETADITEMEEPFVSHMPNRK

SEQ ID NO: 2795 - protein, 158 aa, unidentified
  REGION 1..158: note = Description of Unknown: uncultivated organism with predicted taxonomy: Dialister
  REGION 1..158: note = MG15-47 RuvC-III domain
QDTQYISRFLYNYLRNTLELTPGYTDRKRRIIPVNGAVTGYIRKRLGIRKIRENGDLHHAVDAVVIAVTTQGMIQKVTRYSQIRENPKLIDKKTGEVLTAKEFHNKDNFPEPWPRFRQELEARVSEDPEEAIRRLRLPAYENVGEIKKPFISRMPRRK

SEQ ID NO: 2796 - protein, 170 aa, unidentified; identical to SEQ ID NO: 2786
  REGION 1..170: note = Description of Unknown: uncultivated organism with predicted taxonomy: Selenomonas bovis
  REGION 1..170: note = MG15-48 RuvC-III domain

SEQ ID NO: 2797 - protein, 153 aa, unidentified
  REGION 1..153: note = Description of Unknown: uncultivated organism with predicted taxonomy: Dialister
  REGION 1..153: note = MG15-49 RuvC-III domain
QDTQYISKYLYNYLLENLELAKGYTERKRRIIPVNGAVTAYFRKRLGINKIRENGDLHHAVDAVIIACATQGIVNKVSRYSKSRELWDYEVDMETGEVLQKKNENRKDIFPEPWLNFRYELEQKVRVRPLDIPETADITEMEEPFVSHMPNRK

SEQ ID NO: 2798 - protein, 153 aa, unidentified; identical to SEQ ID NO: 2751
  REGION 1..153: note = Description of Unknown: uncultivated organism with predicted taxonomy: Dialister
  REGION 1..153: note = MG15-50 RuvC-III domain

SEQ ID NO: 2799 - protein, 153 aa, unidentified; identical to SEQ ID NO: 2758
  REGION 1..153: note = Description of Unknown: uncultivated organism with predicted taxonomy: Dialister
  REGION 1..153: note = MG15-51 RuvC-III domain

SEQ ID NO: 2800 - protein, 153 aa, unidentified; identical to SEQ ID NO: 2797
  REGION 1..153: note = Description of Unknown: uncultivated organism with predicted taxonomy: Veillonellales
  REGION 1..153: note = MG15-52 RuvC-III domain

SEQ ID NO: 2801 - protein, 153 aa, unidentified; identical to SEQ ID NO: 2772
  REGION 1..153: note = Description of Unknown: uncultivated organism with predicted taxonomy: Dialister invisus
  REGION 1..153: note = MG15-53 RuvC-III domain

SEQ ID NO: 2802 - protein, 153 aa, unidentified; identical to SEQ ID NO: 2781
  REGION 1..153: note = Description of Unknown: uncultivated organism with predicted taxonomy: Dialister
  REGION 1..153: note = MG15-54 RuvC-III domain

SEQ ID NO: 2803 - protein, 167 aa, unidentified
  REGION 1..167: note = Description of Unknown: uncultivated organism with predicted taxonomy: Megasphaera stantonii
  REGION 1..167: note = MG15-55 RuvC-III domain
QDTQYISRFMLNYLQNNYELTPGNTNRKRRIIPVNGAVTAYVRKRLGISKIRENGDLHHAVDATVIAAVTQGVVNSVSKYSKRHELQYHVDEHGNCVDLVTGELMGDAFKENHKIKGFPEPWPQFRAELEARVSENAAEAIRILKLPTYSPDEEIKTPFVSRMVRHK

SEQ ID NO: 2804 - protein, 170 aa, unidentified; identical to SEQ ID NO: 2786
  REGION 1..170: note = Description of Unknown: uncultivated organism with predicted taxonomy: Selenomonas bovis
  REGION 1..170: note = MG15-56 RuvC-III domain

SEQ ID NO: 2805 - protein, 153 aa, unidentified; identical to SEQ ID NO: 2781
  REGION 1..153: note = Description of Unknown: uncultivated organism with predicted taxonomy: Dialister
  REGION 1..153: note = MG15-57 RuvC-III domain

SEQ ID NO: 2806 - protein, 153 aa, unidentified; identical to SEQ ID NO: 2794
  REGION 1..153: note = Description of Unknown: uncultivated organism with predicted taxonomy: Dialister
  REGION 1..153: note = MG15-58 RuvC-III domain

SEQ ID NO: 2807 - protein, 153 aa, unidentified; identical to SEQ ID NO: 2794
  REGION 1..153: note = Description of Unknown: uncultivated organism with predicted taxonomy: Dialister
  REGION 1..153: note = MG15-59 RuvC-III domain

SEQ ID NO: 2808 - protein, 153 aa, unidentified; identical to SEQ ID NO: 2772
  REGION 1..153: note = Description of Unknown: uncultivated organism with predicted taxonomy: Megasphaera
  REGION 1..153: note = MG15-60 RuvC-III domain

SEQ ID NO: 2809 - protein, 153 aa, unidentified; identical to SEQ ID NO: 2772
  REGION 1..153: note = Description of Unknown: uncultivated organism with predicted taxonomy: Dialister
  REGION 1..153: note = MG15-61 RuvC-III domain

SEQ ID NO: 2810 - protein, 167 aa, unidentified; identical to SEQ ID NO: 2766
  REGION 1..167: note = Description of Unknown: uncultivated organism with predicted taxonomy: Megasphaera stantonii
  REGION 1..167: note = MG15-62 RuvC-III domain

SEQ ID NO: 2811 - protein, 153 aa, unidentified; identical to SEQ ID NO: 2762
  REGION 1..153: note = Description of Unknown: uncultivated organism with predicted taxonomy: Dialister
  REGION 1..153: note = MG15-63 RuvC-III domain

SEQ ID NO: 2812 - protein, 153 aa, unidentified; identical to SEQ ID NO: 2794
  REGION 1..153: note = Description of Unknown: uncultivated organism with predicted taxonomy: Megasphaera
  REGION 1..153: note = MG15-64 RuvC-III domain

SEQ ID NO: 2813 - protein, 153 aa, unidentified; identical to SEQ ID NO: 2751
  REGION 1..153: note = Description of Unknown: uncultivated organism with predicted taxonomy: Dialister
  REGION 1..153: note = MG15-65 RuvC-III domain

SEQ ID NO: 2814 - protein, 167 aa, unidentified; identical to SEQ ID NO: 2766
  REGION 1..167: note = Description of Unknown: uncultivated organism with predicted taxonomy: Megasphaera micronuciformis
  REGION 1..167: note = MG15-66 RuvC-III domain

SEQ ID NO: 2815 - protein, 167 aa, unidentified; identical to SEQ ID NO: 2766
  REGION 1..167: note = Description of Unknown: uncultivated organism with predicted taxonomy: Megasphaera stantonii
  REGION 1..167: note = MG15-67 RuvC-III domain

SEQ ID NO: 2816 - protein, 153 aa, unidentified
  REGION 1..153: note = Description of Unknown: uncultivated organism with predicted taxonomy: Veillonellaceae bacterium DNF00626
  REGION 1..153: note = MG15-68 RuvC-III domain
QDTQYISSYLYRYLMQNITLAPGYTDRKERIISLNGVVTGYVRKRWRIPKIRANGDLHHAVDAVVIACINDRLIKRVTEYSKAKELEYTPSDSGAVKTSMKDGFPEPWYCFRQELKARLSETPDEAIRNLHLATYCNVGNIKTPFVSRMLKCK

SEQ ID NO: 2817 - protein, 164 aa, unidentified
  REGION 1..164: note = Description of Unknown: uncultivated organism with predicted taxonomy: Dialister
  REGION 1..164: note = MG15-69 RuvC-III domain
QDTQYISRFLYNYLRNTLELTPGYTDRKRRIIPVNGAVTGYIRKRLGIHKIRENGDLHHAVDAVVIAATTQGMIQKVTRYSQIKENETWIDDHTKVDERTGEIFFVKKAHEKDAFPEPWPRFRQELEARVSEDPEETIRRLRLPSYENAGEIKKPFVSRMPRRK

SEQ ID NO: 2818 - protein, 153 aa, unidentified; identical to SEQ ID NO: 2758
  REGION 1..153: note = Description of Unknown: uncultivated organism with predicted taxonomy: Dialister
  REGION 1..153: note = MG15-70 RuvC-III domain

SEQ ID NO: 2819 - protein, 153 aa, unidentified; identical to SEQ ID NO: 2794
  REGION 1..153: note = Description of Unknown: uncultivated organism with predicted taxonomy: Dialister
  REGION 1..153: note = MG15-71 RuvC-III domain

SEQ ID NO: 2820 - protein, 153 aa, unidentified; identical to SEQ ID NO: 2758
  REGION 1..153: note = Description of Unknown: uncultivated organism with predicted taxonomy: Dialister
  REGION 1..153: note = MG15-72 RuvC-III domain

SEQ ID NO: 2821 - protein, 153 aa, unidentified; identical to SEQ ID NO: 2772
  REGION 1..153: note = Description of Unknown: uncultivated organism with predicted taxonomy: Dialister invisus
  REGION 1..153: note = MG15-73 RuvC-III domain

SEQ ID NO: 2822 - protein, 153 aa, unidentified; identical to SEQ ID NO: 2772
  REGION 1..153: note = Description of Unknown: uncultivated organism with predicted taxonomy: Dialister
  REGION 1..153: note = MG15-74 RuvC-III domain

SEQ ID NO: 2823 - protein, 153 aa, unidentified; identical to SEQ ID NO: 2772
  REGION 1..153: note = Description of Unknown: uncultivated organism with predicted taxonomy: Dialister invisus
  REGION 1..153: note = MG15-75 RuvC-III domain

SEQ ID NO: 2824 - protein, 153 aa, unidentified; identical to SEQ ID NO: 2751
  REGION 1..153: note = Description of Unknown: uncultivated organism with predicted taxonomy: Dialister
  REGION 1..153: note = MG15-76 RuvC-III domain

SEQ ID NO: 2825 - protein, 153 aa, unidentified; identical to SEQ ID NO: 2781
  REGION 1..153: note = Description of Unknown: uncultivated organism with predicted taxonomy: Dialister invisus
  REGION 1..153: note = MG15-77 RuvC-III domain

SEQ ID NO: 2826 - protein, 153 aa, unidentified; identical to SEQ ID NO: 2772
  REGION 1..153: note = Description of Unknown: uncultivated organism with predicted taxonomy: Dialister
  REGION 1..153: note = MG15-78 RuvC-III domain

SEQ ID NO: 2827 - protein, 153 aa, unidentified; identical to SEQ ID NO: 2751
  REGION 1..153: note = Description of Unknown: uncultivated organism with predicted taxonomy: Megasphaera stantonii
  REGION 1..153: note = MG15-79 RuvC-III domain

SEQ ID NO: 2828 - protein, 153 aa, unidentified; identical to SEQ ID NO: 2755
  REGION 1..153: note = Description of Unknown: uncultivated organism with predicted taxonomy: Megasphaera sp. AM44-1BH
  REGION 1..153: note = MG15-80 RuvC-III domain

SEQ ID NO: 2829 - protein, 153 aa, unidentified; identical to SEQ ID NO: 2751
  REGION 1..153: note = Description of Unknown: uncultivated organism with predicted taxonomy: Megasphaera
  REGION 1..153: note = MG15-81 RuvC-III domain

SEQ ID NO: 2830 - protein, 153 aa, unidentified; identical to SEQ ID NO: 2755
  REGION 1..153: note = Description of Unknown: uncultivated organism with predicted taxonomy: Megasphaera sp. AM44-1BH
  REGION 1..153: note = MG15-82 RuvC-III domain

SEQ ID NO: 2831 - protein, 153 aa, unidentified; identical to SEQ ID NO: 2816
  REGION 1..153: note = Description of Unknown: uncultivated organism with predicted taxonomy: Veillonellaceae bacterium DNF00626
  REGION 1..153: note = MG15-83 RuvC-III domain

SEQ ID NO: 2832 - protein, 153 aa, unidentified; identical to SEQ ID NO: 2755
  REGION 1..153: note = Description of Unknown: uncultivated organism with predicted taxonomy: Dialister
  REGION 1..153: note = MG15-84 RuvC-III domain

SEQ ID NO: 2833 - protein, 153 aa, unidentified; identical to SEQ ID NO: 2755
  REGION 1..153: note = Description of Unknown: uncultivated organism with predicted taxonomy: Dialister
  REGION 1..153: note = MG15-85 RuvC-III domain

SEQ ID NO: 2834 - protein, 153 aa, unidentified; identical to SEQ ID NO: 2775
  REGION 1..153: note = Description of Unknown: uncultivated organism with predicted taxonomy: Dialister
  REGION 1..153: note = MG15-86 RuvC-III domain

SEQ ID NO: 2835 - protein, 153 aa, unidentified; identical to SEQ ID NO: 2779
  REGION 1..153: note = Description of Unknown: uncultivated organism with predicted taxonomy: Dialister
  REGION 1..153: note = MG15-87 RuvC-III domain

SEQ ID NO: 2836 - protein, 153 aa, unidentified; identical to SEQ ID NO: 2755
  REGION 1..153: note = Description of Unknown: uncultivated organism with predicted taxonomy: Megasphaera sp. AM44-1BH
  REGION 1..153: note = MG15-88 RuvC-III domain

SEQ ID NO: 2837 - protein, 153 aa, unidentified; identical to SEQ ID NO: 2755
  REGION 1..153: note = Description of Unknown: uncultivated organism with predicted taxonomy: Dialister
  REGION 1..153: note = MG15-89 RuvC-III domain

SEQ ID NO: 2838 - protein, 153 aa, unidentified; identical to SEQ ID NO: 2762
  REGION 1..153: note = Description of Unknown: uncultivated organism with predicted taxonomy: Dialister
  REGION 1..153: note = MG15-90 RuvC-III domain

SEQ ID NO: 2839 - protein, 153 aa, unidentified; identical to SEQ ID NO: 2794
  REGION 1..153: note = Description of Unknown: uncultivated organism with predicted taxonomy: Dialister
  REGION 1..153: note = MG15-91 RuvC-III domain

SEQ ID NO: 2840 - protein, 165 aa, unidentified; identical to SEQ ID NO: 2764
  REGION 1..165: note = Description of Unknown: uncultivated organism with predicted taxonomy: Firmicutes
  REGION 1..165: note = MG15-92 RuvC-III domain

SEQ ID NO: 2841 - protein, 167 aa, unidentified; identical to SEQ ID NO: 2763
  REGION 1..167: note = Description of Unknown: uncultivated organism with predicted taxonomy: Megasphaera micronuciformis
  REGION 1..167: note = MG15-93 RuvC-III domain

SEQ ID NO: 2842 - protein, 153 aa, unidentified; identical to SEQ ID NO: 2797
  REGION 1..153: note = Description of Unknown: uncultivated organism with predicted taxonomy: Dialister
  REGION 1..153: note = MG15-94 RuvC-III domain

SEQ ID NO: 2843 - protein, 153 aa, unidentified; identical to SEQ ID NO: 2772
  REGION 1..153: note = Description of Unknown: uncultivated organism with predicted taxonomy: Dialister
  REGION 1..153: note = MG15-95 RuvC-III domain

SEQ ID NO: 2844 - protein, 167 aa, unidentified; identical to SEQ ID NO: 2766
  REGION 1..167: note = Description of Unknown: uncultivated organism with predicted taxonomy: Megasphaera micronuciformis
  REGION 1..167: note = MG15-96 RuvC-III domain

SEQ ID NO: 2845 - protein, 167 aa, unidentified; identical to SEQ ID NO: 2767
  REGION 1..167: note = Description of Unknown: uncultivated organism with predicted taxonomy: Megasphaera micronuciformis
  REGION 1..167: note = MG15-97 RuvC-III domain

SEQ ID NO: 2846 - protein, 153 aa, unidentified; identical to SEQ ID NO: 2751
  REGION 1..153: note = Description of Unknown: uncultivated organism with predicted taxonomy: Dialister
  REGION 1..153: note = MG15-98 RuvC-III domain

SEQ ID NO: 2847 - protein, 167 aa, unidentified; identical to SEQ ID NO: 2766
  REGION 1..167: note = Description of Unknown: uncultivated organism with predicted taxonomy: Megasphaera micronuciformis
  REGION 1..167: note = MG15-99 RuvC-III domain

SEQ ID NO: 2848 - protein, 167 aa, unidentified; identical to SEQ ID NO: 2766
  REGION 1..167: note = Description of Unknown: uncultivated organism with predicted taxonomy: Megasphaera stantonii
  REGION 1..167: note = MG15-100 RuvC-III domain

SEQ ID NO: 2849 - protein, 153 aa, unidentified; identical to SEQ ID NO: 2772
  REGION 1..153: note = Description of Unknown: uncultivated organism with predicted taxonomy: Dialister
  REGION 1..153: note = MG15-101 RuvC-III domain

SEQ ID NO: 2850 - protein, 153 aa, unidentified; identical to SEQ ID NO: 2751
  REGION 1..153: note = Description of Unknown: uncultivated organism with predicted taxonomy: Megasphaera
  REGION 1..153: note = MG15-102 RuvC-III domain

SEQ ID NO: 2851 - protein, 165 aa, unidentified; identical to SEQ ID NO: 2789
  REGION 1..165: note = Description of Unknown: uncultivated organism with predicted taxonomy: Megasphaera sp. AM44-1BH
  REGION 1..165: note = MG15-103 RuvC-III domain

SEQ ID NO: 2852 - protein, 153 aa, unidentified; identical to SEQ ID NO: 2751
  REGION 1..153: note = Description of Unknown: uncultivated organism with predicted taxonomy: Dialister
  REGION 1..153: note = MG15-104 RuvC-III domain

SEQ ID NO: 2853 - protein, 167 aa, unidentified; identical to SEQ ID NO: 2767
  REGION 1..167: note = Description of Unknown: uncultivated organism with predicted taxonomy: Megasphaera micronuciformis
  REGION 1..167: note = MG15-105 RuvC-III domain

SEQ ID NO: 2854 - protein, 153 aa, unidentified; identical to SEQ ID NO: 2751
  REGION 1..153: note = Description of Unknown: uncultivated organism with predicted taxonomy: Dialister
  REGION 1..153: note = MG15-106 RuvC-III domain

SEQ ID NO: 2855 - protein, 153 aa, unidentified; identical to SEQ ID NO: 2751
  REGION 1..153: note = Description of Unknown: uncultivated organism with predicted taxonomy: Dialister
  REGION 1..153: note = MG15-107 RuvC-III domain

SEQ ID NO: 2856 - protein, 153 aa, unidentified; identical to SEQ ID NO: 2751
  REGION 1..153: note = Description of Unknown: uncultivated organism with predicted taxonomy: Dialister
  REGION 1..153: note = MG15-108 RuvC-III domain

SEQ ID NO: 2857 - protein, 167 aa, unidentified; identical to SEQ ID NO: 2766
  REGION 1..167: note = Description of Unknown: uncultivated organism with predicted taxonomy: Megasphaera stantonii
  REGION 1..167: note = MG15-109 RuvC-III domain

SEQ ID NO: 2858 - protein, 153 aa, unidentified; identical to SEQ ID NO: 2762
  REGION 1..153: note = Description of Unknown: uncultivated organism with predicted taxonomy: Dialister
  REGION 1..153: note = MG15-110 RuvC-III domain

SEQ ID NO: 2859 - protein, 153 aa, unidentified; identical to SEQ ID NO: 2751
  REGION 1..153: note = Description of Unknown: uncultivated organism with predicted taxonomy: Veillonellales
  REGION 1..153: note = MG15-111 RuvC-III domain

SEQ ID NO: 2860 - protein, 153 aa, unidentified; identical to SEQ ID NO: 2772
  REGION 1..153: note = Description of Unknown: uncultivated organism with predicted taxonomy: Dialister
  REGION 1..153: note = MG15-112 RuvC-III domain

SEQ ID NO: 2861 - protein, 153 aa, unidentified; identical to SEQ ID NO: 2751
  REGION 1..153: note = Description of Unknown: uncultivated organism with predicted taxonomy: Dialister
  REGION 1..153: note = MG15-113 RuvC-III domain

SEQ ID NO: 2862 - protein, 164 aa, unidentified
  REGION 1..164: note = Description of Unknown: uncultivated organism with predicted taxonomy: Veillonellales
  REGION 1..164: note = MG15-114 RuvC-III domain
QDTQYISRFLYNYLKNTLELTPGYTDRKRRIIPVNGAVTGYIRKRLGIHKIRENGDLHHAVDAVVIAATTQGMIQKVTRYSQIKENETWIDDHTKVDERTGEIFFVKKAHEKDAFPEPWPRFRQELEARVSEDPEEAIRRLGLPSYENVGEIKKPFVSRMPRRK

SEQ ID NO: 2863 - protein, 153 aa, unidentified; identical to SEQ ID NO: 2751
  REGION 1..153: note = Description of Unknown: uncultivated organism with predicted taxonomy: Dialister
  REGION 1..153: note = MG15-115 RuvC-III domain

SEQ ID NO: 2864 - protein, 153 aa, unidentified; identical to SEQ ID NO: 2755
  REGION 1..153: note = Description of Unknown: uncultivated organism with predicted taxonomy: Megasphaera sp. AM44-1BH
  REGION 1..153: note = MG15-116 RuvC-III domain

SEQ ID NO: 2865 - protein, 165 aa, unidentified; identical to SEQ ID NO: 2764
  REGION 1..165: note = Description of Unknown: uncultivated organism with predicted taxonomy: Megasphaera
  REGION 1..165: note = MG15-117 RuvC-III domain

SEQ ID NO: 2866 - protein, 153 aa, unidentified; identical to SEQ ID NO: 2781
  REGION 1..153: note = Description of Unknown: uncultivated organism with predicted taxonomy: Dialister
  REGION 1..153: note = MG15-118 RuvC-III domain

SEQ ID NO: 2867 - protein, 158 aa, unidentified; identical to SEQ ID NO: 2795
  REGION 1..158: note = Description of Unknown: uncultivated organism with predicted taxonomy: Dialister
  REGION 1..158: note = MG15-119 RuvC-III domain

SEQ ID NO: 2868 - protein, 167 aa, unidentified
  REGION 1..167: note = Description of Unknown: uncultivated organism with predicted taxonomy: Megasphaera micronuciformis
  REGION 1..167: note = MG15-120 RuvC-III domain
QDTQYISRFMLNYLQNNYELTPGNTDRKRRIIPVNGAVTAYVRKRLGISKIRENGDLHHAVDAAVIAAVTQGVVNSVSKYSKRHELQYHVDEHGNCVDLVTGELMGDAFKENHKIKGFPEPWPQFRAELEARVSENAAEAIRILNLPTYSPDEEIKTPFVSRMVRHK

SEQ ID NO: 2869 - protein, 167 aa, unidentified; identical to SEQ ID NO: 2763
  REGION 1..167: note = Description of Unknown: uncultivated organism with predicted taxonomy: Megasphaera micronuciformis
  REGION 1..167: note = MG15-121 RuvC-III domain

SEQ ID NO: 2870 - protein, 153 aa, unidentified; identical to SEQ ID NO: 2772
  REGION 1..153: note = Description of Unknown: uncultivated organism with predicted taxonomy: Dialister invisus
  REGION 1..153: note = MG15-122 RuvC-III domain

SEQ ID NO: 2871 - protein, 153 aa, unidentified; identical to SEQ ID NO: 2758
  REGION 1..153: note = Description of Unknown: uncultivated organism with predicted taxonomy: Megasphaera
  REGION 1..153: note = MG15-123 RuvC-III domain

SEQ ID NO: 2872 - protein, 153 aa, unidentified; identical to SEQ ID NO: 2751
  REGION 1..153: note = Description of Unknown: uncultivated organism with predicted taxonomy: Dialister
  REGION 1..153: note = MG15-124 RuvC-III domain

SEQ ID NO: 2873 - protein, 153 aa, unidentified; identical to SEQ ID NO: 2781
  REGION 1..153: note = Description of Unknown: uncultivated organism with predicted taxonomy: Dialister
  REGION 1..153: note = MG15-125 RuvC-III domain

SEQ ID NO: 2874 - protein, 167 aa, unidentified
  REGION 1..167: note = Description of Unknown: uncultivated organism with predicted taxonomy: Megasphaera stantonii
  REGION 1..167: note = MG15-126 RuvC-III domain
QDTQYISRFMLNYLQNNYELTPGNTDRKRRIIPVNGAVTAYVRKRLGISKIRENGDLHHAVDATVIAAVTQGVVNSVSKYSKRHELQYHVDEHGNCVDLVTGKLMGDAFKENHKIKGFPEPWPQFRAELEARVSENAAEAIRTLNLPTYSSDEEIKTPFVSRMVRHK

SEQ ID NO: 2875 - protein, 153 aa, unidentified; identical to SEQ ID NO: 2794
  REGION 1..153: note = Description of Unknown: uncultivated organism with predicted taxonomy: Dialister
  REGION 1..153: note = MG15-127 RuvC-III domain

SEQ ID NO: 2876 - protein, 153 aa, unidentified; identical to SEQ ID NO: 2794
  REGION 1..153: note = Description of Unknown: uncultivated organism with predicted taxonomy: Dialister invisus
  REGION 1..153: note = MG15-128 RuvC-III domain

SEQ ID NO: 2877 - protein, 153 aa, unidentified; identical to SEQ ID NO: 2794
  REGION 1..153: note = Description of Unknown: uncultivated organism with predicted taxonomy: Dialister
  REGION 1..153: note = MG15-129 RuvC-III domain

SEQ ID NO: 2878 - protein, 153 aa, unidentified; identical to SEQ ID NO: 2755
  REGION 1..153: note = Description of Unknown: uncultivated organism with predicted taxonomy: Dialister
  REGION 1..153: note = MG15-130 RuvC-III domain

SEQ ID NO: 2879 - protein, 153 aa, unidentified; identical to SEQ ID NO: 2797
  REGION 1..153: note = Description of Unknown: uncultivated organism with predicted taxonomy: Dialister
  REGION 1..153: note = MG15-131 RuvC-III domain

SEQ ID NO: 2880 - protein, 167 aa, unidentified; identical to SEQ ID NO: 2790
  REGION 1..167: note = Description of Unknown: uncultivated organism with predicted taxonomy: Veillonella magna
  REGION 1..167: note = MG15-132 RuvC-III domain

SEQ ID NO: 2881 - protein, 153 aa, unidentified; identical to SEQ ID NO: 2751
  REGION 1..153: note = Description of Unknown: uncultivated organism with predicted taxonomy: Dialister
  REGION 1..153: note = MG15-133 RuvC-III domain

SEQ ID NO: 2882 - protein, 167 aa, unidentified; identical to SEQ ID NO: 2766
  REGION 1..167: note = Description of Unknown: uncultivated organism with predicted taxonomy: Megasphaera micronuciformis
  REGION 1..167: note = MG15-134 RuvC-III domain

SEQ ID NO: 2883 - protein, 167 aa, unidentified; identical to SEQ ID NO: 2766
  REGION 1..167: note = Description of Unknown: uncultivated organism with predicted taxonomy: Megasphaera micronuciformis
  REGION 1..167: note = MG15-135 RuvC-III domain

SEQ ID NO: 2884 - protein, 146 aa, unidentified
  REGION 1..146: note = Description of Unknown: uncultivated organism with predicted taxonomy: Megasphaera stantonii
  REGION 1..146: note = MG15-136 RuvC-III domain
QDTQYISKYLYNYLLENLELAKGYTERKRRITPVNGAVTAYIRKRLGINKIRENGDLHHAVDAVIIACATQGIVNKVSRYSKSRELWDYEVDKETGEILQKKNKNTKDVFPEPWLNFRYELEQKVRIRPLDIPETADITKMEEPFV

SEQ ID NO: 2885 - protein, 165 aa, unidentified; identical to SEQ ID NO: 2789
  REGION 1..165: note = Description of Unknown: uncultivated organism with predicted taxonomy: Megasphaera sp. AM44-1BH
  REGION 1..165: note = MG15-137 RuvC-III domain

SEQ ID NO: 2886 - protein, 165 aa, unidentified
  REGION 1..165: note = Description of Unknown: uncultivated organism with predicted taxonomy: Megasphaera
  REGION 1..165: note = MG15-138 RuvC-III domain
QDTQYISRYLYNYLRQHIPLKEGYTDRKRRIIPVNGAVTAYVRKRLGISKIRENGDLHHAVDAVIIACVTQGVVNKISCYSKIKELRQFMTADGTIVDKETGEVLQTANPRKTDPFPEPWPKFRQELEARVSDNPAEAIAALGLPTYEGIVSISAPFVSRMPNRK

SEQ ID NO: 2887 - protein, 165 aa, unidentified
  REGION 1..165: note = Description of Unknown: uncultivated organism with predicted taxonomy: Megasphaera
  REGION 1..165: note = MG15-139 RuvC-III domain
QDTQYISRYLYNYLKRHIELKEGYTDRKRRIIPVNGAVTAYVRKRLGISKIRENGDLHHAVDAVIIACVTQGVVNKISRYSKIKELRQFMTADGMIVDKETGEVLQTANPRKTDPFPEPWPKFRQELEARVSDNPAEAIAALGLPTYEGIVNISAPFVSRMPNRK

SEQ ID NO: 2888 - protein, 165 aa, unidentified
  REGION 1..165: note = Description of Unknown: uncultivated organism with predicted taxonomy: Megasphaera sp. AM44-1BH
  REGION 1..165: note = MG15-140 RuvC-III domain
QDTQYLSTYLYNYLCHVMKLTPGCTERKRRIIAVNGAVTAYVRKRLGINKIRSNGDLHHAVDAVIIACVTQGVINRISRYSKIKELQNFQTNDGQVVDSVTGEMLTLKHVHKKDPFPEPWPHFRQELEARVGKQPQEAIAALHLPTYENVESIYTPFVSRMPNRK

SEQ ID NO: 2889 - protein, 153 aa, unidentified
  REGION 1..153: note = Description of Unknown: uncultivated organism with predicted taxonomy: Dialister
  REGION 1..153: note = MG15-141 RuvC-III domain
QDTQYISKYLYNYLRHHLVPAKGYTERKRRIISVNGAVTAYIRKRLGINKIRENGDLHHAVDAVIIACATQGIVNKVSRYSKSRELWDYEVDMETGEVLQKKNENRKDIFPEPWLNFRYELEQKVRVRPLDIPETADITEMEEPFVSHMPNRK

SEQ ID NO: 2890 - protein, 165 aa, unidentified
  REGION 1..165: note = Description of Unknown: uncultivated organism with predicted taxonomy: Megasphaera sp. AM44-1BH
  REGION 1..165: note = MG15-142 RuvC-III domain
QDTQYLSTYLYNYLCHVMKLTPGCTERKRRIIAVNGAVTAYVRKRLGINKIRSNGDLHHAVDAVIIACVTQGVINRISRYSKIKELQNFQTNDGQVVDSVTGEILTLKHVHKKDLFPEPWPHFRQELVARVGKQPQEAIAALHLPTYENVESIYTPFVSRMPNRK

SEQ ID NO: 2891 - protein, 167 aa, unidentified; identical to SEQ ID NO: 2760
  REGION 1..167: note = Description of Unknown: uncultivated organism with predicted taxonomy: Megasphaera micronuciformis
  REGION 1..167: note = MG15-143 RuvC-III domain

SEQ ID NO: 2892 - protein, 167 aa, unidentified; identical to SEQ ID NO: 2763
  REGION 1..167: note = Description of Unknown: uncultivated organism with predicted taxonomy: Megasphaera stantonii
  REGION 1..167: note = MG15-144 RuvC-III domain

SEQ ID NO: 2893 - protein, 167 aa, unidentified
  REGION 1..167: note = Description of Unknown: uncultivated organism with predicted taxonomy: Megasphaera stantonii
  REGION 1..167: note = MG15-145 RuvC-III domain
QDTQYISRFMLNYLQNNYELTPGNTDRRRRIIPVNGAVTAYVRKRLGISKIRENGDLHHAVDAAVIAAVTQGVVNSVSRYSKRHELQYHVDEHGNCVDLVTGELMGDAFKENHKIKGFPEPWAQFRAELEARVSENAAEAIRILNLPTYSPDEEIKTPFVSRMVRHK

SEQ ID NO: 2894 - protein, 171 aa, unidentified
  REGION 1..171: note = Description of Unknown: uncultivated organism with predicted taxonomy: Megasphaera stantonii
  REGION 1..171: note = MG15-146 RuvC-III domain
NDTKYISSFVKNLLDDHLEFAPWLTGKNRHVMAVNGAVTDYTRKRLGIRKIREDGDLHHAVDAAVIAIVTQGNIQKLTNYSKQIERSRAFAKNPDGSYSDRETGEILKKDELIVRMSKHFPEPWPGFRRELEARVSDHPKELLESLRLPTYTPEELDALKPPFVSRMPTRK

SEQ ID NO: 2895 - protein, 158 aa, unidentified
  REGION 1..158: note = Description of Unknown: uncultivated organism with predicted taxonomy: Selenomonas ruminantium
  REGION 1..158: note = MG15-147 RuvC-III domain
NDTRYITKLVKDLIEKYLEMAPFNTNRKRHVVAVNGAVTAYVRKRLGIAKIREDGDLHHAVDAAVIACVTEGMINRISRYSKRREILYNNKLVDEETGEIIKGKEDFPEPWPWFRKELDARTSKNPALLLREMKLPTYTEAELENLREPYVSRMPCHK

SEQ ID NO: 2896 - protein, 146 aa, unidentified
  REGION 1..146: note = Description of Unknown: uncultivated organism with predicted taxonomy: Selenomonas sp. AE3005
  REGION 1..146: note = MG15-148 RuvC-III domain
NDTKYISRFVYNLLRQHLEFSPFIGGRKRHVLAVNGSVTAYVRKRLGINKIRANGDLHHAVDAVIIACVTQGMVNIIEQYSKARELWEISAKEPFPEPWQGFRKELEARTSDNPAEELRRVQVKNYTEEELQAVKPIFVSRMPRRK

SEQ ID NO: 2897 - protein, 158 aa, unidentified
  REGION 1..158: note = Description of Unknown: uncultivated organism with predicted taxonomy: Selenomonas ruminantium
  REGION 1..158: note = MG15-149 RuvC-III domain
NDTRYITKLVKDIIEKYLEMAPFKTSRKRNVVAVNGAVTAYVRKRLGIAKIRENGDLHHAVDAAVIACVTEGMINRISRYSKRREILYNSKLVDEETGEIIKGKEDFPEPWPWFRKELDARTSKNPALLIRGLKLPTYAEEELENLHEPYVSRMPCHK

SEQ ID NO: 2898 - protein, 171 aa, unidentified
  REGION 1..171: note = Description of Unknown: uncultivated organism with predicted taxonomy: Selenomonas ruminantium
  REGION 1..171: note = MG15-150 RuvC-III domain
TDTKYIGSFVANLLRDHLDFAPWLNGRKQHVLVVNGAVTDYTRKRLGIRKIREDGDLHHAVDAAVIATVTQGNIQKLTNYSKQIERSRAFDKTANGSYADRETGEVLKKDELMVRMSKHFPEPWPGFRHELEARVSDHPKELLESLRLPTYTPEELDALKPPFVSRMPTRK

SEQ ID NO: 2899 - protein, 146 aa, unidentified
  REGION 1..146: note = Description of Unknown: uncultivated organism with predicted taxonomy: Selenomonas sp. AE3005
  REGION 1..146: note = MG15-151 RuvC-III domain
NDTKYISRFVYNLLRQHLEFSPFIGGRKRHVLAVNGSVTAYVRKRLGINKIRANGDLHHAVDAVIIACVTQGMVNIIEQYSKARELWEISAKEPFPEPWPGFRKELEARTSDNPAEELRRVQVKNYTEEELQAVKPIFVSRMPRRK

SEQ ID NO: 2900 - protein, 146 aa, unidentified
  REGION 1..146: note = Description of Unknown: uncultivated organism with predicted taxonomy: Selenomonas sp. AE3005
  REGION 1..146: note = MG15-152 RuvC-III domain
NDTKYISRFVYNLLRNHLEFNPFMGGRNRHVLAVSGGVTAYVRKRLGINKIRANGDLHHAVDAVIIACVTQGMVNIIEQYSKAKELWEISAKEPFPEPWIGFRKELEARTSDNPAEALRRMRCKNYSEEELQALKPIFVSRMPRRK

SEQ ID NO: 2901 - protein, 146 aa, unidentified
  REGION 1..146: note = Description of Unknown: uncultivated organism with predicted taxonomy: Selenomonas sp. AE3005
  REGION 1..146: note = MG15-153 RuvC-III domain
NDTKYISRFVYNLLRNHLEFSPFMGGRNRHVLAVSGGVTAYVRKRLGINKIRANGDLHHAVDAVIIACVTQGMVNIIEQYSKAKELWEISAKEPFPEPWIGFRKELEARTSDNPAEALRRMRCKNYSEEELQALNPIFVSRMPRRK

SEQ ID NO: 2902 - protein, 158 aa, unidentified
  REGION 1..158: note = Description of Unknown: uncultivated organism with predicted taxonomy: Selenomonas ruminantium
  REGION 1..158: note = MG15-154 RuvC-III domain
NDTRYITKLVKDIIEKYLEMAPFKTSRKRNVVAVNGAVTAYVRKRLGIAKIRENGDLHHAVDAAVIACVTEGMINRISRYSKRREILYNSKLVDEETGEIIKEKEDFPEPWPWFRKELDARTSKNPALLIRELKLPTYAEEELENLHEPYVSRMPCHK

SEQ ID NO: 2903 - protein, 146 aa, unidentified
  REGION 1..146: note = Description of Unknown: uncultivated organism with predicted taxonomy: Selenomonas sp. AE3005
  REGION 1..146: note = MG15-155 RuvC-III domain
NDTKYISRFVYNLLRNHLEFSPFMGGRNRHVLAVSGGVTAYVRKRLGINKIRANGDLHHAVDAVIIACVTQGMVNIIEQYSKAKELWEISAKEPFPEPWIGFRKELEARTSDNPAEALRRMRCKNYSEEELQALKPIFVSRMPRRK

SEQ ID NO: 2904 - protein, 146 aa, unidentified; identical to SEQ ID NO: 2899
  REGION 1..146: note = Description of Unknown: uncultivated organism with predicted taxonomy: Selenomonas sp. AE3005
  REGION 1..146: note = MG15-156 RuvC-III domain

SEQ ID NO: 2905 - protein, 169 aa, unidentified
  REGION 1..169: note = Description of Unknown: uncultivated organism with predicted taxonomy: Megasphaera stantonii
  REGION 1..169: note = MG15-157 RuvC-III domain
NDTKYISSFVKNLLEDHLEFAPWLTGRKRHVMAVNGAVTDYTRKRLGIRKIREDGDLHHAVDAAVIAIVTQGNIQKLTNYSKRIEHAFIKNRDGSYTHPDTGEILKKDELMAQMSRHFPEPWPGFRRELEARVSDHPKELLESLRLPTYTPEEIDALKPPFVSRMPTRK

SEQ ID NO: 2906 - protein, 158 aa, unidentified
  REGION 1..158: note = Description of Unknown: uncultivated organism with predicted taxonomy: Selenomonas ruminantium
  REGION 1..158: note = MG15-158 RuvC-III domain
NDTRYITKLVKDIIEKYLEMAPFKTTRKRNVVAVNGAVTAYVRKRLGIAKIRENGDLHHAVDAAVIACVTEGMINRISRYSKRREILYNNKLVDEETGEIIKGKEDFPEPWPWFRKELDARTGKNPALLIRDLKLPTYTEAELENLHEPYVSRMPCHK

SEQ ID NO: 2907 - protein, 158 aa, unidentified
  REGION 1..158: note = Description of Unknown: uncultivated organism with predicted taxonomy: Selenomonas ruminantium
  REGION 1..158: note = MG15-159 RuvC-III domain
NDTRYITKLVKDIIEKYLEMAPFKTSRKRNVVAVNGAVTAYVRKRLGIAKIRENGDLHHAVDAAVIACVTEGMINRISRYSKRREILYNSKLVDEETGEIIKEKEDFPEPWPWFRKELDARTSKNPALLTRELKLPTYAEEELENLHEPYVSRMPCHK

SEQ ID NO: 2908 - protein, 169 aa, unidentified
  REGION 1..169: note = Description of Unknown: uncultivated organism with predicted taxonomy: Megasphaera stantonii
  REGION 1..169: note = MG15-160 RuvC-III domain
NDTKYISSFVKNLLEDHLEFAPWLTGKKRHVMAVNGAVTDYTRKRLGIRKIREDGDLHHAVDAAVIAIVTQGNIQKLTNYSKRIEHAFIKNRDGSYTHPDTGEILKKGELMAQMSRHFPEPWPGFRRELEARVSDHPKALLESLRLPTYTPEELDALKPPFVSRMPTRK

SEQ ID NO: 2909 - protein, 170 aa, unidentified; identical to SEQ ID NO: 2786
  REGION 1..170: note = Description of Unknown: uncultivated organism with predicted taxonomy: Selenomonas sp. AE3005
  REGION 1..170: note = MG15-161 RuvC-III domain

SEQ ID NO: 2910 - protein, 153 aa, unidentified; identical to SEQ ID NO: 2751
  REGION 1..153: note = Description of Unknown: uncultivated organism with predicted taxonomy: Megasphaera
  REGION 1..153: note = MG15-162 RuvC-III domain

SEQ ID NO: 2911 - protein, 153 aa, unidentified
  REGION 1..153: note = Description of Unknown: uncultivated organism with predicted taxonomy: Megasphaera stantonii
  REGION 1..153: note = MG15-163 RuvC-III domain
QDTQYISKYLYNYLRHHLVLAKGYTERKRRIIPVNGAVTAYIRKRLGINKIRENGDLHHAVDAVIIACATQGIVNKVSRYSKSRELWDYEVDMETGEVLQKKNKNTKDVFPEPWLNFRYELEQKVRVRPLDIPETADITEMEEPFVSHMPNRK

SEQ ID NO: 2912 - protein, 153 aa, unidentified; identical to SEQ ID NO: 2762
  REGION 1..153: note = Description of Unknown: uncultivated organism with predicted taxonomy: Megasphaera
  REGION 1..153: note = MG15-164 RuvC-III domain

SEQ ID NO: 2913 - protein, 153 aa, unidentified; identical to SEQ ID NO: 2751
  REGION 1..153: note = Description of Unknown: uncultivated organism with predicted taxonomy: Megasphaera stantonii
  REGION 1..153: note = MG15-165 RuvC-III domain

SEQ ID NO: 2914 - protein, 162 aa, unidentified
  REGION 1..162: note = Description of Unknown: uncultivated organism with predicted taxonomy: Bacteroidales
  REGION 1..162: note = MG16-2 RuvC-III domain
RETQYIAKKSVEILKQICRNVWTTSGSVTDFLRHNWGYDEILHTLDFDRYKSGGLTEVIEIEHKGQKHRIERIKDWSKRLDHRHHAVDALVVACTKQSYIQRLNNLNTERDAMYQDIEAQSVEWKEKHSLLEKWIKLQPHPTVSEVTDKVDEILVSFKAGKR

SEQ ID NO: 2915 - protein, 165 aa, unidentified
  REGION 1..165: note = Description of Unknown: uncultivated organism with predicted taxonomy: Bacteroidales
  REGION 1..165: note = MG16-5 RuvC-III domain
LQSQYIAKKAAEILRQGYRNVYATSGSVTDFLRHQWGYDEILHRLNLPRYQQVEGLTEDVTYDHCGQEHQQERIKGWTKRLDHRHHAIDALTIALTQQSVIQRLNTLNNSREQMFDELGKRTDTPEYTEKRSLLEKWVDAQPHFSVQEVTDKVDGILVSFRAGKR

SEQ ID NO: 2916 - protein, 165 aa, unidentified; identical to SEQ ID NO: 2915
  REGION 1..165: note = Description of Unknown: uncultivated organism with predicted taxonomy: Bacteroidetes
  REGION 1..165: note = MG16-6 RuvC-III domain

SEQ ID NO: 2917 - protein, 150 aa, unidentified
  REGION 1..150: note = Description of Unknown: uncultivated organism with predicted taxonomy: Bacteroides
  REGION 1..150: note = MG16-7 RuvC-III domain
VQTQYISRKAMEILMQICHDVYASSGDVTAYLRRIWGYDEILQRLNIPRYREGGLTEMVTYEHNNQQHTEERIKGWSKRLDHRHHAIDALTIACTRQNIIQRLNNLNAQESSGEDKLNLDKWTMAQAHFSVREVSDAASRILISFKSGKK

SEQ ID NO: 2918 - protein, 150 aa, unidentified; identical to SEQ ID NO: 2917
  REGION 1..150: note = Description of Unknown: uncultivated organism with predicted taxonomy: Bacteroides
  REGION 1..150: note = MG16-8 RuvC-III domain

SEQ ID NO: 2919 - protein, 150 aa, unidentified; identical to SEQ ID NO: 2917
  REGION 1..150: note = Description of Unknown: uncultivated organism with predicted taxonomy: Bacteroides sp. CAG:770
  REGION 1..150: note = MG16-9 RuvC-III domain

SEQ ID NO: 2920 - protein, 150 aa, unidentified; identical to SEQ ID NO: 2917
  REGION 1..150: note = Description of Unknown: uncultivated organism with predicted taxonomy: Bacteroides
  REGION 1..150: note = MG16-10 RuvC-III domain

SEQ ID NO: 2921 - protein, 150 aa, unidentified; identical to SEQ ID NO: 2917
  REGION 1..150: note = Description of Unknown: uncultivated organism with predicted taxonomy: Bacteroides
  REGION 1..150: note = MG16-11 RuvC-III domain

SEQ ID NO: 2922 - protein, 165 aa, unidentified; identical to SEQ ID NO: 2915
  REGION 1..165: note = Description of Unknown: uncultivated organism with predicted taxonomy: Bacteroidetes
  REGION 1..165: note = MG16-12 RuvC-III domain

SEQ ID NO: 2923 - protein, 150 aa, unidentified; identical to SEQ ID NO: 2917
  REGION 1..150: note = Description of Unknown: uncultivated organism with predicted taxonomy: Bacteroides
  REGION 1..150: note = MG16-13 RuvC-III domain

SEQ ID NO: 2924 - protein, 150 aa, unidentified; identical to SEQ ID NO: 2917
  REGION 1..150: note = Description of Unknown: uncultivated organism with predicted taxonomy: Bacteroides sp. CAG:770
  REGION 1..150: note = MG16-14 RuvC-III domain

SEQ ID NO: 2925 - protein, 150 aa, unidentified
  REGION 1..150: note = Description of Unknown: uncultivated organism with predicted taxonomy: Bacteroides sp. CAG:770
  REGION 1..150: note = MG16-15 RuvC-III domain
VQTQYISRKAMEILKQVCHNVYGSSGEVTSYLRRIWGYDEILHSLDLPRYREGGMTAEVSYDHRGQTHTEERIKDWSKRLDHRHHAIDALTIACTRQSIIQRLNNLSAMTAVAGESMSLDKWTLAQPHFSVQEVSDNVSRILVSFKAGKK

SEQ ID NO: 2926 - protein, 150 aa, unidentified
  REGION 1..150: note = Description of Unknown: uncultivated organism with predicted taxonomy: Bacteroides sp. CAG:709
  REGION 1..150: note = MG16-16 RuvC-III domain
VQTQYISRKAMEILKQVCHNVYGSSGEVTSYLRRIWGYDEILHSLDLPRYREGGMTAEVSYEHRGQTHTEERIKDWSKRLDHRHHAIDALTIACTRQSVIQRLNNLSSMTAVAGEAMSLDKWTLAQPHFSVQEVSDNVSQILVSFKAGKK

SEQ ID NO: 2927 - protein, 150 aa, unidentified
  REGION 1..150: note = Description of Unknown: uncultivated organism with predicted taxonomy: Bacteroides sp. CAG:770
  REGION 1..150: note = MG16-17 RuvC-III domain
VQTQYISRKAMEILKQVCHNVYGSSGEVTSYLRRIWGYDEILHSLDLPRYREGGMTAEVSYDHRGQTHTEERIKDWSKRLDHRHHAIDALTIACTQQSIIQRLNNLSAMTAVAGESMSLDKWTLAQPHFSVQKVSDNVSRILVSFKAGKK

SEQ ID NO: 2928 - protein, 150 aa, unidentified
  REGION 1..150: note = Description of Unknown: uncultivated organism with predicted taxonomy: Bacteroides sp. CAG:770
  REGION 1..150: note = MG16-18 RuvC-III domain
VQTQYISRKAMEILNQVCRNVYGSSGDVTAYLRRIWGYDEILHSLDLPRYREGNLTGDVTYVHRGQTHTEERIKDWSKRLDHRHHAIDALTIASTRQSIIQRLNTLNAKTAIGEEQISLDKWTLAQAHFSVADVADHVADILVSFKSGKK

SEQ ID NO: 2929 - protein, 150 aa, unidentified
  REGION 1..150: note = Description of Unknown: uncultivated organism with predicted taxonomy: Bacteroides sp. CAG:770
  REGION 1..150: note = MG16-19 RuvC-III domain
VQTQYISRKAMEILNQVCRNVYGSSGDVTAYLRRIWGYDEILHSLDLPRYRDGNLTEDVTYVHRGQTHTEERIKDWSKRLDHRHHAIDALTIACTRQSIIQRLNTLNAKTAIGEEQMSLDKWTLAQAHFSVADVADHVADILVSFKSGKR

SEQ ID NO: 2930 - protein, 150 aa, unidentified
  REGION 1..150: note = Description of Unknown: uncultivated organism with predicted taxonomy: Bacteroides sp. CAG:770
  REGION 1..150: note = MG16-20 RuvC-III domain
VQTQYISRKAMEILKQVCHNVYGSSGEVTSYLRRIWGYDEILHSLDLPRYREGGMTAEVSYDHRGQTHTEERIKDWSKRLDHRHHAIDALTIACTRQSIIQRLNNLSAMSAVAGESMSLDKWTLAQPHFSVQEVSDNVSRILVSFKAGKK

SEQ ID NO: 2931 - protein, 150 aa, unidentified
  REGION 1..150: note = Description of Unknown: uncultivated organism with predicted taxonomy: Bacteroides sp. CAG:770
  REGION 1..150: note = MG16-21 RuvC-III domain
VQTQYVSRKAMEILNQVCRNVYGSSGDVTAYLRRIWGYDEILHSLDLPRYREGNLTGNVTYVHRGQTHTEERIRDWSKRLDHRHHAIDALTIACTRQSIIQRLNTLNAKTAIGEEQMSLDKWTLAQAHFSVADVADHVADILVSFKSGKK

SEQ ID NO: 2932 - protein, 150 aa, unidentified
  REGION 1..150: note = Description of Unknown: uncultivated organism with predicted taxonomy: Bacteroides sp. CAG:770
  REGION 1..150: note = MG16-22 RuvC-III domain
VQTQYISRKAMEILNQVCRNVYGSSGDVTAYLRRIWGYDEILHSLDLPRYRKGNLTGDVTYVHKGQTHTEERIKDWSKRLDHRHHAIDALTIACTRQSIIQRLNTLNAKTAIGEEQMSLDKWTLAQAHFSVADVADHVADILVSFKSGKR

SEQ ID NO: 2933 - protein, 150 aa, unidentified
  REGION 1..150: note = Description of Unknown: uncultivated organism with predicted taxonomy: Bacteroidales
  REGION 1..150: note = MG16-23 RuvC-III domain
VQTQYISRKAMEILKQVCHNVYGSSGEVTSYLRRIWGYDEILHSLDLPRYREGGMTAEVSYDHRGQTHTEERIKDWSKRLDHRHHAIDALTIACTRQSIIQRLNNRSAMTAVAGESMSLDKWTLAQPHFSVQEVSDNVSRILVSFKAGKK

SEQ ID NO: 2934 - protein, 150 aa, unidentified
  REGION 1..150: note = Description of Unknown: uncultivated organism with predicted taxonomy: Bacteroides sp. CAG:770
  REGION 1..150: note = MG16-24 RuvC-III domain
VQTQYISRKAMEILKQVCHNVYGSSGEVTSYLRRIWGYDEILHALDLPRYREGGMTAEVSYDHRGQTHTEERIKDWSKRLDHRHHAIDALTIACTRQSIIQRLNNLSAMTAVAGESMSLDKWTLAQPHFSVQEVSDNVSRILVSFKAGKK

SEQ ID NO: 2935 - protein, 150 aa, unidentified
  REGION 1..150: note = Description of Unknown: uncultivated organism with predicted taxonomy: Bacteroides sp. CAG:770
  REGION 1..150: note = MG16-25 RuvC-III domain
VQTQYISRKAMEILNQVCRNVYGSSGDVTAYLRRIWGYDEILHSLDLPRYREGNLTGDVTYVHRGQTHTEERIKDWSKRLDHRHHAIDALTIACTRQSIIQRLNTLNAKTAIGEEQISLDKWTLAQAHFSVADVADHVADILVSFKSGKK

SEQ ID NO: 2936 - protein, 150 aa, unidentified; identical to SEQ ID NO: 2925
  REGION 1..150: note = Description of Unknown: uncultivated organism with predicted taxonomy: Bacteroides
  REGION 1..150: note = MG16-26 RuvC-III domain

SEQ ID NO: 2937 - protein, 150 aa, unidentified
  REGION 1..150: note = Description of Unknown: uncultivated organism with predicted taxonomy: Bacteroides sp. CAG:770
  REGION 1..150: note = MG16-27 RuvC-III domain
VQTQYISRKAMEILDQVCRNVYGSSGDVTAYLRRIWGYDEILHSLDLPRYREGNLTGDVTYVHRGQTHTEERIKDWSKRLDHRHHAIDALTIACTRQSIIQRLNTLNAKTAIGEEQMSLDKWTLAQAHFSVADVADHVADILVSFKSGKK

SEQ ID NO: 2938 - protein, 150 aa, unidentified
  REGION 1..150: note = Description of Unknown: uncultivated organism with predicted taxonomy: Bacteroides sp. CAG:545
  REGION 1..150: note = MG16-28 RuvC-III domain
VQTQYISRKAMEILKQVCHNVYGSSGEVTSYLRRIWGYDEILHTLDLPRYREGGMTAEVSYDHRGQTHTEERIKDWSKRLDHRHHAIDALTIACTRQSIIQRLNNLSAMTAVAGESMSLDKWTLAQPHFSVQEVSDNVSRILVSFKAGKK

SEQ ID NO: 2939 - protein, 150 aa, unidentified
  REGION 1..150: note = Description of Unknown: uncultivated organism with predicted taxonomy: Bacteroides sp. CAG:709
  REGION 1..150: note = MG16-29 RuvC-III domain
VQTQYISRKAMEILKQVCHNVYGSSGEVTSYLRRIWGYDEILHSLDLPRYREGGMTAEVSYEHRGQTHTEERIKDWSKRLDHRHHAIDALTIACTRQSVIQRLNNLSSMTAVAGEAMSLDKWTLAQPHFSVQEVSDKVGGILVSFKAGKK

SEQ ID NO: 2940 - protein, 150 aa, unidentified; identical to SEQ ID NO: 2939
  REGION 1..150: note = Description of Unknown: uncultivated organism with predicted taxonomy: Bacteroides sp. CAG:709
  REGION 1..150: note = MG16-30 RuvC-III domain

SEQ ID NO: 2941 - protein, 150 aa, unidentified; identical to SEQ ID NO: 2939
  REGION 1..150: note = Description of Unknown: uncultivated organism with predicted taxonomy: Bacteroides sp. CAG:709
  REGION 1..150: note = MG16-31 RuvC-III domain

SEQ ID NO: 2942 - protein, 150 aa, unidentified
  REGION 1..150: note = Description of Unknown: uncultivated organism with predicted taxonomy: Alistipes sp. CAG:514
  REGION 1..150: note = MG16-32 RuvC-III domain
VQTQYISRKAMEILKQVCHNVYGSSGEVTSYLRRIWGYDEILHSLDLPRYREGGMTTEVSYEHRGQTHTEERIKDWSKRLDHRHHAIDALTIACTRQSIIQRLNNLSSMTATAGESMSLDKWTSAQPHFSVQEVSDNVSRILVSFKAGKK

SEQ ID NO: 2943 - protein, 150 aa, unidentified; identical to SEQ ID NO: 2942
  REGION 1..150: note = Description of Unknown: uncultivated organism with predicted taxonomy: Alistipes sp. CAG:514
  REGION 1..150: note = MG16-33 RuvC-III domain

SEQ ID NO: 2944 - protein, 150 aa, unidentified; identical to SEQ ID NO: 2925
  REGION 1..150: note = Description of Unknown: uncultivated organism with predicted taxonomy: Bacteroides sp. CAG:545
  REGION 1..150: note = MG16-34 RuvC-III domain

SEQ ID NO: 2945 - protein, 150 aa, unidentified
  REGION 1..150: note = Description of Unknown: uncultivated organism with predicted taxonomy: Bacteroides sp. CAG:770
  REGION 1..150: note = MG16-35 RuvC-III domain
VQTQYISRKAMEILNQVCRNVYGSSGDVTAYLRRIWGYDEILHSLDLPRYREGNLTGDVTYVHKGQTHTEERIKDWSKRLDHRHHAIDALTIACTRQSIIQKLNTLNAKTAIGEEQISLDKWTLAQAHFSVADVADHVADILVSFKSGKK

SEQ ID NO: 2946 - protein, 150 aa, unidentified
  REGION 1..150: note = Description of Unknown: uncultivated organism with predicted taxonomy: Bacteroides
  REGION 1..150: note = MG16-36 RuvC-III domain
VQTQYISRKAMEILKQVCHNVYGSSGEVTSYLRRIWGYDKILHSLDLPRYREGGMTAEVSYDHRGQTHTEERIKDWSKRLDHRHHAIDALTIACTRQSIIQRLNNLSAMTAVAGESMSLDKWTLAQPHFSVQEVSDNVSRILVSFKAGKK

SEQ ID NO: 2947 - protein, 150 aa, unidentified; identical to SEQ ID NO: 2925
  REGION 1..150: note = Description of Unknown: uncultivated organism with predicted taxonomy: Bacteroides sp. CAG:545
  REGION 1..150: note = MG16-37 RuvC-III domain

SEQ ID NO: 2948 - protein, 150 aa, unidentified; identical to SEQ ID NO: 2946
  REGION 1..150: note = Description of Unknown: uncultivated organism with predicted taxonomy: Bacteroides
  REGION 1..150: note = MG16-38 RuvC-III domain

SEQ ID NO: 2949 - protein, 150 aa, unidentified; identical to SEQ ID NO: 2929
  REGION 1..150: note = Description of Unknown: uncultivated organism with predicted taxonomy: Bacteroides sp. CAG:770
  REGION 1..150: note = MG16-39 RuvC-III domain

SEQ ID NO: 2950 - protein, 150 aa, unidentified
  REGION 1..150: note = Description of Unknown: uncultivated organism with predicted taxonomy: Bacteroides sp. CAG:770
  REGION 1..150: note = MG16-40 RuvC-III domain
VQTQYISRKAMEILKQVCHNVYGSSGEVTSYLRRIWGYDEILHSLDLPRYREGGMTAEVSYEHRGQTHTEERIKDWSKRLDHRHHAIDALTIACTRQSIIQRLNNLSSMTAVAGEAMSLDKWTLAQPHFSVQEVSDKVGGILVSFKAGKK

SEQ ID NO: 2951 - protein, 150 aa, unidentified
  REGION 1..150: note = Description of Unknown: uncultivated organism with predicted taxonomy: Bacteroides sp. CAG:770
  REGION 1..150: note = MG16-42 RuvC-III domain
VQTQYISRKAMEILNQVCRNVYGSSGDVTAYLRRIWGYDEILHSLDLPRYREGNLTGDVTYVHMGQTHTEERIKDWSKRLDHRHHAIDALTIACTRQSIIQRLNTLNAKTAIGEEQMSLDKWTLAQAHFSVADVSDHVADILVSFKSGKK

SEQ ID NO: 2952 - protein, 150 aa, unidentified; identical to SEQ ID NO: 2951
  REGION 1..150: note = Description of Unknown: uncultivated organism with predicted taxonomy: Bacteroides sp. CAG:770
  REGION 1..150: note = MG16-43 RuvC-III domain

SEQ ID NO: 2953 - protein, 150 aa, unidentified
  REGION 1..150: note = Description of Unknown: uncultivated organism with predicted taxonomy: Bacteroides sp. CAG:770
  REGION 1..150: note = MG16-44 RuvC-III domain
VQTQYISRKAMEILNQVCRNVYGSSGDVTAYLRRIWGYDEILHYLDLPRYREGNLTGDVTYVHRGQTHTEERIRDWSKRLDHRHHAIDALTIACTRQSIIQRLNTLNAKTAIGEEQMSLDKWTLAQAHFSVADVADHVADILVSFKSGKK

SEQ ID NO: 2954 - protein, 150 aa, unidentified; identical to SEQ ID NO: 2945
  REGION 1..150: note = Description of Unknown: uncultivated organism with predicted taxonomy: Bacteroides sp. CAG:770
  REGION 1..150: note = MG16-45 RuvC-III domain

SEQ ID NO: 2955 - protein, 150 aa, unidentified; identical to SEQ ID NO: 2925
  REGION 1..150: note = Description of Unknown: uncultivated organism with predicted taxonomy: Bacteroides sp. CAG:770
  REGION 1..150: note = MG16-46 RuvC-III domain

SEQ ID NO: 2956 - protein, 150 aa, unidentified; identical to SEQ ID NO: 2939
  REGION 1..150: note = Description of Unknown: uncultivated organism with predicted taxonomy: Bacteroides sp. CAG:709
  REGION 1..150: note = MG16-47 RuvC-III domain

SEQ ID NO: 2957 - protein, 150 aa, unidentified
  REGION 1..150: note = Description of Unknown: uncultivated organism with predicted taxonomy: Bacteroides sp. CAG:770
  REGION 1..150: note = MG16-48 RuvC-III domain
VQTQYISRKAMEILNQVCRNVYGSSGDVTAYLRRIWGYDEILHSLDLPRYREGNLTGDVTYVHRGQTHTEERIRDWSKRLDHRHHAIDALTIASTRQSIIQRLNTLNAKTAIGEEQISLDKWTLAQAHFSVADVADHVADILVSFKSGKK

SEQ ID NO: 2958 - protein, 150 aa, unidentified; identical to SEQ ID NO: 2957
  REGION 1..150: note = Description of Unknown: uncultivated organism with predicted taxonomy: Bacteroides sp. CAG:770
  REGION 1..150: note = MG16-50 RuvC-III domain

SEQ ID NO: 2959 - protein, 150 aa, unidentified; identical to SEQ ID NO: 2957
  REGION 1..150: note = Description of Unknown: uncultivated organism with predicted taxonomy: Bacteroides sp. CAG:770
  REGION 1..150: note = MG16-51 RuvC-III domain

SEQ ID NO: 2960 - protein, 150 aa, unidentified
  REGION 1..150: note = Description of Unknown: uncultivated organism with predicted taxonomy: Bacteroides sp. CAG:770
  REGION 1..150: note = MG16-52 RuvC-III domain
VQTQYISRKAMEILNQVCRNVYGSSGDVTAYLRRIWGYDEILHSLDLPRYREGNLTGDVTYVHRGQTHTEERIRDWSKRLDHRHHAIDALTIACTRQSIIQRLNTLNAKTAIGEEQMSLDKWTLAQAHFSVADVADHVADILVSFKSGKK

SEQ ID NO: 2961 - protein, 150 aa, unidentified; identical to SEQ ID NO: 2939
  REGION 1..150: note = Description of Unknown: uncultivated organism with predicted taxonomy: Bacteroides sp. CAG:709
  REGION 1..150: note = MG16-53 RuvC-III domain

SEQ ID NO: 2962 - protein, 150 aa, unidentified; identical to SEQ ID NO: 2939
  REGION 1..150: note = Description of Unknown: uncultivated organism with predicted taxonomy: Bacteroides sp. CAG:709
  REGION 1..150: note = MG16-54 RuvC-III domain

SEQ ID NO: 2963 - protein, 150 aa, unidentified
  REGION 1..150: note = Description of Unknown: uncultivated organism with predicted taxonomy: Bacteroides sp. CAG:770
  REGION 1..150: note = MG16-55 RuvC-III domain
VQTQYISRKAMDILNQVCRNVYGSSGDVTAYLRRIWGYDEILHSLDLPRYREGNLTGDVTYVHRGQTHTEERIKDWSKRLDHRHHAIDALTIASTRQSIIQRLNTLNAKAAIGEEQMSLDKWTLAQAHFSVADVADHVADILVSFKSGKK

SEQ ID NO: 2964 - protein, 150 aa, unidentified; identical to SEQ ID NO: 2925
  REGION 1..150: note = Description of Unknown: uncultivated organism with predicted taxonomy: Bacteroides sp. CAG:545
  REGION 1..150: note = MG16-56 RuvC-III domain

SEQ ID NO: 2965 - protein, 150 aa, unidentified; identical to SEQ ID NO: 2929
  REGION 1..150: note = Description of Unknown: uncultivated organism with predicted taxonomy: Bacteroides sp. CAG:770
  REGION 1..150: note = MG16-57 RuvC-III domain

SEQ ID NO: 2966 - protein, 150 aa, unidentified
  REGION 1..150: note = Description of Unknown: uncultivated organism with predicted taxonomy: Bacteroides sp. CAG:770
  REGION 1..150: note = MG16-58 RuvC-III domain
VQTQYISRKAMEILNQVCRNVYGSSGDVTAYLRRIWGYDEILHSLDLPRYREGNLTGDVTYVHRGQTHTEERIRDWSKRLDHRHHAIDALTIACTRQSIIQRLNTLNAKTAIGEEQMSLDKWTLAQAHFSVADVADHVAGILVSFKSGKR

SEQ ID NO: 2967 - protein, 150 aa, unidentified
  REGION 1..150: note = Description of Unknown: uncultivated organism with predicted taxonomy: Bacteroides sp. CAG:770
  REGION 1..150: note = MG16-59 RuvC-III domain
VQTQYISRKAMEILKQVCHNVYGSSGEVTSYLRRIWGYDEILHSLDLPRYREGGMTAEVSYDHRGQTHTEERIKDWSKRLEHRHHAIDALTIACTRQSIIQRLNNLSAMTAVAGESMSLDKWTLAQPHFSVQEVSDNVSRILVSFKAGKK

SEQ ID NO: 2968 - protein, 150 aa, unidentified; identical to SEQ ID NO: 2925
  REGION 1..150: note = Description of Unknown: uncultivated organism with predicted taxonomy: Bacteroides sp. CAG:770
  REGION 1..150: note = MG16-60 RuvC-III domain

SEQ ID NO: 2969 - protein, 150 aa, unidentified; identical to SEQ ID NO: 2939
  REGION 1..150: note = Description of Unknown: uncultivated organism with predicted taxonomy: Bacteroides sp. CAG:709
  REGION 1..150: note = MG16-61 RuvC-III domain

SEQ ID NO: 2970 - protein, 150 aa, unidentified; identical to SEQ ID NO: 2925
  REGION 1..150: note = Description of Unknown: uncultivated organism with predicted taxonomy: Bacteroides sp. CAG:770
  REGION 1..150: note = MG16-62 RuvC-III domain

SEQ ID NO: 2971 - protein, 150 aa, unidentified; identical to SEQ ID NO: 2925
  REGION 1..150: note = Description of Unknown: uncultivated organism with predicted taxonomy: Bacteroides sp. CAG:770
  REGION 1..150: note = MG16-63 RuvC-III domain

SEQ ID NO: 2972 - protein, 150 aa, unidentified; identical to SEQ ID NO: 2942
  REGION 1..150: note = Description of Unknown: uncultivated organism with predicted taxonomy: Alistipes sp. CAG:514
  REGION 1..150: note = MG16-64 RuvC-III domain

SEQ ID NO: 2973 - protein, 150 aa, unidentified
  REGION 1..150: note = Description of Unknown: uncultivated organism with predicted taxonomy: Bacteroides sp. CAG:770
  REGION 1..150: note = MG16-65 RuvC-III domain
VQTQYISRKAMEILNQVCRNVYGSSGDVTAYLRRIWGYDEILHSLDLPRYREGNLTGDVTYVHKGQTHTEERIKDWSKRLDHRHHAIDALTIASTRQSIIQRLNTLNAKTAIGEEQISLDKWTLAQAHFSVADVADHVADILVSFKSGKK

SEQ ID NO: 2974 - protein, 150 aa, unidentified
  REGION 1..150: note = Description of Unknown: uncultivated organism with predicted taxonomy: Bacteroides sp. CAG:770
  REGION 1..150: note = MG16-66 RuvC-III domain
VQTQYISRKAMEILKQVCHNVYGSSGEVTSYLRRIWGYDEILHSLDLPRYREGGMTAEVSYDHRGQTHTEERIKDWSKRLDHRHHAIDALTIACTRQSIIQRLNNLSAMTAVAGEYMSLDKWTLAQPHFSVQEVSDNVSRILVSFKAGKK

SEQ ID NO: 2975 - protein, 150 aa, unidentified; identical to SEQ ID NO: 2925
  REGION 1..150: note = Description of Unknown: uncultivated organism with predicted taxonomy: Bacteroides sp. CAG:545
  REGION 1..150: note = MG16-67 RuvC-III domain

SEQ ID NO: 2976 - protein, 150 aa, unidentified; identical to SEQ ID NO: 2930
  REGION 1..150: note = Description of Unknown: uncultivated organism with predicted taxonomy: Bacteroides sp. CAG:770
  REGION 1..150: note = MG16-68 RuvC-III domain

SEQ ID NO: 2977 - protein, 150 aa, unidentified; identical to SEQ ID NO: 2939
  REGION 1..150: note = Description of Unknown: uncultivated organism with predicted taxonomy: Bacteroides sp. CAG:709
  REGION 1..150: note = MG16-69 RuvC-III domain

SEQ ID NO: 2978 - protein, 150 aa, unidentified; identical to SEQ ID NO: 2925
  REGION 1..150: note = Description of Unknown: uncultivated organism with predicted taxonomy: Bacteroides sp. CAG:770
  REGION 1..150: note = MG16-70 RuvC-III domain

SEQ ID NO: 2979 - protein, 150 aa, unidentified; identical to SEQ ID NO: 2938
  REGION 1..150: note = Description of Unknown: uncultivated organism with predicted taxonomy: Bacteroides sp. CAG:545
  REGION 1..150: note = MG16-72 RuvC-III domain

SEQ ID NO: 2980 - protein, 150 aa, unidentified; identical to SEQ ID NO: 2925
  REGION 1..150: note = Description of Unknown: uncultivated organism with predicted taxonomy: Bacteroides sp. CAG:545
  REGION 1..150: note = MG16-73 RuvC-III domain

SEQ ID NO: 2981 - protein, 150 aa, unidentified
  REGION 1..150: note = Description of Unknown: uncultivated organism with predicted taxonomy: Bacteroides sp. CAG:770
  REGION 1..150: note = MG16-74 RuvC-III domain
VQTQYISRKAMEILNQVCRNVYGSSGDVTAYLRRIWGYDEILHSLDLPRYREGNLTGDVTYVHRGQTHTEERIRDWSKRLDHRHHAIDALTIASTRQSIIQRLNTLNANTAIGEEQISLDKWTLAQAHFSVADVADHVADILVSFKSGKK

SEQ ID NO: 2982 - protein, 150 aa, unidentified; identical to SEQ ID NO: 2939
  REGION 1..150: note = Description of Unknown: uncultivated organism with predicted taxonomy: Bacteroides sp. CAG:709
  REGION 1..150: note = MG16-75 RuvC-III domain

SEQ ID NO: 2983 - protein, 150 aa, unidentified; identical to SEQ ID NO: 2939
  REGION 1..150: note = Description of Unknown: uncultivated organism with predicted taxonomy: Bacteroides
  REGION 1..150: note = MG16-76 RuvC-III domain

SEQ ID NO: 2984 - protein, 150 aa, unidentified
  REGION 1..150: note = Description of Unknown: uncultivated organism with predicted taxonomy: Bacteroides sp. CAG:770
  REGION 1..150: note = MG16-77 RuvC-III domain
VQTQYISRKAMEILNQVCRNVYGSSGDVTAYLRRIWGYDEILHSLDLPRYREGNLTGDVTYVHRGQTHTEERIRDWSKRLDHRHHAIDALTIACTRQSIIQRLNTLNAKTAIGEEQMSLDKWTLAQAHFSVADVADHVADILVSFKSGKR

SEQ ID NO: 2985 - protein, 150 aa, unidentified; identical to SEQ ID NO: 2925
  REGION 1..150: note = Description of Unknown: uncultivated organism with predicted taxonomy: Bacteroides
  REGION 1..150: note = MG16-78 RuvC-III domain

SEQ ID NO: 2986 - protein, 150 aa, unidentified
  REGION 1..150: note = Description of Unknown: uncultivated organism with predicted taxonomy: Bacteroides sp. CAG:770
  REGION 1..150: note = MG16-79 RuvC-III domain
IQTQYISRKAMEILKQVCHNVYGSSGEVTSYLRRIWGYDEILHSLDLPRYREGGMTAEVSYDHRGQTHTEERIKDWSKRLDHRHHAIDALTIACTRQSIIQRLNNLSAMTAVAGESMSLDKWTLAQPHFSVQEVSDNVSRILVSFKAGKK

SEQ ID NO: 2987 - protein, 150 aa, unidentified; identical to SEQ ID NO: 2925
  REGION 1..150: note = Description of Unknown: uncultivated organism with predicted taxonomy: Bacteroides sp. CAG:545
  REGION 1..150: note = MG16-80 RuvC-III domain

SEQ ID NO: 2988 - protein, 150 aa, unidentified
  REGION 1..150: note = Description of Unknown: uncultivated organism with predicted taxonomy: Bacteroides
  REGION 1..150: note = MG16-81 RuvC-III domain
VQTQYISRKAMEILKQVCHNVYGSSGEVTSYLRRIWGYDVILHSLDLPRYREGGMTAEVSYEHRGQTHTEERIKDWSKRLDHRHHAIDALTIACTRQSVIQRLNNLSSMTAVAGEAMSLDKWTLAQPHFSVQEVSDKVGGILVSFKAGKK

SEQ ID NO: 2989 - protein, 150 aa, unidentified; identical to SEQ ID NO: 2930
  REGION 1..150: note = Description of Unknown: uncultivated organism with predicted taxonomy: Bacteroides sp. CAG:770
  REGION 1..150: note = MG16-82 RuvC-III domain

SEQ ID NO: 2990 - protein, 150 aa, unidentified; identical to SEQ ID NO: 2925
  REGION 1..150: note = Description of Unknown: uncultivated organism with predicted taxonomy: Bacteroides sp. CAG:545
  REGION 1..150: note = MG16-83 RuvC-III domain

SEQ ID NO: 2991 - protein, 165 aa, unidentified
  REGION 1..165: note = Description of Unknown: uncultivated organism with predicted taxonomy: Bacteroidetes
  REGION 1..165: note = MG16-84 RuvC-III domain
RQSQYIAKKAAEILRQGVRNVYATSGSVTDFLRHQWGYDNILHYLNLPRYQQVDGLTESVTYDHCGQKHQEERIKDWTKRLDHRHHAIDALTIALTQQSVIQRLNTLNASREEMKNDLGQRIDTPEYTEKRSLLEKWVDIQPHFSVQEVTDKVDGILISFRAGKR

SEQ ID NO: 2992 - protein, 150 aa, unidentified; identical to SEQ ID NO: 2925
  REGION 1..150: note = Description of Unknown: uncultivated organism with predicted taxonomy: Bacteroides
  REGION 1..150: note = MG16-85 RuvC-III domain

SEQ ID NO: 2993 - protein, 150 aa, unidentified
  REGION 1..150: note = Description of Unknown: uncultivated organism with predicted taxonomy: Bacteroides sp. CAG:545
  REGION 1..150: note = MG16-86 RuvC-III domain
VQTQYISRKAMEILKQVCHNVYGSSGEVTSYLRRIWGYDEILHSLDLPRYREGGMTAEVSYDHLGQTHTEERIKDWSKRLDHRHHAIDALTIACTRQSIIQRLNNLSAMSAVAGESMSLDKWTLAQPHFSVQEVSDNVSRILVSFKAGKK

SEQ ID NO: 2994 - protein, 150 aa, unidentified; identical to SEQ ID NO: 2993
  REGION 1..150: note = Description of Unknown: uncultivated organism with predicted taxonomy: Bacteroides
  REGION 1..150: note = MG16-87 RuvC-III domain

SEQ ID NO: 2995 - protein, 150 aa, unidentified; identical to SEQ ID NO: 2926
  REGION 1..150: note = Description of Unknown: uncultivated organism with predicted taxonomy: Bacteroides
  REGION 1..150: note = MG16-88 RuvC-III domain

SEQ ID NO: 2996 - protein, 150 aa, unidentified; identical to SEQ ID NO: 2939
  REGION 1..150: note = Description of Unknown: uncultivated organism with predicted taxonomy: Bacteroides sp. CAG:709
  REGION 1..150: note = MG16-89 RuvC-III domain

SEQ ID NO: 2997 - protein, 150 aa, unidentified; identical to SEQ ID NO: 2966
  REGION 1..150: note = Description of Unknown: uncultivated organism with predicted taxonomy: Bacteroides sp. CAG:770
  REGION 1..150: note = MG16-90 RuvC-III domain

SEQ ID NO: 2998 - protein, 150 aa, unidentified; identical to SEQ ID NO: 2966
  REGION 1..150: note = Description of Unknown: uncultivated organism with predicted taxonomy: Bacteroides sp. CAG:770
  REGION 1..150: note = MG16-91 RuvC-III domain

SEQ ID NO: 2999 - protein, 150 aa, unidentified; identical to SEQ ID NO: 2942
  REGION 1..150: note = Description of Unknown: uncultivated organism with predicted taxonomy: Alistipes sp. CAG:514
  REGION 1..150: note = MG16-92 RuvC-III domain

SEQ ID NO: 3000 - protein, 150 aa, unidentified; identical to SEQ ID NO: 2942
  REGION 1..150: note = Description of Unknown: uncultivated organism with predicted taxonomy: Alistipes sp. CAG:514
  REGION 1..150: note = MG16-93 RuvC-III domain

SEQ ID NO: 3001 - protein, 150 aa, unidentified
  REGION 1..150: note = Description of Unknown: uncultivated organism with predicted taxonomy: Bacteroides sp. CAG:545
  REGION 1..150: note = MG16-94 RuvC-III domain
VQTQYISRKAMEILKQVCHNVYGSSGEVTSYLRRIWGYDEILHSLDLPRYREGGMTAEVSYDHRGQTHTEERIKDWSKRLDHRHHAIDALTIACTRQSIIQRLNNLSAMTAVAGESMSLDKWTLAQPHFSVQEVSYNVSRILVSFKAGKK

SEQ ID NO: 3002 - protein, 150 aa, unidentified
  REGION 1..150: note = Description of Unknown: uncultivated organism with predicted taxonomy: Bacteroides sp. CAG:709
  REGION 1..150: note = MG16-95 RuvC-III domain
VQTQYISRKAMEILKQVCHNVYGSSGEVTSYLRRIWGYDEILHSLDLPRYREGGMTAEVSYEHRGQIHTEERIKDWSKRLDHRHHAIDALTIACTRQSVIQRLNNLSSMTAVAGEAMSLDKWTLAQPHFSVQEVSDKVGGILVSFKAGKK

SEQ ID NO: 3003 - protein, 150 aa, unidentified; identical to SEQ ID NO: 2925
  REGION 1..150: note = Description of Unknown: uncultivated organism with predicted taxonomy: Bacteroides
  REGION 1..150: note = MG16-96 RuvC-III domain

SEQ ID NO: 3004 - protein, 150 aa, unidentified; identical to SEQ ID NO: 2925
  REGION 1..150: note = Description of Unknown: uncultivated organism with predicted taxonomy: Bacteroides
  REGION 1..150: note = MG16-97 RuvC-III domain

SEQ ID NO: 3005 - protein, 150 aa, unidentified
  REGION 1..150: note = Description of Unknown: uncultivated organism with predicted taxonomy: Bacteroides sp. CAG:770
  REGION 1..150: note = MG16-98 RuvC-III domain
VQTQYISRKAMEILNQVCRNVYGSSGDVTAYLRRIWGYDEILHSLDLPRYREGNLTGDVTYVHRGQTHTEERIKDWSKRLDHRHHAIDALTIACTRQSIIQRLNTLNAKTAIGEEQMSLDKWTLAQAHFSVADVADHVADILVSFKSGKK

SEQ ID NO: 3006 - protein, 150 aa, unidentified; identical to SEQ ID NO: 2939
  REGION 1..150: note = Description of Unknown: uncultivated organism with predicted taxonomy: Bacteroides sp. CAG:709
  REGION 1..150: note = MG16-99 RuvC-III domain

SEQ ID NO: 3007 - protein, 150 aa, unidentified; identical to SEQ ID NO: 2939
  REGION 1..150: note = Description of Unknown: uncultivated organism with predicted taxonomy: Bacteroides sp. CAG:709
  REGION 1..150: note = MG16-100 RuvC-III domain

SEQ ID NO: 3008 - protein, 150 aa, unidentified
  REGION 1..150: note = Description of Unknown: uncultivated organism with predicted taxonomy: Bacteroides sp. CAG:545
  REGION 1..150: note = MG16-101 RuvC-III domain
VQTQYISRKAMEILKQVCHNVYGSSGEVTSYLRRIWGYDEILHSLDLPRYREGGMTSEVSYDHRGQTHTEERIKDWSKRLDHRHHAIDALTIACTRQSIIQRLNNLSAMTAVAGESMSLDKWTLAQPHFSVQEVSDNVSRILVSFKAGKK

SEQ ID NO: 3009 - protein, 150 aa, unidentified
  REGION 1..150: note = Description of Unknown: uncultivated organism with predicted taxonomy: Bacteroides sp. CAG:770
  REGION 1..150: note = MG16-102 RuvC-III domain
VQTQYISRKAMEILNQVCRNVYCSSGDVTAYLRRIWGYDEILHSLDLPRYREGNLTGDVTYVHMGQTHTEERIKDWSKRMDHRHHAIDALTIACTRQSIIQRLNTLNAKTAIGEEQMSLDKWTLAQAHFSVADVADHVADILVSFKSGKR

SEQ ID NO: 3010 - protein, 150 aa, unidentified; identical to SEQ ID NO: 2953
  REGION 1..150: note = Description of Unknown: uncultivated organism with predicted taxonomy: Bacteroides sp. CAG:770
  REGION 1..150: note = MG16-103 RuvC-III domain

SEQ ID NO: 3011 - protein, 150 aa, unidentified; identical to SEQ ID NO: 2939
  REGION 1..150: note = Description of Unknown: uncultivated organism with predicted taxonomy: Bacteroides
  REGION 1..150: note = MG16-104 RuvC-III domain

SEQ ID NO: 3012 - protein, 150 aa, unidentified
  REGION 1..150: note = Description of Unknown: uncultivated organism with predicted taxonomy: Bacteroides sp. CAG:770
  REGION 1..150: note = MG16-105 RuvC-III domain
VQTQYISRKAMEILNQVCRNVYGSSGDVTAYLRRIWGYDEILHSLDLPRYREGNLTENVTYVHRGQTHTEERIKDWSKRLDHRHHAIDALTIACTRQSIIQRLNTLNAKTAIGEEQMSLDKWTLAQTHFSVADVADHVADILVSFKSGKR

SEQ ID NO: 3013 - protein, 150 aa, unidentified; identical to SEQ ID NO: 2925
  REGION 1..150: note = Description of Unknown: uncultivated organism with predicted taxonomy: Bacteroides sp. CAG:545
  REGION 1..150: note = MG16-106 RuvC-III domain

SEQ ID NO: 3014 - protein, 150 aa, unidentified; identical to SEQ ID NO: 2925
  REGION 1..150: note = Description of Unknown: uncultivated organism with predicted taxonomy: Bacteroides sp. CAG:545
  REGION 1..150: note = MG16-107 RuvC-III domain

SEQ ID NO: 3015 - protein, 150 aa, unidentified; identical to SEQ ID NO: 2932
  REGION 1..150: note = Description of Unknown: uncultivated organism with predicted taxonomy: Bacteroides sp. CAG:770
  REGION 1..150: note = MG16-108 RuvC-III domain

SEQ ID NO: 3016 - protein, 150 aa, unidentified; identical to SEQ ID NO: 2939
  REGION 1..150: note = Description of Unknown: uncultivated organism with predicted taxonomy: Bacteroides sp. CAG:709
  REGION 1..150: note = MG16-109 RuvC-III domain

SEQ ID NO: 3017 - protein, 150 aa, unidentified; identical to SEQ ID NO: 2939
  REGION 1..150: note = Description of Unknown: uncultivated organism with predicted taxonomy: Bacteroides sp. CAG:709
  REGION 1..150: note = MG16-110 RuvC-III domain

SEQ ID NO: 3018 - protein, 150 aa, unidentified; identical to SEQ ID NO: 2925
  REGION 1..150: note = Description of Unknown: uncultivated organism with predicted taxonomy: Bacteroides sp. CAG:770
  REGION 1..150: note = MG16-113 RuvC-III domain

SEQ ID NO: 3019 - protein, 150 aa, unidentified; identical to SEQ ID NO: 2925
  REGION 1..150: note = Description of Unknown: uncultivated organism with predicted taxonomy: Bacteroides sp. CAG:545
  REGION 1..150: note = MG16-114 RuvC-III domain

SEQ ID NO: 3020 - protein, 150 aa, unidentified; identical to SEQ ID NO: 2925
  REGION 1..150: note = Description of Unknown: uncultivated organism with predicted taxonomy: Bacteroides sp. CAG:770
  REGION 1..150: note = MG16-115 RuvC-III domain

SEQ ID NO: 3021 - protein, 150 aa, unidentified; identical to SEQ ID NO: 2925
  REGION 1..150: note = Description of Unknown: uncultivated organism with predicted taxonomy: Bacteroides
  REGION 1..150: note = MG16-116 RuvC-III domain

SEQ ID NO: 3022 - protein, 150 aa, unidentified; identical to SEQ ID NO: 2973
  REGION 1..150: note = Description of Unknown: uncultivated organism with predicted taxonomy: Bacteroides sp. CAG:770
  REGION 1..150: note = MG16-118 RuvC-III domain

SEQ ID NO: 3023 - protein, 150 aa, unidentified; identical to SEQ ID NO: 2939
  REGION 1..150: note = Description of Unknown: uncultivated organism with predicted taxonomy: Bacteroides sp. CAG:709
  REGION 1..150: note = MG16-119 RuvC-III domain

SEQ ID NO: 3024 - protein, 150 aa, unidentified; identical to SEQ ID NO: 2939
  REGION 1..150: note = Description of Unknown: uncultivated organism with predicted taxonomy: Bacteroides sp. CAG:709
  REGION 1..150: note = MG16-120 RuvC-III domain

SEQ ID NO: 3025 - protein, 150 aa, unidentified
  REGION 1..150: note = Description of Unknown: uncultivated organism with predicted taxonomy: Bacteroides sp. CAG:770
  REGION 1..150: note = MG16-121 RuvC-III domain
VQTQYISRKAMEILNQVCRNVYGSSGDVTAYLRRIWGYDEILHSLDLPRYREGNLTGDVTYLHKGQTHTEERIKDWSKRLDHRHHAIDALTIASTRQSIIQRLNTLNAKTAIGEEQISLDKWTLAQAHFSVADVADHVADILVSFKSGKK

SEQ ID NO: 3026 - protein, 150 aa, unidentified
  REGION 1..150: note = Description of Unknown: uncultivated organism with predicted taxonomy: Bacteroides sp. CAG:770
  REGION 1..150: note = MG16-122 RuvC-III domain
VQTQYISRKAMEILNQVCRNVYGSSGDVTAYLRRIWGYDEILHSLDLPRYREGNLTGDVTYVHKGQTHTEERIKDWSKRLDHRHHAIDALTIASTRQSIIQRLNTLNAKTAIGEEQISLDKWTLAQAHFSVADVADHVADILVSFKSGKR

SEQ ID NO: 3027 - protein, 150 aa, unidentified; identical to SEQ ID NO: 2925
  REGION 1..150: note = Description of Unknown: uncultivated organism with predicted taxonomy: Bacteroides sp. CAG:545
  REGION 1..150: note = MG16-123 RuvC-III domain

SEQ ID NO: 3028 - protein, 150 aa, unidentified
  REGION 1..150: note = Description of Unknown: uncultivated organism with predicted taxonomy: Bacteroides sp. CAG:770
  REGION 1..150: note = MG16-126 RuvC-III domain
VQTQYISRKAMEILKQVCHNVYGSSGEVTSYLRRIWGYDEILHSLDLPRYREGGMTAEVSYDHRGQTHTEERIKDWSKRLDHRHHAIDALTIACTRQSIIQRLNNLSAMAAVAGESMSLDKWTLAQPHFSVQEVSDNVSRILVSFKAGKK

SEQ ID NO: 3029 - protein, 150 aa, unidentified; identical to SEQ ID NO: 2939
  REGION 1..150: note = Description of Unknown: uncultivated organism with predicted taxonomy: Bacteroides sp. CAG:709
  REGION 1..150: note = MG16-127 RuvC-III domain

SEQ ID NO: 3030 - protein, 150 aa, unidentified; identical to SEQ ID NO: 2925
  REGION 1..150: note = Description of Unknown: uncultivated organism with predicted taxonomy: Bacteroides sp. CAG:770
  REGION 1..150: note = MG16-128 RuvC-III domain

SEQ ID NO: 3031 - protein, 150 aa, unidentified; identical to SEQ ID NO: 2939
  REGION 1..150: note = Description of Unknown: uncultivated organism with predicted taxonomy: Bacteroides sp. CAG:709
  REGION 1..150: note = MG16-129 RuvC-III domain

SEQ ID NO: 3032 - protein, 150 aa, unidentified
  REGION 1..150: note = Description of Unknown: uncultivated organism with predicted taxonomy: Bacteroides sp. CAG:770
  REGION 1..150: note = MG16-130 RuvC-III domain
VQTQYISRKAMEILNQVCRNVYGSSGDVTAYLRRIWGYDEILHSLDLPRYRDGNLTEDVTYVHRGQTHTEERIKDWSKRLDHRHHAIDALTIACTRQSIIQRLNTLNAKTAIGEEQMSLDKWTLAQAHFSVADVADHVADILVSFKSGKK

SEQ ID NO: 3033 - protein, 150 aa, unidentified
  REGION 1..150: note = Description of Unknown: uncultivated organism with predicted taxonomy: Bacteroides sp. CAG:709
  REGION 1..150: note = MG16-131 RuvC-III domain
VQTQYISRKAMEILKQVCHNVYGSSGEVTSYLRRIWGYDEILHSLDLPRYREGGMTAEVSYEHRGQTHTEERIKDWSKRLDHRHHAIDALTIACTRQSVIQRLNNLSSMTAVAGEAMSLDKWTLAQPHFSMQEVSDKVGGILVSFKAGKK

SEQ ID NO: 3034 - protein, 150 aa, unidentified; identical to SEQ ID NO: 2925
  REGION 1..150: note = Description of Unknown: uncultivated organism with predicted taxonomy: Bacteroides
  REGION 1..150: note = MG16-132 RuvC-III domain

SEQ ID NO: 3035 - protein, 159 aa, unidentified
  REGION 1..159: note = Description of Unknown: uncultivated organism with predicted taxonomy: Bacteroidales
  REGION 1..159: note = MG16-133 RuvC-III domain
RLSQYISKKAQELLKKSCREVIATSGSVTDLIRHTWGYDTILHELNLPCYKEAGLTTFIKEENTGQQKEVIKDWTKRLDHRHHAVDALTVACTSRSIIQHINTLHASREVMRGDVKTPRKEWENNDLLQQWIKEKMPFDRQYVLQKVASILVSMKSGKK

SEQ ID NO: 3036 - protein, 166 aa, unidentified
  REGION 1..166: note = Description of Unknown: uncultivated organism
  REGION 1..166: note = MG16-134 RuvC-III domain
GETQYISREAIKILKQCCKNVNATSGAVTAILRHLWGYDEILHQLDFERYKKAGLTKIVTWESDHGKNKHTKEQIVNWTKRIDHRHHAIDALVIACTQQGFVQRINTLNADETKDLMKKQIESSGVKFEEKKDLLNKYLASLTPFSTQTVADNVDKILVSFKAGKK

SEQ ID NO: 3037 - protein, 166 aa, unidentified
  REGION 1..166: note = Description of Unknown: uncultivated organism with predicted taxonomy: Porphyromonas sp. oral taxon 278
  REGION 1..166: note = MG16-135 RuvC-III domain
GETQYISREAIRILKQCCRYVNATSGSITATLRHLWGYDEILHQLNFERYKQAGLTKIVTWESNHGKNKHSKEQIVDWSKRIDHRHHAIDALVVACTQQGFIQRINTLNADETKDLMKKQIESAGIKYEEKKVLLDKYLISLIPFKTQIVADAVNKILVSFKAGKK

SEQ ID NO: 3038 - protein, 162 aa, unidentified
  REGION 1..162: note = Description of Unknown: uncultivated organism with predicted taxonomy: Bacteroidales
  REGION 1..162: note = MG16-136 RuvC-III domain
RQSQYISKKAVEMLKLVCRNVWTTSGSITDFLRHNWGYDQILHDLNLPRYSLGGMTESVHYEHNGQKHEEERIIGWTKRLDHRHHAIDALTIASTQQSYIQRLNTLSASRDVMHAEVEKQGVQWQEKHSLLEEWTAQRPHLPYSTVRDYVDGILVSFKPGKM

SEQ ID NO: 3039 - protein, 159 aa, unidentified
  REGION 1..159: note = Description of Unknown: uncultivated organism with predicted taxonomy: Prevotella
  REGION 1..159: note = MG16-137 RuvC-III domain
RLSQYISRKAQELLRMTCRDVTVTTGEITALIRHTWGYDTILHDLNFSSYKEAGLTEIVKGEDSGRTREIIKDWSKRLDHRHHAIDALAVACTSRSIVQRINTLNASREEIRGEIKAPRKEWKDSNLLQQWIKEKMPFDRQYVLHKVASILISMKAGKK

SEQ ID NO: 3040 - protein, 162 aa, unidentified
  REGION 1..162: note = Description of Unknown: uncultivated organism
  REGION 1..162: note = MG16-138 RuvC-III domain
RQSQYISKKAVEMLKQVCRNVWTTSGSVTDFIRHQWGYDNILHDLNFKRYKDAGQTEIIISDHLGQVHQEERIKNWTKRLDHRHHAIDALTIASTKQSYIQRLNHLNSSRDKMFQELEAQSKEVKEKYSLLESWMRCRPHIPVSVVSQAIDGILVSFKTGKR

SEQ ID NO: 3041 - protein, 163 aa, unidentified
  REGION 1..163: note = Description of Unknown: uncultivated organism with predicted taxonomy: Bacteroidales
  REGION 1..163: note = MG16-139 RuvC-III domain
RQSQYIAVKAVEILQQGIRRVWTSGGSVTDFLRHQWGYDEILHTLNLPRYKQVDEMTEWVHYEHAGQEHEVERIKNWTKRLDHRHHAIDALTVALTQQSMIQRLNTLEASHDEMEKQVKEANTPYKEKKSILEKWVTEQPHFEVSEVTDKVDSILVSFRAGKR

SEQ ID NO: 3042 - protein, 126 aa, unidentified
  REGION 1..126: note = Description of Unknown: uncultivated organism with predicted taxonomy: Fibrobacter
  REGION 1..126: note = MG16-140 RuvC-III domain
RQTQYIAKKALEMLKEICYNVYATSGSVTDFIRRTWGYDEILHQLNFDRYKKGGLTELREYEHKGETHTEERIQDWSKRLDHRHHAIDALVIAMTRQSIIQRLNHLNTERDAMFQEVEKQRKDWKN

SEQ ID NO: 3043 - protein, 100 aa, unidentified
  REGION 1..100: note = Description of Unknown: uncultivated organism with predicted taxonomy: Bacteroidales
  REGION 1..100: note = MG16-141 RuvC-III domain
RQSQYIAVKAVEILQQGIRQVWTSGGSVTDFLRHQWGYDEILHTLNLPRYRKVEDLTEIVHYEHAGQEHDEERIKNWSKRIDHRHHAIDALTVALTRQAY

SEQ ID NO: 3044 - protein, 163 aa, unidentified
  REGION 1..163: note = Description of Unknown: uncultivated organism with predicted taxonomy: Bacteroidales
  REGION 1..163: note = MG16-142 RuvC-III domain
RQSQYIAVKAVEILQKGIRTVWTSGGSVTDFLRHQWGYDEILHTLNLPRYRQVDELTEMVHYEHAGQEHDEERIKNWTKRIDHRHHAIDALTVALTRQSYIQRLNTLEASHDIMEKQVKEAGTQYNEKKSILEKWVAEQPHFPVADVTENVDGILVSFRAGKR

SEQ ID NO: 3045 - protein, 162 aa, unidentified
  REGION 1..162: note = Description of Unknown: uncultivated organism with predicted taxonomy: Deminuibacter soli
  REGION 1..162: note = MG16-143 RuvC-III domain
RQSQYIAKKAVDMLKQVCRNVWTTSGSVTDFLRHNWGYDQILHDLNLPRYKEGGMTEMVHYEHNGQEHDEERIIGWTKRLDHRHHAIDALTIASTRQSYIQRLNTLYASRDAMHAEIKKQSAHWQEKHSLLEEWTKQRPHLPVSVVRDSVDGILVSFKPGKR

SEQ ID NO: 3046 - protein, 166 aa, unidentified
  REGION 1..166: note = Description of Unknown: uncultivated organism with predicted taxonomy: Bacteroidales
  REGION 1..166: note = MG16-144 RuvC-III domain
GETQYISRESIRILKQCCRNVNATSGSITATLRHLWGYDEVLHQLNFERFKNAGLTETVTWESNHGKNKHSKEQIIDWSKRVDHRHHAIDALVVACTQQGFIQRINTLNADETKDLMKRQIETVGVKYDEKKILLDKYLTSLAPFKTQTVANAASNILVSFKPGKK

SEQ ID NO: 3047 - protein, 166 aa, unidentified
  REGION 1..166: note = Description of Unknown: uncultivated organism with predicted taxonomy: Bacteroides
  REGION 1..166: note = MG16-145 RuvC-III domain
RETQYISRESIRILKQCCRNVNATSGAVTAILRHLWGYDEILHQLNFERYKNAGLTETVIWESNHGKNKHSREQIVDWSKRVDHRHHAIDALVVACTQQGFIQRINTLNADETKGLMKKQIETAGLKYVEKMALRDKYLISLTPFKTQAVANAVNNILVSFKPGKR

SEQ ID NO: 3048 - protein, 162 aa, unidentified
  REGION 1..162: note = Description of Unknown: uncultivated organism with predicted taxonomy: Bacteroidetes
  REGION 1..162: note = MG16-146 RuvC-III domain
RQSQYISKKAVEMLKQVCRNVWTTSGSVTDFVRHHWGYDNIIHDLNFQRNKNAGQTAIITYEHRGQTHQEERIKEWSKRLDHRHHAIDALTIASTKQSYIQRLNHLNTSRDAMFQELEAQSEEFKEKYSLLERWIKERPHIPVSEVTEAVDGILVSFKAGKR

SEQ ID NO: 3049 - protein, 163 aa, unidentified
  REGION 1..163: note = Description of Unknown: uncultivated organism with predicted taxonomy: Bacteroidales
  REGION 1..163: note = MG16-147 RuvC-III domain
RQSQYIAVKAVEVLQDGIRHVWTSGGSVTDFLRHQWGYDEILHTLNLPRYRQVEGLTEYVEFEHAGQKHTEERIKNWSKRIDHRHHAIDALTVALTQQGYIQRLNTLEASHDLMEKQVKEAGTHYNEKKSILEKWINEQPHFSVEDVTNVVKGILVSFRAGKR

SEQ ID NO: 3050 - protein, 163 aa, unidentified
  REGION 1..163: note = Description of Unknown: uncultivated organism with predicted taxonomy: Bacteroidales
  REGION 1..163: note = MG16-148 RuvC-III domain
RQSQYIAVKAVEVLQDGIRQVWTSGGSVTDFLRHQWGYDEILHTLNLPRYRQVEGLTEFVDFEHAGQKHTEERIKNWSKRIDHRHHAIDALTVALTQQGYIQRLNTLEASHDFMEKQVKEAGTKYNEKKSILEKWINEQPHFSVEDVTNAVDGILVSFRAGKR

SEQ ID NO: 3051 - protein, 166 aa, unidentified
  REGION 1..166: note = Description of Unknown: uncultivated organism with predicted taxonomy: Bacteroidetes
  REGION 1..166: note = MG16-149 RuvC-III domain
GETQYISREAIRILKQCCRYVNATSGSITATLRHLWGYDEILHQLNFERYKQAGLTEIVTWESNHGKNKHSKEQIVDWSKRIDHRHHAIDALVVACTQQGFIQRINTLNADETKDLMKKQIESAGIKYEEKKVLLDKYLISLIPFKTQIVADAVNKILVSFKAGKK

SEQ ID NO: 3052 - protein, 159 aa, unidentified
  REGION 1..159: note = Description of Unknown: uncultivated organism with predicted taxonomy: Bacteroidales
  REGION 1..159: note = MG16-150 RuvC-III domain
RLSQYISRKAMEILRMGCREVVATSGSITELIRHTWGYDTILHELNCPDYKEAGLTEIIIDEKTKRQREVISDWTKRLDHRHHAIDALAVACTTHSIVQHINTLHASRKIMRDEIKTSRKEWKDNYLLQQWIKEKMPFDRHYVLHKIASILVSMKAGKK

SEQ ID NO: 3053 - protein, 166 aa, unidentified; identical to SEQ ID NO: 3047
  REGION 1..166: note = Description of Unknown: uncultivated organism with predicted taxonomy: Prevotella
  REGION 1..166: note = MG16-151 RuvC-III domain

SEQ ID NO: 3054 - protein, 162 aa, unidentified
  REGION 1..162: note = Description of Unknown: uncultivated organism with predicted taxonomy: Fibrobacter
  REGION 1..162: note = MG16-152 RuvC-III domain
RQTQYISKKALEMLKEVCRNVYATSGSVTDFIRHTWGYDEILHQLNFDRYKQGGLTEAREFDNKGIIHKEERIQNWSKRLDHRHHAIDALVIAMTKQSIIQRLNHLNTERDAMFQEVDKQSAEWKNDFSLLQEWLRERKHFSTKDVADRVAEILISFKAGKR

SEQ ID NO: 3055 - protein, 163 aa, unidentified
  REGION 1..163: note = Description of Unknown: uncultivated organism with predicted taxonomy: Bacteroidales
  REGION 1..163: note = MG16-153 RuvC-III domain
RQSQYIAVKAVEILQQGIRQVWTSGGSVTDFLRHQWGYDEILHTLNLPRYRQVEDLTEMVHYEHAGQEHDEERIKNWSKRIDHRHHAIDALTVALTRQAYIQRLNTLEASHDFMEKQVKEAGTQYNEKKSILEKWILEQPHFSVDDVTQSVDSILVSFRAGKR

SEQ ID NO: 3056 - protein, 163 aa, unidentified
  REGION 1..163: note = Description of Unknown: uncultivated organism with predicted taxonomy: Bacteroidales
  REGION 1..163: note = MG16-154 RuvC-III domain
RQSQYIAVKAVEVLQDGIRQVWTSGGSVTDFLRHQWGYDEILHTLNLPRYRQVEGLTEFVDFEHAGQKHTEERIKNWSKRIDHRHHAIDALTVALTQQGYIQRLNTLEASHDFMEKQVKEAGTKYNEKKSILEKWINEQPHFSVEEVTNAVDGILVSFRAGKR

SEQ ID NO: 3057 - protein, 162 aa, unidentified
  REGION 1..162: note = Description of Unknown: uncultivated organism with predicted taxonomy: Bacteroidales
  REGION 1..162: note = MG16-155 RuvC-III domain
RQSQYISKKAVEMLKQVCRNVWTTSGSVTDFVRHQWGYDNILHDLNFKRYKDAGQTEIIVCDQMGQVRQVERIKDWTKRLDHRHHAIDALTIASTKQSYIQRLNHLNASRDQMFQELETQSNKVREEYSLLENWMKERPHIPVSVVSQIVDGILVSFKTGKR

SEQ ID NO: 3058 - protein, 163 aa, unidentified; identical to SEQ ID NO: 3044
  REGION 1..163: note = Description of Unknown: uncultivated organism with predicted taxonomy: Bacteroidales
  REGION 1..163: note = MG16-156 RuvC-III domain

SEQ ID NO: 3059 - protein, 162 aa, unidentified
  REGION 1..162: note = Description of Unknown: uncultivated organism with predicted taxonomy: Fibrobacter
  REGION 1..162: note = MG16-157 RuvC-III domain
RQTQYIAKKALEMLKEVCYNVYATSGSVTDFIRHTWGYDEILHQLNFDRYKKGGLTELREFDHKGATHTEERIQNWSKRLDHRHHAIDALVIAMTRQSIIQRLNHLNTERDAMFQEVEKQSKEWKNDYSLLQEWLRERKHFSTDEVAQKVSDILASFKAGKR

SEQ ID NO: 3060 - protein, 162 aa, unidentified
  REGION 1..162: note = Description of Unknown: uncultivated organism with predicted taxonomy: Bacteroidetes
  REGION 1..162: note = MG16-158 RuvC-III domain
RQSQYISRKAVDMLKLVCRNVWTTSGSVTDFLRHNWGYDQILHDLNLPRYKEGGMTEVVHYEHNGQEHDEERIIGWTKRMDHRHHAIDALTIACTRQSYIQRLNTLNASRDAMHAEIEKQNAYWQEKHSLLEEWTRQRPHLPVSVVRDYVDGILVSFKPGKK

SEQ ID NO: 3061 - protein, 163 aa, unidentified
  REGION 1..163: note = Description of Unknown: uncultivated organism with predicted taxonomy: Bacteroidetes
  REGION 1..163: note = MG16-159 RuvC-III domain
RQSQYIARKSVEMLQQVCKNVYSTSGSVTDFVRHQWGYDEILHDLNFERYMKAGLTSMVKQLHSGKEVEVERITNWTKRLDNRHHAVDALAIACTTQGMIQRLNTLNASREGILDELNSKEERVVDPERSMLEKWIYTQPHISYAQAKEAIDNIIISQRPNTR

SEQ ID NO: 3062 - protein, 162 aa, unidentified
  REGION 1..162: note = Description of Unknown: uncultivated organism with predicted taxonomy: Fibrobacter
  REGION 1..162: note = MG16-160 RuvC-III domain
RQTQYIAKKALEMLKNVCYNVYATSGSITDFIRHIWGYDEILHQLNFERYKKGGLTEFREYDHKGETHTEERIQNWSKRLDHRHHAIDALVIAMTRQSIIQRLNHLNTERDAMFQEVEKQSKEWKNDYSMLQEWLRERKHFSTEDVAKKVSNILVSFKAGKR

SEQ ID NO: 3063 - protein, 163 aa, unidentified
  REGION 1..163: note = Description of Unknown: uncultivated organism with predicted taxonomy: Bacteroidales
  REGION 1..163: note = MG16-161 RuvC-III domain
RQSQYIAVKAVEILQQGIRKVWTSGGSVTDFLRHQWGYDEVLHTLNLPRYHKVEGMTEFVQYEHAGQTHEEERIKNWTKRVDHRHHAIDALTVALTRQAYIQRLNTLEASHDLMEKQVKDAGTLYNEKKSILEKWINEQPHFSVDEVTRQVDGILISFRAGKR

SEQ ID NO: 3064 - protein, 163 aa, unidentified
  REGION 1..163: note = Description of Unknown: uncultivated organism with predicted taxonomy: Prevotella
  REGION 1..163: note = MG16-162 RuvC-III domain
RQSQYIARKAIEMLQQICKNVYSTSGRVTDFVRHQWGYDEILHDLNFDRYKKAGLTTMVTQLQSGDEVEVERIKDWTKRLDNRHHAVDALAIACTTQGMIQRLNTLNASRDEMQAELNDKNGSIMDPNRSMLEKWVSIQPHITYAEAKNEVDKIIISQRPNTR

SEQ ID NO: 3065 - protein, 166 aa, unidentified; identical to SEQ ID NO: 3047
  REGION 1..166: note = Description of Unknown: uncultivated organism with predicted taxonomy: Bacteroides
  REGION 1..166: note = MG16-163 RuvC-III domain

SEQ ID NO: 3066 - protein, 163 aa, unidentified
  REGION 1..163: note = Description of Unknown: uncultivated organism with predicted taxonomy: Prevotella
  REGION 1..163: note = MG16-164 RuvC-III domain
RQSQYIAKKSVEILQQVCKNVYTTSGSVTDFVRHQWGYDEILHDLNFERFKKANLTTMVKQLHSGKEVEVERIKDWTKRLDNRHHAVDALAIACTTQGMIQRLNTLNASRDAMLDELNNKEQRMIDSERSMLEKWIISQPHVSCVEAKKEIDKILISLRPNTR

SEQ ID NO: 3067 - protein, 165 aa, unidentified
  REGION 1..165: note = Description of Unknown: uncultivated organism
  REGION 1..165: note = MG16-165 RuvC-III domain
RQSQYIAVKAVEILQQGIRQVWTSGGSVTDFLRHQWGYDEILHTLNLPRYRQVEDLTEIVHYEHAGQEHDEERIKNWSKRIDHRHHAIDALTVALTRQAYIKRLNSLNAEFTREEMLKEVEEANTVYNEKKSLLEKWILEQPHFSVDDVTNSVDSILVSFRAGKR

SEQ ID NO: 3068 - protein, 162 aa, unidentified
  REGION 1..162: note = Description of Unknown: uncultivated organism with predicted taxonomy: Bacteroidales
  REGION 1..162: note = MG16-166 RuvC-III domain
RLSQYIAKKSVEMLQQICRNVYVTSGSVTDFVRHQWGYDELLHDLNFERYKKAGLTAMVKQLHSGKEVEVERIKDWTKRLDNRHHAVDALAIACTTQGMIQRLNTLNASRDDMLEELNSKKRVADPNRSMLEKWLYAQPHVSYALAKEELDKIIVSQRPNTR

SEQ ID NO: 3069 - protein, 165 aa, unidentified
  REGION 1..165: note = Description of Unknown: uncultivated organism with predicted taxonomy: Bacteroidales
  REGION 1..165: note = MG16-167 RuvC-III domain
RLSQYIAVKAVDLLQQGIRQVWASSGTVTFFMRHQWGYDEILHTLNLPRYRRVEGMTEFVDFEHAGQKHTEERIKNWSKRIDHRHHAIDALTIALTRQAYIQSLNTLSSEITREEMIEIIKETGKVYKEKTSLLDKWARELPHFSVEDVTNAVDGILVSFRAGKR

SEQ ID NO: 3070 - protein, 159 aa, unidentified
  REGION 1..159: note = Description of Unknown: uncultivated organism with predicted taxonomy: Barnesiella viscericola
  REGION 1..159: note = MG16-168 RuvC-III domain
RLSQYISRKAQELLRTACRDVIATSGSITDLIRHTWGYDTILHELNFDCYKKAGLTEFIKDEKTGKNREVIQDWTKRLDHRHHAIDALAVACTSRSIIQRINTLHASREDIRKEIKSTRKEWQENDLLQQWIKEKMPFDRKYVLHKVASILVSMKAGKK

SEQ ID NO: 3071 - protein, 163 aa, unidentified; identical to SEQ ID NO: 3044
  REGION 1..163: note = Description of Unknown: uncultivated organism with predicted taxonomy: Bacteroidales
  REGION 1..163: note = MG16-169 RuvC-III domain

SEQ ID NO: 3072 - protein, 162 aa, unidentified; identical to SEQ ID NO: 3040
  REGION 1..162: note = Description of Unknown: uncultivated organism
  REGION 1..162: note = MG16-170 RuvC-III domain

SEQ ID NO: 3073 - protein, 163 aa, unidentified; identical to SEQ ID NO: 3063
  REGION 1..163: note = Description of Unknown: uncultivated organism with predicted taxonomy: Bacteroidales
  REGION 1..163: note = MG16-171 RuvC-III domain

SEQ ID NO: 3074 - protein, 118 aa, unidentified
  REGION 1..118: note = Description of Unknown: uncultivated organism with predicted taxonomy: Prevotella brevis
  REGION 1..118: note = MG16-172 RuvC-III domain
RQSQYIAVKAVEILQQAIRQVWTSGGSVTDFLRHQWGYDEILHTLNLPRYRQVEDLTEIVHYEHAGQEHEEERIKNWSKRIDHRHHAIDALTVALTRQAYIQRLNSLNAEFTREEMLK

SEQ ID NO: 3075 - protein, 166 aa, unidentified; identical to SEQ ID NO: 3047
  REGION 1..166: note = Description of Unknown: uncultivated organism with predicted taxonomy: Bacteroides
  REGION 1..166: note = MG16-173 RuvC-III domain

SEQ ID NO: 3076 - protein, 163 aa, unidentified
  REGION 1..163: note = Description of Unknown: uncultivated organism with predicted taxonomy: Bacteroidetes
  REGION 1..163: note = MG16-174 RuvC-III domain
RQSQYIAVKAVEVLQDGIRQVWTSGGSVTDFLRHQWGYDEILHTLNLPRYRQVEGLTEFVDYEHAGQKHTEERIKNWTKRIDHRHHAIDALTVALTQQGYIQRLNTLEASHDFMEKQVKETGTHYNEKKSILEKWINEQPHFSVEDVTSAVDGILVSFRAGKR

SEQ ID NO: 3077 - protein, 159 aa, unidentified
  REGION 1..159: note = Description of Unknown: uncultivated organism with predicted taxonomy: Prevotella
  REGION 1..159: note = MG16-175 RuvC-III domain
RLSQYISRKAQELLRTACRDVIATSGSITDLIRHTWGYDTILHELNFDCYKKAGLTEFIKDEKTGKIREVIQDWTKRLDHRHHAIDALAVACTSRSIIQRINTLHASREDIRKEIKSTRKEWQENDLLQQWIKEKMPFDRKYVLHKVASILVSMKAGKK

SEQ ID NO: 3078 - protein, 163 aa, unidentified; identical to SEQ ID NO: 3056
  REGION 1..163: note = Description of Unknown: uncultivated organism with predicted taxonomy: Bacteroidales
  REGION 1..163: note = MG16-176 RuvC-III domain

SEQ ID NO: 3079 - protein, 163 aa, unidentified; identical to SEQ ID NO: 3055
  REGION 1..163: note = Description of Unknown: uncultivated organism with predicted taxonomy: Bacteroidia
  REGION 1..163: note = MG16-177 RuvC-III domain

SEQ ID NO: 3080 - protein, 163 aa, unidentified; identical to SEQ ID NO: 3044
  REGION 1..163: note = Description of Unknown: uncultivated organism with predicted taxonomy: Porphyromonas sp. oral taxon 278
  REGION 1..163: note = MG16-178 RuvC-III domain

SEQ ID NO: 3081 - protein, 162 aa, unidentified; identical to SEQ ID NO: 3040
  REGION 1..162: note = Description of Unknown: uncultivated organism
  REGION 1..162: note = MG16-179 RuvC-III domain

SEQ ID NO: 3082 - protein, 165 aa, unidentified
  REGION 1..165: note = Description of Unknown: uncultivated organism with predicted taxonomy: Bacteroidales
  REGION 1..165: note = MG16-180 RuvC-III domain
RQSQYIAVKAVEILQQGIRQVWTSGGSVTDCLRHQWGYDEILHTLNLPRYRQVEDLTEIVHYEHAGQEHDEERIKNWSKRIDHRHHAIDALTVALTRQAYITRLNSLNAEFTREEMLKEVEEANTVYNEKKSLLEKWVNEQPHFSVEDVTQSVDGILVSFRAGKR

SEQ ID NO: 3083 - protein, 163 aa, unidentified; identical to SEQ ID NO: 3044
  REGION 1..163: note = Description of Unknown: uncultivated organism with predicted taxonomy: Bacteroidales
  REGION 1..163: note = MG16-181 RuvC-III domain

SEQ ID NO: 3084 - protein, 163 aa, unidentified
  REGION 1..163: note = Description of Unknown: uncultivated organism with predicted taxonomy: Prevotella
  REGION 1..163: note = MG16-182 RuvC-III domain
RQSQYIARKSVEMLQQICKNVYFTSGSVTDFVRHQWGYDEILHDLNFERYMKAGLTSMVKQLHSGKEVEVERITNWTKRLDNRHHAVDALAIACTTQGMIQRLNTLNASREGILDELNSKEERVVDPERSMLEKWIYTQPHISYAQAKEAIDNIIISQRPNTR

SEQ ID NO: 3085 - protein, 43 aa, unidentified
  REGION 1..43: note = Description of Unknown: uncultivated organism with predicted taxonomy: Prevotella
  REGION 1..43: note = MG16-183 RuvC-III domain
RLSPYIARKSVEMLQQICKNVYSTSGSVTDFVRHQWGYDEILH

SEQ ID NO: 3086 - protein, 163 aa, unidentified
  REGION 1..163: note = Description of Unknown: uncultivated organism with predicted taxonomy: Bacteroidales
  REGION 1..163: note = MG16-184 RuvC-III domain
RQSQYIAVKAVEILQKGIRTVWTSGGSVTDFLRHQWGYDEILHTLNLPRYRQVDELTEMVHYEHAGQEHDEERIKNWTKRIDHRHHAIDALTVALTRQSYIQRLNTLEASHDIMEKQVKETGTQYNEKKSILEKWVAEQPHFPVADVTENVDGILVSFRAGKR

SEQ ID NO: 3087 - protein, 162 aa, unidentified; identical to SEQ ID NO: 3062
  REGION 1..162: note = Description of Unknown: uncultivated organism with predicted taxonomy: Fibrobacter
  REGION 1..162: note = MG16-185 RuvC-III domain

SEQ ID NO: 3088 - protein, 163 aa, unidentified; identical to SEQ ID NO: 3066
  REGION 1..163: note = Description of Unknown: uncultivated organism with predicted taxonomy: Prevotella
  REGION 1..163: note = MG16-186 RuvC-III domain

SEQ ID NO: 3089 - protein, 163 aa, unidentified
  REGION 1..163: note = Description of Unknown: uncultivated organism with predicted taxonomy: Bacteroidales
  REGION 1..163: note = MG16-187 RuvC-III domain
RQSQYIAVKAVEVLQDGIRQVWTSGGSVTDFLRHQWGYDEILHTLNLPRYHQVEGLTEFVDFEHAGQKHTEERIKNWSKRIDNRHHAIDALTVALTQQGYIQRLNTLEASHDFMEKQVKEAGTKYNEKKSILEKWINEQPHFSVEDVTNAVDGILVSFRAGKR

SEQ ID NO: 3090 - protein, 163 aa, unidentified
  REGION 1..163: note = Description of Unknown: uncultivated organism
  REGION 1..163: note = MG16-188 RuvC-III domain
RQSQYIAKKSVEMLQLVCKNVYVTSGSVTDFVRHQWGYDELLHDLNFERFKKAGLTTMVKQLHSGEEVEVERIANWTKRLDNRHHAVDALAIACTTQSMIQRLNTLNASRDDMLEELNSKDQRLVDPERSMLEKWVFIQPHITYADAKKEIDKIVISQRPNTR

SEQ ID NO: 3091 - protein, 163 aa, unidentified; identical to SEQ ID NO: 3090
  REGION 1..163: note = Description of Unknown: uncultivated organism
  REGION 1..163: note = MG16-189 RuvC-III domain

SEQ ID NO: 3092 - protein, 163 aa, unidentified
  REGION 1..163: note = Description of Unknown: uncultivated organism with predicted taxonomy: Prevotella ruminicola
  REGION 1..163: note = MG16-190 RuvC-III domain
RQSQYIAKKSVEMLQQVCKNVYTTSGSVTDFVRHQWGYDELLHELNFERFKKAGLTAMVKQLQSGKEVEVERIKDWTKRLDNRHHAVDALAIACTTQGMIQRLNTLNASRADMLEELSSNDRRLVDPDRSMLEKWIYVQPHISYAEAKNEIDKIVISQRPNTR

SEQ ID NO: 3093 - protein, 163 aa, unidentified; identical to SEQ ID NO: 3089
  REGION 1..163: note = Description of Unknown: uncultivated organism with predicted taxonomy: Labilibaculum filiforme
  REGION 1..163: note = MG16-191 RuvC-III domain

SEQ ID NO: 3094 - protein, 163 aa, unidentified
  REGION 1..163: note = Description of Unknown: uncultivated organism with predicted taxonomy: Bacteroidales
  REGION 1..163: note = MG16-192 RuvC-III domain
RQSQYIAKKSVEILLQVCKNVYTTSGSVTDFVRHQWGYDELLHELNFERFKKAGLTAMVKQLHSGKEVEVERIKDWTKRLDNRHHAVDALAIACTTQGMIQRLNTLNASRDVILEELNSNDQRLVDPDRSMLEKWIYVQPHISYAEAKNEVDKIVISQRPNTR

SEQ ID NO: 3095 - protein, 162 aa, unidentified
  REGION 1..162: note = Description of Unknown: uncultivated organism
  REGION 1..162: note = MG16-193 RuvC-III domain
RQTQYIAKKAIEMLKDICYNVYATSGSVTDFIRHTWGYDEILHQLNFDRYKKGGLTELREYDHKGETHTEERIQNWSKRLDHRHHAIDALVIAMTRQSIIQRLNHLNTERDAMFQEVEKQSKEWKNDYSMLQEWLRERKHFPTEDVAKKVSDILVSFKAGKR

SEQ ID NO: 3096 - protein, 47 aa, unidentified
  REGION 1..47: note = Description of Unknown: uncultivated organism with predicted taxonomy: Sediminibacterium sp. C3
  REGION 1..47: note = MG16-194 RuvC-III domain
RLSQYIAKKSVEMLQQVCRNVYSTSGSVTDFVRHQWGYDELLHDLNF

SEQ ID NO: 3097 - protein, 161 aa, unidentified
  REGION 1..161: note = Description of Unknown: uncultivated organism with predicted taxonomy: Bacteroides
  REGION 1..161: note = MG16-195 RuvC-III domain
RLSQYISKKAMEILSFGCRDVVATSGSITAIIRHAWGWDTILEELNIQTYRNANLTEVIEVKSKGQNKKMETIKNWTKRLDNRHHAIDALVVACTSSSIIQRINTLNASKQKMRDEITSARKKWDENNILTQWIREKNPLNRKEVLEHVSSIFISMKAGKK

SEQ ID NO: 3098 - protein, 163 aa, unidentified; identical to SEQ ID NO: 3094
  REGION 1..163: note = Description of Unknown: uncultivated organism with predicted taxonomy: Gammaproteobacteria bacterium
  REGION 1..163: note = MG16-196 RuvC-III domain

SEQ ID NO: 3099 - protein, 159 aa, unidentified
  REGION 1..159: note = Description of Unknown: uncultivated organism with predicted taxonomy: Bacteroides
  REGION 1..159: note = MG16-197 RuvC-III domain
RLSQYISKKAQEILKTACREVVATSGTITDLIRHTWGYDTILHELNFPNYKEAGLTSFVTDEKTNQQREVIKDWSKRLDHRHHAVDALAVACTSRSIVQHINTLHASRDEMRKEVNSARKDWKDNNLLQQWIMEKKPFDRQYVLHKVASILVSMKAGKR

SEQ ID NO: 3100 - protein, 105 aa, unidentified
  REGION 1..105: note = Description of Unknown: uncultivated organism with predicted taxonomy: Bacteroidales
  REGION 1..105: note = MG16-198 RuvC-III domain
RQSQYIAKKSVDMLQQVCKNVYTTSGSVTDFVRHQWGYDELLHELNFERFKKAGLTAMVKQLHSGKEIEVERIKDWTKRLDNRHHAVDALAIACTTQGMIQRLNT

SEQ ID NO: 3101 - protein, 163 aa, unidentified
  REGION 1..163: note = Description of Unknown: uncultivated organism with predicted taxonomy: Gammaproteobacteria bacterium
  REGION 1..163: note = MG16-199 RuvC-III domain
RQSQYIAKKSVDMLQQVCKNVYTTSGSVTDFVRHQWGYDELLHELNFERFKKAGLTAMVKQLHSGKEVEVERIKDWTKRLDNRHHAVDALAIACTTQGMIQRLNTLNASRDVILEELNSNDQRLVDPDRSMLEKWIYVQPHISYAEAKNEVDKIVISQRPNTR

SEQ ID NO: 3102 - protein, 162 aa, unidentified
  REGION 1..162: note = Description of Unknown: uncultivated organism with predicted taxonomy: Fibrobacter
  REGION 1..162: note = MG16-200 RuvC-III domain
RQTQYIAKKALEMLKDVCYNVYATSGSVTDFIRHTWGYDEILHQLNFDRYKKGGLTELREYDHKGETHTEERIQDWSKRLDHRHHAIDALVIAMTRQSIIQRLNHLNTERDAMFQEVEKQSKEWKNDYSMLQEWLRERKHFSTEDVAKKVSDILVSFKAGKR

SEQ ID NO: 3103 - protein, 166 aa, unidentified
  REGION 1..166: note = Description of Unknown: uncultivated organism with predicted taxonomy: Prevotella
  REGION 1..166: note = MG16-201 RuvC-III domain
GETQYISREAIRILKQCCRYVNATSGSITATLRHLWGYDEILHQLNFERYKQAGLTEIVTWESNHGKNKHSKEQIVDWSKRIDHRHHAIDALVVACTQQGFIQRINTLNADETKDLMKKQIEASGIKYEEKKVLLDKYLTSLIPFKTQIVADAVNKILVSFKAGKK

SEQ ID NO: 3104 - protein, 163 aa, unidentified
  REGION 1..163: note = Description of Unknown: uncultivated organism
  REGION 1..163: note = MG16-202 RuvC-III domain
RQSQYIAKKAVEILKDGIREVWTSGGSVTDFLRHQWGYDEILHTLNLPRYQQVEGLTETIQYEHAGQTHEEERIKNWTKRIDHRHHAIDALTVALTQQAYIQRLNTLEASHDHMQKVVNEAGTQYNEKKSLLEKWVAEQPHFSVADVTDKVDGILVSFRAGKR

SEQ ID NO: 3105 - protein, 159 aa, unidentified
  REGION 1..159: note = Description of Unknown: uncultivated organism with predicted taxonomy: Bacteroides sp. CAG:144
  REGION 1..159: note = MG16-203 RuvC-III domain
RLSQYITKKAHELLRTACRDVLATSGSITDLTRHVWGYDTILHELNLPRYKSAGITEVITDERTGREQEVIRDWNKRLDHRHHAIDALAVACTSRSMIQRINTLHASREEMREEVSSPRKDWKENDLLRQWIKEQRPFERQYVLHKVESILVSMKAGKK

SEQ ID NO: 3106 - protein, 163 aa, unidentified
  REGION 1..163: note = Description of Unknown: uncultivated organism with predicted taxonomy: Bacteroidales
  REGION 1..163: note = MG16-204 RuvC-III domain
RQSQYIAKKSVEMLQLVCKNVYTTSGSVTDFVRHQWGYDELLHELNFERFKKAGLTAMVKQMHSGKEIEVERIKDWTKRLDNRHHAVDALAIACTTQGMIQRLNTLNASREEMLEELSINDQRLIDPERSMLEKWLFVQPHISYAEAKNEINKIVISQRPNTR

SEQ ID NO: 3107 - protein, 162 aa, unidentified; identical to SEQ ID NO: 3102
  REGION 1..162: note = Description of Unknown: uncultivated organism with predicted taxonomy: Fibrobacter
  REGION 1..162: note = MG16-205 RuvC-III domain

SEQ ID NO: 3108 - protein, 163 aa, unidentified
  REGION 1..163: note = Description of Unknown: uncultivated organism with predicted taxonomy: Gammaproteobacteria bacterium
  REGION 1..163: note = MG16-206 RuvC-III domain
RQSQYIAKKSVEILQQVCKDVYTTSGSVTDFVRHQWGYDELLHELNFERFKKAGLTAMVKQLHSGKEVEVERIKDWTKRLDNRHHAVDALAIACTTQGMIQRLNTLNASRDVILEELNSNDQRLVDPDRSMLEKWIYVQPHISYAEAKNEVDKIVISQRPNTR

SEQ ID NO: 3109 - protein, 159 aa, unidentified
  REGION 1..159: note = Description of Unknown: uncultivated organism
  REGION 1..159: note = MG16-207 RuvC-III domain
RLSQYITKKAHELLRTACRDVLATSGSITDLTRHVWGYDTILHELNLPRYKSAGITEVITDERTGREQEVIKDWNKRLDHRHHAIDALAVACTSRSMIQRINTLHASREEMREEVSSPRRDWKENDLLRQWIKEQLPFERQYVLHKVESILVSMKAGKK

SEQ ID NO: 3110 - protein, 163 aa, unidentified
  REGION 1..163: note = Description of Unknown: uncultivated organism
  REGION 1..163: note = MG16-208 RuvC-III domain
RQSQMIARKSFEVLRQICHNVYATSGSVTDFLRHQWGYDNILHDLNFERFSKSDNIEEITIVGRDGIETKVKRIKGWNKRIDNRHHAVDALTIALTTQSMIQRLNTLYASRDAMHGDIEASKQKFNEKKSILEKWTAIQPHFTYSQASEAISRILISQRGGKR

SEQ ID NO: 3111 - protein, 166 aa, unidentified; identical to SEQ ID NO: 3103
  REGION 1..166: note = Description of Unknown: uncultivated organism with predicted taxonomy: Chryseobacterium vrystaatense
  REGION 1..166: note = MG16-209 RuvC-III domain

SEQ ID NO: 3112 - protein, 162 aa, unidentified
  REGION 1..162: note = Description of Unknown: uncultivated organism
  REGION 1..162: note = MG16-210 RuvC-III domain
RQSQYISKKAIEMLKQICRYVWATSGSVTDFIRHNWGYDKILHDLNFERYKSGGLTEMVHYDHQGQEHDEERIKEWTKRLDHRHHALDALTIASTQQGYIQRLNHLNTERDQMFAELEMQREEYKGRYSLLEEWIKERPHISVEDAKVAVDQIAVSFKAGKK

SEQ ID NO: 3113 - protein, 166 aa, unidentified
  REGION 1..166: note = Description of Unknown: uncultivated organism with predicted taxonomy: Prevotella
  REGION 1..166: note = MG16-211 RuvC-III domain
GETQYISRESIRILKQCCRTVNATSGKITAILRHLWGYDEILHQLNFERYKKAGLTETKTWESNHGKNKHSKEQIVDWSKRIDHRHHAIDALVVACTQQGVIQRINTLNADETKDLMKKQIESANIKYEEKKVLLDKYLTSLVPFNTKTVAEAVNKILVSFKAGKK

SEQ ID NO: 3114 - protein, 163 aa, unidentified; identical to SEQ ID NO: 3064
  REGION 1..163: note = Description of Unknown: uncultivated organism with predicted taxonomy: Prevotella ihumii
  REGION 1..163: note = MG16-212 RuvC-III domain

SEQ ID NO: 3115 - protein, 162 aa, unidentified
  REGION 1..162: note = Description of Unknown: uncultivated organism with predicted taxonomy: Treponema pedis
  REGION 1..162: note = MG16-213 RuvC-III domain
RQSQYISKKAVEMLKQVCRYVWTTSGSVTDFLRQTWGYNNILHDLNFERYKSGGLTEIRQYDHKGQEQSKECIIGWTKRLDHRHHALDALTIASTQQGYIQRLNHLNTERDEMFAELKKQSEEHKEKHSLLEDWMKERPHLSVEAVKEAVDQIAVSFKAGKK

SEQ ID NO: 3116 - protein, 163 aa, unidentified
  REGION 1..163: note = Description of Unknown: uncultivated organism with predicted taxonomy: Sediminibacterium sp. C3
  REGION 1..163: note = MG16-214 RuvC-III domain
RQSQYIAKKSVEMLLQVCKNVYTTSGSVTDFVRHQWGYDELLHDLNFDRFKKAGLTAMVKQLHSGKEVEVERIKDWTKRLDNRHHAVDALTIACTTQGMIQRLNTLNASREDILEELNSKDQRLVDPERSMLEKWIVVQPHISYSEAKNEIDKIVISQRPNTR

SEQ ID NO: 3117 - protein, 163 aa, unidentified
  REGION 1..163: note = Description of Unknown: uncultivated organism with predicted taxonomy: Prevotella
  REGION 1..163: note = MG16-215 RuvC-III domain
RQSQYIAKKSVEMLQQVCKNVYTTSGSVTDFVRHQWGYDDLLHDLNFERFKKAGLTAMVKQLHSGKEVEMERIKDWTKRLDNRHHAVDALAIACTTQGMIQRLNTLNASRDEILEELNSKDQRVVDPERSMLEKWVYAQPHISYAEAKNEIDKIVISQRPNTR

SEQ ID NO: 3118 - protein, 163 aa, unidentified
  REGION 1..163: note = Description of Unknown: uncultivated organism with predicted taxonomy: Bacteroidales
  REGION 1..163: note = MG16-216 RuvC-III domain
RQSQYIAKKSVEMLQQVCKNVYTTTGSVTDFVRHQWGYDEILHDLNFERFKKAELTTMVTQLHSGKEVEVERITNWTKRLDNRHHAVDALAIACTTQGMIQRLNTLSACRNEMLDELNSKDERVIDPERSMLEKWINSQPHICYAQAKDEVDKIIVSQRPNTR

SEQ ID NO: 3119 - protein, 163 aa, unidentified
  REGION 1..163: note = Description of Unknown: uncultivated organism with predicted taxonomy: Porphyromonas catoniae
  REGION 1..163: note = MG16-217 RuvC-III domain
RQSQYIAKKSVEMLQQVCKNVYTTSGSVTDFVRHQWGYDELLHDLNFERFKKAGLTAMVKQLHSGEEVEVERIANWTKRLDNRHHAVDALAIACTTQSMIQRLNTLNASRDDMLEELNSKDQRLVDPERSMLEKWVFIQPHITYADAKKEIDKIVISQRPNTR

SEQ ID NO: 3120 - protein, 163 aa, unidentified
  REGION 1..163: note = Description of Unknown: uncultivated organism with predicted taxonomy: Prevotella
  REGION 1..163: note = MG16-218 RuvC-III domain
RQSQYIAKKSVEMLQQVCKNVYTTSGSITDFVRHQWGYDELLHELNFERFKKAGLTAMVKQLQSGKEVEVERIKDWTKRLDNRHHAVDALAIACTTQGMIQRLNTLNASRADMLEELSSNDRRLVDPDRSMLEKWIYVQPHISYAEAKNEIDKIVISQRPNTR

SEQ ID NO: 3121 - protein, 162 aa, unidentified
  REGION 1..162: note = Description of Unknown: uncultivated organism with predicted taxonomy: Fibrobacter
  REGION 1..162: note = MG16-219 RuvC-III domain
RQTQYISKKALEMLKEVCCKVYATNGSVTDFIRHTWGYDEILHQLNFDRYKQGGLTEVREFDNKGIIHKEERIQNWSKRLDHRHHAIDALVIAMTKQSIIQRLNHLNTERDAMFQEVDKQSAEWKNDFSLLQEWLRERKHFSTKDVADRVAEILISFKAGKR

SEQ ID NO: 3122 - protein, 163 aa, unidentified
  REGION 1..163: note = Description of Unknown: uncultivated organism with predicted taxonomy: Sediminibacterium sp. C3
  REGION 1..163: note = MG16-220 RuvC-III domain
RQSQYIAKKSVEMLQQVCKNVYTTTGSVTDFVRHQWGYDEILHDLNFERFKKAELTTMVTQLHSGKEVEVERITNWTKRLDNRHHAVDALAIACTTQGMIQRLNTLNACRNEMLDELNSKDERVIDPERSMLEKWINSQPHICYAQAKDEVDKIIVSQRPNTR

SEQ ID NO: 3123 - protein, 163 aa, unidentified
  REGION 1..163: note = Description of Unknown: uncultivated organism with predicted taxonomy: Sediminibacterium sp. C3
  REGION 1..163: note = MG16-221 RuvC-III domain
RQSQYIAKKSVEMLQQVCKNVYTTSGSVTDFVRHQWGYDEILHDLNFERFKKAGLTAMVKQLHSGKEVEVERIMDWTKRLDNRHHAVDALTIACTTQGMIQRLNTLNASRDEMLEELNSKDQRVVDPERSMLEKWIFVQPHISYVEAKNEIDKIVISQRPNTR

SEQ ID NO: 3124 - protein, 163 aa, unidentified
  REGION 1..163: note = Description of Unknown: uncultivated organism with predicted taxonomy: Prevotella sp. ne3005
  REGION 1..163: note = MG16-222 RuvC-III domain
RQSQYIAKKSVEMLLQVCKNVYTTSGSVTDFVRHQWGYDELLHDLNFDRFKKAGLTAMVKQLHSGKEVEVERIKDWTKRLDNRHHAVDALTIACTTQGMIQRLNTLNASREDILEELNSKDQRLVDPERSMLEKWVFVQPHISYSEAKNEIDKIVISQRPNTR

SEQ ID NO: 3125 - protein, 163 aa, unidentified
  REGION 1..163: note = Description of Unknown: uncultivated organism with predicted taxonomy: Prevotella copri
  REGION 1..163: note = MG16-223 RuvC-III domain
RQSQYIAKKSVEILQQVCKNVYTTSGSVTDFVRHQWGYDEILHDLNFEHFKKANLTTMVKQLHSGKEVEVERIKDWTKRLDNRHHAVDALAIACTTQGMIQRLNTLNASRDAMLDELNNKEQRMIDSERSMLEKWIISQPHVSYAEAKKEIDKILISLRPNTR

SEQ ID NO: 3126 - protein, 135 aa, unidentified
  REGION 1..135: note = Description of Unknown: uncultivated organism with predicted taxonomy: Bacteroides sp. CAG:770
  REGION 1..135: note = MG16-224 RuvC-III domain
RQSQYIAKKSVEMLQQVCKNVYTTSGSVTDFVRHQWGYDELLHELNIERFKKAGLTAMVKQLHSGKEVEVERIKDWTKRLDNRHHAVDAFAIACTTQGMIQRLNTLNASRDEMFEELNTKDQRLIDPERSMLEKW

SEQ ID NO: 3127 - protein, 162 aa, unidentified
  REGION 1..162: note = Description of Unknown: uncultivated organism with predicted taxonomy: Bacteroidales
  REGION 1..162: note = MG16-225 RuvC-III domain
RQSQYISKKAVEILRSAIRDVYATSGSVTDFLRHIWGYDQILHNLNLPKYRDAELTEFVTYDHRGQEHQEERIKNWSKRIDHRHHAIDALTIALTRQGYIQRLNNLNASHDDIAEAVRKVNPLMEKKYSLLEKYIYIQPHFTVQEVTDKVDGILVSFRAGKK

SEQ ID NO: 3128 - protein, 20 aa, unidentified
  REGION 1..20: note = Description of Unknown: uncultivated organism
  REGION 1..20: note = MG16-226 RuvC-III domain
RLSQYIATKAVEILQQGIRQ

SEQ ID NO: 3129 - protein, 165 aa, unidentified
  REGION 1..165: note = Description of Unknown: uncultivated organism with predicted taxonomy: Bacteroidales
  REGION 1..165: note = MG16-228 RuvC-III domain
RQSQYIAKKAAEILRQGYRNVYATSGSVTDFLRHQWGYDEILHRLNLPRYQQVEGLTELVTYDHCGQEHQQERIKGWTKRLDHRHHAIDALTIALTQQSVIQRLNTLNTSREQMFDDLGKRTDTPEYTEKRSLLENWIDAQPHFSVQEVTDKVDGILVSFRAGKR

SEQ ID NO: 3130 - protein, 165 aa, unidentified; identical to SEQ ID NO: 3129
  REGION 1..165: note = Description of Unknown: uncultivated organism with predicted taxonomy: Bacteroidales
  REGION 1..165: note = MG16-229 RuvC-III domain

SEQ ID NO: 3131 - protein, 150 aa, unidentified
  REGION 1..150: note = Description of Unknown: uncultivated organism with predicted taxonomy: Bacteroides sp. CAG:545
  REGION 1..150: note = MG16-230 RuvC-III domain
VQTQYISRKAMEILKQVCHNVYGSSGEVTSYLRRIWGYDEILHSLDLPRYREGGMTAEVSYDHRGQTHTEERIKDWSKRLDHRHHAIDALTIACTRQSIIQRLNNLSAMTAVAGESMSLDKWTLAQPHFSVQEASDNVSRILVSFKAGKK

SEQ ID NO: 3132 - protein, 150 aa, unidentified
  REGION 1..150: note = Description of Unknown: uncultivated organism with predicted taxonomy: Bacteroides sp. CAG:770
  REGION 1..150: note = MG16-231 RuvC-III domain
VQTQYISRKAMEILNQVCRNVYGSSGDVTAYLRRIWGYDEILHSLDLPRYREGNLTGDVTYVHRGQTHTEERIRDWSKRLDHRHHAIDALTIACTRQSIIQRLNILNAKTAIGEEQMSLDKWTLAQAHFSVADVADHVADILVSFKSGKR

SEQ ID NO: 3133 - protein, 150 aa, unidentified
  REGION 1..150: note = Description of Unknown: uncultivated organism with predicted taxonomy: Bacteroides sp. CAG:770
  REGION 1..150: note = MG16-232 RuvC-III domain
VQTQYISRKAMEILKQVCHNVYGSSGEVTSYLRRIWGYDEILHSLDLPRYREGGMTAEVSYDHRGQTHTEERIKDWSKRLDHRHHAIDALTIACTRQSIIQRLNNLSAMTAVAGESMSLDKWTLSQPHFSVQEVSDNVSRILVSFKAGKK

SEQ ID NO: 3134 - protein, 150 aa, unidentified; identical to SEQ ID NO: 2934
  REGION 1..150: note = Description of Unknown: uncultivated organism with predicted taxonomy: Bacteroides sp. CAG:545
  REGION 1..150: note = MG16-233 RuvC-III domain

SEQ ID NO: 3135 - protein, 150 aa, unidentified
  REGION 1..150: note = Description of Unknown: uncultivated organism with predicted taxonomy: Bacteroides sp. CAG:770
  REGION 1..150: note = MG16-234 RuvC-III domain
VQTQYISRKAMEILNQVCRNVYGSSGDVTAYLRRIWGYDEILHSLDLPRYREGNLTGDVTYVHRGQTHTEERIKDWSKRLDHRHHAIDALTIACTRQSIIQRLNTLNAKTAIGEEQISLDKWTLAQAHFSVADVADHVADILVSFKSGKR

SEQ ID NO: 3136 - protein, 150 aa, unidentified; identical to SEQ ID NO: 3135
  REGION 1..150: note = Description of Unknown: uncultivated organism with predicted taxonomy: Bacteroides sp. CAG:770
  REGION 1..150: note = MG16-235 RuvC-III domain

SEQ ID NO: 3137 - protein, 150 aa, unidentified
  REGION 1..150: note = Description of Unknown: uncultivated organism with predicted taxonomy: Bacteroides sp. CAG:770
  REGION 1..150: note = MG16-236 RuvC-III domain
VQTQYISRKAMEILNQVCRNVYGSSGDVTASLRRIWGYDEILHSLDLPRYREGNLTGDVTYVHKGQTHTEERIKDWSKRLDHRHHAIDALTIASTRQSIIQRLNTLNAKTAIGEEQISLDKWTLAQAHFSVADVADHVADILVSFKSGKK

SEQ ID NO: 3138 - protein, 150 aa, unidentified; identical to SEQ ID NO: 2925
  REGION 1..150: note = Description of Unknown: uncultivated organism with predicted taxonomy: Bacteroides sp. CAG:770
  REGION 1..150: note = MG16-237 RuvC-III domain

SEQ ID NO: 3139 - protein, 150 aa, unidentified; identical to SEQ ID NO: 2925
  REGION 1..150: note = Description of Unknown: uncultivated organism with predicted taxonomy: Bacteroides sp. CAG:545
  REGION 1..150: note = MG16-238 RuvC-III domain

SEQ ID NO: 3140 - protein, 150 aa, unidentified; identical to SEQ ID NO: 2939
  REGION 1..150: note = Description of Unknown: uncultivated organism with predicted taxonomy: Bacteroides sp. CAG:770
  REGION 1..150: note = MG16-239 RuvC-III domain

SEQ ID NO: 3141 - protein, 150 aa, unidentified; identical to SEQ ID NO: 2939
  REGION 1..150: note = Description of Unknown: uncultivated organism with predicted taxonomy: Bacteroides sp. CAG:709
  REGION 1..150: note = MG16-240 RuvC-III domain

SEQ ID NO: 3142 - protein, 150 aa, unidentified; identical to SEQ ID NO: 2939
  REGION 1..150: note = Description of Unknown: uncultivated organism with predicted taxonomy: Bacteroides sp. CAG:770
  REGION 1..150: note = MG16-242 RuvC-III domain

SEQ ID NO: 3143 - protein, 150 aa, unidentified; identical to SEQ ID NO: 2939
  REGION 1..150: note = Description of Unknown: uncultivated organism with predicted taxonomy: Bacteroides sp. CAG:709
  REGION 1..150: note = MG16-243 RuvC-III domain

SEQ ID NO: 3144 - protein, 163 aa, unidentified
  REGION 1..163: note = Description of Unknown: uncultivated organism with predicted taxonomy: Bacteroidales
  REGION 1..163: note = MG16-245 RuvC-III domain
RQSQYIAVKAVEILQTGIRRVWTSGGSVTDFLRHQWGYDEILHTLNLPRYRKVDELTEIVHFEHAGQEHEEERIKNWTKRIDHRHHAIDALTVALTQQSYIQRLNTLEASHEWMEKQVKEANTAYNEKKSILERWVADQPHFSVADVTNKVDGILVSFRAGKR

SEQ ID NO: 3145 - protein, 163 aa, unidentified
  REGION 1..163: note = Description of Unknown: uncultivated organism with predicted taxonomy: Bacteroides sp. CAG:770
  REGION 1..163: note = MG16-246 RuvC-III domain
RQSQYIARKSVEMLQQVCKDVYTTSGSVTDFVRHQWGYDEILHDLNFERFKKAGLTTMVTQLHSGKEVEVERIKDWTKRLDNRHHAVDALAIACTTQGMIQRLNTLNASREGILDELNSKEERVVDPERSMLEKWIYTQPHISYAQAKEAIDNIIISQRPNIR

SEQ ID NO: 3146 - protein, 163 aa, unidentified
  REGION 1..163: note = Description of Unknown: uncultivated organism with predicted taxonomy: Porphyromonas sp. oral taxon 278
  REGION 1..163: note = MG16-247 RuvC-III domain
RQSQYIAVKAVEILQTGVRRVWTSGGSVTDFLRHQWGYDEILHTLNLPRYRQVEALTEIVHYEHAGQEHNEERIKNWTKRTDHRHHAIDALTVALTQQSYIQRLNTLEASHDWMEKQVKEANTPYNEKKSVLERWVADQPHFSVAEVTDKVDGILVSFRAGKR

SEQ ID NO: 3147 - protein, 163 aa, unidentified
  REGION 1..163: note = Description of Unknown: uncultivated organism with predicted taxonomy: Coprobacter sp.
  REGION 1..163: note = MG16-248 RuvC-III domain
RQSQYIAVKAVEILQAGIRHVWTSGGSVTDFLRHQWGYDEILHTLNLPRYRKVDELTEIVHFEHAGQEHEEERIKNWTKRIDHRHHAIDALTVALTQQSYIQRLNTLEASHDWMEKQVKEVNTPYNEKKSVLERWIADQPHFSVSDVTDKVDGILVSFRAGKR

SEQ ID NO: 3148 - protein, 162 aa, unidentified; identical to SEQ ID NO: 3057
  REGION 1..162: note = Description of Unknown: uncultivated organism with predicted taxonomy: Bacteroides sp. CAG:144
  REGION 1..162: note = MG16-249 RuvC-III domain

SEQ ID NO: 3149 - protein, 163 aa, unidentified
  REGION 1..163: note = Description of Unknown: uncultivated organism with predicted taxonomy: Sediminibacterium sp. C3
  REGION 1..163: note = MG16-250 RuvC-III domain
RQSQYIAKKSVEMLQQVCKNVYTTSGSVTDFVRHQWGYDELLHDLNFDRFKKAGLTAMVKQLHSGKEVEVERIKDWTKRLDNRHHAVDALAIACTTQGMIQRLNTLNASRDVMLEELSSNDQRLVDPERSMLEKWIYVQPHISYAEAKNEVDKIVISQRPNTR

SEQ ID NO: 3150 - protein, 159 aa, unidentified
  REGION 1..159: note = Description of Unknown: uncultivated organism with predicted taxonomy: Bacteroides sp. CAG:144
  REGION 1..159: note = MG16-251 RuvC-III domain
RLSQYISKKSQELLKMACRNVVATSGNITDLVRHTWGYDTILHELNFPCYKEAGLTTFIKDENTGQQREVIKDWTKRLDHRHHAIDALAVACTSRSIVQRINTLHASREEMREDVKSPRKDWEDNDLLQQWIKEKMPFDRDYVLHKVASILVSMKAGKK

SEQ ID NO: 3151 - protein, 162 aa, unidentified
  REGION 1..162: note = Description of Unknown: uncultivated organism with predicted taxonomy: Bacteroidales
  REGION 1..162: note = MG16-252 RuvC-III domain
RQSQYISKKAVEMLKLVCRNVWTTSGSITDFLRHNWGYDQILHDLNLPRYSLGGMTESVHYEHNGQKHEEERIIGWTKRLDHRHHAIDALTIASTQQSYIQRLNTLSASRDVMHAEVEKQGVQWQEKHSLLEEWTAQRPHLPYSTVRDYVDGILVSFKPGKK

SEQ ID NO: 3152 - protein, 159 aa, unidentified
  REGION 1..159: note = Description of Unknown: uncultivated organism
  REGION 1..159: note = MG16-253 RuvC-III domain
RLSQYISKKAQELLKAACREVMATSGSITDLIRHTWGYDTILHELNFPRYKDAGLTEIIKDEETGMQREVIPDWSKRLDHRHHAIDALAVACTSRSIVQRINTLNASREIIREEIKTSRKEWEDNDLLQQWIKEKMPFDRQYVVQKVASILVSMKAGKK

SEQ ID NO: 3153 - protein, 163 aa, unidentified
  REGION 1..163: note = Description of Unknown: uncultivated organism with predicted taxonomy: Marinilabiliaceae
  REGION 1..163: note = MG16-254 RuvC-III domain
RQSQYIAVKAVEVLQDGIRQVWTSGGSVTDFLRHQWGYDEILHTLNLPRYRQVEGLTELVDFEHAGQKHTEERIKNWSKRIDHRHHAIDALTVALTQQGYIQRLNTLEASHDFMEKQVKEAGTKYNEKKSILEKWINEQPHFSVEEVTNAVDRILVSFRAGKR

SEQ ID NO: 3154 - protein, 163 aa, unidentified
  REGION 1..163: note = Description of Unknown: uncultivated organism with predicted taxonomy: Bacteroidetes
  REGION 1..163: note = MG16-255 RuvC-III domain
RLSQNIARSAMELLRQVCHNVYATSGSVTDFVRHQWGYDNILHDLNFSRFAKSGNTEFITVVGADGKETQQERIKGWSKRMDNRHHAVDALAIALTTQSMIQRINNLNASREFMQKDVEASKEKFKEKKSLLEKWVAIQPHLSYGQAKDAISGILVSQRSGKH

SEQ ID NO: 3155 - protein, 159 aa, unidentified; identical to SEQ ID NO: 3150
  REGION 1..159: note = Description of Unknown: uncultivated organism with predicted taxonomy: Bacteroides sp. CAG:144
  REGION 1..159: note = MG16-256 RuvC-III domain

SEQ ID NO: 3156 - protein, 165 aa, unidentified
  REGION 1..165: note = Description of Unknown: uncultivated organism with predicted taxonomy: Bacteroidia
  REGION 1..165: note = MG16-257 RuvC-III domain
RQSQYIAVKAVEILQQGIRQVWTSGGSVTDFLRHLWGYDEILHTLNLPRYRQVEELTEIVHYEHAGQEHDEERIKNWSKRIDHRHHAIDALTVALTRQAYIQRLNSLNAEFTREEMLKEVEEANTVYNEKKSLLEKWVNEQPHFSVDDVTQSVDSILVSFRAGKR

SEQ ID NO: 3157 - protein, 163 aa, unidentified; identical to SEQ ID NO: 3146
  REGION 1..163: note = Description of Unknown: uncultivated organism with predicted taxonomy: Bacteroidales
  REGION 1..163: note = MG16-258 RuvC-III domain

SEQ ID NO: 3158 - protein, 162 aa, unidentified
  REGION 1..162: note = Description of Unknown: uncultivated organism with predicted taxonomy: Prevotella saccharolytica
  REGION 1..162: note = MG16-259 RuvC-III domain
RQTQYIAKKALEMLKDVCYNVYATSGSVTDFIRHTWGYDEILHQLNYDRYKKGGLTEFREYDHKGETHTEERIQDWSKRLDHRHHAIDALVIAMTRQSIIQRLNHLNTERDAMFQEVEKQRKEWKNDYSMLQEWLRERKHFSAEDVAKKVSDILVSFKAGKR

SEQ ID NO: 3159 - protein, 163 aa, unidentified; identical to SEQ ID NO: 3154
  REGION 1..163: note = Description of Unknown: uncultivated organism with predicted taxonomy: Bacteroides sp. CAG:770
  REGION 1..163: note = MG16-260 RuvC-III domain

SEQ ID NO: 3160 - protein, 162 aa, unidentified
  REGION 1..162: note = Description of Unknown: uncultivated organism with predicted taxonomy: Bacteroidales
  REGION 1..162: note = MG16-261 RuvC-III domain
RQTQYISKKALELLREICHNVYATSGSVTDFIRHTWGYDEILHQLNFDRYKQSGLTEIREFDNKGEIHKEERIQKWNKRLDHRHHAIDALVIAMTKQSIIQRLNHLNTERDAMFQEVEKQSIEWKNDFSLLQEWLRERKHFSTKDVANRVANILISFKAGKR

SEQ ID NO: 3161 - protein, 120 aa, unidentified
  REGION 1..120: note = Description of Unknown: uncultivated organism with predicted taxonomy: Porphyromonas catoniae
  REGION 1..120: note = MG16-262 RuvC-III domain
RQSQYIAKKSVEMLLQVCKNVYTTSGSVTDFVRHQWGYDELLHDLNFDRFKKAGLTAMVKQLHSGKEVEVERIKDWTKRLDNRHHAVDALAIACTTQGMIQRLNTLNASRDEMLEELNGK

SEQ ID NO: 3162 - protein, 163 aa, unidentified
  REGION 1..163: note = Description of Unknown: uncultivated organism with predicted taxonomy: Sediminibacterium sp. C3
  REGION 1..163: note = MG16-263 RuvC-III domain
RLSQYIAKKSVEMLQQVCRNVYSTSGSVTDFVRHQWGYDELLHDLNFERYKRAGLTAMVTQLRSGKEVEVERIKDWTKRLDNRHHAVDALAIACTTQGMIQRLNTLNASREDILDELNKTEERNDDSERSMLEKWICSQPHISYAEAKDELDKIIISQRPSTR

SEQ ID NO: 3163 - protein, 166 aa, unidentified
  REGION 1..166: note = Description of Unknown: uncultivated organism
  REGION 1..166: note = MG16-264 RuvC-III domain
GETQYISRESIRILKQCCRNVNATSGTVTATLRHLWGYDEILHQLNFERYKQAGLTETVTWTSNHGKNEHSKEQIVDWSKRIDHRHHAIDALVVACTQQGFIQRINTLNADDTKDLMRKQIESAGIKFEEKKVLLDKYLASFVPFTTKVVADEVNKILVSFKAGKK

SEQ ID NO: 3164 - protein, 163 aa, unidentified
  REGION 1..163: note = Description of Unknown: uncultivated organism
  REGION 1..163: note = MG16-265 RuvC-III domain
RQSQYIAKKSVEMLQLVCRNVYTTSGSVTETVRRLWGYNELLHDLNFERFKKAGLTTMVTQLHSGEEIEVERIKDWTKRLDNRHHAVDALAIACTTQGMIQRLNTLNASRDDMLKELNSQEQRVVDPEHSMLEKWIYTQPHISYVQAKEAIEKIIISQRPNTR

SEQ ID NO: 3165 - protein, 162 aa, unidentified; identical to SEQ ID NO: 3095
  REGION 1..162: note = Description of Unknown: uncultivated organism with predicted taxonomy: Porphyromonas sp. oral taxon 278
  REGION 1..162: note = MG16-266 RuvC-III domain

SEQ ID NO: 3166 - protein, 163 aa, unidentified
  REGION 1..163: note = Description of Unknown: uncultivated organism
  REGION 1..163: note = MG16-267 RuvC-III domain
RQSQYIAKKSVEMLLQVCKNVYTTSGSVTDFVRHQWGYDELLHDLNFERFKKAGLTAMVKQLHSGEEVEVERIANWTKRLDNRHHAVDALAIACTTQSMIQRLNTLNASRDDMLEELNSKDQRLVDPERSMLEKWVFIQPHITYADAKKEIDKIVISQRPNTR

SEQ ID NO: 3167 - protein, 163 aa, unidentified
  REGION 1..163: note = Description of Unknown: uncultivated organism with predicted taxonomy: Prevotella
  REGION 1..163: note = MG16-268 RuvC-III domain
SLSQYISRKAMEILQTGCRKVYATSGSITDIERHLWGYDTILHELNFPRYKCAGLTTVIKEEYEEGIITEKEVITNWSKRKDNRHHAIDALVIACTTQDTIQRINTLHASRDELQKETSGNPVFYSEKSTLLERWIKGKQPIPRHEVLEQVKQIAISIKAGKK

SEQ ID NO: 3168 - protein, 163 aa, unidentified; identical to SEQ ID NO: 3118
  REGION 1..163: note = Description of Unknown: uncultivated organism with predicted taxonomy: Bacteroidales
  REGION 1..163: note = MG16-269 RuvC-III domain

SEQ ID NO: 3169 - protein, 163 aa, unidentified
  REGION 1..163: note = Description of Unknown: uncultivated organism with predicted taxonomy: Bacteroidales
  REGION 1..163: note = MG16-270 RuvC-III domain
RQSQYIAVKAVEILQTGIRRVWTSGGSVTDFLRHQWGYDEILHTLNLPRYRKVDELTEIVHFEHAGQEHEEERIKNWTKRIDHRHHAIDALTVALTQQSYIQRLNTLEASHEWMEKQVKEANTAYNEKKSVLERWVADQPHFSVADVTDKVDGILVSFRAGKR

SEQ ID NO: 3170 - protein, 164 aa, unidentified
  REGION 1..164: note = Description of Unknown: uncultivated organism with predicted taxonomy: Bacteroidales
  REGION 1..164: note = MG16-271 RuvC-III domain
RQSQYIAAKAVEILQTAIRDVHATSGSVTELLRHQWGYDEILHHLNLPRYNKADLTEIVQYDHAGQKHTVERIKNWNKRLDQRHHAVDALTIALTKQSYIQRLNTLNASRETIYNEVEQADAKLRNEEKRTLLENWVAIQPHFPVKDVEDKVAGILVSFRAGKR

SEQ ID NO: 3171 - protein, 163 aa, unidentified
  REGION 1..163: note = Description of Unknown: uncultivated organism with predicted taxonomy: Bacteroides sp. CAG:770
  REGION 1..163: note = MG16-272 RuvC-III domain
RQSQYIAKKSVEMLQQVCKNVYTTSGSVTDFVRHQWGYDELLHELNFERFKKAGLTAMVKQLHSGKEIEVERIKDWTKRLDNRHHAVDALAIACTTQGMIQRLNTLNASRDEMQEELSSKEQRLVDPERSMLEKWIFAQPHISYAEAKNEIDKIIISQRPNTR

SEQ ID NO: 3172 - protein, 163 aa, unidentified
  REGION 1..163: note = Description of Unknown: uncultivated organism with predicted taxonomy: Bacteroidetes
  REGION 1..163: note = MG16-273 RuvC-III domain
RLSQYIAKKSVEMLQQVCKNVYATSGSITDFVRHQWGYDELLHDLNFERFKKAGLTTMVKQLHSGEEVEVERIANWTKRLDNRHHAVDALAIACTTQSMIQRLNTLNASRDDMLEEQNSKDQRLVDPERSMLEKWVFIQPHITYADAKKEIDKIVISQRPNTR

SEQ ID NO: 3173 - protein, 159 aa, unidentified
  REGION 1..159: note = Description of Unknown: uncultivated organism with predicted taxonomy: Bacteroidales
  REGION 1..159: note = MG16-274 RuvC-III domain
RLSQYISKKAQELLKTACREVMATSGSITDLIRHTWGYDTILHELNFPRYKDAGLTEIIKDEETGMQRELIPDWSKRLDHRHHAIDALAVACTSRSIVQRINTLHASREIIRDEIKTSRKEWEDNDLLQQWIKEKMPFDRQYVVQKVASILVSMKAGKK

SEQ ID NO: 3174 - protein, 166 aa, unidentified; identical to SEQ ID NO: 3163
  REGION 1..166: note = Description of Unknown: uncultivated organism with predicted taxonomy: Bacteroidetes
  REGION 1..166: note = MG16-275 RuvC-III domain

SEQ ID NO: 3175 - protein, 134 aa, unidentified
  REGION 1..134: note = Description of Unknown: uncultivated organism with predicted taxonomy: Clostridiales
  REGION 1..134: note = MG18-1 RuvC-III domain
VETRQSTKAAAHLLEQLLPNTEVVYVKAGLAADFRQEFGFVKCRDANDFHHAKDAYLNAVVGNVYHEKFTKNPLRFVRSGQEYSLNLSALFQNWNIYKGGRVIWQKGEDGSLETVRARMAKNDPMVTRYCTEGR

SEQ ID NO: 3176 - protein, 136 aa, unidentified
  REGION 1..136: note = Description of Unknown: uncultivated organism with predicted taxonomy: Phascolarctobacterium succinatutens
  REGION 1..136: note = MG18-3 RuvC-III domain
VETRQSTKAVATILKTAYKHSEVVYVKAGNVSDFRHQFKFVKCREVNDLHHAKDAYLNIVVGNCYYVKFTANPLNFIKKNQDSRSYSLKPEIFYKFNIKRDDDIAWLGGEDGTMATVARTMHKNNILFTRQAVEGK

SEQ ID NO: 3177 - protein, 136 aa, unidentified
  REGION 1..136: note = Description of Unknown: uncultivated organism with predicted taxonomy: Phascolarctobacterium succinatutens
  REGION 1..136: note = MG18-4 RuvC-III domain
VETRQSTKAVATILKTAYKHSEIVYVKAGNVSDFRQKFEFVKCRDVNDLHHAKDAYLNIVVGNCYHVKFTDKPMDFIKKNQDNRSYSLKPEIFYKFSIKRDSEIAWVGGKDGTITTVTKTMHKNNILFTRQPVEGK

SEQ ID NO: 3178 - protein, 136 aa, unidentified
  REGION 1..136: note = Description of Unknown: uncultivated organism with predicted taxonomy: Phascolarctobacterium succinatutens
  REGION 1..136: note = MG18-5 RuvC-III domain
VETRQSTKAVAAILKTAYQNSEVVYVKAGNVSDFRKQFKFVKCRDVNDLHHAKDAYLNIVVGNCYHVKFTANPLNFITKNQDNRRYSLKPEIFYKFSIKRDGEIAWIGGKDGTITTVTKTMHKNNILFTRQPVEGK

SEQ ID NO: 3179 - protein, 136 aa, unidentified
  REGION 1..136: note = Description of Unknown: uncultivated organism with predicted taxonomy: Phascolarctobacterium
  REGION 1..136: note = MG18-6 RuvC-III domain
VETRQSTKAVAAILKTAYQNSEVVYVKAGNVSDFRQQFNFVKCRDVNDLHHAKDAYLNIVVGNCYHVKFTANPLNFITKNQDNRRYSLKPEIFYKFNIKRDDDIAWLGGEDGTMAIVARTMHKNNILFTRQAVEGK

SEQ ID NO: 3180 - protein, 136 aa, unidentified
  REGION 1..136: note = Description of Unknown: uncultivated organism with predicted taxonomy: Acidaminococcales
  REGION 1..136: note = MG18-7 RuvC-III domain
VETRQSTKATADILKSAYEHSEVVYVKAGNVSDFRQQFDFVKCREVNDLHHAKDAYLNIVVGNCYHVKFTINPLMFIRGNQDNRRYSLKPEVFYAHDIKRNGEIAWLAGDNGTMATVKRVMQKNNVLFTRLAVEGK

SEQ ID NO: 3181 - protein, 136 aa, unidentified
  REGION 1..136: note = Description of Unknown: uncultivated organism
  REGION 1..136: note = MG18-8 RuvC-III domain
VETRQSTKAVATILKTAYKHSEVVYVKAGNVSDFRQQFKFVKCREVNDLHHAKDAYLNIVVGNCYYVKFTANPLNFIKKNQDSRSYSLKPEIFYKFNIKRDDDIAWLGGEDGTMATVARTMHKNNILFTRQAVEGK

SEQ ID NO: 3182 - protein, 136 aa, unidentified
  REGION 1..136: note = Description of Unknown: uncultivated organism with predicted taxonomy: Phascolarctobacterium succinatutens
  REGION 1..136: note = MG18-9 RuvC-III domain
VETRQSTKAVATILKTAYQNSEVVYVKAGNVSDFRQQFKFVKCREVNDLHHAKDAYLNIVVGNCYHVKFTANPLNFITKNQDNRRYSLKPEIFYKFSIKRDGEIAWLGGEDGTMATVARTMHKNNILFTRQAVEGK

SEQ ID NO: 3183 - protein, 136 aa, unidentified; identical to SEQ ID NO: 3182
  REGION 1..136: note = Description of Unknown: uncultivated organism with predicted taxonomy: Phascolarctobacterium
  REGION 1..136: note = MG18-10 RuvC-III domain

SEQ ID NO: 3184 - protein, 136 aa, unidentified
  REGION 1..136: note = Description of Unknown: uncultivated organism with predicted taxonomy: Phascolarctobacterium succinatutens
  REGION 1..136: note = MG18-11 RuvC-III domain
VETRQSTKAVAAILKIAYQNSEVVYVKAGNVSDFRQQFKFVKCREVNDLHHAKDAYLNIVVGNCYHVKFTANPLNFITKNQDNRRYSLKPEIFYKFSIKRDGEIAWLGGEDGTMATVARTMHKNNILFTRQAVEGK

SEQ ID NO: 3185 - protein, 136 aa, unidentified
  REGION 1..136: note = Description of Unknown: uncultivated organism with predicted taxonomy: Phascolarctobacterium succinatutens
  REGION 1..136: note = MG18-12 RuvC-III domain
VETRQSTKAVATILKTAYKHSEVVYVKAGNVSDFRQQFKFVKCREVNDLHHAKDAYLNIVVGNCYYVKFTANPLNFIKKNQDSRSYSLKPEIFYKFNIKRDDDIAWLGGEDGTMATVARTMHKNNILFTRQPLEGK

SEQ ID NO: 3186 - protein, 136 aa, unidentified; identical to SEQ ID NO: 3177
  REGION 1..136: note = Description of Unknown: uncultivated organism with predicted taxonomy: Phascolarctobacterium succinatutens
  REGION 1..136: note = MG18-13 RuvC-III domain

SEQ ID NO: 3187 - protein, 136 aa, unidentified; identical to SEQ ID NO: 3182
  REGION 1..136: note = Description of Unknown: uncultivated organism with predicted taxonomy: Phascolarctobacterium
  REGION 1..136: note = MG18-14 RuvC-III domain

SEQ ID NO: 3188 - protein, 136 aa, unidentified
  REGION 1..136: note = Description of Unknown: uncultivated organism with predicted taxonomy: Phascolarctobacterium succinatutens
  REGION 1..136: note = MG18-15 RuvC-III domain
VETRQSTKAVAAILKTAYQNSEVVYVKAGNVSDFRQQFKFEKCREVNDLHHAKDAYLNIVVGNCYHVKFTANPLNFITKNQDNRRYSLKPEIFYKFSIKRDGEIAWLGGEDGTMATVARTMHKNNILFTRQAVEGK

SEQ ID NO: 3189 - protein, 136 aa, unidentified; identical to SEQ ID NO: 3185
  REGION 1..136: note = Description of Unknown: uncultivated organism with predicted taxonomy: Phascolarctobacterium succinatutens
  REGION 1..136: note = MG18-16 RuvC-III domain

SEQ ID NO: 3190 - protein, 136 aa, unidentified; identical to SEQ ID NO: 3182
  REGION 1..136: note = Description of Unknown: uncultivated organism with predicted taxonomy: Phascolarctobacterium
  REGION 1..136: note = MG18-17 RuvC-III domain

SEQ ID NO: 3191 - protein, 136 aa, unidentified; identical to SEQ ID NO: 3182
  REGION 1..136: note = Description of Unknown: uncultivated organism with predicted taxonomy: Phascolarctobacterium succinatutens
  REGION 1..136: note = MG18-18 RuvC-III domain

SEQ ID NO: 3192 - protein, 136 aa, unidentified; identical to SEQ ID NO: 3182
  REGION 1..136: note = Description of Unknown: uncultivated organism with predicted taxonomy: Phascolarctobacterium
  REGION 1..136: note = MG18-19 RuvC-III domain

SEQ ID NO: 3193 - protein, 136 aa, unidentified; identical to SEQ ID NO: 3182
  REGION 1..136: note = Description of Unknown: uncultivated organism with predicted taxonomy: Phascolarctobacterium
  REGION 1..136: note = MG18-20 RuvC-III domain

SEQ ID NO: 3194 - protein, 136 aa, unidentified; identical to SEQ ID NO: 3182
  REGION 1..136: note = Description of Unknown: uncultivated organism with predicted taxonomy: Phascolarctobacterium
  REGION 1..136: note = MG18-21 RuvC-III domain

SEQ ID NO: 3195 - protein, 136 aa, unidentified; identical to SEQ ID NO: 3177
  REGION 1..136: note = Description of Unknown: uncultivated organism with predicted taxonomy: Phascolarctobacterium
  REGION 1..136: note = MG18-22 RuvC-III domain

SEQ ID NO: 3196 - protein, 136 aa, unidentified
  REGION 1..136: note = Description of Unknown: uncultivated organism with predicted taxonomy: Phascolarctobacterium succinatutens
  REGION 1..136: note = MG18-23 RuvC-III domain
VETRQSTKAVAAILKTAYQNSEVVYVKAGNVSDFRQQFKFVKCREVNDLHHAKDAYLNIVVGNCYHVKFTANPLNFITKNQDNRRYSLKPEIFYKFSIKRDGEIAWLGGEDGTMATVVRTMHKNNILFTRQAVEGK

SEQ ID NO: 3197 - protein, 136 aa, unidentified
  REGION 1..136: note = Description of Unknown: uncultivated organism with predicted taxonomy: Phascolarctobacterium
  REGION 1..136: note = MG18-24 RuvC-III domain
VETRQSTKAVAAILKTAYQNSEVVYVKAGNVSDFRQQFKFVKCREVNDLHHAKDAYLNIVVGNCYHVKFTANPLNFITKNQDNRRYSLKPEIFYKFSIKRDGEIAWLGGEDGTMATVARTMHKNNILFTRQAVEGK

SEQ ID NO: 3198 - protein, 136 aa, unidentified; identical to SEQ ID NO: 3182
  REGION 1..136: note = Description of Unknown: uncultivated organism with predicted taxonomy: Phascolarctobacterium succinatutens
  REGION 1..136: note = MG18-25 RuvC-III domain

SEQ ID NO: 3199 - protein, 136 aa, unidentified; identical to SEQ ID NO: 3182
  REGION 1..136: note = Description of Unknown: uncultivated organism with predicted taxonomy: Phascolarctobacterium succinatutens
  REGION 1..136: note = MG18-26 RuvC-III domain

SEQ ID NO: 3200 - protein, 136 aa, unidentified; identical to SEQ ID NO: 3197
  REGION 1..136: note = Description of Unknown: uncultivated organism with predicted taxonomy: Phascolarctobacterium succinatutens
  REGION 1..136: note = MG18-27 RuvC-III domain

SEQ ID NO: 3201 - protein, 136 aa, unidentified
  REGION 1..136: note = Description of Unknown: uncultivated organism with predicted taxonomy: Phascolarctobacterium
  REGION 1..136: note = MG18-28 RuvC-III domain
VETRQSTKAVAAILKTAYQNSEVVYVKAGNVSDFRQQFNFVKCRDVNDLHHAKDAYLNIVVGNCYHVKFTANPLNFITKNQDNRRYSLKPEIFYKFSIKRDGEIAWLGGEDGTMATVARTMHKNNILFTRQAVEGK

SEQ ID NO: 3202 - protein, 136 aa, unidentified; identical to SEQ ID NO: 3197
  REGION 1..136: note = Description of Unknown: uncultivated organism with predicted taxonomy: Phascolarctobacterium succinatutens
  REGION 1..136: note = MG18-29 RuvC-III domain

SEQ ID NO: 3203 - protein, 136 aa, unidentified
  REGION 1..136: note = Description of Unknown: uncultivated organism with predicted taxonomy: Phascolarctobacterium succinatutens
  REGION 1..136: note = MG18-30 RuvC-III domain
VETRQSTKAVAAILKTAYQNSEVVYVKAGNVSDFRQQFKFVKCRDVNDLHHAKDAYLNIVVGNCYHVKFTANPLNFITKNQDNRRYSLKPEIFYKFSIKRDSEIAWIGGKDGTITTVTKTMHKNNILFTRQPVEGK

SEQ ID NO: 3204 - protein, 136 aa, unidentified; identical to SEQ ID NO: 3203
  REGION 1..136: note = Description of Unknown: uncultivated organism with predicted taxonomy: Phascolarctobacterium succinatutens
  REGION 1..136: note = MG18-31 RuvC-III domain

SEQ ID NO: 3205 - protein, 136 aa, unidentified
  REGION 1..136: note = Description of Unknown: uncultivated organism with predicted taxonomy: Phascolarctobacterium succinatutens
  REGION 1..136: note = MG18-32 RuvC-III domain
VETRQSTKAVAAILKTAYQNSEVVYVKAGNVSDFRQQFKFVKCREVNDLHHAKDAYLNIVVGNCYHVKFTANPLNFITKNQDNRRYSLKPEIFYKFSIKRDSEIAWIGGKDGTITTVTKTMHKNNILFTRQPVEGK

SEQ ID NO: 3206 - protein, 136 aa, unidentified; identical to SEQ ID NO: 3182
  REGION 1..136: note = Description of Unknown: uncultivated organism with predicted taxonomy: Phascolarctobacterium succinatutens
  REGION 1..136: note = MG18-33 RuvC-III domain

SEQ ID NO: 3207 - protein, 136 aa, unidentified; identical to SEQ ID NO: 3182
  REGION 1..136: note = Description of Unknown: uncultivated organism with predicted taxonomy: Phascolarctobacterium succinatutens
  REGION 1..136: note = MG18-34 RuvC-III domain

SEQ ID NO: 3208 - protein, 136 aa, unidentified; identical to SEQ ID NO: 3185
  REGION 1..136: note = Description of Unknown: uncultivated organism with predicted taxonomy: Phascolarctobacterium succinatutens
  REGION 1..136: note = MG18-35 RuvC-III domain

SEQ ID NO: 3209 - protein, 136 aa, unidentified; identical to SEQ ID NO: 3182
  REGION 1..136: note = Description of Unknown: uncultivated organism with predicted taxonomy: Phascolarctobacterium succinatutens
  REGION 1..136: note = MG18-36 RuvC-III domain

SEQ ID NO: 3210 - protein, 136 aa, unidentified; identical to SEQ ID NO: 3197
  REGION 1..136: note = Description of Unknown: uncultivated organism with predicted taxonomy: Phascolarctobacterium succinatutens
  REGION 1..136: note = MG18-37 RuvC-III domain

SEQ ID NO: 3211 - protein, 136 aa, unidentified; identical to SEQ ID NO: 3203
  REGION 1..136: note = Description of Unknown: uncultivated organism with predicted taxonomy: Phascolarctobacterium
  REGION 1..136: note = MG18-38 RuvC-III domain

SEQ ID NO: 3212 - protein, 136 aa, unidentified; identical to SEQ ID NO: 3205
  REGION 1..136: note = Description of Unknown: uncultivated organism with predicted taxonomy: Phascolarctobacterium
  REGION 1..136: note = MG18-39 RuvC-III domain

SEQ ID NO: 3213 - protein, 136 aa, unidentified
  REGION 1..136: note = Description of Unknown: uncultivated organism with predicted taxonomy: Phascolarctobacterium succinatutens
  REGION 1..136: note = MG18-40 RuvC-III domain
VETRQSTKAVAAILKTAYQNSEVVYVKAGNVSDFRQQFKFVKCREVNDLHHAKDAYLNIVVGNCYHVKFTANPLNFITKNQDNRRYSLKPEIFYKFSIKRDGEIAWLGGEDGTMATVARTMHKNNILFTRQPLEGK

SEQ ID NO: 3214 - protein, 136 aa, unidentified
  REGION 1..136: note = Description of Unknown: uncultivated organism with predicted taxonomy: Phascolarctobacterium succinatutens
  REGION 1..136: note = MG18-41 RuvC-III domain
VETRQSTKAVAAILKTAYQNSEVVYVKAGNVSDFRQQFKFVKCRDVNDLHHAKDAYLNIVVGNCYHVKFTAHPLNFITKNQDNRRYSLKPEIFYKFSIKRDGEIAWLGGEDGTMATVARTMHKNNILFTRQAVEGK

SEQ ID NO: 3215 - protein, 136 aa, unidentified; identical to SEQ ID NO: 3176
  REGION 1..136: note = Description of Unknown: uncultivated organism with predicted taxonomy: Phascolarctobacterium succinatutens
  REGION 1..136: note = MG18-42 RuvC-III domain

SEQ ID NO: 3216 - protein, 136 aa, unidentified; identical to SEQ ID NO: 3185
  REGION 1..136: note = Description of Unknown: uncultivated organism with predicted taxonomy: Phascolarctobacterium succinatutens
  REGION 1..136: note = MG18-43 RuvC-III domain

SEQ ID NO: 3217 - protein, 136 aa, unidentified; identical to SEQ ID NO: 3197
  REGION 1..136: note = Description of Unknown: uncultivated organism with predicted taxonomy: Phascolarctobacterium succinatutens
  REGION 1..136: note = MG18-44 RuvC-III domain

SEQ ID NO: 3218 - protein, 136 aa, unidentified; identical to SEQ ID NO: 3197
  REGION 1..136: note = Description of Unknown: uncultivated organism with predicted taxonomy: Phascolarctobacterium succinatutens
  REGION 1..136: note = MG18-45 RuvC-III domain

SEQ ID NO: 3219 - protein, 136 aa, unidentified
  REGION 1..136: note = Description of Unknown: uncultivated organism with predicted taxonomy: Phascolarctobacterium
  REGION 1..136: note = MG18-46 RuvC-III domain
VETRQSTKAVAAILKTAYQNSEVVYVKAGNVSDFRQQFKFVKCREVNDLHHAKDAYLNIVVGNCYHVKFTANHLNFITKNQDNRRYSLKPEIFYKFSIKRDGEIAWLGGEDGTMATVARTMHKNNILFTRQAVEGK

SEQ ID NO: 3220 - protein, 136 aa, unidentified; identical to SEQ ID NO: 3180
  REGION 1..136: note = Description of Unknown: uncultivated organism with predicted taxonomy: Phascolarctobacterium
  REGION 1..136: note = MG18-47 RuvC-III domain

SEQ ID NO: 3221 - protein, 136 aa, unidentified; identical to SEQ ID NO: 3197
  REGION 1..136: note = Description of Unknown: uncultivated organism with predicted taxonomy: Phascolarctobacterium succinatutens
  REGION 1..136: note = MG18-48 RuvC-III domain

SEQ ID NO: 3222 - protein, 136 aa, unidentified; identical to SEQ ID NO: 3197
  REGION 1..136: note = Description of Unknown: uncultivated organism with predicted taxonomy: Phascolarctobacterium succinatutens
  REGION 1..136: note = MG18-49 RuvC-III domain

SEQ ID NO: 3223 - protein, 136 aa, unidentified; identical to SEQ ID NO: 3182
  REGION 1..136: note = Description of Unknown: uncultivated organism with predicted taxonomy: Phascolarctobacterium succinatutens
  REGION 1..136: note = MG18-50 RuvC-III domain

SEQ ID NO: 3224 - protein, 136 aa, unidentified
  REGION 1..136: note = Description of Unknown: uncultivated organism with predicted taxonomy: Phascolarctobacterium succinatutens
  REGION 1..136: note = MG18-51 RuvC-III domain
VETRQSTKAVAAILKTAYKHSEIVYVKAGNVSDFRQKFEFVKCRDVNDLHHAKDAYLNIVVGNCYHVKFTANPLNFITKNQDNRRYSLKPEIFYKFSIKRDSEIAWIGGKDGTITTVTKTMHKNNILFTRQPVEGK

SEQ ID NO: 3225 - protein, 136 aa, unidentified; identical to SEQ ID NO: 3197
  REGION 1..136: note = Description of Unknown: uncultivated organism with predicted taxonomy: Phascolarctobacterium succinatutens
  REGION 1..136: note = MG18-52 RuvC-III domain

SEQ ID NO: 3226 - protein, 136 aa, unidentified; identical to SEQ ID NO: 3203
  REGION 1..136: note = Description of Unknown: uncultivated organism with predicted taxonomy: Firmicutes
  REGION 1..136: note = MG18-53 RuvC-III domain

SEQ ID NO: 3227 - protein, 136 aa, unidentified
  REGION 1..136: note = Description of Unknown: uncultivated organism with predicted taxonomy: Phascolarctobacterium
  REGION 1..136: note = MG18-54 RuvC-III domain
VETRQSTKAVATILKTAYKHSEIVYVKAGNVSDFRQKFEFVKCRDVNDLHHAKNAYLNIVVGNCYYVKFTAKPLDFIKKNQDNRSYSLKPEIFYKFSIKRDSEIAWVGGKDGTITTVTKTIHKNNILFTRQPVEGK

SEQ ID NO: 3228 - protein, 136 aa, unidentified; identical to SEQ ID NO: 3197
  REGION 1..136: note = Description of Unknown: uncultivated organism with predicted taxonomy: Phascolarctobacterium
  REGION 1..136: note = MG18-55 RuvC-III domain

SEQ ID NO: 3229 - protein, 136 aa, unidentified; identical to SEQ ID NO: 3182
  REGION 1..136: note = Description of Unknown: uncultivated organism with predicted taxonomy: Phascolarctobacterium succinatutens
  REGION 1..136: note = MG18-56 RuvC-III domain

SEQ ID NO: 3230 - protein, 136 aa, unidentified; identical to SEQ ID NO: 3197
  REGION 1..136: note = Description of Unknown: uncultivated organism with predicted taxonomy: Phascolarctobacterium succinatutens
  REGION 1..136: note = MG18-57 RuvC-III domain

SEQ ID NO: 3231 - protein, 136 aa, unidentified
  REGION 1..136: note = Description of Unknown: uncultivated organism with predicted taxonomy: Phascolarctobacterium succinatutens
  REGION 1..136: note = MG18-58 RuvC-III domain
VETRQSTKAVAAILKTAYQNSEVVYVKAGNVSDFRQQFKFVKCREVNDLHHAKDAYLNIVVGNCHHVKFTANPLNFITKNQDNRRYSLKPEIFYKFSIKRDGEIAWLGGEDGTMATVARTMHKNNILFTRQAVEGK

SEQ ID NO: 3232 - protein, 136 aa, unidentified; identical to SEQ ID NO: 3203
  REGION 1..136: note = Description of Unknown: uncultivated organism with predicted taxonomy: Phascolarctobacterium succinatutens
  REGION 1..136: note = MG18-59 RuvC-III domain

SEQ ID NO: 3233 - protein, 136 aa, unidentified; identical to SEQ ID NO: 3197
  REGION 1..136: note = Description of Unknown: uncultivated organism
  REGION 1..136: note = MG18-60 RuvC-III domain

SEQ ID NO: 3234 - protein, 136 aa, unidentified
  REGION 1..136: note = Description of Unknown: uncultivated organism with predicted taxonomy: Phascolarctobacterium succinatutens
  REGION 1..136: note = MG18-61 RuvC-III domain
VETRQSTKAVAAILKTAYQNSEVVYVKAGNVSDFRQQFKFVKCRELNDLHHAKDAYLNIVVGNCYHVKFTANPLNFITKNQDNRRYSLKPEIFYKFSIKRDGEIAWLGGEDGTMATVARTMHKNNILFTRQAVEGK

SEQ ID NO: 3235 - protein, 136 aa, unidentified; identical to SEQ ID NO: 3185
  REGION 1..136: note = Description of Unknown: uncultivated organism with predicted taxonomy: Phascolarctobacterium succinatutens
  REGION 1..136: note = MG18-62 RuvC-III domain

SEQ ID NO: 3236 - protein, 136 aa, unidentified; identical to SEQ ID NO: 3197
  REGION 1..136: note = Description of Unknown: uncultivated organism
  REGION 1..136: note = MG18-63 RuvC-III domain

SEQ ID NO: 3237 - protein, 136 aa, unidentified
  REGION 1..136: note = Description of Unknown: uncultivated organism with predicted taxonomy: Phascolarctobacterium succinatutens
  REGION 1..136: note = MG18-64 RuvC-III domain
VETRQSTKAVAAILKTAYQNSEVVYVKAGNVSDFRQQFKFVKCRDVNDLHHAKDAYLNIVVGNCYHVKFTANPLNFITKNQDNRRYSLKPEIFYKFSIKRDGEIAWLGGEDGTMATVARTMHKNNILFTRQAVEGK

SEQ ID NO: 3238 - protein, 136 aa, unidentified; identical to SEQ ID NO: 3213
  REGION 1..136: note = Description of Unknown: uncultivated organism with predicted taxonomy: Firmicutes
  REGION 1..136: note = MG18-65 RuvC-III domain

SEQ ID NO: 3239 - protein, 136 aa, unidentified; identical to SEQ ID NO: 3197
  REGION 1..136: note = Description of Unknown: uncultivated organism with predicted taxonomy: Phascolarctobacterium succinatutens
  REGION 1..136: note = MG18-66 RuvC-III domain

SEQ ID NO: 3240 - protein, 136 aa, unidentified; identical to SEQ ID NO: 3184
  REGION 1..136: note = Description of Unknown: uncultivated organism
  REGION 1..136: note = MG18-67 RuvC-III domain

SEQ ID NO: 3241 - protein, 136 aa, unidentified; identical to SEQ ID NO: 3197
  REGION 1..136: note = Description of Unknown: uncultivated organism with predicted taxonomy: Phascolarctobacterium succinatutens
  REGION 1..136: note = MG18-68 RuvC-III domain

SEQ ID NO: 3242 - protein, 136 aa, unidentified; identical to SEQ ID NO: 3197
  REGION 1..136: note = Description of Unknown: uncultivated organism with predicted taxonomy: Phascolarctobacterium succinatutens
  REGION 1..136: note = MG18-69 RuvC-III domain

SEQ ID NO: 3243 - protein, 136 aa, unidentified; identical to SEQ ID NO: 3181
  REGION 1..136: note = Description of Unknown: uncultivated organism with predicted taxonomy: Negativicutes
  REGION 1..136: note = MG18-70 RuvC-III domain

SEQ ID NO: 3244 - protein, 136 aa, unidentified; identical to SEQ ID NO: 3197
  REGION 1..136: note = Description of Unknown: uncultivated organism with predicted taxonomy: Phascolarctobacterium succinatutens
  REGION 1..136: note = MG18-71 RuvC-III domain

SEQ ID NO: 3245 - protein, 136 aa, unidentified; identical to SEQ ID NO: 3213
  REGION 1..136: note = Description of Unknown: uncultivated organism with predicted taxonomy: Phascolarctobacterium succinatutens
  REGION 1..136: note = MG18-72 RuvC-III domain

SEQ ID NO: 3246 - protein, 136 aa, unidentified; identical to SEQ ID NO: 3224
  REGION 1..136: note = Description of Unknown: uncultivated organism with predicted taxonomy: Phascolarctobacterium
  REGION 1..136: note = MG18-73 RuvC-III domain

SEQ ID NO: 3247 - protein, 136 aa, unidentified
  REGION 1..136: note = Description of Unknown: uncultivated organism with predicted taxonomy: Phascolarctobacterium succinatutens
  REGION 1..136: note = MG18-74 RuvC-III domain
VETRQSTKAVAAILKTAYQNSEVVYVKAGNVSDFRQQFKFVKCREVNDLHHAKDAYLNIVVGNCYHVKFTANPLNFITKNQDNRRYSLKPEIFYKFSIKRDSEIAWIGGKDGTITTVTKTMHKNNILFTRQAVEGK

SEQ ID NO: 3248 - protein, 136 aa, unidentified; identical to SEQ ID NO: 3179
  REGION 1..136: note = Description of Unknown: uncultivated organism with predicted taxonomy: Phascolarctobacterium
  REGION 1..136: note = MG18-75 RuvC-III domain

SEQ ID NO: 3249 - protein, 136 aa, unidentified; identical to SEQ ID NO: 3178
  REGION 1..136: note = Description of Unknown: uncultivated organism with predicted taxonomy: Phascolarctobacterium succinatutens
  REGION 1..136: note = MG18-76 RuvC-III domain

SEQ ID NO: 3250 - protein, 136 aa, unidentified; identical to SEQ ID NO: 3197
  REGION 1..136: note = Description of Unknown: uncultivated organism with predicted taxonomy: Phascolarctobacterium
  REGION 1..136: note = MG18-78 RuvC-III domain

SEQ ID NO: 3251 - protein, 136 aa, unidentified; identical to SEQ ID NO: 3197
  REGION 1..136: note = Description of Unknown: uncultivated organism with predicted taxonomy: Phascolarctobacterium succinatutens
  REGION 1..136: note = MG18-79 RuvC-III domain

SEQ ID NO: 3252 - protein, 136 aa, unidentified; identical to SEQ ID NO: 3196
  REGION 1..136: note = Description of Unknown: uncultivated organism with predicted taxonomy: Phascolarctobacterium succinatutens
  REGION 1..136: note = MG18-80 RuvC-III domain

SEQ ID NO: 3253 - protein, 136 aa, unidentified; identical to SEQ ID NO: 3180
  REGION 1..136: note = Description of Unknown: uncultivated organism with predicted taxonomy: Phascolarctobacterium succinatutens
  REGION 1..136: note = MG18-81 RuvC-III domain

SEQ ID NO: 3254 - protein, 136 aa, unidentified; identical to SEQ ID NO: 3185
  REGION 1..136: note = Description of Unknown: uncultivated organism with predicted taxonomy: Phascolarctobacterium succinatutens
  REGION 1..136: note = MG18-82 RuvC-III domain

SEQ ID NO: 3255 - protein, 136 aa, unidentified; identical to SEQ ID NO: 3201
  REGION 1..136: note = Description of Unknown: uncultivated organism with predicted taxonomy: Phascolarctobacterium succinatutens
  REGION 1..136: note = MG18-83 RuvC-III domain

SEQ ID NO: 3256 - protein, 136 aa, unidentified; identical to SEQ ID NO: 3185
  REGION 1..136: note = Description of Unknown: uncultivated organism with predicted taxonomy: Phascolarctobacterium succinatutens
  REGION 1..136: note = MG18-84 RuvC-III domain

SEQ ID NO: 3257 - protein, 136 aa, unidentified; identical to SEQ ID NO: 3197
  REGION 1..136: note = Description of Unknown: uncultivated organism with predicted taxonomy: Phascolarctobacterium
  REGION 1..136: note = MG18-85 RuvC-III domain

SEQ ID NO: 3258 - protein, 136 aa, unidentified; identical to SEQ ID NO: 3182
  REGION 1..136: note = Description of Unknown: uncultivated organism with predicted taxonomy: Phascolarctobacterium succinatutens
  REGION 1..136: note = MG18-86 RuvC-III domain

SEQ ID NO: 3259 - protein, 136 aa, unidentified; identical to SEQ ID NO: 3197
  REGION 1..136: note = Description of Unknown: uncultivated organism with predicted taxonomy: Phascolarctobacterium succinatutens
  REGION 1..136: note = MG18-87 RuvC-III domain

SEQ ID NO: 3260 - protein, 136 aa, unidentified; identical to SEQ ID NO: 3179
  REGION 1..136: note = Description of Unknown: uncultivated organism with predicted taxonomy: Phascolarctobacterium
  REGION 1..136: note = MG18-88 RuvC-III domain

SEQ ID NO: 3261 - protein, 136 aa, unidentified
  REGION 1..136: note = Description of Unknown: uncultivated organism with predicted taxonomy: Firmicutes
  REGION 1..136: note = MG18-89 RuvC-III domain
VETRQSTKAVAAILKTAYQNSEVVYVKAGNVSDFRQQFKFVKCREVNDLHHAKDAYLNIVVGNCYHVKFTANPLNFITKNQDNRRYSLKPEIFYKFSIKRDGEIAWLGGEDGTMETVARTMHKNNILFTRQAVEGK

SEQ ID NO: 3262 - protein, 136 aa, unidentified; identical to SEQ ID NO: 3205
  REGION 1..136: note = Description of Unknown: uncultivated organism with predicted taxonomy: Phascolarctobacterium
  REGION 1..136: note = MG18-90 RuvC-III domain

SEQ ID NO: 3263 - protein, 136 aa, unidentified
  REGION 1..136: note = Description of Unknown: uncultivated organism with predicted taxonomy: Phascolarctobacterium succinatutens
  REGION 1..136: note = MG18-91 RuvC-III domain
VETRQSTKAVAAILKTAYQNSEVVYVKAGNVSDFRQQFNFVKCRDVNDLHHAKDAYLNIVVGNCYHVKFTANPLNFITKNQDNRRYSLKPEIFYKFNIKRDDDIAWLGGADGTMATVARTMHKNNILFTRQPLEGK

SEQ ID NO: 3264 - protein, 136 aa, unidentified; identical to SEQ ID NO: 3197
  REGION 1..136: note = Description of Unknown: uncultivated organism with predicted taxonomy: Phascolarctobacterium succinatutens
  REGION 1..136: note = MG18-92 RuvC-III domain

SEQ ID NO: 3265 - protein, 136 aa, unidentified
  REGION 1..136: note = Description of Unknown: uncultivated organism
  REGION 1..136: note = MG18-93 RuvC-III domain
VEMRQSTKAVATILKTAYKHSEVVYVKAGNVSDFRQQFKFVKCREVNDLHHAKDAYLNIVVGNCYYVKFTANPLNFIKKNQDSRSYSLKPEIFYKFNIKRDDDIAWLGGEDGTMATVARTMHKNNILFTRQPLEGK

SEQ ID NO: 3266 - protein, 136 aa, unidentified; identical to SEQ ID NO: 3197
  REGION 1..136: note = Description of Unknown: uncultivated organism with predicted taxonomy: Phascolarctobacterium succinatutens
  REGION 1..136: note = MG18-94 RuvC-III domain

SEQ ID NO: 3267 - protein, 136 aa, unidentified; identical to SEQ ID NO: 3213
  REGION 1..136: note = Description of Unknown: uncultivated organism
  REGION 1..136: note = MG18-95 RuvC-III domain

SEQ ID NO: 3268 - protein, 136 aa, unidentified; identical to SEQ ID NO: 3197
  REGION 1..136: note = Description of Unknown: uncultivated organism with predicted taxonomy: Clostridium sp. CAG:964
  REGION 1..136: note = MG18-96 RuvC-III domain

SEQ ID NO: 3269 - protein, 136 aa, unidentified; identical to SEQ ID NO: 3197
  REGION 1..136: note = Description of Unknown: uncultivated organism with predicted taxonomy: Phascolarctobacterium succinatutens
  REGION 1..136: note = MG18-97 RuvC-III domain

SEQ ID NO: 3270 - protein, 136 aa, unidentified
  REGION 1..136: note = Description of Unknown: uncultivated organism with predicted taxonomy: Phascolarctobacterium succinatutens
  REGION 1..136: note = MG18-98 RuvC-III domain
VETRQSTKAVAAILKTAYQNSEVVYVKAGNVSDFRQQFNFVKCRDVNDLHHAKDAYLNIVVGNCYHVKFTANPLNFITKNQDNRRYSLKPEFFYKFNIKRDDDIAWLGGADGTMATVARTMHKNNILFTRQPLEGK

SEQ ID NO: 3271 - protein, 136 aa, unidentified; identical to SEQ ID NO: 3178
  REGION 1..136: note = Description of Unknown: uncultivated organism with predicted taxonomy: Firmicutes
  REGION 1..136: note = MG18-99 RuvC-III domain

SEQ ID NO: 3272 - protein, 136 aa, unidentified; identical to SEQ ID NO: 3197
  REGION 1..136: note = Description of Unknown: uncultivated organism with predicted taxonomy: Phascolarctobacterium succinatutens
  REGION 1..136: note = MG18-100 RuvC-III domain

SEQ ID NO: 3273 - protein, 136 aa, unidentified; identical to SEQ ID NO: 3203
  REGION 1..136: note = Description of Unknown: uncultivated organism with predicted taxonomy: Firmicutes
  REGION 1..136: note = MG18-101 RuvC-III domain

SEQ ID NO: 3274 - protein, 136 aa, unidentified; identical to SEQ ID NO: 3237
  REGION 1..136: note = Description of Unknown: uncultivated organism with predicted taxonomy: Firmicutes
  REGION 1..136: note = MG18-102 RuvC-III domain

SEQ ID NO: 3275 - protein, 136 aa, unidentified
  REGION 1..136: note = Description of Unknown: uncultivated organism with predicted taxonomy: Phascolarctobacterium succinatutens
  REGION 1..136: note = MG18-103 RuvC-III domain
VETRQSTKAVAAILKTAYKHSEIVYVKAGNVSDFRQKFEFVKCRDVNDLHHAKDAYLNIVVGNCYHVKFTANPLNFITKNQDNRRYSLKPEIFYKFSIKRDSEIAWIGGKDGTITTVTKTMHKNNILFTRQAVEGK

SEQ ID NO: 3276 - protein, 136 aa, unidentified; identical to SEQ ID NO: 3197
  REGION 1..136: note = Description of Unknown: uncultivated organism with predicted taxonomy: Phascolarctobacterium
  REGION 1..136: note = MG18-104 RuvC-III domain

SEQ ID NO: 3277 - protein, 136 aa, unidentified; identical to SEQ ID NO: 3197
  REGION 1..136: note = Description of Unknown: uncultivated organism with predicted taxonomy: Phascolarctobacterium succinatutens
  REGION 1..136: note = MG18-105 RuvC-III domain

SEQ ID NO: 3278 - protein, 136 aa, unidentified; identical to SEQ ID NO: 3182
  REGION 1..136: note = Description of Unknown: uncultivated organism with predicted taxonomy: Firmicutes
  REGION 1..136: note = MG18-106 RuvC-III domain

SEQ ID NO: 3279 - protein, 136 aa, unidentified
  REGION 1..136: note = Description of Unknown: uncultivated organism with predicted taxonomy: Phascolarctobacterium succinatutens
  REGION 1..136: note = MG18-107 RuvC-III domain
VETRQSTKAVAAILKTAYQNSAVVYVKAGNVSDFRQQFKFVKCREVNDLHHAKDAYLNIVVGNCYHVKFTASPLNFITKNQDNRRYSLKPEIFYKFSIKRDGEIAWLGGEDGTMATVARTMHKNNILFTRQAVEGK

SEQ ID NO: 3280 - protein, 136 aa, unidentified; identical to SEQ ID NO: 3203
  REGION 1..136: note = Description of Unknown: uncultivated organism with predicted taxonomy: Ruminococcaceae bacterium
  REGION 1..136: note = MG18-108 RuvC-III domain

SEQ ID NO: 3281 - protein, 136 aa, unidentified; identical to SEQ ID NO: 3197
  REGION 1..136: note = Description of Unknown: uncultivated organism with predicted taxonomy: Phascolarctobacterium succinatutens
  REGION 1..136: note = MG18-109 RuvC-III domain

SEQ ID NO: 3282 - protein, 136 aa, unidentified; identical to SEQ ID NO: 3178
  REGION 1..136: note = Description of Unknown: uncultivated organism with predicted taxonomy: Phascolarctobacterium succinatutens
  REGION 1..136: note = MG18-111 RuvC-III domain

SEQ ID NO: 3283 - protein, 136 aa, unidentified; identical to SEQ ID NO: 3197
  REGION 1..136: note = Description of Unknown: uncultivated organism with predicted taxonomy: Phascolarctobacterium succinatutens
  REGION 1..136: note = MG18-112 RuvC-III domain

SEQ ID NO: 3284 - protein, 136 aa, unidentified
  REGION 1..136: note = Description of Unknown: uncultivated organism with predicted taxonomy: Clostridiales
  REGION 1..136: note = MG18-113 RuvC-III domain
VETRQSTKAVAAILKTAYQNSEVVYVKAGNVSDFRQQFKFVKCRDVNDLHHAKDAYLNIVVGNCYHVKFTANPLNFITKNQDNRRYSLKPEIFYKFSIKRDGEIAWLGGEDGTMATVARTMHKNNILFTRQPLEGK

SEQ ID NO: 3285 - protein, 136 aa, unidentified
  REGION 1..136: note = Description of Unknown: uncultivated organism with predicted taxonomy: Phascolarctobacterium
  REGION 1..136: note = MG18-114 RuvC-III domain
VETRQSTKAVAAILKTAYQNSEVVYVKAGNVSDFRQQFKFVKCREVNDLHHAKDAYQNIVVGNCYHVKFTANPLNFITKNQDNRRYSLKPEIFYKFSIKRDGEIAWLGGEDGTMATVARTMHKNNILFTRQAVEGK

SEQ ID NO: 3286 - protein, 136 aa, unidentified; identical to SEQ ID NO: 3224
  REGION 1..136: note = Description of Unknown: uncultivated organism with predicted taxonomy: Phascolarctobacterium succinatutens
  REGION 1..136: note = MG18-115 RuvC-III domain

SEQ ID NO: 3287 - protein, 136 aa, unidentified
  REGION 1..136: note = Description of Unknown: uncultivated organism with predicted taxonomy: Phascolarctobacterium succinatutens
  REGION 1..136: note = MG18-116 RuvC-III domain
VETRQSTKAVAAILKTAYQNSEVVYVKAGNVSDFRQQFKFVKCRDVNDLHHAKDAYLNIVVGNCYHVKFTANPLNFITKNQDNRRYSLKPEIFYKFNIKRDDDIAWLGGEDGTMATVARTMHKNNILFTRQAVEGK

SEQ ID NO: 3288 - protein, 136 aa, unidentified; identical to SEQ ID NO: 3197
  REGION 1..136: note = Description of Unknown: uncultivated organism with predicted taxonomy: Phascolarctobacterium
  REGION 1..136: note = MG18-117 RuvC-III domain

SEQ ID NO: 3289 - protein, 136 aa, unidentified; identical to SEQ ID NO: 3197
  REGION 1..136: note = Description of Unknown: uncultivated organism with predicted taxonomy: Phascolarctobacterium succinatutens
  REGION 1..136: note = MG18-118 RuvC-III domain

SEQ ID NO: 3290 - protein, 136 aa, unidentified; identical to SEQ ID NO: 3197
  REGION 1..136: note = Description of Unknown: uncultivated organism with predicted taxonomy: Phascolarctobacterium succinatutens
  REGION 1..136: note = MG18-119 RuvC-III domain

SEQ ID NO: 3291 - protein, 136 aa, unidentified; identical to SEQ ID NO: 3197
  REGION 1..136: note = Description of Unknown: uncultivated organism with predicted taxonomy: Phascolarctobacterium succinatutens
  REGION 1..136: note = MG18-120 RuvC-III domain

SEQ ID NO: 3292 - protein, 136 aa, unidentified; identical to SEQ ID NO: 3224
  REGION 1..136: note = Description of Unknown: uncultivated organism with predicted taxonomy: Phascolarctobacterium succinatutens
  REGION 1..136: note = MG18-121 RuvC-III domain

SEQ ID NO: 3293 - protein, 136 aa, unidentified; identical to SEQ ID NO: 3203
  REGION 1..136: note = Description of Unknown: uncultivated organism with predicted taxonomy: Phascolarctobacterium
  REGION 1..136: note = MG18-122 RuvC-III domain

SEQ ID NO: 3294 - protein, 136 aa, unidentified; identical to SEQ ID NO: 3197
  REGION 1..136: note = Description of Unknown: uncultivated organism with predicted taxonomy: Phascolarctobacterium succinatutens
  REGION 1..136: note = MG18-123 RuvC-III domain

SEQ ID NO: 3295 - protein, 136 aa, unidentified; identical to SEQ ID NO: 3284
  REGION 1..136: note = Description of Unknown: uncultivated organism with predicted taxonomy: Phascolarctobacterium succinatutens
  REGION 1..136: note = MG18-124 RuvC-III domain

SEQ ID NO: 3296 - protein, 136 aa, unidentified; identical to SEQ ID NO: 3205
  REGION 1..136: note = Description of Unknown: uncultivated organism with predicted taxonomy: Phascolarctobacterium
  REGION 1..136: note = MG18-125 RuvC-III domain

SEQ ID NO: 3297 - protein, 136 aa, unidentified; identical to SEQ ID NO: 3284
  REGION 1..136: note = Description of Unknown: uncultivated organism with predicted taxonomy: Phascolarctobacterium
  REGION 1..136: note = MG18-126 RuvC-III domain

SEQ ID NO: 3298 - protein, 136 aa, unidentified; identical to SEQ ID NO: 3185
  REGION 1..136: note = Description of Unknown: uncultivated organism with predicted taxonomy: Phascolarctobacterium
  REGION 1..136: note = MG18-127 RuvC-III domain

SEQ ID NO: 3299 - protein, 136 aa, unidentified; identical to SEQ ID NO: 3197
  REGION 1..136: note = Description of Unknown: uncultivated organism with predicted taxonomy: Phascolarctobacterium
  REGION 1..136: note = MG18-128 RuvC-III domain

SEQ ID NO: 3300 - protein, 136 aa, unidentified; identical to SEQ ID NO: 3197
  REGION 1..136: note = Description of Unknown: uncultivated organism with predicted taxonomy: Phascolarctobacterium succinatutens
  REGION 1..136: note = MG18-129 RuvC-III domain

SEQ ID NO: 3301 - protein, 136 aa, unidentified; identical to SEQ ID NO: 3182
  REGION 1..136: note = Description of Unknown: uncultivated organism with predicted taxonomy: Phascolarctobacterium succinatutens
  REGION 1..136: note = MG18-130 RuvC-III domain

SEQ ID NO: 3302 - protein, 136 aa, unidentified; identical to SEQ ID NO: 3197
  REGION 1..136: note = Description of Unknown: uncultivated organism with predicted taxonomy: Phascolarctobacterium succinatutens
  REGION 1..136: note = MG18-131 RuvC-III domain

SEQ ID NO: 3303 - protein, 136 aa, unidentified; identical to SEQ ID NO: 3197
  REGION 1..136: note = Description of Unknown: uncultivated organism with predicted taxonomy: Phascolarctobacterium succinatutens
  REGION 1..136: note = MG18-132 RuvC-III domain

SEQ ID NO: 3304 - protein, 136 aa, unidentified; identical to SEQ ID NO: 3203
  REGION 1..136: note = Description of Unknown: uncultivated organism with predicted taxonomy: Phascolarctobacterium succinatutens
  REGION 1..136: note = MG18-133 RuvC-III domain

SEQ ID NO: 3305 - protein, 134 aa, unidentified; identical to SEQ ID NO: 3175
  REGION 1..134: note = Description of Unknown: uncultivated organism with predicted taxonomy: Clostridiales
  REGION 1..134: note = MG18-135 RuvC-III domain

SEQ ID NO: 3306 - protein, 134 aa, unidentified; identical to SEQ ID NO: 3175
  REGION 1..134: note = Description of Unknown: uncultivated organism with predicted taxonomy: Clostridiales
  REGION 1..134: note = MG18-136 RuvC-III domain

SEQ ID NO: 3307 - protein, 134 aa, unidentified; identical to SEQ ID NO: 3175
  REGION 1..134: note = Description of Unknown: uncultivated organism with predicted taxonomy: Dorea sp. OM02-2LB
  REGION 1..134: note = MG18-137 RuvC-III domain

SEQ ID NO: 3308 - protein, 136 aa, unidentified; identical to SEQ ID NO: 3197
  REGION 1..136: note = Description of Unknown: uncultivated organism with predicted taxonomy: Phascolarctobacterium
  REGION 1..136: note = MG18-138 RuvC-III domain

SEQ ID NO: 3309 - protein, 136 aa, unidentified; identical to SEQ ID NO: 3197
  REGION 1..136: note = Description of Unknown: uncultivated organism with predicted taxonomy: Phascolarctobacterium succinatutens
  REGION 1..136: note = MG18-139 RuvC-III domain

SEQ ID NO: 3310 - protein, 136 aa, unidentified; identical to SEQ ID NO: 3197
  REGION 1..136: note = Description of Unknown: uncultivated organism with predicted taxonomy: Phascolarctobacterium succinatutens
  REGION 1..136: note = MG18-140 RuvC-III domain

SEQ ID NO: 3311 - protein, 136 aa, unidentified; identical to SEQ ID NO: 3197
  REGION 1..136: note = Description of Unknown: uncultivated organism with predicted taxonomy: Firmicutes
  REGION 1..136: note = MG18-141 RuvC-III domain

SEQ ID NO: 3312 - protein, 136 aa, unidentified; identical to SEQ ID NO: 3197
  REGION 1..136: note = Description of Unknown: uncultivated organism with predicted taxonomy: Clostridium sp. CAG:964
  REGION 1..136: note = MG18-142 RuvC-III domain

SEQ ID NO: 3313 - protein, 134 aa, unidentified; identical to SEQ ID NO: 3175
  REGION 1..134: note = Description of Unknown: uncultivated organism with predicted taxonomy: Clostridiales
  REGION 1..134: note = MG18-143 RuvC-III domain

SEQ ID NO: 3314 - protein, 134 aa, unidentified; identical to SEQ ID NO: 3175
  REGION 1..134: note = Description of Unknown: uncultivated organism with predicted taxonomy: Firmicutes
  REGION 1..134: note = MG18-144 RuvC-III domain

SEQ ID NO: 3315 - protein, 134 aa, unidentified; identical to SEQ ID NO: 3175
  REGION 1..134: note = Description of Unknown: uncultivated organism with predicted taxonomy: Dorea sp. OM02-2LB
  REGION 1..134: note = MG18-145 RuvC-III domain

SEQ ID NO: 3316 - protein, 136 aa, unidentified; identical to SEQ ID NO: 3197
  REGION 1..136: note = Description of Unknown: uncultivated organism with predicted taxonomy: Phascolarctobacterium succinatutens
  REGION 1..136: note = MG18-146 RuvC-III domain

SEQ ID NO: 3317 - protein, 136 aa, unidentified; identical to SEQ ID NO: 3197
  REGION 1..136: note = Description of Unknown: uncultivated organism with predicted taxonomy: Firmicutes
  REGION 1..136: note = MG18-147 RuvC-III domain

SEQ ID NO: 3318 - protein, 136 aa, unidentified
  REGION 1..136: note = Description of Unknown: uncultivated organism with predicted taxonomy: Lactobacillus oryzae
  REGION 1..136: note = MG18-148 RuvC-III domain
VETRQSTKAVAAILKTAYQNSEVVYVKAGNVSDFRQQFKFVKCREVNDLHHAKDAYLNIVVGNCYHVKFTANPLNFITKNQDNRRYSLKPEIFYKFSIKRDGEIAWLGGKDGTITTVTKTMHKNNILFTRQPVEGK

SEQ ID NO: 3319 - protein, 136 aa, unidentified; identical to SEQ ID NO: 3203
  REGION 1..136: note = Description of Unknown: uncultivated organism with predicted taxonomy: Phascolarctobacterium
  REGION 1..136: note = MG18-149 RuvC-III domain

SEQ ID NO: 3320 - protein, 136 aa, unidentified; identical to SEQ ID NO: 3203
  REGION 1..136: note = Description of Unknown: uncultivated organism with predicted taxonomy: Firmicutes
  REGION 1..136: note = MG18-150 RuvC-III domain

SEQ ID NO: 3321 - protein, 136 aa, unidentified; identical to SEQ ID NO: 3224
  REGION 1..136: note = Description of Unknown: uncultivated organism with predicted taxonomy: Phascolarctobacterium
  REGION 1..136: note = MG18-151 RuvC-III domain

SEQ ID NO: 3322 - protein, 136 aa, unidentified; identical to SEQ ID NO: 3203
  REGION 1..136: note = Description of Unknown: uncultivated organism with predicted taxonomy: Phascolarctobacterium succinatutens
  REGION 1..136: note = MG18-152 RuvC-III domain

SEQ ID NO: 3323 - protein, 136 aa, unidentified; identical to SEQ ID NO: 3197
  REGION 1..136: note = Description of Unknown: uncultivated organism with predicted taxonomy: Firmicutes
  REGION 1..136: note = MG18-153 RuvC-III domain

SEQ ID NO: 3324 - protein, 136 aa, unidentified; identical to SEQ ID NO: 3197
  REGION 1..136: note = Description of Unknown: uncultivated organism with predicted taxonomy: Phascolarctobacterium succinatutens
  REGION 1..136: note = MG18-154 RuvC-III domain

SEQ ID NO: 3325 - protein, 136 aa, unidentified; identical to SEQ ID NO: 3182
  REGION 1..136: note = Description of Unknown: uncultivated organism with predicted taxonomy: Phascolarctobacterium succinatutens
  REGION 1..136: note = MG18-155 RuvC-III domain

SEQ ID NO: 3326 - protein, 136 aa, unidentified; identical to SEQ ID NO: 3197
  REGION 1..136: note = Description of Unknown: uncultivated organism with predicted taxonomy: Clostridium sp. CAG:964
  REGION 1..136: note = MG18-156 RuvC-III domain

SEQ ID NO: 3327 - protein, 136 aa, unidentified; identical to SEQ ID NO: 3224
  REGION 1..136: note = Description of Unknown: uncultivated organism with predicted taxonomy: Ruminococcaceae bacterium
  REGION 1..136: note = MG18-157 RuvC-III domain

SEQ ID NO: 3328 - protein, 136 aa, unidentified; identical to SEQ ID NO: 3182
  REGION 1..136: note = Description of Unknown: uncultivated organism with predicted taxonomy: Clostridium sp. CAG:964
  REGION 1..136: note = MG18-158 RuvC-III domain

SEQ ID NO: 3329 - protein, 136 aa, unidentified; identical to SEQ ID NO: 3205
  REGION 1..136: note = Description of Unknown: uncultivated organism with predicted taxonomy: Phascolarctobacterium succinatutens
  REGION 1..136: note = MG18-159 RuvC-III domain

SEQ ID NO: 3330 - protein, 137 aa, unidentified
  REGION 1..137: note = Description of Unknown: uncultivated organism with predicted taxonomy: Clostridiales
  REGION 1..137: note = MG18-160 RuvC-III domain
VETRQSTKAVAEILQQVYPLSKIVYVKAGLVADFRRYMGHVKCREVNDYHHAKDAYLNIVAGNIYHTRFTDNPYNFIKEAKDKDQKYSLKLEKLLTRDIRRGDITAWDTTGNKTRGVVEKVLARNDIRFTRYPYTEK

SEQ ID NO: 3331 - protein, 164 aa, unidentified
  REGION 1..164: note = Description of Unknown: uncultivated organism with predicted taxonomy: Firmicutes
  REGION 1..164: note = MG21-1 RuvC-III domain
QDTQYLSKVIFRLIENHLQFAETAPGKKHTQPVNGAITAQVRKRLGIEKIREDGDLHHAVDAAVIACITPGMIQKITKYAQNHERFYATAKGYVDIETGEVLTRSEYEAMDDIRFPEPWPGFRSELEARVSEHPQEAIARLKLPHYENSEEIRPIFVSRMPNHK

SEQ ID NO: 3332 - protein, 184 aa, unidentified
  REGION 1..184: note = Description of Unknown: uncultivated organism with predicted taxonomy: Roseburia sp. AM23-20
  REGION 1..184: note = MG21-3 RuvC-III domain
TDTQYITKAVADILRNYLAFEEDSPFIKKPVRSINGAVTDQVRKRLGLQKHREEGDLHHAMDAAVIAVTTDGYINRISRYTQRREFGKRIGCYKDKQTGEKVEIERQKGQAPLYIDPETGEKLTEQVFDHKYAPTFPAPWKEFTKELKARMAPNADEAIRQLYLPSYGSEEIKPIFVSQMPDRK

SEQ ID NO: 3333 - protein, 184 aa, unidentified; identical to SEQ ID NO: 3332
  REGION 1..184: note = Description of Unknown: uncultivated organism with predicted taxonomy: Clostridiales
  REGION 1..184: note = MG21-4 RuvC-III domain

SEQ ID NO: 3334 - protein, 184 aa, unidentified; identical to SEQ ID NO: 3332
  REGION 1..184: note = Description of Unknown: uncultivated organism
  REGION 1..184: note = MG21-5 RuvC-III domain

SEQ ID NO: 3335 - protein, 184 aa, unidentified; identical to SEQ ID NO: 3332
  REGION 1..184: note = Description of Unknown: uncultivated organism
  REGION 1..184: note = MG21-6 RuvC-III domain

SEQ ID NO: 3336 - protein, 168 aa, unidentified
  REGION 1..168: note = Description of Unknown: uncultivated organism with predicted taxonomy: Clostridium sp. CAG:571
  REGION 1..168: note = MG21-7 RuvC-III domain
NDTKYICKYMYNLIRNHLEFSDNANFVRKVWTVNGKLTAHIRKRLGIEKVRDGDTHHAVDATVIAITTQNMINRLTRYYQYVDGRYMNNKGEYIDTYTGEIINAKEYEEKYGIYFPEPWPKFRKELDIRTNCKTRERMIECLEAEKIYTYEDYDDVEPIFVSRMPRRK

SEQ ID NO: 3337 - protein, 167 aa, unidentified
  REGION 1..167: note = Description of Unknown: uncultivated organism with predicted taxonomy: Clostridiales
  REGION 1..167: note = MG21-8 RuvC-III domain
NDTQHITRVVYNYLRNNLKFADSAYAKAPVRAVNGAVTAMLRGRWGIEKMRGNGDLHHCKDAVVIAATSDSMIKDLTKYYQEEEQLFMGKTHFVDPATGEVLTRKEFQQRFAPKFPQPWDRFREELEVRLDPTNPKEALMALNLSTYEFDPEEEIPPVFVSHMPKHT

SEQ ID NO: 3338 - protein, 163 aa, unidentified
  REGION 1..163: note = Description of Unknown: uncultivated organism
  REGION 1..163: note = MG21-9 RuvC-III domain
TDTQYITKAVADILRNYLAFEEDSPFIKKPVRSINGAVTDQVRKRLGLQKHREEGDLHHAMDAAVIAVTTDGYINRISRYTQRREFGKRIGCYVDLETGEKLTKQAFEQKYEPTFPAPWNKFTKELKARMAPNADEAIRQLYLPSYGSEEIKPIFVSQMPDRK

SEQ ID NO: 3339 - protein, 168 aa, unidentified
  REGION 1..168: note = Description of Unknown: uncultivated organism with predicted taxonomy: Clostridiales
  REGION 1..168: note = MG21-10 RuvC-III domain
NDTKYICKYMYNLIRNHLEFSDNPNFVRKVWTVNGKLTAHIRKRLGIEKVRDGDTHHAVDATVIAITTQNMINRLTRYYQYVDGRYMNNKGEYIDIYTGEIINAKEYEEKNGIYFPEPWPKFRKELDIRTNCKTRERMIECLEAEKIYTYEDYDDVEPIFVSRMPRRK

SEQ ID NO: 3340 - protein, 168 aa, unidentified
  REGION 1..168: note = Description of Unknown: uncultivated organism with predicted taxonomy: Clostridiales
  REGION 1..168: note = MG21-11 RuvC-III domain
NDTKYICKYMYNLIRNHLEFSDNTNFVRKVWTVNGALTAHIRKRLGIEKVRDGDTHHAVDATVIAITTQGMVNKLTKYYQYVDGRYMNNKGEYIDTYTGEIINAKEYEEKYGIYFPEPWPKFRKELDIRTNCKTRERMIECIEAERIYTYEDYNDVEPIFVSRMPRRK

SEQ ID NO: 3341 - protein, 184 aa, unidentified
  REGION 1..184: note = Description of Unknown: uncultivated organism with predicted taxonomy: Helicobacter sp. MIT 11-5569
  REGION 1..184: note = MG21-12 RuvC-III domain
TDTQYITKAVADILRNYLAFEEDSPFAKKPVRSINGAVTDQVRKRLGLQKHREEGDLHHAMDAAVIAVTTDGYINRISRYTQRREFGKRIGCYKDKQTGEKVEIEKQKGQAPLYVDPETGEKLTEQAFDQKYAPTFPAPWPEFTKELKARMAPNADEAIRQLYLPSYGSEEIKPIFVSQMPDRK

SEQ ID NO: 3342 - protein, 168 aa, unidentified
  REGION 1..168: note = Description of Unknown: uncultivated organism with predicted taxonomy: Clostridium
  REGION 1..168: note = MG21-13 RuvC-III domain
QDTQYMCKLMYNLVRNHLEFSDNKNFERKVWTVNGSVTAHIRKRLGIEKTRDGDTHHAVDAAVIAITTQNMINRITKYYQYNDGKYMNNKGEYIDLETGEILDAKEYEAKNGIYFPEPWPKFRKELDIRVNCNSKERMIECLNAEKIFTYEDYEDVEPIFVSRMPRRK

SEQ ID NO: 3343 - protein, 191 aa, unidentified
  REGION 1..191: note = Description of Unknown: uncultivated organism with predicted taxonomy: Clostridiales
  REGION 1..191: note = MG21-14 RuvC-III domain
EDTQYISRLVYKLINNYMEFSDNPNVNRKVRNINGAVTHYIRNRLGIEKIRADGDEHHAVDACIIATTSNYMVNKITRYSQYIDGRFMNDRGEYIDIETGEIINKEEYEEEYGPKFPEPWEGFRRELEIRSSDDVANRAEKTPEELKNIMIQEINDEIKNGKLYSYIEHDDGINRFDDIEPIFVSRMPRRK

SEQ ID NO: 3344 - protein, 168 aa, unidentified
  REGION 1..168: note = Description of Unknown: uncultivated organism
  REGION 1..168: note = MG21-15 RuvC-III domain
QDTQYICKLMYNLVKNHLEFSNNKNFDRKVWTVNGAITSHIRKRLGIEKTRDGDIHHAIDAVVIAITTQEMINKLTKYYQYKDGKYMNNKGEFIDLETGEILDAEKYEKENGIYFPEPWPKFRKELEIRTICPTKETMISYLHNEKIFTYDDYEDVEPIFVSRMPKRK

SEQ ID NO: 3345 - protein, 184 aa, unidentified
  REGION 1..184: note = Description of Unknown: uncultivated organism
  REGION 1..184: note = MG21-16 RuvC-III domain
TDTQYITKAVADILRNYLAFEEDSPFAKKPVRSINGAVTDQVRKRLGLQKHREEGDLHHAMDAAVIAVTTDGYINRISRYTQRREFGKRIGCYKDKQTGEKVEIEKQKGQAPLYVDPETGEKLTEQAFDQKYAPTFPAPWPEFTKELKARMAPNADEAIRQLYLPSYGSEEIKPIFVSQMPNRK

SEQ ID NO: 3346 - protein, 163 aa, unidentified
  REGION 1..163: note = Description of Unknown: uncultivated organism with predicted taxonomy: Clostridiales
  REGION 1..163: note = MG21-17 RuvC-III domain
KDTQYITRSIYNLLRDNLAFAESRYSKKPVQTVNGAVTSMLRSRWGVQKIREDGDLHHCMDAAVIAATSPGLVQRLTEYSKRREALEEAPRGYVDPSTGELVEQSEQPRRDPFPKPWEQFHQELEARLATVDPRHQIDLLKLATYESDEEVKPVFVSRMPNHK

SEQ ID NO: 3347 - protein, 163 aa, unidentified
  REGION 1..163: note = Description of Unknown: uncultivated organism with predicted taxonomy: Clostridiales bacterium 42_27
  REGION 1..163: note = MG21-18 RuvC-III domain
KDTQYITRSIYNLLRDNLAFAESRYSKKPVQTVNGAVTSMLRSRWGVQKIREDGDLHHCMDAAVIAATSPGLVQRLTEYSKQREAFVKAPAGYVDPSTGGLVEQSEASRRDPFPKPWEQFHQELEARLDPIDPQHQIDLLKLATYESDEEVKPVFVSRMPNHK

SEQ ID NO: 3348 - protein, 180 aa, unidentified
  REGION 1..180: note = Description of Unknown: uncultivated organism
  REGION 1..180: note = MG21-19 RuvC-III domain
VGVQNIQKRIADILRNYLRFYGEMPMEQHIVVTKNSITEAICEQLGLQRYYTKVSALSSALNAILIAVTPANYEAKVTQYVQSREEHYTDDGYIDPENGKKLTIEEFDAKYMPESDLKCIYSYLKEEIEIWMSSASDKKSINAKRGKLEKLHKKLGLKGKYENEINNWKPIFVSQMPDRK

SEQ ID NO: 3349 - protein, 163 aa, unidentified; identical to SEQ ID NO: 3346
  REGION 1..163: note = Description of Unknown: uncultivated organism with predicted taxonomy: Clostridiales
  REGION 1..163: note = MG21-20 RuvC-III domain

SEQ ID NO: 3350 - protein, 168 aa, unidentified
  REGION 1..168: note = Description of Unknown: uncultivated organism with predicted taxonomy: Clostridiales bacterium 42_27
  REGION 1..168: note = MG21-21 RuvC-III domain
NDTKYICKYMYNLIRNHLEFSDNPNFVRKVWTVNGALTAHIRKRLGIEKVRDGDTHHAVDATVIAITTQGMVNKLTKYYQYVDGRYMNNKGEYIDTYTGEIINAKEYEEKYGIYFPEPWPKFRKELDIRTNCKTRERMIECLEAEKVYTYEDYDDVEPIFVSRMPRRK

SEQ ID NO: 3351 - protein, 92 aa, unidentified
  REGION 1..92: note = Description of Unknown: uncultivated organism with predicted taxonomy: Clostridiales
  REGION 1..92: note = MG21-22 RuvC-III domain
KDTQYITRAVYNLIRDHLAFAESNYRKKPVQAVNGAVTAMLRGRWGVQKIREDGDLHHCLDAAVIAATTPGLVQCLTAYNKHRETWERPPAG

SEQ ID NO: 3352 - protein, 167 aa, unidentified
  REGION 1..167: note = Description of Unknown: uncultivated organism with predicted taxonomy: Roseburia inulinivorans
  REGION 1..167: note = MG21-23 RuvC-III domain
NDTQHITRVVYNYLRNNLEFADSAYAKAPVQAVNGAVTAMLRGRWGIEKMRGDGDLHHCKDAVVIAATSDSMIKDLTKYYQEEEQLFMGKTNFVDPATGEVLTRKEFQQRFAPKFPQPWPRFREELEARLDPTNPKEALMALNLSTYEFDPEEEIPPVFVSHMPKHT

SEQ ID NO: 3353 - protein, 157 aa, unidentified
  REGION 1..157: note = Description of Unknown: uncultivated organism with predicted taxonomy: Firmicutes
  REGION 1..157: note = MG21-24 RuvC-III domain
NDTQHITRVVYNYLRNNLEFADSAYAKAPVQAVNGAVTAMLRGRWGIEKMRGDGDLHHCKDAVVIAATSRSMIEDLTKYYQEEEQRFMGKTHFVDPATGEVLTRKEFPQPWPRFREELEARLDPIDPMEAVMALHLSTYEPEEEIAPVFVSHMPKHT

SEQ ID NO: 3354 - protein, 163 aa, unidentified
  REGION 1..163: note = Description of Unknown: uncultivated organism with predicted taxonomy: Clostridiales bacterium 42_27
  REGION 1..163: note = MG21-25 RuvC-III domain
KDTQYITRAVYNLIRDHLAFAESNYRKKPVQAVNGAVTSMLRGRWGVQKIREDGDLHHCLDAAVIATTTPGLVQRLTAYNKHRETWERPPAGYVDPATGELIELPQEARHDPFPKPWERFRQELEARLDPIDPRHQIDLLKLETYESDEEIKPVFVSRMPNHK

SEQ ID NO: 3355 - protein, 163 aa, unidentified
  REGION 1..163: note = Description of Unknown: uncultivated organism with predicted taxonomy: Ruminococcaceae bacterium TF06-43
  REGION 1..163: note = MG21-26 RuvC-III domain
KDTQYITRAVYNLIRDHLAFAESNYRKKPVQAVNGAVTSMLRGRWGVQKIREDGDLHHCLDAAVIATTTPGLVQRLTAYNKHRETWERPPAGYVDPATGELIELPQEARRDPFPKPWERFRQELEARLDPIDPRHQIDLLKLETYESDEEIKPVFVSRMPNHK

SEQ ID NO: 3356 - protein, 166 aa, unidentified
  REGION 1..166: note = Description of Unknown: uncultivated organism with predicted taxonomy: Clostridiales
  REGION 1..166: note = MG21-27 RuvC-III domain
VDTQYIARVIYNLINDHLQFAETGKYDKKRRTQAVNGAITAHVRKRLGIQKIREDGDLHHAVDAAVVACVSPGMIQKVTQYTKHRECIRKTKEGYLDTETGELMTREAYDAKYSPRFPAPWERFRQELEARLSDNPAEEIARLHLATYDSEEEIKPVFVSRKQTHK

SEQ ID NO: 3357 - protein, 163 aa, unidentified
  REGION 1..163: note = Description of Unknown: uncultivated organism with predicted taxonomy: Clostridiales bacterium 42_27
  REGION 1..163: note = MG21-28 RuvC-III domain
KDTQYITRAVYNLIRDHLAFAESNYRKKPVQAVNGAVTAMLRGRWGVQKIREDGDLHHCLDAAVIAATTPGLVQRLTAYNKHRETWERSPAGYVDPATGEMIELPQEARRDPFPKPWERFRQELEARLDPIDPRHQIDLLKLETYESDEEIKPVFVSRMPNHK

SEQ ID NO: 3358 - protein, 163 aa, unidentified
  REGION 1..163: note = Description of Unknown: uncultivated organism with predicted taxonomy: Firmicutes
  REGION 1..163: note = MG21-29 RuvC-III domain
KDTQYITRAIYTLIRDNLVFAESNYKKRPVQTVNGAVTSMLRNRWGVQKIREDGDLHHCLDAAVIAATTPGLVQRLTEHSKRRETLEKAPAGYVDPATGELIELPQEARRDPFPKPWERFRQELEARLDPIDPRHQIDLLKLETYESDEEIKPVFVSRMPNHK

SEQ ID NO: 3359 - protein, 163 aa, unidentified
  REGION 1..163: note = Description of Unknown: uncultivated organism with predicted taxonomy: Clostridiales bacterium 42_27
  REGION 1..163: note = MG21-30 RuvC-III domain
KDTQYITRAVYNLIRDHLAFAESNYRKKPVQAVNGAVTSMLRGRWGVQKIREDGDLHHCLDAAVIAATTPGLVQRLTAYNKHRETWERPPAGYVDPATGELIELPQEARRDPFPKPWERFRQELEARLDPIDPRHQIDLLKLETYESDEEIKPVFVSRMPNHK

SEQ ID NO: 3360 - protein, 159 aa, unidentified
  REGION 1..159: note = Description of Unknown: uncultivated organism
  REGION 1..159: note = MG21-31 RuvC-III domain
NDTQHITRVVYNYLRNNLEFADSAYAKAPVQAVNGAVTAMLRGRWGIEKMRGNGDLHHCKDAVVIAATSDSMIKDLTKYYQEEEQRFMGKTHFVDPATGEVLTRKEFPQPWPRFREELEARLDPTNPKEALMALNLSTYEFDPEEEIPPVFVSHMPKHT

SEQ ID NO: 3361 - protein, 163 aa, unidentified
  REGION 1..163: note = Description of Unknown: uncultivated organism with predicted taxonomy: Ruminococcaceae bacterium TF06-43
  REGION 1..163: note = MG21-32 RuvC-III domain
KDTQYITRSIYNLIRNNLVFAESNYKKRPVQTVNGAVTSMLRNRWGVQKIREDGDLHHCLDAAVIAATTPGLVQRLTEHSKRRETLEKAPASYVDPATGDLLELPQEARRDLFPKPWERFRQELEARLNPIDPRHQIDLLKLSTYESDEEIKPVFVSRMPNHK

SEQ ID NO: 3362 - protein, 166 aa, unidentified
  REGION 1..166: note = Description of Unknown: uncultivated organism with predicted taxonomy: Clostridiales
  REGION 1..166: note = MG21-33 RuvC-III domain
VDTQYIARVIYNLINDHLQFAETGKYDKKRRTQAVNGAITAHVRKRLGIQKIREDGDLHHAVDAAVVACVSPSMIQKITQYTKHRECIRKTKEGYLDTETGELMTREAYDAKYSPRFPAPWERFRQELEARLSDNPAEEIARLHLATYDSEEEIKPVFVSRKQTHK

SEQ ID NO: 3363 - protein, 163 aa, unidentified
  REGION 1..163: note = Description of Unknown: uncultivated organism with predicted taxonomy: Clostridiales
  REGION 1..163: note = MG21-34 RuvC-III domain
KDTQYITRTVYNLIRDHLAFAESAYRKKPVQAVNGAVTSMLRNRWGVQKIREDGDLHHCLDAAVIAATTPGLVQRLTAYSKHRETWERPPAGYVDPATGELIELPQEARRDPFPKPWERFRQELEARLDPIDPRHQIDLLKLETYESDEEIKPVFVSRMPNHK

SEQ ID NO: 3364 - protein, 163 aa, unidentified
  REGION 1..163: note = Description of Unknown: uncultivated organism with predicted taxonomy: Clostridiales
  REGION 1..163: note = MG21-35 RuvC-III domain
KDTQYITRAVYNLIRDHLAFAESNYRKKPVQAVNGAVTAMLRGRWGVQKIREDGDLHHCLDAAVIAATTPGLVQRLTAYNKHRETWERPPAGYVDPATGELIELPQEARRDPFPKPWERFRQELEARLDPIDPRHQIDLLKLETYESDEEIKPVFVSRMPNHK

SEQ ID NO: 3365 - protein, 168 aa, unidentified
  REGION 1..168: note = Description of Unknown: uncultivated organism
  REGION 1..168: note = MG21-36 RuvC-III domain
QDTQYISRLMYNLIKNHVQFSNNENFERKVFTVNGQITSHIRKRLGINKIRENGDEHHAIDAAIIATVSQGMIQRITKYYQYIDGRYEKNSGEYIDIETGEIITKEQYEAENGSNFPEPWPKFRKELDIRTTCKTKARMEECLLTEKIFYDDYDDVKPIFISRMPRRK

SEQ ID NO: 3366 - protein, 163 aa, unidentified
  REGION 1..163: note = Description of Unknown: uncultivated organism with predicted taxonomy: Clostridiales
  REGION 1..163: note = MG21-37 RuvC-III domain
KDTQYITRAVYNLIRDHLAFAESNYRKKPVQAVNGAVTAMLRGRWGVQKIREDGDLHHCLDAAVIAATTPGLVQRLTAYNKHRETWERPPAGYVDPATGELIELPQEARHDQFPKPWERFRQELEARLDPIDPRHQIDLLKLETYESDEEIQPVFVSRMPNHK

SEQ ID NO: 3367 - protein, 163 aa, unidentified; identical to SEQ ID NO: 3357
  REGION 1..163: note = Description of Unknown: uncultivated organism with predicted taxonomy: Clostridiales bacterium 42_27
  REGION 1..163: note = MG21-38 RuvC-III domain

SEQ ID NO: 3368 - protein, 163 aa, unidentified
  REGION 1..163: note = Description of Unknown: uncultivated organism with predicted taxonomy: Clostridiales
  REGION 1..163: note = MG21-39 RuvC-III domain
KDTQYITRSIYNLIRNNLVFAESNYKKRPVQTVNGAVTSMLRNRWGVQKIREDGDLHHCLDAAVIAATTPGLVQRLTEHSKRRETLEKAPAGYVDPATGELLELPQEARRDLFPKPWERFRQELEARLNPIDPRHQIDLLKLSTYESDEEIKPVFVSRMPNHK

SEQ ID NO: 3369 - protein, 163 aa, unidentified
  REGION 1..163: note = Description of Unknown: uncultivated organism with predicted taxonomy: Clostridiales
  REGION 1..163: note = MG21-40 RuvC-III domain
KDTQYITRSIYNLLRDNLAFAESDYRKKPVQTVNGAVTSMLRGRWGVQKIREDGDLHHCMDAAVIAAASPGLVQRLTEYSKRREAFEEVSRGYVDPATGELVELPEQLRRDPFPKPWERFRQELEARLDPIDPQHQIDLLKLATYESDEEIRPVFVSRMPNHK

SEQ ID NO: 3370 - protein, 165 aa, unidentified
  REGION 1..165: note = Description of Unknown: uncultivated organism with predicted taxonomy: Firmicutes
  REGION 1..165: note = MG21-41 RuvC-III domain
NDTQHITRVVYNYLRNNLEFADSAYAKAPVQAVNGAVTAMLRGRWGIEKMRGDGDLHHCKDAVVIAATSRSMVQRLTNYYKEEERLFMGKTHFVDPATGEVLTRKEFQQRFAPKFPQPWDRFREELEARLDPIDPMEAVMALHLSTYEPEEEIAPVFVSHMPKHT

SEQ ID NO: 3371 - protein, 168 aa, unidentified
  REGION 1..168: note = Description of Unknown: uncultivated organism with predicted taxonomy: Clostridiales
  REGION 1..168: note = MG21-42 RuvC-III domain
NDTKYICKYMYNLIRNHLEFSDNANFVRKVWTVNGALTAHIRKRLGIEKVRDGDTHHAVDATVIAITTQGMVNKLTKYYQYVDGRYMNNKGEYIDTYTGEIINAKEYEEKYGIYFPEPWPKFRKELDIRTNCKTRERMIECLESEKIYTYEDYDDVEPIFVSRMPRRK

SEQ ID NO: 3372 - protein, 163 aa, unidentified
  REGION 1..163: note = Description of Unknown: uncultivated organism with predicted taxonomy: Clostridiales bacterium 42_27
  REGION 1..163: note = MG21-43 RuvC-III domain
KDTQYITRAVYNLIRDHLAFAESNYRKKPVQAVNGAVTAMLRGRWGVQKIREDGDLHPCLDAAVIAATTPGLVQRLTAYNKHRETWERSPAGYVDPATGEMLELPQEARRDPFPKPWERFRQELEARLDPIDPRHQIDLLKLETYESDEEIKPVFVSRMPNHK

SEQ ID NO: 3373 - protein, 168 aa, unidentified
  REGION 1..168: note = Description of Unknown: uncultivated organism with predicted taxonomy: Clostridiales
  REGION 1..168: note = MG21-44 RuvC-III domain
QDTQYISRLMYNLIKNHVQFSDNENFDRKVFTVNGQITSHVRKRLGINKIRENGDEHHAVDAAVIAIISQGMIQKITKYYQYIDGRYEKNSGEYIDLETGEILTKEQYEKENGINFPEPWPKFRTELDIRTTCQTKERMEECLVAEKIYYENYDDVKPVFISRMPRRK

SEQ ID NO: 3374 - protein, 163 aa, unidentified; identical to SEQ ID NO: 3359
  REGION 1..163: note = Description of Unknown: uncultivated organism with predicted taxonomy: Clostridiales
  REGION 1..163: note = MG21-45 RuvC-III domain

SEQ ID NO: 3375 - protein, 168 aa, unidentified; identical to SEQ ID NO: 3371
  REGION 1..168: note = Description of Unknown: uncultivated organism with predicted taxonomy: Clostridiales
  REGION 1..168: note = MG21-46 RuvC-III domain

SEQ ID NO: 3376 - protein, 166 aa, unidentified; identical to SEQ ID NO: 3356
  REGION 1..166: note = Description of Unknown: uncultivated organism with predicted taxonomy: Clostridiales
  REGION 1..166: note = MG21-47 RuvC-III domain

SEQ ID NO: 3377 - protein, 163 aa, unidentified; identical to SEQ ID NO: 3366
  REGION 1..163: note = Description of Unknown: uncultivated organism with predicted taxonomy: Clostridiales bacterium 42_27
  REGION 1..163: note = MG21-48 RuvC-III domain

SEQ ID NO: 3378 - protein, 163 aa, unidentified
  REGION 1..163: note = Description of Unknown: uncultivated organism with predicted taxonomy: Clostridiales bacterium 42_27
  REGION 1..163: note = MG21-49 RuvC-III domain
KDTQYITRAVYNLIRDHLAFAESNYRKKPVQAVNGAVTAMLRGRWGVQKIREDGDLHHCLDAAVIAATTPGLVQRLTAYNKHRETWERSPAGYVDPATGEMLELPQEARRDPFPKPWERFRQELEARLDPIDPRHQIDLLKLETYESDEEIKPVFVSRMPNHK

SEQ ID NO: 3379 - protein, 163 aa, unidentified; identical to SEQ ID NO: 3357
  REGION 1..163: note = Description of Unknown: uncultivated organism with predicted taxonomy: Clostridiales bacterium 42_27
  REGION 1..163: note = MG21-50 RuvC-III domain

SEQ ID NO: 3380 - protein, 163 aa, unidentified
  REGION 1..163: note = Description of Unknown: uncultivated organism with predicted taxonomy: Clostridiales bacterium 42_27
  REGION 1..163: note = MG21-51 RuvC-III domain
KDTQYITRAVYNLIREHLVFAESAYRKKPVQTVNGAVTSMLRGRWGVQKIREDGDLHHCLDAAVIAATTPGLVQRLTAYNKRRESWERSPAGYVDPATGELIVLPQEARRDPFPKPWERFRQELEARLDPIDPRHQIDLLKLETYESDEEIKPVFVSRMPNHK

SEQ ID NO: 3381 - protein, 163 aa, unidentified
  REGION 1..163: note = Description of Unknown: uncultivated organism with predicted taxonomy: Clostridiales bacterium 42_27
  REGION 1..163: note = MG21-52 RuvC-III domain
KDTQYITRAVYNLIRDHLAFAESNYRKKPVQAVNGAVTAMLRGRWGVQKIREDGDLHHCLDAAVIAATTPGLVQRLTAYNKHRETWERSPAGYVDPATGEMIELPQEARRDPFPKPWERFRQELEARLDPIDPRHQIDLLKLETYESDEEIQPVFVSRMPNHK

SEQ ID NO: 3382 - protein, 166 aa, unidentified
  REGION 1..166: note = Description of Unknown: uncultivated organism with predicted taxonomy: Clostridiales
  REGION 1..166: note = MG21-53 RuvC-III domain
VDTQYIARVIYNLINDHLQFAETGKYDKKRRTQAVNGAITAHVRKRLGIQKIREDGDLHHAVDAAVVACVSPGMIQKVTQYTKHRECIRKTKEGYLDTETGELMTREAYDAKYSPRFPAPWERFRQELEARLSDNPAEEIARLHLATYDSEEEIKPVFVSRKPERK

SEQ ID NO: 3383 - protein, 163 aa, unidentified
  REGION 1..163: note = Description of Unknown: uncultivated organism with predicted taxonomy: Clostridiales
  REGION 1..163: note = MG21-54 RuvC-III domain
KDTQYITRTVYNLIRDHLAFAESAYRKKPVQAVNGAVTAMLRGRWGVQKIREDGDLHHCLDAAVIAATTPGLVQRLTAYNKHRETWERPPAGYVDPVTGELIELPQEARRDPFPKPWERFRQELEARLDPIDPRHQIDLLKLETYESDEEIKPVFVSRMPNHK

SEQ ID NO: 3384 - protein, 165 aa, unidentified
  REGION 1..165: note = Description of Unknown: uncultivated organism with predicted taxonomy: Ruminococcaceae bacterium TF06-43
  REGION 1..165: note = MG21-55 RuvC-III domain
NDTQHITRVVYNFLRNNLEFADSAYAKAPVQAVNGAVTAMLRGRWGIEKMRGNGDLHHCKDAVVIAATSDSMIEDLTDYYKEEERLFMGKTHFVDPATGEALTRKEFQQRFAPQFPQPWPRFREELEARLDPIDPMEAVMALHLSTYEPDEEIAPVFVSHMPKHT

SEQ ID NO: 3385 - protein, 163 aa, unidentified
  REGION 1..163: note = Description of Unknown: uncultivated organism with predicted taxonomy: Clostridiales bacterium 42_27
  REGION 1..163: note = MG21-56 RuvC-III domain
KDTQYITRAVYNLIRDHLAFAESNYRKKPVQAVNGAVTAMLRGRWGVQKIREDGDLHHCLDAAVIAATTPGLVQRLTAYNKHRETWERSPAGYVDPATGEMIELPQEARRDPFPKPWERFRQELEARLDPIDPRHQIDPLTAETYESDEEIKPVFVSRMPNHK

SEQ ID NO: 3386 - protein, 164 aa, unidentified
  REGION 1..164: note = Description of Unknown: uncultivated organism
  REGION 1..164: note = MG21-57 RuvC-III domain
QDTQYLSKVVFRLIEDHLQFAETAPGKKHTQPVNGAITAQVRKRLGIEKIREDGDLHHAMDAAVIACITPGMIQRITKYAQNHERFYATAKGYADIKTGEVLTRAQYEAMDDIRFPEPWAGFRLELEARVSDHPQEAIAQLKLPHYENSEEIRPIFVSRMPNHK

SEQ ID NO: 3387 - protein, 163 aa, unidentified
  REGION 1..163: note = Description of Unknown: uncultivated organism with predicted taxonomy: Oscillibacter sp. CAG:241_62_21
  REGION 1..163: note = MG21-58 RuvC-III domain
KDTQYITRTIYNLLREHLLFADSRYSKKPVQAVNGAVTAMLRSRWGVHKIREDGDLHHCMDAAVLAATTPGLVQRLTEYSKHRETLIETPAGFVNRLTGELVEEAGDAQRDRFPEPWDRFRQELEARLDPIDPRHQIDRLKLATYESDEELKPVFVSRMPNHK

SEQ ID NO: 3388 - protein, 163 aa, unidentified; identical to SEQ ID NO: 3387
  REGION 1..163: note = Description of Unknown: uncultivated organism with predicted taxonomy: Clostridiales
  REGION 1..163: note = MG21-59 RuvC-III domain

SEQ ID NO: 3389 - protein, 163 aa, unidentified; identical to SEQ ID NO: 3357
  REGION 1..163: note = Description of Unknown: uncultivated organism with predicted taxonomy: Firmicutes
  REGION 1..163: note = MG21-60 RuvC-III domain

SEQ ID NO: 3390 - protein, 163 aa, unidentified; identical to SEQ ID NO: 3363
  REGION 1..163: note = Description of Unknown: uncultivated organism with predicted taxonomy: Clostridiales
  REGION 1..163: note = MG21-61 RuvC-III domain

SEQ ID NO: 3391 - protein, 163 aa, unidentified; identical to SEQ ID NO: 3366
  REGION 1..163: note = Description of Unknown: uncultivated organism with predicted taxonomy: Firmicutes bacterium CAG:129
  REGION 1..163: note = MG21-62 RuvC-III domain

SEQ ID NO: 3392 - protein, 163 aa, unidentified
  REGION 1..163: note = Description of Unknown: uncultivated organism with predicted taxonomy: Clostridiales
  REGION 1..163: note = MG21-63 RuvC-III domain
KDTQYITRSIYNLIRNNLVFAESNYKKRPVQTVNGAVTSMLRNRWGVQKIREDGDLHHCLDAAVIAATTPGLVQRLTEHSKRRETLEKAPAGYVDPATGELLELPQEARRDLFPKPWERFRQELEARLDPIDPRHQIDLLELETYESDEEIKPVFASRMPNHK

SEQ ID NO: 3393 - protein, 163 aa, unidentified
  REGION 1..163: note = Description of Unknown: uncultivated organism with predicted taxonomy: Clostridiales
  REGION 1..163: note = MG21-64 RuvC-III domain
KDTQYITRSIYNLIRNNLVFAESNYKKRPVQTVNGAVTSMLRNRWGVQKIREDGDLHHCLDAAVIAATTPGLVQRLTEHSKRRETLEKAPAGYVDPATGELLELPQEARRDLFPKPWERFRQELEARLDPIDPRHQIDLLKLETYESDEEIKPVFASRMPNHK

SEQ ID NO: 3394 - protein, 160 aa, unidentified
  REGION 1..160: note = Description of Unknown: uncultivated organism with predicted taxonomy: Clostridiales bacterium 42_27
  REGION 1..160: note = MG21-65 RuvC-III domain
VDTQYIARVIYNLINDHLQFAETGKYDKKRRTQAVNGAITAHVRKRLGIQKIREDGDLHHAVDAAVVACVSPGMIQKVTQYTKHRECIRKTKEGYLDTETGELMTREAYDAKYSPRFPAPWERFRQELEARLSDNPAEEIARLHLATYDSEEEIKPVFVS

SEQ ID NO: 3395 - protein, 163 aa, unidentified; identical to SEQ ID NO: 3393
  REGION 1..163: note = Description of Unknown: uncultivated organism with predicted taxonomy: Clostridiales
  REGION 1..163: note = MG21-66 RuvC-III domain

SEQ ID NO: 3396 - protein, 163 aa, unidentified; identical to SEQ ID NO: 3358
  REGION 1..163: note = Description of Unknown: uncultivated organism with predicted taxonomy: Clostridia
  REGION 1..163: note = MG21-67 RuvC-III domain

SEQ ID NO: 3397 - protein, 163 aa, unidentified; identical to SEQ ID NO: 3378
  REGION 1..163: note = Description of Unknown: uncultivated organism with predicted taxonomy: Clostridiales
  REGION 1..163: note = MG21-68 RuvC-III domain

SEQ ID NO: 3398 - protein, 165 aa, unidentified
  REGION 1..165: note = Description of Unknown: uncultivated organism with predicted taxonomy: Firmicutes
  REGION 1..165: note = MG21-69 RuvC-III domain
NDTQHITRVVYNYLRNNLEFADSAYAKAPVRAVNGAVTAMLRGRWGIEKMRGNGDLHHCKDAVVIAATSRSMVQRLTNYYKEEERLFMGKTNFVDPATGEVLTRKEFQQRFAPKFPQPWDRFREELEARLDPIDPMEAVTALYLSTYEPEEEIAPVFVSHMPKHT

SEQ ID NO: 3399 - protein, 167 aa, unidentified
  REGION 1..167: note = Description of Unknown: uncultivated organism with predicted taxonomy: Firmicutes
  REGION 1..167: note = MG21-70 RuvC-III domain
NDTQHITRVVYNYLRNNLEFADSAYAKAPVRAVNGAVTAMLRGRWGIEKMRGDGDLHHCKDAVVIAATSDSMIKDLTKYYQEEEQLFMGKTNFVDPATGEVLTRKEFQQRFAPKFPQPWPRFREELEARLDPTNPKEALMALNLSTYEFDPEEEIPPVFVSHMPKHT

SEQ ID NO: 3400 - protein, 157 aa, unidentified; identical to SEQ ID NO: 3353
  REGION 1..157: note = Description of Unknown: uncultivated organism with predicted taxonomy: Clostridiales
  REGION 1..157: note = MG21-71 RuvC-III domain

SEQ ID NO: 3401 - protein, 167 aa, unidentified; identical to SEQ ID NO: 3352
  REGION 1..167: note = Description of Unknown: uncultivated organism
  REGION 1..167: note = MG21-72 RuvC-III domain

SEQ ID NO: 3402 - protein, 163 aa, unidentified; identical to SEQ ID NO: 3393
  REGION 1..163: note = Description of Unknown: uncultivated organism with predicted taxonomy: Clostridiales
  REGION 1..163: note = MG21-73 RuvC-III domain

SEQ ID NO: 3403 - protein, 165 aa, unidentified
  REGION 1..165: note = Description of Unknown: uncultivated organism with predicted taxonomy: Firmicutes
  REGION 1..165: note = MG21-74 RuvC-III domain
NDTQHITRVVYNYLRNNLSFADSTYANAPVQAVSGTVTATLRGRWGIEKMREDGDLHHCKDAVVIAATSPSMIQRLSNYYKEEERLFMGKTHFVDPETGEVLTRKAFQQRFAPKFPQPWDRFREELEARLDPVNPMDAVMALHLSTYEPDEDITPVFVSHMPKHT

SEQ ID NO: 3404 - protein, 168 aa, unidentified
  REGION 1..168: note = Description of Unknown: uncultivated organism with predicted taxonomy: Clostridiales
  REGION 1..168: note = MG21-75 RuvC-III domain
CDTQYISRLMYNLIKNHVQFSNNENFERKVFTVNGQITSHIRKRLGINKIRENGDEHHAIDAAIIATVSQGMIQRITKYYQYIDGRYEKNSGEYIDIETGEIITKEQYEAENGSNFPEPWPKFRKELDIRTTCKTKARMEECLLTEKIFYDDYDDVKPIFISRMPRRK

SEQ ID NO: 3405 - protein, 163 aa, unidentified; identical to SEQ ID NO: 3378
  REGION 1..163: note = Description of Unknown: uncultivated organism with predicted taxonomy: Clostridiales bacterium 42_27
  REGION 1..163: note = MG21-76 RuvC-III domain

SEQ ID NO: 3406 - protein, 166 aa, unidentified
  REGION 1..166: note = Description of Unknown: uncultivated organism with predicted taxonomy: Clostridiales
  REGION 1..166: note = MG21-77 RuvC-III domain
VDTQYIARVIYNLINDHLQFAETGKYDKKRRTQAVNGAITAHVRKRLGIQKIREDGDLHHAVDAAVVACVSPGMIQKITQYTKHRECIRKTKEGYLDTETGELMTREAYDAKYSPRFPAPWERFRQELEARLSDNPAEEIARLHLATYDSEEEIKQVFVSRKQTHK

SEQ ID NO: 3407 - protein, 163 aa, unidentified; identical to SEQ ID NO: 3378
  REGION 1..163: note = Description of Unknown: uncultivated organism with predicted taxonomy: Clostridiales bacterium 42_27
  REGION 1..163: note = MG21-78 RuvC-III domain

SEQ ID NO: 3408 - protein, 163 aa, unidentified
  REGION 1..163: note = Description of Unknown: uncultivated organism with predicted taxonomy: Clostridiales
  REGION 1..163: note = MG21-79 RuvC-III domain
KDTQYITRTVYNLIRNHLAFAESAYRKKPVQAVNGAVTAMLRGRWGVQKIREDSDLHHCLDAAVIAATTPGLVQRLTAYNKHRETWERPPAGYVDPATGELIELPQEARRDPFPKPWERFRQELEARLDPIDPRHQIDLLKLETYESDEEIKPVFVSRMPNHK

SEQ ID NO: 3409 - protein, 164 aa, unidentified
  REGION 1..164: note = Description of Unknown: uncultivated organism with predicted taxonomy: Clostridiales
  REGION 1..164: note = MG21-80 RuvC-III domain
QDTQYLSKVVFRLIEDHLQFAKTAPGKKHTQPVNGAITAQVRKRLGIEKIREDGDLHHAMDAAVIACITPGMIQRITKYAQNHERFYATAKGYVDIKTGEVLTRAQYEAMDDIRFPEPWAGFRLELEARVSDHPQEAIAQLKLPHYENSEEIRPIFVSRMPNHK

SEQ ID NO: 3410 - protein, 163 aa, unidentified
  REGION 1..163: note = Description of Unknown: uncultivated organism with predicted taxonomy: Clostridiales
  REGION 1..163: note = MG21-81 RuvC-III domain
KDTQYITRSIYNLLRDNLAFAESDYRKKPVQTVNGAVTSMLRGRWGVQKIREDGDLHHCMDAAVIAAASPGLVQRLTEYSKRREAFEEVSRGYVDPATGELVELPEQLRRDPFPKPWERFRQELEARLDPIDPRHQIDLLKLATYESDEKIRPVFVSRMPNHK

SEQ ID NO: 3411 - protein, 163 aa, unidentified; identical to SEQ ID NO: 3378
  REGION 1..163: note = Description of Unknown: uncultivated organism with predicted taxonomy: Clostridiales bacterium 42_27
  REGION 1..163: note = MG21-82 RuvC-III domain

SEQ ID NO: 3412 - protein, 163 aa, unidentified; identical to SEQ ID NO: 3378
  REGION 1..163: note = Description of Unknown: uncultivated organism with predicted taxonomy: Clostridiales bacterium 42_27
  REGION 1..163: note = MG21-83 RuvC-III domain

SEQ ID NO: 3413 - protein, 163 aa, unidentified
  REGION 1..163: note = Description of Unknown: uncultivated organism with predicted taxonomy: Clostridiales
  REGION 1..163: note = MG21-84 RuvC-III domain
KDTQYITRSIYNLIRNNLVFAESNYKKRPVQTVNGAVTSMLRNRWGVQKIREDGDLHHCLDAAVIAATTPGLVQRLTEHSKRRETLEKAPAGYVDPATGELLELPQEARRDLFPKPWERFRQELEARLDPIDPRHQIDLLKLSTYESDEEIKPVFASRMPNHK

SEQ ID NO: 3414 - protein, 166 aa, unidentified
  REGION 1..166: note = Description of Unknown: uncultivated organism with predicted taxonomy: Clostridiales
  REGION 1..166: note = MG21-85 RuvC-III domain
VDTQYIARVIYNLINDHLQFAETGKYDKKRRTQAVNGAITAHVRKRLGIQKIREDGDLHHAADAAVVACVSPSMIQKITQYTKHRECIRETPKGYLDTETGELMTREAYDAKYPPRFPAPWERFRQELEARLSDNPAEEIARLHLATYDSEEEIKPVFVSRKPERK

SEQ ID NO: 3415 - protein, 163 aa, unidentified; identical to SEQ ID NO: 3410
  REGION 1..163: note = Description of Unknown: uncultivated organism with predicted taxonomy: Firmicutes
  REGION 1..163: note = MG21-86 RuvC-III domain

SEQ ID NO: 3416 - protein, 163 aa, unidentified; identical to SEQ ID NO: 3363
  REGION 1..163: note = Description of Unknown: uncultivated organism with predicted taxonomy: Clostridiales
  REGION 1..163: note = MG21-87 RuvC-III domain

SEQ ID NO: 3417 - protein, 166 aa, unidentified
  REGION 1..166: note = Description of Unknown: uncultivated organism with predicted taxonomy: Clostridiales
  REGION 1..166: note = MG21-88 RuvC-III domain
VDTQYIARVIYNLINDHLQFAETGKYDKKRRTQAVNGAITAHVRKRLGIQKIREDGDLHHAVDAAVVACVSPGMIQKITQYTKHRECIRKTKEGYLDTETGELMTREAYDAKYSPRFPAPWERFRQELEARLSDNPAEEIARLHLATYDSEEEIKPVFVSRKQTHK

SEQ ID NO: 3418 - protein, 163 aa, unidentified; identical to SEQ ID NO: 3363
  REGION 1..163: note = Description of Unknown: uncultivated organism with predicted taxonomy: Clostridiales
  REGION 1..163: note = MG21-89 RuvC-III domain

SEQ ID NO: 3419 - protein, 163 aa, unidentified; identical to SEQ ID NO: 3378
  REGION 1..163: note = Description of Unknown: uncultivated organism with predicted taxonomy: Clostridiales bacterium 42_27
  REGION 1..163: note = MG21-90 RuvC-III domain

SEQ ID NO: 3420 - protein, 163 aa, unidentified; identical to SEQ ID NO: 3378
  REGION 1..163: note = Description of Unknown: uncultivated organism with predicted taxonomy: Clostridiales bacterium 42_27
  REGION 1..163: note = MG21-91 RuvC-III domain

SEQ ID NO: 3421 - protein, 163 aa, unidentified
  REGION 1..163: note = Description of Unknown: uncultivated organism with predicted taxonomy: Ruminococcaceae bacterium TF06-43
  REGION 1..163: note = MG21-92 RuvC-III domain
KDTQYITRTVYNLIRDHLAFAESAYRKKPVQAVNGAVTSMLRNRWGVQKIREDGDLHHCLDAAVIAATTPGLVQRLTAYSKHRETWERPPAGYVDPATGELIELPQEARRDPFPKPWERFRQELEARLNPIDPRHQIDLLKLETYESDEEIKPVFASRMPNHK

SEQ ID NO: 3422 - protein, 163 aa, unidentified; identical to SEQ ID NO: 3363
  REGION 1..163: note = Description of Unknown: uncultivated organism with predicted taxonomy: Ruminococcaceae bacterium TF06-43
  REGION 1..163: note = MG21-93 RuvC-III domain

SEQ ID NO: 3423 - protein, 163 aa, unidentified; identical to SEQ ID NO: 3413
  REGION 1..163: note = Description of Unknown: uncultivated organism with predicted taxonomy: Clostridiales
  REGION 1..163: note = MG21-94 RuvC-III domain

SEQ ID NO: 3424 - protein, 163 aa, unidentified; identical to SEQ ID NO: 3357
  REGION 1..163: note = Description of Unknown: uncultivated organism with predicted taxonomy: Clostridiales bacterium 42_27
  REGION 1..163: note = MG21-95 RuvC-III domain

SEQ ID NO: 3425 - protein, 163 aa, unidentified; identical to SEQ ID NO: 3378
  REGION 1..163: note = Description of Unknown: uncultivated organism with predicted taxonomy: Clostridiales bacterium 42_27
  REGION 1..163: note = MG21-96 RuvC-III domain

SEQ ID NO: 3426 - protein, 168 aa, unidentified
  REGION 1..168: note = Description of Unknown: uncultivated organism with predicted taxonomy: Clostridium
  REGION 1..168: note = MG21-97 RuvC-III domain
QDTQYISRLMYNLIKNHVQFSDNENFDRKVFTVNGQITSHVRKRLGINKIRENGDEHHAVDAAVIAIISQGMIQKITKYYQYIDGRYEKNSGEYIDLETGEILTKEQYEKENGINFPEPWPKFRTELDIRTTCQTKERMEECLVAVKIYYENYDDVKPVFISRMPRRK

SEQ ID NO: 3427 - protein, 166 aa, unidentified
  REGION 1..166: note = Description of Unknown: uncultivated organism with predicted taxonomy: Clostridiales
  REGION 1..166: note = MG21-98 RuvC-III domain
VDTQYIARVIYNLINDHLQFAETGKYDKKRRTQAVNGAITAHVRKRLGIQKIREDGDLHHAADAAVVACVSPSMIQKITQYTKHRECIRETPKGYLDTETGELMTREAYDAKYSPRFPAPWERFRQELEARLSDNPAEEIARLHLATYDSEEEIKPVFVSRKPKRK

SEQ ID NO: 3428 - protein, 163 aa, unidentified; identical to SEQ ID NO: 3357
  REGION 1..163: note = Description of Unknown: uncultivated organism with predicted taxonomy: Clostridiales bacterium 42_27
  REGION 1..163: note = MG21-99 RuvC-III domain

SEQ ID NO: 3429 - protein, 163 aa, unidentified; identical to SEQ ID NO: 3363
  REGION 1..163: note = Description of Unknown: uncultivated organism with predicted taxonomy: Clostridiales
  REGION 1..163: note = MG21-100 RuvC-III domain

SEQ ID NO: 3430 - protein, 168 aa, unidentified
  REGION 1..168: note = Description of Unknown: uncultivated organism with predicted taxonomy: Clostridiales
  REGION 1..168: note = MG21-101 RuvC-III domain
QDTQYISRLMYNLIKNHVQFSNNENFERKVFTVNGQITSHIGKRLGINKIRENGDEHHATDAVIIATVSQGMIQRITKYYQYIDGRYEKNSGEYIDMETGEIITKEQYEAKNGSNFPEPWPKFRKELDIRTTCKTKARMEECLLTEKIFYDDYDDVKPIFISRMPKRK

SEQ ID NO: 3431 - protein, 168 aa, unidentified; identical to SEQ ID NO: 3373
  REGION 1..168: note = Description of Unknown: uncultivated organism with predicted taxonomy: Clostridium
  REGION 1..168: note = MG21-102 RuvC-III domain

SEQ ID NO: 3432 - protein, 163 aa, unidentified
  REGION 1..163: note = Description of Unknown: uncultivated organism with predicted taxonomy: Clostridiales
  REGION 1..163: note = MG21-103 RuvC-III domain
KDTQYITRSIYNLIRNNLVFAESNYKKRPVQTVNGAVTSMLRNRWGVQKIREDGDLHHCLDAAVIAATTPGLVQRLTEHSKRRETLEKAPAGYVDPATGELLELPQEARRDLFPKPWERFRQELEARLDPIDPRHQIDLLKLSTYESDEEIKPVFVSRMPNHK

SEQ ID NO: 3433 - protein, 163 aa, unidentified; identical to SEQ ID NO: 3378
  REGION 1..163: note = Description of Unknown: uncultivated organism with predicted taxonomy: Clostridiales bacterium 42_27
  REGION 1..163: note = MG21-104 RuvC-III domain

SEQ ID NO: 3434 - protein, 163 aa, unidentified
  REGION 1..163: note = Description of Unknown: uncultivated organism with predicted taxonomy: Clostridiales bacterium 42_27
  REGION 1..163: note = MG21-105 RuvC-III domain
KDTQYITRAVYNLIRDHLAFAESNYRKKPVQAVNGAVTAMLRGRWGVQKIREDGDLHHCLDAAVIAATTPGLVQRLTAYNKHRETWERSPAGYVDPATGELIELPQEARRDPFPKPWERFRQELEARLDPIDPRHQIDLLKLETYESDEEIKPVFVSRMPNHK

SEQ ID NO: 3435 - protein, 109 aa, unidentified
  REGION 1..109: note = Description of Unknown: uncultivated organism with predicted taxonomy: Oscillibacter sp. CAG:241_62_21
  REGION 1..109: note = MG21-106 RuvC-III domain
KDTQYITRTIYNLLREHLLFADSRYSKKPVQAVNGAVTAMLRSRWGVHKIREDGDLHHCMDAAVLAATTPGLVQRLTEYSKHRETLIETPAGFVNRLTGELVEEAGDAQ

SEQ ID NO: 3436 - protein, 168 aa, unidentified; identical to SEQ ID NO: 3373
  REGION 1..168: note = Description of Unknown: uncultivated organism with predicted taxonomy: Clostridium
  REGION 1..168: note = MG21-107 RuvC-III domain

SEQ ID NO: 3437 - protein, 163 aa, unidentified; identical to SEQ ID NO: 3363
  REGION 1..163: note = Description of Unknown: uncultivated organism with predicted taxonomy: Clostridiales
  REGION 1..163: note = MG21-108 RuvC-III domain

SEQ ID NO: 3438 - protein, 163 aa, unidentified; identical to SEQ ID NO: 3357
  REGION 1..163: note = Description of Unknown: uncultivated organism with predicted taxonomy: Clostridiales bacterium 42_27
  REGION 1..163: note = MG21-109 RuvC-III domain

SEQ ID NO: 3439 - protein, 163 aa, unidentified; identical to SEQ ID NO: 3387
  REGION 1..163: note = Description of Unknown: uncultivated organism with predicted taxonomy: Oscillibacter sp. CAG:241_62_21
  REGION 1..163: note = MG21-110 RuvC-III domain

SEQ ID NO: 3440 - protein, 163 aa, unidentified; identical to SEQ ID NO: 3432
  REGION 1..163: note = Description of Unknown: uncultivated organism with predicted taxonomy: Clostridiales
  REGION 1..163: note = MG21-111 RuvC-III domain

SEQ ID NO: 3441 - protein, 163 aa, unidentified; identical to SEQ ID NO: 3357
  REGION 1..163: note = Description of Unknown: uncultivated organism with predicted taxonomy: Clostridiales bacterium 42_27
  REGION 1..163: note = MG21-112 RuvC-III domain

SEQ ID NO: 3442 - protein, 163 aa, unidentified; identical to SEQ ID NO: 3378
  REGION 1..163: note = Description of Unknown: uncultivated organism with predicted taxonomy: Clostridiales bacterium 42_27
  REGION 1..163: note = MG21-113 RuvC-III domain

SEQ ID NO: 3443 - protein, 163 aa, unidentified
  REGION 1..163: note = Description of Unknown: uncultivated organism with predicted taxonomy: Clostridiales bacterium 42_27
  REGION 1..163: note = MG21-114 RuvC-III domain
KDTQYITRAVYNLIRDHLTFAESNYRKKPVQAVNGAVTAMLRGRWGVQKIREDGDLHHCLDAAVIAATTPGLVQRLTAYNKHRETWERPPAGYVDPATGELIELPQEARRDPFPKPWERFRQELEARLDPIDPRHQIDLLKLETYESDEEIKPVFVSRMPNHK

SEQ ID NO: 3444 - protein, 166 aa, unidentified; identical to SEQ ID NO: 3406
  REGION 1..166: note = Description of Unknown: uncultivated organism with predicted taxonomy: Clostridiales
  REGION 1..166: note = MG21-115 RuvC-III domain

SEQ ID NO: 3445 - protein, 163 aa, unidentified; identical to SEQ ID NO: 3363
  REGION 1..163: note = Description of Unknown: uncultivated organism with predicted taxonomy: Clostridiales
  REGION 1..163: note = MG21-116 RuvC-III domain

SEQ ID NO: 3446 - protein, 163 aa, unidentified; identical to SEQ ID NO: 3357
  REGION 1..163: note = Description of Unknown: uncultivated organism with predicted taxonomy: Clostridiales bacterium 42_27
  REGION 1..163: note = MG21-117 RuvC-III domain

SEQ ID NO: 3447 - protein, 163 aa, unidentified; identical to SEQ ID NO: 3359
  REGION 1..163: note = Description of Unknown: uncultivated organism with predicted taxonomy: Clostridiales bacterium 42_27
  REGION 1..163: note = MG21-118 RuvC-III domain

SEQ ID NO: 3448 - protein, 163 aa, unidentified; identical to SEQ ID NO: 3378
  REGION 1..163: note = Description of Unknown: uncultivated organism with predicted taxonomy: Clostridiales bacterium 42_27
  REGION 1..163: note = MG21-119 RuvC-III domain

SEQ ID NO: 3449 - protein, 163 aa, unidentified; identical to SEQ ID NO: 3363
  REGION 1..163: note = Description of Unknown: uncultivated organism with predicted taxonomy: Ruminococcaceae bacterium TF06-43
  REGION 1..163: note = MG21-120 RuvC-III domain

SEQ ID NO: 3450 - protein, 163 aa, unidentified; identical to SEQ ID NO: 3432
  REGION 1..163: note = Description of Unknown: uncultivated organism with predicted taxonomy: Clostridiales
  REGION 1..163: note = MG21-121 RuvC-III domain

SEQ ID NO: 3451 - protein, 165 aa, unidentified; identical to SEQ ID NO: 3398
  REGION 1..165: note = Description of Unknown: uncultivated organism
  REGION 1..165: note = MG21-122 RuvC-III domain

SEQ ID NO: 3452 - protein, 163 aa, unidentified; identical to SEQ ID NO: 3357
  REGION 1..163: note = Description of Unknown: uncultivated organism with predicted taxonomy: Clostridiales
  REGION 1..163: note = MG21-123 RuvC-III domain

SEQ ID NO: 3453 - protein, 163 aa, unidentified; identical to SEQ ID NO: 3357
  REGION 1..163: note = Description of Unknown: uncultivated organism with predicted taxonomy: Clostridiales bacterium 42_27
  REGION 1..163: note = MG21-124 RuvC-III domain

SEQ ID NO: 3454 - protein, 163 aa, unidentified; identical to SEQ ID NO: 3357
  REGION 1..163: note = Description of Unknown: uncultivated organism with predicted taxonomy: Clostridiales bacterium 42_27
  REGION 1..163: note = MG21-125 RuvC-III domain

SEQ ID NO: 3455 - protein, 95 aa, unidentified
  REGION 1..95: note = Description of Unknown: uncultivated organism with predicted taxonomy: Clostridiales bacterium 42_27
  REGION 1..95: note = MG21-126 RuvC-III domain
KDTQYITRAVYNLIRDHLAFAESNYRKKPVQAVNGAVAAMLRGRWGVQKIREDGDLHHCLDAAVIAATTPGLVQRLTAYNKHRETWERSPAGYVD

SEQ ID NO: 3456 - protein, 163 aa, unidentified
  REGION 1..163: note = Description of Unknown: uncultivated organism with predicted taxonomy: Clostridiales bacterium 42_27
  REGION 1..163: note = MG21-127 RuvC-III domain
KDTQYITRAVYNLIRDHLAFAESNYRKKPVQAVNGAVTAMLRGRWGVQKIREDGDLHHCLDAAVIAATTPGLVQRLTAYNKHRETWERSPAGYVDPATGELIELPQEARRDPFPKPWERFRQELEARLNPIDPRHQIDLLKLETYESDEEIKPVFVSRMPNHK

SEQ ID NO: 3457 - protein, 163 aa, unidentified; identical to SEQ ID NO: 3378
  REGION 1..163: note = Description of Unknown: uncultivated organism with predicted taxonomy: Clostridiales bacterium 42_27
  REGION 1..163: note = MG21-128 RuvC-III domain

SEQ ID NO: 3458 - protein, 163 aa, unidentified; identical to SEQ ID NO: 3434
  REGION 1..163: note = Description of Unknown: uncultivated organism with predicted taxonomy: Clostridiales bacterium 42_27
  REGION 1..163: note = MG21-129 RuvC-III domain

SEQ ID NO: 3459 - protein, 163 aa, unidentified; identical to SEQ ID NO: 3378
  REGION 1..163: note = Description of Unknown: uncultivated organism with predicted taxonomy: Clostridiales bacterium 42_27
  REGION 1..163: note = MG21-130 RuvC-III domain

SEQ ID NO: 3460 - protein, 163 aa, unidentified; identical to SEQ ID NO: 3378
  REGION 1..163: note = Description of Unknown: uncultivated organism with predicted taxonomy: Clostridiales bacterium 42_27
  REGION 1..163: note = MG21-131 RuvC-III domain

SEQ ID NO: 3461 - protein, 163 aa, unidentified; identical to SEQ ID NO: 3378
  REGION 1..163: note = Description of Unknown: uncultivated organism with predicted taxonomy: Clostridiales bacterium 42_27
  REGION 1..163: note = MG21-132 RuvC-III domain

SEQ ID NO: 3462 - protein, 163 aa, unidentified; identical to SEQ ID NO: 3387
  REGION 1..163: note = Description of Unknown: uncultivated organism with predicted taxonomy: Clostridiales
  REGION 1..163: note = MG21-133 RuvC-III domain

SEQ ID NO: 3463 - protein, 163 aa, unidentified; identical to SEQ ID NO: 3378
  REGION 1..163: note = Description of Unknown: uncultivated organism with predicted taxonomy: Clostridiales bacterium 42_27
  REGION 1..163: note = MG21-134 RuvC-III domain

SEQ ID NO: 3464 - protein, 163 aa, unidentified; identical to SEQ ID NO: 3357
  REGION 1..163: note = Description of Unknown: uncultivated organism with predicted taxonomy: Clostridiales
  REGION 1..163: note = MG21-135 RuvC-III domain

SEQ ID NO: 3465 - protein, 167 aa, unidentified; identical to SEQ ID NO: 3337
  REGION 1..167: note = Description of Unknown: uncultivated organism with predicted taxonomy: Clostridiales
  REGION 1..167: note = MG21-136 RuvC-III domain

SEQ ID NO: 3466 - protein, 168 aa, unidentified
  REGION 1..168: note = Description of Unknown: uncultivated organism with predicted taxonomy: Clostridiales
  REGION 1..168: note = MG21-137 RuvC-III domain
QDTQYISRLMYNLIKDHVQFSNNENFERKVFTVNGQITSHIRKRLGINKIRENGDEHHAIDAAIIATVSQGMIQRITKYYQYIDGRYEKNSGEYIDIETGEIITKEQYEAENGSNFPEPWPKFRKELDIRTTCKTKARMEECLLTEKIFYDDYDDVKPIFISRMPRRK

SEQ ID NO: 3467 - protein, 163 aa, unidentified; identical to SEQ ID NO: 3357
  REGION 1..163: note = Description of Unknown: uncultivated organism with predicted taxonomy: Clostridiales bacterium 42_27
  REGION 1..163: note = MG21-138 RuvC-III domain

SEQ ID NO: 3468 - protein, 163 aa, unidentified; identical to SEQ ID NO: 3357
  REGION 1..163: note = Description of Unknown: uncultivated organism with predicted taxonomy: Clostridiales
  REGION 1..163: note = MG21-139 RuvC-III domain

SEQ ID NO: 3469 - protein, 163 aa, unidentified; identical to SEQ ID NO: 3378
  REGION 1..163: note = Description of Unknown: uncultivated organism with predicted taxonomy: Clostridiales bacterium 42_27
  REGION 1..163: note = MG21-140 RuvC-III domain

SEQ ID NO: 3470 - protein, 165 aa, unidentified
  REGION 1..165: note = Description of Unknown: uncultivated organism with predicted taxonomy: Firmicutes
  REGION 1..165: note = MG21-141 RuvC-III domain
NDTQHITRVVYNYLRNNLEFADSAYAKAPVQAVNGAVTAMLRGRWGIEKMRGDGDLHHCKDAVVIAATSPSMIQRLSNYYKEEERLFMGKTHFVDPGTGEVLTRKEFQQRFAPQFPQPWPRFREELEARLDPVNPTEALMALHLSTYEPEEEIKPVFVSHMPKRT

SEQ ID NO: 3471 - protein, 163 aa, unidentified; identical to SEQ ID NO: 3357
  REGION 1..163: note = Description of Unknown: uncultivated organism with predicted taxonomy: Clostridiales bacterium 42_27
  REGION 1..163: note = MG21-142 RuvC-III domain

SEQ ID NO: 3472 - protein, 163 aa, unidentified; identical to SEQ ID NO: 3434
  REGION 1..163: note = Description of Unknown: uncultivated organism with predicted taxonomy: Clostridiales bacterium 42_27
  REGION 1..163: note = MG21-143 RuvC-III domain

SEQ ID NO: 3473 - protein, 166 aa, unidentified; identical to SEQ ID NO: 3406
  REGION 1..166: note = Description of Unknown: uncultivated organism with predicted taxonomy: Clostridiales
  REGION 1..166: note = MG21-144 RuvC-III domain

SEQ ID NO: 3474 - protein, 163 aa, unidentified
  REGION 1..163: note = Description of Unknown: uncultivated organism with predicted taxonomy: Clostridiales
  REGION 1..163: note = MG21-145 RuvC-III domain
VDTQYLSRVIFRLIDENMAFAETGNYKRKTQTVSGAITAQVRKRLGIDKIRENGDLHHAADAAVIACISPGMVHKVTNYAKRCELYRDGQGYIDYETGEVMTKEAFDEKYAPRFPEPWPMFRKELEARLSADPRAEIEHLNLPAYDSSDELRPVFVSRMPRHK

SEQ ID NO: 3475 - protein, 186 aa, unidentified
  REGION 1..186: note = Description of Unknown: uncultivated organism with predicted taxonomy: Bacteroidales
  REGION 1..186: note = MG22-1 RuvC-III domain
NDTRYIARFMKGILSNIVREKNAEGTLEPEETSKNLIVCSGRITDRVKQDWGLNDIWNHIITPRFERLNKKTSSNDFGEYVCKEGKRYFQTRVPLNLQKGFNKKRIDHRHHAMDAIAIACINRSIVNYLNNAAANQTEREDLRRAVCIPERNGQTKRQLRSPWHCFARDAENALRQIVVSFKQNLR

SEQ ID NO: 3476 - protein, 186 aa, unidentified
  REGION 1..186: note = Description of Unknown: uncultivated organism with predicted taxonomy: Bacteroidales
  REGION 1..186: note = MG22-3 RuvC-III domain
SDTRYIARYIKGILSNIVRQRAADGTLEQEATSKNLIVCTGQITDRVKQDWGLNDVWNHIITPRFERLNRMTGSNDYGEWCCKEGKRYFQTRVPLHLQIGFNKKRIDHRHHAMDAIAIACVNRNVVNYLNNAAAHATDRMDLRMRICRPSGNGQTKKEIRSPWKNFAHDAECALQAITVSFKQNVR

SEQ ID NO: 3477 - protein, 186 aa, unidentified; identical to SEQ ID NO: 3476
  REGION 1..186: note = Description of Unknown: uncultivated organism with predicted taxonomy: Bacteroidales
  REGION 1..186: note = MG22-4 RuvC-III domain

SEQ ID NO: 3478 - protein, 186 aa, unidentified
  REGION 1..186: note = Description of Unknown: uncultivated organism with predicted taxonomy: Bacteroidales
  REGION 1..186: note = MG22-5 RuvC-III domain
NDTRYIARFMKGILSNIVREKNADGTLEPEETSKNLIVCSGRITDRVKQDWGLNDIWNHIITPRFERLNTKTSSNDFGEYVCKDGKRYFQTRVPLNLQKGFNKKRIDHRHHAMDAIAIACVNRSIVNYLNNAAANQTEREDLRRAVCIPERNGQTKRQLRSPWHCFARDAENALRQIVVSFKQNLR

SEQ ID NO: 3479 - protein, 186 aa, unidentified
  REGION 1..186: note = Description of Unknown: uncultivated organism with predicted taxonomy: Bacteroidales
  REGION 1..186: note = MG22-6 RuvC-III domain
NDTRYIARFMKGILSNIVRKKNADGTLEPEETSKNLIVCSGRITDRVKQDWGLNDIWNHIITPRFERLNKKTSSNDFGEYVCKDGKRYFQTRVPLNLQKGFNKKRIDHRHHAMDAIAIACVNRSIVNYLNNAAANQTEREDLRRAVCIPERNGQTKRQLRSPWHCFARDAENALRQIVVSFKQNLR

SEQ ID NO: 3480 - protein, 186 aa, unidentified; identical to SEQ ID NO: 3478
  REGION 1..186: note = Description of Unknown: uncultivated organism with predicted taxonomy: Prevotella
  REGION 1..186: note = MG22-7 RuvC-III domain

SEQ ID NO: 3481 - protein, 186 aa, unidentified; identical to SEQ ID NO: 3479
  REGION 1..186: note = Description of Unknown: uncultivated organism with predicted taxonomy: Bacteroidales
  REGION 1..186: note = MG22-8 RuvC-III domain

SEQ ID NO: 3482 - protein, 186 aa, unidentified
  REGION 1..186: note = Description of Unknown: uncultivated organism with predicted taxonomy: Bacteroidales
  REGION 1..186: note = MG22-9 RuvC-III domain
NDTRYIARFMKGFLSNIVREKNADGTLELEETSKNLIVCSGRITDRIKQDWGLNDVWNHIITPRFERLNQKTSSDNFGEYVCKEGKRYFQTRVPLNLQKGFNKKRIDHRHHAMDAIAIACVNRSIVNYLNNAAANQTEREDLRRAVCIPERNGQTKRQLRSPWRNFAKDAENALRQIVVSFKQNLR

SEQ ID NO: 3483 - protein, 186 aa, unidentified
  REGION 1..186: note = Description of Unknown: uncultivated organism with predicted taxonomy: Bacteroidales
  REGION 1..186: note = MG22-10 RuvC-III domain
NDTRYIARFMKGILSNIVREKNADGTLEPEETSKNLIVCSGRITDRVKQDWGLNDIWNHIITPRFERLNTKTSSNDFGEYVCKEGKRYFQTRVPLNLQKGFNKKRIDHRHHAMDAIAIACVNRSIVNYLNNAAANQTEREDLRRAVCIPERNGQTKRQLRSPWHCFARDAENALRQIVVSFKQNLR

SEQ ID NO: 3484 - protein, 89 aa, unidentified
  REGION 1..89: note = Description of Unknown: uncultivated organism with predicted taxonomy: Prevotella sp. MGM2
  REGION 1..89: note = MG22-12 RuvC-III domain
NDTRYIARFMKGILSNIVREKNADGTLEPEETSKNLIVCSGRITDRVKQDWGLNDIWNHIITPRFERLNTKTSSDKFGEYVCKEGKRYF

SEQ ID NO: 3485 - protein, 186 aa, unidentified
  REGION 1..186: note = Description of Unknown: uncultivated organism with predicted taxonomy: Prevotella
  REGION 1..186: note = MG22-13 RuvC-III domain
NDTRYIARFMKGILSNIVREKNADGTLEPEETSKNLIVCSGRITDRVKQDWGLNDIWNHIITPRFERLNKKTSSNDFGEYVCKEGKRYFQTRVPLSLQKGFNKKRIDHRHHAMDAIAIACVNRSIVNYLNNAAANQTEREDLRRAVCIPERNGQTKRQLRSPWLCFARDTENALRQIVVSFKQNLR

SEQ ID NO: 3486 - protein, 186 aa, unidentified; identical to SEQ ID NO: 3478
  REGION 1..186: note = Description of Unknown: uncultivated organism with predicted taxonomy: Prevotella sp. MGM2
  REGION 1..186: note = MG22-15 RuvC-III domain

SEQ ID NO: 3487 - protein, 186 aa, unidentified
  REGION 1..186: note = Description of Unknown: uncultivated organism with predicted taxonomy: Prevotella sp. MGM2
  REGION 1..186: note = MG22-16 RuvC-III domain
NDTRYIARFMKGILSNIVREKNADGTLEPEETSKNLIVCSGRITDRVKQDWGLNDIWSHIVTPRFERLNTKTSSNDFGEYVCKDGKRYFQTRVPLNLQKGFNKKRIDHRHHAMDAIAIACVNRSIVNYLNNAAANQTEREDLRRAVCIPERNGQTKRQLRSPWHCFAREAENALRQIVVSFKQNLR

SEQ ID NO: 3488 - protein, 186 aa, unidentified
  REGION 1..186: note = Description of Unknown: uncultivated organism with predicted taxonomy: Prevotella
  REGION 1..186: note = MG22-17 RuvC-III domain
NDTRYIARFMKGILSNIVREKNTDGILEPEETSKNLIVCSGRITDRVKQDWGLNDIWNHIVTPRFERLNTKTSSNDFGEYVCKDGKRYFQTRVPLNLQKGFNKKRIDHRHHAMDAIAIACVNRSIVNYLNNAAANQTEREDLRRAVCIPERNGQTKRQLRSPWHCFARDAENALRQIVVSFKQNLR

SEQ ID NO: 3489 - protein, 186 aa, unidentified; identical to SEQ ID NO: 3487
  REGION 1..186: note = Description of Unknown: uncultivated organism with predicted taxonomy: Bacteroidales
  REGION 1..186: note = MG22-18 RuvC-III domain

SEQ ID NO: 3490 - protein, 186 aa, unidentified
  REGION 1..186: note = Description of Unknown: uncultivated organism with predicted taxonomy: Prevotella
  REGION 1..186: note = MG22-19 RuvC-III domain
NDTRYIARFMKGILSNIVREKNADGTLEPEETSKNLIVCSGRITDRVKQDWGLNDIWNHIITPRFERLNKKTSSNDFGEYVCKEGKRYFQTRVPLNLQKGFNKKRIDHRHHAMDAIAIACVNRSIVNYLNNAAANQTEREDLRRAVCIPERNGQTKRQLRSPWPCFARDAENALRQIVVSFKQNLR

SEQ ID NO: 3491 - protein, 186 aa, unidentified
  REGION 1..186: note = Description of Unknown: uncultivated organism with predicted taxonomy: Bacteroidales
  REGION 1..186: note = MG22-21 RuvC-III domain
NDTRYIARFMKGILSNIVREKNADGTLEPEETSKNLIVCSGRITDRVKQDWGLNDIWNHIITPRFERLNKKTSSNDFGEYVCKDGKRYFQTRVPLNLQKGFNKKRIDHRHHAMDAIAIACVNRSIVNYLNNAAANQTEREDLRRAVCIPERNGQTKRQLRSPWHCFARDAENALRQIVVSFKQNLR

SEQ ID NO: 3492 - protein, 186 aa, unidentified
  REGION 1..186: note = Description of Unknown: uncultivated organism with predicted taxonomy: Bacteroidales
  REGION 1..186: note = MG22-22 RuvC-III domain
NDTRYIARFMKGILSNIVREKNADGTLEPEETSKNLIVCSGRITDRVKQDWGLNDIWNHIITPRFERLNKKTSSNDFGEYVCKDGKRYFQTRVPLNLQKGFNKKRIDHRHHAMDAIAIACVNRSIVNYLNNAAANQTEREDLRRAVCIPERNGQTKRQLRSPWPCFARDAENALQQIVVSFKQNLR

SEQ ID NO: 3493 - protein, 185 aa, unidentified
  REGION 1..185: note = Description of Unknown: uncultivated organism with predicted taxonomy: Bacteroidales
  REGION 1..185: note = MG22-23 RuvC-III domain
TDTRYIARFMMGVLSNIVRQNDNGVLESEAISKNLIVCNGKITDRVKQDWGLNDVWNHIVTPRFKRLNQITNSSDFGEWCNKEGKRYFQTRIPLELQKGANKKRIDHRHHAMDAIAIACTTRSLVNYLNNQSAHTKAREDYRQRLCRTDGHGQTKRLLRAPWKDFAKDAESALQQIVVSFKQNTR

(The sequence listing continues in the following parts.)
